United States Patent Application Publication US 2025/0084491 A1 - sequence listing, part 4

SEQ ID NO: 57973 - DNA, 75 bp, synthetic construct
  source 1..75: mol_type = other DNA
acgccagctatcaagattggctgtctgatgtacgtatctcagctgtacgagtaccgcacgatgattggtgatacc

SEQ ID NO: 57974 - DNA, 75 bp, synthetic construct
  source 1..75: mol_type = other DNA
gtggaggcatccggtgccagcctggagaaggggcggcacgaccagttgcttaccgcgcttcgtgcgctgctgtta

SEQ ID NO: 57975 - DNA, 75 bp, synthetic construct
  source 1..75: mol_type = other DNA
caccagttgtgtggggatcgtccggcaacgctgctgctggaatccgcagatatcgacagcaaagatgatttaaaa

SEQ ID NO: 57976 - DNA, 75 bp, synthetic construct
  source 1..75: mol_type = other DNA
ataaaattactgtttgttattacgtctatggttcttaactttaacgcagcagcgaaagaaaaaatatcactgctt

SEQ ID NO: 57977 - DNA, 75 bp, synthetic construct
  source 1..75: mol_type = other DNA
ggtttatacccagcgttgtaaagaggcgtggaaagatgtaccggtgatcctcggcggtattgaggctagtctgcg

SEQ ID NO: 57978 - DNA, 75 bp, synthetic construct
  source 1..75: mol_type = other DNA
acgtggcgctggcgtgggcggtctttaaaatcttccgcattccggtgaatcagtggacgctggcgacggcggcgc

SEQ ID NO: 57979 - DNA, 75 bp, synthetic construct
  source 1..75: mol_type = other DNA
gatacgagtcaaattcggatcccggacccggttctgttttacctgaaatcctatacagacgattttgataccgca

SEQ ID NO: 57980 - DNA, 75 bp, synthetic construct
  source 1..75: mol_type = other DNA
gaaccggccaccaccacgttcaggattaatgcacctgcggtacccgccacgattgagctgacaccgggctatttt

SEQ ID NO: 57981 - DNA, 75 bp, synthetic construct
  source 1..75: mol_type = other DNA
cttgagctttatatctttcctcatattggttcatctgacatccgtcagctcaaaactagccacctattagccccg

SEQ ID NO: 57982 - DNA, 75 bp, synthetic construct
  source 1..75: mol_type = other DNA
gctgaaggacaaggcgaaaacggtgatatcggcccattaaggccattcgctataaatctgagaacaggtgctata

SEQ ID NO: 57983 - DNA, 75 bp, synthetic construct
  source 1..75: mol_type = other DNA
aattaataaaaatgatgaatgatttagactatccatttgaagcaccgctcaaggaatcatttattgaaagtataa

SEQ ID NO: 57984 - DNA, 75 bp, synthetic construct
  source 1..75: mol_type = other DNA
cccggaggccggaagctatatcagcaacattgccgcagccaactcgctgtttagccatcgtttacacgaccgtct

SEQ ID NO: 57985 - DNA, 75 bp, synthetic construct
  source 1..75: mol_type = other DNA
attgcggtggccaactgcccggaaacgtacaaaccgcagttacaggaaggcagtggtcgtacccagactatccgc

SEQ ID NO: 57986 - DNA, 75 bp, synthetic construct
  source 1..75: mol_type = other DNA
ccgcaggaactggcatatggcgagcgcggcgcaggcgcatccatccctccgttcagcaccctggtgtttgaagtc

SEQ ID NO: 57987 - DNA, 75 bp, synthetic construct
  source 1..75: mol_type = other DNA
caactttctaaggcgttatctttccttgagaaaaaagatctcagctcacgaatgtgctttgaagaagcgttatta

SEQ ID NO: 57988 - DNA, 75 bp, synthetic construct
  source 1..75: mol_type = other DNA
gtgaatgagaaaggattttctttaattgaaagtgtggtagtgataatgctttcaactgtcattgttatggggata

SEQ ID NO: 57989 - DNA, 75 bp, synthetic construct
  source 1..75: mol_type = other DNA
ttatctacacctccggctctaccggtacgccgaaaggggtagtcatttctcaccggggagcgcttaacacctgtt

SEQ ID NO: 57990 - DNA, 75 bp, synthetic construct
  source 1..75: mol_type = other DNA
aaagagtgcattaaaaatgcaagtgctacttttaaaaaagcagccagagctgagtattatgagcaagagcattca

SEQ ID NO: 57991 - DNA, 75 bp, synthetic construct
  source 1..75: mol_type = other DNA
ctgaatgatactgcatgtcgcgtattgaaaaaacaaatcgggaatcatcaccgttgggtatttgtgtacaaggaa

SEQ ID NO: 57992 - DNA, 75 bp, synthetic construct
  source 1..75: mol_type = other DNA
ggcagtcgtcaacccgtaatccagacagaaattaacgaaagttgtcttctttattatcgcatcgaaaaacaaatt

SEQ ID NO: 57993 - DNA, 75 bp, synthetic construct
  source 1..75: mol_type = other DNA
cagcagcttaaagcgcagataaagcgcgttgagatggaaaaagaaatactaaagcaggctgccgtgctgatgagc

SEQ ID NO: 57994 - DNA, 75 bp, synthetic construct
  source 1..75: mol_type = other DNA
tggcattcagcagatgaaagggatgggggctttaagtaatgccgaggggcaaaaggtaatggatgctattggtag

SEQ ID NO: 57995 - DNA, 75 bp, synthetic construct
  source 1..75: mol_type = other DNA
tcataaaaaccactgagatggctcagaaacgtatgcaacagaaatacgggaaggacatacaaccgtctcaacagc

SEQ ID NO: 57996 - DNA, 75 bp, synthetic construct
  source 1..75: mol_type = other DNA
tactctggaagacagtggtttctatggtaactctgcggaacctagtgattactctggtaacggcgaagctaatga

SEQ ID NO: 57997 - DNA, 75 bp, synthetic construct
  source 1..75: mol_type = other DNA
ccccgcagcaaccggtaaagaagagcggcaaacgtaagcgtctgctcctccttctcaccttgctctttataatta

SEQ ID NO: 57998 - DNA, 75 bp, synthetic construct
  source 1..75: mol_type = other DNA
tatgccgtacagaacgattatatcgactcaaacccagccagtgatatggctggtgctttatcgacagttaaaaca

SEQ ID NO: 57999 - DNA, 75 bp, synthetic construct
  source 1..75: mol_type = other DNA
aaatgaaatcgcttatgcgcttgaaaattatgatacagccggtaatgactccaacttattgatagtgttttatgt

SEQ ID NO: 58000 - DNA, 75 bp, synthetic construct
  source 1..75: mol_type = other DNA
atgttcctgaaaacagaacaatttgaatataacggcgtgtccgtcaccctttccgaactgtctgcgctacagcgt

SEQ ID NO: 58001 - DNA, 75 bp, synthetic construct
  source 1..75: mol_type = other DNA
aacgtggcaaaattcagatatccaaccatttgaacgaccgtcccatttcggcgcaaaatcgcagtcgctttggac

SEQ ID NO: 58002 - DNA, 75 bp, synthetic construct
  source 1..75: mol_type = other DNA
ttcgcgccgaagtggcggaggtggccagtgccatgtgcgacctgcgtacaaccatgaatgagatggagcagcggt

SEQ ID NO: 58003 - DNA, 75 bp, synthetic construct
  source 1..75: mol_type = other DNA
gtcacgattaatgagaactgtcagattaaggggaaactgtcagccaatcagattgaaggcgatattgtcaaaacg

SEQ ID NO: 58004 - DNA, 75 bp, synthetic construct
  source 1..75: mol_type = other DNA
gtgttcgacctgagacgttactccgacaggttaacaccgtttcgctaccggatagtgcgatcccgccaggcttca

SEQ ID NO: 58005 - DNA, 75 bp, synthetic construct
  source 1..75: mol_type = other DNA
caatgccatgtgcgacctgcgtacaaccatgaatgagatggagcggcggtacagctttaatgctgacaccctgcc

SEQ ID NO: 58006 - DNA, 75 bp, synthetic construct
  source 1..75: mol_type = other DNA
ataaaaagctgggtgaccaggccgtgaccatacagcaaatccagcgggttcagtcagacacgcgcaatgagctga

SEQ ID NO: 58007 - DNA, 75 bp, synthetic construct
  source 1..75: mol_type = other DNA
gcagatttagccagcatggaacaaatatctttggtgaaaagttggttacgggaagctggagcgcacaacgtgtta

SEQ ID NO: 58008 - DNA, 75 bp, synthetic construct
  source 1..75: mol_type = other DNA
gcgtaacggtaactgggtgacagaaaaggatgtcaccattaacggcaagaccacctcgcagtttctggcgtcggt

SEQ ID NO: 58009 - DNA, 75 bp, synthetic construct
  source 1..75: mol_type = other DNA
ttgaacatgacgcaaacacaaaagcaactaataaagatacagatctaaaagaattaaaccccacacataacgtgc

SEQ ID NO: 58010 - DNA, 75 bp, synthetic construct
  source 1..75: mol_type = other DNA
accaggactatgacgccacggcgtctggtgtgaagcggggcgaggaactggcggaagccagcggtgatttgtggc

SEQ ID NO: 58011 - DNA, 75 bp, synthetic construct
  source 1..75: mol_type = other DNA
taacctgacgctgagaacccgaatcaaacggctggcccgcaaaacgctctgtttttcacgttctgttgagcttca

SEQ ID NO: 58012 - DNA, 75 bp, synthetic construct
  source 1..75: mol_type = other DNA
agctgtatgagtttcgcagacgtcagcagatgctgggatatgcctcgctggcagaggttccggcggaacagctgg

SEQ ID NO: 58013 - DNA, 75 bp, synthetic construct
  source 1..75: mol_type = other DNA
atgtttcttaaaacagaacaatttgaatataacggtgtgtctgtcacgctttcggagctgtctgcgctgcagcgt

SEQ ID NO: 58014 - DNA, 75 bp, synthetic construct
  source 1..75: mol_type = other DNA
ctcgacggctgattcgtcttttacactggatggagattcgtcgccgacgatctctgctgatagccaatccactta

SEQ ID NO: 58015 - DNA, 75 bp, synthetic construct
  source 1..75: mol_type = other DNA
cggcaacctgcaggtgagtgtggaagatcttgtcagaaccggcgcgtttctggtggcgatgtccctgtggcataa

SEQ ID NO: 58016 - DNA, 75 bp, synthetic construct
  source 1..75: mol_type = other DNA
agcaatggagtttcgttggcagtaaagcccggcaacactggctctggtacgcgtataacaccaaaacaggggagg

SEQ ID NO: 58017 - DNA, 75 bp, synthetic construct
  source 1..75: mol_type = other DNA
cgacagcactggctctggtatgcctacaacaccaaaacagttatacgttcggtccacgaacggatgaaacctgtc

SEQ ID NO: 58018 - DNA, 75 bp, synthetic construct
  source 1..75: mol_type = other DNA
taacgacttccgcgcacggggctggggctggctgggctcactggaaaccggtctgcccttcagtatcactgacaa

SEQ ID NO: 58019 - DNA, 75 bp, synthetic construct
  source 1..75: mol_type = other DNA
gttacgtcattgaacatatccaggactggccggcaaaccgggtacgcgatctgttgccctggaaagttgatctga

SEQ ID NO: 58020 - DNA, 75 bp, synthetic construct
  source 1..75: mol_type = other DNA
ggcatcaacagggagtacaggtgactcgtatgacaacgcgatggcggagagcatcaatggtctttacaaagcgga

SEQ ID NO: 58021 - DNA, 75 bp, synthetic construct
  source 1..75: mol_type = other DNA
gatgcatggtcgtgacactggaagtagtgctgtttcatttaatcatggaaaggatttgtccttcgaaaacaccgg

SEQ ID NO: 58022 - DNA, 75 bp, synthetic construct
  source 1..75: mol_type = other DNA
cgttattcgtttgaacaagttgatatctgtaatcgtgctgagttggatcgggtgtttgctctgcaccagccagat

SEQ ID NO: 58023 - DNA, 75 bp, synthetic construct
  source 1..75: mol_type = other DNA
tcaaaaggtccgcaactaactccatcacgccgccttctcaggtgcgtgattacaaagcagaagtagcgaaactta

SEQ ID NO: 58024 - DNA, 75 bp, synthetic construct
  source 1..75: mol_type = other DNA
tttgtgctgatgaacacagaaggtcaggattgcggctttaacggcggcgaaatgacactgtcgctggcggaccgc

SEQ ID NO: 58025 - DNA, 75 bp, synthetic construct
  source 1..75: mol_type = other DNA
cccggataaggtgaagtttctgaacaccgtgggagcagccagagtatacgggcgggacattcatacgggggccgg

SEQ ID NO: 58026 - DNA, 75 bp, synthetic construct
  source 1..75: mol_type = other DNA
gccgagttctttggcaaacgccacgaacgagtgttggataaaattcgcaatctggactgttcagcaaaattcact

SEQ ID NO: 58027 - DNA, 75 bp, synthetic construct
  source 1..75: mol_type = other DNA
actcagtcagtcgccaataaattaaaggcgctgggcgatgattccgtgctcacccaacctgtctctttcacgcaa

SEQ ID NO: 58028 - DNA, 75 bp, synthetic construct
  source 1..75: mol_type = other DNA
cggcgggaagaagaaaaaaccggatacgctgaccgtctatcacccggacggcccacccacccaggagaaaaaatg

SEQ ID NO: 58029 - DNA, 75 bp, synthetic construct
  source 1..75: mol_type = other DNA
ggattctgggaaaactgtctgcaaaccagattgaaggtgacctggtcaaaacagtggggaaagctttcccacgga

SEQ ID NO: 58030 - DNA, 75 bp, synthetic construct
  source 1..75: mol_type = other DNA
tggatgagctggtggattgcgtggaggaactggaaggacaggtaagccagtttgaaatactggtgaaggagttta

SEQ ID NO: 58031 - DNA, 75 bp, synthetic construct
  source 1..75: mol_type = other DNA
tggatgagctggtggattgcgtggcggaactggaaggccaggtaagccagtttgaaatactggtgaaggagttta

SEQ ID NO: 58032 - DNA, 75 bp, synthetic construct
  source 1..75: mol_type = other DNA
acgcgcaccattacatccgcgaacattgaccgcctgcgggtcaccttcggggtgcagtcactggtgcagaccacg

SEQ ID NO: 58033 - DNA, 75 bp, synthetic construct
  source 1..75: mol_type = other DNA
ttatcgaagagcttaaatcctcgacgcagaacgccagtggtatgtttgaaatcagcgaggacaccatctgcgcgt

SEQ ID NO: 58034 - DNA, 75 bp, synthetic construct
  source 1..75: mol_type = other DNA
atgaagtatatggcgatctgccccatccggatgaagtagcctccggtgaggcattgccgctctttaccgaaacta

SEQ ID NO: 58035 - DNA, 75 bp, synthetic construct
  source 1..75: mol_type = other DNA
tgtggcgttgtaagcctgtggataatccatggaccttcacttccctgctgaaaaaagcagtctgtgccgttttac

SEQ ID NO: 58036 - DNA, 75 bp, synthetic construct
  source 1..75: mol_type = other DNA
tattctggcaacggtaatggcctgctgcggtttttttctctacccgctgaagtttagttttatccgtcctgaagt

SEQ ID NO: 58037 - DNA, 75 bp, synthetic construct
  source 1..75: mol_type = other DNA
atggctgataacagtattcgcaatgaatactgggatgcacgtttcaccttccattcagaccctgaaaaagaaatg

SEQ ID NO: 58038 - DNA, 75 bp, synthetic construct
  source 1..75: mol_type = other DNA
ggcggtatcttagttctattcgcattaagttctgctctggctggctatttcctctggcaggccgatcgcgatcag

SEQ ID NO: 58039 - DNA, 75 bp, synthetic construct
  source 1..75: mol_type = other DNA
taatgaacgtctttctgaacggctacagctatcagggcgtcgcaaagtccgtcacgctgccaaaactgacccgta

SEQ ID NO: 58040 - DNA, 75 bp, synthetic construct
  source 1..75: mol_type = other DNA
gctcgtcgccgtggtcgtgatgttgccactaaaacagacagacgttgatctgtataccgtggataaccacacagg

SEQ ID NO: 58041 - DNA, 75 bp, synthetic construct
  source 1..75: mol_type = other DNA
ggtggccttctcctgcaagaagcgcggcttctgccccagctgcggggcgcggcgcatggccgagagcgcgcggca

SEQ ID NO: 58042 - DNA, 75 bp, synthetic construct
  source 1..75: mol_type = other DNA
cattaaagttcattttttaacacagaacgctttaaggtttaaagtcggaagtcgtcattatattattaatttccc

SEQ ID NO: 58043 - DNA, 75 bp, synthetic construct
  source 1..75: mol_type = other DNA
tgccacagacaaattggccaacaactcaattaccaccaggatatacttgtgcagaaccctatttattcccagaca

SEQ ID NO: 58044 - DNA, 75 bp, synthetic construct
  source 1..75: mol_type = other DNA
gctggtttacgacttggtgcagtagttgaacagtgccgcatggtaagtaggggggattatctaatcagtgccggg

SEQ ID NO: 58045 - DNA, 75 bp, synthetic construct
  source 1..75: mol_type = other DNA
gcgacaggaagttaaagggattacatggtatcccggccagtaagattgagttctatgctgatggtgccgggctga

SEQ ID NO: 58046 - DNA, 75 bp, synthetic construct
  source 1..75: mol_type = other DNA
ggctggcggggcgtgcattgctttcgcacacgctttccccgctaccggagatcatctatggcgaacaaggcaaac

SEQ ID NO: 58047 - DNA, 75 bp, synthetic construct
  source 1..75: mol_type = other DNA
tttcgatagctctctggttgaaccgctaatatgctccgcacgctataccggaagcacctttcggcgcggagatgc

SEQ ID NO: 58048 - DNA, 75 bp, synthetic construct
  source 1..75: mol_type = other DNA
aactggagcgttttgctgcacgtaaagcagtcgttgccgcagttgacgcgcttggcctgctggaagaaattaaac

SEQ ID NO: 58049 - DNA, 75 bp, synthetic construct
  source 1..75: mol_type = other DNA
gccgaagtcaccgcagacagcggggaatatcaggtactggcgcgctgggacacgccgaaggtggtgaagggcgtg

SEQ ID NO: 58050 - DNA, 75 bp, synthetic construct
  source 1..75: mol_type = other DNA
ggagccgtttcacctacgatgcacagggccggtgcgtgaccgtcaccggggcggagggctattacaacgccacgc

SEQ ID NO: 58051 - DNA, 75 bp, synthetic construct
  source 1..75: mol_type = other DNA
cgctgcgcagggtgtgcaagctgtcggcgcgtaaacaaaagcaggtgcaggaatttattggggtgattgccggta

SEQ ID NO: 58052 - DNA, 75 bp, synthetic construct
  source 1..75: mol_type = other DNA
cgtgaaactgcagcagatgaaggacggacgcctttatattgcgggtatcggagccggtattgagaatacgccagc

SEQ ID NO: 58053 - DNA, 75 bp, synthetic construct
  source 1..75: mol_type = other DNA
tgcgcgtacacagggagaactgaatgcgttgaaggccgcgaaggaagcaaccggcgaaacacttcctgctaatgc

SEQ ID NO: 58054 - DNA, 75 bp, synthetic construct
  source 1..75: mol_type = other DNA
cgccagattattattccgcccattatttttaacggtatagcgtatgacgatccggggagcggaaataacccagga

SEQ ID NO: 58055 - DNA, 75 bp, synthetic construct
  source 1..75: mol_type = other DNA
caatgtatttatgaatgtattgcgacacttgtctaaaacggaaatttccagtgttgagttacgtaatatcctcaa

SEQ ID NO: 58056 - DNA, 75 bp, synthetic construct
  source 1..75: mol_type = other DNA
acaagatgagtatgagattatttataaaaaaataaaaaaaggactaagcatttatgataaaagcgcaatgcaact

SEQ ID NO: 58057 - DNA, 75 bp, synthetic construct
  source 1..75: mol_type = other DNA
aaaaggccttgtccagctcagtagcgccaccaacagcacgtctgaaacgctcgccgcaacaccaaaagcggtaaa

SEQ ID NO: 58058 - DNA, 75 bp, synthetic construct
  source 1..75: mol_type = other DNA
taacggacaacagatcagagattggttatatgtagaagaccatgcacgagcactctataaagtcgttactgaagg

SEQ ID NO: 58059 - DNA, 75 bp, synthetic construct
  source 1..75: mol_type = other DNA
gggtatcttaattccatccatggcaaaatcacattgatgaatatgtgtaaaagtattgttggcatggctaatatt

SEQ ID NO: 58060 - DNA, 75 bp, synthetic construct
  source 1..75: mol_type = other DNA
ggttgtgctattgcgatcatggttagttgctttatgtggatgcttcacgtaatcccagccagctttattcctcgt

SEQ ID NO: 58061 - DNA, 75 bp, synthetic construct
  source 1..75: mol_type = other DNA
gacaccggacgcaaagcagactgcactggtaaatgagaaacgccgggctgctctgaatatgctctatatcgaccc

SEQ ID NO: 58062 - DNA, 75 bp, synthetic construct
  source 1..75: mol_type = other DNA
tgattctggtgaatatcctatattacggatgggtaatataacatatcaaggtaggtgggattttacagatttaaa

SEQ ID NO: 58063 - DNA, 75 bp, synthetic construct
  source 1..75: mol_type = other DNA
ggcgactgaggctgtcatctcgaaagagggcattcttaccgggtcgcactggggggctatccgcgcgacggtgaa

SEQ ID NO: 58064 - DNA, 75 bp, synthetic construct
  source 1..75: mol_type = other DNA
tgattaatatccgcgtagaagcatcggatatatccgtccaccagcaccatatcgtccggatacgctttgaagaat

SEQ ID NO: 58065 - DNA, 75 bp, synthetic construct
  source 1..75: mol_type = other DNA
gtgctagaccgccatcttcatccccggattaaaccgttgttgcatcagtgcgtgcgggttcttgataaaccgggc

SEQ ID NO: 58066 - DNA, 75 bp, synthetic construct
  source 1..75: mol_type = other DNA
aaaactgtctcaggccgcattaggtaagctggtcaaagtggctcacgtaacaatttctcaatgggaaagagatga

SEQ ID NO: 58067 - DNA, 75 bp, synthetic construct
  source 1..75: mol_type = other DNA
aggtatgcagagtcaggtgcttctggctgctgaccggattgcgatgattaatcctgcgaatggcaacacaaagcc

SEQ ID NO: 58068 - DNA, 75 bp, synthetic construct
  source 1..75: mol_type = other DNA
atggcagggaaacagcgatgagaaactgcagacattgaccgaaagtcagcgttttggtttacgcatagcaggtgt

SEQ ID NO: 58069 - DNA, 75 bp, synthetic construct
  source 1..75: mol_type = other DNA
gcgttcaatccgcaaatgcacgtcagtgtaattgataactggtattttatggccagctccgtagtcgtactgacg

SEQ ID NO: 58070 - DNA, 75 bp, synthetic construct
  source 1..75: mol_type = other DNA
aggcgtatgccgaacaggcacgcaaactgtgcttgctgggctatacagacgccgaactcgctgacttctttgaag

SEQ ID NO: 58071 - DNA, 75 bp, synthetic construct
  source 1..75: mol_type = other DNA
ttcaccgtatcttcatcaggagcgaataactggacaccaacaaccagtatcagcgatctgctggttgtggtgatg

SEQ ID NO: 58072 - DNA, 75 bp, synthetic construct
  source 1..75: mol_type = other DNA
cttccagctatgccatcaagcctgtaacacaccaagggctatgggaggtggcgggttatgttgctgctttcgata

SEQ ID NO: 58073 - DNA, 75 bp, synthetic construct
  source 1..75: mol_type = other DNA
gctaactggaatactgcggataccactgatggtcatgcgatcattaaaagtattctgctctgcctgtgggccttc

SEQ ID NO: 58074 - DNA, 75 bp, synthetic construct
  source 1..75: mol_type = other DNA
acgaagtctatggtgatttgcctcatcctgacgaagtaaataataaagaacaattacccctctttactgagacga

SEQ ID NO: 58075 - DNA, 75 bp, synthetic construct
  source 1..75: mol_type = other DNA
aatggattcgaaactggtttaccagttgcatgaccgcttcagcgacagcatgtgcattctgccgaccatagaaga

SEQ ID NO: 58076 - DNA, 75 bp, synthetic construct
  source 1..75: mol_type = other DNA
tttatcaatctgaagtccgatccacaaaaatccctgttaaatcagcaaatatacccaagcattaagccagggtat

SEQ ID NO: 58077 - DNA, 75 bp, synthetic construct
  source 1..75: mol_type = other DNA
gtaaagggatgagttatgtcgatgatgctcaaagggatgattatggcaatctggcgctcaaagcacaggtagcct

SEQ ID NO: 58078 - DNA, 75 bp, synthetic construct
  source 1..75: mol_type = other DNA
agcaatccggcaacaggtgcgccgtctgtatacatcatcggctccggtcaggtgtcaccaatcgccagcgcgagc

SEQ ID NO: 58079 - DNA, 75 bp, synthetic construct
  source 1..75: mol_type = other DNA
ctgctgccggtagggacagatattttcgtcgtgggcgaaaaccgcagcggtgtgcgcagcgccgagcagatgttg

SEQ ID NO: 58080 - DNA, 75 bp, synthetic construct
  source 1..75: mol_type = other DNA
aattatggggaatttaggtgattcttttgtttcaggagtagccggcgatactttgaagaaaaatgtatctggagg

SEQ ID NO: 58081 - DNA, 75 bp, synthetic construct
  source 1..75: mol_type = other DNA
cggcgtcagaataacagttggggcagttcacgaatcagtaaccttcaggcgatagtggtgaagaaaaacagcgcg

SEQ ID NO: 58082 - DNA, 75 bp, synthetic construct
  source 1..75: mol_type = other DNA
attgtgtgcccgacgtggagctggcgagactgcgaacggccatgaaggcccatcaagcgctggcgctggtcttcg

SEQ ID NO: 58083 - DNA, 75 bp, synthetic construct
  source 1..75: mol_type = other DNA
aaaaaccccgtaaacagcattcgcctgaatttcgcagtgaagccctgaaacttgctgaacgcatcggtgttgctg

SEQ ID NO: 58084 - DNA, 75 bp, synthetic construct
  source 1..75: mol_type = other DNA
tatctgaaggaagccgaggtaaacaacgaagggctgatgctggttcaaattaatctggcagaaacatcacccgaa

SEQ ID NO: 58085 - DNA, 75 bp, synthetic construct
  source 1..75: mol_type = other DNA
agaaaatgaaggataaccccgccgttgcactgacccgcgtaccggggttgatgagcgggctgggcaacgtgtccg

SEQ ID NO: 58086 - DNA, 75 bp, synthetic construct
  source 1..75: mol_type = other DNA
ccatgcaaagaaaacaggctttggttgttgattatcgctcaatgactaatgaaccagcaattcgtacgctatacc

SEQ ID NO: 58087 - DNA, 75 bp, synthetic construct
  source 1..75: mol_type = other DNA
gttatcgcattaaacttctggaagagaataccggagtggcgctgtttttccgcacgactcgcagcgtgacgttga

SEQ ID NO: 58088 - DNA, 75 bp, synthetic construct
  source 1..75: mol_type = other DNA
atgcgtgaaataaatgaagatcgcgtaatccgtgaggatgaatgtcgtaagttaactggagtgtgtcgcactaca

SEQ ID NO: 58089 - DNA, 75 bp, synthetic construct
  source 1..75: mol_type = other DNA
gacataccacacatagtcaatcgactgaagatacttcatcaccggcgccggccgcgccgatggtggattcattaa

SEQ ID NO: 58090 - DNA, 75 bp, synthetic construct
  source 1..75: mol_type = other DNA
actatcgcgtcttaattggtgatctcgacgatgaacagatgcattggttatcccaaattggtaacgattataggc

SEQ ID NO: 58091 - DNA, 75 bp, synthetic construct
  source 1..75: mol_type = other DNA
cgttactggaaatgctggtggcaattgccatttttgcctcactggcactgatggcgcagcaggtgacaaacggcg

SEQ ID NO: 58092 - DNA, 75 bp, synthetic construct
  source 1..75: mol_type = other DNA
atgaaatgaaagcccttgaacgtctcaaaagctatctcaacttcgatgaaatcaacgccatttctgctgacgaac

SEQ ID NO: 58093 - DNA, 75 bp, synthetic construct
  source 1..75: mol_type = other DNA
tattcacagcagttagaaaacacgccatatacgcgctatccaacctacagacgccttacgcatcatgaagctcgt

SEQ ID NO: 58094 - DNA, 75 bp, synthetic construct
  source 1..75: mol_type = other DNA
tcagcggagaaaaaaccgtgctgactgccggaggtcgtcatacagttaaagcacagcccggggaacagtatggac

SEQ ID NO: 58095 - DNA, 75 bp, synthetic construct
  source 1..75: mol_type = other DNA
gtctgtaacgtgcggttttcgccggggggatgctgcagaatatgccagggagactgaccagtctctgatgcaact

SEQ ID NO: 58096 - DNA, 75 bp, synthetic construct
  source 1..75: mol_type = other DNA
tattacgtgaaaaagccgtgcaggcggtgatcgtgccggtgtgcctgctggaaaaaatggatgaagaaggcctca

SEQ ID NO: 58097 - DNA, 75 bp, synthetic construct
  source 1..75: mol_type = other DNA
gtgggacgcaacgtagtaagatgtctgacggtactggcgtcgctgtggatgctaagtggcgcggtcagggcgcag

SEQ ID NO: 58098 - DNA, 75 bp, synthetic construct
  source 1..75: mol_type = other DNA
acagcgaaagaaaatcgcctgtcacaaagtaaattcagatgccaggtatgtggatatacagcgaacgccgatgta

SEQ ID NO: 58099 - DNA, 75 bp, synthetic construct
  source 1..75: mol_type = other DNA
cgataagttcaaatgataatgatagtgtagacttgcgaaatataaaatgccctgaaggttcagagagagtaggcg

SEQ ID NO: 58100 - DNA, 75 bp, synthetic construct
  source 1..75: mol_type = other DNA
accgttcgcccaacaacattactgatgctgtacacctttatctcatttattgctctgtttaccgtctgcctgcat

SEQ ID NO: 58101 - DNA, 75 bp, synthetic construct
  source 1..75: mol_type = other DNA
ctgcgcgggatgtttatcacctgtcttgatcgtgcaggagtacaggaaactaggatcggagccattaccggacac

SEQ ID NO: 58102 - DNA, 75 bp, synthetic construct
  source 1..75: mol_type = other DNA
gtgagcaatatccatcaccttgaacgcagcctgcgtaaactacgcctgacacgagttggagctgaatggcacgct

SEQ ID NO: 58103 - DNA, 75 bp, synthetic construct
  source 1..75: mol_type = other DNA
gagaaagccaaagtggccttcttctactccagtccgaccgtgaccgatcagaaccagtgggtgaaagaagcgaaa

SEQ ID NO: 58104 - DNA, 75 bp, synthetic construct
  source 1..75: mol_type = other DNA
cgtgtcgcctgatggtttatgcccggcgttaaagcgtgccatgcagcgcggcgtgaaggtgctgacctgggattc

SEQ ID NO: 58105 - DNA, 75 bp, synthetic construct
  source 1..75: mol_type = other DNA
ctgtcagctggctgcaggcggccggttgttatcatcatccggcaggtggtgctccggcagtacgctacaccgcag

SEQ ID NO: 58106 - DNA, 75 bp, synthetic construct
  source 1..75: mol_type = other DNA
tattaatgactgtatgcatatttggtttgtttatagtcggttcgattttttatcttcttctggagatatttatgt

SEQ ID NO: 58107 - DNA, 75 bp, synthetic construct
  source 1..75: mol_type = other DNA
caacctttgccggactcggaacccgtgattacagcacgcattcatggtatgccggtgcagaagcgggctaccgct

SEQ ID NO: 58108 - DNA, 75 bp, synthetic construct
  source 1..75: mol_type = other DNA
ttgccgtaatcagtacccttagcctggcggcgttcactctcaacgcttatgccgcagagcgaatcgcatttatcc

SEQ ID NO: 58109 - DNA, 75 bp, synthetic construct
  source 1..75: mol_type = other DNA
gacaatgcaaaagttgattccggccgattcgctccgtttgcagttctacgacggcacgcgctggcaggagagctg

SEQ ID NO: 58110 - DNA, 75 bp, synthetic construct
  source 1..75: mol_type = other DNA
cgcgcaaagcagggattaaccttgctcttaacaaacttaacgccgtgccaacaacggcctatcccacaccagccc

SEQ ID NO: 58111 - DNA, 75 bp, synthetic construct
  source 1..75: mol_type = other DNA
gttcactcgtgcgataaagacactgggcatcgagccaatccatgccaacagcccgcaggcaaaagggcgggtaga

SEQ ID NO: 58112 - DNA, 75 bp, synthetic construct
  source 1..75: mol_type = other DNA
ttgttactgaaatgcaggttatcccggtggcgggtcatgacagtatgctgatgaatctgagtggtgcacacgcac

SEQ ID NO: 58113 - DNA, 75 bp, synthetic construct
  source 1..75: mol_type = other DNA
ggcgcacaggcggacgtcgcccgaagctgacaaaagaacagcatgagcaaatagcaaggctgatcaaaaacggtc

SEQ ID NO: 58114 - DNA, 75 bp, synthetic construct
  source 1..75: mol_type = other DNA
acttacaccagaacaatgggagcaggccggacgattaattgcagcaggaattcctcgccagaaggtagcgatcat

SEQ ID NO: 58115 - DNA, 75 bp, synthetic construct
  source 1..75: mol_type = other DNA
attccacatgacgaggtaatggctgaaatggaaaatcttattgctcaaattgctgtaactaacaggagcgagtaa

SEQ ID NO: 58116 - DNA, 75 bp, synthetic construct
  source 1..75: mol_type = other DNA
acgatattattccgctggcagagtcatttataaaaaaatactccacggtgctggtgaaaaatatcaccctttcag

SEQ ID NO: 58117 - DNA, 75 bp, synthetic construct
  source 1..75: mol_type = other DNA
tctcagaatttgaaactatcgagcaagaaaacagctataacgaatggttgcgcgccaaggttgcagcaagtttgg

SEQ ID NO: 58118 - DNA, 75 bp, synthetic construct
  source 1..75: mol_type = other DNA
gccggaaatattgaagagccgcagctgttaaccatcgccacgaaactggcgatcgccggagtccaggaggcgcgg

SEQ ID NO: 58119 - DNA, 75 bp, synthetic construct
  source 1..75: mol_type = other DNA
ggggggaataaatctatacacgtatccactggcaccaatacgttacactgatccactggggttagaacgagttat

SEQ ID NO: 58120 - DNA, 75 bp, synthetic construct
  source 1..75: mol_type = other DNA
tattaccgaaagacaaacacaccgaagcaattattttcgcggggaatgatgcgcactcatttgcagagcactaca

SEQ ID NO: 58121 - DNA, 75 bp, synthetic construct
  source 1..75: mol_type = other DNA
cctgtgagtaaagtggaatcagagcggatagccgaagagatcgatacagcagaacacattaagaagttacgtgcc

SEQ ID NO: 58122 - DNA, 75 bp, synthetic construct
  source 1..75: mol_type = other DNA
gggtgcgcccgcctcgacccgtgaagtagaagcgttgctgcgcgacgtccgacagcatccgcagcagcgtcagct

SEQ ID NO: 58123 - DNA, 75 bp, synthetic construct
  source 1..75: mol_type = other DNA
gtatgagatgaaacacttccggcgctggctgtacaagctggaaggtgatggcgttattgctattgacggtgatga

SEQ ID NO: 58124 - DNA, 75 bp, synthetic construct
  source 1..75: mol_type = other DNA
aaacacggcagcgggttgctttaatttttgatgtggggatctcgacgttataccgcaaatatcctgcgacattgt

SEQ ID NO: 58125 - DNA, 75 bp, synthetic construct
  source 1..75: mol_type = other DNA
tatgccgctctggtatttgaagaagcgcgcagagcggggatcaaccttgctcttaacaaacttaatgccgtgccg

SEQ ID NO: 58126 - DNA, 75 bp, synthetic construct
  source 1..75: mol_type = other DNA
ccagaactcaacaaagccagcttccttattcgccgtgatggttcggccaccacacagaacccggtaaaaacccgg

SEQ ID NO: 58127 - DNA, 75 bp, synthetic construct
  source 1..75: mol_type = other DNA
atcaggaaagttaatcattgatgaacttttgaatgaatgcatcgattacattaaagaggggcatattaccagatg

SEQ ID NO: 58128 - DNA, 75 bp, synthetic construct
  source 1..75: mol_type = other DNA
tatgtgtcactggcctatatggagcgattaaaagaagcaaaactgctggcatcaacagggagtacaggcgactcg

SEQ ID NO: 58129 - DNA, 75 bp, synthetic construct
  source 1..75: mol_type = other DNA
gtcatgggagtaccgttacaccctgaacgcggtgattgaggatttcagcggggaccagaatctgctgatggcccc

SEQ ID NO: 58130 - DNA, 75 bp, synthetic construct
  source 1..75: mol_type = other DNA
ggtatgactgttggcaaaaaattaaaactcccacctgccacctggatccgcgaaatgattcgccatttccaatat

SEQ ID NO: 58131 - DNA, 75 bp, synthetic construct
  source 1..75: mol_type = other DNA
agattttctggatgcgaacagagaacaatgtatcagcccgtttgaatatgcaaagattaacaatccattaaaata

SEQ ID NO: 58132 - DNA, 75 bp, synthetic construct
  source 1..75: mol_type = other DNA
atgggagacggcaatacaggaagtgatattttcgatggtgttggatttcgtggtgtacggctttattcttccgat

SEQ ID NO: 58133 - DNA, 75 bp, synthetic construct
  source 1..75: mol_type = other DNA
ccggctcatcaccgcttgaggtcgccgccgcaaaagcctgtgcggaaattgaaaaaacgccggtcagtattcgtg

SEQ ID NO: 58134 - DNA, 75 bp, synthetic construct
  source 1..75: mol_type = other DNA
cttgaaaacctgatgctgcgccagcgcatcaccgatcagtacctgctggatttctccagccaggtcagcgcgtaa

SEQ ID NO: 58135 - DNA, 75 bp, synthetic construct
  source 1..75: mol_type = other DNA
attcggcaaaatggttttattatctatcaaagctatgtttcccccggcgcttttgaaattacagatttgcacccg

SEQ ID NO: 58136 - DNA, 75 bp, synthetic construct
  source 1..75: mol_type = other DNA
tcgtgggatggcgggtctcctcgtccatggaaacgacattcgtgctggatgcactggagcaggccttgtgggccc

SEQ ID NO: 58137 - DNA, 75 bp, synthetic construct
  source 1..75: mol_type = other DNA
ccgcatcctgattttctacattggttcgttagccgttctgctctcactgatgccgtggacacgcgttaccgctga

SEQ ID NO: 58138 - DNA, 75 bp, synthetic construct
  source 1..75: mol_type = other DNA
gccatactcctccggcagaagcagaaaagcttattatgcttccatcggaaacgatgatctggcagcctgagttca

SEQ ID NO: 58139 - DNA, 75 bp, synthetic construct
  source 1..75: mol_type = other DNA
ttgcatccctgaaagcaaaaattcaggcttaccagcgacataaacgacgtgccaacaagcgtgtgcatgcaacca

SEQ ID NO: 58140 - DNA, 75 bp, synthetic construct
  source 1..75: mol_type = other DNA
tgacctgacgcgagatgttgacggtttctactgtcgtgaaattgtgaaacgaatgtttgaagtgtggtgccactg

SEQ ID NO: 58141 - DNA, 75 bp, synthetic construct
  source 1..75: mol_type = other DNA
aaagcttattatgcttccatcggaaacgatgatctggcagcctgagttcacagataaaacactctccaggaaacc

SEQ ID NO: 58142 - DNA, 75 bp, synthetic construct
  source 1..75: mol_type = other DNA
ttacgctgggccagaccctccccctctccttcacccgtttccacagttctgtactgccgctgcatggcctgaccg

SEQ ID NO: 58143 - DNA, 75 bp, synthetic construct
  source 1..75: mol_type = other DNA
ttcgcgaatgcaaaattcacattcaaagcttcgactacaacgatgcgctacatgttatatgtaggattcatggga

SEQ ID NO: 58144 - DNA, 75 bp, synthetic construct
  source 1..75: mol_type = other DNA
gaaacggtacgaacctacctgaagcgaagcctgaagaatttaaatctggaaggatatgatgcacttcgctctgct

SEQ ID NO: 58145 - DNA, 75 bp, synthetic construct
  source 1..75: mol_type = other DNA
ctgaacatcactattcctcagatagcgttgttgagtagcgctcacggttacattccgcctgaagagtgggatgaa

SEQ ID NO: 58146 - DNA, 75 bp, synthetic construct
  source 1..75: mol_type = other DNA
atgacagtgaaagcaaagcgttttcgcatcggggtggaaggtgccaccaccgacggacgcgaaatccagcgtgaa

SEQ ID NO: 58147 - DNA, 75 bp, synthetic construct
  source 1..75: mol_type = other DNA
tcacgttctgcgtgacggcaatcctcatcatctggatgctgcacggttcgctgtgcgaaatacggatgagcttct

SEQ ID NO: 58148 - DNA, 75 bp, synthetic construct
  source 1..75: mol_type = other DNA
attgccgagcaggagcgggtttgggagcttattttaaccaatgatggttattcatggcattgcgcactttatgat

SEQ ID NO: 58149 - DNA, 75 bp, synthetic construct
  source 1..75: mol_type = other DNA
catctttcaggagcgagaaagaggcggaatcctggctaaatgaactgttttttgctgtgattgcgccgctatacc

SEQ ID NO: 58150 - DNA, 75 bp, synthetic construct
  source 1..75: mol_type = other DNA
gttccgtggtgctgcaaccggtgccgccgcataccaccgccgctggcgttccggctcgtattgtcggtaaaccag

SEQ ID NO: 58151 - DNA, 75 bp, synthetic construct
  source 1..75: mol_type = other DNA
cagtggcgcacgccggacaacattttctggggaattaacaccctgtttggtccgtttgttctggatctgttcact

SEQ ID NO: 58152 - DNA, 75 bp, synthetic construct
  source 1..75: mol_type = other DNA
gaagctgaactggctggggaaaatggacgcaacgtcgctgaaaaacaaagtagcagcgtcgattgtggcaatttc

SEQ ID NO: 58153 - DNA, 75 bp, synthetic construct
  source 1..75: mol_type = other DNA
accgtcgctatgccgaaattggcggtattgtgcatacccactcgcgccacgccaccatctggtcacaggccgggc

SEQ ID NO: 58154 - DNA, 75 bp, synthetic construct
  source 1..75: mol_type = other DNA
ccgtcaaccagtatattgctcaggaataagtggctgacaccgccggaggatattccggagcaggttacccgtgaa

SEQ ID NO: 58155 - DNA, 75 bp, synthetic construct
  source 1..75: mol_type = other DNA
tacgaacgaagaatacagaactgtccatctttcaggagcgagaaggaggcggaatcctggttaaatgaactgttt

SEQ ID NO: 58156 - DNA, 75 bp, synthetic construct
  source 1..75: mol_type = other DNA
acccgtcgctggcccgcgacattatcgaaggtatccgcgccaaaatacgcagcctggtcagtcagggctatctca

SEQ ID NO: 58157 - DNA, 75 bp, synthetic construct
  source 1..75: mol_type = other DNA
gcggtgctcaataccgggcacttgcatccgaaagtggtggctgcggtggaagcgcagttgaaaaaactgtcgcac

SEQ ID NO: 58158 - DNA, 75 bp, synthetic construct
  source 1..75: mol_type = other DNA
gaccgtctgggtgttacacgcatcaccgtgtgaattcagggtaagcttcatgtggtcggaaattgcggcgttctt

SEQ ID NO: 58159 - DNA, 75 bp, synthetic construct
  source 1..75: mol_type = other DNA
atgccgcaaaaaacgatcatcgtgagcattttatgcttaaccatgttgttggccatctggatgatacaccgttcg

SEQ ID NO: 58160 - DNA, 75 bp, synthetic construct
  source 1..75: mol_type = other DNA
ccgacgttgagccaacggaatccctggtggaactggtgaaaaaaggccagaaattattcacctctatggaagtca

SEQ ID NO: 58161 - DNA, 75 bp, synthetic construct
  source 1..75: mol_type = other DNA
gcgactgattagcgcgatgagtgaagtgcgtaacctggtggagccagcgatcgctcgctgggcggcagagcgcgc

SEQ ID NO: 58162 - DNA, 75 bp, synthetic construct
  source 1..75: mol_type = other DNA
cgagcgccatattttcgtgctctctgttcgttttttgcgatggtgtattggttgattctttattggtcattgtgt

SEQ ID NO: 58163 - DNA, 75 bp, synthetic construct
  source 1..75: mol_type = other DNA
ggggtggcgggtctcatcgtccatggaaacgacattcgtgctggatgcactggagcaggcgttatgggcccgtcg

SEQ ID NO: 58164 - DNA, 75 bp, synthetic construct
  source 1..75: mol_type = other DNA
tcacgttctgcgtgacggtaatcctcatcatctggatgctgcacggttcgctgtgtgaaatacggatgagcttct

SEQ ID NO: 58165 - DNA, 75 bp, synthetic construct
  source 1..75: mol_type = other DNA
atggtaaaggggactatacttgtggtggccaagaccaacggggagaatcaaaaggagatggtctatgggggccag

SEQ ID NO: 58166 - DNA, 75 bp, synthetic construct
  source 1..75: mol_type = other DNA
gattatgccaaaccaatccgcaccgatttcccggtatatgacgacctgccggaagaaggcgcagtggattacacc

SEQ ID NO: 58167 - DNA, 75 bp, synthetic construct
  source 1..75: mol_type = other DNA
cctggcctgacttactggaactcttacaaagttggtggcgtggagatacgccgctgggtgcagtggttatgtcaa

SEQ ID NO: 58168 - DNA, 75 bp, synthetic construct
  source 1..75: mol_type = other DNA
ggttttgaggtggtacgcaccacaaaaagcagcatcagcattgccgacccggacggggggcgaaacatccgactg

SEQ ID NO: 58169 - DNA, 75 bp, synthetic construct
  source 1..75: mol_type = other DNA
ggctgatcggtgtcgatgctattcgtggggctgcaatgagagtaatcggtaataagtttggtggctctaaggagt

SEQ ID NO: 58170 - DNA, 75 bp, synthetic construct
  source 1..75: mol_type = other DNA
ttgctgtcggggatctttttgattctgatggggctggcacgctttggtcgcctgattgagtatattccggtttcc

SEQ ID NO: 58171 - DNA, 75 bp, synthetic construct
  source 1..75: mol_type = other DNA
gtcgtattggtggcagacgaccgaaactcaccgcgagtgagtgggagcaggccgggcgtttgctggctgcagggg

SEQ ID NO: 58172 - DNA, 75 bp, synthetic construct
  source 1..75: mol_type = other DNA
caggaaatataagctctaacatatccagtacatcatcttctggagcctctaataatttcaataggttaggggatt

SEQ ID NO: 58173 - DNA, 75 bp, synthetic construct
  source 1..75: mol_type = other DNA
atcaggactactcgcaaaggctggacgagtgggagagcgccttcgcggaatggcagaagatgtctggtcttatgc

SEQ ID NO: 58174 - DNA, 75 bp, synthetic construct
  source 1..75: mol_type = other DNA
ggggcaacgccttactccagcgcggtgaggcgctgacggcggaaaatcaatatcgcaatatcgccagtgctgtac

SEQ ID NO: 58175 - DNA, 75 bp, synthetic construct
  source 1..75: mol_type = other DNA
tacggtttatataccgcagctgttgcggggattgtcattgctctgacgggtgggtcacgctttagcgtttccggt

SEQ ID NO: 58176 - DNA, 75 bp, synthetic construct
  source 1..75: mol_type = other DNA
tatcgcccgtaccgagcttggacgcgcaaccggcgcgctcgatcaggcgcgtgcgctgtcaatcggctcgaatgg

SEQ ID NO: 58177 - DNA, 75 bp, synthetic construct
  source 1..75: mol_type = other DNA
agctgcatcctgtgatctggtcaaccactcaggctgcagaacacttaccggttcgcatgcctcgtctctgctctg

SEQ ID NO: 58178 - DNA, 75 bp, synthetic construct
  source 1..75: mol_type = other DNA
ctggacggtatgaccgggcacgccgggtgcctgccgaactgcaaatgctggccggaagtgcaggtgccaaatccc

SEQ ID NO: 58179 - DNA, 75 bp, synthetic construct
  source 1..75: mol_type = other DNA
aatgatacagtggtgggcagattatttagatagaaataagaaagaaagtattacaccatatgattttgctagaca

SEQ ID NO: 58180 - DNA, 75 bp, synthetic construct
  source 1..75: mol_type = other DNA
cgaatgacagcaaaggccattttgttacggcgaaagaagccgcgaagcacaaccgacaggacgttttgtgctgtg

SEQ ID NO: 58181 - DNA, 75 bp, synthetic construct
  source 1..75: mol_type = other DNA
ggcgagttaggattatcggcgacagaatttggcgttttgctttctgcattttctctgtcttatggtttttcacaa

SEQ ID NO: 58182 - DNA, 75 bp, synthetic construct
  source 1..75: mol_type = other DNA
ttcaggaggctcggcgaatctgtaagcgaggctgtgacatcaaacgagacgaaaatcagagacgctatagccctg

SEQ ID NO: 58183 - DNA, 75 bp, synthetic construct
  source 1..75: mol_type = other DNA
atctgtgggtcattaagcattccgagattggccgtgacattaagccgcgaacttatcagcaggacgtgattaacg

SEQ ID NO: 58184 - DNA, 75 bp, synthetic construct
  source 1..75: mol_type = other DNA
tccggacgggctgactcagccacattacatggatatttgcatggcaatgattcgttgtgtggatgcggtttatat

SEQ ID NO: 58185 - DNA, 75 bp, synthetic construct
  source 1..75: mol_type = other DNA
cgtaccggacggctgtgggtctatgttcgtgacgatcgcaacgccggttcgaccatgccggcagcggtgtggttc

SEQ ID NO: 58186 - DNA, 75 bp, synthetic construct
  source 1..75: mol_type = other DNA
ttgaagaaggttctgcagggaaaaaagcgttggatatgtttggtttattcaatgtcactcagatggcattagaaa

SEQ ID NO: 58187 - DNA, 75 bp, synthetic construct
  source 1..75: mol_type = other DNA
tgacggggtatgaaaatttcaaccgtgaggcatttcacaaggcggaagaggaactgaaacgggaagggcataccg

SEQ ID NO: 58188 - DNA, 75 bp, synthetic construct
  source 1..75: mol_type = other DNA
atgacggtaatcgtgtacggaaaatcaacatttgcaggaaatgccaaaactcgccgtcatgagcggcgcagaaag

SEQ ID NO: 58189 - DNA, 75 bp, synthetic construct
  source 1..75: mol_type = other DNA
ccgttaaccacgctaattacgctattttgcgccagggatttcataaccagattatcggtgccaacatcaccaatt

SEQ ID NO: 58190 - DNA, 75 bp, synthetic construct
  source 1..75: mol_type = other DNA
ctcaatattatgcgaccgggacatcaactccaggcaatgtaaaaacaacagtcaattataccatcgcctacgaat

SEQ ID NO: 58191 - DNA, 75 bp, synthetic construct
  source 1..75: mol_type = other DNA
tacaatctggtgcggaagaacgagatattaagcgtcgttatgcgcaactggtaaaaaattgccgcccggaagatg

SEQ ID NO: 58192 - DNA, 75 bp, synthetic construct
  source 1..75: mol_type = other DNA
tggaaagacctctgcgaggtgcgaatccgaaccggtcagacggagatcgctgtcttcacagtttacgaacctgag

SEQ ID NO: 58193 - DNA, 75 bp, synthetic construct
  source 1..75: mol_type = other DNA
cacctggacggtgggcgacaagaacgccgtgaggctggtcagggagtaaacgagtatgacggaactggaagggca

SEQ ID NO: 58194 - DNA, 75 bp, synthetic construct
  source 1..75: mol_type = other DNA
tatctgcaggagcatttgattacgtcattgtcgatgaagcccatcatacgctggcaaaaacctattctgcggtgg

SEQ ID NO: 58195 - DNA, 75 bp, synthetic construct
  source 1..75: mol_type = other DNA
cctggtcgcgggcgttaacgttccggtgcaggttggcggcggcgtgcgtagcgaagaagacgtggcggcgttact

SEQ ID NO: 58196 - DNA, 75 bp, synthetic construct
  source 1..75: mol_type = other DNA
ggcgctaaggcagaactggcactggcggagaaactgggacatgcggttattttccaggaggcaaccagtgagcga

SEQ ID NO: 58197 - DNA, 75 bp, synthetic construct
  source 1..75: mol_type = other DNA
tgcagtggtctggttcactgctaaaaccgaggctcgcgccaatctgatgctggatgttgcgctggaagatgcagg

SEQ ID NO: 58198 - DNA, 75 bp, synthetic construct
  source 1..75: mol_type = other DNA
gacctctgcgaggtacgaatccgaaccgggcagacggaggtcgctgtcttcacagcttacgaacctgaggagtaa

SEQ ID NO: 58199 - DNA, 75 bp, synthetic construct
  source 1..75: mol_type = other DNA
tccgttgcgtggatgcggtttacatgctgaaaggctggcagcagtcggcaggtgcaagggctgagctggcactgg

SEQ ID NO: 58200 - DNA, 75 bp, synthetic construct
  source 1..75: mol_type = other DNA
taagggcagcgggtttaatgaactgaagtttgacgatgcgacagggaaagaacaggtctacatccacgcgcagaa

SEQ ID NO: 58201 - DNA, 75 bp, synthetic construct
  source 1..75: mol_type = other DNA
gacttcggtcagatttctaaatcacatttaaattctaatggcatttctgttaagaaagatttgaatataaaacta

SEQ ID NO: 58202 - DNA, 75 bp, synthetic construct
  source 1..75: mol_type = other DNA
gatgctaaaggttatgcatcgcgtcacggttcggtagttaagcgcattgccgaaggtctgctgatggacatcaac

SEQ ID NO: 58203 - DNA, 75 bp, synthetic construct
  source 1..75: mol_type = other DNA
taatgaagtcggcgcttgggttattcactactctactgactacgtatttccggggaccggcgaaataccgtggca

SEQ ID NO: 58204 - DNA, 75 bp, synthetic construct
  source 1..75: mol_type = other DNA
gtgtcgaagcgatcgcgaaagcagccaatgaagtcggcgcttgggttattcactactctactgactacgtatttc

SEQ ID NO: 58205 - DNA, 75 bp, synthetic construct
  source 1..75: mol_type = other DNA
tcgaaggcattgatatctgctgggtggaagaagcggaagcggtaacgaaggaatcatgggatatcctgataccaa

SEQ ID NO: 58206 - DNA, 75 bp, synthetic construct
  source 1..75: mol_type = other DNA
attgatttcggacaagtatccaaagtattactgaataatggcgggacatcaacgccgaagagttttgatattaag

SEQ ID NO: 58207 - DNA, 75 bp, synthetic construct
  source 1..75: mol_type = other DNA
gggcgttttttctttcatgtgatgggggccctggctgaaatggaacgagaactgattgttgaacgaacaaaagct

SEQ ID NO: 58208 - DNA, 75 bp, synthetic construct
  source 1..75: mol_type = other DNA
aaatccagcgctgcaactgcagaagtcaaagagggaaacttcactgctgtttctcattttaatctgagttatcag

SEQ ID NO: 58209 - DNA, 75 bp, synthetic construct
  source 1..75: mol_type = other DNA
gattttggtcagatctcaaaagctcatttgaacaacaacggtatctcagtcaagaaagatctgaatattaaactg

SEQ ID NO: 58210 - DNA, 75 bp, synthetic construct
  source 1..75: mol_type = other DNA
atgaaaatgaacgtaacagaaacggtaaaacaggcgtgcggccactggccgcgcattctccctgcgctgggtgtg

SEQ ID NO: 58211 - DNA, 75 bp, synthetic construct
  source 1..75: mol_type = other DNA
tgcttttgcggtggtttcctttcatctgaaccagtcactctcttcgctcttttccctcgatctctccctggtcag

SEQ ID NO: 58212 - DNA, 75 bp, synthetic construct
  source 1..75: mol_type = other DNA
ggatgtgagcggatttttgaggataaaatcagtggcactaagcccgacagaccggggcttaaaaaactgctcagg

SEQ ID NO: 58213 - DNA, 75 bp, synthetic construct
  source 1..75: mol_type = other DNA
cgtttttccaccggatttaaagagttcgaccgcgtattaggcggcggggtggtgccgggaagcgccattctgatt

SEQ ID NO: 58214 - DNA, 75 bp, synthetic construct
  source 1..75: mol_type = other DNA
gagcggatgtgggtcgtcggcaaaaacgagttttaccacaaagaaaccggacgccgccactttgcagaaaatacg

SEQ ID NO: 58215 - DNA, 75 bp, synthetic construct
  source 1..75: mol_type = other DNA
gccgggactgaaaaaactgctcaggacattatcggagggggatacactggtagtctggaagctggaccggctggg

SEQ ID NO: 58216 - DNA, 75 bp, synthetic construct
  source 1..75: mol_type = other DNA
ctgcccagagtctgaaagaaggggataacacgctgcattattcttcctgggtcaaagctgcatctaaaggttctg

SEQ ID NO: 58217 - DNA, 75 bp, synthetic construct
  source 1..75: mol_type = other DNA
ggattaattttcgcagccttactgacagtattgatacgtcatccccaatggggcgttttttcttccacgttatgg

SEQ ID NO: 58218 - DNA, 75 bp, synthetic construct
  source 1..75: mol_type = other DNA
accaacgggactgctggcctgcggactcttctttatgggacagtttgctttatttacctacgtgcgcccctttct

SEQ ID NO: 58219 - DNA, 75 bp, synthetic construct
  source 1..75: mol_type = other DNA
aatcaatcaactttcaatgccgctaatatcagtgatgctggtgttttatctattggtgcatctacaaccgcgcca

SEQ ID NO: 58220 - DNA, 75 bp, synthetic construct
  source 1..75: mol_type = other DNA
atgcaaaaaaaacgtatcacccttgcagggggagttgccatgctctgtctgagcggctgtcatcttcccccggat

SEQ ID NO: 58221 - DNA, 75 bp, synthetic construct
  source 1..75: mol_type = other DNA
aaagccgcagaaattgcccttgcgcatgctcattatctgagtatcgagttttatcgaattgtccgcatcgacccg

SEQ ID NO: 58222 - DNA, 75 bp, synthetic construct
  source 1..75: mol_type = other DNA
taaacaatgagttacatggagtgtggatagatagtgaaaatcgtaatatccacataatacttaaatcaagccttc

SEQ ID NO: 58223 - DNA, 75 bp, synthetic construct
  source 1..75: mol_type = other DNA
cggaaaaggaaaacatccctcccggaaaaatggcttctggcggacactgatgtgtggctttatcgccggaattgc

SEQ ID NO: 58224 - DNA, 75 bp, synthetic construct
  source 1..75: mol_type = other DNA
atgaagtcgaaagatgaaatttttgacgaagttctgggaaaagagggcggttacgtcaatcacccggatgataaa

SEQ ID NO: 58225 - DNA, 75 bp, synthetic construct
  source 1..75: mol_type = other DNA
aatggttaacagcagaacaagtgttagaaacagcaaacaaatgtagaaaaaatagttacggcgagtatttgatta

SEQ ID NO: 58226 - DNA, 75 bp, synthetic construct
  source 1..75: mol_type = other DNA
atcattcccccggtgctgtttcgcgggacgaaacaccagaatttcaacagcccgaatcagcagtcgtactggtat

SEQ ID NO: 58227 - DNA, 75 bp, synthetic construct
  source 1..75: mol_type = other DNA
caaatcgaatcattgaacgttcgcgcgagactcgctctgcttacctcgcccggatagaacaagcgaaaacttcga

SEQ ID NO: 58228 - DNA, 75 bp, synthetic construct
  source 1..75: mol_type = other DNA
gggggatggaatttttatcagtatccgctgaatccggttcagtatatagattcaatgggactggcatcaaaatat

SEQ ID NO: 58229 - DNA, 75 bp, synthetic construct
  source 1..75: mol_type = other DNA
cagtccatcgattttggtcagatctctaaatctcatctgaatggcggtggtatttctaaggcacagaatctggac

SEQ ID NO: 58230 - DNA, 75 bp, synthetic construct
  source 1..75: mol_type = other DNA
ttaacaatggcaccatcaacctcggtaccgcaggcactactgacacgggtatgatcggtatgcaactcgatgcca

SEQ ID NO: 58231 - DNA, 75 bp, synthetic construct
  source 1..75: mol_type = other DNA
aaatcagtggcactaagtccgaaagaccggggctgaaaaaactgctcaggacactatcggcaggagacactctgg

SEQ ID NO: 58232 - DNA, 75 bp, synthetic construct
  source 1..75: mol_type = other DNA
actgggagatgatcatcgtggatgattgctccacctcctgggaacaactacaacagtacgtcaccgccctcaacg

SEQ ID NO: 58233 - DNA, 75 bp, synthetic construct
  source 1..75: mol_type = other DNA
atgctgttcttggcaaagagggcggctacgtcaaccaccctgatgataaaggtggtccgactaaatggggcatta

SEQ ID NO: 58234 - DNA, 75 bp, synthetic construct
  source 1..75: mol_type = other DNA
gccacagatacgttatgctaaacgtaggttacttggaatttatgatactgattttgatattatagaagagataat

SEQ ID NO: 58235 - DNA, 75 bp, synthetic construct
  source 1..75: mol_type = other DNA
tgtacgcagggtgaccgctatctggagctggcagagaaacgggaggctaacgagtcgtttgtttacggctggatg

SEQ ID NO: 58236 - DNA, 75 bp, synthetic construct
  source 1..75: mol_type = other DNA
atgaatatattcgatcactatcgccagcgatatgaagctgccaaggacgaagagttcacactgcaggagtttctt

SEQ ID NO: 58237 - DNA, 75 bp, synthetic construct
  source 1..75: mol_type = other DNA
atttaacgaattcttatatgaatggaatgggaaaaaaagaatacagtagttacttgggaacaccaaataacacct

SEQ ID NO: 58238 - DNA, 75 bp, synthetic construct
  source 1..75: mol_type = other DNA
gacggttgaacagtttattaatgagctgtacggtgaactgacaggcatgatttctgatgttgacctgggcgagat

SEQ ID NO: 58239 - DNA, 75 bp, synthetic construct
  source 1..75: mol_type = other DNA
taactttcaggacgacaccataaagattgtatacgacgaaaataatattattgttgccataaccaaagatgcctc

SEQ ID NO: 58240 - DNA, 75 bp, synthetic construct
  source 1..75: mol_type = other DNA
taacgggcctcagtttcgtatttccctgtcagaccaaaacagactgtttttacgccagatgttgccgcaaaattt

SEQ ID NO: 58241 - DNA, 75 bp, synthetic construct
  source 1..75: mol_type = other DNA
gaagcatgggaacgctacagtgttatggtcagccgtgtggatacggcaaagcccgaatggccacaaaagcctgag

SEQ ID NO: 58242 - DNA, 75 bp, synthetic construct
  source 1..75: mol_type = other DNA
aactgtacgccatcgaggcagagataaggggaatgacggcggagcagcgccttgccgaacgtcagttgaaaacga

SEQ ID NO: 58243 - DNA, 75 bp, synthetic construct
  source 1..75: mol_type = other DNA
atacctaattcggttccgtattgatccaaagaaagcaaatcccaaatttatttggcttcaaatgagaacacctca

SEQ ID NO: 58244 - DNA, 75 bp, synthetic construct
  source 1..75: mol_type = other DNA
ctgttcaggtggaaacgattggacttgttcgtgcgctgaccgtgggcgtggcgtaccagacgacggtaggtggca

SEQ ID NO: 58245 - DNA, 75 bp, synthetic construct
  source 1..75: mol_type = other DNA
tgaagagtcttatcgatttcataccattgaatacacggctgattacgattgaagatgcagaggaaatcaaatttt

SEQ ID NO: 58246 - DNA, 75 bp, synthetic construct
  source 1..75: mol_type = other DNA
cattccaggaaatggcagcgaatatagttcgttctcaactggcgactcttgacctgagtaccgtagaaaaagaaa

SEQ ID NO: 58247 - DNA, 75 bp, synthetic construct
  source 1..75: mol_type = other DNA
cgcgctatcccgaactacaacgttatgggtctggcaaaagcgtctctggaagcgaacgtgcgctatatggcgaac

SEQ ID NO: 58248 - DNA, 75 bp, synthetic construct
  source 1..75: mol_type = other DNA
ccagcttctttcacgttggtgggatgcttaccgtaaacagcttggtttgaaagacttctcccccaaaagccagga

SEQ ID NO: 58249 - DNA, 75 bp, synthetic construct
  source 1..75: mol_type = other DNA
gagcgataccagccggacttcgccgataagacgacaaacggcagcgagaaccggtactggatcctgcgtaacatg

SEQ ID NO: 58250 - DNA, 75 bp, synthetic construct
  source 1..75: mol_type = other DNA
aggaattgcaactgcaggcagaaaaccggaaagccagacttcttgcagatgctgaatccgtgattttgccgctag

SEQ ID NO: 58251 - DNA, 75 bp, synthetic construct
  source 1..75: mol_type = other DNA
atgaatgaagtgttcctgaaatatctgacggctcccaccattaccagcggcggtaatcctcctgcattttccctg

SEQ ID NO: 58252 - DNA, 75 bp, synthetic construct
  source 1..75: mol_type = other DNA
gtggaggcggggcagcctgcaccggcatccgttatgtcacgctgggttgccggagcagggtatgcggtctgtctg

SEQ ID NO: 58253 - DNA, 75 bp, synthetic construct
  source 1..75: mol_type = other DNA
cgacagaaggcaatgaagatgaggcgcttaaccgcgaactcaatcttacctggcaaaatacgcggcccgatcata

SEQ ID NO: 58254 - DNA, 75 bp, synthetic construct
  source 1..75: mol_type = other DNA
gagtcatgggaacgctatagtgttctggtcagccgtgtggatacggcaaatcctgaatggccacaaaagcctgaa

SEQ ID NO: 58255 - DNA, 75 bp, synthetic construct
  source 1..75: mol_type = other DNA
gcagtggatgtatctggacggtcaggtgaggaaacgcgagtattcgtcagaggaagtcaacagacagacagagca

SEQ ID NO: 58256 - DNA, 75 bp, synthetic construct
  source 1..75: mol_type = other DNA
gccgtgttgcccggagtgcggtggttcgctgagttacctgggtgaggatgccgccgaacagctggagctgatgcg

SEQ ID NO: 58257 - DNA, 75 bp, synthetic construct
  source 1..75: mol_type = other DNA
aaattttttaataatggtagagtcaatatttcttattataacactggtgcaaatttgggaggagcaggaggattt

SEQ ID NO: 58258 - DNA, 75 bp, synthetic construct
  source 1..75: mol_type = other DNA
aattgaaaccattgcccgtcagattggcgcggggatgagtaccgtcagaacggctatcgcacggctggaagcaga

SEQ ID NO: 58259 - DNA, 75 bp, synthetic construct
  source 1..75: mol_type = other DNA
actcttcagaaggtatcccgtggcatgaactgccagcttcacacaggggaaacaatcagatgagtttgcctttac

SEQ ID NO: 58260 - DNA, 75 bp, synthetic construct
  source 1..75: mol_type = other DNA
ctcacagcgatgaatataaaatgccaggttattgccccttcccgcataccaaaatcaccgacagacagaatcaaa

SEQ ID NO: 58261 - DNA, 75 bp, synthetic construct
  source 1..75: mol_type = other DNA
agtcaatatggcaccaatattactattaatgaaggtgacagaattacaggagataccgccgatccatcaggaaac

SEQ ID NO: 58262 - DNA, 75 bp, synthetic construct
  source 1..75: mol_type = other DNA
tgacagcccccaccattaccagcggtggcagtcctccggtattttccctgacatcagacggaaagctgaccgcta

SEQ ID NO: 58263 - DNA, 75 bp, synthetic construct
  source 1..75: mol_type = other DNA
gatacagttgttccgtaccatgaaaccggcctctagggataaacttttgcagcaggctctggctcaggttgcaag

SEQ ID NO: 58264 - DNA, 75 bp, synthetic construct
  source 1..75: mol_type = other DNA
ggtggcgaacctggacagctcgatctcagcgctctgtctggcgtatgacgatctgctgcaggcgaaagtgagtat

SEQ ID NO: 58265 - DNA, 75 bp, synthetic construct
  source 1..75: mol_type = other DNA
gtgagctgtataccaaaatcaacggcatgtgggaacagcatgccgttcctttgagctatgaggattgctacaact

SEQ ID NO: 58266 - DNA, 75 bp, synthetic construct
  source 1..75: mol_type = other DNA
accgtaaatttattaagggccgctatactgccaacgcggccaaaggcgaacgactggtatcttctgaattccagc

SEQ ID NO: 58267 - DNA, 75 bp, synthetic construct
  source 1..75: mol_type = other DNA
tttttacccttcggaatccggcagtgattccggctctatcataacagcagcgaaattaatcaaatcctgtttgag

SEQ ID NO: 58268 - DNA, 75 bp, synthetic construct
  source 1..75: mol_type = other DNA
ccagctcccctatacatttatgttgcgtaaggttctggacagtctggacgtgatagtgagcattgatttggacgg

SEQ ID NO: 58269 - DNA, 75 bp, synthetic construct
  source 1..75: mol_type = other DNA
atgaaaatcctatccgcgctggtttaggtgaaaacccacggactgcatatgtagtaccacgagtggagtgggaaa

SEQ ID NO: 58270 - DNA, 75 bp, synthetic construct
  source 1..75: mol_type = other DNA
ctgtgggacatgctgacccacccgcgctacgggatggggaaacgcctgggggccgcggacgtggacaaatgggcg

SEQ ID NO: 58271 - DNA, 75 bp, synthetic construct
  source 1..75: mol_type = other DNA
gataatcagccgtctggtggcaggggaaacgctgagtgtgcgtaagcttgccgctgagtttggtgtgtcggtgcg

SEQ ID NO: 58272 - DNA, 75 bp, synthetic construct
  source 1..75: mol_type = other DNA
caggcaggccggagatgcgctaccgctacgacgatgcggggcgggtggtggagcaacttaacccggcaggcctga

SEQ ID NO: 58273 - DNA, 75 bp, synthetic construct
  source 1..75: mol_type = other DNA
aggtgggattttcaccggttgttattcgcgaagttaatgaaccgcaaacggtactcgccatggtcagtatgggta

SEQ ID NO: 58274 - DNA, 75 bp, synthetic construct
  source 1..75: mol_type = other DNA
ccagtgggcaatgtgtagaggtggagctgtttgcccgctatccgctgaagaaaatcacagcggaaaagagtacga

SEQ ID NO: 58275 - DNA, 75 bp, synthetic construct
  source 1..75: mol_type = other DNA
gcgcacaggacgcacgtggcgccgcaaggctctcgaatacttcctgaacgtcgatgtgtacgccaagacgcgcga

SEQ ID NO: 58276 - DNA, 75 bp, synthetic construct
  source 1..75: mol_type = other DNA
ctatatcaaaaagataatagctgcaacttattcaatactcttactgaagcccgcgacgcaataaaggatgcatat

SEQ ID NO: 58277 - DNA, 75 bp, synthetic construct
  source 1..75: mol_type = other DNA
acacacctcgtgaggcgaaggacaatctcaaatccacgcagatgatgagcgtgattgacgccattggtgaagggc

SEQ ID NO: 58278 - DNA, 75 bp, synthetic construct
  source 1..75: mol_type = other DNA
gcgctgttaacgcgtggcgatctggtgctcttcgaccgtaacaaccataagtcgaatcatcacggcgcgctgatt

SEQ ID NO: 58279 - DNA, 75 bp, synthetic construct
  source 1..75: mol_type = other DNA
acgccatcgaggcagagataaggggaatgacggcggagcagcgccttgccgaacgtcagttgaaaacgaaaccgc

SEQ ID NO: 58280 - DNA, 75 bp, synthetic construct
  source 1..75: mol_type = other DNA
agttcgagcataaggctgacagtctgattgcaaaattcaaagaagctggcggaacggtcagagagattgaggtat

SEQ ID NO: 58281 - DNA, 75 bp, synthetic construct
  source 1..75: mol_type = other DNA
ggtgatggttgatggtgctcagggggcggtgcatttccccgcggatgttcagcaactggatattgatttctatgc

SEQ ID NO: 58282 - DNA, 75 bp, synthetic construct
  source 1..75: mol_type = other DNA
gaagctggcacaactggtggcgatgctggcgcaatttgaacagcatattgaggatgactcgccgctggctgaggt

SEQ ID NO: 58283 - DNA, 75 bp, synthetic construct
  source 1..75: mol_type = other DNA
gcactggctgataactacgaggggcagccagtggattatggcaatggctcagcaggtgacggctgggttgctatc

SEQ ID NO: 58284 - DNA, 75 bp, synthetic construct
  source 1..75: mol_type = other DNA
accaaagcctggcaacaggagatcgtgcaatggctttgggacaaatgtcaaaatcttcaggaaaccgagccgcag

SEQ ID NO: 58285 - DNA, 75 bp, synthetic construct
  source 1..75: mol_type = other DNA
agttagccagtcacgatcttaggctactgttagttaaaatgagggatttttacatccgaaataatatgactaacg

SEQ ID NO: 58286 - DNA, 75 bp, synthetic construct
  source 1..75: mol_type = other DNA
aagctttcctggatatggtggcatggtcagagggaacggataacgggcgacaaccgacacataaccacggttatg

SEQ ID NO: 58287 - DNA, 75 bp, synthetic construct
  source 1..75: mol_type = other DNA
ctggggtatgcggcggatgaccttggttttgtgggggattcgtatcaggaggcgagacagcgttatatcagtaat

SEQ ID NO: 58288 - DNA, 75 bp, synthetic construct
  source 1..75: mol_type = other DNA
cctcaatcatctggttgcgaagctgaaagagtacaacgctgcacctccattgcagggatttggtatttccgcccc

SEQ ID NO: 58289 - DNA, 75 bp, synthetic construct
  source 1..75: mol_type = other DNA
cgtcaataagaaactggaagaccagagtgcggcaatccagcagatacagaaggttcaggttgatacaaataataa

SEQ ID NO: 58290 - DNA, 75 bp, synthetic construct
  source 1..75: mol_type = other DNA
atcaactggctgatgaaaaacgacgagaagacggcagctattcagaagaatttaggtgatgcaccgccactatct

SEQ ID NO: 58291 - DNA, 75 bp, synthetic construct
  source 1..75: mol_type = other DNA
ctgggccatactcctccggcagaagcagaaaaagcttattatgcttccatcggaaacgatgatctggcagcctga

SEQ ID NO: 58292 - DNA, 75 bp, synthetic construct
  source 1..75: mol_type = other DNA
agcctcaccgcgtcacgtttatgcaaacaaaatttagctattaattcccagaatcggattcgcacccaacgcgaa

SEQ ID NO: 58293 - DNA, 75 bp, synthetic construct
  source 1..75: mol_type = other DNA
cgcgtcatgaccgcgcgcaagaaatattttacaacatcggcggagaagcaaagtgctaaagccgccagggagaaa

SEQ ID NO: 58294 - DNA, 75 bp, synthetic construct
  source 1..75: mol_type = other DNA
ccgagctcaggacgctggaaaaacacagcggtgtgaatgagaaaatcagccagcagcgccgggatttatgggaag

SEQ ID NO: 58295 - DNA, 75 bp, synthetic construct
  source 1..75: mol_type = other DNA
ggggcttgcacagtcgcttattcgccgccccgcattattattgctggatgaaccactgagcgcgctggatctcaa

SEQ ID NO: 58296 - DNA, 75 bp, synthetic construct
  source 1..75: mol_type = other DNA
agtccggactgactgccgatcgcatgctgacgctctccagagccggacaggccgcagggctgacgtttaaccagg

SEQ ID NO: 58297 - DNA, 75 bp, synthetic construct
  source 1..75: mol_type = other DNA
aagcaggcggcaatcagcgcaaaagcccgcggcctcaccgaccgtcaggcgcagcgggagtcggaagagcagcgc

SEQ ID NO: 58298 - DNA, 75 bp, synthetic construct
  source 1..75: mol_type = other DNA
atatgctcgccagtgcgcagaaggcatttgatgaggcggataaaaaatggcagtggtaccagagccggagccagc

SEQ ID NO: 58299 - DNA, 75 bp, synthetic construct
  source 1..75: mol_type = other DNA
gagatctgggaacgctacagcgttctggtcagtcgtgtggatcctgcaaatcctgaatggccggaaatgccgcaa

SEQ ID NO: 58300 - DNA, 75 bp, synthetic construct
  source 1..75: mol_type = other DNA
gaggagcagcttcgtggaagctggatggccgggatgaagtccggctggggagagtgggcggaaagtgcgacggac

SEQ ID NO: 58301 - DNA, 75 bp, synthetic construct
  source 1..75: mol_type = other DNA
tcattgcccggtgctggctacggtcagtatgaacacaagatcgatagtctgattgccaaattcaaagaagctggc

SEQ ID NO: 58302 - DNA, 75 bp, synthetic construct
  source 1..75: mol_type = other DNA
accggaaaaatgacagatgaggacgactggcaggccgttctgcatatcgctgtgtttatccgtgcgcaggcaccg

SEQ ID NO: 58303 - DNA, 75 bp, synthetic construct
  source 1..75: mol_type = other DNA
tttgacgggcttccggcatttattgatgcgcaggaactgcctgccgtggcggtgtggctgagtgatgctcagtac

SEQ ID NO: 58304 - DNA, 75 bp, synthetic construct
  source 1..75: mol_type = other DNA
aggcaaagcagcgatacggtgctccccgccttgctgacgaactgccggagttcaatattaaaaccattgccgcca

SEQ ID NO: 58305 - DNA, 75 bp, synthetic construct
  source 1..75: mol_type = other DNA
ccgtgggttatgtcgttataacaagagcgggcatttcaacattccatacggtaattataaaaatccgtatttccc

SEQ ID NO: 58306 - DNA, 75 bp, synthetic construct
  source 1..75: mol_type = other DNA
ccgtcattttagaggcgcaggatgtgttgataacctacagaggaaaactaccgggaataattactggttctctga

SEQ ID NO: 58307 - DNA, 75 bp, synthetic construct
  source 1..75: mol_type = other DNA
atagagtgacagagtcttttctgccttttaaatctttttattgttcaccggtgtgcacgacagttgaactcatct

SEQ ID NO: 58308 - DNA, 75 bp, synthetic construct
  source 1..75: mol_type = other DNA
ctgcgccggatgaacttcggcagtcgttccgaaaaggtatcccgccgtatcgcgcaaatggaagctgacctgaac

SEQ ID NO: 58309 - DNA, 75 bp, synthetic construct
  source 1..75: mol_type = other DNA
ggaatacctgcgctgttgctggattacagctttagtggcagcaatggacgcaatgaaggtacaggttcatcttca

SEQ ID NO: 58310 - DNA, 75 bp, synthetic construct
  source 1..75: mol_type = other DNA
ttccggtcggcgaagatccgtttgcggttccggcaggtgcgccgttacaggaagtctggctgggtaaagtaccgg

SEQ ID NO: 58311 - DNA, 75 bp, synthetic construct
  source 1..75: mol_type = other DNA
tcggtagtcgtcggtacttccggctctaaccgcaccatcatgcaggcttgcatgaccgataacgatgtcgtggtc

SEQ ID NO: 58312 - DNA, 75 bp, synthetic construct
  source 1..75: mol_type = other DNA
ccaaaggcggtaaaggtcgcgtatgaccttgctaacgggaaatacactgcacaggatgccaccacagcgcgaaaa

SEQ ID NO: 58313 - DNA, 75 bp, synthetic construct
  source 1..75: mol_type = other DNA
gagggagcaagagataaagatataagcctttcaggaactgcttcaatgcttcttgaattagggcttcgtgtatat

SEQ ID NO: 58314 - DNA, 75 bp, synthetic construct
  source 1..75: mol_type = other DNA
cagaacggctggcagacctccacggaactggtggaagacccggaagccatactgcgctacggacgcaacctgctg

SEQ ID NO: 58315 - DNA, 75 bp, synthetic construct
  source 1..75: mol_type = other DNA
gagactctgatgccaaattttaaatactccaggatgattaatgaaggtgacgttgaatataaattgttgccaggg

SEQ ID NO: 58316 - DNA, 75 bp, synthetic construct
  source 1..75: mol_type = other DNA
taaattacttcttgaatgtgttgtaaaaacacagtcatcagtagcgaaaattttgggtattgagtctctaagtcc

SEQ ID NO: 58317 - DNA, 75 bp, synthetic construct
  source 1..75: mol_type = other DNA
ctacaatcgccgcgttgaactgtatcgggagaaagaaaaaataacgtaccactggaagaagccggaacggctgcg

SEQ ID NO: 58318 - DNA, 75 bp, synthetic construct
  source 1..75: mol_type = other DNA
cagctggttgcagaaggcaagagccagaccatgaacagccgccacctgacaggtgatgcggtggatgttgttgcc

SEQ ID NO: 58319 - DNA, 75 bp, synthetic construct
  source 1..75: mol_type = other DNA
tataatttcaataattttggtgcaatttatcttctgactgaaggtggtccgactaatccggaatacagattcgct

SEQ ID NO: 58320 - DNA, 75 bp, synthetic construct
  source 1..75: mol_type = other DNA
atgtgtaacccagccatcgctttggttgccgtcacagtggcatccacagccgcatcaatgtacagccagagcaag

SEQ ID NO: 58321 - DNA, 75 bp, synthetic construct
  source 1..75: mol_type = other DNA
cagcgccaggccaccagggcggcgttggttttaccaaaacacccgccggacgtttctaccatgactactatggtg

SEQ ID NO: 58322 - DNA, 75 bp, synthetic construct
  source 1..75: mol_type = other DNA
actggctggtctttttaccggaaactgggcttacggggcgatagccggttgtacgttcttcattgcgcgtgaaca

SEQ ID NO: 58323 - DNA, 75 bp, synthetic construct
  source 1..75: mol_type = other DNA
gatttctggttttacgtgcgaagcgtcaacctggtgggaaaatctgcttttgtggaagccagcgggcagcccagc

SEQ ID NO: 58324 - DNA, 75 bp, synthetic construct
  source 1..75: mol_type = other DNA
tgtccatgatgacagaaatcctgcttaaacaggccatggtgggcattgtcgggcgtatcggcagcgccattggtg

SEQ ID NO: 58325 - DNA, 75 bp, synthetic construct
  source 1..75: mol_type = other DNA
cttcctcatcgggaaaaaagcgaccttacagaagggggaatcctgttcctgcgagagaacgacaaaaagcgtctc

SEQ ID NO: 58326 - DNA, 75 bp, synthetic construct
  source 1..75: mol_type = other DNA
aacaagcctgatgagtgccctgagagtgatcccggaaacgtcccacggtgcgagctgcatcttaaatcaggtgtg

SEQ ID NO: 58327 - DNA, 75 bp, synthetic construct
  source 1..75: mol_type = other DNA
tgccgccacggtgaacctgattaacggcagcggtaagccggtgagtgtggccatcactgcacaccccgcgccgga

SEQ ID NO: 58328 - DNA, 75 bp, synthetic construct
  source 1..75: mol_type = other DNA
tgcaggcgctaaccggataactgcagatggtcgcgtcagtgccctgaagggcgaaggtgatgtgccgaaagttgc

SEQ ID NO: 58329 - DNA, 75 bp, synthetic construct
  source 1..75: mol_type = other DNA
atttaggcacaggcaaagcatatagcgtattgcaagttattcaggcatttgaaaaaatttcaatgaaaaaaatat

SEQ ID NO: 58330 - DNA, 75 bp, synthetic construct
  source 1..75: mol_type = other DNA
actttattccattgtgttggaatgataacctttcttatccattatctcagaacacctgaagaaaaagttgaaaat

SEQ ID NO: 58331 - DNA, 75 bp, synthetic construct
  source 1..75: mol_type = other DNA
attcaaagattgtttattacaaggagtaaatgcagcagacattatgtttccctgtactttttctcttgtaaattg

SEQ ID NO: 58332 - DNA, 75 bp, synthetic construct
  source 1..75: mol_type = other DNA
agcctcccgctattgttccgccgcccggcattgatgagcatttatttgttaactgtggtggttgtcaccgcccat

SEQ ID NO: 58333 - DNA, 75 bp, synthetic construct
  source 1..75: mol_type = other DNA
gcttctgggccaggcactgaaagagcgcattgatgcttcagcgctgcgtacggaggtcacgcaactggaagaaga

SEQ ID NO: 58334 - DNA, 75 bp, synthetic construct
  source 1..75: mol_type = other DNA
tgctggtgtgcctggcactgctgctacctgcggcgaacagtgaaatacacctcggggtgctgagtattttctggg

SEQ ID NO: 58335 - DNA, 75 bp, synthetic construct
  source 1..75: mol_type = other DNA
ttgaccgcctgcgggttaccttcggggtgcagtcactggtggagaccacctcaaagggtgaccgtaacccgacgt

SEQ ID NO: 58336 - DNA, 75 bp, synthetic construct
  source 1..75: mol_type = other DNA
ggcaaatacgagcctgcggggattgttcaccgcggggagtttgtcttcacgaaggaggcgaccagccggattggc

SEQ ID NO: 58337 - DNA, 75 bp, synthetic construct
  source 1..75: mol_type = other DNA
gataaactgaccatccgggccatcgctcagcgtctaggtctcagtcattccacaatacatacgctttttcagcga

SEQ ID NO: 58338 - DNA, 75 bp, synthetic construct
  source 1..75: mol_type = other DNA
catatattttgttgtttttgattgttttttctatggtttcgtttatgcattctatcttatatgtttttgcactaa

SEQ ID NO: 58339 - DNA, 75 bp, synthetic construct
  source 1..75: mol_type = other DNA
tcagagcgcgctggatctcggtgagccactgtcgctgattactgagtctgtgtttgcacgctacatctcttccct

SEQ ID NO: 58340 - DNA, 75 bp, synthetic construct
  source 1..75: mol_type = other DNA
tcggtatggcagtgatggggcgcaaccttgcgctcaacatcgaaagtcgtggttataccgtctctattttcaacc

SEQ ID NO: 58341 - DNA, 75 bp, synthetic construct
  source 1..75: mol_type = other DNA
gcgaacgaaggtaaagtcaaagaagcacaggccgccgcagagcaactgaaaaccacccgcaacacctatcacaag

SEQ ID NO: 58342 - DNA, 75 bp, synthetic construct
  source 1..75: mol_type = other DNA
gattctgcttcagcagggcggtcaggttaaggactcctttggcgggatcattccgacattccgggcgttgctggg

SEQ ID NO: 58343 - DNA, 75 bp, synthetic construct
  source 1..75: mol_type = other DNA
cctctcttgattctatccgcgaaaatccaaacaacggacgctccatttcacaggttcgcgccgcgattcgatccg

SEQ ID NO: 58344 - DNA, 75 bp, synthetic construct
  source 1..75: mol_type = other DNA
tgtatgagatggcccgtaaaggtgcgcaggatgagctccggctgcagttgcgtgatggcggtctgttatcgggga

SEQ ID NO: 58345 - DNA, 75 bp, synthetic construct
  source 1..75: mol_type = other DNA
gtctggggtgggcaaaacgtctattttccgatgggcatggtctggaaggtcagccagcgcgaccgggaaattttc

SEQ ID NO: 58346 - DNA, 75 bp, synthetic construct
  source 1..75: mol_type = other DNA
ctggaccggcaaacatcgaacctggttagctaatcaatcatttagtcagccatctcagcagattgcttttcaaca

SEQ ID NO: 58347 - DNA, 75 bp, synthetic construct
  source 1..75: mol_type = other DNA
ctgtggttttgggctatatcatcaactcacagcgatgaatataaaatgccaggttattgccccttcccgcatacc

SEQ ID NO: 58348 - DNA, 75 bp, synthetic construct
  source 1..75: mol_type = other DNA
cataaagatataacaaacattttagctggtgatagtcaatcttttcttaaacgaagtctttgggaatttatactc

SEQ ID NO: 58349 - DNA, 75 bp, synthetic construct
  source 1..75: mol_type = other DNA
cagcagcgatcagattgctatgttgaaccagaaattatcggactttgccccatccatgccccatggcatggcgat

SEQ ID NO: 58350 - DNA, 75 bp, synthetic construct
  source 1..75: mol_type = other DNA
aaaaagatttcagaagagattggggtgcgtgatatgaaaatatccaaacgctcaatatccagtggtggtggtaag

SEQ ID NO: 58351 - DNA, 75 bp, synthetic construct
  source 1..75: mol_type = other DNA
ttgcaaacctgctgcttgctccgtatttcaaacatatcgctgatgaatatcaacaagccctccgtgatgtagtgt

SEQ ID NO: 58352 - DNA, 75 bp, synthetic construct
  source 1..75: mol_type = other DNA
tcactttgacccgaaacagactggaaaacatcttggtccctggtctcctgatggtcacctgggcgatctcccggc

SEQ ID NO: 58353 - DNA, 75 bp, synthetic construct
  source 1..75: mol_type = other DNA
gaaatttatcgcctccatgctgtcgggagcgagaacggggcgacggtgacgcatttgtcagggaagaatgtgaga

SEQ ID NO: 58354 - DNA, 75 bp, synthetic construct
  source 1..75: mol_type = other DNA
tggtcacggtaaactactatatgacaaccatagctggaatgtttcaatttgcaacagataatggttatacctcag

SEQ ID NO: 58355 - DNA, 75 bp, synthetic construct
  source 1..75: mol_type = other DNA
agatcgatttcaatgctaaagaatggaaaattccagcagctcgaatgaagatgaaccgagaccatacggttccac

SEQ ID NO: 58356 - DNA, 75 bp, synthetic construct
  source 1..75: mol_type = other DNA
ttcgaccgtttacgtgcctgccgtaccgagcaggaagtactggatttaattgaccgcaccaacgcggcagcttaa

SEQ ID NO: 58357 - DNA, 75 bp, synthetic construct
  source 1..75: mol_type = other DNA
cttgagctttatatattccctcacattggttcgtccgacattcgtcagctcaagactagccacctattagccccg

SEQ ID NO: 58358 - DNA, 75 bp, synthetic construct
  source 1..75: mol_type = other DNA
gcagcgcgtgaactgctggggggcgaagaggttgcgggtcagttctggcagcaattgcgtgaacaacaactgccg

SEQ ID NO: 58359 - DNA, 75 bp, synthetic construct
  source 1..75: mol_type = other DNA
cccgtcaggaagtaaaaaatattctgcgcatcaaggcagacagttcgctacaggacatgatcaacgccggaaaat

SEQ ID NO: 58360 - DNA, 75 bp, synthetic construct
  source 1..75: mol_type = other DNA
agaaaacatcgaagcggtgaatacggttcttgaagagatcgatgctcacgagatcccaaccctgctggtgatgaa

SEQ ID NO: 58361 - DNA, 75 bp, synthetic construct
  source 1..75: mol_type = other DNA
atcattgctgcggaaatgccgaaacagctggggtatgcactgaaacaacaactgaggttatggctgacccgatga

SEQ ID NO: 58362 - DNA, 75 bp, synthetic construct
  source 1..75: mol_type = other DNA
atgacaacgagtgatgccatcgctttagctgcgcttgtagtatcgatttacactatcatatcatcagaagtgaag

SEQ ID NO: 58363 - DNA, 75 bp, synthetic construct
  source 1..75: mol_type = other DNA
aagcgtcattgataacgagatgccgaaacagctggggtatgccctgaaacaacaactgaggttatatctgacccg

SEQ ID NO: 58364 - DNA, 75 bp, synthetic construct
  source 1..75: mol_type = other DNA
cggcattagcattggcaattgggtttttatcgggttgtactattatccctggtcagggattaaacagtctgcgta

SEQ ID NO: 58365 - DNA, 75 bp, synthetic construct
  source 1..75: mol_type = other DNA
tattaccttatggtcgagtagataatgatttcttccagatagaagaaagacgttcatggaatgcagggcgatatt

SEQ ID NO: 58366 - DNA, 75 bp, synthetic construct
  source 1..75: mol_type = other DNA
ctgactatcaacggtaacggtgacatgaacaacggcgacgaactggataacagctctgttgacaacgttgttgct

SEQ ID NO: 58367 - DNA, 75 bp, synthetic construct
  source 1..75: mol_type = other DNA
ggcgcacaagactgtccatgaccgtatcgccacggcaggacgtttctgcgaacgactgatggaactgaatattca

SEQ ID NO: 58368 - DNA, 75 bp, synthetic construct
  source 1..75: mol_type = other DNA
tcagctacaggtcggggaatcgacggtaatcaggctgtcgaaggatggcatcaccatcgtgggcggttctgtttt

SEQ ID NO: 58369 - DNA, 75 bp, synthetic construct
  source 1..75: mol_type = other DNA
ctacggtcagggcggcgtactcaccgaagccgttcgcaaacgcccgtacagcgtggtgctgctcgacgaagtgga

SEQ ID NO: 58370 - DNA, 75 bp, synthetic construct
  source 1..75: mol_type = other DNA
ttacccattagtggcttatgttacttcgacaatgcgttgtggatccgccttgagggcggcgaaggatcggtaaaa

SEQ ID NO: 58371 - DNA, 75 bp, synthetic construct
  source 1..75: mol_type = other DNA
ggcttctgacgaaaacaactgggatctgaactacggtgaaatcgcgaagatcttccgtgcaggttgcatcatccg

SEQ ID NO: 58372 - DNA, 75 bp, synthetic construct
  source 1..75: mol_type = other DNA
tcacatgagaaaacacatattcgtttacttagtgcattcctggtaggaataacctggccaatgagtctgcctgtg

SEQ ID NO: 58373 - DNA, 75 bp, synthetic construct
  source 1..75: mol_type = other DNA
gtgggttaccgatgttactgaatttgtagtcaatgggcgcaagctgtatttgtctccagtaatagatctcttcaa

SEQ ID NO: 58374 - DNA, 75 bp, synthetic construct
  source 1..75: mol_type = other DNA
aatatgataaacgcgggcgtccggtgagtgtgacggaaggcggtctgacgcgcagcatggggtatgacgctgccg

SEQ ID NO: 58375 - DNA, 75 bp, synthetic construct
  source 1..75: mol_type = other DNA
cgcaggagataaaccgcagtgaattcacaaactatacctgtgagcgggacacgatggtggaggagtactgcacac

SEQ ID NO: 58376 - DNA, 75 bp, synthetic construct
  source 1..75: mol_type = other DNA
atgctaccatctgtttcaatcaacaatacctgccctacttacacagaatccaccaatgaaaataacaataatgaa

SEQ ID NO: 58377 - DNA, 75 bp, synthetic construct
  source 1..75: mol_type = other DNA
gttaatggattagtacaagagttcaaaaacctttttaatggtaaggaaggaataagcacctgtattaaacatcta

SEQ ID NO: 58378 - DNA, 75 bp, synthetic construct
  source 1..75: mol_type = other DNA
aaaaagcgcagctactgccagtttgattcgaaactggcgcagatagtccagcagcaggggcgtaacgggcagctg

SEQ ID NO: 58379 - DNA, 75 bp, synthetic construct
  source 1..75: mol_type = other DNA
tgtcgaacgtggtcagcgacagaacatatcacctataccgatttttcgtgtcagtttgacgaagtggtgatctga

SEQ ID NO: 58380 - DNA, 75 bp, synthetic construct
  source 1..75: mol_type = other DNA
gtcagcaaaatggcggttacagttcgtgaagcggcgctggtgcctcgtgtgctgcaacaggcatttcacctgatg

SEQ ID NO: 58381 - DNA, 75 bp, synthetic construct
  source 1..75: mol_type = other DNA
actatcaccttctttgctggcattcgctggatgtagccgcgatgggctatttaatggttaaaagcaattgcttcg

SEQ ID NO: 58382 - DNA, 75 bp, synthetic construct
  source 1..75: mol_type = other DNA
tgcgatgacaacacacaggattatcccacgaaaactgacctgggcagtcgcagccatttactggtatcaacggag

SEQ ID NO: 58383 - DNA, 75 bp, synthetic construct
  source 1..75: mol_type = other DNA
ctgtggtatccacgcaaaaaaccccctcattggtgggaaaaaaacttctgctggtacgtcgggtcagcgccgacg

SEQ ID NO: 58384 - DNA, 75 bp, synthetic construct
  source 1..75: mol_type = other DNA
atgacaattcaggaaattccgctgacagcggacaaccagcagttcagcatcgtcctgggtggtgttacctggcgg

SEQ ID NO: 58385 - DNA, 75 bp, synthetic construct
  source 1..75: mol_type = other DNA
gtaaagaggcccgcgactatctggatgaagaagtcacaaatgatgagatcgatgaagaaatcagaactgagctag

SEQ ID NO: 58386 - DNA, 75 bp, synthetic construct
  source 1..75: mol_type = other DNA
acccggcgaacggaaacaccacccctgcactggtcacacagggtggacagacgttcatcaatgaggcgctgatta

SEQ ID NO: 58387 - DNA, 75 bp, synthetic construct
  source 1..75: mol_type = other DNA
atggaatttcacgaaaacagagctaaagcgccgtttatcggcctggtgcaactctggcaggcggtgaggcgttgg

SEQ ID NO: 58388 - DNA, 75 bp, synthetic construct
  source 1..75: mol_type = other DNA
gttgaccgcggcgctgaaaacgtcgaatgcctggatttgattactatgccgtggttccgagctgttcgtggcaac

SEQ ID NO: 58389 - DNA, 75 bp, synthetic construct
  source 1..75: mol_type = other DNA
ccgtcagcgctgtggcgaggtgttccgctatgcgattgttactggtcgagccgactacaaccctgctcccgatct

SEQ ID NO: 58390 - DNA, 75 bp, synthetic construct
  source 1..75: mol_type = other DNA
tcattatgttaaccggtgtacgaacgcaagaattgcgtttcgcacgctggcaggatatcgattttgagacaaaat

SEQ ID NO: 58391 - DNA, 75 bp, synthetic construct
  source 1..75: mol_type = other DNA
ctctggcagaacgaacgattacagcggaagaagcaaaaacaatgacacttgcagccagaagttcttcggctcagg

SEQ ID NO: 58392 - DNA, 75 bp, synthetic construct
  source 1..75: mol_type = other DNA
tcagcaaagaaattgttatagataaaacgggtaatgactccaacttattgatagtgttttatgttcagataatgc

SEQ ID NO: 58393 - DNA, 75 bp, synthetic construct
  source 1..75: mol_type = other DNA
cgccgtgctcctctttttactgcgccggctgacgcggcgcggcataaacgctgcctgtggtcagtgtcccgcgtc

SEQ ID NO: 58394 - DNA, 75 bp, synthetic construct
  source 1..75: mol_type = other DNA
atgccagcgcctctgtatggtgcggacgacgcgcgccgctgttccggcaattccgtatcggaggtgctggataaa

SEQ ID NO: 58395 - DNA, 75 bp, synthetic construct
  source 1..75: mol_type = other DNA
tcagccgaaattgtaaaagaaagattcagcaaagaaattgttatagataaaacgttatgtgtttacaataaaata

SEQ ID NO: 58396 - DNA, 75 bp, synthetic construct
  source 1..75: mol_type = other DNA
ggcagacgcagtgcgaagcgcagaatatcagccgcagtgagttcaccaactatacctgtgagcgcgacctgctgg

SEQ ID NO: 58397 - DNA, 75 bp, synthetic construct
  source 1..75: mol_type = other DNA
cgatatggcggttgccggcggcgtggcgctctctttcccccagcaggcaggctaccgctaccagcccggaatgat

SEQ ID NO: 58398 - DNA, 75 bp, synthetic construct
  source 1..75: mol_type = other DNA
aagcagacaaggaatttatcggaaaaagcagaggtgatcacaaccgtctgggcattgccctgcaaattggatgtg

SEQ ID NO: 58399 - DNA, 75 bp, synthetic construct
  source 1..75: mol_type = other DNA
gccacaacataatgaccgtcgctaaattatggcacatgtttatggattcccccgcatttacagaactggccccca

SEQ ID NO: 58400 - DNA, 75 bp, synthetic construct
  source 1..75: mol_type = other DNA
atgaatggatgccgaagggggtatatttccgcccttctggctactactggaaaccagggggaacaacagaaaaaa

SEQ ID NO: 58401 - DNA, 75 bp, synthetic construct
  source 1..75: mol_type = other DNA
atgacccgcgccgctgttccggcaattccgtatcggaggtgctggaaaatatcaagaataatctcgacgcgtttc

SEQ ID NO: 58402 - DNA, 75 bp, synthetic construct
  source 1..75: mol_type = other DNA
tgtttcgtcgtgattttgttgagtgcgaagcgccaccagcatattgattctgcaattccgggacgttacactgct

SEQ ID NO: 58403 - DNA, 75 bp, synthetic construct
  source 1..75: mol_type = other DNA
tggctatgatcatcgcggcgtgctggttcttgtcgatggtgttcgccagggaacggataccggacacctgaatgg

SEQ ID NO: 58404 - DNA, 75 bp, synthetic construct
  source 1..75: mol_type = other DNA
tgataaaaaatattaacggtggcggaagctggaatgttacccccatgccaaatacggacgtatgcgtgcaggttc

SEQ ID NO: 58405 - DNA, 75 bp, synthetic construct
  source 1..75: mol_type = other DNA
cgtgggaaataccggacagcagtgcagtgcgcagcagataaaccgcagtgaattcacaaactatacctgtgaacg

SEQ ID NO: 58406 - DNA, 75 bp, synthetic construct
  source 1..75: mol_type = other DNA
ctgcgatctgaaagacaacctcgacaacattttgaagatgatcgatctcggcgcgtacgtgcagttcgacaccat

SEQ ID NO: 58407 - DNA, 75 bp, synthetic construct
  source 1..75: mol_type = other DNA
gtgattgagatgaccaaccgttacatggggcgcaatgcgcaatttatgctcgatgtaatgcgcgagacggggatc

SEQ ID NO: 58408 - DNA, 75 bp, synthetic construct
  source 1..75: mol_type = other DNA
aacagataaaattgtttgtgatacactggacagtatcccgcaaggggaacgcagccgccttaaccgggccgcact

SEQ ID NO: 58409 - DNA, 75 bp, synthetic construct
  source 1..75: mol_type = other DNA
atttggaatattccgcacacgggaacatgccggaatgggccagggataatccttcccatttctggcaggcggctg

SEQ ID NO: 58410 - DNA, 75 bp, synthetic construct
  source 1..75: mol_type = other DNA
actgctcaaaaaacgctggatatcacacagcagctacgcgaaaaatacaaagcaattacttacaaccgttcagat

SEQ ID NO: 58411 - DNA, 75 bp, synthetic construct
  source 1..75: mol_type = other DNA
gagcagcatcgcaatgagggctggcagcagcatcagcagggtaagagtcgccatgagcgtggctacggcagcaag

SEQ ID NO: 58412 - DNA, 75 bp, synthetic construct
  source 1..75: mol_type = other DNA
tattgcggaaatccgggaataccgcgatgataaactgtacagcgtaaggcacctggtgtttaacggctttgagct

SEQ ID NO: 58413 - DNA, 75 bp, synthetic construct
  source 1..75: mol_type = other DNA
gttattcgttgggaaccagaaacacagcgcgttatctatcttcgcaaagactacccgcatgagtgctttagtcct

SEQ ID NO: 58414 - DNA, 75 bp, synthetic construct
  source 1..75: mol_type = other DNA
gggtgaaggaactatgtcagcattgccatggtaagggcgaagtcagcacagcgtgcagagggtgtaagggtaaag

SEQ ID NO: 58415 - DNA, 75 bp, synthetic construct
  source 1..75: mol_type = other DNA
aacatcaaccataccctcgaacaaatggcacaagccctgttcaaaagttggtttgtcgattttgaaccagtaaaa

SEQ ID NO: 58416 - DNA, 75 bp, synthetic construct
  source 1..75: mol_type = other DNA
tttctgatgttgacctgggcgagatgaaaattgaacccgtagcgccagcaggacaatctcaacgcctgagttctc

SEQ ID NO: 58417 - DNA, 75 bp, synthetic construct
  source 1..75: mol_type = other DNA
gctggtcactcacggatgacgtgataccccgccgccatgataacgacgaagacactgacactggtgaaaccaccg

SEQ ID NO: 58418 - DNA, 75 bp, synthetic construct
  source 1..75: mol_type = other DNA
aagctggggatcgtcgaacagcgcgaacgatacagccgtacagcgattaacaacatcaaaaaattctggtcgcta

SEQ ID NO: 58419 - DNA, 75 bp, synthetic construct
  source 1..75: mol_type = other DNA
ctccaggaggctgttggcttaccgaatctggcaccgcgctatgccattgatgcacctgctgacgcgcctgatggc

SEQ ID NO: 58420 - DNA, 75 bp, synthetic construct
  source 1..75: mol_type = other DNA
gaataaagaattttcggctaaagttaaattgcttgataaagcaacaggaaaattagggtttgaatttacctccaa

SEQ ID NO: 58421 - DNA, 75 bp, synthetic construct
  source 1..75: mol_type = other DNA
gatatcagaacatcatcaatcgttaatcgtccgtggaataaaaaaggtacgtcaaacggaaaaacacgagtagag

SEQ ID NO: 58422 - DNA, 75 bp, synthetic construct
  source 1..75: mol_type = other DNA
ttaaagaagatgactttctttctttggatgaattaaatgattttctctctatgaatgaatctgaccttgatagtg

SEQ ID NO: 58423 - DNA, 75 bp, synthetic construct
  source 1..75: mol_type = other DNA
tgcggcagggcagcgtgagtgaagaaagccagcagtggcttgcgcagtgcgggctgacggcggaacagatggccg

SEQ ID NO: 58424 - DNA, 75 bp, synthetic construct
  source 1..75: mol_type = other DNA
ttaaaacgattctcgaacttatcagacgtggagacgtgactgaaattgttcacgctggcgatcctgatgatgagg

SEQ ID NO: 58425 - DNA, 75 bp, synthetic construct
  source 1..75: mol_type = other DNA
taatttaccagcagagccgaaagctgcatcggtagcagaaaccgatggtaaagcctttcctcagccagcaggtgt

SEQ ID NO: 58426 - DNA, 75 bp, synthetic construct
  source 1..75: mol_type = other DNA
aaaaatcaccaaagaggctgccatcatggctacgatcccaaccctcactcaacctgaaattgccatcgttgatgg

SEQ ID NO: 58427 - DNA, 75 bp, synthetic construct
  source 1..75: mol_type = other DNA
gatttgaagtgcttgaacaagagtacaattctgtcatgtcgacaaaatatatgggaacaagtgcatttagtcaca

SEQ ID NO: 58428 - DNA, 75 bp, synthetic construct
  source 1..75: mol_type = other DNA
caactcgcgctaaaacaggagaaggaccgaacaaacgaaacagcaatgagaccgttgcgaaaagcgacaatagac

SEQ ID NO: 58429 - DNA, 75 bp, synthetic construct
  source 1..75: mol_type = other DNA
gttgccgaatatttctgcaagcagcacaaaaacgttattcaaaaaatccagacgcttgagtgctctgttgaattc

SEQ ID NO: 58430 - DNA, 75 bp, synthetic construct
  source 1..75: mol_type = other DNA
ctgccttcttcttcaagagccagcctgaccagttccattttgaattcaggggaatagtgtttccggggaagtctt

SEQ ID NO: 58431 - DNA, 75 bp, synthetic construct
  source 1..75: mol_type = other DNA
gctacggtggcccttcaacactaattgcgcgttatccccaacgcaagagagatgattactatgccgtgattacat

SEQ ID NO: 58432 - DNA, 75 bp, synthetic construct
  source 1..75: mol_type = other DNA
ctaagccgccacgaatggttgatcgcaccgttattattgcagggcagcgcctcgccggatgcgcggattttactg

SEQ ID NO: 58433 - DNA, 75 bp, synthetic construct
  source 1..75: mol_type = other DNA
aacgtcatgacgatgtactgaaaaagatccgcacgcttgaatgctcagcatcattcactgcccgcaatttttcgg

SEQ ID NO: 58434 - DNA, 75 bp, synthetic construct
  source 1..75: mol_type = other DNA
tccgctctcttattataagaatcgcgattacgcctgcttcttctcggcaaactctgcccagaaaccggcgttgta

SEQ ID NO: 58435 - DNA, 75 bp, synthetic construct
  source 1..75: mol_type = other DNA
tccgactctggcgcgtgaaaagctcgaagaactccacggactgtttcttggcaaagaaactgtccggcgcatcat

SEQ ID NO: 58436 - DNA, 75 bp, synthetic construct
  source 1..75: mol_type = other DNA
tcccgccatagctctttcagcatttacagctttgaagcgtaatgaacaacaggatcctattttgttgattctcgc

SEQ ID NO: 58437 - DNA, 75 bp, synthetic construct
  source 1..75: mol_type = other DNA
ttgctgacactgagaacgtcaatccgaatgtcgttatttttgacaccccgctgatgcgcggtgagcagaaagttg

SEQ ID NO: 58438 - DNA, 75 bp, synthetic construct
  source 1..75: mol_type = other DNA
gagatacagctagcccatgtagataaaaatactattcgaggcacatataatcatgctatatacttgaaaaatagg

SEQ ID NO: 58439 - DNA, 75 bp, synthetic construct
  source 1..75: mol_type = other DNA
agaacagaattcgtggaacttataatcatgcgctgtatcttgaaaaacgcagaaaaatgatgaactggtatgctg

SEQ ID NO: 58440 - DNA, 75 bp, synthetic construct
  source 1..75: mol_type = other DNA
cagtttgatgcgtggctgatggaaaacgcactgccgtcggggtttgaggcggggtttgatgggatggagattggg

SEQ ID NO: 58441 - DNA, 75 bp, synthetic construct
  source 1..75: mol_type = other DNA
gaaatgcaattagcacatgttgataagaacaatatccgaggaacctataatcacgcacaatatttttctcaaagg

SEQ ID NO: 58442 - DNA, 75 bp, synthetic construct
  source 1..75: mol_type = other DNA
tacaaaaaaagtgtggtgtaaatatggtaagataccagggcaaggggatggtgtaaacctttttttgttggtgaa

SEQ ID NO: 58443 - DNA, 75 bp, synthetic construct
  source 1..75: mol_type = other DNA
tgctttcaattgatgcaaataatgtgcgtcagcgtgtctttcagactggatgtagcactttcgaagcaatccaat

SEQ ID NO: 58444 - DNA, 75 bp, synthetic construct
  source 1..75: mol_type = other DNA
ggccgttcaggtggtaaacggcgttccccgcgtgccggaacagcgctcaaaagcgaagtctgacagtggcaagcg

SEQ ID NO: 58445 - DNA, 75 bp, synthetic construct
  source 1..75: mol_type = other DNA
ttgaggatggtgtttactggtacgtgtcgagctttaacaacccacatcagttcgcacccggctcggtgtttcatc

SEQ ID NO: 58446 - DNA, 75 bp, synthetic construct
  source 1..75: mol_type = other DNA
atggtaagcgttttgactttgttaagagccaatgctcgtagcgaaagaattcaagaaattatagattttttgatc

SEQ ID NO: 58447 - DNA, 75 bp, synthetic construct
  source 1..75: mol_type = other DNA
cgggacgacctttgtatgatcagttttttggcatgcttggcgatcaaaacattatcaatacagttatagcaatgc

SEQ ID NO: 58448 - DNA, 75 bp, synthetic construct
  source 1..75: mol_type = other DNA
aatatcaatacgatttgaggaaccatttgctggttaatctctttccgatagcattggatgcagcaatcactacat

SEQ ID NO: 58449 - DNA, 75 bp, synthetic construct
  source 1..75: mol_type = other DNA
gaatcaatataagaccgcagagagctttctgtgtgcgatgcttgaacgatgtaaagatcatgatgcgcgtaaggc

SEQ ID NO: 58450 - DNA, 75 bp, synthetic construct
  source 1..75: mol_type = other DNA
taaacgccgctggcggtggccccgaagggatgagtcccatggacgggaggaataaccttgctcccgttttgcctg

SEQ ID NO: 58451 - DNA, 75 bp, synthetic construct
  source 1..75: mol_type = other DNA
tcttattgaggcttcagcagatagtgccagcgcgctttcatactctcgtggtgagttatttcgtgcgtgctcaat

SEQ ID NO: 58452 - DNA, 75 bp, synthetic construct
  source 1..75: mol_type = other DNA
agatggtatgagccgccggtcagctttaccggtctggcaaaaagcctgcgtgctgccgtgcatcacagctcaccg

SEQ ID NO: 58453 - DNA, 75 bp, synthetic construct
  source 1..75: mol_type = other DNA
gacattaagtgcgggaaagaaatattcatcttcgccatcccacatcaggattaatggctattcatttacaacccc

SEQ ID NO: 58454 - DNA, 75 bp, synthetic construct
  source 1..75: mol_type = other DNA
ccgatacactgggcgtcatcttcgcacggtgcagaagttcaaaatgcgcaaagctggtcagcgaccattcgtcag

SEQ ID NO: 58455 - DNA, 75 bp, synthetic construct
  source 1..75: mol_type = other DNA
tttacaaaagcgacttgaagaacttaacgaatggttaaatgagccaataatatcttttgacccctaccagttgaa

SEQ ID NO: 58456 - DNA, 75 bp, synthetic construct
  source 1..75: mol_type = other DNA
acgacgcattctggaagatataaagggtataaaagtcgtcggtgaggcatcgtgcggtgaagacgccgttaagtg

SEQ ID NO: 58457 - DNA, 75 bp, synthetic construct
  source 1..75: mol_type = other DNA
ctttatattgcgggtatcggtgccggtattgagaacacccctgacggcatgcagagccaggtgctgctggcggca

SEQ ID NO: 58458 - DNA, 75 bp, synthetic construct
  source 1..75: mol_type = other DNA
gtttctgaatatcaaaaatgtcagccgcgatgacatgatggctgcgcaccgtgtaccgccacaaatgatggggat

SEQ ID NO: 58459 - DNA, 75 bp, synthetic construct
  source 1..75: mol_type = other DNA
agaaaccatattgccatcacgcttctgtcagggttgatgaaaaagagcgtcaggtccgctgcaaaatatgtggcg

SEQ ID NO: 58460 - DNA, 75 bp, synthetic construct
  source 1..75: mol_type = other DNA
actatcccctgctgcaggagaagaacctgatacgacgcgtgccattcgtactggagttgcgtaacgtgccgttca

SEQ ID NO: 58461 - DNA, 75 bp, synthetic construct
  source 1..75: mol_type = other DNA
ggctggtaaatgactggtatcccacagcaagtatcagcgatttgctggttgtggtgatgaagaaagccaccgcag

SEQ ID NO: 58462 - DNA, 75 bp, synthetic construct
  source 1..75: mol_type = other DNA
cgggcggctttaccaccaaaaaagcgtcaaccgtttctcgcggcggctatggtcgttcttccagcgcccgtgggc

SEQ ID NO: 58463 - DNA, 75 bp, synthetic construct
  source 1..75: mol_type = other DNA
ccagcaggttgacgaacaggccacgcagccggacagcatgaccgcagataattatgtgcgtgtagtggtggaggt

SEQ ID NO: 58464 - DNA, 75 bp, synthetic construct
  source 1..75: mol_type = other DNA
atggccagaaaacgcaaatcaagaaataacagtaaaattggtcacggagcgatcagtcgcattggaagaccgcat

SEQ ID NO: 58465 - DNA, 75 bp, synthetic construct
  source 1..75: mol_type = other DNA
agttgacgcaggtgatgatttcatccgctcccgtaaggcctgaaaccgtggagaaagcggaatacctgcgtctgg

SEQ ID NO: 58466 - DNA, 75 bp, synthetic construct
  source 1..75: mol_type = other DNA
ttttctacggttgcaaactgctgaccacgccgaatccggaagaagataaagacctgcaactgttccgcaaactgg

SEQ ID NO: 58467 - DNA, 75 bp, synthetic construct
  source 1..75: mol_type = other DNA
ggcattattccgcgaactgtatccggcgctaaaacaaattcaatcgaactattccggcagatgctacgactacgg

SEQ ID NO: 58468 - DNA, 75 bp, synthetic construct
  source 1..75: mol_type = other DNA
gctgtacaatcaaagaggtgcagtttaccgcaggacaaaagcaggatattgatgtcaccacgctgtgttctgttg

SEQ ID NO: 58469 - DNA, 75 bp, synthetic construct
  source 1..75: mol_type = other DNA
tcatgaaaataaaacaggtgataacctcctttggtaatgggtattcacaggtattattacagaacaatgttgttt

SEQ ID NO: 58470 - DNA, 75 bp, synthetic construct
  source 1..75: mol_type = other DNA
tgccggacgtcagggaggcagcatacatcgcatcactttccgggaagccgtatctgaggggctgttccggcgcgt

SEQ ID NO: 58471 - DNA, 75 bp, synthetic construct
  source 1..75: mol_type = other DNA
gtatctggaggaggcgagcacaatattttatcccatgtctgcacgatgccagtttgaacaggatgcctgtgaact

SEQ ID NO: 58472 - DNA, 75 bp, synthetic construct
  source 1..75: mol_type = other DNA
tcctggcgatgcctggaatcagtattatccccaatggctctacgttagatattgcgatgcctcaggcggagattg

SEQ ID NO: 58473 - DNA, 75 bp, synthetic construct
  source 1..75: mol_type = other DNA
cttcagaattaatccgactttatccaaaagaaataatattctttatctgcgtaggggttttggtaggcggtgtca

SEQ ID NO: 58474 - DNA, 75 bp, synthetic construct
  source 1..75: mol_type = other DNA
gaggcgctgcgtaatcacgaaagaaataaaccgacacgtccggttcgaccgaattttatctatgaagatgtttcg

SEQ ID NO: 58475 - DNA, 75 bp, synthetic construct
  source 1..75: mol_type = other DNA
agataaatgcatgtttgacgcagaacacgaaataacaaaaaggtttgatgaaatctgcgcattgcaacaaaaact

SEQ ID NO: 58476 - DNA, 75 bp, synthetic construct
  source 1..75: mol_type = other DNA
tatttactcctcatgccgtctgatagtgcggaaaaacggtgctgaaatttataaccgtaccgcgctggataatac

SEQ ID NO: 58477 - DNA, 75 bp, synthetic construct
  source 1..75: mol_type = other DNA
agccaggcgcgggaaaaacaacgataaacagactggtgatgaacccctgttacgaatttgccgatcgactcattc

SEQ ID NO: 58478 - DNA, 75 bp, synthetic construct
  source 1..75: mol_type = other DNA
ctgcgccagcaggcgggatgaatgtgtattacatcgcttataaccaggacatgaccgtcgaatacattcaggcgt

SEQ ID NO: 58479 - DNA, 75 bp, synthetic construct
  source 1..75: mol_type = other DNA
ttaaccagtggccggcactgacgtactatgcgaacgatggctgggtggaaatcgacaacaacatcgctgaaaatg

SEQ ID NO: 58480 - DNA, 75 bp, synthetic construct
  source 1..75: mol_type = other DNA
ataatttaaatgaaagggccaagataaaaaacatggaaggttggcttgctaatgcgttgagagatataaatgcgt

SEQ ID NO: 58481 - DNA, 75 bp, synthetic construct
  source 1..75: mol_type = other DNA
gtgggcaaagctttcccccgggactcccgtgcaccggagcggtggccatcagggaccattaccgtcagggtttat

SEQ ID NO: 58482 - DNA, 75 bp, synthetic construct
  source 1..75: mol_type = other DNA
caacggcaatgaatatttcaaatggagaagcaaacaaagcaccacaacaaaagacctgatgaatcttaaatggga

SEQ ID NO: 58483 - DNA, 75 bp, synthetic construct
  source 1..75: mol_type = other DNA
ggcgatattgaaaaagccagcaaggtattcgtccgtaacgaattaacccccttacaggaaagaatcaaagaaatt

SEQ ID NO: 58484 - DNA, 75 bp, synthetic construct
  source 1..75: mol_type = other DNA
tttagtggcatgctggttaagcaggaaaaaagacggaagaaaacgctgacaaaagcgcagatcacgcgggttgtg

SEQ ID NO: 58485 - DNA, 75 bp, synthetic construct
  source 1..75: mol_type = other DNA
tcgggcgggatattcttgcgaaatcgaccgttgccgccgttatcgaatacctcggtttacaggaaacggtaaaca

SEQ ID NO: 58486 - DNA, 75 bp, synthetic construct
  source 1..75: mol_type = other DNA
tactgcggcagacaggtttccgtattttacggggaatgatgtcgccagcctggcaaccctgacaaaagtcgggcg

SEQ ID NO: 58487 - DNA, 75 bp, synthetic construct
  source 1..75: mol_type = other DNA
acggggattaccagagtcagagcgtcttgcagccaggcagcagcgaagcaaagcgttactgacgtcgctgcatga

SEQ ID NO: 58488 - DNA, 75 bp, synthetic construct
  source 1..75: mol_type = other DNA
ccgtggtggcagcgattacgcgcaacgcaaaattaaaatagccgctgcacactctctttccctcgggctgttacc

SEQ ID NO: 58489 - DNA, 75 bp, synthetic construct
  source 1..75: mol_type = other DNA
catcggtatttttgaccttgaagatatcagtgatttttctgtcgttatcggagcaggtggaacagctggtaatcc

SEQ ID NO: 58490 - DNA, 75 bp, synthetic construct
  source 1..75: mol_type = other DNA
ggtggacttacttttgaaaacgactcaatccttgcctggattcgaaatactgactgggcgaagattggatttaaa

SEQ ID NO: 58491 - DNA, 75 bp, synthetic construct
  source 1..75: mol_type = other DNA
gcgcttattaatccgaacatccgggttaacggactcattcaactggatcaggcttccgtgtatcgcaccgcgctg

SEQ ID NO: 58492 - DNA, 75 bp, synthetic construct
  source 1..75: mol_type = other DNA
gcgattgtgctcaacagcgccaccgggcttatcggcatgccgcagcagactatcggtaacggcgtaaacgtccgc

SEQ ID NO: 58493 - DNA, 75 bp, synthetic construct
  source 1..75: mol_type = other DNA
cgctgatgaaagacttcgaggccaaaggcgcgactgaaggtctgacgcctgaaatgcctgctaccgttttccccc

SEQ ID NO: 58494 - DNA, 75 bp, synthetic construct
  source 1..75: mol_type = other DNA
tcgaacaacgatattgcgatggctggtggtcagatcaccgaccagaacacggatggaaatatcacgctaagcggc

SEQ ID NO: 58495 - DNA, 75 bp, synthetic construct
  source 1..75: mol_type = other DNA
cacgccagaattatggtgggctgggcaggggagccgaaaggctcgccggtctccgttgacgccggtactgcgaac

SEQ ID NO: 58496 - DNA, 75 bp, synthetic construct
  source 1..75: mol_type = other DNA
cctttttgagaaccttcgccgcaaggggcatcactgccacggccggaaacgactgtccgggggcagaccgcaaaa

SEQ ID NO: 58497 - DNA, 75 bp, synthetic construct
  source 1..75: mol_type = other DNA
cgtcgatgcgctgattgttcaggatatggggattctggaacttgatattccgccgattgaactgcacgccagtac

SEQ ID NO: 58498 - DNA, 75 bp, synthetic construct
  source 1..75: mol_type = other DNA
agcattcggtcttattttccgtcgttcagaagattttcttcatttcattccgacggctgaaggacaaggcgaaaa

SEQ ID NO: 58499 - DNA, 75 bp, synthetic construct
  source 1..75: mol_type = other DNA
acgactacgccgggaccctgaccggcgggcgcattctgaacatcgatgccgccagtctcaccctgacgctggacc

SEQ ID NO: 58500 - DNA, 75 bp, synthetic construct
  source 1..75: mol_type = other DNA
tgatgataaaggacgccgaatggtaggtaaagtttgtgtgttaggatcatttaacgtcgatattgtggcgaaagt

SEQ ID NO: 58501 - DNA, 75 bp, synthetic construct
  source 1..75: mol_type = other DNA
actcgccccactgtggttcccgacgtccatcatgatggtggcgttttatcgccatgccgggcgcatgtggccggg

SEQ ID NO: 58502 - DNA, 75 bp, synthetic construct
  source 1..75: mol_type = other DNA
aacggcatttaccggtggaagcgccaaaaactcactgaataaagatattgtcacggggctgaacacctctgacag

SEQ ID NO: 58503 - DNA, 75 bp, synthetic construct
  source 1..75: mol_type = other DNA
gtccaactctgccgataatatagcgggcgtttattacagacccgttcaaaagtatataaatggcacctggtataa

SEQ ID NO: 58504 - DNA, 75 bp, synthetic construct
  source 1..75: mol_type = other DNA
gaagaaatccggcaggatcgggaaaacgattattgcagccacggtattgagcgtaattgttgcccgctgggctgc

SEQ ID NO: 58505 - DNA, 75 bp, synthetic construct
  source 1..75: mol_type = other DNA
aaggaagcatctttcatctgatggaaccggacatcaaccaagagatctacggcctgccaggttacctttctgcca

SEQ ID NO: 58506 - DNA, 75 bp, synthetic construct
  source 1..75: mol_type = other DNA
tgccagcgccgccgcgctcggtgtgccgttaaaaattacccatatggcggtaggcgatggcggcggaacattgcc

SEQ ID NO: 58507 - DNA, 75 bp, synthetic construct
  source 1..75: mol_type = other DNA
ataccgtcgccgcgtgcagacgtacagggaaaaagcaaaaataacgtaccagtggaagaagccggagcggttacg

SEQ ID NO: 58508 - DNA, 75 bp, synthetic construct
  source 1..75: mol_type = other DNA
atggtgttgattaccagcagcacggacaatatcaccctgaaaatcgaccctgccgtagtgctggcaacccgcaag

SEQ ID NO: 58509 - DNA, 75 bp, synthetic construct
  source 1..75: mol_type = other DNA
attttgccatcgctgcatatggcaaaccgcgaactgcgtagggcgaagaatcatgtccagaagtgggagcgagtc

SEQ ID NO: 58510 - DNA, 75 bp, synthetic construct
  source 1..75: mol_type = other DNA
aacctccgcaacgcaatgaaaagcgccaaagggccaggcaacttccgcaacctgtttatgtactctcctaacggc

SEQ ID NO: 58511 - DNA, 75 bp, synthetic construct
  source 1..75: mol_type = other DNA
ataccgtcgccgttctcaacaacgaagggagagcgcgaaaaacacttatcagtggaagaagccggaacggttgcg

SEQ ID NO: 58512 - DNA, 75 bp, synthetic construct
  source 1..75: mol_type = other DNA
ctggtcgcataactatggggcacgctctggatgttacaggagatataacaactaacgcatgggtgtacgcaaacc

SEQ ID NO: 58513 - DNA, 75 bp, synthetic construct
  source 1..75: mol_type = other DNA
ggcctgcccggctatctttctgccatcccatccgctttgctcaacgagtccgccacgctgttccgccgcaagtat

SEQ ID NO: 58514 - DNA, 75 bp, synthetic construct
  source 1..75: mol_type = other DNA
aatactactgacacgtttatctttacaattataccagacaataaccatgtgttaaaattatcgtctcccattacc

SEQ ID NO: 58515 - DNA, 75 bp, synthetic construct
  source 1..75: mol_type = other DNA
gcttaccaattttcgtattcgtgataacattatttagctcttcattaggatggagcgcagaattttctgccagtt

SEQ ID NO: 58516 - DNA, 75 bp, synthetic construct
  source 1..75: mol_type = other DNA
gcaccggaaatcaaaccctcgcccggcggcaacacgccatcgggtccgtctgcagatacgtccgttcgcacaatc

SEQ ID NO: 58517 - DNA, 75 bp, synthetic construct
  source 1..75: mol_type = other DNA
gaaacgcagacagtccaggagctgcgcgcgctgtttcaggcggtccgcctgatgggctgtattaacgtcatagtg

SEQ ID NO: 58518 - DNA, 75 bp, synthetic construct
  source 1..75: mol_type = other DNA
gtcgctacacccgggaaaatgcgctcgaccgcgcttatgcctcctttaacgccaaccgtaacagcaacgggcaaa

SEQ ID NO: 58519 - DNA, 75 bp, synthetic construct
  source 1..75: mol_type = other DNA
gcggggaacactccatgagccaaaatttcaaggctgggattcgcggtttatccccgctggcgcggggaacacgta

SEQ ID NO: 58520 - DNA, 75 bp, synthetic construct
  source 1..75: mol_type = other DNA
ttcagatgcgtctttttcatcttaatcattccccgtattcctggtactggaatgtcagattcagaccccaggaag

SEQ ID NO: 58521 - DNA, 75 bp, synthetic construct
  source 1..75: mol_type = other DNA
aaaagcagccaggagtgccctgcaaacacaggaaatatcacagataagtgttttaatcatcgctgcattctggaa

SEQ ID NO: 58522 - DNA, 75 bp, synthetic construct
  source 1..75: mol_type = other DNA
gtcgttttgaagtggacgttagaccgcgcggaacctcaggaagaaggattcgacgcaaatttgacagaaaggcgg

SEQ ID NO: 58523 - DNA, 75 bp, synthetic construct
  source 1..75: mol_type = other DNA
tgccggattcatacgatgctccggatccgcgcattaaacagctggcgcgccgcagtacagtgacgccgggtgggg

SEQ ID NO: 58524 - DNA, 75 bp, synthetic construct
  source 1..75: mol_type = other DNA
ctgagataaacaggatcttatctataaagataccacaggaagcaggtttaaaaatacttaaacgaatgggagtgg

SEQ ID NO: 58525 - DNA, 75 bp, synthetic construct
  source 1..75: mol_type = other DNA
gatcggtcttaacaagggagaggcccaccatgcgctcaaaaatgcgctccgtatcgggaggcagggggaaattcg

SEQ ID NO: 58526 - DNA, 75 bp, synthetic construct
  source 1..75: mol_type = other DNA
gtttcgttttgcgggaaacaacagcacccaggtaacaccggttctggatggcgtggacggaaaaccgttcatgct

SEQ ID NO: 58527 - DNA, 75 bp, synthetic construct
  source 1..75: mol_type = other DNA
gtaggaaaaacctggcgggaagcgaagcgccagcatgacgaaacaatttccggctctaaagccacactcacggat

SEQ ID NO: 58528 - DNA, 75 bp, synthetic construct
  source 1..75: mol_type = other DNA
atgtccgattcgtcctggttgcgcagcgtgaataataaagggatttatactggcggccaggtaaaaggtggaact

SEQ ID NO: 58529 - DNA, 75 bp, synthetic construct
  source 1..75: mol_type = other DNA
tcgggtggggcggcgacttttgatgcagtcacgacggctatggcgtctgctgcccctgctcttggagcaatggct

SEQ ID NO: 58530 - DNA, 75 bp, synthetic construct
  source 1..75: mol_type = other DNA
acagcaacggaatttaaccgcttctcacaatttgcttctttttcatcgtctagtgcgccttcggtcaccgcacca

SEQ ID NO: 58531 - DNA, 75 bp, synthetic construct
  source 1..75: mol_type = other DNA
aagaaagccaacatgatgatctacttgattgtcttaaaacactttatccagatgaaccgggtttaaccgtggcaa

SEQ ID NO: 58532 - DNA, 75 bp, synthetic construct
  source 1..75: mol_type = other DNA
ctcctcagatatgaatatctgggatggcgaaaagggcgttcgcaatacgctcgtgaatgaaatcattcgccttgc

SEQ ID NO: 58533 - DNA, 75 bp, synthetic construct
  source 1..75: mol_type = other DNA
agaaaatgcagaaataattttagatattgatactccggacgactttattacagcgcaaaaaaggtatactaaaat

SEQ ID NO: 58534 - DNA, 75 bp, synthetic construct
  source 1..75: mol_type = other DNA
atgacgactgttaatagtaatgacccgcacgttgccaaaactggcgatgaaaaaagtgaaaaaaaacgcctgact

SEQ ID NO: 58535 - DNA, 75 bp, synthetic construct
  source 1..75: mol_type = other DNA
cggccagcatggtgttcgccgtgagctccgcgcatgctgggttcaccccgagtggcaccaccggcaccaccaaac

SEQ ID NO: 58536 - DNA, 75 bp, synthetic construct
  source 1..75: mol_type = other DNA
tggctaatcagcgaatgaccgggagtaatgcgcggtggaaatggacaacagattacaaccgtcgctcgatagcgg

SEQ ID NO: 58537 - DNA, 75 bp, synthetic construct
  source 1..75: mol_type = other DNA
aacgacagagcatgttctgacgttactatgttgctttgcgacggaatacaacaacgttgccagcgccgactacat

SEQ ID NO: 58538 - DNA, 75 bp, synthetic construct
  source 1..75: mol_type = other DNA
ttcttggctcattcaacgctaaccagtcatacactgtcggcactacgtacacacaatccgaagtcgcagctctcg

SEQ ID NO: 58539 - DNA, 75 bp, synthetic construct
  source 1..75: mol_type = other DNA
gcgaaatcatcttagaaatggctaaacgctactttgagttaacgccgggtgtgagaattgaagagtggtttaaaa

SEQ ID NO: 58540 - DNA, 75 bp, synthetic construct
  source 1..75: mol_type = other DNA
cccgccgagcggcagtggaaattaaaaagtttgagaaacgtgatctggcacaggcggttattaatgctgcctatc

SEQ ID NO: 58541 - DNA, 75 bp, synthetic construct
  source 1..75: mol_type = other DNA
agactgcatcggcaaactccgcgacagcagccaaaaaatcagaaaccaacgcgaaaaatagcgagacagccgcaa

SEQ ID NO: 58542 - DNA, 75 bp, synthetic construct
  source 1..75: mol_type = other DNA
agatgcgtcttttttatctgaaccactctccgtactcctggcactggaatgtcagattcagacctcaggaagccg

SEQ ID NO: 58543 - DNA, 75 bp, synthetic construct
  source 1..75: mol_type = other DNA
ggttttcatttaaccagggacgggcagcgactgttcactgaacgttatatcagaacactcagtgagttattagcg

SEQ ID NO: 58544 - DNA, 75 bp, synthetic construct
  source 1..75: mol_type = other DNA
cgaaaaacatcttaaccgtttcattgagggtaaatgcgtcagtgatatcaaactgatccacgatcaaatgctcaa

SEQ ID NO: 58545 - DNA, 75 bp, synthetic construct
  source 1..75: mol_type = other DNA
ggttttcatttaacccgggacggacaacggctgttcactgagcgttatatcagaaaccttaatgagctgttaccg

SEQ ID NO: 58546 - DNA, 75 bp, synthetic construct
  source 1..75: mol_type = other DNA
agatgcgccttttttatctgaatcatgctccgtattcctggcactggaatgtcagattcaggccacaggaagccg

SEQ ID NO: 58547 - DNA, 75 bp, synthetic construct
  source 1..75: mol_type = other DNA
ggaagctatgcaacaaaatcatatgtagacaataaaacaacatggaatagttattgcaatgtaatctatgatcaa

SEQ ID NO: 58548 - DNA, 75 bp, synthetic construct
  source 1..75: mol_type = other DNA
caccgtatgcaaatcaagtcgctcaagagcggctttttttgtgtctgaaatcacccatatccgtgcagtatatag

SEQ ID NO: 58549 - DNA, 75 bp, synthetic construct
  source 1..75: mol_type = other DNA
tttactgttgattattccaatggcttcggtgatgcaatggatgcttatgaggaaaacatccgcgccgctggaata

SEQ ID NO: 58550 - DNA, 75 bp, synthetic construct
  source 1..75: mol_type = other DNA
gagagtgacacttcgttaactcttgttgaagcctacggtggcagcacccaaacaaatgttccgtgcagaataatt

SEQ ID NO: 58551 - DNA, 75 bp, synthetic construct
  source 1..75: mol_type = other DNA
gactcaccaacccgcgaggcatatgacagtgcaggcattcatgccggttactgcacggaagctgaatatgcccgc

SEQ ID NO: 58552 - DNA, 75 bp, synthetic construct
  source 1..75: mol_type = other DNA
aatgtggaagaaaacagctactggctccgccgtatagcggcgggtgatgtggtacgtgttaaacaggataaggct

SEQ ID NO: 58553 - DNA, 75 bp, synthetic construct
  source 1..75: mol_type = other DNA
tcgtgccgttgcttttgtcgagagtgaagttgacgagtggattcaatcagttatcgaaacaagtcgaaataatgt

SEQ ID NO: 58554 - DNA, 75 bp, synthetic construct
  source 1..75: mol_type = other DNA
cccgttattgttagcggacacgaaaaccaagccattactcacagtataacggtcggcagtcgcataaccgttcag

SEQ ID NO: 58555 - DNA, 75 bp, synthetic construct
  source 1..75: mol_type = other DNA
ccaacgcgaccttctctgctgctaacaaagctgacctgggtgcatacacctatcaggctgaacagcgcggtaaca

SEQ ID NO: 58556 - DNA, 75 bp, synthetic construct
  source 1..75: mol_type = other DNA
gctcccttcctttcatggctggtccctgcgcgcgttcttgcagtggaattgttccctgaccagcttaccgtgacc

SEQ ID NO: 58557 - DNA, 75 bp, synthetic construct
  source 1..75: mol_type = other DNA
ccgtgtcgaccggggcttcgctcgaccttctgacgcgtgctgtgattatttcgctttttacctggcggcgtgccg

SEQ ID NO: 58558 - DNA, 75 bp, synthetic construct
  source 1..75: mol_type = other DNA
tactgttaatttaaccgaatctactggttggaataactattctaacctgtacgccaatactatcaccgtaactaa

SEQ ID NO: 58559 - DNA, 75 bp, synthetic construct
  source 1..75: mol_type = other DNA
gtgaacgaccgtacctgggatacttccaagtctaactacggctacggtattgttgctatgaactctgatggtcat

SEQ ID NO: 58560 - DNA, 75 bp, synthetic construct
  source 1..75: mol_type = other DNA
cttggtcagctgtcagatcgcttgcatcacactgtcaataatcaagtgttgttggttattcgccgggaagaaaaa

SEQ ID NO: 58561 - DNA, 75 bp, synthetic construct
  source 1..75: mol_type = other DNA
ggatattaccaaaaatgcaacgtatggcgttgagatagaaagtctggtgctggagataaatgcaccggcatcatc

SEQ ID NO: 58562 - DNA, 75 bp, synthetic construct
  source 1..75: mol_type = other DNA
gttaccaggtgaagcgcattaccgtgaagccgggcgaaggcctgtcggtacagatgcatcaccatcgtgccgagc

SEQ ID NO: 58563 - DNA, 75 bp, synthetic construct
  source 1..75: mol_type = other DNA
gaatatcggcagcatatggcacaacgaagatctatactacagatactagagcaagatggctacatggtgggggat

SEQ ID NO: 58564 - DNA, 75 bp, synthetic construct
  source 1..75: mol_type = other DNA
gggtgacgcggacgaatcatgcggtgagcgacctgacgggccgtccgctgatgctctttaacagtgaaggtaaaa

SEQ ID NO: 58565 - DNA, 75 bp, synthetic construct
  source 1..75: mol_type = other DNA
aggtcggggaatcgacggtaatcaggctgtcgaaggatggcatcaccatcgtgggcggttctgttttcatcaact

SEQ ID NO: 58566 - DNA, 75 bp, synthetic construct
  source 1..75: mol_type = other DNA
gtcgaagagtgcaggaccatcaaggcggagtatcaacagaaacttaaaaaactgcgaaacagcagaagtgaggct

SEQ ID NO: 58567 - DNA, 75 bp, synthetic construct
  source 1..75: mol_type = other DNA
tttcggtacagctatcactggctctcaacgccatcgagcgtcatctggaatcaacgttgctggccgtgcatttgt

SEQ ID NO: 58568 - DNA, 75 bp, synthetic construct
  source 1..75: mol_type = other DNA
gcgcgccagcttttcgatacagcttctcaggtctgtgaaattgtcgacggtgttcggcagtgtatgcagaactga

SEQ ID NO: 58569 - DNA, 75 bp, synthetic construct
  source 1..75: mol_type = other DNA
aggccgacccggcgagctgggcgaagtacggcgaacgcgacgtgactcgccgcgagcacgcccaggaactgcgca

SEQ ID NO: 58570 - DNA, 75 bp, synthetic construct
  source 1..75: mol_type = other DNA
atgcaacagcaaaaaccgctggaaggcgcacaactggtcattatgacgattgcgctgtcactggcgacattcatg

SEQ ID NO: 58571 - DNA, 75 bp, synthetic construct
  source 1..75: mol_type = other DNA
caacacagcgagaaattgatcgcgcagaaacagatttactcatcaacctgtcaacgcttacccagcgcggtctgg

SEQ ID NO: 58572 - DNA, 75 bp, synthetic construct
  source 1..75: mol_type = other DNA
tcagatccatgctgacgccttgttgatcctcactgatgcggacgcagtatatctcgactggggcaagccaaccca

SEQ ID NO: 58573 - DNA, 75 bp, synthetic construct
  source 1..75: mol_type = other DNA
atcttttcacagccatggtgaagcagttccgggctgacctggccgatgttgcgaagcagtgcaaccagggcaacc

SEQ ID NO: 58574 - DNA, 75 bp, synthetic construct
  source 1..75: mol_type = other DNA
agatccggatattgcggaagcgggttattacggtgccgcatcccgcagtagcggaaactgggtaagccatctgcg

SEQ ID NO: 58575 - DNA, 75 bp, synthetic construct
  source 1..75: mol_type = other DNA
tgactgcggtgatcatttactggaataccgtccatcttggtcatgccgtcacggagcggcggaacgaagggttgg

SEQ ID NO: 58576 - DNA, 75 bp, synthetic construct
  source 1..75: mol_type = other DNA
gactcttttaaagaaaaaccagattatgatactgctgaagaatatttgtacagcggtgagtattactggaatagt

SEQ ID NO: 58577 - DNA, 75 bp, synthetic construct
  source 1..75: mol_type = other DNA
aacgacacgttacgcgtgaccgatatcacgtatcggccgacctataccgtactgattgacagcctgagcgttgtc

SEQ ID NO: 58578 - DNA, 75 bp, synthetic construct
  source 1..75: mol_type = other DNA
cggaaaaccacatctggtttctggagcatgatgcagccggacagggagtggagttactgaagaagggggggacgt

SEQ ID NO: 58579 - DNA, 75 bp, synthetic construct
  source 1..75: mol_type = other DNA
ggtggggccagtgaaagttctgctgcgatacatgcaaccgctaaatggtctaccgcgcagttgaaaaaacatcag

SEQ ID NO: 58580 - DNA, 75 bp, synthetic construct
  source 1..75: mol_type = other DNA
tggatcaactgcaagccaacggcgtggcggcggcgtgccttaactcgacgcaaacccgcgaacagcaacttgaag

SEQ ID NO: 58581 - DNA, 75 bp, synthetic construct
  source 1..75: mol_type = other DNA
actgtacaaggacctgcttacccgtactcaggccgcactgaaggccaaccctaaaaatattctgcttgcagtggt

SEQ ID NO: 58582 - DNA, 75 bp, synthetic construct
  source 1..75: mol_type = other DNA
tgggcacgtcgtgggattatttccgaccgtctggcaacggcgattcttgtgcatgccgggagaaacgctgaattc

SEQ ID NO: 58583 - DNA, 75 bp, synthetic construct
  source 1..75: mol_type = other DNA
tacgcacagaaaactaccagcaatacctacgaattaacggttaacggcgcgtgcaatgcaagtgcatttaatcaa

SEQ ID NO: 58584 - DNA, 75 bp, synthetic construct
  source 1..75: mol_type = other DNA
ggaggtaactacaccggtaataatggcacgctgctcattaacacagtgctggatgatagctcttctgcaaccgac

SEQ ID NO: 58585 - DNA, 75 bp, synthetic construct
  source 1..75: mol_type = other DNA
agttatctttactcacaacatagattaattggtgtagtaggagttaaagatttagtagttgttgaaactaaagat

SEQ ID NO: 58586 - DNA, 75 bp, synthetic construct
  source 1..75: mol_type = other DNA
gcccgccattgcgcttgccgctattgccgcctgcaataataatccggatcataaccctttactgttagtgctggc

SEQ ID NO: 58587 - DNA, 75 bp, synthetic construct
  source 1..75: mol_type = other DNA
ggagtggtgatggtggactcaccaccgctgaacgtcagcgtctgaaagagctggaacgtgaaaatcgtgaactgc

SEQ ID NO: 58588 - DNA, 75 bp, synthetic construct
  source 1..75: mol_type = other DNA
acgttgccggcatcacggcatcgcagactaacagagaaggtggcgcttctgaggtggctacaatgatgcacgcag

SEQ ID NO: 58589 - DNA, 75 bp, synthetic construct
  source 1..75: mol_type = other DNA
gctggcggcgtttgatctcgccttcaagtgccgaaacgataaattgccctgtactttcgccatcttcctttaaat

SEQ ID NO: 58590 - DNA, 75 bp, synthetic construct
  source 1..75: mol_type = other DNA
tacaatccgagcaatatgaatatgtcataacccttctaatcctttcccgaaaaacaactgtatggcctccttttc

SEQ ID NO: 58591 - DNA, 75 bp, synthetic construct
  source 1..75: mol_type = other DNA
gtgtcagacacactccccgggacaacgcttcccgacgacaataacgaccgcccctggtggggactgccctgcacc

SEQ ID NO: 58592 - DNA, 75 bp, synthetic construct
  source 1..75: mol_type = other DNA
ggagcgcgtggcggcaaagcaggtgttgtcggaaatgaccgtagcggacatccgcaataatccggtgattgccta

SEQ ID NO: 58593 - DNA, 75 bp, synthetic construct
  source 1..75: mol_type = other DNA
gtgtcagacacactctccgggacaatgcttcccgacgacaatcacgaccgcccctggtgggggctgccctgcacc

SEQ ID NO: 58594 - DNA, 75 bp, synthetic construct
  source 1..75: mol_type = other DNA
agctggaagatatctacggtgagaaagcggctgccacgctgtttgacgtcatgaacacccgtgcctttttccgtt

SEQ ID NO: 58595 - DNA, 75 bp, synthetic construct
  source 1..75: mol_type = other DNA
tttgatttttgtggctaccttgaggcattacctgacaccaacggcatgtttatggggaacgccaatattgtcccg

SEQ ID NO: 58596 - DNA, 75 bp, synthetic construct
  source 1..75: mol_type = other DNA
ttcctgaatttaagaaaaattacctttcccctgtttactggtctacatggttccttttgggaatgattgcaggta

SEQ ID NO: 58597 - DNA, 75 bp, synthetic construct
  source 1..75: mol_type = other DNA
caataacccgatgcgcttcactgaccgcagcggcggtgtgtcacgccgccgggtgattattcatttcccggagca

SEQ ID NO: 58598 - DNA, 75 bp, synthetic construct
  source 1..75: mol_type = other DNA
gaatttaccgccatgagcgccagcgacaaggcgatgcgggtgcatgagcattacggcgaagcgctggctgtggac

SEQ ID NO: 58599 - DNA, 75 bp, synthetic construct
  source 1..75: mol_type = other DNA
gccgacaccctcggcagctgtggttacgtttatatggctgtttatccgacactggcacccgcaaccacctcataa

SEQ ID NO: 58600 - DNA, 75 bp, synthetic construct
  source 1..75: mol_type = other DNA
gttcgttcaagcagggcaatctgtgagctggatgatcgtgtgtatccacgaaaatactggctacatggtctgaac

SEQ ID NO: 58601 - DNA, 75 bp, synthetic construct
  source 1..75: mol_type = other DNA
atcgatctctccggaaagcgtgcttcagcgcagcgtaaagcgaaagatcgtattgacttagagcgtcattacggt

SEQ ID NO: 58602 - DNA, 75 bp, synthetic construct
  source 1..75: mol_type = other DNA
agctgacgccctcggggcgcggcaggcggcctgcgggcgatgcggtgccggttgacgcaagcgcccacgacgagc

SEQ ID NO: 58603 - DNA, 75 bp, synthetic construct
  source 1..75: mol_type = other DNA
gtcatgatatttgcgatcattttgcattggctgccgggcggtggctggaatggtggagcgcttaaattcatgata

SEQ ID NO: 58604 - DNA, 75 bp, synthetic construct
  source 1..75: mol_type = other DNA
ttaccttgccgaccgcgccggtatcagagggcagttcagcgacgcggatgcataccatctggaccaggcttttcc

SEQ ID NO: 58605 - DNA, 75 bp, synthetic construct
  source 1..75: mol_type = other DNA
cgaaaatgaaatcacaggtggtcgtcagctgactgacaatccgaaagaggtggccaggatgctgaaaaaagatgg

SEQ ID NO: 58606 - DNA, 75 bp, synthetic construct
  source 1..75: mol_type = other DNA
gcagttctgatcggtgggatgattggtgccggtgtggtgcttgggcgaaatgctctgcgcggttacaaagccaaa

SEQ ID NO: 58607 - DNA, 75 bp, synthetic construct
  source 1..75: mol_type = other DNA
agaggccggttcagcgacgcggattcgtaccacctggaccaggcctttccgctgctgatgaaacaactggagctc

SEQ ID NO: 58608 - DNA, 75 bp, synthetic construct
  source 1..75: mol_type = other DNA
aaggcagggtggtacgccgggagggcgatccgctggaagtggcgcagtggctgcaggcctgtcatgatgccggaa

SEQ ID NO: 58609 - DNA, 75 bp, synthetic construct
  source 1..75: mol_type = other DNA
cggcgaaaattaccaccccgcagatccagcaaactcaggacgtgactcaggaaaccatgttcctgctgggaagcg

SEQ ID NO: 58610 - DNA, 75 bp, synthetic construct
  source 1..75: mol_type = other DNA
acggcatgacgtatcaggcctgccgtggggattttgtggtacgtctcgacggcagcacctgtctgcagttatgga

SEQ ID NO: 58611 - DNA, 75 bp, synthetic construct
  source 1..75: mol_type = other DNA
gacctgtgaagccgacaccctcggctcctgtggttacgtttatctggctgtttatccgacgcccgaaacgaaaac

SEQ ID NO: 58612 - DNA, 75 bp, synthetic construct
  source 1..75: mol_type = other DNA
agcaatttcaggaagcgctttcacgtcagtggcagcgttatggcttaaattctgcggctgaaatgactcctcgcc

SEQ ID NO: 58613 - DNA, 75 bp, synthetic construct
  source 1..75: mol_type = other DNA
cgcacgcagtaccgcacctgactgggcgtacaacgataaagagatcaacaaggtctttatgaccctgaagcagcg

SEQ ID NO: 58614 - DNA, 75 bp, synthetic construct
  source 1..75: mol_type = other DNA
tgtccatcgtgacggtcaggcctcgatcaccatctggctgggccaggcatccatgcttatccagcccggacgcga

SEQ ID NO: 58615 - DNA, 75 bp, synthetic construct
  source 1..75: mol_type = other DNA
ggaataacaccgtggcgggtgatgtgacggcaggtgaggatatggctgtcgaacgtggcgtaaaactgacccgac

SEQ ID NO: 58616 - DNA, 75 bp, synthetic construct
  source 1..75: mol_type = other DNA
aagaaagtcaattttgctgtgatggccgtcggggacggcggcggaaaactgcccgaaccggacgccagccagaca

SEQ ID NO: 58617 - DNA, 75 bp, synthetic construct
  source 1..75: mol_type = other DNA
tccggacatccagcagcagatgcagcgtcgtgaagaggtgaacattaatgtgcaccgggagcgcggggaggatgt

SEQ ID NO: 58618 - DNA, 75 bp, synthetic construct
  source 1..75: mol_type = other DNA
tcgagatgagcggcgtgctgacaaaaggatcgccgaccttaaccattctgaatgtgattggtgacggtgctttct

SEQ ID NO: 58619 - DNA, 75 bp, synthetic construct
  source 1..75: mol_type = other DNA
tggtggatgatccgcgccctcctgttgaactggagcgcatcgaggaggcagggaacaagacggaaaaccataccg

SEQ ID NO: 58620 - DNA, 75 bp, synthetic construct
  source 1..75: mol_type = other DNA
gccaatatcatactttactgcctgtttatttttttctggatcctagttggtctggttttatgggtaaaaataagc

SEQ ID NO: 58621 - DNA, 75 bp, synthetic construct
  source 1..75: mol_type = other DNA
gtaaaggacaagcatcgtcattttattatggtcagcctcagggtgaagtgtgtctaatcaacagggttttcggtc

SEQ ID NO: 58622 - DNA, 75 bp, synthetic construct
  source 1..75: mol_type = other DNA
atgaacacccgtgcctttttccgttctcccagccataagattgcagagttcgctgccggtgaaattggtgagaaa

SEQ ID NO: 58623 - DNA, 75 bp, synthetic construct
  source 1..75: mol_type = other DNA
ccatttttgcctgggtgctggcaatcctgttgtgtctgacagggaccctggcgattttttcattgcccgttgaac

SEQ ID NO: 58624 - DNA, 75 bp, synthetic construct
  source 1..75: mol_type = other DNA
caattaatggatttgcggaaccgctttctcaggtataaaggtggtgattatatcccgttccttgcaaacttcccg

SEQ ID NO: 58625 - DNA, 75 bp, synthetic construct
  source 1..75: mol_type = other DNA
gtgaccaaagactacacctttaaacgccccggctgggccggacgttttgatcaggaaggccagcaccaggattac

SEQ ID NO: 58626 - DNA, 75 bp, synthetic construct
  source 1..75: mol_type = other DNA
ctctacgttttccggggctggcaccacaggcccgttaccggcttcgtgttgttgaccatccggatattcagctgg

SEQ ID NO: 58627 - DNA, 75 bp, synthetic construct
  source 1..75: mol_type = other DNA
ttacaagactttcagacagagttataaatcatttacactcgtacaaagggataaatcgtatatacatgactggtg

SEQ ID NO: 58628 - DNA, 75 bp, synthetic construct
  source 1..75: mol_type = other DNA
acgaagcaaaagaaattttctttaactactgcaattactcatatcacgaaataaaagatgaggaggaagaacaaa

SEQ ID NO: 58629 - DNA, 75 bp, synthetic construct
  source 1..75: mol_type = other DNA
cgccggtatcagaggccggttcagcgatgcagatgcataccacctggaccaggcctttccgctgctgatgaaaca

SEQ ID NO: 58630 - DNA, 75 bp, synthetic construct
  source 1..75: mol_type = other DNA
ttgttcggtagccctatcgacattcttaaccgtgcagctcccgttgcgttactggcgattggtatgacgctggtg

SEQ ID NO: 58631 - DNA, 75 bp, synthetic construct
  source 1..75: mol_type = other DNA
atattaacaaatctggtgtgctgacagaggctgccattgacgagccacgatttgaacgtgatggcctgcttattg

SEQ ID NO: 58632 - DNA, 75 bp, synthetic construct
  source 1..75: mol_type = other DNA
tgccggagcggatgattatctgagtaagccgtttggcattggcgaattgcaggcccgtctgcgcgtcgctttacg

SEQ ID NO: 58633 - DNA, 75 bp, synthetic construct
  source 1..75: mol_type = other DNA
cataaaaagaagaatactcgttaatccagcgacacatcctgtcggcgtgagtgtgtcagaacagacgatcccaca

SEQ ID NO: 58634 - DNA, 75 bp, synthetic construct
  source 1..75: mol_type = other DNA
ggacgggcttcgcagcagccgggagtatgatgagaagggaaggctgacggcggagacctcgcgcagcggtgagac

SEQ ID NO: 58635 - DNA, 75 bp, synthetic construct
  source 1..75: mol_type = other DNA
ctataccgcgccgaaagaaggtctgatcgacccgaatcattccgtgcagattggtattcgtaccgagtttgataa

SEQ ID NO: 58636 - DNA, 75 bp, synthetic construct
  source 1..75: mol_type = other DNA
aacgacgccaaaggcaaaactctgaaagcggcgtcgattgccgaggccatcatcaacaccatcgcaccgctggag

SEQ ID NO: 58637 - DNA, 75 bp, synthetic construct
  source 1..75: mol_type = other DNA
attagaagacccagatggagcgaataaatacccaaaacttcagatagcaagatggagagacagttatgatgtaag

SEQ ID NO: 58638 - DNA, 75 bp, synthetic construct
  source 1..75: mol_type = other DNA
acagcctgaaccggcgtgaggtgctgcatacagaaggcggggccgggctgaaacgggtggtgaaaaaagaactgg

SEQ ID NO: 58639 - DNA, 75 bp, synthetic construct
  source 1..75: mol_type = other DNA
gattacctatgctaacccggtgaacccgctgctgggtgcgaaggtgctgccgggcgagacggaccttgcgctgcc

SEQ ID NO: 58640 - DNA, 75 bp, synthetic construct
  source 1..75: mol_type = other DNA
gtcttagggccggagaaacgcagacggcgtaccacacaggaaaagatcgcaattgttcagcagagctttgaaccg

SEQ ID NO: 58641 - DNA, 75 bp, synthetic construct
  source 1..75: mol_type = other DNA
tttcagatgacctacattccgggtacctacaacaatggcaatgtgtactttgcctggatgcgctttcagttttga

SEQ ID NO: 58642 - DNA, 75 bp, synthetic construct
  source 1..75: mol_type = other DNA
tcctgatggtcttcgttgtcgtttgcgttttgaaaaatacgatgggtcggtttatacatttttaggagatgctta

SEQ ID NO: 58643 - DNA, 75 bp, synthetic construct
  source 1..75: mol_type = other DNA
agatggaacagcaactgccacccgggatcagtgaatccggtgaagtggtggatatggccgcttatgaggcatggc

SEQ ID NO: 58644 - DNA, 75 bp, synthetic construct
  source 1..75: mol_type = other DNA
tggccttgatgatcggggtgtcgatctgggatctgctctcaccggccaaccgccgctgcgaactaccacccaaac

SEQ ID NO: 58645 - DNA, 75 bp, synthetic construct
  source 1..75: mol_type = other DNA
gggaactctgtttttctgccggtttaacacggtgcgataacggtttatccccgctggcgcggggaactctgtttc

SEQ ID NO: 58646 - DNA, 75 bp, synthetic construct
  source 1..75: mol_type = other DNA
tgggtgaggattacacgccgtcagacatttttgacagtgtgcctttccggggtgcgatgatgagttctgatgaga

SEQ ID NO: 58647 - DNA, 75 bp, synthetic construct
  source 1..75: mol_type = other DNA
ctggcgacccggttgaatggggtgaaaaagccattgcacattatgaaaagctgggaattgatccacagagtaaaa

SEQ ID NO: 58648 - DNA, 75 bp, synthetic construct
  source 1..75: mol_type = other DNA
acggcaaaaccttccggatgaacgctgcccaggtactgcatgataaatatatgatctggtgcggagagcagctat

SEQ ID NO: 58649 - DNA, 75 bp, synthetic construct
  source 1..75: mol_type = other DNA
cagcgaacaaacatgttcgtaaatagttttaatcctgatgcctggaataaaagcggtggtatatctgtaacatca

SEQ ID NO: 58650 - DNA, 75 bp, synthetic construct
  source 1..75: mol_type = other DNA
tgttctttctcacgttagaaacatatttcggggtgttttcctttaaaagaaaaggaaaaataaatggcaaaaaga

SEQ ID NO: 58651 - DNA, 75 bp, synthetic construct
  source 1..75: mol_type = other DNA
ccgctggcgcggggaactcgccgtctgcctccagcccagccctggatatttcggtttatccccgctggcgcgggg

SEQ ID NO: 58652 - DNA, 75 bp, synthetic construct
  source 1..75: mol_type = other DNA
ggcggtttatccccgctggcgcggggaactcgggataaatcggcccgcattggcgggcctttgcggtttatcccc

SEQ ID NO: 58653 - DNA, 75 bp, synthetic construct
  source 1..75: mol_type = other DNA
tgctgaaagacggtgcaggaaaaccgatacagaactgcaccattcagctcaaagcaaaacgtaacagcaccacgg

SEQ ID NO: 58654 - DNA, 75 bp, synthetic construct
  source 1..75: mol_type = other DNA
gaactgaatccccgccatcagcataccgtgacactgtatgcgaaggggctgacctgtgaagccgacaccctcggc

SEQ ID NO: 58655 - DNA, 75 bp, synthetic construct
  source 1..75: mol_type = other DNA
tccaagctgctgccgctgttcgcagtcgtggctttgctggcgaatgcactgggctggctgagtcatcggcaatgg

SEQ ID NO: 58656 - DNA, 75 bp, synthetic construct
  source 1..75: mol_type = other DNA
aagctttcctggatatggtggcatggtcagagggaacggataacgggcgacaactgacacgtaaccacggttatg

SEQ ID NO: 58657 - DNA, 75 bp, synthetic construct
  source 1..75: mol_type = other DNA
gtttatccccgctggcgcggggaacacatcaacgttatcgattacaactgacagggagccggtttatccccgctg

SEQ ID NO: 58658 - DNA, 75 bp, synthetic construct
  source 1..75: mol_type = other DNA
tggtggaagaggtggcacgcaacgctgaagccgcctctcagagcgcagcggcagcaaagaaatcagaaacagcag

SEQ ID NO: 58659 - DNA, 75 bp, synthetic construct
  source 1..75: mol_type = other DNA
aatgaaaactggcgtgcttttgctggttttggctatgctgatggtcaattcagcgaggggaaagggattgttcgt

SEQ ID NO: 58660 - DNA, 75 bp, synthetic construct
  source 1..75: mol_type = other DNA
tggtgactcactgttgattaactggaactgtgcagcctcgaaatccccaccgaagacccctgatgaaaagcagga

SEQ ID NO: 58661 - DNA, 75 bp, synthetic construct
  source 1..75: mol_type = other DNA
aagctgcctggtgcagtggtggatcgggataccaaatcccctcgataccgtgacccggctaacccggctaatacg

SEQ ID NO: 58662 - DNA, 75 bp, synthetic construct
  source 1..75: mol_type = other DNA
gataagcgcaaagtcgcgttgacggcggcgggagaatgttttctccaggacgcgctggcaatcctcgaacaagcg

SEQ ID NO: 58663 - DNA, 75 bp, synthetic construct
  source 1..75: mol_type = other DNA
ttgaaatttttcatgcggtaatgaccgccggaagcctgactgaggcagcacacctgctacacacctcacagccaa

SEQ ID NO: 58664 - DNA, 75 bp, synthetic construct
  source 1..75: mol_type = other DNA
tcgctgctttcttcgttactgtcattggttctttcatctggtcagccaaccactactacagcaaatatcagtacg

SEQ ID NO: 58665 - DNA, 75 bp, synthetic construct
  source 1..75: mol_type = other DNA
tcatatctgaagaaagcgtatgtctcacttcgtcattaacacctttgactgctgatctggcaggtacagtatgta

SEQ ID NO: 58666 - DNA, 75 bp, synthetic construct
  source 1..75: mol_type = other DNA
atggcagtacagatttcaggcgtgctgaaagacggtgcaggaaaaccaatacagaactgtactattcagctcaaa

SEQ ID NO: 58667 - DNA, 75 bp, synthetic construct
  source 1..75: mol_type = other DNA
atgaagctgagatataagctggttattgttgccttctttgttaccgtcatcggttcttttatctggtctgccggg

SEQ ID NO: 58668 - DNA, 75 bp, synthetic construct
  source 1..75: mol_type = other DNA
aaagagtcggcctacggtattggctgcaccacctgggaagttatctggcgtatcgttcttccgttcaccaaaaat

SEQ ID NO: 58669 - DNA, 75 bp, synthetic construct
  source 1..75: mol_type = other DNA
atgaccttggattcgacgcctctcgtgtcgtgccaacagctaatgaaaaccgtcctcgtaatattgcctttaatt

SEQ ID NO: 58670 - DNA, 75 bp, synthetic construct
  source 1..75: mol_type = other DNA
gagcgaatgccggatgatggtcagcacgtaattattttatgtgatggcgcattcgttctttatgcgcaatatcga

SEQ ID NO: 58671 - DNA, 75 bp, synthetic construct
  source 1..75: mol_type = other DNA
ctgaatacggtactgatcgtgtaattgatgataattggcatgatggtgatgtattcactttaaatattgctaatt

SEQ ID NO: 58672 - DNA, 75 bp, synthetic construct
  source 1..75: mol_type = other DNA
tattcgtggctgggatgacggacgtggtgtggatgccgggcgacaattattatcttcacagggggatgcaataag

SEQ ID NO: 58673 - DNA, 75 bp, synthetic construct
  source 1..75: mol_type = other DNA
gccatttcctgctctacgtacgttattccgccgccggatggcagggtgacatggatttaccgccgcagccgctga

SEQ ID NO: 58674 - DNA, 75 bp, synthetic construct
  source 1..75: mol_type = other DNA
gagctggatgcggccggtgagctgggaaactgggaatatgatctcgatacctacaatcactgtattgcggtgctg

SEQ ID NO: 58675 - DNA, 75 bp, synthetic construct
  source 1..75: mol_type = other DNA
cagtatccctgaaggaatgataatactcgtcgatcctgaagtagagccgcgtaacgggaaactggtagttgcaaa

SEQ ID NO: 58676 - DNA, 75 bp, synthetic construct
  source 1..75: mol_type = other DNA
gataaagaagtacggtccggattactccactttttcatcaagccaatccgcccaccactgcatcatttctctgcg

SEQ ID NO: 58677 - DNA, 75 bp, synthetic construct
  source 1..75: mol_type = other DNA
accgctggaatattatattaataatgtcagtgggaccctcaccctgcttgaagttatgaagcaagcaagtgttta

SEQ ID NO: 58678 - DNA, 75 bp, synthetic construct
  source 1..75: mol_type = other DNA
ctggctatatgttcgctcgtatgtcggcacacggtcagatcgagttcactgctgatgctatcccgcatctcgtaa

SEQ ID NO: 58679 - DNA, 75 bp, synthetic construct
  source 1..75: mol_type = other DNA
ctgaatatcgccgccgattatgcggaatatgtggcagaggctcgttacagaagaaaatttcctgaggatgtaagc

SEQ ID NO: 58680 - DNA, 75 bp, synthetic construct
  source 1..75: mol_type = other DNA
ccgaataactcacgagcaatcattaataacactgctttgctgattcgtcagaatgctggctctctggaagtcttc

SEQ ID NO: 58681 - DNA, 75 bp, synthetic construct
  source 1..75: mol_type = other DNA
ctttctgcagccccggcccgtaccatttaaagagtcacttctggatgcagtaaaaaccggtgaaaatgcagtcat

SEQ ID NO: 58682 - DNA, 75 bp, synthetic construct
  source 1..75: mol_type = other DNA
attacgacaaatatccaattattaataaaacgttaagtatttttgataatataaactttaccaaagtagcttctg

SEQ ID NO: 58683 - DNA, 75 bp, synthetic construct
  source 1..75: mol_type = other DNA
ggggaagtgacaccacaggaacagaaagaggcagagacccgtttaatgatgctgaatgaccgacgaaaagacaga

SEQ ID NO: 58684 - DNA, 75 bp, synthetic construct
  source 1..75: mol_type = other DNA
tctaaaggcagcgctggccgcattcgataacctggacgagaacctgaaaaatcattggctacttgagtctgcaaa

SEQ ID NO: 58685 - DNA, 75 bp, synthetic construct
  source 1..75: mol_type = other DNA
gtgcttacagcagcttttctctgctttgcatggacagcattctgggttcttttccttttacattatttcccaaaa

SEQ ID NO: 58686 - DNA, 75 bp, synthetic construct
  source 1..75: mol_type = other DNA
ttttattcatcctgaataaacatgaacgggcatacagatgccagtaccccgtatatatttttttagctatagtat

SEQ ID NO: 58687 - DNA, 75 bp, synthetic construct
  source 1..75: mol_type = other DNA
acctattttttattatagtaataatgtttctggtacactacagctaattaacctcgccatcaggaataacgtaac

SEQ ID NO: 58688 - DNA, 75 bp, synthetic construct
  source 1..75: mol_type = other DNA
gaatgatgattgcgctgcccgtcctgttcctgctcgtgcagctgaacggctgcgccggtacgcggacagtttacg

SEQ ID NO: 58689 - DNA, 75 bp, synthetic construct
  source 1..75: mol_type = other DNA
ctggatatattgggtcccatactgttctgtcattattggagcagaatgaagacgttgtcatcatagataattttt

SEQ ID NO: 58690 - DNA, 75 bp, synthetic construct
  source 1..75: mol_type = other DNA
gtgcctgctgccgctgctgaccggttgcggaagtacgcgaacagtttacgtgccggttccggcggtaccgctgcc

SEQ ID NO: 58691 - DNA, 75 bp, synthetic construct
  source 1..75: mol_type = other DNA
cctatgagcagatgtacctgctaaatcagcagttgatctgcaacgctgaccagctcaaacatgccgttatcacag

SEQ ID NO: 58692 - DNA, 75 bp, synthetic construct
  source 1..75: mol_type = other DNA
gcaacaagactaccgacgatctgattatggcgaagcgtatcgctgactttgaagaccagtatcaggctgacgcgg

SEQ ID NO: 58693 - DNA, 75 bp, synthetic construct
  source 1..75: mol_type = other DNA
gtgtggcgtttgtcgttcgctggctgctgtgggtcgtcaggtttgtggttatctggccgctggcgacaatggccc

SEQ ID NO: 58694 - DNA, 75 bp, synthetic construct
  source 1..75: mol_type = other DNA
ttatccgctggcgctggggaatctggttatcgccgcaatgaatctggccgctgatatcggcgtgccggtggtgaa

SEQ ID NO: 58695 - DNA, 75 bp, synthetic construct
  source 1..75: mol_type = other DNA
cagaaatgggttgacgactacggcgaagacagcgacttcgtgaaggtccgcgtgcgggggatcttccctgacgcg

SEQ ID NO: 58696 - DNA, 75 bp, synthetic construct
  source 1..75: mol_type = other DNA
tttactggtggtgtaccacgctggaaggcatgcgggatttaatcaagtcccagccagtatatgagattcagtatt

SEQ ID NO: 58697 - DNA, 75 bp, synthetic construct
  source 1..75: mol_type = other DNA
caatgaaacccatccgcatagtgcgttaagttatctctcaccaagggaatatcgacgtcagcgggtaacgtcaac

SEQ ID NO: 58698 - DNA, 75 bp, synthetic construct
  source 1..75: mol_type = other DNA
catcccacgagatttaaaggttaacgaaacaaacgctgaatatctggtgcgtaaatttgctgaagcggaggccaa

SEQ ID NO: 58699 - DNA, 75 bp, synthetic construct
  source 1..75: mol_type = other DNA
cagaaagcgattgaatcaattaagcaggctgattcggctgttaagttggcacacgagaagttttcggcgctggca

SEQ ID NO: 58700 - DNA, 75 bp, synthetic construct
  source 1..75: mol_type = other DNA
agaagctggcggaatatctggtgctgtataacagcaaaagaccccacaaggcgctcgcactaatgacgcccgtgg

SEQ ID NO: 58701 - DNA, 75 bp, synthetic construct
  source 1..75: mol_type = other DNA
aacaaggcaatgacggaacgtattataagaatagtttaaatcaacatatcaattatgttagaaaaaaagcacatg

SEQ ID NO: 58702 - DNA, 75 bp, synthetic construct
  source 1..75: mol_type = other DNA
atgataggtccagataaatttgattctatagatagcaccgcatatgacgccttaaataaaataaatagccaatct

SEQ ID NO: 58703 - DNA, 75 bp, synthetic construct
  source 1..75: mol_type = other DNA
tcatgaaattgaacggtatctgtatgccacttttaaatatgaattaattttagaagaaaaactatatctctctat

SEQ ID NO: 58704 - DNA, 75 bp, synthetic construct
  source 1..75: mol_type = other DNA
ccctggatttctccgcagcaggaagcgtcgttactgttctggaagcacaggcttacagccgcaaagttgaagccc

SEQ ID NO: 58705 - DNA, 75 bp, synthetic construct
  source 1..75: mol_type = other DNA
tgctggaacaacaagaaggaaaccgaacccgcactgctttaatgctgggcatcagtcgccgtgcattgatgtata

SEQ ID NO: 58706 - DNA, 75 bp, synthetic construct
  source 1..75: mol_type = other DNA
gcctgccgctggcgctcatcagcgaagacggcaatacggcgtggcgcggggagtatgatgaatggggcaaccagc

SEQ ID NO: 58707 - DNA, 75 bp, synthetic construct
  source 1..75: mol_type = other DNA
gtcggcaatatgcccgccagagtcattggtgtggcggaagaaaaacagtcgatgtttggtagcagtaaagtgctg

SEQ ID NO: 58708 - DNA, 75 bp, synthetic construct
  source 1..75: mol_type = other DNA
gtaaccggcatcggggcatccattaccgacgaggacatcgagaatgccgaagatgaagcgccgcccggcatcggc

SEQ ID NO: 58709 - DNA, 75 bp, synthetic construct
  source 1..75: mol_type = other DNA
cgtcaggtgctcgaccatctgatgccgcatctgctaagtgatgtctgtgcgcgtgaagacgctgctgtcacgctg

SEQ ID NO: 58710 - DNA, 75 bp, synthetic construct
  source 1..75: mol_type = other DNA
cccgacggtggagcggcaattacagcggattattttctctctcgagcgagaagcccgggaaaaagcggacaaagt

SEQ ID NO: 58711 - DNA, 75 bp, synthetic construct
  source 1..75: mol_type = other DNA
atgaaaatgatttttaccggtaaggtcagcggagaaaaaaccgtgctgactgtcggaggtcgtcatacagttaaa

SEQ ID NO: 58712 - DNA, 75 bp, synthetic construct
  source 1..75: mol_type = other DNA
gataaagatctcgccgctgcgttgctcgccgagcagattaatgccgatgggctggtgatcctcaccgatgctgat

SEQ ID NO: 58713 - DNA, 75 bp, synthetic construct
  source 1..75: mol_type = other DNA
gaaaacagacagcgcaaaaagcaggggctggataccctgggtatggatgaactgatagcgaaagcctggcgggca

SEQ ID NO: 58714 - DNA, 75 bp, synthetic construct
  source 1..75: mol_type = other DNA
cagcgccttcaaaggcgaccgctaccacaacacgaaaaatggcatcaacgccgacatcggtgccagtacggacct

SEQ ID NO: 58715 - DNA, 75 bp, synthetic construct
  source 1..75: mol_type = other DNA
actacgaacaggagaaagcgatcaatgaacgtgaagcgcagcagaggatcgaccaggcgcgcaatgatgctcttg

SEQ ID NO: 58716 - DNA, 75 bp, synthetic construct
  source 1..75: mol_type = other DNA
ttatacatcaggagttgcactttatcgataatggtaagagaaaacttacatgcaatattttgtgcaatgatggga

SEQ ID NO: 58717 - DNA, 75 bp, synthetic construct
  source 1..75: mol_type = other DNA
gcgaaaaatagcgagacagccacaaaggccagcgaaaaaaacgcaaaatccagccagacggcagcgaaaaccagt

SEQ ID NO: 58718 - DNA, 75 bp, synthetic construct
  source 1..75: mol_type = other DNA
gcgtgcgcctggctgacggacgcaccgcgtactggaatgacagcacccgccgcattgatatcacccccgcaccga

SEQ ID NO: 58719 - DNA, 75 bp, synthetic construct
  source 1..75: mol_type = other DNA
tttgaaatcactgtccggcgcgttgacccacgaatcaaacccggcggcatggaaatcagccagatggtttcccgt

SEQ ID NO: 58720 - DNA, 75 bp, synthetic construct
  source 1..75: mol_type = other DNA
ggatataaaggaaatatgcagaacttgcaggcaggggcattcgctgcaacagcaacgctggttgcatcatattcg

SEQ ID NO: 58721 - DNA, 75 bp, synthetic construct
  source 1..75: mol_type = other DNA
taccggttcaccagtacgccagaaaccgataacacctggccgattgaagtcaccgctgaagatgtcaaaggcaat

SEQ ID NO: 58722 - DNA, 75 bp, synthetic construct
  source 1..75: mol_type = other DNA
gctttgagaccggcgacgctggcgaaatatatgtcgatattaccgggatgcgcaccgataccggtgcgtcagttt

SEQ ID NO: 58723 - DNA, 75 bp, synthetic construct
  source 1..75: mol_type = other DNA
tggcaggcatcgcgagcagctatcgagattgagctgcaaaagccaaagaaaggcccacttcccggtgattatcac

SEQ ID NO: 58724 - DNA, 75 bp, synthetic construct
  source 1..75: mol_type = other DNA
gcgacaccctgtgggatcacttgttcgaagatgaaagccagcaaactgcattaccctctgcactggcgcactatt

SEQ ID NO: 58725 - DNA, 75 bp, synthetic construct
  source 1..75: mol_type = other DNA
gggaatatatcattatttaattgggtgcacgcttatcaatgtttagtcgagttatctaaagaagaaatgagcaaa

SEQ ID NO: 58726 - DNA, 75 bp, synthetic construct
  source 1..75: mol_type = other DNA
caccagcttccggtagctatttacagttattgccagtatcaggacggtgcggcccccgggcgtggtgcctggacg

SEQ ID NO: 58727 - DNA, 75 bp, synthetic construct
  source 1..75: mol_type = other DNA
ggtacccaaagatgaaattgccctgatccgtaacggtgaagagcgcggtgatatcgctgaagccatgtttcaggt

SEQ ID NO: 58728 - DNA, 75 bp, synthetic construct
  source 1..75: mol_type = other DNA
atatcgccgcctttctcgacatgctggcggtatccgaagggacggcgaatcatccgctgacgaaaaaccggggct

SEQ ID NO: 58729 - DNA, 75 bp, synthetic construct
  source 1..75: mol_type = other DNA
tgcgtgaggcagcacagaacgcgaaagatttaggtgagattaagaattacaagcgaggtgagcaagctgttgccg

SEQ ID NO: 58730 - DNA, 75 bp, synthetic construct
  source 1..75: mol_type = other DNA
ggagccacgaccatgcaagtcaacatttcaccattaacgccacgcctattgtgattggcgagaaatgctggctgg

SEQ ID NO: 58731 - DNA, 75 bp, synthetic construct
  source 1..75: mol_type = other DNA
gccgttggcgtcaatgtgctggggattattgctgttgaagcaggcgcagcaattgaagccggtgcttccgtccag

SEQ ID NO: 58732 - DNA, 75 bp, synthetic construct
  source 1..75: mol_type = other DNA
atgccggtaattaacacgcatcagaatatcgcggcctttctcgacatgctggccgtgtccgaagggacggcgaat

SEQ ID NO: 58733 - DNA, 75 bp, synthetic construct
  source 1..75: mol_type = other DNA
cttatcaccagtcgttttttgcatatccgcgccagcccggaacaggcatcaatggaattttacggcgggaagtca

SEQ ID NO: 58734 - DNA, 75 bp, synthetic construct
  source 1..75: mol_type = other DNA
tcacaaacgaaatcttccgcgttcctgcgcgccgcaagcgtaagcccgcggttaagccgtccgacatcccgacct

SEQ ID NO: 58735 - DNA, 75 bp, synthetic construct
  source 1..75: mol_type = other DNA
tgatatctccagcctgacatccagtattggcggtgatgtggctggaacctggggaatgcgtaatggatatgcctt

SEQ ID NO: 58736 - DNA, 75 bp, synthetic construct
  source 1..75: mol_type = other DNA
aattattgctggcgctgatgggatgcagttttatttccggaatacagcccgtctgggcggctgatgtgaatataa

SEQ ID NO: 58737 - DNA, 75 bp, synthetic construct
  source 1..75: mol_type = other DNA
tccctgtacgcccgcaaagtggggggaaagtccaaatcataaatctgcaatcgctattctgcagtaaaaatcagt

SEQ ID NO: 58738 - DNA, 75 bp, synthetic construct
  source 1..75: mol_type = other DNA
tgggtatcgtcaaatcgtccgacacatttcagttcatgggcgcgcaggggcattatttcggatcgcctggcaacc

SEQ ID NO: 58739 - DNA, 75 bp, synthetic construct
  source 1..75: mol_type = other DNA
tcgatctgattgagattttattttatctgaagaaaaagattcgtattatcctttttattatagctatctgtatgg

SEQ ID NO: 58740 - DNA, 75 bp, synthetic construct
  source 1..75: mol_type = other DNA
ctgcgtgccacccgcatggataacagcgacaccctgtgggatcacttgttcgaagatgaaagccagcaaactgca

SEQ ID NO: 58741 - DNA, 75 bp, synthetic construct
  source 1..75: mol_type = other DNA
ggcggtatggaccttggcgagacggcggatattggctcaaatatcctgacgcagttcggcctctccgctgaccag

SEQ ID NO: 58742 - DNA, 75 bp, synthetic construct
  source 1..75: mol_type = other DNA
agaatggcgacgcctcctcgcttgatttcgaactggaatacgtcgccagccgcccgcagttgctggaaaaactca

SEQ ID NO: 58743 - DNA, 75 bp, synthetic construct
  source 1..75: mol_type = other DNA
tcgggcagtctgcatcacagcccaactgtaaacaggaggaggctgcgggtgaacagacaaaaccgtttcaggtca

SEQ ID NO: 58744 - DNA, 75 bp, synthetic construct
  source 1..75: mol_type = other DNA
tatacatacacgcttaaagaaaacggtatgccctatgctggtgtcattgcacaggaagctctggaagcaatccca

SEQ ID NO: 58745 - DNA, 75 bp, synthetic construct
  source 1..75: mol_type = other DNA
gcattattccgcgaactgtatccggcgctaaaacaaattcaatcgaactattccggcagatgtcatgactgcggt

SEQ ID NO: 58746 - DNA, 75 bp, synthetic construct
  source 1..75: mol_type = other DNA
ggtctacatccacgcgcagaagaacatgaacaccgaggtgctgaataaccgcaccactgatgtgataaacaacca

SEQ ID NO: 58747 - DNA, 75 bp, synthetic construct
  source 1..75: mol_type = other DNA
acttcctcaacggcgacccggaccagccgattattatggggcgtacctaccaccatgaaaaccgcacacccggca

SEQ ID NO: 58748 - DNA, 75 bp, synthetic construct
  source 1..75: mol_type = other DNA
tgctgccgggcgttttttgcagcctgcgatcgggttcggcaaagagatgtcccgcgttcaggcactgacgcgaat

SEQ ID NO: 58749 - DNA, 75 bp, synthetic construct
  source 1..75: mol_type = other DNA
ctgacagcaggcattggcggcaaaaccgccctggactgggcgatgaaacagaattttcgctgtggctgctggctg

SEQ ID NO: 58750 - DNA, 75 bp, synthetic construct
  source 1..75: mol_type = other DNA
aaataacgctagataccctggaaaaacaacgtctgcaatacacagatgcgttccgtcgctcatcagacattatac

SEQ ID NO: 58751 - DNA, 75 bp, synthetic construct
  source 1..75: mol_type = other DNA
acggcaataactctttgataaaacatggtgtggtgcaaggaaataatatagtagattttgatttactacgtaatt

SEQ ID NO: 58752 - DNA, 75 bp, synthetic construct
  source 1..75: mol_type = other DNA
cctgaaagactgggagtacgaccgtgaaaaaggggtattcctgctgaaagagatcgacctgtgggaggtcagtct

SEQ ID NO: 58753 - DNA, 75 bp, synthetic construct
  source 1..75: mol_type = other DNA
cgcagggggtggatgctgctatagaagctgcaaaaaatctggtggcccaagaatatgagtataaggatttcaaag

SEQ ID NO: 58754 - DNA, 75 bp, synthetic construct
  source 1..75: mol_type = other DNA
aatgatggaattgccgatgctggcggcatggacccgatgggttcagacggtaactacgtaacttacaatggtttt

SEQ ID NO: 58755 - DNA, 75 bp, synthetic construct
  source 1..75: mol_type = other DNA
atgtttgagtcttatatggcagaacgtcttcgccaccgctggatgcgcctgcgcttatatcgtttccccggttct

SEQ ID NO: 58756 - DNA, 75 bp, synthetic construct
  source 1..75: mol_type = other DNA
tgggtaccaacgagccgtcagaagatccggatgttgcggatattgggtattacggagccggtggtcgaacggacg

SEQ ID NO: 58757 - DNA, 75 bp, synthetic construct
  source 1..75: mol_type = other DNA
aaacccggggaaaattccgctcgatttaattgaagtgcgctccggctcttatctcgaagaggatgatgtggtgcg

SEQ ID NO: 58758 - DNA, 75 bp, synthetic construct
  source 1..75: mol_type = other DNA
gaaaaaatatcgcccggatattctcgatgcctgtgaaaaagcgatgagcgccgtcgatccggatctcgattttat

SEQ ID NO: 58759 - DNA, 75 bp, synthetic construct
  source 1..75: mol_type = other DNA
actgatgcaggcggtggctattgaaggagagccacaggtcggcccttcatctgagccggattggtactacgtcat

SEQ ID NO: 58760 - DNA, 75 bp, synthetic construct
  source 1..75: mol_type = other DNA
ctgaagttaaggggatgaaaccacgtgaaaaggactatgccgtttatgatgggttcggtttattgctgaatgtga

SEQ ID NO: 58761 - DNA, 75 bp, synthetic construct
  source 1..75: mol_type = other DNA
tttcgcaactggcgcgctttccgatcgatgccatcaaacttgaccaggtttttgttcgagatattcacaaacaac

SEQ ID NO: 58762 - DNA, 75 bp, synthetic construct
  source 1..75: mol_type = other DNA
agaagtggatgcagagcgaatgctgcatcttaaatttgttcgccgtctgcaccagatgcgcgggacgtctttgtt

SEQ ID NO: 58763 - DNA, 75 bp, synthetic construct
  source 1..75: mol_type = other DNA
accgctgcgattgggctttctcgtttctcgccgttatgaagagcgtcaagagcaagagctgcttcaggagctgcc

SEQ ID NO: 58764 - DNA, 75 bp, synthetic construct
  source 1..75: mol_type = other DNA
tggagcgatggggggcgtgggtggcaaataaccacgaggatgttacatggtcatctattgctgcaggttttaaag

SEQ ID NO: 58765 - DNA, 75 bp, synthetic construct
  source 1..75: mol_type = other DNA
atgtcgatgataaaaagctatgccgcaaaagaagcaggcggcgaactggaagtttatgagtacgatcccggtgaa

SEQ ID NO: 58766 - DNA, 75 bp, synthetic construct
  source 1..75: mol_type = other DNA
ttacagctgactgctcatctcctgcatcaacagcaaaagaaattgaagctcttaaatatatgattacagtaatat

SEQ ID NO: 58767 - DNA, 75 bp, synthetic construct
  source 1..75: mol_type = other DNA
ttgcagcgcacagggtgagcagtgggaataccgccacgacgccagcggcagacgaacagagaaacgctgcgaccg

SEQ ID NO: 58768 - DNA, 75 bp, synthetic construct
  source 1..75: mol_type = other DNA
ccgtgcagatcgatgtctgggcgacagtacctgatgacgcagatgatattcgtgagcaggcgcttgatgcagtaa

SEQ ID NO: 58769 - DNA, 75 bp, synthetic construct
  source 1..75: mol_type = other DNA
atgattgaatggattattcgtcgctcggtggcgaaccgttttttggtgctgatgggcgcgttgtttctgagcatc

SEQ ID NO: 58770 - DNA, 75 bp, synthetic construct
  source 1..75: mol_type = other DNA
aaagatcctctgtctggtgcaatttcaaatggtatcggttctgctgctgggtatggtatcggtaaaggtattact

SEQ ID NO: 58771 - DNA, 75 bp, synthetic construct
  source 1..75: mol_type = other DNA
atgacgacaccaaccagacggataagtttctatctgaagcccgccgccgtcaatagtgaacggaaggcgtgtaat

SEQ ID NO: 58772 - DNA, 75 bp, synthetic construct
  source 1..75: mol_type = other DNA
tagttcaggtactggaaacctggcctgaccggctggagagggacagggggtggaccgcatcacaactgaatgaag

SEQ ID NO: 58773 - DNA, 75 bp, synthetic construct
  source 1..75: mol_type = other DNA
aatattatttgaataaagaaggtaatatgtttcatcttgtgaaacgggtgaagaccttttctaaatctgcgactt

SEQ ID NO: 58774 - DNA, 75 bp, synthetic construct
  source 1..75: mol_type = other DNA
tggtgctcggctgcgtatttggcggttattttgaagcgggcgggcaattagtggctatctggcaaccggcggaaa

SEQ ID NO: 58775 - DNA, 75 bp, synthetic construct
  source 1..75: mol_type = other DNA
atgacgctggcggggaaaaatctccgccttttccagccggtccccggaaagagcaaaaggatgtcgccgcaggct

SEQ ID NO: 58776 - DNA, 75 bp, synthetic construct
  source 1..75: mol_type = other DNA
acttccggcagacggaacgcaggtgtctttcccgtatgccggtgaatggctgacggaggaagaaatcagggcagt

SEQ ID NO: 58777 - DNA, 75 bp, synthetic construct
  source 1..75: mol_type = other DNA
tggcaattgatcttatcaacacgctaaatcccacggaggaacagctgttggttggtttgcgcacagcttacgccg

SEQ ID NO: 58778 - DNA, 75 bp, synthetic construct
  source 1..75: mol_type = other DNA
tggtttaatatgtaaggataatagtggcagatatttctcaacagcacctaaccgaggagaaagaaaaggatcata

SEQ ID NO: 58779 - DNA, 75 bp, synthetic construct
  source 1..75: mol_type = other DNA
gctgaccaccaccggtcagacgttgctgacccgccagacgcgccgctttcgtctggttgtgaaggaaagcgatca

SEQ ID NO: 58780 - DNA, 75 bp, synthetic construct
  source 1..75: mol_type = other DNA
ttcgaaccgctggactcagaagaacggggccgcaccttcgaagctctggattgcacagattggcgcgatgactga

SEQ ID NO: 58781 - DNA, 75 bp, synthetic construct
  source 1..75: mol_type = other DNA
cgctggtttgaccgtgatgttctgcgggaggtggtccgggaggcccgggccgaaatccgcagcatggcggatgcc

SEQ ID NO: 58782 - DNA, 75 bp, synthetic construct
  source 1..75: mol_type = other DNA
ccgctggtttgaccgtggtgttctgcgggaggtggtccgggaagcccggaccgaaatccgcagcatggcggatgc

SEQ ID NO: 58783 - DNA, 75 bp, synthetic construct
  source 1..75: mol_type = other DNA
ctgcgccgcagtaacgatatccttcgccaggcttccgcttattttgcgaaggcggagttcgaccgcctctggaaa

SEQ ID NO: 58784 - DNA, 75 bp, synthetic construct
  source 1..75: mol_type = other DNA
cagcacgcgaacagtgggaacgtgacaacggatttatcagcaacggaaacggcctggaagctgtgggagcttatg

SEQ ID NO: 58785 - DNA, 75 bp, synthetic construct
  source 1..75: mol_type = other DNA
atgaatgagtttaagcgttttgaagaccgtctgaccggactgattgaatcactgtcaccgtcagggcgtcggcga

SEQ ID NO: 58786 - DNA, 75 bp, synthetic construct
  source 1..75: mol_type = other DNA
cggcgaatatgacctttttgatttaatggcgcaggttactgaagagaacctgcatgcccctgtggattttgggtc

SEQ ID NO: 58787 - DNA, 75 bp, synthetic construct
  source 1..75: mol_type = other DNA
ccagtggtctggtctgtgatgtgctgcgtataccggatgaaccgtcccgtcgctggtttgaccgggatattctgc

SEQ ID NO: 58788 - DNA, 75 bp, synthetic construct
  source 1..75: mol_type = other DNA
aatatcattattactttgcagataaacaaatgtctgccagaggttcgtatgagtatcgatgcactacggtgggct

SEQ ID NO: 58789 - DNA, 75 bp, synthetic construct
  source 1..75: mol_type = other DNA
tgatggactgattggtaaaagactttataaagcggaaggtattattgaagggatgcttatggctctgagtgtcag

SEQ ID NO: 58790 - DNA, 75 bp, synthetic construct
  source 1..75: mol_type = other DNA
agttggtaaagttgaaatctatactgaaaacggtgaacttatatttgaacaatataaaacccttaaactagttta

SEQ ID NO: 58791 - DNA, 75 bp, synthetic construct
  source 1..75: mol_type = other DNA
gcaagtaaagcagcccatggtattttgggtataggaatagcggtagcaactcaagccgctaccaccgcgctaaat

SEQ ID NO: 58792 - DNA, 75 bp, synthetic construct
  source 1..75: mol_type = other DNA
agattaagctccacgaaaaactatccaagagtgatatactaaatatattggctgagcagatgaccatgcttgagg

SEQ ID NO: 58793 - DNA, 75 bp, synthetic construct
  source 1..75: mol_type = other DNA
tgaccttgaaaaagaccttatcagtgagcgtagaaaagctggtattgaacgtgctaaagctgaaggggttcacat

SEQ ID NO: 58794 - DNA, 75 bp, synthetic construct
  source 1..75: mol_type = other DNA
atcgcaggtcatgcccgcagtcggggactgattattgtgactaataacacccgggaatttgaacgtgtggacggt

SEQ ID NO: 58795 - DNA, 75 bp, synthetic construct
  source 1..75: mol_type = other DNA
atgctgaagtttatgctcgataccaacatctgcattttcacaataaagaacaagcccgccagtgtcagagaacgt

SEQ ID NO: 58796 - DNA, 75 bp, synthetic construct
  source 1..75: mol_type = other DNA
gccagaactcaaactgatggacgaaagattatttatcgatgcggcgatgggttttgtcctgcctgaagcggctca

SEQ ID NO: 58797 - DNA, 75 bp, synthetic construct
  source 1..75: mol_type = other DNA
ggtaaaacttcagtagctgaacgcacaccgctacgcgatgcagtaaacatgctggtaggaaagaaaggacttcgc

SEQ ID NO: 58798 - DNA, 75 bp, synthetic construct
  source 1..75: mol_type = other DNA
ggaaacattgttgagtttatcaagtacaaactgaagaatgttgccgcaggttatgaggtttataactacgttgat

SEQ ID NO: 58799 - DNA, 75 bp, synthetic construct
  source 1..75: mol_type = other DNA
acgggcatacagatgccagtaccccgtatatatttttttagctatagtattatggattttacctattctcctgat

SEQ ID NO: 58800 - DNA, 75 bp, synthetic construct
  source 1..75: mol_type = other DNA
atgaaatccgcagcatggcggatgcactggcgaaaatccggaaatgatgacgctggcggggaaaaatctccgcct

SEQ ID NO: 58801 - DNA, 75 bp, synthetic construct
  source 1..75: mol_type = other DNA
atcgaactggtgagtaaaggaaaaaaatatgtcatctgccacgccgattatccttgtgataaatacgagtttgga

SEQ ID NO: 58802 - DNA, 75 bp, synthetic construct
  source 1..75: mol_type = other DNA
atactcatggtgcagatagtcatggagaatattgggacgaaatattttcaggtaaagatgagaaaatagttaaaa

SEQ ID NO: 58803 - DNA, 75 bp, synthetic construct
  source 1..75: mol_type = other DNA
gttctgcgggaggtggtccggaaagcccgggccgaaatccgtagcgtggcggatgccctggcaaaaagcaggggc

SEQ ID NO: 58804 - DNA, 75 bp, synthetic construct
  source 1..75: mol_type = other DNA
cgtcgctggtttgaccgggatattctgcgggaggtggtcctggaagcccggactgaaatccgcagcatggcggat

SEQ ID NO: 58805 - DNA, 75 bp, synthetic construct
  source 1..75: mol_type = other DNA
tttaatatcaagaacctggacaaacagcagagccacttttatccagaaatcacacagattggcgatgttcgcgat

SEQ ID NO: 58806 - DNA, 75 bp, synthetic construct
  source 1..75: mol_type = other DNA
atcagacgcgaggctcatccatgttatcgggggtgctgatgcggatcagtgcccttaaggagtatgaggatgcgg

SEQ ID NO: 58807 - DNA, 75 bp, synthetic construct
  source 1..75: mol_type = other DNA
gcctggttgtgaaggaaagcgatcacccctgctggctcgatgaagacgacgaaaacctgcccgtggtgctcgatg

SEQ ID NO: 58808 - DNA, 75 bp, synthetic construct
  source 1..75: mol_type = other DNA
cggtcgggctggtttcctctaacgccagttgtggtaaccctgtacagtccaccgccagcgagcttaccacctccg

SEQ ID NO: 58809 - DNA, 75 bp, synthetic construct
  source 1..75: mol_type = other DNA
acaaatctgcatacccgaaacttgcagtcgcttatccgtcaggcgttattcctgatatgcgtggctggactatca

SEQ ID NO: 58810 - DNA, 75 bp, synthetic construct
  source 1..75: mol_type = other DNA
ctcatgggcttatgcaaataataaggtcattacagatacaggttgcggaagtatttgtcttgcaggtgctgttgt

SEQ ID NO: 58811 - DNA, 75 bp, synthetic construct
  source 1..75: mol_type = other DNA
ggggctgagggcaaaagcctcccggaagttcagcccggtcagttaccgtgcacacaacctgcctgtgtcagaaaa

SEQ ID NO: 58812 - DNA, 75 bp, synthetic construct
  source 1..75: mol_type = other DNA
ctgggaaaacggctggcgcgatgtcaccaactcgcgtgcaccggtcaaaacgcctgccgacctgaaagggttgaa

SEQ ID NO: 58813 - DNA, 75 bp, synthetic construct
  source 1..75: mol_type = other DNA
ttactgtttttggtggggattttattatggatgatttaaaaaaagtaaaaaatacggaagcatgggtatggtata

SEQ ID NO: 58814 - DNA, 75 bp, synthetic construct
  source 1..75: mol_type = other DNA
tctttgccgataccggagaaaacggggtgatgatgccggtgaaaaatccgatgtccggcaccggtctacgctgga

SEQ ID NO: 58815 - DNA, 75 bp, synthetic construct
  source 1..75: mol_type = other DNA
cggatgttattgaagtttattccggcggcgtgcttgatgttagaggtggtacggcaacaaatattactcagcacg

SEQ ID NO: 58816 - DNA, 75 bp, synthetic construct
  source 1..75: mol_type = other DNA
ctcagccgatgctggttatcagggggccgaaaagcgcgatgagctcagcgatgtcagcgcagactggcttatcgc

SEQ ID NO: 58817 - DNA, 75 bp, synthetic construct
  source 1..75: mol_type = other DNA
acatgctgcgcaccaaactgccgcgcggtattccgttgtgtatccatctgatgtccagtcagctggttggtgaca

SEQ ID NO: 58818 - DNA, 75 bp, synthetic construct
  source 1..75: mol_type = other DNA
ttaacggcaaattacgcacgtaccggagggcaggtgactgcagggaatgtgcaatcgattattggcgtgactttt

SEQ ID NO: 58819 - DNA, 75 bp, synthetic construct
  source 1..75: mol_type = other DNA
gtgaataaccctctagatgccgtcactcaggcggttaactctcttgtcaccgcactgaaactgcctgacgaatcc

SEQ ID NO: 58820 - DNA, 75 bp, synthetic construct
  source 1..75: mol_type = other DNA
cctgcgtgccattaacctcaatgatccatgacgctactgcgcatttagatgttggtcagcagcgactcaacctga

SEQ ID NO: 58821 - DNA, 75 bp, synthetic construct
  source 1..75: mol_type = other DNA
gtaacggcgtgcccctgcgaggtttaaagattcgccgtgaaaaagaacgccagctttgcctgacgggactggtca

SEQ ID NO: 58822 - DNA, 75 bp, synthetic construct
  source 1..75: mol_type = other DNA
ataaccctgtgaattcggtcttctctaatgacaatagccatttcacataccggcatattgatttcagtattgagc

SEQ ID NO: 58823 - DNA, 75 bp, synthetic construct
  source 1..75: mol_type = other DNA
gcaatctgacggtacatggcaccaatatcgggtttaccggtaatgccagccttacccagggggcgctggttgaaa

SEQ ID NO: 58824 - DNA, 75 bp, synthetic construct
  source 1..75: mol_type = other DNA
aacaatgccatcaattagttggccaggacctgcatcaagaattaacaaaaaacctgacggcggacgaagtggcaa

SEQ ID NO: 58825 - DNA, 75 bp, synthetic construct
  source 1..75: mol_type = other DNA
tttcgttgaatctaaatattcatggtcagcaaaacttgaatcaatgatttcagatgttactaatttgatagagaa

SEQ ID NO: 58826 - DNA, 75 bp, synthetic construct
  source 1..75: mol_type = other DNA
ctctatgaagtggactcacgctatggcgaggacgttcgccggatcagtctgatgggacagcatgtcctctatgat

SEQ ID NO: 58827 - DNA, 75 bp, synthetic construct
  source 1..75: mol_type = other DNA
ggataaaaccttaaagatggcgtttcaggatctgcgggaactgaaagttgatgctgcatggccgttcctgttggt

SEQ ID NO: 58828 - DNA, 75 bp, synthetic construct
  source 1..75: mol_type = other DNA
acagcagcctgagccggaacgtgacgtttattgcggatgtcaggacggcgaagatcgctgatctggtggtcatta

SEQ ID NO: 58829 - DNA, 75 bp, synthetic construct
  source 1..75: mol_type = other DNA
tgaccgcaatgccggccgtggtgttcaccgacccgcaggtcgccaccgtgggctacagcgaggcggaagcacatc

SEQ ID NO: 58830 - DNA, 75 bp, synthetic construct
  source 1..75: mol_type = other DNA
gcagacgctggacgaactgggctatgacgttgccgatgcagaagataacgggccggacgatccgaaaatcatcga

SEQ ID NO: 58831 - DNA, 75 bp, synthetic construct
  source 1..75: mol_type = other DNA
tccggcaatgtcgatggtttcttacgcatcgggtgcgcgctatctctcgctgattggcggtacttgcttaagctt

SEQ ID NO: 58832 - DNA, 75 bp, synthetic construct
  source 1..75: mol_type = other DNA
acgacgggatcgagaccgacagtcgcctgctaacactggataacgtgccgcgtgcgcttgccaacttcgacacac

SEQ ID NO: 58833 - DNA, 75 bp, synthetic construct
  source 1..75: mol_type = other DNA
gtccagataaactctgtgacgggcgtgttcagcatggcgggatttttgatgatttatgcccgcgcctgtaccaca

SEQ ID NO: 58834 - DNA, 75 bp, synthetic construct
  source 1..75: mol_type = other DNA
tcgtccgggaactggcaggtctggcgttcgtggagcgcagcgaatacgtgatcctgctgggaccttcgggtgtag

SEQ ID NO: 58835 - DNA, 75 bp, synthetic construct
  source 1..75: mol_type = other DNA
gtttgtcgcggatgtcaggacggcgcagatagcgagtctggaggtgatgcaggataacgcgatcgcagacggcgc

SEQ ID NO: 58836 - DNA, 75 bp, synthetic construct
  source 1..75: mol_type = other DNA
tctgcctctatccgctcatcctgctgacactctgtgtggtgaatatgtataacgttcatacccgggttattccga

SEQ ID NO: 58837 - DNA, 75 bp, synthetic construct
  source 1..75: mol_type = other DNA
ctgacaccggcaggcctgctggcacccacctaccgtaaccagctggcgtttatcgatatcttctttaaggggatg

SEQ ID NO: 58838 - DNA, 75 bp, synthetic construct
  source 1..75: mol_type = other DNA
acaggctctaccccactgaccagcaggcgcaaaggttgcgtcagttgtgcggttgcgctcgctttgtctggaact

SEQ ID NO: 58839 - DNA, 75 bp, synthetic construct
  source 1..75: mol_type = other DNA
agatggtcaattaattcgagatcacaggacgctagaaagtcaccccagctctatttttattcttatgcttaatga

SEQ ID NO: 58840 - DNA, 75 bp, synthetic construct
  source 1..75: mol_type = other DNA
tcatcctgggctttgttgccgcagcctggctcaagttaccggtgctggctattgctgccgctgcgctggcgatgg

SEQ ID NO: 58841 - DNA, 75 bp, synthetic construct
  source 1..75: mol_type = other DNA
gcacttacggccagtattttaactccgatgagccgtccctgcgggatgatgcgaaaatggtggtgctggagctgg

SEQ ID NO: 58842 - DNA, 75 bp, synthetic construct
  source 1..75: mol_type = other DNA
cccgccagcctgctcgatgcggcatttcgcgtcgccgatgaccagagcaaccgctttacgctgccgcaggcggtg

SEQ ID NO: 58843 - DNA, 75 bp, synthetic construct
  source 1..75: mol_type = other DNA
aaacgtgcgctggcgaatgactcggcatggcaccgtttaagtgagaaagagttcgcccatctgcaaacgttgtta

SEQ ID NO: 58844 - DNA, 75 bp, synthetic construct
  source 1..75: mol_type = other DNA
gcggaaaccgatggtaaagcctttcctcagccagcaggtgttgcgttaccagtacaggaagctgcaacacaggaa

SEQ ID NO: 58845 - DNA, 75 bp, synthetic construct
  source 1..75: mol_type = other DNA
gtcagacgatgagctggaaaccgtcatgcagcggctggacgatgcctttgagcatggtgcggatgtcagcgttgt

SEQ ID NO: 58846 - DNA, 75 bp, synthetic construct
  source 1..75: mol_type = other DNA
tgcccgtgatgcggcaactggtttttaccgggctattcagaaggtacgggaaacgcttcaggcgctgcgtgatgc

SEQ ID NO: 58847 - DNA, 75 bp, synthetic construct
  source 1..75: mol_type = other DNA
tgttccaggtcatggcagaacaggcaaaaggtgcacagaaaaatgccatgaactcctggacgggcatgactgcca

SEQ ID NO: 58848 - DNA, 75 bp, synthetic construct
  source 1..75: mol_type = other DNA
tgaagttcaacggcgcgaaattctctgccactgattatcctgtgctggcgaaagtgtttccttcgctggtattac

SEQ ID NO: 58849 - DNA, 75 bp, synthetic construct
  source 1..75: mol_type = other DNA
tgatagtcgatctgctcggcaatatttccgctaaatctcgccagtggtcgcaggagctgggggcattttcccgtt

SEQ ID NO: 58850 - DNA, 75 bp, synthetic construct
  source 1..75: mol_type = other DNA
tcagtgcgtccggtggtgactgagtcagtgacaaaaatcatggcatgcgggaccacgctgatgggctacacacaa

SEQ ID NO: 58851 - DNA, 75 bp, synthetic construct
  source 1..75: mol_type = other DNA
attgcactactcctcccggaaaaacctgaaatagccaatgaactcgccagtcttgaaagctcccggtcaagtctc

SEQ ID NO: 58852 - DNA, 75 bp, synthetic construct
  source 1..75: mol_type = other DNA
gccagagtatccaggccgcggacgccagtatcctgaccggatacgggataaacgtttaccagttgctggccgata

SEQ ID NO: 58853 - DNA, 75 bp, synthetic construct
  source 1..75: mol_type = other DNA
ggtaaacaaccgctggacaatacgcttaccaatttgagtggaaaggatgtagctggtcttctcgcataccttggt

SEQ ID NO: 58854 - DNA, 75 bp, synthetic construct
  source 1..75: mol_type = other DNA
gacaatggcggcgctagcctgtatcgcgcaaaatgatagccaacagttgctcgacgaaatcgtccaacaagaggg

SEQ ID NO: 58855 - DNA, 75 bp, synthetic construct
  source 1..75: mol_type = other DNA
tggtatcccgttacgattctctgcgtaacccactgacttctctgggggattacctcgaccccgaactcatttctc

SEQ ID NO: 58856 - DNA, 75 bp, synthetic construct
  source 1..75: mol_type = other DNA
accggcgtggcctgttcggtgtgccccggcggagtgacgtccggccatccggtcaatcccctgctcggtgcaaag

SEQ ID NO: 58857 - DNA, 75 bp, synthetic construct
  source 1..75: mol_type = other DNA
gggaccgcccgtggggcgatgaaaaaccgcatagcacgatggtgtttatcgggattcagttgccggaggaagaga

SEQ ID NO: 58858 - DNA, 75 bp, synthetic construct
  source 1..75: mol_type = other DNA
ccgtagtggaactaaacgacgatgatgatcatcatcatcgcaacaattctccactcccaccgacaccccctgatg

SEQ ID NO: 58859 - DNA, 75 bp, synthetic construct
  source 1..75: mol_type = other DNA
cccgccttgatattacaggtgtatgggtgttctccctggggctctggtttcatattgttgcccgtctggtttaca

SEQ ID NO: 58860 - DNA, 75 bp, synthetic construct
  source 1..75: mol_type = other DNA
ttagtggctgaggaacgccgcgcagcgctgaatatgctgtatatcgacccacagaacagcagccagattattgct

SEQ ID NO: 58861 - DNA, 75 bp, synthetic construct
  source 1..75: mol_type = other DNA
aaaagccggagcttgtggagcaagagctgtggggtgtcttactggcttataatctggtgagatatcagatgatta

SEQ ID NO: 58862 - DNA, 75 bp, synthetic construct
  source 1..75: mol_type = other DNA
atgcggcaatgcatgaaactattgaagccgttcgcagtgttgcggataactccagtggaattgccggatggcatt

SEQ ID NO: 58863 - DNA, 75 bp, synthetic construct
  source 1..75: mol_type = other DNA
attgtggatatgaagcggtggtatctgtgtccgcaggtacgggtcgcggatatcgtccagctgaacgggaatatc

SEQ ID NO: 58864 - DNA, 75 bp, synthetic construct
  source 1..75: mol_type = other DNA
ttgtgaaattaccgacaagaagggaaagggccttcccgagagtggtaaaggagaggccctggaaataccccacag

SEQ ID NO: 58865 - DNA, 75 bp, synthetic construct
  source 1..75: mol_type = other DNA
atgaaggctgcgaagaggcttatcgtctctgggtggaggataccggtgagacggattttgacaccttccgcgatg

SEQ ID NO: 58866 - DNA, 75 bp, synthetic construct
  source 1..75: mol_type = other DNA
acttttgaaaatgactcaatccttgcctggattcgaaatactgactgggcgaagattggatttaaaaatgatgcc

SEQ ID NO: 58867 - DNA, 75 bp, synthetic construct
  source 1..75: mol_type = other DNA
ccattcaactggatactcccatcatgcgcggtaaaacagaaattaccgaaattgtgttgcgtaaaccgcagtccg

SEQ ID NO: 58868 - DNA, 75 bp, synthetic construct
  source 1..75: mol_type = other DNA
atgagcgataagcagactgaaaagaccattcaactggatacccctatcaagcgcggtaaaacagaaatcaccgaa

SEQ ID NO: 58869 - DNA, 75 bp, synthetic construct
  source 1..75: mol_type = other DNA
aacttgaacagctaaaaaaagctgcacaggcacagcgcaccaaatcagtagaaaagaaaaactcttctaatcaac

SEQ ID NO: 58870 - DNA, 75 bp, synthetic construct
  source 1..75: mol_type = other DNA
caccgttactctgccggactaccctggttcagtgccgattcctcttaccgtttattgtgcgaaaagccaaaacct

SEQ ID NO: 58871 - DNA, 75 bp, synthetic construct
  source 1..75: mol_type = other DNA
caactggcaaccgtagcagtgattcaccaacagcatatgcgcaacattgcgcagtggttgcaggcaaacggcatc

SEQ ID NO: 58872 - DNA, 75 bp, synthetic construct
  source 1..75: mol_type = other DNA
tggtgcgtggcgtttacgcgacaataccacctggagttataacagtagcgacagttcatcaggtagcaaaaataa

SEQ ID NO: 58873 - DNA, 75 bp, synthetic construct
  source 1..75: mol_type = other DNA
acggcgcggaagcgattgaagatgacgctaaacgccgcgagcgccagcaagaaaccgccgtcgctacgatgaagc

SEQ ID NO: 58874 - DNA, 75 bp, synthetic construct
  source 1..75: mol_type = other DNA
atgaaaagagttttgttctttttgctgatgatatttgttagttttggtgttatagctgattgcgaaatacaagat

SEQ ID NO: 58875 - DNA, 75 bp, synthetic construct
  source 1..75: mol_type = other DNA
aatgcctaccgcgtgctggctgatcgtctgggtgtggaccagaaagtggtcagaaaacttggtgaaaaagggctg

SEQ ID NO: 58876 - DNA, 75 bp, synthetic construct
  source 1..75: mol_type = other DNA
ggcccttattaatggtgcgccagccacactggatacgctgaaagaaattgccgctgccattaataatgacccgaa

SEQ ID NO: 58877 - DNA, 75 bp, synthetic construct
  source 1..75: mol_type = other DNA
aacacgttctatacgcccgatttcgctgtgatgctcgccaccggcgagatggaactgcacgaagtgaaaggtttc

SEQ ID NO: 58878 - DNA, 75 bp, synthetic construct
  source 1..75: mol_type = other DNA
tatttcagacactggcagaacaggcacggggagcacaaaaggacgcaatgaattcctggagtggtctgacggcca

SEQ ID NO: 58879 - DNA, 75 bp, synthetic construct
  source 1..75: mol_type = other DNA
gagcgctgtaatctgacactggtaggtttttgtaaaccgggtcgggcaacggtttatacccatccgcagcgtttg

SEQ ID NO: 58880 - DNA, 75 bp, synthetic construct
  source 1..75: mol_type = other DNA
gcatgttgatgtggttatcgttgagcggcgttcgttcagtattgttgcagcagtagagctggatgatgccagcca

SEQ ID NO: 58881 - DNA, 75 bp, synthetic construct
  source 1..75: mol_type = other DNA
gtggctgggatgacgggcgtggtattgatgctgtacgtgccttgctaagtcttcagaatggaggagtggaatcac

SEQ ID NO: 58882 - DNA, 75 bp, synthetic construct
  source 1..75: mol_type = other DNA
ttgccgcgcgtggactggaaatgacaggtgttgacctcgaaacaatggaagaagtctggcaacaggtaaaacggc

SEQ ID NO: 58883 - DNA, 75 bp, synthetic construct
  source 1..75: mol_type = other DNA
aagcaaatcactactcgtaagactgattgctttatgtggtgatatgatgataaaagttgattatccacttcataa

SEQ ID NO: 58884 - DNA, 75 bp, synthetic construct
  source 1..75: mol_type = other DNA
ctggacagcaggcaatcagaagcaggcgtcacgcgcctgaacggaaaatctccggctgcggtgttagcagaagtg

SEQ ID NO: 58885 - DNA, 75 bp, synthetic construct
  source 1..75: mol_type = other DNA
cgcttattgcaaaagatgcacatggcaacgctatcagtggtctttccctgtcggcaagcctgacgggtgctgcgt

SEQ ID NO: 58886 - DNA, 75 bp, synthetic construct
  source 1..75: mol_type = other DNA
ggttacgatgaactggcggcattcgatgaagatattgagaaagagggatccccgacgttcctgggtgataaacgt

SEQ ID NO: 58887 - DNA, 75 bp, synthetic construct
  source 1..75: mol_type = other DNA
ttgttcagtttggcacttttgcaggaaacacgacccgctttatcagtggacacttccctataccattccctaatc

SEQ ID NO: 58888 - DNA, 75 bp, synthetic construct
  source 1..75: mol_type = other DNA
gggttctctgaatatccttttttcctaggttataaccgggcgatcgctaaagaaaatgctgaggtggtattaaca

SEQ ID NO: 58889 - DNA, 75 bp, synthetic construct
  source 1..75: mol_type = other DNA
ctggtatctcactgagatgaagcagctgctcggcgaggcgacggttgaatcgctgcgccatgccctcttttttga

SEQ ID NO: 58890 - DNA, 75 bp, synthetic construct
  source 1..75: mol_type = other DNA
cagcagccagtatgggctacagcaagaacacctgttgtttacaccactcttcaaagctgagaacgccagatgttt

SEQ ID NO: 58891 - DNA, 75 bp, synthetic construct
  source 1..75: mol_type = other DNA
gcggaatactggcgtgattatttgaaactgagcgccaatggttatatccgggcttctggctggaaaaaatcgccg

SEQ ID NO: 58892 - DNA, 75 bp, synthetic construct
  source 1..75: mol_type = other DNA
gcgccgcctgtttctgggtcgatgtgtgtgaagataaaaacgcaacaccacattcgccgcagcagcgaatggaaa

SEQ ID NO: 58893 - DNA, 75 bp, synthetic construct
  source 1..75: mol_type = other DNA
tatgacaccaaaacgcaacctgcgatgccagccaatatggaactcaccgacggtggtcaacgcatcaagttaaaa

SEQ ID NO: 58894 - DNA, 75 bp, synthetic construct
  source 1..75: mol_type = other DNA
atgataaagagacttgtatttttcgcaattttcgttccggtgttgggggttggttttatatttgcgattacagga

SEQ ID NO: 58895 - DNA, 75 bp, synthetic construct
  source 1..75: mol_type = other DNA
cagcatcaggttacggggtcacttacgtaaagaactggcagaaggcagctcagccacaggcagcactgcaggaaa

SEQ ID NO: 58896 - DNA, 75 bp, synthetic construct
  source 1..75: mol_type = other DNA
ccggtcgccttcaagaaaggcgggatgaaattctggctccgctttgccgaaaagtttggctccccgtgggtgatc

SEQ ID NO: 58897 - DNA, 75 bp, synthetic construct
  source 1..75: mol_type = other DNA
cgaactctcccaaggcttaaaggaatttcagctaacctacgcaaacaacttattaatagcaatgatgaacaaacg

SEQ ID NO: 58898 - DNA, 75 bp, synthetic construct
  source 1..75: mol_type = other DNA
ggctctttaaaacaacagtttcatgtaagttatttaccgcgattatactcagcgtttttttaggccaaccagcat

SEQ ID NO: 58899 - DNA, 75 bp, synthetic construct
  source 1..75: mol_type = other DNA
acaaaaaagccgacagcgtcgaaaccaccattgatgacctgtggcgggatatgcgctggtcggtctcgcgtctgc

SEQ ID NO: 58900 - DNA, 75 bp, synthetic construct
  source 1..75: mol_type = other DNA
atagaacggatcaagttgcattcaactcatcttacgcaattgtatttaacaatttacaaagtgcacttaaagatg

SEQ ID NO: 58901 - DNA, 75 bp, synthetic construct
  source 1..75: mol_type = other DNA
gccctgcctgcggttttgccaacaccttttgggggaaaacgaccgccgacgggacattgattgaacactttggtc

SEQ ID NO: 58902 - DNA, 75 bp, synthetic construct
  source 1..75: mol_type = other DNA
acatcaacctcaccggcgattacctctggcgcagcagcgccaagatcggcgcgggcaagttcaggccgctacgac

SEQ ID NO: 58903 - DNA, 75 bp, synthetic construct
  source 1..75: mol_type = other DNA
gattgtcattcaagaattgataatgggagagatatgagcagggaagagcgaagggctgaaatggatcgggccatt

SEQ ID NO: 58904 - DNA, 75 bp, synthetic construct
  source 1..75: mol_type = other DNA
aatgacctgccttcatcaggtgatccggaagcagaacaaaaatttactgctctggaaaatacgctgaatgctgca

SEQ ID NO: 58905 - DNA, 75 bp, synthetic construct
  source 1..75: mol_type = other DNA
atcgcgctgcaataccgcttcgactctcaacagacatttacccgcgcattcaagaagcagtttgcccagactcct

SEQ ID NO: 58906 - DNA, 75 bp, synthetic construct
  source 1..75: mol_type = other DNA
tctattacaacaacaggcactaaagcccccattgcaaaaatatacaatggtggagagttattttttttccaatgt

SEQ ID NO: 58907 - DNA, 75 bp, synthetic construct
  source 1..75: mol_type = other DNA
ggcgaacgcttctatcgcccacccggacaaaccgctaccggcagtggacttgggctatcgattgtccagcgaatc

SEQ ID NO: 58908 - DNA, 75 bp, synthetic construct
  source 1..75: mol_type = other DNA
tccccgtgaaacccgggtcatccggccggaagaggaatgctgcccggcctgtggtggtgacctcagtcctctggg

SEQ ID NO: 58909 - DNA, 75 bp, synthetic construct
  source 1..75: mol_type = other DNA
tctgttacgcgcaccgccgataaagattcagctaaaacttttgttcaggagacgctgaaagatacctgggagtct

SEQ ID NO: 58910 - DNA, 75 bp, synthetic construct
  source 1..75: mol_type = other DNA
ggtcgtttcgttttcgccacaacgtcgggccgccgaatggggggttttgttcgccgcgctgaccacgctgtgcat

SEQ ID NO: 58911 - DNA, 75 bp, synthetic construct
  source 1..75: mol_type = other DNA
gaaagatgagtagccgggatttgacccgattttcagctgcccggcgtcatgcgatcctggtgtgcgtgctggaag

SEQ ID NO: 58912 - DNA, 75 bp, synthetic construct
  source 1..75: mol_type = other DNA
accctgcgttgttattgcgggtcgcgcgatgcagttgggcgacgccattaaaatcatgaacgacaggctgaaacc

SEQ ID NO: 58913 - DNA, 75 bp, synthetic construct
  source 1..75: mol_type = other DNA
cgggttgcgggtgatgaatttccggggtgcacaggtcagtcgtgaagaggcgcgccagtggcgtgtgcagcaccc

SEQ ID NO: 58914 - DNA, 75 bp, synthetic construct
  source 1..75: mol_type = other DNA
cgaccggcttcatcaagccgcgctggcagaaactggtgatgaccgacgccggcatcgaccggcgctactacgaac

SEQ ID NO: 58915 - DNA, 75 bp, synthetic construct
  source 1..75: mol_type = other DNA
atcccaatgtgagagctttaattccacctgcaccgccattaccttcacaaaccgacggtgcaggaggtgcccgta

SEQ ID NO: 58916 - DNA, 75 bp, synthetic construct
  source 1..75: mol_type = other DNA
ggtaatacaccgtaagagctggaaaaaccgtaagcgtcgtctcagcaccgtctggcagatcctgaaattcctgag

SEQ ID NO: 58917 - DNA, 75 bp, synthetic construct
  source 1..75: mol_type = other DNA
gcgccatcaataccggttctaaaaatgtaaaaattaacggagagctggccgcacgcgcagcggtcacccttcccc

SEQ ID NO: 58918 - DNA, 75 bp, synthetic construct
  source 1..75: mol_type = other DNA
gctttcagaaaatacaatctggaatatgaaagatgactccgttgttacccatctgactaattcagacagtattat

SEQ ID NO: 58919 - DNA, 75 bp, synthetic construct
  source 1..75: mol_type = other DNA
caggtattaaacagtctgaacttcgagaaataatactaagactgcctccagtctctttacaaaaatcaatttctc

SEQ ID NO: 58920 - DNA, 75 bp, synthetic construct
  source 1..75: mol_type = other DNA
tctttattgacggcctgcccgccgccagaaccggtgatgctattgactgcggcggcgtggttattggtggcggta

SEQ ID NO: 58921 - DNA, 75 bp, synthetic construct
  source 1..75: mol_type = other DNA
atatgggctttgcagtccgtgttaggctttattgctccaatgtggctagtgggtattggtgtcgccacagcggta

SEQ ID NO: 58922 - DNA, 75 bp, synthetic construct
  source 1..75: mol_type = other DNA
ggtactcccttgccgccacggtgttgttgttatcaccgttcgatttattggcatcactcggcatggacatgtact

SEQ ID NO: 58923 - DNA, 75 bp, synthetic construct
  source 1..75: mol_type = other DNA
gagtattcacgaagccgtctgggagctggcgtggaaaaaatccgggccggaaatggccgcgctggagcgctggct

SEQ ID NO: 58924 - DNA, 75 bp, synthetic construct
  source 1..75: mol_type = other DNA
ggatgcgctgtatcccaccgaacgggaactggacccgctcaaggatctgaactaccagtgcgtggacgatacctt

SEQ ID NO: 58925 - DNA, 75 bp, synthetic construct
  source 1..75: mol_type = other DNA
ccggacctgaaagaaaattcagcctccggctcaggaactgtgaatttaacagtcagggtgggaaccttttctctg

SEQ ID NO: 58926 - DNA, 75 bp, synthetic construct
  source 1..75: mol_type = other DNA
tttgccctataaccggacgtgcatttttcatgtggattgagcatccgacattgggaaatgtgccgacgtatggtg

SEQ ID NO: 58927 - DNA, 75 bp, synthetic construct
  source 1..75: mol_type = other DNA
cctcgccaaccgtatttttgagcacagcaatcgccgggttgatgagcaaaaccgtcagagtctgaacagcctgtt

SEQ ID NO: 58928 - DNA, 75 bp, synthetic construct
  source 1..75: mol_type = other DNA
aggatgtggtagacgcggtactggcggcgaaagcgcgcggtaaccgggtgattgcggttggcaccacctcagtac

SEQ ID NO: 58929 - DNA, 75 bp, synthetic construct
  source 1..75: mol_type = other DNA
atgaaaggaatgagcaaaatgccgcagttcaatttgcggtggcctaaagaagtattggatttggtacgcaaggtg

SEQ ID NO: 58930 - DNA, 75 bp, synthetic construct
  source 1..75: mol_type = other DNA
ctgcgatggtcacggcctccatcctggagcgccgtggcgacacagcagcccttacccggctacaggataccgggg

SEQ ID NO: 58931 - DNA, 75 bp, synthetic construct
  source 1..75: mol_type = other DNA
cgctgagcccggtgaatagcatggatccattaggattatatgaatttaaatcaaaaaatatagatgatattggaa

SEQ ID NO: 58932 - DNA, 75 bp, synthetic construct
  source 1..75: mol_type = other DNA
tatgactgcgtgatgcccctgtatcagttcagtcgtgatttttccctgatgcaggccgtgccacgtggtaagcca

SEQ ID NO: 58933 - DNA, 75 bp, synthetic construct
  source 1..75: mol_type = other DNA
atcggcgcaggaattaccgaactgtggctcggcggcaagtatggctgcgcaagggattttttacggcactgaccg

SEQ ID NO: 58934 - DNA, 75 bp, synthetic construct
  source 1..75: mol_type = other DNA
cttgagatcgacttcaagggagagaccgtaagtaaatggactttctcctctgataacaacaacacaaagactggt

SEQ ID NO: 58935 - DNA, 75 bp, synthetic construct
  source 1..75: mol_type = other DNA
ccagccgggattcggagttcaacctcagacgcaactatctggagttgcgtcggctggtggcccgccctgagtttg

SEQ ID NO: 58936 - DNA, 75 bp, synthetic construct
  source 1..75: mol_type = other DNA
accgttcacgccgagaaattaaactcaatcggtggcccgaccgatcccttgccgattggcgcggcatttaccggt

SEQ ID NO: 58937 - DNA, 75 bp, synthetic construct
  source 1..75: mol_type = other DNA
tgtgcgtaaagtctggcgtcagttgttacgggaaggaatcagggtagccagatgtacagtggcgcgcctcatggc

SEQ ID NO: 58938 - DNA, 75 bp, synthetic construct
  source 1..75: mol_type = other DNA
actcatggctgcggaggatggaaaactggggacgaagcctaaagtgtggcgcgatcttacggtggatggcgaaag

SEQ ID NO: 58939 - DNA, 75 bp, synthetic construct
  source 1..75: mol_type = other DNA
cgattaataccgccttgattcccaactggaaaacgctcgatccgcgcgtggttaaaggcgactggtttaacgttg

SEQ ID NO: 58940 - DNA, 75 bp, synthetic construct
  source 1..75: mol_type = other DNA
catcgggtactgtttatgccactggacagactgatcgcgacactgatgaaagcgaaacaggaaaaacggctggag

SEQ ID NO: 58941 - DNA, 75 bp, synthetic construct
  source 1..75: mol_type = other DNA
acagaaaggtccttcttcagcttaaggcgattaatgccctgaagcgacgggagtccgcccaggcactctacacct

SEQ ID NO: 58942 - DNA, 75 bp, synthetic construct
  source 1..75: mol_type = other DNA
ctgataacttccaagataacattaaaaattatcttgagatcacagggcaaacagaagagggttctcgacgcagca

SEQ ID NO: 58943 - DNA, 75 bp, synthetic construct
  source 1..75: mol_type = other DNA
agttagagagcaaccttgcagaactccgtggtggcagcgattacgcgcaacgcaaaattaaaatagccgctgcac

SEQ ID NO: 58944 - DNA, 75 bp, synthetic construct
  source 1..75: mol_type = other DNA
caatatcagaactaaccaaagaacgcctccgccgcgcgggtaaaaaggttcgtgaagacaatccagagtggaaag

SEQ ID NO: 58945 - DNA, 75 bp, synthetic construct
  source 1..75: mol_type = other DNA
cagcatcaggttacggggtgactcacgtaagggacaggcagatggcagctcagccacaggcagcactgcatgaaa

SEQ ID NO: 58946 - DNA, 75 bp, synthetic construct
  source 1..75: mol_type = other DNA
acattaagaccgtttgctattgataacgcaaccggcgaactggttattggaaccaaactgtccgcaagtctgaac

SEQ ID NO: 58947 - DNA, 75 bp, synthetic construct
  source 1..75: mol_type = other DNA
ttcgctgattactgaagacggcgaagcgattgaaggtgaggccctggacgatgtcactgtcatcggggtcgtgac

SEQ ID NO: 58948 - DNA, 75 bp, synthetic construct
  source 1..75: mol_type = other DNA
tgtatgcggggcagtggcgggatgcggaatcggggctgtgctataaccggttccggtattacgagccggagagcg

SEQ ID NO: 58949 - DNA, 75 bp, synthetic construct
  source 1..75: mol_type = other DNA
ggaaaagcgggaagctgctgggtgcaaaactcggcgcattgctgagcagaacaaaaaatgccctgaaaaatacgt

SEQ ID NO: 58950 - DNA, 75 bp, synthetic construct
  source 1..75: mol_type = other DNA
gggcgtctggacaatctccacgtcgcaatggttggtgacctgaaatatggccgcaccgttcactccctgacccag

SEQ ID NO: 58951 - DNA, 75 bp, synthetic construct
  source 1..75: mol_type = other DNA
ggaaattgatatgggaaccacgccactcagggacttacagaacagccctgccggtcccgagaagaaattccggct

SEQ ID NO: 58952 - DNA, 75 bp, synthetic construct
  source 1..75: mol_type = other DNA
ctcggtgaagcagaaggtatcagtctgcagatactggacaatcaagggtatccggctcgtgttggaaaagttatg

SEQ ID NO: 58953 - DNA, 75 bp, synthetic construct
  source 1..75: mol_type = other DNA
gacgcatttgaaaataacgttgctaaaacaaatctttgcgccattctggaacaacatggcctaactaacctgcac

SEQ ID NO: 58954 - DNA, 75 bp, synthetic construct
  source 1..75: mol_type = other DNA
cgtcagtttgatgaattaactgtttcttgtgttgatggtggcaaattgtttacctgctttacccgtcaaatccct

SEQ ID NO: 58955 - DNA, 75 bp, synthetic construct
  source 1..75: mol_type = other DNA
gtaaggaaaatccgttgcaaccttcacctgcggaaaaagtcagtccggagatggcggagaagcttgccctgcttg

SEQ ID NO: 58956 - DNA, 75 bp, synthetic construct
  source 1..75: mol_type = other DNA
atggcggagaaacttgccctgcttgagaaactgggcatcacgctggatgacctggaaaaactcttcaaatcccgc

SEQ ID NO: 58957 - DNA, 75 bp, synthetic construct
  source 1..75: mol_type = other DNA
accgtccggaggatggcgcgcggtttgaaccgctgatcggcaaccccggtgatggttcatcaccccactgtgccg

SEQ ID NO: 58958 - DNA, 75 bp, synthetic construct
  source 1..75: mol_type = other DNA
ccgccccatcaggtcaaattgacgcgatggaagaggtcaaagtgaaacgttccattggttcaaaacgacccaatg

SEQ ID NO: 58959 - DNA, 75 bp, synthetic construct
  source 1..75: mol_type = other DNA
gatgggacagcatgtcctctatgatgttgatgaccagaccagaaaagtccgggttctggccgtggtcggccagcg

SEQ ID NO: 58960 - DNA, 75 bp, synthetic construct
  source 1..75: mol_type = other DNA
ccgtcaaggagcaggcggaaaacaaaatcgatggtgcggttgcactgattatgacgatcggtcgggcaatgctca

SEQ ID NO: 58961 - DNA, 75 bp, synthetic construct
  source 1..75: mol_type = other DNA
tcctgttccggaagcccggcggaaaatatttcccggtgtgacgttatgcgttgaatgtcaggcgtatcaggaaag

SEQ ID NO: 58962 - DNA, 75 bp, synthetic construct
  source 1..75: mol_type = other DNA
tcccgctttgcgccactgatcccatccgttggcagcgtcgtaccgccgacgtggagtgcggcatctggcctgacg

SEQ ID NO: 58963 - DNA, 75 bp, synthetic construct
  source 1..75: mol_type = other DNA
atgggcaattatattcgtcccttatccgatgcggtatttaccatcgcatctgatgacctgtggatcgagagttta

SEQ ID NO: 58964 - DNA, 75 bp, synthetic construct
  source 1..75: mol_type = other DNA
acccatgctgacggaagcgttcgggattgaggttaacgcctcaaacatgaaccgtccggaggatggcgcgcggtt

SEQ ID NO: 58965 - DNA, 75 bp, synthetic construct
  source 1..75: mol_type = other DNA
tctccggtcacggaggaaaaaccagcaccggcaagcacagcaccggctgttgtccgaaaagttaaaggctgttac

SEQ ID NO: 58966 - DNA, 75 bp, synthetic construct
  source 1..75: mol_type = other DNA
aataaaaatggcaataaactggatctgtacggaaaagttgatgctcgtcatactttttccgataaccctggcgat

SEQ ID NO: 58967 - DNA, 75 bp, synthetic construct
  source 1..75: mol_type = other DNA
gtcacagtgggggctaccggcaactgtattatgggctgagtggcggtattctggcacatgccaatggtctgacac

SEQ ID NO: 58968 - DNA, 75 bp, synthetic construct
  source 1..75: mol_type = other DNA
ccgtcagttacggcattgtcagactgaacgcaccggtgactgccgccttcaacatgaaacagactgtggatgcat

SEQ ID NO: 58969 - DNA, 75 bp, synthetic construct
  source 1..75: mol_type = other DNA
taatgccttggctgatgagattattattgcggggcttgcggattcagaatgcgtcggatgctttgaagccgggga

SEQ ID NO: 58970 - DNA, 75 bp, synthetic construct
  source 1..75: mol_type = other DNA
atgtagaaacagactacgggaagaaaacggggtcttctgcaacctactatatttgttgtgagtgccttaatgcac

SEQ ID NO: 58971 - DNA, 75 bp, synthetic construct
  source 1..75: mol_type = other DNA
caggcggtcagaaagtacaaaataaagctcatgagattattggggcagaaaaatatcatgcatgggatgatcaaa

SEQ ID NO: 58972 - DNA, 75 bp, synthetic construct
  source 1..75: mol_type = other DNA
actagcatttaataaagtaacatcagaattcaagacaggggatgactattcatttataaatggagcaatcacctt

SEQ ID NO: 58973 - DNA, 75 bp, synthetic construct
  source 1..75: mol_type = other DNA
tcaatatggctaaatttattaaggagcagtcgctgctattgctcgataaactgaatgagctggatatggataccc

SEQ ID NO: 58974 - DNA, 75 bp, synthetic construct
  source 1..75: mol_type = other DNA
cctgatatgcgtggctggacgattaagggcaagcccgccagtggtcgtgccgtattgtctcaggaacaggacggc

SEQ ID NO: 58975 - DNA, 75 bp, synthetic construct
  source 1..75: mol_type = other DNA
gcggatcgtgggtctctacgaacaggcagccagtgatgatggcgagatcatgcgaccaaaagagcctaactggac

SEQ ID NO: 58976 - DNA, 75 bp, synthetic construct
  source 1..75: mol_type = other DNA
ccctcgtcgttgttacttactcgaacattcccgtaataacaacggagttattggcaacactatacaaaacagaac

SEQ ID NO: 58977 - DNA, 75 bp, synthetic construct
  source 1..75: mol_type = other DNA
aaaggaatgacgattgacggaactaaacttactgaaaacattaaaacagatgctataaaaataaaagataacaat

SEQ ID NO: 58978 - DNA, 75 bp, synthetic construct
  source 1..75: mol_type = other DNA
atcatcgtgatagctatgtacagtctgttatatcgaatatgacagcaaaatcattggttgttttttgtttctatg

SEQ ID NO: 58979 - DNA, 75 bp, synthetic construct
  source 1..75: mol_type = other DNA
actgtctgcatgggctggtgcagacgccgaacgcctgaccgttacggctctgcccgccattaccacttatggcga

SEQ ID NO: 58980 - DNA, 75 bp, synthetic construct
  source 1..75: mol_type = other DNA
gcatcggtagcggaaaccgatggtaaagcctttcctcagccagccggtgttgcgttaccggtacaggaagctgca

SEQ ID NO: 58981 - DNA, 75 bp, synthetic construct
  source 1..75: mol_type = other DNA
caatggcaatgatcatggctacgggttcagcaatggctggtgtcaagcaagcttctcagggggaggtacagtttg

SEQ ID NO: 58982 - DNA, 75 bp, synthetic construct
  source 1..75: mol_type = other DNA
atgaaataggttcgttgacgcctaaacaggggcaagtgttactttcatcccaaacacgtctttacacagggaaat

SEQ ID NO: 58983 - DNA, 75 bp, synthetic construct
  source 1..75: mol_type = other DNA
cctggcagagtttctgctggaaaaaggttacgaggtgcatggtattaagcgtcgtgcatcgtcattcaacaccga

SEQ ID NO: 58984 - DNA, 75 bp, synthetic construct
  source 1..75: mol_type = other DNA
ctgtctgctgacatcgttgtgcacccgggtgaaacagtgaatggcggaacactggtaaaccatgacaaccagttt

SEQ ID NO: 58985 - DNA, 75 bp, synthetic construct
  source 1..75: mol_type = other DNA
gagccaatgacctgattataccatcgctgcaaatggcaaaccgcgaactgcgccgggcgaaaagttatgtccaga

SEQ ID NO: 58986 - DNA, 75 bp, synthetic construct
  source 1..75: mol_type = other DNA
agcaaattccgcgaaggcggcaaaaacgtccgagacgaacgccaggtcttctgagacggcagcgggacagagcgc

SEQ ID NO: 58987 - DNA, 75 bp, synthetic construct
  source 1..75: mol_type = other DNA
tatcattcacctgaaagggatgacagccgttggcgaaggtgagttactcatcggctggagtggtacaagcggtgc

SEQ ID NO: 58988 - DNA, 75 bp, synthetic construct
  source 1..75: mol_type = other DNA
atgatcatttgtgaatgtatggctcgcctgaaaaaaaacaacagcgatttacatgatttattggtggactattat

SEQ ID NO: 58989 - DNA, 75 bp, synthetic construct
  source 1..75: mol_type = other DNA
gacggtgataacgccaaatgtgccgcgtattacacggcggaagacaacgcgctggcgcatgactggtcagaacgc

SEQ ID NO: 58990 - DNA, 75 bp, synthetic construct
  source 1..75: mol_type = other DNA
accggtaccattacgacagtcagcaccggctggtgcactacacgcggacacaatatgcagagccgctggtcgaaa

SEQ ID NO: 58991 - DNA, 75 bp, synthetic construct
  source 1..75: mol_type = other DNA
aataaatgtattaagacaggtgtaatgtacgaaatattaaatgttttgagtgaatatatgggtgttaaaaaaatg

SEQ ID NO: 58992 - DNA, 75 bp, synthetic construct
  source 1..75: mol_type = other DNA
acttgaggcatgtggtgaggcgtttctggcgcaggttcgccagcaggcagaaaaacttgtcagggagatggcggc

SEQ ID NO: 58993 - DNA, 75 bp, synthetic construct
  source 1..75: mol_type = other DNA
tctggggaattaacaccctgtttggcccgtttgttctggatctgtttactgatggtgataacgccaaatgtgccg

SEQ ID NO: 58994 - DNA, 75 bp, synthetic construct
  source 1..75: mol_type = other DNA
atttttatcgaaagattatatttgcctaccagcatagggtcatatttgtagtgaatcaggccgacaaggccgaac

SEQ ID NO: 58995 - DNA, 75 bp, synthetic construct
  source 1..75: mol_type = other DNA
tcgacaattgaggccaagcggagcgctgtacaacagatctttctgccgcaccatccagtctgtgttgtatcggcc

SEQ ID NO: 58996 - DNA, 75 bp, synthetic construct
  source 1..75: mol_type = other DNA
gaagttagccaacggcgcgcacacctttaagtatgcaccggagtggttagccagccgttatgccagaccgttgtc

SEQ ID NO: 58997 - DNA, 75 bp, synthetic construct
  source 1..75: mol_type = other DNA
tgccgttgtatgacacaccgctgtcgggtgttaatcgcctaatcaaacggctggaagatattgtgctggcctcgc

SEQ ID NO: 58998 - DNA, 75 bp, synthetic construct
  source 1..75: mol_type = other DNA
gattttttgtgccggactggttgcatttaatcctgatttcgactcccgcctgatgctctggttggcatggtattt

SEQ ID NO: 58999 - DNA, 75 bp, synthetic construct
  source 1..75: mol_type = other DNA
gtaaatctggatttgaagcaattaagcgatctgcgcagccagttcagaatggacgtgaagggtgagcgaccagtg

SEQ ID NO: 59000 - DNA, 75 bp, synthetic construct
  source 1..75: mol_type = other DNA
gcttcccttgacaagtttccaccaatagttcccccaattaatatagaagcatggaaatcattgtctgaaatctct

SEQ ID NO: 59001 - DNA, 75 bp, synthetic construct
  source 1..75: mol_type = other DNA
ttccagctccgtgtccgtaacgccattatcaaacgccagtcccttgatttcatcatggccggttttaacggcgtg

SEQ ID NO: 59002 - DNA, 75 bp, synthetic construct
  source 1..75: mol_type = other DNA
gatttggggacgaaaaccacatcgtcgtttgattacggcactaaatccacgaataacaccggggcgcatacccat

SEQ ID NO: 59003 - DNA, 75 bp, synthetic construct
  source 1..75: mol_type = other DNA
tggcagacgttcgtgaacggcatggtttattactggtgtcagacgctggcccccatgcgcgatatttttaaatcc

SEQ ID NO: 59004 - DNA, 75 bp, synthetic construct
  source 1..75: mol_type = other DNA
tctccacgccggctgacctgtcatcgttaaactatcattcaccgattttctgtgaggactttatcgtgtcagaca

SEQ ID NO: 59005 - DNA, 75 bp, synthetic construct
  source 1..75: mol_type = other DNA
gcactggcactattaccttctgccgcttttgctgcaccagccactgaagaaacggtgattgttgagggttcagcc

SEQ ID NO: 59006 - DNA, 75 bp, synthetic construct
  source 1..75: mol_type = other DNA
agcagaatccggatatccagcagaagatgcagcgtcgtgaagaggtgaacatcaatgtgcaccgggagcgcgggg

SEQ ID NO: 59007 - DNA, 75 bp, synthetic construct
  source 1..75: mol_type = other DNA
atgtgcctggcgtcatagcagactggccggtcaaccgggtcagcgaactgcttccgtggcgcatagcactgccag

SEQ ID NO: 59008 - DNA, 75 bp, synthetic construct
  source 1..75: mol_type = other DNA
cgctgatcgacctgctgcgtaaatctcctgaaccgactcaacctgcggcacagaaagaggaatttgaagatggca

SEQ ID NO: 59009 - DNA, 75 bp, synthetic construct
  source 1..75: mol_type = other DNA
tggcgattatgatagcgaagaagccttctacaaagcagaaggccgtgcaggatattcaccgggtcttggcggggt

SEQ ID NO: 59010 - DNA, 75 bp, synthetic construct
  source 1..75: mol_type = other DNA
aaccatcattgatgtcctgccgcaacgattaatcgacggcctcggcgtcgcgggcggcatcatgccagcaatcgg

SEQ ID NO: 59011 - DNA, 75 bp, synthetic construct
  source 1..75: mol_type = other DNA
aggatgccggctggctgcgtaccctgcgcgccccgaatctgcagctggctgtcgagctgacggacgccggccggg

SEQ ID NO: 59012 - DNA, 75 bp, synthetic construct
  source 1..75: mol_type = other DNA
atccagtacggatttggggacgaaaaccacatcgtcgtttgattacggcactaaatccacgaataacactggtgc

SEQ ID NO: 59013 - DNA, 75 bp, synthetic construct
  source 1..75: mol_type = other DNA
gcgtctgaacggtgtggcagttgaagaactgtccagcaaattcactgtggagccgtctgtgcagcagacgctgga

SEQ ID NO: 59014 - DNA, 75 bp, synthetic construct
  source 1..75: mol_type = other DNA
cgaaacgtgaccggattgaaaactttgaatccgttaacgaagcctatgtggttgaggactaccgctgcgccgcac

SEQ ID NO: 59015 - DNA, 75 bp, synthetic construct
  source 1..75: mol_type = other DNA
acctgaccacgccaccagcccgctggcaactcagctacatgacaggctctgcacggagccggtaaaaaaacaggc

SEQ ID NO: 59016 - DNA, 75 bp, synthetic construct
  source 1..75: mol_type = other DNA
catcccttcagcttccggcaccggttcgggcgctcattcgtaccgtacgggaaaccgtggtgtcagtcgcacggg

SEQ ID NO: 59017 - DNA, 75 bp, synthetic construct
  source 1..75: mol_type = other DNA
tcactgatgaatttgaggattcagaatttacttcacccgcagacgagttccgtaaagccggacacgaagtgatta

SEQ ID NO: 59018 - DNA, 75 bp, synthetic construct
  source 1..75: mol_type = other DNA
gtgatgccgcgaaaaaagcggctaaccgttttgcggtgccaccacctccccgactggtggtgaataaccagaatg

SEQ ID NO: 59019 - DNA, 75 bp, synthetic construct
  source 1..75: mol_type = other DNA
atgaccacaacgcaaaaaacgactgacgttacggccccccgacgcagccactggtggtggacggtgccaggatgt

SEQ ID NO: 59020 - DNA, 75 bp, synthetic construct
  source 1..75: mol_type = other DNA
cgcagtgcgatccgcacgcagaaatgagcgaagaggatcgggaatggattgatgcgcctgcggtgggcaaggaga

SEQ ID NO: 59021 - DNA, 75 bp, synthetic construct
  source 1..75: mol_type = other DNA
gatgtagaaagtaacatcaatatttccaataactcccgcgttgcaggtattgcattatctcaaggtaatacttac

SEQ ID NO: 59022 - DNA, 75 bp, synthetic construct
  source 1..75: mol_type = other DNA
cggtcagcgaaatgaaaggggaaaaaattggtatcggtgtcaccggctccatcgccagcaccaccgacaccgccg

SEQ ID NO: 59023 - DNA, 75 bp, synthetic construct
  source 1..75: mol_type = other DNA
aaccgtcggtcacccagaccctgatgaacaccatgcaggagtcctctgactttctgacccgcatcaacattgtgc

SEQ ID NO: 59024 - DNA, 75 bp, synthetic construct
  source 1..75: mol_type = other DNA
gcgtctgaacggtgtggcagttgaagaactgtccagcaagttcactgtagagccgtctgtgcagcagacgctgga

SEQ ID NO: 59025 - DNA, 75 bp, synthetic construct
  source 1..75: mol_type = other DNA
gcgcctggctgccgagttggcagaacagaaaatgcagttggaacaacagctggtggccgccgcccctaaagtcga

SEQ ID NO: 59026 - DNA, 75 bp, synthetic construct
  source 1..75: mol_type = other DNA
tatttgctgaagcattgccttacctcactcctgctggcgttgagagagcggcaacacaggcaccaacacttgctg

SEQ ID NO: 59027 - DNA, 75 bp, synthetic construct
  source 1..75: mol_type = other DNA
gtgagtgatccgctggggttgctggggggtgagcagacttaccggtatgtgccgaatccgtgtgggtatgttgat

SEQ ID NO: 59028 - DNA, 75 bp, synthetic construct
  source 1..75: mol_type = other DNA
tggcgtactggacaccaatggtggctgggctgatgactcacttaatgttgatgaactgaatatcactctggataa

SEQ ID NO: 59029 - DNA, 75 bp, synthetic construct
  source 1..75: mol_type = other DNA
acatgggtaaatatatttactcaccatcacgtaacctgttttatccggttgcactgaaggcggtttatgaacacg

SEQ ID NO: 59030 - DNA, 75 bp, synthetic construct
  source 1..75: mol_type = other DNA
ggcagaagcccagcgactgcgggcgcaagggctggatattgtggttggcgtggtagaaacccacgggcggaaaga

SEQ ID NO: 59031 - DNA, 75 bp, synthetic construct
  source 1..75: mol_type = other DNA
tgaacaacagcgttgattttaccgttactcaggcagtgatgggctttgaatatacagctacgcttcatgctgaca

SEQ ID NO: 59032 - DNA, 75 bp, synthetic construct
  source 1..75: mol_type = other DNA
gtgagtttgtcacttcattacaggcactgaaagagattggaataaaagcaggcttttcagcttttgcagaagaat

SEQ ID NO: 59033 - DNA, 75 bp, synthetic construct
  source 1..75: mol_type = other DNA
gcggagcgtgtccgcgaccagttgtcggtgatggccagccccaacggtaacctggatgaagtgcatgaaggtctg

SEQ ID NO: 59034 - DNA, 75 bp, synthetic construct
  source 1..75: mol_type = other DNA
tattcaggcccgccagcgtctgggaagtgaggctgtccgccgcgtgttcacgaaaacagcgcagctctggcataa

SEQ ID NO: 59035 - DNA, 75 bp, synthetic construct
  source 1..75: mol_type = other DNA
cagcatccgtaagccgctgctggaaatgctgcgtgaaaaacgtctgacgcaggtccagatccgcgaggaaatcaa

SEQ ID NO: 59036 - DNA, 75 bp, synthetic construct
  source 1..75: mol_type = other DNA
ggcagcttcacggtgaactggggcgtggactacaccctgacgctggataactttatcaagctatttggtcaggga

SEQ ID NO: 59037 - DNA, 75 bp, synthetic construct
  source 1..75: mol_type = other DNA
taaattctggagtaatatcttttgaaagtcctgtagattcaccatctaacgaggatgttgaagttgccctcgaaa

SEQ ID NO: 59038 - DNA, 75 bp, synthetic construct
  source 1..75: mol_type = other DNA
atgacaatagaaaaacacgaaagaagcactaaggatttggtgaaagcagcagtatcgggatggctgggcactgcg

SEQ ID NO: 59039 - DNA, 75 bp, synthetic construct
  source 1..75: mol_type = other DNA
ggtctggggcagatcgacaaatcgctggatgaagcctcacttagcctgcgtgcaggttccctgcgaaccattacg

SEQ ID NO: 59040 - DNA, 75 bp, synthetic construct
  source 1..75: mol_type = other DNA
attctggaaatggaaaacctggtgaaaatcatccgggcgtcgttacagggggccagtatcaccacacagacggtg

SEQ ID NO: 59041 - DNA, 75 bp, synthetic construct
  source 1..75: mol_type = other DNA
agaccattataaatacgcgagcttcctgtagaagctcttgcgaaacgaagctttcacgcaagcaaattcgtaatc

SEQ ID NO: 59042 - DNA, 75 bp, synthetic construct
  source 1..75: mol_type = other DNA
atggcacgaaaaaccaccccactaaccattacggagatcaaaaacgcacgaccaggggaaaaggaatacaccctg

SEQ ID NO: 59043 - DNA, 75 bp, synthetic construct
  source 1..75: mol_type = other DNA
cgaggaaacataagaaaaggtgaatggcttcgaaagagctttctgaacacaacccccaccctcattcctccaatc

SEQ ID NO: 59044 - DNA, 75 bp, synthetic construct
  source 1..75: mol_type = other DNA
cgtacacttgcctataaaacattcgaaaaaatcataattaatacggataataaaacctgtgatatctattttatg

SEQ ID NO: 59045 - DNA, 75 bp, synthetic construct
  source 1..75: mol_type = other DNA
gcgcaatctcgatgatttgcgccggatcgtgcaaacgctgacacaacgcggcgtgggtaatgctgccaacttact

SEQ ID NO: 59046 - DNA, 75 bp, synthetic construct
  source 1..75: mol_type = other DNA
atggaactccgtggctggtttcccaaaggtagtaatacttatctgttgatgcgtgaaacacattacaatgcgggt

SEQ ID NO: 59047 - DNA, 75 bp, synthetic construct
  source 1..75: mol_type = other DNA
actggcagatggtgatccggaaaaactctttcatggtggcaaacgacctgaacggcgggttgctctcaccccgga

SEQ ID NO: 59048 - DNA, 75 bp, synthetic construct
  source 1..75: mol_type = other DNA
atgagtaaaaacccacttgagaccgtcactcaggcggttaattcactgctgactgcgcttaaattaccagatgaa

SEQ ID NO: 59049 - DNA, 75 bp, synthetic construct
  source 1..75: mol_type = other DNA
atgaacatcatcaacgggggtgagcacgctgacaacaacgttgatatccaggaattcatgattcagccggttggc

SEQ ID NO: 59050 - DNA, 75 bp, synthetic construct
  source 1..75: mol_type = other DNA
ttcgatacaaagctatagcagtaaaacataacgagagcatacctgaacgcgaagcccaaaaacttgaaatagaga

SEQ ID NO: 59051 - DNA, 75 bp, synthetic construct
  source 1..75: mol_type = other DNA
aggaatttcagactatgaaggaagcagtcgggataagcaacttttctctggtcacaaaaccgaggggcaagtgct

SEQ ID NO: 59052 - DNA, 75 bp, synthetic construct
  source 1..75: mol_type = other DNA
aatcacggcgttatgttgcacgtatctataacgttgggctatcaaccctatataaacgatttcctgttactggca

SEQ ID NO: 59053 - DNA, 75 bp, synthetic construct
  source 1..75: mol_type = other DNA
caggatgatgaagaaaaaccgcaaccatctggaacaacggcagatgaacagggagaggctgaaacaatggaaccg

SEQ ID NO: 59054 - DNA, 75 bp, synthetic construct
  source 1..75: mol_type = other DNA
caggataaagcggaacaaaacagcccaaatgcgttacaaaacgagccaaaaacaaaacaacctgaaccagtagtg

SEQ ID NO: 59055 - DNA, 75 bp, synthetic construct
  source 1..75: mol_type = other DNA
acgatgtcaaaacctggaccggcggcccgctgaattataaagaaggattcttcacccagttagccaccgatgagc

SEQ ID NO: 59056 - DNA, 75 bp, synthetic construct
  source 1..75: mol_type = other DNA
aattcttcgcgcttatgtgctttgcacgaaagaaggcagaccaaaagtgttagggtattacactttgtcaggtag

SEQ ID NO: 59057 - DNA, 75 bp, synthetic construct
  source 1..75: mol_type = other DNA
ccccgggtgataggagagctggcgggaacaagtaaccagtatgtttttaatggcggtgccatcgctctgatgcgt

SEQ ID NO: 59058 - DNA, 75 bp, synthetic construct
  source 1..75: mol_type = other DNA
ggtcttggacggtgattccaatgtaattcgtgaatatgatacaaatgatattgactatggtatttacgatgccgg

SEQ ID NO: 59059 - DNA, 75 bp, synthetic construct
  source 1..75: mol_type = other DNA
gatgttgaggattatcaggaacgcccggcgaatggctgggatattcgtgctgagggctatttacctgcctggccg

SEQ ID NO: 59060 - DNA, 75 bp, synthetic construct
  source 1..75: mol_type = other DNA
gacgcccatgcgcgcttatcccgttttgcaccctatctggcaaaagcatttcctgaaactgctgccactgggggg

SEQ ID NO: 59061 - DNA, 75 bp, synthetic construct
  source 1..75: mol_type = other DNA
tgccgattgttctctattccggcgcgttggcgctcaacagcctgtttcatgtgggtgagtcgctacaactttccg

SEQ ID NO: 59062 - DNA, 75 bp, synthetic construct
  source 1..75: mol_type = other DNA
tgaccaccaccgtcgttgccgttgacatcattctccagcagcactttgtcggctttgacggcaaggtctgcgcgg

SEQ ID NO: 59063 - DNA, 75 bp, synthetic construct
  source 1..75: mol_type = other DNA
gtgcgtatttctcttcaggaactacaacttgagttaatggttgaatatgcactttttttcagtgtaatggctggc

SEQ ID NO: 59064 - DNA, 75 bp, synthetic construct
  source 1..75: mol_type = other DNA
gtatacagtcggcgacgacgcctgatgagttgctctcggcgctggatgacaagggaggcacgcaaccttctgcct

SEQ ID NO: 59065 - DNA, 75 bp, synthetic construct
  source 1..75: mol_type = other DNA
tgaaacacgtcccggaagtttcctcgttccacgttctttaggtaaagagatctcgtgggataaattttttatggc

SEQ ID NO: 59066 - DNA, 75 bp, synthetic construct
  source 1..75: mol_type = other DNA
gctggggaaaaagttactttactgtgtggccgggaagacttttataatccgacaaaaattcagcagttacgctct

SEQ ID NO: 59067 - DNA, 75 bp, synthetic construct
  source 1..75: mol_type = other DNA
ctcgtcttcagcagcgcactacagccatcatgcgctatgcagtgcaaagtgggttaattgattataacccggcac

SEQ ID NO: 59068 - DNA, 75 bp, synthetic construct
  source 1..75: mol_type = other DNA
cctttgattctgtcagtatccgcggcattcgtttatacagcgacagccgcatgttgcctccgacattagcgagtt

SEQ ID NO: 59069 - DNA, 75 bp, synthetic construct
  source 1..75: mol_type = other DNA
agtcttcggacaaccctgtgcagggaaaacaaatctgacagcagagttaatttctgctgttgtggagaataataa

SEQ ID NO: 59070 - DNA, 75 bp, synthetic construct
  source 1..75: mol_type = other DNA
agatatgccatgccacccggtatgttgttgcccagggcctgtgttggttgttctggtgtctgaaatacgccgtca

SEQ ID NO: 59071 - DNA, 75 bp, synthetic construct
  source 1..75: mol_type = other DNA
gcgcagttcgtccatatttaccaaaattatgaacacagccccgaacacggtggatcccgttaccgtctgcagtag

SEQ ID NO: 59072 - DNA, 75 bp, synthetic construct
  source 1..75: mol_type = other DNA
atcaggaaatgccatgtttatttccctgatgaccgaacaaacagaagcaacggagataaaaatgaacatgcgtaa

SEQ ID NO: 59073 - DNA, 75 bp, synthetic construct
  source 1..75: mol_type = other DNA
aatactttaatctgaccctgaaaggtctggggtatctcagtaatgtacgtcaggtgaatcaccagaacggctcgt

SEQ ID NO: 59074 - DNA, 75 bp, synthetic construct
  source 1..75: mol_type = other DNA
accagatcaaagggttatgtatttgtctggtggtgatttatcactcggtcattaccttttatccgcatctgacca

SEQ ID NO: 59075 - DNA, 75 bp, synthetic construct
  source 1..75: mol_type = other DNA
gatatccctgaggggtatgtgcgcgtggctgccgtgcatggtgtgcctgcagaagtgctctatgccgtctctctg

SEQ ID NO: 59076 - DNA, 75 bp, synthetic construct
  source 1..75: mol_type = other DNA
ttcttaatgaacttaaatctatgacaggaaattatcgttatgttttcccgggacggaatgatccaaacaaaccta

SEQ ID NO: 59077 - DNA, 75 bp, synthetic construct
  source 1..75: mol_type = other DNA
tgaaggcccgcctgatcaaggtggactggatcaagataggccaggagatggtttacaaggctgaaaaatcagact

SEQ ID NO: 59078 - DNA, 75 bp, synthetic construct
  source 1..75: mol_type = other DNA
actgtttaaatttgaggcaaaaccaattatccctgacgatattcgttctggtgaatatagtagcgcattgtcatt

SEQ ID NO: 59079 - DNA, 75 bp, synthetic construct
  source 1..75: mol_type = other DNA
caggaaaaaatcgccattattcagcagacaatggaacccggtatgacggtgtcccatgtggcgcgtttgcatggt

SEQ ID NO: 59080 - DNA, 75 bp, synthetic construct
  source 1..75: mol_type = other DNA
cggtaaatttcgttactgcataccgggcgctgatttaccggcagagccggaagctgcatccgtagcggaaaccga

SEQ ID NO: 59081 - DNA, 75 bp, synthetic construct
  source 1..75: mol_type = other DNA
tatacagctacgcttcatgctgacaatactccgggctcttttgaaactgctgcttcctacaccgttgtgtatgag

SEQ ID NO: 59082 - DNA, 75 bp, synthetic construct
  source 1..75: mol_type = other DNA
atgaaactggcaccgaacgtaaaacagcagtcacgcggcataaaacacaaaggaacagaagtcattatttttgcg

SEQ ID NO: 59083 - DNA, 75 bp, synthetic construct
  source 1..75: mol_type = other DNA
aggacagcgtgccggcggatatctggggagacaacctgatgctgcactatgtcggcaaaccgcagcccggggcgg

SEQ ID NO: 59084 - DNA, 75 bp, synthetic construct
  source 1..75: mol_type = other DNA
accagctggtgattaatggtggtcaggcaaccggcaaaacctggcttgcgtttacaaatgtcggaaacagcaacc

SEQ ID NO: 59085 - DNA, 75 bp, synthetic construct
  source 1..75: mol_type = other DNA
atgaaactggcaccgaacgtaaaaaaacagccacgcggaataaaacacaaagacacagaggtgattattttcgcg

SEQ ID NO: 59086 - DNA, 75 bp, synthetic construct
  source 1..75: mol_type = other DNA
agtagatgatgtaataataaataaaacaagacaaaatgagttagtaaaagtattttgcgagtataaaacagagtt

SEQ ID NO: 59087 - DNA, 75 bp, synthetic construct
  source 1..75: mol_type = other DNA
ttgcacctgctgcatcgcctctcgcttcgaccatcgttcagaccccggacgacgcgattgtggcgggcttcacct

SEQ ID NO: 59088 - DNA, 75 bp, synthetic construct
  source 1..75: mol_type = other DNA
gagttctacgaagctgaggcgaaaaaacaggcgaagcagtttttcatggatattgttgccgggttatgcgaaggg

SEQ ID NO: 59089 - DNA, 75 bp, synthetic construct
  source 1..75: mol_type = other DNA
ataagaactggtataaaacgccaaatgcagcgccgcgtgtttttgataccggcggtcatcaaaccggagcggcta

SEQ ID NO: 59090 - DNA, 75 bp, synthetic construct
  source 1..75: mol_type = other DNA
tccagtacggatttggggacgaaaaccacatcgtcgtttgattacggcactaaatccacgaataacaccggggcg

SEQ ID NO: 59091 - DNA, 75 bp, synthetic construct
  source 1..75: mol_type = other DNA
ttcattggtggttttaatatttattctgatggtactaaacgagtagtttctaacggtgaggctactaaaactatg

SEQ ID NO: 59092 - DNA, 75 bp, synthetic construct
  source 1..75: mol_type = other DNA
tccatcgcaccagcacagtgaggagctcattgaatttgccattgattacctgaagaacaataaaaagcaggggct

SEQ ID NO: 59093 - DNA, 75 bp, synthetic construct
  source 1..75: mol_type = other DNA
aatgcggccagctggcgggagaaccgccattatccgcagcgcatcctgcgcgaactggcaccgcgatatctcaca

SEQ ID NO: 59094 - DNA, 75 bp, synthetic construct
  source 1..75: mol_type = other DNA
ttaacgaaaaatattctaaggctgttaatattttaaaggataaccttaaagaacactaccatattttttatggtt

SEQ ID NO: 59095 - DNA, 75 bp, synthetic construct
  source 1..75: mol_type = other DNA
ggcgttatctgctcaatatcacaggacgcctcggcgctgtatcctgcggggttttctgtggttgaggtcgatgaa

SEQ ID NO: 59096 - DNA, 75 bp, synthetic construct
  source 1..75: mol_type = other DNA
tgagtgaagcgagtattaatcaggtattcaaacggattgggtatacgggaaaggttactggacatggttttcggc

SEQ ID NO: 59097 - DNA, 75 bp, synthetic construct
  source 1..75: mol_type = other DNA
caggagcaggtctataaggctgaaaaagcggagtccctgccaccgcaaaatggcacaactaaacgtcaatacgca

SEQ ID NO: 59098 - DNA, 75 bp, synthetic construct
  source 1..75: mol_type = other DNA
aaaataatataagaggaacctataatcatgctgtatatattgaggggagaagggggatgatacagtggtattcgg

SEQ ID NO: 59099 - DNA, 75 bp, synthetic construct
  source 1..75: mol_type = other DNA
cagccgccacttcaggcatctcaagagtggcgcggtagctgaagaccagcatctgctgctgacaaccatcctggc

SEQ ID NO: 59100 - DNA, 75 bp, synthetic construct
  source 1..75: mol_type = other DNA
cgagaaccggggttatccgcaacgcatcctgtaccagaacgcgccgcgctatctgtcatggggaggggctaactg

SEQ ID NO: 59101 - DNA, 75 bp, synthetic construct
  source 1..75: mol_type = other DNA
attgagtacgtgcagacgcacagcgcaccgcagccggttccggcagatattcgcaaatttgttaccgtcaaaatt

SEQ ID NO: 59102 - DNA, 75 bp, synthetic construct
  source 1..75: mol_type = other DNA
gcgggtttatccgttttgttactggaacgcgctgaaatccccggcagcaaaaatctttccggcgggcggttatat

SEQ ID NO: 59103 - DNA, 75 bp, synthetic construct
  source 1..75: mol_type = other DNA
atggatggattgtctataccatcgtttgcgatccttcggacatgctcgttgtgcagatgaccgaagataaggccc

SEQ ID NO: 59104 - DNA, 75 bp, synthetic construct
  source 1..75: mol_type = other DNA
attcaaagattgtttgttacaaggagttaatgcagcagacattatgtttccttgtactttttctcttgtaagttg

SEQ ID NO: 59105 - DNA, 75 bp, synthetic construct
  source 1..75: mol_type = other DNA
aattgctggatggggttgaagttgagtggagaaatcttggtgatacttcactcttcgaaatagcgaataatggaa

SEQ ID NO: 59106 - DNA, 75 bp, synthetic construct
  source 1..75: mol_type = other DNA
aactaatgtttgcggcctgattacattaaaaagtaaatacccattaatctacaaatttctgttttactggctaac

SEQ ID NO: 59107 - DNA, 75 bp, synthetic construct
  source 1..75: mol_type = other DNA
catgtcaattatgattgctttcctggtcgccaggaatatggcgattagctatgagcaagatgatcttttatgcgg

SEQ ID NO: 59108 - DNA, 75 bp, synthetic construct
  source 1..75: mol_type = other DNA
tttcctgtctggcaatggtaacccctcctgcgctgacagctgaatttaaccttaacgttctcgataagtcgattc

SEQ ID NO: 59109 - DNA, 75 bp, synthetic construct
  source 1..75: mol_type = other DNA
tgcggtttttttgtacgcattattttgtcacgcccaaattatggtggggcgtacaggggcatcgcaagatgcgcc

SEQ ID NO: 59110 - DNA, 75 bp, synthetic construct
  source 1..75: mol_type = other DNA
atgacaaaaccagtatcaatcagcaagaagccccgtaaccaacatacgcctgaatttcgtaacgaagccctgaaa

SEQ ID NO: 59111 - DNA, 75 bp, synthetic construct
  source 1..75: mol_type = other DNA
tgctgcgtgtggagcgagcgctggaaaggtgtgtgaaacaacagccgccgcagaaggtatatgacgctgcggtgt

SEQ ID NO: 59112 - DNA, 75 bp, synthetic construct
  source 1..75: mol_type = other DNA
acgaatcgcggccgggtggacttgtattgccttcatcattctggcgggctgttgcaggggtgaaaggactggagg

SEQ ID NO: 59113 - DNA, 75 bp, synthetic construct
  source 1..75: mol_type = other DNA
tgaatttcgcagtgaagccctgaagcttgctgaacgcatcggtgttgctgccgcagcccgtgaactcagcctgta

SEQ ID NO: 59114 - DNA, 75 bp, synthetic construct
  source 1..75: mol_type = other DNA
gattgcagcctgaaattgaaaatacgattaccacgtttatgttatgctgttttatcctcatatacagtttcaatt

SEQ ID NO: 59115 - DNA, 75 bp, synthetic construct
  source 1..75: mol_type = other DNA
gcgtcccatgtggtgagttttcaaaattcgcacatgaggatgtcactatggcaaccacccctacccaaactcacc

SEQ ID NO: 59116 - DNA, 75 bp, synthetic construct
  source 1..75: mol_type = other DNA
catcgttcggctataccttccgccgcaaggggatgcctgttattgaccaatacgacacggcaggcggcaaagtgc

SEQ ID NO: 59117 - DNA, 75 bp, synthetic construct
  source 1..75: mol_type = other DNA
aagaaggtaaccacacaacggcataccgcgatgggtccggcatctggaccatctgtcggggtgccacgatggtgg

SEQ ID NO: 59118 - DNA, 75 bp, synthetic construct
  source 1..75: mol_type = other DNA
gaacaataaatgaaatgagttcatataccccacatatgaaagtaaataggattagcgaaaacttgaaaaaggtac

SEQ ID NO: 59119 - DNA, 75 bp, synthetic construct
  source 1..75: mol_type = other DNA
ccgcgaaagcgccgagagcatcttcgacgaggaagcaaaagccacccgtcgcgccaccaatggcatcctgttgcg

SEQ ID NO: 59120 - DNA, 75 bp, synthetic construct
  source 1..75: mol_type = other DNA
atccattaggattagaaacactaaaatgcattaagccactgcattcaatgggcggaactggtgaaagaagcggtc

SEQ ID NO: 59121 - DNA, 75 bp, synthetic construct
  source 1..75: mol_type = other DNA
atgaatatgtttttcaaacaaaaattgctatatttacaaaatttaaaaatgataatagatatgactataaagata

SEQ ID NO: 59122 - DNA, 75 bp, synthetic construct
  source 1..75: mol_type = other DNA
ggtggtcggtagcccggtatcgctgggcaaggatggtaaagctgccgatctctggaaagacaatctgatgggcca

SEQ ID NO: 59123 - DNA, 75 bp, synthetic construct
  source 1..75: mol_type = other DNA
atcgactgcttaacggctggcaactatcaaaactgcatacttttgaagtggctgccaggcatcagtccttcgccc

SEQ ID NO: 59124 - DNA, 75 bp, synthetic construct
  source 1..75: mol_type = other DNA
gcttggtgcctgtcagaaactccaggaggctgttggcttaccgaatctggcaccgcgctatgccattgatgctcc

SEQ ID NO: 59125 - DNA, 75 bp, synthetic construct
  source 1..75: mol_type = other DNA
tcttgagccgtcggtggctgcagcgaaagcggggaaactgccggaggcgtttttctggacggatgcggaaaacaa

SEQ ID NO: 59126 - DNA, 75 bp, synthetic construct
  source 1..75: mol_type = other DNA
acctgatagacagcatgatcagaccgctgctgatggtgttcggattcttttttgcatcggtcgccatcgtggccg

SEQ ID NO: 59127 - DNA, 75 bp, synthetic construct
  source 1..75: mol_type = other DNA
agtcaatatggcaccaatattactattaatgatggtgacagaattactggagataccgccgatccatcaggaaac

SEQ ID NO: 59128 - DNA, 75 bp, synthetic construct
  source 1..75: mol_type = other DNA
gattccagcttacgtgccaggccgttatttaacagttatcgaaaaattatcgcctcccccgattatatttcccgc

SEQ ID NO: 59129 - DNA, 75 bp, synthetic construct
  source 1..75: mol_type = other DNA
gcctcagccacgtccggcacgacccggcgcactgtctggcccccggcctgttccgtgccctcaagcggggcgagc

SEQ ID NO: 59130 - DNA, 75 bp, synthetic construct
  source 1..75: mol_type = other DNA
ctggcactgtttatcggcttacgcagccgcaaaaaaacgcggcatcactcgctaaaggaaaatgtcgctccgggt

SEQ ID NO: 59131 - DNA, 75 bp, synthetic construct
  source 1..75: mol_type = other DNA
ggaaatccacattcgccagcgcaccatgaagaaggacctggaatcgctgagcagtgcggatgagatcctggcata

SEQ ID NO: 59132 - DNA, 75 bp, synthetic construct
  source 1..75: mol_type = other DNA
atgctcatatcaaatatcggtaatcttgaggaatacacatttgttcccgtaccaccatccaaatgccgtacagat

SEQ ID NO: 59133 - DNA, 75 bp, synthetic construct
  source 1..75: mol_type = other DNA
aaaaatgacggtgatagcaatactgtagaaatcacagcaaccccaagatcaggtggcgctatttaccaaacgcaa

SEQ ID NO: 59134 - DNA, 75 bp, synthetic construct
  source 1..75: mol_type = other DNA
acggttcagggctggcggcagggcagtggcgcgttatggcgtccggggttatctgtcatcgttttcgacccgctg

SEQ ID NO: 59135 - DNA, 75 bp, synthetic construct
  source 1..75: mol_type = other DNA
tatctggaatctgtacaccctgaacaacggtggcgcatttatggcacccgaaccggatgacgaaacatgggtgct

SEQ ID NO: 59136 - DNA, 75 bp, synthetic construct
  source 1..75: mol_type = other DNA
gctttctggaagtcgcgtcccgaacccggcagcaactcagcaacatcatgcgctatgccgttcagcaggggctta

SEQ ID NO: 59137 - DNA, 75 bp, synthetic construct
  source 1..75: mol_type = other DNA
aaatgattttaatcagacggccaaatcctcgacttcactgatgacagaatcagctaaaaccgccagtggtaatta

SEQ ID NO: 59138 - DNA, 75 bp, synthetic construct
  source 1..75: mol_type = other DNA
agaggaagtcgagcagcttacggatatatatacttaattgacagcatgataagaccacctctcatggtattcggt

SEQ ID NO: 59139 - DNA, 75 bp, synthetic construct
  source 1..75: mol_type = other DNA
attatggggatagtctggttcctgtttattggaatccgccatgttgtccgcaccggccaccagggcaatgtcttt

SEQ ID NO: 59140 - DNA, 75 bp, synthetic construct
  source 1..75: mol_type = other DNA
tctggtcgaatttcatgttcatacacatactcatacacgttgggataaaaagttcacttcacgagaagaacagtg

SEQ ID NO: 59141 - DNA, 75 bp, synthetic construct
  source 1..75: mol_type = other DNA
cagaatgaagactttggtgagtcggaatggattagttacaccgggtcgggttatctgctccacctgggtgcctag

SEQ ID NO: 59142 - DNA, 75 bp, synthetic construct
  source 1..75: mol_type = other DNA
agtgggacgcttttgttgaataacgataacgtgttgggtaatacccatgaactgcgtctggcggcagagactgaa

SEQ ID NO: 59143 - DNA, 75 bp, synthetic construct
  source 1..75: mol_type = other DNA
cagatcagtccttctctctcccctgatgggccagaaaacacatcgtcttctcaaaaatcccgcaagactggcaca

SEQ ID NO: 59144 - DNA, 75 bp, synthetic construct
  source 1..75: mol_type = other DNA
actcaatcgctggttccgtgatggaagagggcgtcgcgtccacgttatacgctgggagcctgaaacacagcgggt

SEQ ID NO: 59145 - DNA, 75 bp, synthetic construct
  source 1..75: mol_type = other DNA
atcgaagaagatgaacgggaaatagagcatctgcgggctcagatagaaaaactgcgccggatgctgttcggaacc

SEQ ID NO: 59146 - DNA, 75 bp, synthetic construct
  source 1..75: mol_type = other DNA
cagatagttttatagataatatggagaaagctgggattctgtctgagcttacttgttctataatcaatgaagtgg

SEQ ID NO: 59147 - DNA, 75 bp, synthetic construct
  source 1..75: mol_type = other DNA
tgtggacgggaagtgaaatttacccttgaggtgctccggggagactctgttgagagcgcttcacgcgtatggtca

SEQ ID NO: 59148 - DNA, 75 bp, synthetic construct
  source 1..75: mol_type = other DNA
ggtgttctacacgcggatacagcacggtgagccgcaggtggagagccgctacctctatgacccgctgggccgccg

SEQ ID NO: 59149 - DNA, 75 bp, synthetic construct
  source 1..75: mol_type = other DNA
gtcgctggaccggtgccgttgctgaactgctggagccgctgtatgacgtcctgcgccagtatgtactgatgcccg

SEQ ID NO: 59150 - DNA, 75 bp, synthetic construct
  source 1..75: mol_type = other DNA
aaaactgactaccggggctgtcactatgactactctcccaaccctctctcaacctgaaattgccatcgttgatgg

SEQ ID NO: 59151 - DNA, 75 bp, synthetic construct
  source 1..75: mol_type = other DNA
gcccgtgcggaagcgaaaaaacgttatcagaaggcttatgctgccagtcttcatgtgcaggaatccctggcatga

SEQ ID NO: 59152 - DNA, 75 bp, synthetic construct
  source 1..75: mol_type = other DNA
attttggcggtgttgttaaaacggcctcagcactaggaacgtcaaaaaccactgtcagcatgtgggaagaggatg

SEQ ID NO: 59153 - DNA, 75 bp, synthetic construct
  source 1..75: mol_type = other DNA
catacacatccctggaatcagatcactggtgtgccaacagcttcattgacagcgaaaggcatcactcagctcagt

SEQ ID NO: 59154 - DNA, 75 bp, synthetic construct
  source 1..75: mol_type = other DNA
cgcagcttggcggtgtcggggtccgctggaatatctggaccggcgagacgcactacgacgcctggccgcacaaag

SEQ ID NO: 59155 - DNA, 75 bp, synthetic construct
  source 1..75: mol_type = other DNA
ggcgatatcaaaggcgcatgtgatcagctacgtcgctggacatatgctggcggtaagcaatggaaaggtctcatg

SEQ ID NO: 59156 - DNA, 75 bp, synthetic construct
  source 1..75: mol_type = other DNA
cgatgcagaaagcgacctgtatgaagtcgaaatgcgcggacgtgtgacggaaattgatatgggggaagccaaaca

SEQ ID NO: 59157 - DNA, 75 bp, synthetic construct
  source 1..75: mol_type = other DNA
tgcgtgaaatccatcaaatctggacaagccagctttatccaatgcttaaggccgttgaatctccgctggctagca

SEQ ID NO: 59158 - DNA, 75 bp, synthetic construct
  source 1..75: mol_type = other DNA
aactgtacgaccgtgttggtgatgctgtttttggcgctgcacttgttgattccaggctgaatggttctgacaagg

SEQ ID NO: 59159 - DNA, 75 bp, synthetic construct
  source 1..75: mol_type = other DNA
aaactcaacccatattccaaagctgataaatatgggcgtaataaaaaagtctgaggatttaattaccaaaccatg

SEQ ID NO: 59160 - DNA, 75 bp, synthetic construct
  source 1..75: mol_type = other DNA
agcggtcagcgggcgctaaggcagagctggcactggcggagaaactggggcatgcggtgatttatcaggaggtgg

SEQ ID NO: 59161 - DNA, 75 bp, synthetic construct
  source 1..75: mol_type = other DNA
cttgcagtagctaattactttactaaacggcatgagcgggttttagatagaattagaaacctcgaatgttccgct

SEQ ID NO: 59162 - DNA, 75 bp, synthetic construct
  source 1..75: mol_type = other DNA
aaatacctggggtgtacaaggctcagtaggtatgtctacggggtggttagcgaataccagtacagatggtaatca

SEQ ID NO: 59163 - DNA, 75 bp, synthetic construct
  source 1..75: mol_type = other DNA
cccctcagactgtgcgtcttactccggtgagatttcattcccctttttctccaggttcgtcgaatattaatgcga

SEQ ID NO: 59164 - DNA, 75 bp, synthetic construct
  source 1..75: mol_type = other DNA
gttgccaacttcttctccaaacgtcatgacgatgtactgaaaaagatccgcacgcttgaatgttccgcatcattc

SEQ ID NO: 59165 - DNA, 75 bp, synthetic construct
  source 1..75: mol_type = other DNA
ccccgcctgcaccgacgccagtgattgtccacaacgcctgcccgaaagtgagcctttgcccgatgccgggcagtg

SEQ ID NO: 59166 - DNA, 75 bp, synthetic construct
  source 1..75: mol_type = other DNA
acagcgtgtaacggccattatgcgttatgctgtacagaacgattacattgactcgaatccggccagtgatatggc

SEQ ID NO: 59167 - DNA, 75 bp, synthetic construct
  source 1..75: mol_type = other DNA
ggaccagcatatatccagtaccaagtagaaaatagcaaagcgagaaaccagcgagtaaattacttgctaaaagat

SEQ ID NO: 59168 - DNA, 75 bp, synthetic construct
  source 1..75: mol_type = other DNA
tttactcagttaagcagtgcgaccaacagcacgtctgaaacactggccgcaacgccgaaagcggtaaaggccgcc

SEQ ID NO: 59169 - DNA, 75 bp, synthetic construct
  source 1..75: mol_type = other DNA
aacatacgattaagactcaaccgcttgaagatactccgtcatcggcaccagctgcaccgatggtggattcgttaa

SEQ ID NO: 59170 - DNA, 75 bp, synthetic construct
  source 1..75: mol_type = other DNA
gctggaaaactcagaaaccgtggcggatgcgctgacccgtgctgcccggcatcgcggggtgctggtgaccagtaa

SEQ ID NO: 59171 - DNA, 75 bp, synthetic construct
  source 1..75: mol_type = other DNA
ctgagaatgaagtcaggggcgaactgacgtttattgaaaaggctcagggaatccataaagcacggatgatttatg

SEQ ID NO: 59172 - DNA, 75 bp, synthetic construct
  source 1..75: mol_type = other DNA
gcgcgggaatggcgggaaattccccgcacggagcctgacccggaaatcacaccggataacagttaccgcaattat

SEQ ID NO: 59173 - DNA, 75 bp, synthetic construct
  source 1..75: mol_type = other DNA
gattttcttgatgcgaaccgggagaaggggatcagtccgtttgaatacgcaaatgttaacaatccgctgagaagg

SEQ ID NO: 59174 - DNA, 75 bp, synthetic construct
  source 1..75: mol_type = other DNA
gtgtaggagatgctgtttttggcgctgcacttgttgattccagacttaatggttctgacaaggaggcgcacccat

SEQ ID NO: 59175 - DNA, 75 bp, synthetic construct
  source 1..75: mol_type = other DNA
acgccctgaatgaaacctgtgaggcgcttgtccgggcaatgcatctgagcatcctggtacaggaaaatccgctcg

SEQ ID NO: 59176 - DNA, 75 bp, synthetic construct
  source 1..75: mol_type = other DNA
ggggaaaccggggaatgtactgaccgttaacggcaactataccggaaacaatggcctgatgacgttcaacgcgac

SEQ ID NO: 59177 - DNA, 75 bp, synthetic construct
  source 1..75: mol_type = other DNA
gtgagcagcaggattgaactgtatatcggcggcagtattttttccggctggctgacggtcagcgtccgtcgctcg

SEQ ID NO: 59178 - DNA, 75 bp, synthetic construct
  source 1..75: mol_type = other DNA
aggttccccgccagttgcgacagtcacgtcatcgtcgtccgttaccagcacatcttccccgtgaaatacaccgcc

SEQ ID NO: 59179 - DNA, 75 bp, synthetic construct
  source 1..75: mol_type = other DNA
tcaggaaggccagcaccaggattaccagcgcacgcagtatgaggtgtatgactaccccggacgtttcaagggcgc

SEQ ID NO: 59180 - DNA, 75 bp, synthetic construct
  source 1..75: mol_type = other DNA
cgcaggtcagaagaataacgtgttccttccggcaaaggttggtcttgcgggtgacccccccacagaacaagagtt

SEQ ID NO: 59181 - DNA, 75 bp, synthetic construct
  source 1..75: mol_type = other DNA
agaatatcagtgatattgaaacagcaaatgcatggttgccgacctttattgaagcctataacaaccggttcgcta

SEQ ID NO: 59182 - DNA, 75 bp, synthetic construct
  source 1..75: mol_type = other DNA
tgtcaccatcatggatcccgatccggattcagcggtgatttctcgtttttttgcatccctgaaagcaaaaattca

SEQ ID NO: 59183 - DNA, 75 bp, synthetic construct
  source 1..75: mol_type = other DNA
acaggctggcggtcaggctgtcgctgattatcagccgtcttgtggcgggtgaaacgttagagatgcaaaaactgg

SEQ ID NO: 59184 - DNA, 75 bp, synthetic construct
  source 1..75: mol_type = other DNA
cgcattgttacccgaaacagagaaggcaaagatcgaaagttacattgaatttgtcatcagccagaacgaaagaag

SEQ ID NO: 59185 - DNA, 75 bp, synthetic construct
  source 1..75: mol_type = other DNA
aagccgtccctgtttgcccgcgtcacggcactgttcaccaaaaaagagcagtccgacgatgcccggttctctgat

SEQ ID NO: 59186 - DNA, 75 bp, synthetic construct
  source 1..75: mol_type = other DNA
aacatcaattcaaacaccaaaaagatattcaataatcttgataacctatcttatatacagaggacaactttccga

SEQ ID NO: 59187 - DNA, 75 bp, synthetic construct
  source 1..75: mol_type = other DNA
caggttgcgcgaaaaattgaagctgccgccaataaaccccgtaactggcttgatatcgatcgctcgctttctcag

SEQ ID NO: 59188 - DNA, 75 bp, synthetic construct
  source 1..75: mol_type = other DNA
ttcgccagtatgagcgggataccgggggcggagatggagggctcaccagtgctgaacgtcagcgtctgaaagagc

SEQ ID NO: 59189 - DNA, 75 bp, synthetic construct
  source 1..75: mol_type = other DNA
gtcctgcgtcaaagtgaacccgaaagcgggagcttacggggaggaagggaactggatggtactggagaggaaata

SEQ ID NO: 59190 - DNA, 75 bp, synthetic construct
  source 1..75: mol_type = other DNA
ccggagaaccgccggacgctgactctccctgataacctgccggaaacgaaacaggcgtttgctgagggcgtcaca

SEQ ID NO: 59191 - DNA, 75 bp, synthetic construct
  source 1..75: mol_type = other DNA
gcgatggtcagtaataccgcgacggtactgcgcgtaattaacgataaaggtgaaaatggctggctggaaatcccg

SEQ ID NO: 59192 - DNA, 75 bp, synthetic construct
  source 1..75: mol_type = other DNA
atgagtgggtggcgtcaccattgcagcaacaggcgctgcaatggtgacgccaccgcgttgggggaggacaatgac

SEQ ID NO: 59193 - DNA, 75 bp, synthetic construct
  source 1..75: mol_type = other DNA
agccggggagcttcgcgccgctcatccgcatcgaaacagacaacggcgagcgggagaaagcgcagcgccgcagcc

SEQ ID NO: 59194 - DNA, 75 bp, synthetic construct
  source 1..75: mol_type = other DNA
acgaactactgatacaggaacgtgaacatgagctattcctagagcgtgagcgccatctggaaatacaggaacgga

SEQ ID NO: 59195 - DNA, 75 bp, synthetic construct
  source 1..75: mol_type = other DNA
agccagcggctttcttcaacgctttgaccctttaatgtttgttgtggattacaaccgttctaccgaactttttgt

SEQ ID NO: 59196 - DNA, 75 bp, synthetic construct
  source 1..75: mol_type = other DNA
tcacaatacagacacagacaaccgtgaaggttactggcaacccaagcaccgcacatgttgctagctttatcgctg

SEQ ID NO: 59197 - DNA, 75 bp, synthetic construct
  source 1..75: mol_type = other DNA
atatggtgcttgtcgtagcgacacaatcgccggatgaactaattaaatcacctatcgcggctgccgttcgtgagc

SEQ ID NO: 59198 - DNA, 75 bp, synthetic construct
  source 1..75: mol_type = other DNA
catcatgcctgtcgtacggagttttatgccatgacggtccattattaccggttgcgggattacgccctgcagcat

SEQ ID NO: 59199 - DNA, 75 bp, synthetic construct
  source 1..75: mol_type = other DNA
caatcacatgtatctggtgtgataaatcgcgttacatgacctttcatgttgtgctggtggttatcacgacgttct

SEQ ID NO: 59200 - DNA, 75 bp, synthetic construct
  source 1..75: mol_type = other DNA
gggaagaggaacaaacgcttaatcgcggtttacatcagcgcggcgttaatcgggtgatttttattagacacgttt

SEQ ID NO: 59201 - DNA, 75 bp, synthetic construct
  source 1..75: mol_type = other DNA
ccgcgcgatggtcgtgattatgatccggaggtgctgcagcaggcggtgaatgatgcggtcgcgaaaataccggta

SEQ ID NO: 59202 - DNA, 75 bp, synthetic construct
  source 1..75: mol_type = other DNA
aatcgttactggctggcatggggatgccgtgtccaaaagagatagccatccaacagatttcgcaactggcagatg

SEQ ID NO: 59203 - DNA, 75 bp, synthetic construct
  source 1..75: mol_type = other DNA
gaagactgccgccaggactaccgccagcgtgcaacaggcggtaacgcccccgctgacactctgaccaattgctga

SEQ ID NO: 59204 - DNA, 75 bp, synthetic construct
  source 1..75: mol_type = other DNA
ggtatcgatccagaagcgtatctgcgccatatcctgagcgtactgccggaatggccctccaaccgtgttgacgaa

SEQ ID NO: 59205 - DNA, 75 bp, synthetic construct
  source 1..75: mol_type = other DNA
tgctgatttttttgcgacctataaagcgacattaccaatcattggacgtctgatgaacatcagtcaggctatgat

SEQ ID NO: 59206 - DNA, 75 bp, synthetic construct
  source 1..75: mol_type = other DNA
agcggagctggcaaagaaagtagccatggtgctgacaaaagaaaagcctcaagactgcggcaacagttttgaggc

SEQ ID NO: 59207 - DNA, 75 bp, synthetic construct
  source 1..75: mol_type = other DNA
gttacggcaaagtgactgcgctggttgcagaagaaatccaggacggtccgctggcgggcaagatggcactttacg

SEQ ID NO: 59208 - DNA, 75 bp, synthetic construct
  source 1..75: mol_type = other DNA
atctactggcgacctggcagattgacggagcttattttgaatgtgtagatgaagcggatctagccttgcttactg

SEQ ID NO: 59209 - DNA, 75 bp, synthetic construct
  source 1..75: mol_type = other DNA
gcctggggctggtggtgttactgccgttagctaacccattaacaactgtcgcgttatttcttggcctggcaggca

SEQ ID NO: 59210 - DNA, 75 bp, synthetic construct
  source 1..75: mol_type = other DNA
cgccgcccataacccgctggcaaaccgtaagcagaaccctgaaaacctgtttaccgctgccgaagaaacgcagat

SEQ ID NO: 59211 - DNA, 75 bp, synthetic construct
  source 1..75: mol_type = other DNA
ccggtcatctgtccggagaggatgccgtctctcttgtggtttatgatggtctgccgcaggacagtattattgaac

SEQ ID NO: 59212 - DNA, 75 bp, synthetic construct
  source 1..75: mol_type = other DNA
ctgggccatcagcgaattgccctgctgagtgaggacaactcccgtgcctatgtcactgcacgacgtcagggatgg

SEQ ID NO: 59213 - DNA, 75 bp, synthetic construct
  source 1..75: mol_type = other DNA
ttatcaacgaagcgaaagagcaggttcagcaggcgctgaatgcgcgtaaagcggaactggaaagcgcagcactga

SEQ ID NO: 59214 - DNA, 75 bp, synthetic construct
  source 1..75: mol_type = other DNA
tgcgccgctggcggaagttaaatctgacgaactggaaccactgccggtttcactgaccaatctgaatccgcaaat

SEQ ID NO: 59215 - DNA, 75 bp, synthetic construct
  source 1..75: mol_type = other DNA
tgcacccggaacaactggatgcccctgcgccgcataccgaagtggccagtctgcatcccaatcacgtctggcaga

SEQ ID NO: 59216 - DNA, 75 bp, synthetic construct
  source 1..75: mol_type = other DNA
gcgtcgccccgggcgtgcgccttacgaatttggtgagtatatagcgttactgatccgccaggatgatgcacgcgt

SEQ ID NO: 59217 - DNA, 75 bp, synthetic construct
  source 1..75: mol_type = other DNA
agaccggacctcagggacctcgtggagagccaggtccggcaggcagcgctgcaaatgtggctgatgcgacgacgg

SEQ ID NO: 59218 - DNA, 75 bp, synthetic construct
  source 1..75: mol_type = other DNA
tgtcagggactgcctgtcatcatattactgaaacacctgcaagctttaaaagtgaaattacgtcccggcaactgg

SEQ ID NO: 59219 - DNA, 75 bp, synthetic construct
  source 1..75: mol_type = other DNA
gaaatgtacgatgcagacgtttctccggcgctgatatcgaaaatcaccgatgccgtaatcgaccaggttgtagaa

SEQ ID NO: 59220 - DNA, 75 bp, synthetic construct
  source 1..75: mol_type = other DNA
ctggctgtgtttgctgaacgccgtaaggacagttttggcccgtatgtccggctgatgagcgtcaccctgaactga

SEQ ID NO: 59221 - DNA, 75 bp, synthetic construct
  source 1..75: mol_type = other DNA
agaaaacgttgcggtaagtgcggcgagagagttccagttaattcatgcccgtgtaatggtgactcgcaatgctgg

SEQ ID NO: 59222 - DNA, 75 bp, synthetic construct
  source 1..75: mol_type = other DNA
tgatttcagccagatttacagttgttctgacagaacattaaatgattatgcggttattttttatcagggatgcac

SEQ ID NO: 59223 - DNA, 75 bp, synthetic construct
  source 1..75: mol_type = other DNA
tactgccgtcattattgtccggctgtgccggaatttccggcagcaataacgtggcaccatcagatacgcctgctc

SEQ ID NO: 59224 - DNA, 75 bp, synthetic construct
  source 1..75: mol_type = other DNA
taggaagtctttcaacattcctgtttattgcagaaaaggcaggatatgacgttattgcaccagctgatgaagatg

SEQ ID NO: 59225 - DNA, 75 bp, synthetic construct
  source 1..75: mol_type = other DNA
gcatccggcctcggtagttgctctcaatgcacgggcactgaaggaaattttcagcgatgagcgtaagcgagtcag

SEQ ID NO: 59226 - DNA, 75 bp, synthetic construct
  source 1..75: mol_type = other DNA
aaccggatgactatgatgacgaaacatgggtactgttcaatgccatgaacggtaaccgcgctgaaatgagcccgg

SEQ ID NO: 59227 - DNA, 75 bp, synthetic construct
  source 1..75: mol_type = other DNA
acaagcagaaagccaaacctgtctccttacttagagaacgggcaggattgaagctaatttcagctgttgatgtcc

SEQ ID NO: 59228 - DNA, 75 bp, synthetic construct
  source 1..75: mol_type = other DNA
tatcagtaccaaaagcgcgacagcggaagaagccctgaaactaatcggtgaactgtacgtcatcgagcacgaaat

SEQ ID NO: 59229 - DNA, 75 bp, synthetic construct
  source 1..75: mol_type = other DNA
tcacgcaggccagggaaagtgcggaagccagtgcccggtcggcatcggagagtgctgcgacagcaacggcccgcg

SEQ ID NO: 59230 - DNA, 75 bp, synthetic construct
  source 1..75: mol_type = other DNA
cagatatccgcaaagtgatctacacaacgaacgccatcgagtcgctgaacagtgtgatccggcatgccatcagga

SEQ ID NO: 59231 - DNA, 75 bp, synthetic construct
  source 1..75: mol_type = other DNA
gaagaagccctgaagcgaatcagtgaactgtacgccatcgaggatgaaatacggggattaccagagtcagagcgt

SEQ ID NO: 59232 - DNA, 75 bp, synthetic construct
  source 1..75: mol_type = other DNA
gcacaccctgtttatgcacctgacgctggtgccgtacatggcagcgtctggtgaagtcaaaaccaaaccgactca

SEQ ID NO: 59233 - DNA, 75 bp, synthetic construct
  source 1..75: mol_type = other DNA
tgagcgtattgaaggtaagggcggtcagacactttccctggggcttgtggtcagcaaagcaactcacggactgaa

SEQ ID NO: 59234 - DNA, 75 bp, synthetic construct
  source 1..75: mol_type = other DNA
tactgtcggtattggtgctcatacgcactccgttgcgattggttcacatggacacaccatcaccgttaacgctgc

SEQ ID NO: 59235 - DNA, 75 bp, synthetic construct
  source 1..75: mol_type = other DNA
cttatcagggagggaatgtggtgattactcaaaggccacaatttataacttcgtggcgcccgggcattgctacgg

SEQ ID NO: 59236 - DNA, 75 bp, synthetic construct
  source 1..75: mol_type = other DNA
tatatcgatatgttatttgttgaccctgaatacacccgccgtggggttgccagcgctttgttaaaacctttgatt

SEQ ID NO: 59237 - DNA, 75 bp, synthetic construct
  source 1..75: mol_type = other DNA
ttgcactttttattcaaaaaactggataaaaagtacacctataaaacgctaaatatcttccagattatcatcgat

SEQ ID NO: 59238 - DNA, 75 bp, synthetic construct
  source 1..75: mol_type = other DNA
ctagataaactatctgatgtgactggatttcctcagtattggtttttcttaccattaaatgaagaaaataaggac

SEQ ID NO: 59239 - DNA, 75 bp, synthetic construct
  source 1..75: mol_type = other DNA
agacatccgaaacgaacgcgaaagcgtcggaaaccagcgcagaatcctcaaaaacggctgccgcatcgtccgcca

SEQ ID NO: 59240 - DNA, 75 bp, synthetic construct
  source 1..75: mol_type = other DNA
gttatggctgtgtggcgcaagacatacggttacaacaaaaaaatagattggatcggaaacgaacagttcgctgaa

SEQ ID NO: 59241 - DNA, 75 bp, synthetic construct
  source 1..75: mol_type = other DNA
tccgcgaggcgctttcacgtcataacagcaagaagcaagttgctgatgaactgggcatcggcattgctacgctct

SEQ ID NO: 59242 - DNA, 75 bp, synthetic construct
  source 1..75: mol_type = other DNA
actcaccggaccatcagggtaaacatccggagcagcaccttcgtcccttccggggtatcctgcaggcagatgcgt

SEQ ID NO: 59243 - DNA, 75 bp, synthetic construct
  source 1..75: mol_type = other DNA
agccgccacttctgcatccaccgcgaccacgaaagcgtcagaagctgccacctcagcccgggatgcggcggcctc

SEQ ID NO: 59244 - DNA, 75 bp, synthetic construct
  source 1..75: mol_type = other DNA
ttccgatgatacgcctgtgcctggtggatgttctgatacccggaaggattctgacaaaaaatctggtggatccgc

SEQ ID NO: 59245 - DNA, 75 bp, synthetic construct
  source 1..75: mol_type = other DNA
accaggaacgtccgtatatcgtcatagtcgatattgatggaacaatatcagaggcaactgaagacagactgcatt

SEQ ID NO: 59246 - DNA, 75 bp, synthetic construct
  source 1..75: mol_type = other DNA
cacgttttgaacaggatgattttgatctcgatatagtctacggtgaaccccgcccatcaccctatgagaagatcc

SEQ ID NO: 59247 - DNA, 75 bp, synthetic construct
  source 1..75: mol_type = other DNA
atggcaaaacatggtggctatgatgttgactggtgaactgacctcttcaacgaaatggcaagaccagcgcgtggt

SEQ ID NO: 59248 - DNA, 75 bp, synthetic construct
  source 1..75: mol_type = other DNA
ctgcgatattgaaccggaactgaaaccgatccgcggcggtaccgacggcgcgcagttgtcgtttatgggattacc

SEQ ID NO: 59249 - DNA, 75 bp, synthetic construct
  source 1..75: mol_type = other DNA
cgcttagaacaaaaacttaatcaaagaaatgaaaagtcagcatatgcagatgttgctaatatatatgaagatatt

SEQ ID NO: 59250 - DNA, 75 bp, synthetic construct
  source 1..75: mol_type = other DNA
atggtggatggcaaacctgtcgttccgggcatgaagttgtcgaaggaaaaatgcgaccaggttaacgccattgag

SEQ ID NO: 59251 - DNA, 75 bp, synthetic construct
  source 1..75: mol_type = other DNA
tcaaataactgttatggtcaggtatcccgtcgtgaccaggagagcgcgctggcgtgctggggaatcgacagataa

SEQ ID NO: 59252 - DNA, 75 bp, synthetic construct
  source 1..75: mol_type = other DNA
tcaaaaattatccactcttatagtaccaattcctccacttgccgaacaaaaaatcatcgctgaaaaactcgatac

SEQ ID NO: 59253 - DNA, 75 bp, synthetic construct
  source 1..75: mol_type = other DNA
ctaaccaggcatcaggatggtgaagatgcctctacaggtgtgagttatctggaattagcagatgttcttatcaga

SEQ ID NO: 59254 - DNA, 75 bp, synthetic construct
  source 1..75: mol_type = other DNA
cttctaaggctattgatgcggcttctgatactgcgactaaaacgttgactaaggcaacggaaagcgttgctgatg

SEQ ID NO: 59255 - DNA, 75 bp, synthetic construct
  source 1..75: mol_type = other DNA
tgatgataaaaaatggcctcttctttatgagttcgaacgtttaattcgcgaagtatctccagaaatcgtaacaat

SEQ ID NO: 59256 - DNA, 75 bp, synthetic construct
  source 1..75: mol_type = other DNA
aatgatgtctccgcagtgcagtcagacgtcaccaacataaaaggcgatgtcgcacatgcccagtcaacggctgac

SEQ ID NO: 59257 - DNA, 75 bp, synthetic construct
  source 1..75: mol_type = other DNA
gtgtttcccgtcgacgttttataagcggctgaatgctggtgaccgcaggggagcgtgtgaggcgattcgctggtg

SEQ ID NO: 59258 - DNA, 75 bp, synthetic construct
  source 1..75: mol_type = other DNA
ccgcctggcagaaatcatcacgccggaaggcaaaacgcagtatgcgtatgacaaatccggcaggctgacgggtat

SEQ ID NO: 59259 - DNA, 75 bp, synthetic construct
  source 1..75: mol_type = other DNA
caaggatttaatcagccgcacaaaagcagcgctggcgaaaaatccgaaaaacgtcctgctggccgtctgctggac

SEQ ID NO: 59260 - DNA, 75 bp, synthetic construct
  source 1..75: mol_type = other DNA
aatgatgttcctgccaccaatgtactgattgaaggcagtattgataacgatcgcgttacgctgactaacctgggt

SEQ ID NO: 59261 - DNA, 75 bp, synthetic construct
  source 1..75: mol_type = other DNA
ccatttttatcgcggtagcagaagagagtaattttagtaaagccgccgcacggctgggcgttacccgttcagcgg

SEQ ID NO: 59262 - DNA, 75 bp, synthetic construct
  source 1..75: mol_type = other DNA
caatgtattgcagtttattggtaggcctgataagcgcagcgcatcaggcaatcttacgcttgtcatcagtctcat

SEQ ID NO: 59263 - DNA, 75 bp, synthetic construct
  source 1..75: mol_type = other DNA
attacgtttcatgcggactggaaacggccgaaggatttcgcagaatgcctttatcccagattcctgccgcaaccc

SEQ ID NO: 59264 - DNA, 75 bp, synthetic construct
  source 1..75: mol_type = other DNA
aggcgctggcatgggtggagaaaaacatcagagtgccactgactgaaccccagaaagcgggtattgcgtcattct

SEQ ID NO: 59265 - DNA, 75 bp, synthetic construct
  source 1..75: mol_type = other DNA
gtatgaggttttaagcttctcactacaggcacattcattgagccaggaatgtattgataagttggacattttttt

SEQ ID NO: 59266 - DNA, 75 bp, synthetic construct
  source 1..75: mol_type = other DNA
cagcaagcgttacactcagcgcattgagcgacataatctgaatctgagacaacatctggcaaggctgggacggaa

SEQ ID NO: 59267 - DNA, 75 bp, synthetic construct
  source 1..75: mol_type = other DNA
aggcgttaaggagaggtggattgatcttagtgaggttgcaaaatgggccagacaaaactgctcaaactaccgcgc

SEQ ID NO: 59268 - DNA, 75 bp, synthetic construct
  source 1..75: mol_type = other DNA
aatcacgcctgaagagaaagctgcacgttatcagcaagcgttacactcagcgcattgagcgacataatctgaatc

SEQ ID NO: 59269 - DNA, 75 bp, synthetic construct
  source 1..75: mol_type = other DNA
aggccgaggtgatccgaatgcctctactgtcgaaacttgaggctgtcgcaaggcgtgagctggcttatctgcggg

SEQ ID NO: 59270 - DNA, 75 bp, synthetic construct
  source 1..75: mol_type = other DNA
cgaattcgtttctctggacgcgccggtcgaaccggatgcccaagacgtggccgaggccatggtggaagaggaaat

SEQ ID NO: 59271 - DNA, 75 bp, synthetic construct
  source 1..75: mol_type = other DNA
ggcccaggtgatctatcaggcgatggagagctaccataatccgtggcaatacagcccaatgtctgctccggaagg

SEQ ID NO: 59272 - DNA, 75 bp, synthetic construct
  source 1..75: mol_type = other DNA
tgaagatcgacaatcaggaaccaggcgaaaaaaaccaggaaagagatgatttacagggcagtcagtacgcagacg

SEQ ID NO: 59273 - DNA, 75 bp, synthetic construct
  source 1..75: mol_type = other DNA
tcgacgtgttcacccgctgcgtgctcggcatggtcgtcacgctggaagcgccgtctgccgtttcggttggcctgt

SEQ ID NO: 59274 - DNA, 75 bp, synthetic construct
  source 1..75: mol_type = other DNA
acgaaatgaagggttaaatacactcaatgacttttatttattggctgaacggaaaaccttacgttttgtccatac

SEQ ID NO: 59275 - DNA, 75 bp, synthetic construct
  source 1..75: mol_type = other DNA
gaactcagcctgtatgaatcacagctctacaactggcgcagtaaacagcaaaatcagcagacgtcttctgaacgt

SEQ ID NO: 59276 - DNA, 75 bp, synthetic construct
  source 1..75: mol_type = other DNA
gtgaaatatgatctgcatggcattcagattgcagcgaatgtgtatacacctgctaactatgaccctgcgaaaaaa

SEQ ID NO: 59277 - DNA, 75 bp, synthetic construct
  source 1..75: mol_type = other DNA
catcccgtctttttccgttctgtaccggtaaataccgctggcacggcagtgctgaagcgtataccggtcgtgaag

SEQ ID NO: 59278 - DNA, 75 bp, synthetic construct
  source 1..75: mol_type = other DNA
atgacaaaaacagtatcaaccagcaaaaaaacacgtaaacagcattcgcctgaattttgcagtgaagccctgaag

SEQ ID NO: 59279 - DNA, 75 bp, synthetic construct
  source 1..75: mol_type = other DNA
tttcaaaaagaagaaaactaagtccgcgggctcttatacttccgctcctgtgaaagcaccacctaaagaatggct

SEQ ID NO: 59280 - DNA, 75 bp, synthetic construct
  source 1..75: mol_type = other DNA
taataagctcggtattgaaagtgatcttaccttatggagagatttatattttaaacgatatatttgtattacata

SEQ ID NO: 59281 - DNA, 75 bp, synthetic construct
  source 1..75: mol_type = other DNA
atctaccgccgccgcatcagttacgccttcatcaatgcacaggaggctggcgaggtggcgggctttatcgccatt

SEQ ID NO: 59282 - DNA, 75 bp, synthetic construct
  source 1..75: mol_type = other DNA
tcatgcctgtcgtacggagaattatgccatgacggtccattattaccggttgcgggattacgccctgcagcatcc

SEQ ID NO: 59283 - DNA, 75 bp, synthetic construct
  source 1..75: mol_type = other DNA
aacccatgcgactgatgctgcaggctcagcacgcgcagccagcacatcagccgggcaggccgcgacgtcggctca

SEQ ID NO: 59284 - DNA, 75 bp, synthetic construct
  source 1..75: mol_type = other DNA
ccaccgggctgatgattaaatccggcaaagtgttcggcaacctgatggtcgatgtggtcgccaccaacgaaaaat

SEQ ID NO: 59285 - DNA, 75 bp, synthetic construct
  source 1..75: mol_type = other DNA
tctgaacactctcatggattcagaccaaaacgttcgtgtgaaactgcgctcagatctattcgtccagtctggaac

SEQ ID NO: 59286 - DNA, 75 bp, synthetic construct
  source 1..75: mol_type = other DNA
tggcttttgaaattggcggcaaagttgccgcctctctccccaaaagttttactacagctaatcaggctgttgcta

SEQ ID NO: 59287 - DNA, 75 bp, synthetic construct
  source 1..75: mol_type = other DNA
tttaattgatagcgaatacgctggtgaggtagcaagtaccgggtactgtattttacgagcaaaacaagatcaggt

SEQ ID NO: 59288 - DNA, 75 bp, synthetic construct
  source 1..75: mol_type = other DNA
acccgaatacgcaatatgttgatgttttacttaccgatttgaatggttgcttccgtggaaaacgtattcctgttt

SEQ ID NO: 59289 - DNA, 75 bp, synthetic construct
  source 1..75: mol_type = other DNA
atttctctgcgcatccttgtatgcgtttaccctctttcctgattccatttttcatacatcggagatattcacgtg

SEQ ID NO: 59290 - DNA, 75 bp, synthetic construct
  source 1..75: mol_type = other DNA
cgccaacgcgtaattgttttgctttctcaccctgccaaccggcgtgatcatactaacgttttgatgcacgttcag

SEQ ID NO: 59291 - DNA, 75 bp, synthetic construct
  source 1..75: mol_type = other DNA
ctgagcgtcacccttaacggagtatatggtgtagacgcgacaggattattattcctttcaattttgatgggatta

SEQ ID NO: 59292 - DNA, 75 bp, synthetic construct
  source 1..75: mol_type = other DNA
aacggtgagattgcaaaagacgtccagagtgcgacgctaacggtacgtaaagacgctgccttcggtattaagttc

SEQ ID NO: 59293 - DNA, 75 bp, synthetic construct
  source 1..75: mol_type = other DNA
ttatcaaatattagcattgaagataaagcaaaagtaaaattacgaggaaaaagatttcttgaggatatggttggc

SEQ ID NO: 59294 - DNA, 75 bp, synthetic construct
  source 1..75: mol_type = other DNA
cagaaaaattctttcgttttgtcgttaatgaagaaggctacgacgcaggaagggctgctattggtcttgacctat

SEQ ID NO: 59295 - DNA, 75 bp, synthetic construct
  source 1..75: mol_type = other DNA
aaggtgatgtttttaatgaaaaaaataagctattttccattctaaatcatgaatactctgctaaaaaagatattt

SEQ ID NO: 59296 - DNA, 75 bp, synthetic construct
  source 1..75: mol_type = other DNA
aacggcgtggatatgcgcgacatacggatccgcgttctggaaatgctggcctacaatcgccgcgttgaactgtat

SEQ ID NO: 59297 - DNA, 75 bp, synthetic construct
  source 1..75: mol_type = other DNA
cccagtaaggcagaccgccttatcacggaacgtctggtacaggcactgggcctggtggatatccgggtgccggac

SEQ ID NO: 59298 - DNA, 75 bp, synthetic construct
  source 1..75: mol_type = other DNA
gcgacgattaaatctcatcaatccagattgcgcgagcttggctcactgcctcgccagtcagtcaaggaattaacc

SEQ ID NO: 59299 - DNA, 75 bp, synthetic construct
  source 1..75: mol_type = other DNA
agggggaagaacgtgctaaattcaggaaagaaattgccagggagcgtaagaaacgttttgcagtgaaaacaggga

SEQ ID NO: 59300 - DNA, 75 bp, synthetic construct
  source 1..75: mol_type = other DNA
acaatgttcctgtgcgcacggaagtggaattctatggccgcggagctgcagactcccattatacactggatacat

SEQ ID NO: 59301 - DNA, 75 bp, synthetic construct
  source 1..75: mol_type = other DNA
gaacatttaacttcggcacccttcatcttgaaaatgcggattttgctgttgcacgcaatgctgacgtgaaaggta

SEQ ID NO: 59302 - DNA, 75 bp, synthetic construct
  source 1..75: mol_type = other DNA
atgaaagcgggtatctcagtccgttctggtcgtcggatcgaaaaaggccagagggcaaaaaatagtgttcggcac

SEQ ID NO: 59303 - DNA, 75 bp, synthetic construct
  source 1..75: mol_type = other DNA
gagttgcaggattttaccaatgactgctactcgctggcgatgtaccagtggaaacaacgtgaccagggtatgacg

SEQ ID NO: 59304 - DNA, 75 bp, synthetic construct
  source 1..75: mol_type = other DNA
gagacgtattcagcgcaatacgatgccgtctatggcgcatacaaaaccaaagccggtaaaaatatcttctttgtg

SEQ ID NO: 59305 - DNA, 75 bp, synthetic construct
  source 1..75: mol_type = other DNA
ggaacgacagcagtgtggggctgaaaaagcgggttacggaggaagttgatgaagggctgtggctgcgtctttcgg

SEQ ID NO: 59306 - DNA, 75 bp, synthetic construct
  source 1..75: mol_type = other DNA
gtctccgtccgggaaaacacggacggcacctttgccatcacggcggtgcagcacgtaccggaaaaagaagccatc

SEQ ID NO: 59307 - DNA, 75 bp, synthetic construct
  source 1..75: mol_type = other DNA
tcactatcaatgggatgaaagcgatctcaaacagcgcaatatcattgctgttgatgaacatatgaccattctcag

SEQ ID NO: 59308 - DNA, 75 bp, synthetic construct
  source 1..75: mol_type = other DNA
atgataaaacggacgttattagcggcagcaatttttagcacattgcccgcttatgccgggttaacttccattacc

SEQ ID NO: 59309 - DNA, 75 bp, synthetic construct
  source 1..75: mol_type = other DNA
tttgtgccgttgatgacggatgagcatggtgtgaatgtgccgacaaacgagccgtcagaagatccggacattatc

SEQ ID NO: 59310 - DNA, 75 bp, synthetic construct
  source 1..75: mol_type = other DNA
gcttttccgaacttcagctggcgcgagcggcaagcgtcagtccggtagtggtacgagaatatcttttgaaattcg

SEQ ID NO: 59311 - DNA, 75 bp, synthetic construct
  source 1..75: mol_type = other DNA
gagcggcataacctgaatctgagacaacatctggcaaggctgggacggaagtcactgtcgttctcaaaatcggtg

SEQ ID NO: 59312 - DNA, 75 bp, synthetic construct
  source 1..75: mol_type = other DNA
tcctgtcggaactgcttttaatcgtctggtagaacaacagaaacagctcaatgaagcaaaagctaaggggatgct

SEQ ID NO: 59313 - DNA, 75 bp, synthetic construct
  source 1..75: mol_type = other DNA
catactcaaacgattactgaatcacaaaacggtttatccccgctggcgcggggaacacctgtgctcctgttttgt

SEQ ID NO: 59314 - DNA, 75 bp, synthetic construct
  source 1..75: mol_type = other DNA
atgctccgcttccctcaggaagaggctctgtatccgggattattgcaggtgaaagacgtctgttccgccgactca

SEQ ID NO: 59315 - DNA, 75 bp, synthetic construct
  source 1..75: mol_type = other DNA
ccaaagcggaaggtccggcgaaaggccagccgatgctgaacaccgcaattgatgcggcagagatgatcctgacgc

SEQ ID NO: 59316 - DNA, 75 bp, synthetic construct
  source 1..75: mol_type = other DNA
ctgtaaagattggaagccgatcaattgcgtttattgaaagtgaaattgaagaatggattaatcagcgcatcgctg

SEQ ID NO: 59317 - DNA, 75 bp, synthetic construct
  source 1..75: mol_type = other DNA
ccagccgatgctgaacaccgcaattgatgcggcagagatgatcctgacgctggcaccggaaaccaacggtcaggt

SEQ ID NO: 59318 - DNA, 75 bp, synthetic construct
  source 1..75: mol_type = other DNA
attacagaagaacccgaaaaatgtgttgctggcggtgtgctggatgcagggcgaatttgacatgagcgctgccac

SEQ ID NO: 59319 - DNA, 75 bp, synthetic construct
  source 1..75: mol_type = other DNA
ctgtcgtggttcaggctacacgcattgatgcatctattctccctcgcaacatattcagtcagtcttaccttctgt

SEQ ID NO: 59320 - DNA, 75 bp, synthetic construct
  source 1..75: mol_type = other DNA
cgcattgagcgacataacctgaatctgagacaacatctggcaaggctgggacggaagtcactgtcgttctcaaaa

SEQ ID NO: 59321 - DNA, 75 bp, synthetic construct
  source 1..75: mol_type = other DNA
ctagccgttatgctgaatttactggtttttattcgttccagtgaactcagataagcccgttggtctgaaattgat

SEQ ID NO: 59322 - DNA, 75 bp, synthetic construct
  source 1..75: mol_type = other DNA
ctcgcagttatgctgaatttactggtttttattcgttccagtgaactcagataagcccgttggtctgaaattgat

SEQ ID NO: 59323 - DNA, 75 bp, synthetic construct
  source 1..75: mol_type = other DNA
gcattgaccacggtaaaacgccagcatcgccctgctcttgatctttcccgcctgcctgaacttttgtcgcgtatt

SEQ ID NO: 59324 - DNA, 75 bp, synthetic construct
  source 1..75: mol_type = other DNA
ccggcacatctgccagtgaggcggcaacccatgcgactgatgctgcaggctcagcgcgtgcagccagcacgtcag

SEQ ID NO: 59325 - DNA, 75 bp, synthetic construct
  source 1..75: mol_type = other DNA
aaaagaggcggcaaaatcatcagaaacgaacgcatcctcgagcgccagtagcgcagcttcctcggcaacggcggc

SEQ ID NO: 59326 - DNA, 75 bp, synthetic construct
  source 1..75: mol_type = other DNA
actccgatctatcaagctgatgcgctgatccaagttgaacagaaacaggctaatgcgatactaagtaatctgacc

SEQ ID NO: 59327 - DNA, 75 bp, synthetic construct
  source 1..75: mol_type = other DNA
aatggagaaaagaaaaacattacaagatgaaaagattaaattgaataaacgagtatcggcgatgccggaaactca

SEQ ID NO: 59328 - DNA, 75 bp, synthetic construct
  source 1..75: mol_type = other DNA
ggatcgccggacgatacttctcctttgaaggcaggcgctggatctttaaagccataaccccggaagggaaaattc

SEQ ID NO: 59329 - DNA, 75 bp, synthetic construct
  source 1..75: mol_type = other DNA
tctcttgaggcaaaagctgtacttgatcaaattgtaaatgttgataaccaactgaatgaattgacctttagagaa

SEQ ID NO: 59330 - DNA, 75 bp, synthetic construct
  source 1..75: mol_type = other DNA
gactctcccacccgcaaagcgcttccggccacactcccccgtgacagacaggttatctccccggcagaaaccgaa

SEQ ID NO: 59331 - DNA, 75 bp, synthetic construct
  source 1..75: mol_type = other DNA
tttattgaaagtgagattgatgagtggattgaaaaaatgattgcgaaatctcgctgcgtatctgaatgtaaacat

SEQ ID NO: 59332 - DNA, 75 bp, synthetic construct
  source 1..75: mol_type = other DNA
cgaattaatgcaggcgatcgcaggggagcgtgtgaagcgattcgctggtggattaaggacggtggcagagactgc

SEQ ID NO: 59333 - DNA, 75 bp, synthetic construct
  source 1..75: mol_type = other DNA
accacagcgattcgtgcctcccgttctctgattgaggaataccgtcgcgccagctcggcgcgatctacccttggt

SEQ ID NO: 59334 - DNA, 75 bp, synthetic construct
  source 1..75: mol_type = other DNA
ggtgaagttcgctaaccttaccaccggcgaggtgcagtggcgaaaccgtccgccatcagtcagtatccgtggggc

SEQ ID NO: 59335 - DNA, 75 bp, synthetic construct
  source 1..75: mol_type = other DNA
aggcgctggcatgggtggagaaaaacatcaaagtgccattgaccgaaccccagaaagcggggatcgcgtcattct

SEQ ID NO: 59336 - DNA, 75 bp, synthetic construct
  source 1..75: mol_type = other DNA
gcattgaccacggtaaaacgccagcatcgccctgctcttgatctttctcgcctgcctgaacttctgtcgcgtatt

SEQ ID NO: 59337 - DNA, 75 bp, synthetic construct
  source 1..75: mol_type = other DNA
atgagcaacctacgaaaatatcgagagtcactgaatatctctcaaacaacacttgctaaggcagttggatgcaca

SEQ ID NO: 59338 - DNA, 75 bp, synthetic construct
  source 1..75: mol_type = other DNA
tatctctctccgaagctcgtacaaaacgggatgaggcccgaaaactgatttcggagggggttgacccttgcgaac

SEQ ID NO: 59339 - DNA, 75 bp, synthetic construct
  source 1..75: mol_type = other DNA
ggatcggcagcctcaccgggaacggatggtctgatgtgggtgacaccgaccgatcaggtgcaggatgaagcgtcg

SEQ ID NO: 59340 - DNA, 75 bp, synthetic construct
  source 1..75: mol_type = other DNA
atacgctggcggtaagcaatggaaaggcctgatgactcgtcgtgagattgagcgtgaggtctgtttgtgggggca

SEQ ID NO: 59341 - DNA, 75 bp, synthetic construct
  source 1..75: mol_type = other DNA
tcagcggcagcttaccatgatgatcactttccaagagaaaaactccgtatgcttgctgtaaaaacaacatgtaag

SEQ ID NO: 59342 - DNA, 75 bp, synthetic construct
  source 1..75: mol_type = other DNA
gatctcacgcgctcaatcaatattgcgccttctgccaacgcttacgttgcgcgggcgacaatttatcgccaacgt

SEQ ID NO: 59343 - DNA, 75 bp, synthetic construct
  source 1..75: mol_type = other DNA
agcagcgagccaccacacaggcggtttacacgctgccggaaaattcaacgctgacaggcagtcgtgcgatgacgg

SEQ ID NO: 59344 - DNA, 75 bp, synthetic construct
  source 1..75: mol_type = other DNA
ggaagcccgcgaggggcgcaaggattacagcgtccaccgcattaccctggatgatgccattgcggacgggctgta

SEQ ID NO: 59345 - DNA, 75 bp, synthetic construct
  source 1..75: mol_type = other DNA
aaaggccaacagcttaacgcctctattattgctcagacgcgtctgacctctactgaagagttcggcaaaatcctg

SEQ ID NO: 59346 - DNA, 75 bp, synthetic construct
  source 1..75: mol_type = other DNA
aatggttacagttctgatatcgatcgcgctcatgtttacacgctggaagaagcccaaaaagcctggaattgtggg

SEQ ID NO: 59347 - DNA, 75 bp, synthetic construct
  source 1..75: mol_type = other DNA
ggggcaacagtttgtgttgacgcaatgtttttacaaaaacaccgaccaaaaactggcgggtatctgatcgtttat

SEQ ID NO: 59348 - DNA, 75 bp, synthetic construct
  source 1..75: mol_type = other DNA
gaggaaaagcagcgttggtggagtgagatcaaggggtatcagaattaccgcaacgcgacgggtaaacccctgagt

SEQ ID NO: 59349 - DNA, 75 bp, synthetic construct
  source 1..75: mol_type = other DNA
ggaacgtaacggtgtacgtgctgcttacattcataaagcagaacatctggaagaacggcgactgatgctacagtg

SEQ ID NO: 59350 - DNA, 75 bp, synthetic construct
  source 1..75: mol_type = other DNA
cgtgccgggatcggcatcaacgccgggcgtattcgtgcgctgggtagcccgattcgcggtggcgaagcgttccat

SEQ ID NO: 59351 - DNA, 75 bp, synthetic construct
  source 1..75: mol_type = other DNA
gttcagggcgatggcgtgcagtgcgttaatagaatcaggtttgtggtcccgtgatgcagttgaacgtcagatgag

SEQ ID NO: 59352 - DNA, 75 bp, synthetic construct
  source 1..75: mol_type = other DNA
ttcaagatcctggtcgggcgcgacaacctcacggcaaacggcattgagctgccggatgtggaaggggcgattgtc

SEQ ID NO: 59353 - DNA, 75 bp, synthetic construct
  source 1..75: mol_type = other DNA
tcgtattctgggtaaggagaaaactctggcacttggtgtgtatccagaagtttctctttctgaagctcgtacaaa

SEQ ID NO: 59354 - DNA, 75 bp, synthetic construct
  source 1..75: mol_type = other DNA
ttgttatgcctggcggttggtctgatcgcggttcatatgcggctggttttttctcaatatattctactgctgagc

SEQ ID NO: 59355 - DNA, 75 bp, synthetic construct
  source 1..75: mol_type = other DNA
cagggggctgacgggctgatgtgggtaagtccggccgatcagtctcaggacgatcccctgagcagcagtggttca

SEQ ID NO: 59356 - DNA, 75 bp, synthetic construct
  source 1..75: mol_type = other DNA
agattttctggatgcgaacagagataagggtatcagcccgtttgaatatgcaaagattaacaatccattaaaata

SEQ ID NO: 59357 - DNA, 75 bp, synthetic construct
  source 1..75: mol_type = other DNA
ggcgagtatatggcaggacaggtacaaggggaatacgtggagttgagcgacggcactttatcgtggttagggaac

SEQ ID NO: 59358 - DNA, 75 bp, synthetic construct
  source 1..75: mol_type = other DNA
gcccggagaaaaatccacgatgtgcatgcaagagtgccaaccgacatcaccacggaagccctgcagcgtatcggt

SEQ ID NO: 59359 - DNA, 75 bp, synthetic construct
  source 1..75: mol_type = other DNA
ggttgtcaccttattattgctcacttttgctatgagttgttaccgattacggcatcgccaattgattgctagtta

SEQ ID NO: 59360 - DNA, 75 bp, synthetic construct
  source 1..75: mol_type = other DNA
cagcgacatgcaccggaatgcggtgaaacaacagctctactgagcttgataaaagatgaaggtctgctctctggg

SEQ ID NO: 59361 - DNA, 75 bp, synthetic construct
  source 1..75: mol_type = other DNA
gactactgacactttcagtaaagccaatacgcagtcaggtgataagggggcttatacctgcgaggtaacggattc

SEQ ID NO: 59362 - DNA, 75 bp, synthetic construct
  source 1..75: mol_type = other DNA
attactccccaaaatctccaaaattgagcgatgacgcaccggcgacaggctctggtggtttaacaattacggatg

SEQ ID NO: 59363 - DNA, 75 bp, synthetic construct
  source 1..75: mol_type = other DNA
gataacgtactgaccgccgcctcttctgcgccagcaggcgggatgaatgtgtattacatcgcttataaccaggac

SEQ ID NO: 59364 - DNA, 75 bp, synthetic construct
  source 1..75: mol_type = other DNA
agtatggtggccagtggctatgactaccgacgcgacgatgatgcgggcctgtggagttcagccgatctgacttat

SEQ ID NO: 59365 - DNA, 75 bp, synthetic construct
  source 1..75: mol_type = other DNA
attattgttaatgataatggcctgaaagcaggaacgcgttttccggatgggctggaattaattgaacatattccc

SEQ ID NO: 59366 - DNA, 75 bp, synthetic construct
  source 1..75: mol_type = other DNA
gtgggtgaaggaactgtgtcagcattgtcatggtaagggagaagtcagcacagcgtgcagagggtgtaagggtaa

SEQ ID NO: 59367 - DNA, 75 bp, synthetic construct
  source 1..75: mol_type = other DNA
tttgtgtttcatgcctggcgttaactgcctgttctgttgatgaaattgcttcggttaacaagcaaattagtgatg

SEQ ID NO: 59368 - DNA, 75 bp, synthetic construct
  source 1..75: mol_type = other DNA
atgaaactaaagaccacattgttcggcaatgtatatcagtttaaggatgtaaaagaggtgctggctaaagccaac

SEQ ID NO: 59369 - DNA, 75 bp, synthetic construct
  source 1..75: mol_type = other DNA
tgagtcaatgctggaagcaacagaagatgatcgccatccgggctgtccggtatttgccggtatgaaattaccgga

SEQ ID NO: 59370 - DNA, 75 bp, synthetic construct
  source 1..75: mol_type = other DNA
attattttattaattcctctggagataaatcagatataatttataaagttgatgggctttctatcatagcgagaa

SEQ ID NO: 59371 - DNA, 75 bp, synthetic construct
  source 1..75: mol_type = other DNA
acctccgacatcagtggggaatggctggcgcaggccggtattcagcttcccgtactggatccggaaagcgccatg

SEQ ID NO: 59372 - DNA, 75 bp, synthetic construct
  source 1..75: mol_type = other DNA
tatctgcgccatattctgagcgtactgccggaatggccctccaaccgtgttgacgaactcctgccatggaacgta

SEQ ID NO: 59373 - DNA, 75 bp, synthetic construct
  source 1..75: mol_type = other DNA
atgagcaggaaactccactatggtttatcggtagccgttctggcgctgattgccacaggtgcttctgcgcctgaa

SEQ ID NO: 59374 - DNA, 75 bp, synthetic construct
  source 1..75: mol_type = other DNA
gtgaagaaatccggttacagattattccttacctcgtgagttttgcctttgctgattactccaggtctgcggcaa

SEQ ID NO: 59375 - DNA, 75 bp, synthetic construct
  source 1..75: mol_type = other DNA
ggcagccgaagccgctatgggccatattgagctgggtaaatgggctgatttagtgattctcgcccctgccacggc

SEQ ID NO: 59376 - DNA, 75 bp, synthetic construct
  source 1..75: mol_type = other DNA
tctcattgaggagtacgagaagaaacattacccaattcaaccaccatcacctgttgaatcttttaactatccata

SEQ ID NO: 59377 - DNA, 75 bp, synthetic construct
  source 1..75: mol_type = other DNA
acgacaaagcagcggacaatgatggggctaggagctttccccgctctttcacttgcagatgcccggaggttaaga

SEQ ID NO: 59378 - DNA, 75 bp, synthetic construct
  source 1..75: mol_type = other DNA
catccattcgttacgatgttaacgatcaacgcctggatatcgatgtcccccaggcatggattatgaagaattatc

SEQ ID NO: 59379 - DNA, 75 bp, synthetic construct
  source 1..75: mol_type = other DNA
gcgcacagggcgaaggtggcgggcagatcctgcgctcggcgctgagcctgtcgatgataaccggccagccattta

SEQ ID NO: 59380 - DNA, 75 bp, synthetic construct
  source 1..75: mol_type = other DNA
ccaacactgaaattctgcgagctaaagcgttagagaaagatctaacactgcatgatggcgaggggcttttcctga

SEQ ID NO: 59381 - DNA, 75 bp, synthetic construct
  source 1..75: mol_type = other DNA
gtcgacaacataatgtcagcagcctggggttcgatgtatgtaaatgattttaacgatcgtggacgggtgaaaaaa

SEQ ID NO: 59382 - DNA, 75 bp, synthetic construct
  source 1..75: mol_type = other DNA
atcccactgcagacccgtcacaggaaaagctgaaggtcttttatatcgatgccagaagcaccgagacggatgaat

SEQ ID NO: 59383 - DNA, 75 bp, synthetic construct
  source 1..75: mol_type = other DNA
atgaacgtaaaaatcagatacggcctgtcggctgccgttctggcactgattgccgtcggtgcgcctgcgcctgat

SEQ ID NO: 59384 - DNA, 75 bp, synthetic construct
  source 1..75: mol_type = other DNA
tgaaatgttagtcaatgccgataaagcgttatatcaagccaaaagaaccggaaaaaacaaggtgataattcactc

SEQ ID NO: 59385 - DNA, 75 bp, synthetic construct
  source 1..75: mol_type = other DNA
agactgccgtatccgttcaaacaactgttacggtcaggtatcaagacgtgaccaggagagtgcgctggcatgctg

SEQ ID NO: 59386 - DNA, 75 bp, synthetic construct
  source 1..75: mol_type = other DNA
ctcttgtgattagttctttttctactttcgcaggtggtggttctgaatggcaaccaacagtatctccgggacaat

SEQ ID NO: 59387 - DNA, 75 bp, synthetic construct
  source 1..75: mol_type = other DNA
cagttgcggcattacattttgctaccatcgtgcctggcgcttattgctggcatcatgctgatgataatgaatttg

SEQ ID NO: 59388 - DNA, 75 bp, synthetic construct
  source 1..75: mol_type = other DNA
gtcattgataaactggttacaaagtgctggcaggaagaagcatatgctgagacacaattgaggagagtgacaaga

SEQ ID NO: 59389 - DNA, 75 bp, synthetic construct
  source 1..75: mol_type = other DNA
ccgggtggctgcgcaatcgcggctataacaaacgaaccgttgcggtggcgggtgacctgacggcaggaaggatct

SEQ ID NO: 59390 - DNA, 75 bp, synthetic construct
  source 1..75: mol_type = other DNA
gccatgagcagattgcgcaaagcctgttcccggtcggcgaactggaaaaaccgcaggtgcgtaagattgctgaag

SEQ ID NO: 59391 - DNA, 75 bp, synthetic construct
  source 1..75: mol_type = other DNA
atacttgaccagtttctggacgaaaaagaaggtaaccacacaatggcataccgtgatggttccggcatatggacc

SEQ ID NO: 59392 - DNA, 75 bp, synthetic construct
  source 1..75: mol_type = other DNA
tgttgggcagcatgaaagccaacggtatggtccccgatatggttgtggtcgactacgctgacctgatgcgtgcca

SEQ ID NO: 59393 - DNA, 75 bp, synthetic construct
  source 1..75: mol_type = other DNA
ggctatctcggcgtgcgaacccttgacggctttgcccgttacagcaaatcaagccgtcacaaaatgtctgcgggg

SEQ ID NO: 59394 - DNA, 75 bp, synthetic construct
  source 1..75: mol_type = other DNA
ttttataccctgggagggggctcggtgatatcgcagccggcaacgcgcagcaatatgcagaaacttggggtggat

SEQ ID NO: 59395 - DNA, 75 bp, synthetic construct
  source 1..75: mol_type = other DNA
catcacccgctggaaccaggaataccagaagctgctcgggatctcgacggaagaggagcttcgccgggtggtgct

SEQ ID NO: 59396 - DNA, 75 bp, synthetic construct
  source 1..75: mol_type = other DNA
taaaatcaccaaagaggctgccatcatggctacgatcccaaccctcactcaacctgaaattgccatcgttgatgg

SEQ ID NO: 59397 - DNA, 75 bp, synthetic construct
  source 1..75: mol_type = other DNA
tgcgaccggttacgccaaccctgtacgtctcaccacctctgtgattggcgtcccatgtggtgagttttcaaaatt

SEQ ID NO: 59398 - DNA, 75 bp, synthetic construct
  source 1..75: mol_type = other DNA
ccaatatttgaagaatacctaatggaaattttacctcaacgctcagacactcttgataaacaagaattaaaccta

SEQ ID NO: 59399 - DNA, 75 bp, synthetic construct
  source 1..75: mol_type = other DNA
cgcgatgcctatcatcttgcaggtatcgatttgccggatttttaccgacatgatgactggtggaaatcaggtcag

SEQ ID NO: 59400 - DNA, 75 bp, synthetic construct
  source 1..75: mol_type = other DNA
ggggagtctgctgtttggtctgttaacgtacctgacgaacctgtacttcaagattaaagaggaccgtcgtaaggc

SEQ ID NO: 59401 - DNA, 75 bp, synthetic construct
  source 1..75: mol_type = other DNA
tgccggaacgcataccgtgattaaagccggtgtctctgcggatacgcaatctgatttcggcgcgggtgtcggcgt

SEQ ID NO: 59402 - DNA, 75 bp, synthetic construct
  source 1..75: mol_type = other DNA
ttcgacgtaagcgatgcagagggtaacgatattaatggttacactaccgtcgattttatcagtagttggcagctt

SEQ ID NO: 59403 - DNA, 75 bp, synthetic construct
  source 1..75: mol_type = other DNA
cgggcattgcctacggcacctccgcaggcagtgctggctactggtttttacagtggcttgatcaggtcagtccat

SEQ ID NO: 59404 - DNA, 75 bp, synthetic construct
  source 1..75: mol_type = other DNA
cttttgtgggatgtgcatttcacccctggactggcggagacggttgtggctgtctttgcccccggcgacaggggc

SEQ ID NO: 59405 - DNA, 75 bp, synthetic construct
  source 1..75: mol_type = other DNA
aatctctatctggataatctggaggccacagggctgtatcaggtgccgttgtcatcagcacaaccgggcgatgtg

SEQ ID NO: 59406 - DNA, 75 bp, synthetic construct
  source 1..75: mol_type = other DNA
gtacgtcagccagctgcagacgatggtggccacactgaaaatccccatggaacggcgtaataaacgaacaggcag

SEQ ID NO: 59407 - DNA, 75 bp, synthetic construct
  source 1..75: mol_type = other DNA
cctatgcgatgcacatgctgtatgtcggtataccgctgaaggtcctgcagagcctgatggggcataagtccatca

SEQ ID NO: 59408 - DNA, 75 bp, synthetic construct
  source 1..75: mol_type = other DNA
attgaaaataataaactaattattttcatccttccaacaaaagctttattagaagaatatctaattgacttaaaa

SEQ ID NO: 59409 - DNA, 75 bp, synthetic construct
  source 1..75: mol_type = other DNA
agccggtgctgccagtgtcgcgctgacgccgttcgtcggcgtgccggtgggtatttttgtgggaatttatgtctt

SEQ ID NO: 59410 - DNA, 75 bp, synthetic construct
  source 1..75: mol_type = other DNA
aacaaaagtattatgccgctgcaatatctgtagtcatgagtggtcggctacaccttgcaacctaaaacacgggcg

SEQ ID NO: 59411 - DNA, 75 bp, synthetic construct
  source 1..75: mol_type = other DNA
acgctgactctcaacaaaaacctggcagttgctaaaatcgacttctgtattaaacgtatccggatgcatgaacaa

SEQ ID NO: 59412 - DNA, 75 bp, synthetic construct
  source 1..75: mol_type = other DNA
cgatgcacatgctgtatgccggtataccgctgaaggtcctgcagagcctgatggggcataagtccatcagctcaa

SEQ ID NO: 59413 - DNA, 75 bp, synthetic construct
  source 1..75: mol_type = other DNA
ctacccgcatgagtgctttagtcctttgtggaaattcaggcgtgattttgttgagtgtgaaggaccaccagcaca

SEQ ID NO: 59414 - DNA, 75 bp, synthetic construct
  source 1..75: mol_type = other DNA
taccaaaagagatggctacgcctgcagagttcgcagagtgggagggcatttcccgtggctctgtttaccaaaaaa

SEQ ID NO: 59415 - DNA, 75 bp, synthetic construct
  source 1..75: mol_type = other DNA
tttggcctgctgacgtatctgactaacctgtatttcaaaatcagggaggaccgccgtaagacggcgcggggagac

SEQ ID NO: 59416 - DNA, 75 bp, synthetic construct
  source 1..75: mol_type = other DNA
gacatacttatgcctgctggtcgctgacagccggtgccaacccggcattcatagcaaaccagatgggacatgcag

SEQ ID NO: 59417 - DNA, 75 bp, synthetic construct
  source 1..75: mol_type = other DNA
atggccgtttccggcctgcatggcatgatttgcgcttttggacgggagattcagtgtgctgattggttatgtaag

SEQ ID NO: 59418 - DNA, 75 bp, synthetic construct
  source 1..75: mol_type = other DNA
caggcaagctgactctcagagaattaattgatactcttgcaaaagataaaaattacaaagcttccaagtgggatc

SEQ ID NO: 59419 - DNA, 75 bp, synthetic construct
  source 1..75: mol_type = other DNA
atgcagcagaagctcagaagtatgccgcagacctgcaaaatcagcagtggcagacgatcatgaaaaaccttgctc

SEQ ID NO: 59420 - DNA, 75 bp, synthetic construct
  source 1..75: mol_type = other DNA
ttcagtagaaaaccaggcgcagtccgacagggaagcgcgtaagtcgccggtgattcaggcggcgatcaaactggc

SEQ ID NO: 59421 - DNA, 75 bp, synthetic construct
  source 1..75: mol_type = other DNA
tgtggattttagcaaacgctccaacgaagcgggtagaaatatgatggctcatattaagtcctcatcttatatcaa

SEQ ID NO: 59422 - DNA, 75 bp, synthetic construct
  source 1..75: mol_type = other DNA
gggactccgtggatccagtccgtgctgggcaggcaaaaaccggaaacttacaacctggcgatcagaaaacgcatt

SEQ ID NO: 59423 - DNA, 75 bp, synthetic construct
  source 1..75: mol_type = other DNA
tctgcttaccaggcgcatttcgcccaggggatcaccataataaaatgctgaggcctggcctttgcgtagtgcacg

SEQ ID NO: 59424 - DNA, 75 bp, synthetic construct
  source 1..75: mol_type = other DNA
cttcacgttccgacagccgacaactggactctgtcgatccttttaatatcgaccatattgaagtgatctccggcg

SEQ ID NO: 59425 - DNA, 75 bp, synthetic construct
  source 1..75: mol_type = other DNA
ctcaccgctgccatcgcatttgttgtttgcgggctgatagtctggttgtttttgccatcaatacaaagaaatatt

SEQ ID NO: 59426 - DNA, 75 bp, synthetic construct
  source 1..75: mol_type = other DNA
catggtcaagaaagaaaaaaacaaaggtcgcgtaagcctgcgttatctgatgtacaaaaccgatcaggtccgtga

SEQ ID NO: 59427 - DNA, 75 bp, synthetic construct
  source 1..75: mol_type = other DNA
agagcataaccgcgctcatgcggttttttcatgtcatgagcattgctacgcccaaattatggtggggcgtgcagg

SEQ ID NO: 59428 - DNA, 75 bp, synthetic construct
  source 1..75: mol_type = other DNA
agaccgcaatgcaaccggactgcaaattattgctgatttgttccgtaataaactggggatgtctgtgggggctcg

SEQ ID NO: 59429 - DNA, 75 bp, synthetic construct
  source 1..75: mol_type = other DNA
tgcgtcgccatcacatgtatgaccagacctttcagcgcgccttcaaacgtgccgtagaacaagcaggcatcacga

SEQ ID NO: 59430 - DNA, 75 bp, synthetic construct
  source 1..75: mol_type = other DNA
aagtcacgctacaggcgcgtttagtctctgccttggaaaccttaaacccaaatgtgcccagtgacaccttaatcg

SEQ ID NO: 59431 - DNA, 75 bp, synthetic construct
  source 1..75: mol_type = other DNA
ttttgtaaagacaacgacaggcgttaactccagcccgacactgacgaagcgggaaatcagcacaaaggttgatgt

SEQ ID NO: 59432 - DNA, 75 bp, synthetic construct
  source 1..75: mol_type = other DNA
tttgcaaacaggagacagtcaacaaagcgtgggcacttgagcagacttctgaagtgcaggaaagaatcagtgatg

SEQ ID NO: 59433 - DNA, 75 bp, synthetic construct
  source 1..75: mol_type = other DNA
aagccagccgcgcaacacttgcggccaacggtgttgaaggtgaagtctttgccagcaacgtcttttccgaggtga

SEQ ID NO: 59434 - DNA, 75 bp, synthetic construct
  source 1..75: mol_type = other DNA
atcagtgatctgaatgcactgggcgatatcacccacattaatctccatattaattcaccgggtggcgatgtcttt

SEQ ID NO: 59435 - DNA, 75 bp, synthetic construct
  source 1..75: mol_type = other DNA
atgagtcgttcagttctggttactggtgccagcaaaggcattggtcgcgccatcgcctgccaactggcggcagac

SEQ ID NO: 59436 - DNA, 75 bp, synthetic construct
  source 1..75: mol_type = other DNA
ccagcatgaaaatggaagaaatatctattcccgagagctgattaataaggctgccgtggcaggaattagtggcaa

SEQ ID NO: 59437 - DNA, 75 bp, synthetic construct
  source 1..75: mol_type = other DNA
gcacacgtcgccatctggaaggctttaagtgtcggtgaaactcttcccgcgcgcgattttcagcacatcgataaa

SEQ ID NO: 59438 - DNA, 75 bp, synthetic construct
  source 1..75: mol_type = other DNA
atcctgctgggacctcctggtgtcggaaaaactcatctggccatagctcttggcgtgaaagcggtggatgcggga

SEQ ID NO: 59439 - DNA, 75 bp, synthetic construct
  source 1..75: mol_type = other DNA
ccggtcgtgaagtgcaggatattcccggtgtgctggccgtgtttgctgaacgccgtaaggacagttttggcccgt

SEQ ID NO: 59440 - DNA, 75 bp, synthetic construct
  source 1..75: mol_type = other DNA
aaattcagctggggtgatgccccctggcagatcattgacctcagtatcgcgggcaaagtgaacatacaggtggac

SEQ ID NO: 59441 - DNA, 75 bp, synthetic construct
  source 1..75: mol_type = other DNA
ggcaatgttcaaacccgacttggcgtaaaaacctggctgaagagccaccataaaatggatgacggtaaatcccgc

SEQ ID NO: 59442 - DNA, 75 bp, synthetic construct
  source 1..75: mol_type = other DNA
catttaaaaaactcaatggcctggtgtctgaattttctatgggtggggtatctaccaccaataatatggaattgt

SEQ ID NO: 59443 - DNA, 75 bp, synthetic construct
  source 1..75: mol_type = other DNA
gattttggtcagatttctaaatcgcatttgaaaaacgacggtatctcagtcaagaaagatttagatattaaattg

SEQ ID NO: 59444 - DNA, 75 bp, synthetic construct
  source 1..75: mol_type = other DNA
accgctctggaagctgccggtggcaaagtggtcacaacgggtaaagatattctggttaccctgccggcttaccgg

SEQ ID NO: 59445 - DNA, 75 bp, synthetic construct
  source 1..75: mol_type = other DNA
acctacgctttgtcagcgagccagataacggtatctacgacgccatgaacaaaggcattgcgatggcacaaggca

SEQ ID NO: 59446 - DNA, 75 bp, synthetic construct
  source 1..75: mol_type = other DNA
gcgcggtgggttactgcgcggcgagcgtgtcttcaatcaatatcgcgaaataatgccggaaacagagatcgaaaa

SEQ ID NO: 59447 - DNA, 75 bp, synthetic construct
  source 1..75: mol_type = other DNA
gggtaaagaaaccgacatcgtcacgctgcctatccagcacgactctgccgctgaactggcgcagccgctggatgt

SEQ ID NO: 59448 - DNA, 75 bp, synthetic construct
  source 1..75: mol_type = other DNA
gttaccggttaaaagagaaacgtaaagctggagtgctggccaaaaacacaacgccaatcagtgatgatgaaatgg

SEQ ID NO: 59449 - DNA, 75 bp, synthetic construct
  source 1..75: mol_type = other DNA
atgcaactcagttgcaggatggcgataacacgctgaaatatacgacttgggttaaaaaatccagcgccgcaggta

SEQ ID NO: 59450 - DNA, 75 bp, synthetic construct
  source 1..75: mol_type = other DNA
gcggatcatcttggtattgacggtctggaacaactgcgtgcaatccaggacgccacggggatcgggatggtgctt

SEQ ID NO: 59451 - DNA, 75 bp, synthetic construct
  source 1..75: mol_type = other DNA
tgggaatatcaaaagcgatggcggaaaaggtgctaattgcaaaagctagacggcaggataacgacaaaacaatca

SEQ ID NO: 59452 - DNA, 75 bp, synthetic construct
  source 1..75: mol_type = other DNA
caagcgccagtgtcagcgagctgaagaaaaacccgatggctacagtcagcgccggtgatggtttcccggtcgcta

SEQ ID NO: 59453 - DNA, 75 bp, synthetic construct
  source 1..75: mol_type = other DNA
gaaaggatgcttgatgcgctggatgaccaggaactggtgaaactggttactgaacgcagcaatcagccactgcat

SEQ ID NO: 59454 - DNA, 75 bp, synthetic construct
  source 1..75: mol_type = other DNA
aaaaattatccggacaggctgctgacaagatgcaggctggcgtgattctgctggactttatgcgccgggagttaa

SEQ ID NO: 59455 - DNA, 75 bp, synthetic construct
  source 1..75: mol_type = other DNA
aaagatccgtcgaatcatccggtggcgggaataacggtgaacttcaccatgccacaggacgttgcggcaaacttt

SEQ ID NO: 59456 - DNA, 75 bp, synthetic construct
  source 1..75: mol_type = other DNA
accagaacagcacgccaaatctggacgagtatgcgttttgccagcctgactgaaagtatttctgttatctgcggt

SEQ ID NO: 59457 - DNA, 75 bp, synthetic construct
  source 1..75: mol_type = other DNA
caggtgtgtcatacaccacgtcagcggtggggacgggctactggttcctgcagttgctggacagggtttccccgt

SEQ ID NO: 59458 - DNA, 75 bp, synthetic construct
  source 1..75: mol_type = other DNA
acaccgattgcacaggccgcaaactaccttgctatcaaatcacccgcgatggcttcgcgttccttgctatgggct

SEQ ID NO: 59459 - DNA, 75 bp, synthetic construct
  source 1..75: mol_type = other DNA
gttgccctgcgacttgatggcaagcagtaccagctaaaagcccatcgcgtggcgtggattcttgcgcatggcgct

SEQ ID NO: 59460 - DNA, 75 bp, synthetic construct
  source 1..75: mol_type = other DNA
cgttaagcgcattcgtgaataacaagtacaacggcgacaatgaacgtgttgcgcagacgctggaacgctggctgg

SEQ ID NO: 59461 - DNA, 75 bp, synthetic construct
  source 1..75: mol_type = other DNA
cataatcattgtttatcatttctggccagagataggctcggcaagaaattcaaaccggcgtaccttgatgccctg

SEQ ID NO: 59462 - DNA, 75 bp, synthetic construct
  source 1..75: mol_type = other DNA
tcgctgtcgcgtaaaccggaggtgacgtggtatggctgggacggagacaggctgacgacggtgcagactgacacc

SEQ ID NO: 59463 - DNA, 75 bp, synthetic construct
  source 1..75: mol_type = other DNA
cacataacactgaacggttgaatgttgaacaaattaaggcgttgcttttgacattgaaatatgttcaaaaggaac

SEQ ID NO: 59464 - DNA, 75 bp, synthetic construct
  source 1..75: mol_type = other DNA
cggtacagcctcaacgacgctcatcaatgaaggttaccaagaagtttcaagtggtggcagtgccatagatactac

SEQ ID NO: 59465 - DNA, 75 bp, synthetic construct
  source 1..75: mol_type = other DNA
attccacctcgacaacccaagccagtatttcaccgactatgtgcgtcgctacaccgacatgccgatgctggtgat

SEQ ID NO: 59466 - DNA, 75 bp, synthetic construct
  source 1..75: mol_type = other DNA
cccgttcggctgcctcgatgcgtgaatatggttacagtgctgatgatgtgctgaaggtgacggaggccatttcga

SEQ ID NO: 59467 - DNA, 75 bp, synthetic construct
  source 1..75: mol_type = other DNA
accatcaccgtgcatttcaccgcaaaaagaggtgactggtgtggcttctggagtaacgaggatgtatcggtgtgg

SEQ ID NO: 59468 - DNA, 75 bp, synthetic construct
  source 1..75: mol_type = other DNA
tgtatttttctggtgaaccagcacagatcgctgagattaaacgactggccagcggtgcagtcacaccgctttatc

SEQ ID NO: 59469 - DNA, 75 bp, synthetic construct
  source 1..75: mol_type = other DNA
tggtatctatacagcgctaaccgcctgaaatacccgatgatgcgcaaacgcctgatgaaaatgtggcgtgaagcg

SEQ ID NO: 59470 - DNA, 75 bp, synthetic construct
  source 1..75: mol_type = other DNA
gatttggcgatctactttgatgatgcgccgtcagcgcaattggctcatcactttctgatggatgaagaaatcttg

SEQ ID NO: 59471 - DNA, 75 bp, synthetic construct
  source 1..75: mol_type = other DNA
atggcaacgacgaacgcattcagcctggcgtcaccgccactggcacgtatctgccttcacggggatttacaacga

SEQ ID NO: 59472 - DNA, 75 bp, synthetic construct
  source 1..75: mol_type = other DNA
accatgcaaagcaagagtttctttgaaggaatgaatctgctgaaactcaatcctgaagtgattgaaaagcagatg

SEQ ID NO: 59473 - DNA, 75 bp, synthetic construct
  source 1..75: mol_type = other DNA
atgtttgtaattcttgtaattcaaaccttgggcaaaaagttgatataaaaataataaatgaatttttatcggttt

SEQ ID NO: 59474 - DNA, 75 bp, synthetic construct
  source 1..75: mol_type = other DNA
cagataagccaaaacttttcccacacccaagcttagcgcacacagaagatggagtgtgcgaaggagataaacagt

SEQ ID NO: 59475 - DNA, 75 bp, synthetic construct
  source 1..75: mol_type = other DNA
aacccactatgatgctgtctggctgagggatagtttatggggctatatggcattagtatcagatcagggaaatag

SEQ ID NO: 59476 - DNA, 75 bp, synthetic construct
  source 1..75: mol_type = other DNA
accgttatgaccgcccggcgctaacactcatagccgcgacgctctacagccaggagcgttttgataatggtcaga

SEQ ID NO: 59477 - DNA, 75 bp, synthetic construct
  source 1..75: mol_type = other DNA
ttagaatcatgcgtaagtctgaaatgcttacacaagaaaaaatggctgaaattacagggctcacggtagcggccc

SEQ ID NO: 59478 - DNA, 75 bp, synthetic construct
  source 1..75: mol_type = other DNA
aagaacaacaaaaatatttgcagaagcaaacggcgcttgtgcgtgcagaactgtaccgggcgggaatttctgcga

SEQ ID NO: 59479 - DNA, 75 bp, synthetic construct
  source 1..75: mol_type = other DNA
gggggcatggtacccccacatctattgaatccgcaacgcgcagtatcatgacagctaaagatctagcatatctaa

SEQ ID NO: 59480 - DNA, 75 bp, synthetic construct
  source 1..75: mol_type = other DNA
atgatttacccaacgaatacaggaaaaagcggagaacaccttcgcctcaccacgctggaaagtgtctggattcag

SEQ ID NO: 59481 - DNA, 75 bp, synthetic construct
  source 1..75: mol_type = other DNA
cttcgccagtacggcagcaaaggcggcaacagcctttgagctgccagcggatgaactgtcagaaagtctggggaa

SEQ ID NO: 59482 - DNA, 75 bp, synthetic construct
  source 1..75: mol_type = other DNA
atccgaccaataaattaccggatttacggggcgaatttatccgtggctgggatgacggacggggaattgattcag

SEQ ID NO: 59483 - DNA, 75 bp, synthetic construct
  source 1..75: mol_type = other DNA
ggtcaacgtaattatggttgcagtcgtgggccggggcgtctactggatggcaagtgcccctgtaaaacagcatcc

SEQ ID NO: 59484 - DNA, 75 bp, synthetic construct
  source 1..75: mol_type = other DNA
atggaacatcagagaaaactattccagcaacgcggctatagcgaagatctattgccgaaaacgcaaagccagcgg

SEQ ID NO: 59485 - DNA, 75 bp, synthetic construct
  source 1..75: mol_type = other DNA
aagcaatgggaaaagccagctctgttggactggctgagcggcttgatatcagtcgtgaagaggttctcaacgaac

SEQ ID NO: 59486 - DNA, 75 bp, synthetic construct
  source 1..75: mol_type = other DNA
atgctggttgcgaaaattgcccagtatgaagatgaggcggaagagttcgcagagttcaacgaccgtattgcagcg

SEQ ID NO: 59487 - DNA, 75 bp, synthetic construct
  source 1..75: mol_type = other DNA
ctgaccccggcattgacgatgccgtcgccattgccgccgcgatttttgcacccgaactcgacctgcaactgatga

SEQ ID NO: 59488 - DNA, 75 bp, synthetic construct
  source 1..75: mol_type = other DNA
ctcccaatattggtggtcaggagttgcaggcgctggctcagatggccgcaatgcagcgtgccgggcacagtgtca

SEQ ID NO: 59489 - DNA, 75 bp, synthetic construct
  source 1..75: mol_type = other DNA
ctgaccgcactggcaggccttgccactgcggcagacaaactaccgtattttacggggaatgatacagccagcctg

SEQ ID NO: 59490 - DNA, 75 bp, synthetic construct
  source 1..75: mol_type = other DNA
ggcggcgtgctgccggaaatgtctgcggcgattgccggacatgccagcgaggccgctgatgatggcggaatgacg

SEQ ID NO: 59491 - DNA, 75 bp, synthetic construct
  source 1..75: mol_type = other DNA
ggttcaggcggaggtggtgcatacgatgccggttatagcggaaccagtatgacgggcgggaaaggcgctgcaggg

SEQ ID NO: 59492 - DNA, 75 bp, synthetic construct
  source 1..75: mol_type = other DNA
cccaagtgagtttatccaaaccaatatcattggtacttacacattattagaagccgcgcgccaatattggaatca

SEQ ID NO: 59493 - DNA, 75 bp, synthetic construct
  source 1..75: mol_type = other DNA
gcctttctggtgcagtgcacgggcaaaaccagttgccgcgagctgtccgttgcacaactggaacaagtgctcgat

SEQ ID NO: 59494 - DNA, 75 bp, synthetic construct
  source 1..75: mol_type = other DNA
agtcaatatttattcatggaatgaaaatcagtttacagcagcgtattccaggagtgagtattcagggggccagtc

SEQ ID NO: 59495 - DNA, 75 bp, synthetic construct
  source 1..75: mol_type = other DNA
tggatgtcgctgtcacggaaaccgcaagtgacctggtacggctgggacggcgaccggctgaccacgatacagaac

SEQ ID NO: 59496 - DNA, 75 bp, synthetic construct
  source 1..75: mol_type = other DNA
tgactaagacatttggatcaacaatagctgacgtgataggtaaaaatcatgaggcggcaggggatagacaaggtc

SEQ ID NO: 59497 - DNA, 75 bp, synthetic construct
  source 1..75: mol_type = other DNA
ttcacgacggatatcccaggacatcagcacccgtgatgaaggcgggggcggaaaggtcgtggttatcgggcggca

SEQ ID NO: 59498 - DNA, 75 bp, synthetic construct
  source 1..75: mol_type = other DNA
tcggcgatggcggcggaacattaccaacgccgggcgcaaagcagacagcactggtaaatgagaaacgccgggctg

SEQ ID NO: 59499 - DNA, 75 bp, synthetic construct
  source 1..75: mol_type = other DNA
caaggaaaataagtttgttattaatttctatgatcccaatcagaccgcgacgcataaacgagtatttttttgcac

SEQ ID NO: 59500 - DNA, 75 bp, synthetic construct
  source 1..75: mol_type = other DNA
aggcagtaaaggaatatgtagaaattttaaaagaattcaatatatgcccagaaaaggtagcagaatacctaagcg

SEQ ID NO: 59501 - DNA, 75 bp, synthetic construct
  source 1..75: mol_type = other DNA
ggcagcatatgaccttgctaacgggaaatacactgcacaggacgccaccacagcgcgaaaaggtcttgtccagct

SEQ ID NO: 59502 - DNA, 75 bp, synthetic construct
  source 1..75: mol_type = other DNA
gtgttgcgtcctgatggtcgtcatcgcaccaaaaaattcgctaacaccactaaagggcacgatgagctggtgagc

SEQ ID NO: 59503 - DNA, 75 bp, synthetic construct
  source 1..75: mol_type = other DNA
accgcactggcaggccttgccactgcggcagacaaacttccgtattttacggggaatgatacagccagcctgaca

SEQ ID NO: 59504 - DNA, 75 bp, synthetic construct
  source 1..75: mol_type = other DNA
tttgcccctatatttccagacacctgttatcacttaacccattactggcctgctgccgcagatattcccgtggcg

SEQ ID NO: 59505 - DNA, 75 bp, synthetic construct
  source 1..75: mol_type = other DNA
cacacacccgtggaatcagataacggatgtgcctgcagcttcactgacggtaaaaggcaccgtgcaactcagcag

SEQ ID NO: 59506 - DNA, 75 bp, synthetic construct
  source 1..75: mol_type = other DNA
atgaatcaaatcgaccgtttgctcactattatgcagcgcctgcgcgacccggaaaacggctgcccgtgggataaa

SEQ ID NO: 59507 - DNA, 75 bp, synthetic construct
  source 1..75: mol_type = other DNA
ggtactgaacggcgaacgtgacaggctactaagcgacgccccaccaagacactattacgctcatgcggctggtcg

SEQ ID NO: 59508 - DNA, 75 bp, synthetic construct
  source 1..75: mol_type = other DNA
agtacgtatcagagttgcagaatctttcctctcttcaggggcaaggtcaggcgcttaaccagtattacaactccc

SEQ ID NO: 59509 - DNA, 75 bp, synthetic construct
  source 1..75: mol_type = other DNA
tgggctgcgattggtgtactgggaagtctggttctgggctttctgacttatctgacgaatctgtacttcaaaatc

SEQ ID NO: 59510 - DNA, 75 bp, synthetic construct
  source 1..75: mol_type = other DNA
gcagtcagccagatagcgatgcgacacgtaactttattaccggaatggccacagctaaagctaaccaggaaatac

SEQ ID NO: 59511 - DNA, 75 bp, synthetic construct
  source 1..75: mol_type = other DNA
tgtgtattacatcgcctataaccaggatatgaccgtcgaatacattcaggcgtgtgcgatgtgggcgcgggcatt

SEQ ID NO: 59512 - DNA, 75 bp, synthetic construct
  source 1..75: mol_type = other DNA
tgctggaggcactccccactgatgcccgctctttcctggggcgcgactttggccgtagcggtgatttgtcggtgg

SEQ ID NO: 59513 - DNA, 75 bp, synthetic construct
  source 1..75: mol_type = other DNA
cagggcaagagtggtgagaatgacactcgctttggcctggaagttaattatcggattggcgaacctctggcgaaa

SEQ ID NO: 59514 - DNA, 75 bp, synthetic construct
  source 1..75: mol_type = other DNA
atgcgcaagtatcgcatccgacattattgcggcactggagtttggcaacagtgccggatgcggcgcgagcgcctt

SEQ ID NO: 59515 - DNA, 75 bp, synthetic construct
  source 1..75: mol_type = other DNA
ccgcgatggcgggatggaatccggtgtgcatatccggggtgttaatccggacaccggtaacagcgataacaccat

SEQ ID NO: 59516 - DNA, 75 bp, synthetic construct
  source 1..75: mol_type = other DNA
caccacaacggtgatggcgacgcaggattacgttgatgacaaaattgcagaacatgaacagtcacgacgtcaccc

SEQ ID NO: 59517 - DNA, 75 bp, synthetic construct
  source 1..75: mol_type = other DNA
actgggtagccagttgactataatcggtattgtatttccgctggttgtggggcttataagtgttttatttcaaaa

SEQ ID NO: 59518 - DNA, 75 bp, synthetic construct
  source 1..75: mol_type = other DNA
ccgcgtttttcgaatcatacctggcgggtgtgctggcagaaactgaatggccgcgtgaaacgcttgttgcatttg

SEQ ID NO: 59519 - DNA, 75 bp, synthetic construct
  source 1..75: mol_type = other DNA
ttgaagactttagcactattgcggaatacatgcgcggtgacgatcctgataaacctgttgtggttgatatgagat

SEQ ID NO: 59520 - DNA, 75 bp, synthetic construct
  source 1..75: mol_type = other DNA
gtggtgataaccaccccggctatcggtcatgttccgccacgcccggtgctgatgttcagttgcgtggacaatatc

SEQ ID NO: 59521 - DNA, 75 bp, synthetic construct
  source 1..75: mol_type = other DNA
ggcccttggttttggggcggcggtccgttccagaatggctgcaaccaactggtcagcctgtggagtaaaaccggg

SEQ ID NO: 59522 - DNA, 75 bp, synthetic construct
  source 1..75: mol_type = other DNA
ctcggcattcattgccagtttacctatcaactaaccaccacgccagaaaacgaaacggttcgctttacactgtat

SEQ ID NO: 59523 - DNA, 75 bp, synthetic construct
  source 1..75: mol_type = other DNA
cgggcgtctctgcggcgctgccgtttgtcatcggcggtggtatcctggtggcgcttgccaacatgctggtgcagt

SEQ ID NO: 59524 - DNA, 75 bp, synthetic construct
  source 1..75: mol_type = other DNA
gcgaagcattcactatccgtaacgtacgggttatgcctgaatccattccggctggctttaaagcactggctgaca

SEQ ID NO: 59525 - DNA, 75 bp, synthetic construct
  source 1..75: mol_type = other DNA
tcgcccgggccgggttctatgcgtggctgcataaccctgtctcggcgcgtgataaagataaccagcgcctgctga

SEQ ID NO: 59526 - DNA, 75 bp, synthetic construct
  source 1..75: mol_type = other DNA
gcgcattttgaatgtttctccgcgccgcttactgaacttccttgaatctcgcggtatggcaccgattgcggaatt

SEQ ID NO: 59527 - DNA, 75 bp, synthetic construct
  source 1..75: mol_type = other DNA
ccacgactcctatgcggtggcgatcaccaatgggagtcacgattattacgatggtctgctaatggcctcagtgtc

SEQ ID NO: 59528 - DNA, 75 bp, synthetic construct
  source 1..75: mol_type = other DNA
gagaagcggcgaaaggaaaagcacgtgcagcagccggacaacaccgcgccggacggggccaccgtatcggcggag

SEQ ID NO: 59529 - DNA, 75 bp, synthetic construct
  source 1..75: mol_type = other DNA
aggccgccatgtgtgagaagctgcacgaactcgcggaagaacttcagaacagcatacagacacgctttgaagcgg

SEQ ID NO: 59530 - DNA, 75 bp, synthetic construct
  source 1..75: mol_type = other DNA
tggcacttcattaacatgcgtatctggccgcgagtggttgatggggtagggatcctgcgcggcatcgaagctaac

SEQ ID NO: 59531 - DNA, 75 bp, synthetic construct
  source 1..75: mol_type = other DNA
tcccgccagtagcgaatgatgatgtttatatgggggtactggcgcaagcagagaactttaagaaaaatcacatga

SEQ ID NO: 59532 - DNA, 75 bp, synthetic construct
  source 1..75: mol_type = other DNA
cgtcgcccgcaacgtcttacaattaccacctagtcagggtccacccgacacccggtactgacggagaacaacgga

SEQ ID NO: 59533 - DNA, 75 bp, synthetic construct
  source 1..75: mol_type = other DNA
gtaaggcgcacgggcttactttgcagcatgttgctgcgggcgttcaggttaatccagcaacgctgagtcgtattg

SEQ ID NO: 59534 - DNA, 75 bp, synthetic construct
  source 1..75: mol_type = other DNA
gaaattggtgggtatccgtcactgttgttgccagatgtggcgattagtcttgaccgtactgaagatgccacgctg

SEQ ID NO: 59535 - DNA, 75 bp, synthetic construct
  source 1..75: mol_type = other DNA
atgagcaaagtacgcgttatttttgaatttaaccacgtaatgcatgaagtaaagccagccggtaatgatagtcag

SEQ ID NO: 59536 - DNA, 75 bp, synthetic construct
  source 1..75: mol_type = other DNA
taccccaggctggcaaaggcttatccgaccaataaattaccggatttacggggcgaatttatccgtggctgggat

SEQ ID NO: 59537 - DNA, 75 bp, synthetic construct
  source 1..75: mol_type = other DNA
ttccgctgtgtgccacatctgacaggacggcgctttgagcacggggtgacggactgttacacgctgttccgggat

SEQ ID NO: 59538 - DNA, 75 bp, synthetic construct
  source 1..75: mol_type = other DNA
tctttgtcgcaatgttgctctggtgtggcggctttttcagccaggcatgcgcagcgcagcctccgcaggttgcgc

SEQ ID NO: 59539 - DNA, 75 bp, synthetic construct
  source 1..75: mol_type = other DNA
tacccgtgcaggaagcggacgtcactgaagccacttttgttgttgccgggcagttatttggcacgcgaggacggg

SEQ ID NO: 59540 - DNA, 75 bp, synthetic construct
  source 1..75: mol_type = other DNA
gctgccggagacctgccagagggcaggtatttcttaaaaaacttgaggtaaaaggtgacagtttctcattcactc

SEQ ID NO: 59541 - DNA, 75 bp, synthetic construct
  source 1..75: mol_type = other DNA
atgagttaaaacttgcagagcataacgctatatcaagtgggtttaccagcatcaatacatttgccaggcataatg

SEQ ID NO: 59542 - DNA, 75 bp, synthetic construct
  source 1..75: mol_type = other DNA
tttatgccgttctggcaggttacgctgctgatggggggcttatggggtatttcctggggatgtgcaatgtggttt

SEQ ID NO: 59543 - DNA, 75 bp, synthetic construct
  source 1..75: mol_type = other DNA
ataaaacccgccccccacgagtacagataacgtatgatgttgaaaccggagatgctgaaactgcgaaagagttac

SEQ ID NO: 59544 - DNA, 75 bp, synthetic construct
  source 1..75: mol_type = other DNA
gcgggaaggatgcccgcattctgaaagactccgagaaaaccggcaactggttcaccttcggaaccccggaaaatg

SEQ ID NO: 59545 - DNA, 75 bp, synthetic construct
  source 1..75: mol_type = other DNA
ctgatgcaaggtgcagaaacgacgaaacccggcagtgcgctaacactaaccgggcttctaaccaccaacgataga

SEQ ID NO: 59546 - DNA, 75 bp, synthetic construct
  source 1..75: mol_type = other DNA
ataaagcccgacctccacgagtacagataacgtacgatgttgaaaccggagctgccgaaacagcgaaagagttac

SEQ ID NO: 59547 - DNA, 75 bp, synthetic construct
  source 1..75: mol_type = other DNA
cacaacctgaataaatacatctggcgttttatcgccctgagcacggcacaaccgcgcgtgattaccattgaggcc

SEQ ID NO: 59548 - DNA, 75 bp, synthetic construct
  source 1..75: mol_type = other DNA
gtcaaagctgcatctaaaggttctgcaaaagaaggtgctttcaccgctgttgccaacttcaatctgacttacaac

SEQ ID NO: 59549 - DNA, 75 bp, synthetic construct
  source 1..75: mol_type = other DNA
gttaaaaatccgcaggattatccaattctaattcaatctaaagtaatggacgagggtagtaaagataatgcggat

SEQ ID NO: 59550 - DNA, 75 bp, synthetic construct
  source 1..75: mol_type = other DNA
tggcctgcaactgcaaaaacacggcctgcgctgtgccattgtcacgcgtggtcaaagcgcgctgcatttctcatc

SEQ ID NO: 59551 - DNA, 75 bp, synthetic construct
  source 1..75: mol_type = other DNA
ctattgctttttcattgtgtgctgttgcacatgcagccaatcaagggcaaggtgttgttaattttaaagggacgg

SEQ ID NO: 59552 - DNA, 75 bp, synthetic construct
  source 1..75: mol_type = other DNA
gagaaatcgaacgccaaaatgattgttatcgatccgcgatataccgatacggctgctggtcgtgaagatgaatgg

SEQ ID NO: 59553 - DNA, 75 bp, synthetic construct
  source 1..75: mol_type = other DNA
tgattaacgccgccgaaaaaggggcagatttaaccctttccggcagcacctccggcgtggagccggggcaaacgg

SEQ ID NO: 59554 - DNA, 75 bp, synthetic construct
  source 1..75: mol_type = other DNA
cagcgcgagggtattgcgctcgccaagcaacgcggggcttaccgtggcaggaagaaatccctgtcgtctgagcgt

SEQ ID NO: 59555 - DNA, 75 bp, synthetic construct
  source 1..75: mol_type = other DNA
attccaaaagaaaacagcgaatgcatgtataaccgcaaggctatcgaccagtgggttgagagtatgtcaaaaaaa

SEQ ID NO: 59556 - DNA, 75 bp, synthetic construct
  source 1..75: mol_type = other DNA
aatttcgatcacatccgtaatcattacttccgcagccataagaccatcaaccctacggggattatttcaattggt

SEQ ID NO: 59557 - DNA, 75 bp, synthetic construct
  source 1..75: mol_type = other DNA
ccagcatccgtgacaataataactctggcatcggggggcagggattgagcaagggaatcaaggaaatcatgattg

SEQ ID NO: 59558 - DNA, 75 bp, synthetic construct
  source 1..75: mol_type = other DNA
aagcaacagccacaggtatacgaactggcagtatgactattgattatcacgacgcaatccgccgtctggatgcag

SEQ ID NO: 59559 - DNA, 75 bp, synthetic construct
  source 1..75: mol_type = other DNA
cccgaatgaacacggaacaacagatcgcgccgtaatatataacgggaagcatggggttatgacgatatatcccgg

SEQ ID NO: 59560 - DNA, 75 bp, synthetic construct
  source 1..75: mol_type = other DNA
gccgggggcggacgaggtgctgccgcctccgccgcccgcataccgggtgctgacgggggtggtggacggcttcgg

SEQ ID NO: 59561 - DNA, 75 bp, synthetic construct
  source 1..75: mol_type = other DNA
tggtttaccgcgaccgaagaaaattaaaaaccgacactattggtcacgtaaagacattgatagatacctattaac

SEQ ID NO: 59562 - DNA, 75 bp, synthetic construct
  source 1..75: mol_type = other DNA
gcgcaagctgacgaagcaggattactgggaaaacttccggttgagatgaaggttgcccagtggcgatggttgtat

SEQ ID NO: 59563 - DNA, 75 bp, synthetic construct
  source 1..75: mol_type = other DNA
atattgccatgcgaacaggcctttcatccagcaccgtgtcacgggttttagcgggtaaagctaataccagttatc

SEQ ID NO: 59564 - DNA, 75 bp, synthetic construct
  source 1..75: mol_type = other DNA
tttgaaatggggcatcgcagagtaatgaacattatgtgtttacgtcgatacacaatggaactgcgacttgccgga

SEQ ID NO: 59565 - DNA, 75 bp, synthetic construct
  source 1..75: mol_type = other DNA
atcacctccgcgttcgttggcaacgattgcgcttataccactttccgggctctgtgctgacggattaccgaatac

SEQ ID NO: 59566 - DNA, 75 bp, synthetic construct
  source 1..75: mol_type = other DNA
tgtttgatgatgccggaccgaatgttggtgtcgcatatgacaatccactccgtgccgccatgattgtctttctca

SEQ ID NO: 59567 - DNA, 75 bp, synthetic construct
  source 1..75: mol_type = other DNA
gtccggtggccatcacgccttatactctgatgcaggccattgcggcggaaggtgatgtcaccacacctgtgttgg

SEQ ID NO: 59568 - DNA, 75 bp, synthetic construct
  source 1..75: mol_type = other DNA
ggtaaccgcgctgaaatgagcccggaagccgccggcattgctgcctgtctgatgacgtacagtcatcatgcctgt

SEQ ID NO: 59569 - DNA, 75 bp, synthetic construct
  source 1..75: mol_type = other DNA
ccatgcgtattcaccgtcagcatccggcatcccgtctttttcctttctgtaccggcaaataccgctggcacggca

SEQ ID NO: 59570 - DNA, 75 bp, synthetic construct
  source 1..75: mol_type = other DNA
aaatgaaactggaatgactctgtttgccaataacaccgttacaggagaatataataacggcggggccatatttgc

SEQ ID NO: 59571 - DNA, 75 bp, synthetic construct
  source 1..75: mol_type = other DNA
acatcgccatgagcaagggtaatgaagacgtcgtgttatcttatatatcgacgctgggtgcttttgcaaaaaaaa

SEQ ID NO: 59572 - DNA, 75 bp, synthetic construct
  source 1..75: mol_type = other DNA
ccttatggctacgatcctcgccccttcacatcctcaatttatatttgtttttgccgccgttcgtcgtgcagaacg

SEQ ID NO: 59573 - DNA, 75 bp, synthetic construct
  source 1..75: mol_type = other DNA
gtggctatacgggttatgacttactccacaaagagcaaaaattccaaggcgcgtcatcaatattaataaaccatg

SEQ ID NO: 59574 - DNA, 75 bp, synthetic construct
  source 1..75: mol_type = other DNA
cggtcgtgaacaactggcggcaacgctggcggcgatgccggagatgacggtggaaaaagcccgcccgatcctggc

SEQ ID NO: 59575 - DNA, 75 bp, synthetic construct
  source 1..75: mol_type = other DNA
gaacgggacatattaaaaaaagccgttgtagattcaatctgtcaatgcaacacccctttcaattatctctttcgg

SEQ ID NO: 59576 - DNA, 75 bp, synthetic construct
  source 1..75: mol_type = other DNA
tcactgactgaaatctggcggggtacggaggatgaccttgctgatgcagtgctggttgccacgacgccggggcag

SEQ ID NO: 59577 - DNA, 75 bp, synthetic construct
  source 1..75: mol_type = other DNA
cgcccagaagctgaacgataaagcgattttgctcagttctattaattcaccgctttggatctgtacccttaaatc

SEQ ID NO: 59578 - DNA, 75 bp, synthetic construct
  source 1..75: mol_type = other DNA
gtgataatattacggtaactaaaaatctgaccggtaatatttctgtcggtgacaatgcggataccttaacggccg

SEQ ID NO: 59579 - DNA, 75 bp, synthetic construct
  source 1..75: mol_type = other DNA
ttgcgatccttcggacatgctcgttgtgcagatgaccgaagataaggcccgcgagcattctaaaaagcgccttga

SEQ ID NO: 59580 - DNA, 75 bp, synthetic construct
  source 1..75: mol_type = other DNA
tactgatggtctgtctcgtcgatatcgtcgacagttccgcgctgccatggctgggcgagcagttctcgttgttcg

SEQ ID NO: 59581 - DNA, 75 bp, synthetic construct
  source 1..75: mol_type = other DNA
acggtagaatcaaatcgtcagctgaaatataagcagttcgcgttgagtaaccctgaacgcgtggtggtggatatc

SEQ ID NO: 59582 - DNA, 75 bp, synthetic construct
  source 1..75: mol_type = other DNA
aaagcaaaacgtaaaaccgcagctgtttgcccttgcgccggtcgccgggtttaaagagcgtctggtgatggacct

SEQ ID NO: 59583 - DNA, 75 bp, synthetic construct
  source 1..75: mol_type = other DNA
atgacgaggctgcgaacacgacgttatgccggtgctctgctgctgtgtatggcgaccgtttctgtggctgacgct

SEQ ID NO: 59584 - DNA, 75 bp, synthetic construct
  source 1..75: mol_type = other DNA
gttgccggactgtacagcttcaactatatgctacccgctgcgggcgtgcgtggcgcagcaatcacccgtactgcc

SEQ ID NO: 59585 - DNA, 75 bp, synthetic construct
  source 1..75: mol_type = other DNA
atgatgagaaaggaacaagtttaattgaatctgcgatagtattagcgctttctgttgcttctgtatccggtgtgt

SEQ ID NO: 59586 - DNA, 75 bp, synthetic construct
  source 1..75: mol_type = other DNA
cagatttctctcggcactacggcgggtgaattagaagttatgccgaagctaaatggacaggatgcggcagcaaat

SEQ ID NO: 59587 - DNA, 75 bp, synthetic construct
  source 1..75: mol_type = other DNA
ataacaccgaaagctatcgccagccgcgccgcgagaaatcgaaaggcgggaccggtgacgagctgctgaccaact

SEQ ID NO: 59588 - DNA, 75 bp, synthetic construct
  source 1..75: mol_type = other DNA
ctttctgtaggttttgagagacttgctaaactaatacttgttgcacactatgccattgaacacaaagggaaaatg

SEQ ID NO: 59589 - DNA, 75 bp, synthetic construct
  source 1..75: mol_type = other DNA
tctctaataccgctgtacgtcaaagaatttttgctacaggctgttccgctatggaagcagtgcaatattacgtat

SEQ ID NO: 59590 - DNA, 75 bp, synthetic construct
  source 1..75: mol_type = other DNA
cgcccgcaagcagataccgactattctgcccgccttactggaagaagagctgaaccaggatatcgatgaactgca

SEQ ID NO: 59591 - DNA, 75 bp, synthetic construct
  source 1..75: mol_type = other DNA
gcattgcaccggaagaactgtctgcatgggctggtgcggacgccgaacgcctgaccgttacggctctgcccgcca

SEQ ID NO: 59592 - DNA, 75 bp, synthetic construct
  source 1..75: mol_type = other DNA
ttaactggaactgtgcagcctcgaaatccccaccgaagacccctgatgaaaagcaggatacgccggatatgagag

SEQ ID NO: 59593 - DNA, 75 bp, synthetic construct
  source 1..75: mol_type = other DNA
cgtacggagtgttatgccatgacggtccactattaccggctgcgggattacgccctgcaacatccggaatgcaac

SEQ ID NO: 59594 - DNA, 75 bp, synthetic construct
  source 1..75: mol_type = other DNA
aacttaaagaagttgtagatatcatcactactaaagttgatgtatcgcaaattagtctttgcgattacatatcaa

SEQ ID NO: 59595 - DNA, 75 bp, synthetic construct
  source 1..75: mol_type = other DNA
ccgtgcgatttaacaacgttactcaacgttgacgccctaatcgtgacccatttgcatgaagatcactgggacgaa

SEQ ID NO: 59596 - DNA, 75 bp, synthetic construct
  source 1..75: mol_type = other DNA
ccaaaacggtaattcgcatccgcaaaggtagctctaacggtgtggaactgacaggactgcaactggacgaagaaa

SEQ ID NO: 59597 - DNA, 75 bp, synthetic construct
  source 1..75: mol_type = other DNA
atgaacggtaaccgcgcagaaatgagcccggaagccgccggtattaccgcctgtctgatgacgtacagtcatcat

SEQ ID NO: 59598 - DNA, 75 bp, synthetic construct
  source 1..75: mol_type = other DNA
gtctggcagccggtcttgataaagacggggagtgcattgacgcgttaggcgcgatgggatttggatcgatcgaga

SEQ ID NO: 59599 - DNA, 75 bp, synthetic construct
  source 1..75: mol_type = other DNA
ttacccccatttgcctgtttttgttacaaaaacgccgggagcgggggaaaacttactttttcccgtttccggggg

SEQ ID NO: 59600 - DNA, 75 bp, synthetic construct
  source 1..75: mol_type = other DNA
atgggtacagccctttctccgatagtttcagaattcgaaactaccgaacaagaaaacagttacaacgaatggttg

SEQ ID NO: 59601 - DNA, 75 bp, synthetic construct
  source 1..75: mol_type = other DNA
gactctcgcttctggtggtgggttggatattaccggaggaaaggtaacaatcaatggcccgcttaactttttgct

SEQ ID NO: 59602 - DNA, 75 bp, synthetic construct
  source 1..75: mol_type = other DNA
cagatccgcgccctgcaattcctcatgatgatgtaatggcagaaatggaaaatctcattgcccaaattgctgcga

SEQ ID NO: 59603 - DNA, 75 bp, synthetic construct
  source 1..75: mol_type = other DNA
atcaattgaatccgatatcagacatcgaccccctgggtttatctatgtgggaggatgcaaaatcgggggcatgta

SEQ ID NO: 59604 - DNA, 75 bp, synthetic construct
  source 1..75: mol_type = other DNA
cggatccggtggaggaaaatacgggcacccggaaccataaatggcagagactgacgccttcagtctccacgtcct

SEQ ID NO: 59605 - DNA, 75 bp, synthetic construct
  source 1..75: mol_type = other DNA
aacaaaaaccgatggcaatcaaagcattacgactgttgatttaggtgctggtgatgatctaatggtcattcgtgg

SEQ ID NO: 59606 - DNA, 75 bp, synthetic construct
  source 1..75: mol_type = other DNA
tatgctctatctgcgtaaccacaacccggcaacctttgtgttgatcccggtattcatcgtggtgaccaaagtcat

SEQ ID NO: 59607 - DNA, 75 bp, synthetic construct
  source 1..75: mol_type = other DNA
gagaaattatcaagttagttccattagtatcaattgatctgctaattgaaaacgagaatggtgaatatttatttg

SEQ ID NO: 59608 - DNA, 75 bp, synthetic construct
  source 1..75: mol_type = other DNA
cggatccggttgaggaaaatacgggcacccgtaaccacaagtggcagagactgacgccctccgtctcccgctcct

SEQ ID NO: 59609 - DNA, 75 bp, synthetic construct
  source 1..75: mol_type = other DNA
cggtattcctggcctgattgccgactacagcctcaatgcgcaaactcgccaccaggagcagggggggcgaggact

SEQ ID NO: 59610 - DNA, 75 bp, synthetic construct
  source 1..75: mol_type = other DNA
catgacggaggatgatgtccgaccggaggcactgcgccgctttgagcagatggtagaagaggtgtcacgtaacgc

SEQ ID NO: 59611 - DNA, 75 bp, synthetic construct
  source 1..75: mol_type = other DNA
ttttagtcgtgatgattattttttctatgaatgctaatgcaaatcagttaaatagcagcggattacttgataact

SEQ ID NO: 59612 - DNA, 75 bp, synthetic construct
  source 1..75: mol_type = other DNA
taaccgcgacgattgaacaacgcggaccacaaacggcggatgagctggatgcggtgttcggtaccacatcacgca

SEQ ID NO: 59613 - DNA, 75 bp, synthetic construct
  source 1..75: mol_type = other DNA
atgctgtctcctttgtggcgctgactaacattgagatgaagcgtgcctcgctggagcttcacaataaaccgcaac

SEQ ID NO: 59614 - DNA, 75 bp, synthetic construct
  source 1..75: mol_type = other DNA
gtgttattccagatatgcgcggctggacaatcaagggcaaacccgccagtgggcgtgccgtattgtcacaggaac

SEQ ID NO: 59615 - DNA, 75 bp, synthetic construct
  source 1..75: mol_type = other DNA
cgcaatggcagtatcatgaagaactgtgggtacgcggcaacgatgcggcgaaagagcaggtgctggcagccattg

SEQ ID NO: 59616 - DNA, 75 bp, synthetic construct
  source 1..75: mol_type = other DNA
caggtttatctgactggacttccacagtcagggaaattacaggtttcatggggcaaagataaaaactcaaactgt

SEQ ID NO: 59617 - DNA, 75 bp, synthetic construct
  source 1..75: mol_type = other DNA
ttaggaacgaaaacgaccagttcatttgattacgggacaaaaacagtcagtacgtttaaccacggcacaaaatca

SEQ ID NO: 59618 - DNA, 75 bp, synthetic construct
  source 1..75: mol_type = other DNA
cgcggcatccaaatctccgccgggaatgccgtctcctttgtggcactgactaacattgagatgaagcgtgcgtcg

SEQ ID NO: 59619 - DNA, 75 bp, synthetic construct
  source 1..75: mol_type = other DNA
gcttttttatggttcgcatttcaggaaatccgggaagccgcacgatcacgacaagacgtgtgccaattatcgacg

SEQ ID NO: 59620 - DNA, 75 bp, synthetic construct
  source 1..75: mol_type = other DNA
cgttacaggtaaagcgaccaatggtccaatactggacggaaacggcgtgactgtactcggtattctggaagtgct

SEQ ID NO: 59621 - DNA, 75 bp, synthetic construct
  source 1..75: mol_type = other DNA
gtgatttctcatctgccttcgtcgaaagacgaggcgctaaaaattgtggaggccataaagcagaaaaagcaccgt

SEQ ID NO: 59622 - DNA, 75 bp, synthetic construct
  source 1..75: mol_type = other DNA
gtgaagaagacgtggcggcgttactggaagctggcgttgcgcgcgtggtggtcggttccaccgcagtgaaatcac

SEQ ID NO: 59623 - DNA, 75 bp, synthetic construct
  source 1..75: mol_type = other DNA
ttgtaatagtgcccgttatattattttattttgcacctgacagttttctcgctgaaattattcatgaatggaaga

SEQ ID NO: 59624 - DNA, 75 bp, synthetic construct
  source 1..75: mol_type = other DNA
gtaccttttccccggagttcaagcttgaagctatcgaacaggtggttaaataccagcgtgatgtcagagaagtcg

SEQ ID NO: 59625 - DNA, 75 bp, synthetic construct
  source 1..75: mol_type = other DNA
ctgcgtcagtatgagcgcgatgccggtgcaggtgacggcggactgagcaccactgaacgtcagcgtctgaaggaa

SEQ ID NO: 59626 - DNA, 75 bp, synthetic construct
  source 1..75: mol_type = other DNA
atgacaaccgttacgcataattccaccacaccttctgtttccgtaactactgcatcagggaataacccacctcag

SEQ ID NO: 59627 - DNA, 75 bp, synthetic construct
  source 1..75: mol_type = other DNA
gatcaacacattatttctcacctgccagccagccggggagatgcagagcatattctccgtcgcctgtcagcacag

SEQ ID NO: 59628 - DNA, 75 bp, synthetic construct
  source 1..75: mol_type = other DNA
gctggcacgaaggacatgatgctcctaggacggatagccactccagtctacggctattacacataaagataactg

SEQ ID NO: 59629 - DNA, 75 bp, synthetic construct
  source 1..75: mol_type = other DNA
aacccatgcgactgatgctgcaggctcagcacgcgcagccagcacgtcagccggacaggccgcgacgtcggctca

SEQ ID NO: 59630 - DNA, 75 bp, synthetic construct
  source 1..75: mol_type = other DNA
cgctgaattacagctattccaataatatatggcaaaacgatcgggatcatttactcgcttttacgcttaatgttc

SEQ ID NO: 59631 - DNA, 75 bp, synthetic construct
  source 1..75: mol_type = other DNA
cgatgttctggcgtctggaacaaggcccggcggcggcgattggtttaagtctggttatcggtatcgtgatggcgg

SEQ ID NO: 59632 - DNA, 75 bp, synthetic construct
  source 1..75: mol_type = other DNA
gtggccttcacggctaagatcgcctccggtctggataatctttactgggcgtcacagcgcaccggcgcgacagtc

SEQ ID NO: 59633 - DNA, 75 bp, synthetic construct
  source 1..75: mol_type = other DNA
accctgtggctgctgcgttaccgccctgacgaaattccgttcctgcgggataactttggcgtcccggaagtcaca

SEQ ID NO: 59634 - DNA, 75 bp, synthetic construct
  source 1..75: mol_type = other DNA
tcgagagaggaattacttaagagaaattcttttccatcagtgaatgaaaacaaatatctgaatgcgatgtggcgc

SEQ ID NO: 59635 - DNA, 75 bp, synthetic construct
  source 1..75: mol_type = other DNA
accacactcaccccctggcttgtccgggagcgctgctggctgaccgtctggagctctgaagaactgctgagccgg

SEQ ID NO: 59636 - DNA, 75 bp, synthetic construct
  source 1..75: mol_type = other DNA
tcgagagaggaattgcttaagagaaagagtttcggttctgttaatgacaacaaatatctgaatgcgatgtggcgg

SEQ ID NO: 59637 - DNA, 75 bp, synthetic construct
  source 1..75: mol_type = other DNA
gaccctgacagaccccgtgacagggaagtcaggagaagtgaaatcattggtttcgtcgctacaaaccaaatatgc

SEQ ID NO: 59638 - DNA, 75 bp, synthetic construct
  source 1..75: mol_type = other DNA
aacgctggagcagttcgactttaccttccagccgggcatcgaccgtaaggttgtccgggaactggctggtctggc

SEQ ID NO: 59639 - DNA, 75 bp, synthetic construct
  source 1..75: mol_type = other DNA
cgacaggtgtatcctctcttgtagacggagacaatactattcattttactgctttggttaaaaaagacacaagtg

SEQ ID NO: 59640 - DNA, 75 bp, synthetic construct
  source 1..75: mol_type = other DNA
cagcgcctccgcgcaggccagcgtcagcaatattaacggcaatagcgcctcggcggtgcataactacagcgtcga

SEQ ID NO: 59641 - DNA, 75 bp, synthetic construct
  source 1..75: mol_type = other DNA
gcttgccttcctccatacccctttcgctcgcgcacttcccgcccgacaaagcgttaacattaacgactacaaccc

SEQ ID NO: 59642 - DNA, 75 bp, synthetic construct
  source 1..75: mol_type = other DNA
ttcggaacgtctgtgaggagttcaccgcggctaattcggagttactgagtcttgttcaggagtacaacagaattg

SEQ ID NO: 59643 - DNA, 75 bp, synthetic construct
  source 1..75: mol_type = other DNA
ctgtctgatgacgtacagtcatcacgcctgccgtacggagtgttatgccatgacggttcattattaccgtctgcg

SEQ ID NO: 59644 - DNA, 75 bp, synthetic construct
  source 1..75: mol_type = other DNA
gccgtcccgtccgacaacactgtttacccggatagcgtcatacgcggcgtaattccggcacccgacaccaccccg

SEQ ID NO: 59645 - DNA, 75 bp, synthetic construct
  source 1..75: mol_type = other DNA
gtagccaactgttacagcgtattgaagccgtcaatgtggaacgaacaaaggtcttcagtcgtctgacagttttat

SEQ ID NO: 59646 - DNA, 75 bp, synthetic construct
  source 1..75: mol_type = other DNA
atcaaggaatggtctccgcgattacgtacggcgatccagttagcccgaaatgtatcttccggcacatgcgagtat

SEQ ID NO: 59647 - DNA, 75 bp, synthetic construct
  source 1..75: mol_type = other DNA
ggaaaggtatccatccacaaaatcatctggccggttacagcggtgtgcttcaggccgatgcttacggtggttacc

SEQ ID NO: 59648 - DNA, 75 bp, synthetic construct
  source 1..75: mol_type = other DNA
ggactggcggggcagattgataacctgcgcaaaaagataattgaaaattttcccaaaattgaagtcaccatcaca

SEQ ID NO: 59649 - DNA, 75 bp, synthetic construct
  source 1..75: mol_type = other DNA
ccctgccgaaacccgaggttgtcctgcgctggcgtgagcagaccacagatgacttccgcttctgttttaagtttc

SEQ ID NO: 59650 - DNA, 75 bp, synthetic construct
  source 1..75: mol_type = other DNA
atattaatgttcagaataatattgatcttgttgatggaaaaacgaatccgaataaagcaacaaaagcattacaaa

SEQ ID NO: 59651 - DNA, 75 bp, synthetic construct
  source 1..75: mol_type = other DNA
taagtatcacggggggtttttggttcggactgctcatggcctctttccactggtggcgcaggaaagttaaccggc

SEQ ID NO: 59652 - DNA, 75 bp, synthetic construct
  source 1..75: mol_type = other DNA
taatgacatcaacgcctggtttggttacgacgactccgtaccgctgctcgatctgtacaatccggtgaataccga

SEQ ID NO: 59653 - DNA, 75 bp, synthetic construct
  source 1..75: mol_type = other DNA
atgacaaccgtttcgcataattccaccacaccttctgtttccgtaaccgctgcatcagggaataacccacctcag

SEQ ID NO: 59654 - DNA, 75 bp, synthetic construct
  source 1..75: mol_type = other DNA
acagccggataacgccaacgctaaagccggtaatacgatgccctgggtgtttgactgcggcaaaatcgaccaggt

SEQ ID NO: 59655 - DNA, 75 bp, synthetic construct
  source 1..75: mol_type = other DNA
aacgctaaaaccggtaatacgatgccgtgggtgtttgactgcggcaagattgaccaggttctcggggagttttaa

SEQ ID NO: 59656 - DNA, 75 bp, synthetic construct
  source 1..75: mol_type = other DNA
acaagcctggaaagtggaacataaattatcggatattctactgttgactatttgtgccgttatttcgggtgcaga

SEQ ID NO: 59657 - DNA, 75 bp, synthetic construct
  source 1..75: mol_type = other DNA
atagcatggatccattaggattatatgaatttaaatcaaaaaatatagatgatattggaatatttgcattggcaa

SEQ ID NO: 59658 - DNA, 75 bp, synthetic construct
  source 1..75: mol_type = other DNA
ggtaagcacttctacaaagtgattggtgatgaactaaagaatttgcgggtgactttaagtcactcacaaaatccc

SEQ ID NO: 59659 - DNA, 75 bp, synthetic construct
  source 1..75: mol_type = other DNA
acaaaatacagaacacgataccccatactacaaccctataaaaacgttcgatattgttccggcatttgaggcaag

SEQ ID NO: 59660 - DNA, 75 bp, synthetic construct
  source 1..75: mol_type = other DNA
cgcgaagacaagacggttcacgataaagcgctgctgatggattttaaccatcccggcaataaccgctttatggtc

SEQ ID NO: 59661 - DNA, 75 bp, synthetic construct
  source 1..75: mol_type = other DNA
ttcacactgacgacacaccggtaaaggtactggcaccgggcctgaaaaagacgaaaacagggcgcatctggacgt

SEQ ID NO: 59662 - DNA, 75 bp, synthetic construct
  source 1..75: mol_type = other DNA
gccatcgtttactgcaacgcgagctgatgatttgattttgccatcgctgcatttggcaaaccgcgaactgcgtcg

SEQ ID NO: 59663 - DNA, 75 bp, synthetic construct
  source 1..75: mol_type = other DNA
aatcagcaaaggccgtctgattcgtgctaatcaggacggtaaatttcgttactgtatgccgggcgataatttacc

SEQ ID NO: 59664 - DNA, 75 bp, synthetic construct
  source 1..75: mol_type = other DNA
ttgcagaacgaggcaatgaagcatatgtccgctataaccggcgcggcgaaccagtgctggtaaacatcccatcta

SEQ ID NO: 59665 - DNA, 75 bp, synthetic construct
  source 1..75: mol_type = other DNA
acgcagatcccccctggacattccgcgacaaagcaaccgatggtcaacgcggtgcaagttttaaatatccggtca

SEQ ID NO: 59666 - DNA, 75 bp, synthetic construct
  source 1..75: mol_type = other DNA
ccataatttgccgcctacagatgtgtacgctatggcccaggtcgagggcgcggataaaccgctcagtaacctgca

SEQ ID NO: 59667 - DNA, 75 bp, synthetic construct
  source 1..75: mol_type = other DNA
gccgttcgtcaggtaaaagcggcattgttgtcatcccgggatttatctgtttattctatgaatgccccagggttt

SEQ ID NO: 59668 - DNA, 75 bp, synthetic construct
  source 1..75: mol_type = other DNA
ctgcgtttgaacaggtcaggacggtcacaggtaaattcccgcagaaaacgccccagcgggatgtctgtggtgcgc

SEQ ID NO: 59669 - DNA, 75 bp, synthetic construct
  source 1..75: mol_type = other DNA
agtatccgccatatccggcgctggttcgtcacggtacggggttgtcatctccggctaaccaggcatttgaacagt

SEQ ID NO: 59670 - DNA, 75 bp, synthetic construct
  source 1..75: mol_type = other DNA
gcatcagcttctggccgcagcattttggcctcattccacagtgggtgaccctggatccccgtgtcttcggctgga

SEQ ID NO: 59671 - DNA, 75 bp, synthetic construct
  source 1..75: mol_type = other DNA
cgggtatggcggcgggagcgtgacctgacggggtggatgtcgctgtcgcgtaaaccggaggagacatggtacggc

SEQ ID NO: 59672 - DNA, 75 bp, synthetic construct
  source 1..75: mol_type = other DNA
tcagtgcgcagctgaataatctgcaggatacggcaacgtctgcattaagcgatatcagtaaaactgtgggagggc

SEQ ID NO: 59673 - DNA, 75 bp, synthetic construct
  source 1..75: mol_type = other DNA
gcatcagcttctggccgcagcattttggcctcattccacagtgggttaccctggaaccccgtgtcttcggctgga

SEQ ID NO: 59674 - DNA, 75 bp, synthetic construct
  source 1..75: mol_type = other DNA
tctgttacacgcacagcagataaggattctgcaaaaacatttgttcaggagactctgaaagatacctgggagtct

SEQ ID NO: 59675 - DNA, 75 bp, synthetic construct
  source 1..75: mol_type = other DNA
ctgaggtccgtcagcgggccgttcgtatggttatcgaaagccagaatgactatgactcgcagtgggcggccatca

SEQ ID NO: 59676 - DNA, 75 bp, synthetic construct
  source 1..75: mol_type = other DNA
atgactaaaaatacttgtttttcccccgaaatccgtcagagggcgattcgtatggttctggaaagtcagggcgaa

SEQ ID NO: 59677 - DNA, 75 bp, synthetic construct
  source 1..75: mol_type = other DNA
gacgaagcaaaagatattttctttaactactgcaattactcatatcacgaaataaaagacgaagaggaagaataa

SEQ ID NO: 59678 - DNA, 75 bp, synthetic construct
  source 1..75: mol_type = other DNA
ttccccaatggttagttgaccaaaggataattcgtagaaatggtatgcttgagaaatattttcgtttttttgaaa

SEQ ID NO: 59679 - DNA, 75 bp, synthetic construct
  source 1..75: mol_type = other DNA
ctaactttgtcaccgtagatactgacggagatggtgttgctgatagcactattgcaagctgggatgatgttgcat

SEQ ID NO: 59680 - DNA, 75 bp, synthetic construct
  source 1..75: mol_type = other DNA
gtaatttatttggatggaatatgtatttataaatatccaaatggacaaacaaaagatatatcaaaaattaagcgt

SEQ ID NO: 59681 - DNA, 75 bp, synthetic construct
  source 1..75: mol_type = other DNA
ctgtttgatgacgtagttaagttgtttgagtttgatacattcgaaagcccagcaaaggaggcaaccagtgagcaa

SEQ ID NO: 59682 - DNA, 75 bp, synthetic construct
  source 1..75: mol_type = other DNA
ctgtatcgcgccaatcgcctgtttatggaggcgtataccgaaattctggaactggattcctgcttcaaagattga

SEQ ID NO: 59683 - DNA, 75 bp, synthetic construct
  source 1..75: mol_type = other DNA
attacctgcccaatagtacgcgagttggtgcaaaaatgtttcatgaattggctcaggaatttattcgccgtgggc

SEQ ID NO: 59684 - DNA, 75 bp, synthetic construct
  source 1..75: mol_type = other DNA
acacctgacgtttaccggagaggactcgccgatggcgaacctgatgctttcggtgatgggagcattcgctgagtt

SEQ ID NO: 59685 - DNA, 75 bp, synthetic construct
  source 1..75: mol_type = other DNA
gaattaacccgacgcatcagtaagcgttatgacgatgtagaggtgatcgtaaaagccaccagcaacgatggcctt

SEQ ID NO: 59686 - DNA, 75 bp, synthetic construct
  source 1..75: mol_type = other DNA
gaaaagaaagggctatgggtgtacatgactgaaattttcagtgggaacccccatcttttcaaagggaagcatctc

SEQ ID NO: 59687 - DNA, 75 bp, synthetic construct
  source 1..75: mol_type = other DNA
cggtcgccgctaattggtttcagctcaaaagcaaaagtgttacccctgattatgcaaaagatatttggcgctcat

SEQ ID NO: 59688 - DNA, 75 bp, synthetic construct
  source 1..75: mol_type = other DNA
taccgtggcatttgaagagaagtatggctcccagctggagctgatatttcgttttatcgatcgtgcgctggcaat

SEQ ID NO: 59689 - DNA, 75 bp, synthetic construct
  source 1..75: mol_type = other DNA
ctcaccgtcattgcagtcggtgacactgaggactgtcagaggaacctccggtaagtttttctgggaagcgaccgg

SEQ ID NO: 59690 - DNA, 75 bp, synthetic construct
  source 1..75: mol_type = other DNA
tcctgaacattcctgaattccctgccgataaccgcattcgtttacaacagttgctatggaaaaccgcccgcgatc

SEQ ID NO: 59691 - DNA, 75 bp, synthetic construct
  source 1..75: mol_type = other DNA
cctgttccatggccttcagccacaccgccaacaggctggctgaaatgcaacggtgcgcctttttctgcagaagaa

SEQ ID NO: 59692 - DNA, 75 bp, synthetic construct
  source 1..75: mol_type = other DNA
agaaactgaaaaagttgctggcgctggcagcatccggcaacccgcatgaggctgctctggcactgcgccgcgccc

SEQ ID NO: 59693 - DNA, 75 bp, synthetic construct
  source 1..75: mol_type = other DNA
gtgatgcagggtgatgccatggtgctcggtgccggagaggcattcaccaacaatggaacgctgactgccggtaaa

SEQ ID NO: 59694 - DNA, 75 bp, synthetic construct
  source 1..75: mol_type = other DNA
acattattaaatttatcactgtgtggtgttttttttagcaccgcacagtccgctcaactaaatattaataatgta

SEQ ID NO: 59695 - DNA, 75 bp, synthetic construct
  source 1..75: mol_type = other DNA
accgtggcatttgaagagaagtatggctcccagcttgagctgatatttcgttttatcgatcgcgcactggcgatt

SEQ ID NO: 59696 - DNA, 75 bp, synthetic construct
  source 1..75: mol_type = other DNA
ggaagcaacgattggtccgcaatgctttattgccgactcggtagttgcaaaccaggcatatttgggcgcacaagt

SEQ ID NO: 59697 - DNA, 75 bp, synthetic construct
  source 1..75: mol_type = other DNA
agaattgcctaagctgatgcgttcgctagtcatgtcaaatctatctgttccgactcgctgtcttattgagtggca

SEQ ID NO: 59698 - DNA, 75 bp, synthetic construct
  source 1..75: mol_type = other DNA
cgatgaagccaatcgttgaaaacctcggaatgagctggggtactcagcaacaaaaacttatgaaacaactagata

SEQ ID NO: 59699 - DNA, 75 bp, synthetic construct
  source 1..75: mol_type = other DNA
taatctgccatgctggtggagtcagccaccagcatgacgaacaggccacgcagccgggcagtgtcaccgctgaaa

SEQ ID NO: 59700 - DNA, 75 bp, synthetic construct
  source 1..75: mol_type = other DNA
ttgaataatacacctattaacaatccggtgctgagatctattaccaatgaaatgattctcctgcagtataatctt

SEQ ID NO: 59701 - DNA, 75 bp, synthetic construct
  source 1..75: mol_type = other DNA
gtcgcgccacgacggagtggtttggtgagtcaatgctggaagcaacagaagatgatcgtcatcctggttgtccgg

SEQ ID NO: 59702 - DNA, 75 bp, synthetic construct
  source 1..75: mol_type = other DNA
gatgccttaccggaaagtgcagcccgtaaggcactgagattaccgaagcctgttgtgccgtctgtcacccgggag

SEQ ID NO: 59703 - DNA, 75 bp, synthetic construct
  source 1..75: mol_type = other DNA
gtggaaagcctgctgatgatccccaccacctgataggccacggtcaggggggaatgggtacaaaagcgcatgacc

SEQ ID NO: 59704 - DNA, 75 bp, synthetic construct
  source 1..75: mol_type = other DNA
ccagtggcctcattccggatggcacagcgagaacatgaccacaatgcgacacgcgccgggcgcaatccgtctgtg

SEQ ID NO: 59705 - DNA, 75 bp, synthetic construct
  source 1..75: mol_type = other DNA
acgaatccatggtgtgcggcgtgttccccaaccaagatggaacgttcactgctatgacgtataccaaaagcaaaa

SEQ ID NO: 59706 - DNA, 75 bp, synthetic construct
  source 1..75: mol_type = other DNA
ttcggtctgtttgcgaaagactccagctacaaccaaatagacaaaagctacgaattaagaataaccgtcattaca

SEQ ID NO: 59707 - DNA, 75 bp, synthetic construct
  source 1..75: mol_type = other DNA
cagcgcagcaggttttttgttccgctaccccggcgttaaggggaaatgaggtcaacatggatacgctcaatcttg

SEQ ID NO: 59708 - DNA, 75 bp, synthetic construct
  source 1..75: mol_type = other DNA
agcaacttgctcaccaaaacttgtcagcatggatgattgacgtcatccgtcacgcaatcagcggtacgcaggaga

SEQ ID NO: 59709 - DNA, 75 bp, synthetic construct
  source 1..75: mol_type = other DNA
cctataaattctggcgaaaatgtcgtcaggatggactggggcgacgggtttttctggtaaagggagacagcacga

SEQ ID NO: 59710 - DNA, 75 bp, synthetic construct
  source 1..75: mol_type = other DNA
tggataacgctgcccgtgcacagaaggcgctcggtctgaagtttggtgtggcactgacagcagaccaggtggcgg

SEQ ID NO: 59711 - DNA, 75 bp, synthetic construct
  source 1..75: mol_type = other DNA
agattttgaagaaaaacacggcagccagctgttgttgctgattcgttttttaatgcacgcgagaaattcgggtgt

SEQ ID NO: 59712 - DNA, 75 bp, synthetic construct
  source 1..75: mol_type = other DNA
cttcagtaaaattcatcttgatgcgtcaatgtcctgcgcgggggatcccataccgttagcaccagaaacggttgc

SEQ ID NO: 59713 - DNA, 75 bp, synthetic construct
  source 1..75: mol_type = other DNA
gttagccgttatgcgctgggccgtgactatcacaaacttctgcgcaaccgactcaaaaagctgggcgagatgatt

SEQ ID NO: 59714 - DNA, 75 bp, synthetic construct
  source 1..75: mol_type = other DNA
tggtgccggaactcgggctggtggtccttaagccaggtcgtgaatccatgcaggtatttcacaatcctcgagtgc

SEQ ID NO: 59715 - DNA, 75 bp, synthetic construct
  source 1..75: mol_type = other DNA
tcgcgctgctggcggtggtgatgacgttcatgatggcgccgggtcatctgttgctgccgattctccagtgtctgg

SEQ ID NO: 59716 - DNA, 75 bp, synthetic construct
  source 1..75: mol_type = other DNA
ttggctggtttgggcgagaagggggattccccgatacgcaaatcgtcgcgttatttgttctgtttatggtggcag

SEQ ID NO: 59717 - DNA, 75 bp, synthetic construct
  source 1..75: mol_type = other DNA
ccgccaactcaagttagatattttcaccaaatcacgactccgcatcaaagtcatcgcagacgttccagactcccg

SEQ ID NO: 59718 - DNA, 75 bp, synthetic construct
  source 1..75: mol_type = other DNA
agattgaagagcttcagcgtaacgctgccctttccgctcaccgcatcgaccgtaatgccgtttcagcggagcatt

SEQ ID NO: 59719 - DNA, 75 bp, synthetic construct
  source 1..75: mol_type = other DNA
atggatactatcgatcttggcaacagcgaatctctggtatgtggcgtgttccccaaccaggacggtacgttcacc

SEQ ID NO: 59720 - DNA, 75 bp, synthetic construct
  source 1..75: mol_type = other DNA
atccgctcagctcgggcttcccgggacggataccgtcagtcatatcatcagccagcaacgtgtttttgtctgggc

SEQ ID NO: 59721 - DNA, 75 bp, synthetic construct
  source 1..75: mol_type = other DNA
gaccctgcgcacgctaatgacagtatcagcccgatatttgacaaggagaaagagcagaggcgtctgcagacagtg

SEQ ID NO: 59722 - DNA, 75 bp, synthetic construct
  source 1..75: mol_type = other DNA
cgaaccgcggcgcgctgccgttcccggctgccagacgtgtgcagagtgccaatccgtcatcgagctgaagaataa

SEQ ID NO: 59723 - DNA, 75 bp, synthetic construct
  source 1..75: mol_type = other DNA
gcacatgatctctttgtgttgcctttgtgcagaaagcatcacaacgagctgcatacggatacagtggcatttgaa

SEQ ID NO: 59724 - DNA, 75 bp, synthetic construct
  source 1..75: mol_type = other DNA
ggggatgtggagaaggcggcaaatgtgtttgtgcgaaatgaattattaccgttgcaaaaaaggatgcgtgaagta

SEQ ID NO: 59725 - DNA, 75 bp, synthetic construct
  source 1..75: mol_type = other DNA
cctgctaatgcaacagagaaacaacgtcaggaatatcttgcgaaactgcgtgacacgcaggcttacaggaatgaa

SEQ ID NO: 59726 - DNA, 75 bp, synthetic construct
  source 1..75: mol_type = other DNA
tgcggttgatgccggggtgctgacggaatgtaacggtttttatgatattccgcgtccccgcccggtgcagccggt

SEQ ID NO: 59727 - DNA, 75 bp, synthetic construct
  source 1..75: mol_type = other DNA
ccagcacctacatccctcacccgctgctcagccaacaggctttttcgcgttttgtgcaggactatctggtatttg

SEQ ID NO: 59728 - DNA, 75 bp, synthetic construct
  source 1..75: mol_type = other DNA
cgtgatgccctgagctgccgcttcttttatgacgcctttccgggaatgcgtctgcgccaccaggtgaccggcgat

SEQ ID NO: 59729 - DNA, 75 bp, synthetic construct
  source 1..75: mol_type = other DNA
cgatgaatgaacactgcggcaagccacttaatgacacccgtttgctggctttgatgggcgagctggaagggcgta

SEQ ID NO: 59730 - DNA, 75 bp, synthetic construct
  source 1..75: mol_type = other DNA
ataattatttttttaagagaggaattgttgcaagcttacatatggagacaattaaatatatattgatgcctttca

SEQ ID NO: 59731 - DNA, 75 bp, synthetic construct
  source 1..75: mol_type = other DNA
ggggatgtggaaaaggctagtaaggtattcgtaagaaacgaattgatatcaatgcaaaaacggatcaaggagatt

SEQ ID NO: 59732 - DNA, 75 bp, synthetic construct
  source 1..75: mol_type = other DNA
ggggatatcgaaaaggcaagcacagtatttgtacgaaatgagctactgcctctacaaaaaatgtttctagaaata

SEQ ID NO: 59733 - DNA, 75 bp, synthetic construct
  source 1..75: mol_type = other DNA
ctgaattcctcgaatatgaaacgctggatgaagccttaatcaaccagagccgtacacagcgaatcatcatggtcg

SEQ ID NO: 59734 - DNA, 75 bp, synthetic construct
  source 1..75: mol_type = other DNA
ctggcaagcgctcaaatatgccgggtattgcgccaacctgcgtaaagagcaaattctgcagatcttccagcttta

SEQ ID NO: 59735 - DNA, 75 bp, synthetic construct
  source 1..75: mol_type = other DNA
aaggacgggcttcagattatcccgttgtcagaagtggcggcgaaggatgagttcctgaatatcaagaacgtgagc

SEQ ID NO: 59736 - DNA, 75 bp, synthetic construct
  source 1..75: mol_type = other DNA
tgaatccagttacgaatacagatcctctggggttagaagtttttcctagaccattccccttgccaattccatggc

SEQ ID NO: 59737 - DNA, 75 bp, synthetic construct
  source 1..75: mol_type = other DNA
cctgtttctgatggcattgatcagggcagtacgtaacggcacaaatatcagcgaacatcatttcattcagatgtc

SEQ ID NO: 59738 - DNA, 75 bp, synthetic construct
  source 1..75: mol_type = other DNA
tggaacacaatacatttttcagtgttaccggcatagatgagtctctctatgaaaagtatataatctttatcactc

SEQ ID NO: 59739 - DNA, 75 bp, synthetic construct
  source 1..75: mol_type = other DNA
tgcggttgatgccggaatgctgactgaacttaatggtttttacgacgtaccgcgtccccgtacagagcagcctgt

SEQ ID NO: 59740 - DNA, 75 bp, synthetic construct
  source 1..75: mol_type = other DNA
tgaaagacacgcagggccatgaaacgcggtatgaatacaacgccgccggtgacctgaccgccgtcattgccccgg

SEQ ID NO: 59741 - DNA, 75 bp, synthetic construct
  source 1..75: mol_type = other DNA
gaaaccgcagagcggtggcagtatgacgaacgcggctggctgacagacatcagccatatcagcgaagggcaccgg

SEQ ID NO: 59742 - DNA, 75 bp, synthetic construct
  source 1..75: mol_type = other DNA
tgtcagaagtggcggcaaaggatgagtttttgaacatcaagaacgtgagccgtgacgatatgatggctgcgcacc

SEQ ID NO: 59743 - DNA, 75 bp, synthetic construct
  source 1..75: mol_type = other DNA
gagtgcttatttttgtatttctggtgatattctatgggattattattttacatgatattccctacctgattgcta

SEQ ID NO: 59744 - DNA, 75 bp, synthetic construct
  source 1..75: mol_type = other DNA
tatcacctgtgacggctgtggttttatcaacacgccgcacgcgacgctcaccacaggcagacctgtgatgaatgc

SEQ ID NO: 59745 - DNA, 75 bp, synthetic construct
  source 1..75: mol_type = other DNA
ttgaacgtattggaatgcttacaaagcgctacccttcaagaagtgcagctgccagagcgtggggaatcaatatca

SEQ ID NO: 59746 - DNA, 75 bp, synthetic construct
  source 1..75: mol_type = other DNA
taaaacagttgtacatcacctgatcactcccaagaaagcagaaaatatattctgtccaggaaatgctgaagtaga

SEQ ID NO: 59747 - DNA, 75 bp, synthetic construct
  source 1..75: mol_type = other DNA
gtattcatccaacattccacaacgcatcaaatcgcttggcaactctggaccagactgcttgaagcttgagtgcct

SEQ ID NO: 59748 - DNA, 75 bp, synthetic construct
  source 1..75: mol_type = other DNA
ggatccgcgttcttgaaatgctggcctacaatcgccgcgttgaactgtatcgggagaaagaaaaaattacgtacc

SEQ ID NO: 59749 - DNA, 75 bp, synthetic construct
  source 1..75: mol_type = other DNA
agcgctacaagaagccagatgacatcgaaatatcattggcttatcgaatcaataattacacatttatcgagcgag

SEQ ID NO: 59750 - DNA, 75 bp, synthetic construct
  source 1..75: mol_type = other DNA
ctggcgagtgggggcaataacagtttgctttctggattattacttacagggcttaatggtggtcctgaagcgctc

SEQ ID NO: 59751 - DNA, 75 bp, synthetic construct
  source 1..75: mol_type = other DNA
gacaggtaaaaagcatacatcaccgaaaacgcgctctgccggggagagggaagaggagcaggcaagagaggctct

SEQ ID NO: 59752 - DNA, 75 bp, synthetic construct
  source 1..75: mol_type = other DNA
gaccgtggtattagtccgctggcgcaagaaggtctggtgaaatgggcattatgcggtcactggggacaatcgccg

SEQ ID NO: 59753 - DNA, 75 bp, synthetic construct
  source 1..75: mol_type = other DNA
gtgctgggagcgtttttgccaggagctgggcaagcaaattccagtggcaatgacgctggaaaagaatatgccgat

SEQ ID NO: 59754 - DNA, 75 bp, synthetic construct
  source 1..75: mol_type = other DNA
ctccgtaatgcgatgaaaagcgccaaaggtccgggcaacttccgcaacctgtttatgtactcgccgaacggcaaa

SEQ ID NO: 59755 - DNA, 75 bp, synthetic construct
  source 1..75: mol_type = other DNA
gacaccgttgtcgagtgtgttcttaacaaactctgcccgtcgcatacctatgtgatttttaaatatccggagtaa

SEQ ID NO: 59756 - DNA, 75 bp, synthetic construct
  source 1..75: mol_type = other DNA
gtaaaaacaggggcgataaccgcggagatattgtgattgccggaagccagcttaaggccggtggtaacacaagcc

SEQ ID NO: 59757 - DNA, 75 bp, synthetic construct
  source 1..75: mol_type = other DNA
atcccgggcaaacgaactgtggaaaaaggctgtgcacactatcaataacacaaccagggaagaacgccgggtatg

SEQ ID NO: 59758 - DNA, 75 bp, synthetic construct
  source 1..75: mol_type = other DNA
ggagagccgctaccggtatgatgataccggtcgggtgacggagcaggtcaacccggaggggctggactaccgctt

SEQ ID NO: 59759 - DNA, 75 bp, synthetic construct
  source 1..75: mol_type = other DNA
aggaggcagtgagtccccccatccgacatccccgtcactccgtacgctgctttcacttaaagcatcagcaggaga

SEQ ID NO: 59760 - DNA, 75 bp, synthetic construct
  source 1..75: mol_type = other DNA
gaaaaattgtcgatggagttggaagccgctaaacagcgggaaaaagatctgtttatggaaaatgttcgacttaag

SEQ ID NO: 59761 - DNA, 75 bp, synthetic construct
  source 1..75: mol_type = other DNA
ctgatggatatcgaaatcgaccacgccgaccagaccgaagaaagcgacatgtccttccttacgcgcatggcggaa

SEQ ID NO: 59762 - DNA, 75 bp, synthetic construct
  source 1..75: mol_type = other DNA
tccagaaactgactgaaagagttgatgaacttgagtcagaattaaagttgttattaacttcccgaagcgatatta

SEQ ID NO: 59763 - DNA, 75 bp, synthetic construct
  source 1..75: mol_type = other DNA
ctgataacggaagtcatacagagctcccattccagagcggcggcactggcggttgactctgccgccgcaaaactg

SEQ ID NO: 59764 - DNA, 75 bp, synthetic construct
  source 1..75: mol_type = other DNA
agcagaaagcggtgctgctgtcagccggcaaactgtcggggtgttacacggaaggggtggtactggcgaagaagg

SEQ ID NO: 59765 - DNA, 75 bp, synthetic construct
  source 1..75: mol_type = other DNA
gttcgtctatgataaccaaaagaaaaagtgggttgtcgctggaactgtatgggggatttataattacgccaatgg

SEQ ID NO: 59766 - DNA, 75 bp, synthetic construct
  source 1..75: mol_type = other DNA
cctgtttgtactggtcaataaatttgatgagaaagaccgcaatggcgatggggcagatgccgtacgccagaaagt

SEQ ID NO: 59767 - DNA, 75 bp, synthetic construct
  source 1..75: mol_type = other DNA
acatcgctatgccgacacagaagacaccgtgctggaaattcagcggctggctgccgtttgccgtgacaccctgaa

SEQ ID NO: 59768 - DNA, 75 bp, synthetic construct
  source 1..75: mol_type = other DNA
gtggcatttgaagagaagtatggctcccagctggagctgatatttcgttttatcgatcgcgcactggcgattggt

SEQ ID NO: 59769 - DNA, 75 bp, synthetic construct
  source 1..75: mol_type = other DNA
aatcgtcaggggtattgaaacaggttttcgtggtacggccctgtacgccacagaaaatattgccggacgcatcaa

SEQ ID NO: 59770 - DNA, 75 bp, synthetic construct
  source 1..75: mol_type = other DNA
tcacctgattggtcatggtcagggtggaatgggtacaaaagcgcatgacctttttgtgttgcctttgtgcagaaa

SEQ ID NO: 59771 - DNA, 75 bp, synthetic construct
  source 1..75: mol_type = other DNA
taaaggcgcttgaaatgcgtggcgttgaacctacagtgaaaaacgctcacgatatctaccttcagttttcaccgg

SEQ ID NO: 59772 - DNA, 75 bp, synthetic construct
  source 1..75: mol_type = other DNA
ccacctgataggtcacggtcagggtggaatgggtacaaaagcgcatgacctctttgtgttgcctttgtgcagaaa

SEQ ID NO: 59773 - DNA, 75 bp, synthetic construct
  source 1..75: mol_type = other DNA
accgtggcatttgaagagaagtatggctcccagttggagctgatatttcgttttatcgatcgtgcgctggcaata

SEQ ID NO: 59774 - DNA, 75 bp, synthetic construct
  source 1..75: mol_type = other DNA
atggcattcacactgtttaaacgtcgcaatgtcaccacgccatctgaaacggaggcggcaggacagggttttgtt

SEQ ID NO: 59775 - DNA, 75 bp, synthetic construct
  source 1..75: mol_type = other DNA
ccaccagggcgcgtaaaccgggaagaagtcgcaatggcgacgcctcgcgctatgcggggtttcgagaagggcaga

SEQ ID NO: 59776 - DNA, 75 bp, synthetic construct
  source 1..75: mol_type = other DNA
atgaccgggtgcttcgtgaaaaacagcgggagccggaagcatgaacaggaaggcgtttctggcctgcgtgctgat

SEQ ID NO: 59777 - DNA, 75 bp, synthetic construct
  source 1..75: mol_type = other DNA
catattatttttccctgcattcaatgcttctttgttttttaccggagttaaacctctatattcaataataaaatg

SEQ ID NO: 59778 - DNA, 75 bp, synthetic construct
  source 1..75: mol_type = other DNA
caaagaaacaactttgcttatggcaggcgcaaagagagcgcatgaatgagcgcgagtttctttcctcctcatccg

SEQ ID NO: 59779 - DNA, 75 bp, synthetic construct
  source 1..75: mol_type = other DNA
cgatatatcaggcaatccgatcaaagtttctgaagggatggaatttgtgcaatcaggtactaacgtgccctatat

SEQ ID NO: 59780 - DNA, 75 bp, synthetic construct
  source 1..75: mol_type = other DNA
acccgtccggtgaagtcacacccagtaaggcagaccggcttattacggagcgtctggtacaggcactggccctgg

SEQ ID NO: 59781 - DNA, 75 bp, synthetic construct
  source 1..75: mol_type = other DNA
ttgatcgtattaggcaagccttgggggataaacaactgacagccgtggcgtattcgtatggaactcaaattgcag

SEQ ID NO: 59782 - DNA, 75 bp, synthetic construct
  source 1..75: mol_type = other DNA
caaaggctggctgcaaaaaattcgtgaggatgcaccggatcacgtaatgggcagcaccaccacgggcggtgaaac

SEQ ID NO: 59783 - DNA, 75 bp, synthetic construct
  source 1..75: mol_type = other DNA
cagtaacagcccgggtggccaccctgttcccttcatcatttccggtactccctgtagccgcacctgcaggctgga

SEQ ID NO: 59784 - DNA, 75 bp, synthetic construct
  source 1..75: mol_type = other DNA
tgcggatcctctggcgttcgaagaaaagcatggttctcaggttgatttaatttttcgttttcttgatcacgcctt

SEQ ID NO: 59785 - DNA, 75 bp, synthetic construct
  source 1..75: mol_type = other DNA
tcatgcagacccgctggagtttgagaaaaagtacggctctcaggttgagttaatttttcgttttcttgatcacgc

SEQ ID NO: 59786 - DNA, 75 bp, synthetic construct
  source 1..75: mol_type = other DNA
ggcatacgctggcgctaatttatgtgtggatgaggctgttgttcgtcacctcctgtttccggggaaatctgaaga

SEQ ID NO: 59787 - DNA, 75 bp, synthetic construct
  source 1..75: mol_type = other DNA
tccgggtgctgtatctgaacaaccagaatcagctgattgccgatgaaaccctcttcaccggcaccatcaaccgca

SEQ ID NO: 59788 - DNA, 75 bp, synthetic construct
  source 1..75: mol_type = other DNA
atggtgaaagcatccctggcgaatggagcctcacttgagaaacaactggaggctattgatgaaaaactgacactc

SEQ ID NO: 59789 - DNA, 75 bp, synthetic construct
  source 1..75: mol_type = other DNA
catgcaatgaatggcacgcaggagcgggaattatcgctggctgaattatcctggtgggcggtctgcaatcaggtg

SEQ ID NO: 59790 - DNA, 75 bp, synthetic construct
  source 1..75: mol_type = other DNA
catgatcggttttaacggcgtgaagcgtgcgaaaacctccaaccgtagcgaaaacccgctactgcaggatgtgaa

SEQ ID NO: 59791 - DNA, 75 bp, synthetic construct
  source 1..75: mol_type = other DNA
gagtggtatctggggaaaagtttgtggatttttcggcaccagtgactgggggtgggaagagtatgttgatatcgt

SEQ ID NO: 59792 - DNA, 75 bp, synthetic construct
  source 1..75: mol_type = other DNA
gagggcttcactgtaaaaatcagtttcccggcagtcagccagttacagacccggctcgcggtaaaaacaaatctg

SEQ ID NO: 59793 - DNA, 75 bp, synthetic construct
  source 1..75: mol_type = other DNA
gcacgaccgagggcgcgaccatgactgcaagcgtcactgacgctaacggcaacccggtagaaggcataaaagtta

SEQ ID NO: 59794 - DNA, 75 bp, synthetic construct
  source 1..75: mol_type = other DNA
ggtttaattattcaatgggggccaattgatgttccgctgacgtctcaggacacagtaacctattttccgattgca

SEQ ID NO: 59795 - DNA, 75 bp, synthetic construct
  source 1..75: mol_type = other DNA
acagatatctggaatatggcctgatgtgtatgctgagcggatacaggctcacgacaggccgtgaactgtttgatg

SEQ ID NO: 59796 - DNA, 75 bp, synthetic construct
  source 1..75: mol_type = other DNA
ttgatcgtattaggcaagccttgggtgataaacaactgacagccgtggcgtattcgtatggaacacaaattgcag

SEQ ID NO: 59797 - DNA, 75 bp, synthetic construct
  source 1..75: mol_type = other DNA
aagtcaggagaagtgaaatcactggtttcgtcgctacaaaccaaatatgccctgaaaggctataacgtcgaagcc

SEQ ID NO: 59798 - DNA, 75 bp, synthetic construct
  source 1..75: mol_type = other DNA
gtgctcagtcaatctaaaggaaaggagtttttctactctcattttggaactccatatcgtgttaccgtaattaat

SEQ ID NO: 59799 - DNA, 75 bp, synthetic construct
  source 1..75: mol_type = other DNA
aaatcagcattcactggctggtctttttgctggttatcgcagcgtattgcgcaatggagtttcgtggtttcttcc

SEQ ID NO: 59800 - DNA, 75 bp, synthetic construct
  source 1..75: mol_type = other DNA
cggcttaaacgcctggggctgtcaaaaatgttccgccgtctggttgtcacacttatccggcgttatggcgtcagt

SEQ ID NO: 59801 - DNA, 75 bp, synthetic construct
  source 1..75: mol_type = other DNA
atgaactcacctgtcgcggcatgttcagcgaccagcggcagacagaaatatcgcttttactcaattattatgaaa

SEQ ID NO: 59802 - DNA, 75 bp, synthetic construct
  source 1..75: mol_type = other DNA
tttgaaggactggcatggaaagcagaaggccggatgctgtttgtcgctaaagaacgacgccctacaggcatgttt

SEQ ID NO: 59803 - DNA, 75 bp, synthetic construct
  source 1..75: mol_type = other DNA
cgccgccgctcagttatcgacaacccgaaacgtgaccggattgaaaactttgaatccgttaacgaagcctatgtg

SEQ ID NO: 59804 - DNA, 75 bp, synthetic construct
  source 1..75: mol_type = other DNA
cagcaatgagcgtgtgattcgtgctgttggtggcgctggtgcactgtctgactggctgttgcgtcatgtcaaatc

SEQ ID NO: 59805 - DNA, 75 bp, synthetic construct
  source 1..75: mol_type = other DNA
attaatcttccgtttatacactggccgcggatttgcaatgataagcgtgtcgtgttatctgtggctgcctttacc

SEQ ID NO: 59806 - DNA, 75 bp, synthetic construct
  source 1..75: mol_type = other DNA
cagaagtgcaggtcttacttttcctaatgatttttattttctggctgagcgtaaaattttcaactatgccagtgt

SEQ ID NO: 59807 - DNA, 75 bp, synthetic construct
  source 1..75: mol_type = other DNA
ctacgcctgaaactcgttttgaaattggcgttatcactggcgataaaacttttattgaggatgccattaaccaga

SEQ ID NO: 59808 - DNA, 75 bp, synthetic construct
  source 1..75: mol_type = other DNA
tggtattctgcaaccggcgttcatctgatgtaagagataaagaatcgatgagcgaagtaatcatgatcgtctctc

SEQ ID NO: 59809 - DNA, 75 bp, synthetic construct
  source 1..75: mol_type = other DNA
gatccggagtcgccggagtcttttatgttacgcccaaaacgtcgccgctgggttaatgaaaagtacacgcgctgg

SEQ ID NO: 59810 - DNA, 75 bp, synthetic construct
  source 1..75: mol_type = other DNA
gaaaatactggcatgtgtacatgtcgaagaagacagccggagggcggaatacggcacgctacctgggtcgttatc

SEQ ID NO: 59811 - DNA, 75 bp, synthetic construct
  source 1..75: mol_type = other DNA
gaccgagaacctggaaaacacctgaactggcaaagtttgtaggagatgatttatttaatattctgactgaatgta

SEQ ID NO: 59812 - DNA, 75 bp, synthetic construct
  source 1..75: mol_type = other DNA
cactatgtctaccgctacgatgaatacggcaggctggcggagaagacggaccgcatcccggaaggggttatccgg

SEQ ID NO: 59813 - DNA, 75 bp, synthetic construct
  source 1..75: mol_type = other DNA
ggaaggccagccttcacgatatccgcctgcgcgaagaggcggacctctggctgtctgtgcgctcggatactccgg

SEQ ID NO: 59814 - DNA, 75 bp, synthetic construct
  source 1..75: mol_type = other DNA
acggatgtacaaagcatcaccatcaggggcaataaacctgtcatccgcgtttcccggagtgcgcattgcatgcgc

SEQ ID NO: 59815 - DNA, 75 bp, synthetic construct
  source 1..75: mol_type = other DNA
atatactggcacattcgatgggcggtgcgatctccacattatttctgcaacgccatccaggtgtatgtgacgcca

SEQ ID NO: 59816 - DNA, 75 bp, synthetic construct
  source 1..75: mol_type = other DNA
cagccagcactgacaacaccaatgttaatggcgaagacatgacggagattgaggagaatatgctactcccgattt

SEQ ID NO: 59817 - DNA, 75 bp, synthetic construct
  source 1..75: mol_type = other DNA
catgaagacctggtacgcagccacataagcaaggccttaagtggcgaaaagatgaaaaagaaagatcgcgatgct

SEQ ID NO: 59818 - DNA, 75 bp, synthetic construct
  source 1..75: mol_type = other DNA
tcatgctgacccgctggagtttgagaaaaagtacgggtcccaggttgagttaatttttcgttttcttgatcacgc

SEQ ID NO: 59819 - DNA, 75 bp, synthetic construct
  source 1..75: mol_type = other DNA
tcgctttggtgccgggaaagtcagttcgcgtataggtttgtcatcgcctgcaaaattatttaaccaaaattcatc

SEQ ID NO: 59820 - DNA, 75 bp, synthetic construct
  source 1..75: mol_type = other DNA
ctttttatgcgcaattgcgacctgtcaatagcgatgtgcagtcgggtaaagtgaatgccagcgcgacatttgtac

SEQ ID NO: 59821 - DNA, 75 bp, synthetic construct
  source 1..75: mol_type = other DNA
accggggaaattttcgcaaccaaccgtgagcaggtggaagcgatgatcgaatatctgtggaaaataagacgcaga

SEQ ID NO: 59822 - DNA, 75 bp, synthetic construct
  source 1..75: mol_type = other DNA
cccacctggaatagcggtgttccgtggacggaatggaaagaacgtagtcgtgagtgctacgaagacgatttgcgt

SEQ ID NO: 59823 - DNA, 75 bp, synthetic construct
  source 1..75: mol_type = other DNA
atgaccaatctatcgggggtttatggcactctgctgccggataataacctgaattatagcgttcaggtcggtaac

SEQ ID NO: 59824 - DNA, 75 bp, synthetic construct
  source 1..75: mol_type = other DNA
gccaagattggcacagagctgacatcgttgcagagctacgaaaacgcaatatgtcactagctgaattgggaagat

SEQ ID NO: 59825 - DNA, 75 bp, synthetic construct
  source 1..75: mol_type = other DNA
aacccaaagatctaaaccccacacataacgcacgcgagagtgctccgaccagtgagcaggaagttttgtcgttac

SEQ ID NO: 59826 - DNA, 75 bp, synthetic construct
  source 1..75: mol_type = other DNA
ggcgcgtgcgctgtatcgacatgcggagatcggtcaacaaatcccgggtcaactgtacgccgcggtggcggaagt

SEQ ID NO: 59827 - DNA, 75 bp, synthetic construct
  source 1..75: mol_type = other DNA
tgaatccgttaacgaagcctatgtggttgaggactatcgctgcgctgcactggtggaaaacatccagattggcga

SEQ ID NO: 59828 - DNA, 75 bp, synthetic construct
  source 1..75: mol_type = other DNA
ctaaagagcgtgagcctgtcgatccgacgctaatggtcgatgtggaatacaaatgcgagcagactaactttgaca

SEQ ID NO: 59829 - DNA, 75 bp, synthetic construct
  source 1..75: mol_type = other DNA
cacaccgggcgcggtgaaagtcggtaaagggggcgaatatgccaacctggacgctgtggtgatggatgcggtcaa

SEQ ID NO: 59830 - DNA, 75 bp, synthetic construct
  source 1..75: mol_type = other DNA
tcgtatgatcggcccgaactgcccaggcgttatcactccgggtgaatgcaaaatcggtatccagccgggtcacat

SEQ ID NO: 59831 - DNA, 75 bp, synthetic construct
  source 1..75: mol_type = other DNA
accatgactgcaagcgtcactgacgctaacggcaacccggtagaaggcataaaagttaatttccgcggaacctcc

SEQ ID NO: 59832 - DNA, 75 bp, synthetic construct
  source 1..75: mol_type = other DNA
aagaattaaaccccacacataacgcgcgcatgcgcgagagtgctacgaccggtgagttgaatgacgcgtcgttgc

SEQ ID NO: 59833 - DNA, 75 bp, synthetic construct
  source 1..75: mol_type = other DNA
ccctgctccattacgtcccggatctgcgccgcaagatgctgctggccacactgtggaacaccgtgtgcgcgcatt

SEQ ID NO: 59834 - DNA, 75 bp, synthetic construct
  source 1..75: mol_type = other DNA
atggttttattggtcgtaatttatgtttgaggcttgaggaacttggttataaagatcttattagaattgatcgag

SEQ ID NO: 59835 - DNA, 75 bp, synthetic construct
  source 1..75: mol_type = other DNA
gaaaacagacagcgcaaaaagcaggggctggataccctgggtatggatgagctgatagcgaaagcctggcgtttt

SEQ ID NO: 59836 - DNA, 75 bp, synthetic construct
  source 1..75: mol_type = other DNA
gaaaactgacgatgttctgatcgactacagcactctgttcggtgtgtctccaatgactgcaaccgttgacgcatc

SEQ ID NO: 59837 - DNA, 75 bp, synthetic construct
  source 1..75: mol_type = other DNA
aaaaaactgcatctggcgcgattacatggtcggtaattgttacccagatattatctccagtttctctttctttga

SEQ ID NO: 59838 - DNA, 75 bp, synthetic construct
  source 1..75: mol_type = other DNA
gaacggaaaacagcacgcagacgcactgaaagacgcttaccagcatcaccacggcgcagccgggcgtgagtggat

SEQ ID NO: 59839 - DNA, 75 bp, synthetic construct
  source 1..75: mol_type = other DNA
gtgaaaataccttcgaaccgcaactaattaagaagcatcagacacgcatcacccagatggacagccagattttgt

SEQ ID NO: 59840 - DNA, 75 bp, synthetic construct
  source 1..75: mol_type = other DNA
attttttaatggcgactataacaaatcaccttcacagtctcaacaaccatctttatatacatcaccttctccaac

SEQ ID NO: 59841 - DNA, 75 bp, synthetic construct
  source 1..75: mol_type = other DNA
aaatgcccgtctggggctggcggcggcaacgctgcagtcggatatggaaaaagccggtgaactggcggcaaggga

SEQ ID NO: 59842 - DNA, 75 bp, synthetic construct
  source 1..75: mol_type = other DNA
gacggtaataaggcaatcactgaaacagagcatgatgcggtgaaggcgatgttcagggggattctgaaaaaatga

SEQ ID NO: 59843 - DNA, 75 bp, synthetic construct
  source 1..75: mol_type = other DNA
tatcaccttgcgggtatcaatcgacctaaaaatgtcgaagagtttgtcgaagggaattgcaattttactcagcag

SEQ ID NO: 59844 - DNA, 75 bp, synthetic construct
  source 1..75: mol_type = other DNA
ggaaaaagaagccatcgtggataacggggcgcactttgacggcgaccagagcggcaccctgaacagcgtcatccc

SEQ ID NO: 59845 - DNA, 75 bp, synthetic construct
  source 1..75: mol_type = other DNA
caacgtgaagcgccacgacgcgcaccgtttctatctgcgcgaaggctacgagcagagccacttccgcttcaccaa

SEQ ID NO: 59846 - DNA, 75 bp, synthetic construct
  source 1..75: mol_type = other DNA
aaggttttattgctcgtaatttaatctatcgcctgcaggaagcaggctttaaagatttaattacgatcgaccgtg

SEQ ID NO: 59847 - DNA, 75 bp, synthetic construct
  source 1..75: mol_type = other DNA
cggggcagcagtatgatgaggagtccggcctgtattacaaccgccaccgctattatgacccgctgcaggggcggt

SEQ ID NO: 59848 - DNA, 75 bp, synthetic construct
  source 1..75: mol_type = other DNA
accccttctcacagtttgtagtgaaggtaacgcagccaattatcgggccactgcgccgcgttattccggcaatgg

SEQ ID NO: 59849 - DNA, 75 bp, synthetic construct
  source 1..75: mol_type = other DNA
tggggcgatctgtttagtgttgttccgatgactgcaaccatcgacgcatcaagcaccacgccttctatggtgttc

SEQ ID NO: 59850 - DNA, 75 bp, synthetic construct
  source 1..75: mol_type = other DNA
atgcgcgggtgtgagatgcgcggcatggcggtcaattttggcggtttcctttccatcaataaactttcgcagtaa

SEQ ID NO: 59851 - DNA, 75 bp, synthetic construct
  source 1..75: mol_type = other DNA
cggtgttgaactgacgccggggtattttcagataacggcagtcccgaaactgaccatttatgacccgacggtgca

SEQ ID NO: 59852 - DNA, 75 bp, synthetic construct
  source 1..75: mol_type = other DNA
ggtggtggagcagatgtcagagctgacggccatgacagcctcgtttgtgctggcaacaccgacggagacggacgg

SEQ ID NO: 59853 - DNA, 75 bp, synthetic construct
  source 1..75: mol_type = other DNA
atgaaagcactggctcggtttggcaaagcctttggcggctacaagatgatcgatgtgccacaacccatttgtggc

SEQ ID NO: 59854 - DNA, 75 bp, synthetic construct
  source 1..75: mol_type = other DNA
tgaagtccggctggggcgagtgggcggaaagtgcgacggacagtttttcgcaggttaaaagtgctgccacgcaga

SEQ ID NO: 59855 - DNA, 75 bp, synthetic construct
  source 1..75: mol_type = other DNA
tgacggatggcacgggactccccatgtccggataccatattattctgaaagcccgacagaatacatccgcagtgg

SEQ ID NO: 59856 - DNA, 75 bp, synthetic construct
  source 1..75: mol_type = other DNA
ccctgccgtcactgcgtcgtcgcctgttccgctgtgtctccatccgggaaaacacggacggcacctttgccatca

SEQ ID NO: 59857 - DNA, 75 bp, synthetic construct
  source 1..75: mol_type = other DNA
cgcctggccgcggttctgaaaggggttgaagggttaaagcttggcgactttaacgaacatcagattgacctgttc

SEQ ID NO: 59858 - DNA, 75 bp, synthetic construct
  source 1..75: mol_type = other DNA
aattactgatgacattaaagacgatgccatcaaaaccaaaggctacttcatctacccaagtcagcttttctgcaa

SEQ ID NO: 59859 - DNA, 75 bp, synthetic construct
  source 1..75: mol_type = other DNA
ctggcttactcctctcaggaccataccttctggttttttaaagagaaaaatccgatagaggtctacaaagtaacc

SEQ ID NO: 59860 - DNA, 75 bp, synthetic construct
  source 1..75: mol_type = other DNA
gtgaaattatgtgggaaatggacgatggctcccgcatggtgctgaaggctgaaagtcaggaggcaaccagtgaac

SEQ ID NO: 59861 - DNA, 75 bp, synthetic construct
  source 1..75: mol_type = other DNA
tgggtttttctccgttttcaaaaactatcgtgctggcaaaaatgcgtaatcttgacgacggaaccagtcttcgtg

SEQ ID NO: 59862 - DNA, 75 bp, synthetic construct
  source 1..75: mol_type = other DNA
tttctgaccaaagtgaatatcgtgccggtcgacgagctgaaaggcgaaaaagtcggggtgggcgtcaacggtacg

SEQ ID NO: 59863 - DNA, 75 bp, synthetic construct
  source 1..75: mol_type = other DNA
gtcagcatggctggtaaatgactggtatcccacagcaagtatcagcgatttgctggttgtggtgatgaagaaagc

SEQ ID NO: 59864 - DNA, 75 bp, synthetic construct
  source 1..75: mol_type = other DNA
caacgtgggttaattatctttgcgctgatctggattgtcgccggatggtttgatttgtttgggatgtcgatggcg

SEQ ID NO: 59865 - DNA, 75 bp, synthetic construct
  source 1..75: mol_type = other DNA
cgcagatccagttgtgcatagtacacatggtacgcaacagcctgcggttcgtggcgtggaaagactataaagcgg

SEQ ID NO: 59866 - DNA, 75 bp, synthetic construct
  source 1..75: mol_type = other DNA
tcatgcgcaaatctgaagatctcactcagcgggaattcgctgatatgattggaatttcttattctgctctgacca

SEQ ID NO: 59867 - DNA, 75 bp, synthetic construct
  source 1..75: mol_type = other DNA
tatgtggtcgaggcttacgccgccggttgcctgattgaaaacatcaatctcggtgacttcaccgcacctgccgca

SEQ ID NO: 59868 - DNA, 75 bp, synthetic construct
  source 1..75: mol_type = other DNA
aaagcgtgcccgtgcgcgtcgtgatgcggacagggaacgtcaggatattgtcaccctggtgaaacggcagctgac

SEQ ID NO: 59869 - DNA, 75 bp, synthetic construct
  source 1..75: mol_type = other DNA
ggtgtatgaacagcagacctcctggccgctgattctggaaaacagccaggttgtggtgctgtggggaatgaaccc

SEQ ID NO: 59870 - DNA, 75 bp, synthetic construct
  source 1..75: mol_type = other DNA
caacccggcagcgttccatgccgaagatggcagcggttaccagttcctggtggaaatgcttaccgacctcaacag

SEQ ID NO: 59871 - DNA, 75 bp, synthetic construct
  source 1..75: mol_type = other DNA
gaagagagaaatgccgtaatgctggagtacatgaaagagaaggatgttgccagcatgtcaggtcgcctgctaaat

SEQ ID NO: 59872 - DNA, 75 bp, synthetic construct
  source 1..75: mol_type = other DNA
cctggtggcagagtctgccggcgcaggcgacagctatacgtcgaagaaaaagaaagagattaacgagacagtccg

SEQ ID NO: 59873 - DNA, 75 bp, synthetic construct
  source 1..75: mol_type = other DNA
aatagtgaaggggcattctccatccacaataacgtggcagacaatgtgttgctggaaaacggtggtcatttagac

SEQ ID NO: 59874 - DNA, 75 bp, synthetic construct
  source 1..75: mol_type = other DNA
gacgggatatcaccgctgttgcgtcatccgttaccgcaaccggcaatatcagcgtgaatgccggtcgtgatgttg

SEQ ID NO: 59875 - DNA, 75 bp, synthetic construct
  source 1..75: mol_type = other DNA
gcgccactaacagcacgtctgaagcactggccgcaacgccgaaagcggtcaagacagcctatgaccttgctaacg

SEQ ID NO: 59876 - DNA, 75 bp, synthetic construct
  source 1..75: mol_type = other DNA
tctggtgccaagccagtgtgttaccggcgtgattgcgcaaagctatcatcagtctgagaaatcggcctccgagtt

SEQ ID NO: 59877 - DNA, 75 bp, synthetic construct
  source 1..75: mol_type = other DNA
cgcgacaaataccataattaatggtggcacacagaatattaataattatggcatagccacaggcaccaatatcaa

SEQ ID NO: 59878 - DNA, 75 bp, synthetic construct
  source 1..75: mol_type = other DNA
cagagatttatggcgaagtattaatactgattatgacaatcacgaattatcatatgaaaaccgaattattttacg

SEQ ID NO: 59879 - DNA, 75 bp, synthetic construct
  source 1..75: mol_type = other DNA
atgcttgcattacaaccgcgctactccaactacacattatcatctggtatcctgcacaaaactaaggaggttggt

SEQ ID NO: 59880 - DNA, 75 bp, synthetic construct
  source 1..75: mol_type = other DNA
aaaaacttcgttccctgcttggacgcaggagtgagaggcaggaaaccatcgctgatggtaacgggctttcggtac

SEQ ID NO: 59881 - DNA, 75 bp, synthetic construct
  source 1..75: mol_type = other DNA
gctaacgggaaatatactgcgcaggatgccaccacagcgcggaaaggccttgtccagctcagtagcgccaccaac

SEQ ID NO: 59882 - DNA, 75 bp, synthetic construct
  source 1..75: mol_type = other DNA
ttttgctgaggtattgccgaaaaccattgccgcgctgtacccggaaaaagtcgcttatccgagtagttttctgct

SEQ ID NO: 59883 - DNA, 75 bp, synthetic construct
  source 1..75: mol_type = other DNA
taattgcagatataaaaaaaccaaccgtaagggttggttttttcttgggatttttggtcggcacgagaggatttg

SEQ ID NO: 59884 - DNA, 75 bp, synthetic construct
  source 1..75: mol_type = other DNA
caacctgtaagctgcaggtgctgaagaacggacaggaaatctttcagcaacccgcgacggatgtcagcagggtat

SEQ ID NO: 59885 - DNA, 75 bp, synthetic construct
  source 1..75: mol_type = other DNA
aaaaggcattgagccggtgattacgctttccagtggggaagcgaagcaaatcgaaattctctatattgaacccat

SEQ ID NO: 59886 - DNA, 75 bp, synthetic construct
  source 1..75: mol_type = other DNA
tgggaccaaaactaccagtaacgacgggagtcacacgcattcaataccaacatcagatggtgcaaaccagggggg

SEQ ID NO: 59887 - DNA, 75 bp, synthetic construct
  source 1..75: mol_type = other DNA
ttgggtatattgcaaatggtataggtgatgatatatcaagtattgccaggacaatgctcggtgaggttgtggaaa

SEQ ID NO: 59888 - DNA, 75 bp, synthetic construct
  source 1..75: mol_type = other DNA
ggaaaacggccggtctgacggggaccgccgggatgatgcttctcgtgaccctggttctgcccgttcaggccgctg

SEQ ID NO: 59889 - DNA, 75 bp, synthetic construct
  source 1..75: mol_type = other DNA
taatccgccgcgtcgccggaatcagccagcagcatgacgaacaggccacacagccggacagcgtgaccgctgaaa

SEQ ID NO: 59890 - DNA, 75 bp, synthetic construct
  source 1..75: mol_type = other DNA
taatcgcggaataaaacaatccacggttaatcgttattgcgcaatgatgagtggtttcttcacaaaactaattga

SEQ ID NO: 59891 - DNA, 75 bp, synthetic construct
  source 1..75: mol_type = other DNA
acaggcgctgaaaaatcaactaccacaacgtgaaatcagcgtgctgctgacgcaggttgaagtggatgccaacga

SEQ ID NO: 59892 - DNA, 75 bp, synthetic construct
  source 1..75: mol_type = other DNA
aatgagcaaaaaaataaactctacaaattgattgagcatgtgggtattgagtatatttttgttgccgaaaagata

SEQ ID NO: 59893 - DNA, 75 bp, synthetic construct
  source 1..75: mol_type = other DNA
atgcgtgattttgagaattcctttgatgctgcccttgccggggtggacagaacgattgttgaagtgatggggctc

SEQ ID NO: 59894 - DNA, 75 bp, synthetic construct
  source 1..75: mol_type = other DNA
aggcaatcagttcgtggaatactttggcgaaatgctcttccgctctgacttgtgtaatgctgacgtagcaatggg

SEQ ID NO: 59895 - DNA, 75 bp, synthetic construct
  source 1..75: mol_type = other DNA
cgaactaccacgccaccaaacctaaatttcttgcgcatgttgatctgatgacccggccacttattgatgttgcgg

SEQ ID NO: 59896 - DNA, 75 bp, synthetic construct
  source 1..75: mol_type = other DNA
tgttctgcgaggtcttaaaaacccattcctctggacaattttcattttttaccgcacttccaggagtaacgcgtg

SEQ ID NO: 59897 - DNA, 75 bp, synthetic construct
  source 1..75: mol_type = other DNA
atgccgggtctatggggccgaaagtcaccgcctgcgcaaagtttgttagtcagtgccggggcattgcagggatcg

SEQ ID NO: 59898 - DNA, 75 bp, synthetic construct
  source 1..75: mol_type = other DNA
gtgtcagcatggctggtaaataactggtatcccacagcaagtatcagcgatctgctggttgtggtgatgaaaaaa

SEQ ID NO: 59899 - DNA, 75 bp, synthetic construct
  source 1..75: mol_type = other DNA
atgagtattcaaagtttgcttgattatatttctgtgatccctgatggacgacaacaaggaaaagttagacataaa

SEQ ID NO: 59900 - DNA, 75 bp, synthetic construct
  source 1..75: mol_type = other DNA
tggcacggtgccggaacatacagaacatatgatggccggggaggcgccagtggtggtcagcaacgttttgaaccg

SEQ ID NO: 59901 - DNA, 75 bp, synthetic construct
  source 1..75: mol_type = other DNA
accattgcatgttctgcctgccacgacgaaatcgaccgccgcacgcattttgttgacgctggatatgcaaaagaa

SEQ ID NO: 59902 - DNA, 75 bp, synthetic construct
  source 1..75: mol_type = other DNA
cggaattgccgtgcaaaatccgaatactccttttgggatatttatcgttatcgctttgctatgcggttttgcagg

SEQ ID NO: 59903 - DNA, 75 bp, synthetic construct
  source 1..75: mol_type = other DNA
gtggccagtcaagaaaaaatacggctccagtatttcctggggagacctgatggtcctgactggtaatgttgccct

SEQ ID NO: 59904 - DNA, 75 bp, synthetic construct
  source 1..75: mol_type = other DNA
catcctctgttgatttaatattcagttcaaatcctgaattacgtgcggtggcagaagtatatgcctcggatgatg

SEQ ID NO: 59905 - DNA, 75 bp, synthetic construct
  source 1..75: mol_type = other DNA
aggcgtgaccaaagtctcagcattacctgactcgctcaccacgccgttagggagtttgtggaaactgtatgttta

SEQ ID NO: 59906 - DNA, 75 bp, synthetic construct
  source 1..75: mol_type = other DNA
catacgatcatgggtatcccacaggcacgggatatggaccgggtcacctgcggcagatatccgggaatgtttatt

SEQ ID NO: 59907 - DNA, 75 bp, synthetic construct
  source 1..75: mol_type = other DNA
ccctggtgttctggataacaagttttttgttaatctgctggatatgtcaacacgatggagtaaagcagataaaga

SEQ ID NO: 59908 - DNA, 75 bp, synthetic construct
  source 1..75: mol_type = other DNA
tggtggcgcgctgccagcaaatttgtggcaaagacaatctgggactggtgattgaatgctccggtgccaatatcg

SEQ ID NO: 59909 - DNA, 75 bp, synthetic construct
  source 1..75: mol_type = other DNA
acaggataccgccagccagattaacgcggcccgcgatatcgtgactgtcgccagtgacacgctgacaacacaggg

SEQ ID NO: 59910 - DNA, 75 bp, synthetic construct
  source 1..75: mol_type = other DNA
gcaagcagacaaattgacccaattacgtcgcttagcctgtagcgtgtcgcaacgggataataaaacagccacatt

SEQ ID NO: 59911 - DNA, 75 bp, synthetic construct
  source 1..75: mol_type = other DNA
cttccatgcacaacccgtgttctcgatagtggtgcacacaccagcgatgaactcgcagcgatggtgctcgacgga

SEQ ID NO: 59912 - DNA, 75 bp, synthetic construct
  source 1..75: mol_type = other DNA
acatgccgcaatcgtatagatatgtggctgagaatagctgagtttattctgtatccactgatgcgagatgcattt

SEQ ID NO: 59913 - DNA, 75 bp, synthetic construct
  source 1..75: mol_type = other DNA
ttgatatccgggtgccggaccatctgatagtcggtggcagccaggttttctcctttgcggaacacggtctgcttt

SEQ ID NO: 59914 - DNA, 75 bp, synthetic construct
  source 1..75: mol_type = other DNA
attcagtcggcagtgctacgcgccaggggagcagttcgccgacccggtttatcggccagtcggctatgacgtcaa

SEQ ID NO: 59915 - DNA, 75 bp, synthetic construct
  source 1..75: mol_type = other DNA
gcctcagtccttcccgtaatgacaacaacgtccacgataaaatgtttcttgacggctccttcctgaagattggct

SEQ ID NO: 59916 - DNA, 75 bp, synthetic construct
  source 1..75: mol_type = other DNA
tgctgatggtacaacgataaataagtctggctctcaggacgtagtacaaggaagtctggcaacgaacacaaccat

SEQ ID NO: 59917 - DNA, 75 bp, synthetic construct
  source 1..75: mol_type = other DNA
gcggttaacgtcggcggtgcgtttaacctgtttcagcaaaccatgaaccagtttcgccgtcagcggggcggggcg

SEQ ID NO: 59918 - DNA, 75 bp, synthetic construct
  source 1..75: mol_type = other DNA
ggctatgagcgcgggctgacgttgccactgcgccatccttcagggctacacgacggagccacggaagcggtatgg

SEQ ID NO: 59919 - DNA, 75 bp, synthetic construct
  source 1..75: mol_type = other DNA
atcaccagtacggaagatgagattaaaatcaccgcgaagaagaaaatcacccttaacggcggtggcagctacatc

SEQ ID NO: 59920 - DNA, 75 bp, synthetic construct
  source 1..75: mol_type = other DNA
gcgcttcacgaccacgctgacgagctttaccgcagctgcctcgcacgcttcggggatgacggtgaaaacctctga

SEQ ID NO: 59921 - DNA, 75 bp, synthetic construct
  source 1..75: mol_type = other DNA
atgctgccgcagcatagcgatattgaaatagcctggtatgcttcgatacagcaggagccgaatggctggaagacc

SEQ ID NO: 59922 - DNA, 75 bp, synthetic construct
  source 1..75: mol_type = other DNA
ttacctgacagatgcgtctgctgctgacgagttcgttgatgagggaacctgggaggcgacactgcatattgaggt

SEQ ID NO: 59923 - DNA, 75 bp, synthetic construct
  source 1..75: mol_type = other DNA
taccggacagcgcgctggcttgaaatgaaaacggagcgcagtcttccctggattgggcagcttcttcgtcgtgac

SEQ ID NO: 59924 - DNA, 75 bp, synthetic construct
  source 1..75: mol_type = other DNA
tgcttatggcgcgtcgaaagcggcgctgaaaagcctggcgttgagcgtcgggctggaactggcgggtagcggcgt

SEQ ID NO: 59925 - DNA, 75 bp, synthetic construct
  source 1..75: mol_type = other DNA
gcagccgctggatgctcagtcacaggtaaattctgttgatgcagacaaattactggctgcctatcgcggagaatt

SEQ ID NO: 59926 - DNA, 75 bp, synthetic construct
  source 1..75: mol_type = other DNA
gacactgacactgacattcaccgtatcttcatcaggagcgaataactggacaccaacaaccagtatcagcgatct

SEQ ID NO: 59927 - DNA, 75 bp, synthetic construct
  source 1..75: mol_type = other DNA
atactggaagcgtattggcgagtattacaacctcaacctgaccatcgttaacgatcaggtcgatcaaaccttccg

SEQ ID NO: 59928 - DNA, 75 bp, synthetic construct
  source 1..75: mol_type = other DNA
gcgatccgtatggactgctcctccgagtgtgcgatggcgggcctgctggcactgcgtgataagttcgatctggcg

SEQ ID NO: 59929 - DNA, 75 bp, synthetic construct
  source 1..75: mol_type = other DNA
tgagatatattccttataacggaggtgctgtaaaggaaacatggtgggacagggattctgatcggaaacgtttac

SEQ ID NO: 59930 - DNA, 75 bp, synthetic construct
  source 1..75: mol_type = other DNA
caggacaatgctcaggaaactgaaaaactgacgggaggccaggaagaaaacgcgcaggcagacgcccacggggat

SEQ ID NO: 59931 - DNA, 75 bp, synthetic construct
  source 1..75: mol_type = other DNA
aaaacactctggataaatggattaaagaatcaggagcacaaccaccaagacctgataaatattcttcgtttgaac

SEQ ID NO: 59932 - DNA, 75 bp, synthetic construct
  source 1..75: mol_type = other DNA
aaaggccgcctgaccggcgaacgccagacggtggagaacccggagacgggggaactgctgtggcagcatgagacg

SEQ ID NO: 59933 - DNA, 75 bp, synthetic construct
  source 1..75: mol_type = other DNA
acaccagtatccagacgttctcattttgttatatggagtattttattatttgtaattatatctcttctcttatct

SEQ ID NO: 59934 - DNA, 75 bp, synthetic construct
  source 1..75: mol_type = other DNA
agtccgcgattattcctttttatataaaaggaaataaacttgtaccatgtttatcaaaagaaaaactttcatctt

SEQ ID NO: 59935 - DNA, 75 bp, synthetic construct
  source 1..75: mol_type = other DNA
agggttaagtctgcataacctcaaagatgaaaatggtaatttaactaaccagtatgttgtacagaatggcggaaa

SEQ ID NO: 59936 - DNA, 75 bp, synthetic construct
  source 1..75: mol_type = other DNA
tgctccccgaatgcccggatattgccaatgctatggcgctacgttatgcagaccaaaacgttccggcgatgacct

SEQ ID NO: 59937 - DNA, 75 bp, synthetic construct
  source 1..75: mol_type = other DNA
gctgcttaatgtcctgagtcagcgttatgtgggacgagggatgagtaagagaaggatggccgagctactaaacga

SEQ ID NO: 59938 - DNA, 75 bp, synthetic construct
  source 1..75: mol_type = other DNA
cacgcaccggacggtgaacggcgacccggcggagcagtggcagtatgatgagcacggctggctgacagaaatcag

SEQ ID NO: 59939 - DNA, 75 bp, synthetic construct
  source 1..75: mol_type = other DNA
ctaacccgcaactcgcagcaattcttggggatgcctgtggggtggtcttccagcatccgtccgaaaaaacgctct

SEQ ID NO: 59940 - DNA, 75 bp, synthetic construct
  source 1..75: mol_type = other DNA
taatgaccagtgactacgcgtcacaccctcaacactttaatcatatggttgaagcctttcgtagggatctaaaac

SEQ ID NO: 59941 - DNA, 75 bp, synthetic construct
  source 1..75: mol_type = other DNA
catttattatgggttttagtgcgttacctgtatgggcgatgaactgctatgctgaacatgaaggggggaataccg

SEQ ID NO: 59942 - DNA, 75 bp, synthetic construct
  source 1..75: mol_type = other DNA
caacagcagtgcatacgcgtgatattgtgctccaggtatatcgatgggcaatagaaagagggcagaaagtcgaga

SEQ ID NO: 59943 - DNA, 75 bp, synthetic construct
  source 1..75: mol_type = other DNA
ttcgatgaagagaatcaggttgaagctaaggaaaatgatccggaggaaatggaaggcgctgaacatccgcacaat

SEQ ID NO: 59944 - DNA, 75 bp, synthetic construct
  source 1..75: mol_type = other DNA
attgaagccggtgatgacagcatctgttatgcgaaactggatgacagcgtaattactgatgacattaaagacgat

SEQ ID NO: 59945 - DNA, 75 bp, synthetic construct
  source 1..75: mol_type = other DNA
ctaactatgcggcaaatgccggtaagtctggaggggagttcttcacacctcagcacgtctctaagctgattgctc

SEQ ID NO: 59946 - DNA, 75 bp, synthetic construct
  source 1..75: mol_type = other DNA
ggctataacagccagcggcaggtgacgtcggtgacgtacccggacgggcttcgcagcagccgggagtatgatgag

SEQ ID NO: 59947 - DNA, 75 bp, synthetic construct
  source 1..75: mol_type = other DNA
tcgataccaccagtaaccgcctgggtaacaccgttaaggataaaaatgcccgcctggccgcggttctgaaagggg

SEQ ID NO: 59948 - DNA, 75 bp, synthetic construct
  source 1..75: mol_type = other DNA
agcagtttgcccgaaaaagggctgaacactgccaccggcgcagccggggaagggtgtaacgaaaaaagcagcctt

SEQ ID NO: 59949 - DNA, 75 bp, synthetic construct
  source 1..75: mol_type = other DNA
aactggctatgcacgggcagacccacgttaacaaaatctacgacccggcagcaggttccggttctctgttattgc

SEQ ID NO: 59950 - DNA, 75 bp, synthetic construct
  source 1..75: mol_type = other DNA
cagcacgtctctaagctgattgcacaactggctatgcacgggcagacccacgttaacaaaatctacgacccggca

SEQ ID NO: 59951 - DNA, 75 bp, synthetic construct
  source 1..75: mol_type = other DNA
aggtagcggacttatccaccattattcaggaacaaccctctttcgtagcagaaacccgtgcggctgacaaaaata

SEQ ID NO: 59952 - DNA, 75 bp, synthetic construct
  source 1..75: mol_type = other DNA
atgatcaacaaccaactattagaaacaacattctttaaagaagcaaaacaacttgcagaagtatttatctccctt

SEQ ID NO: 59953 - DNA, 75 bp, synthetic construct
  source 1..75: mol_type = other DNA
cctgacagctacgtgacgatggggccgaaaagcatcatggcggcgaaaaacttgctgataattgtcagtggcgca

SEQ ID NO: 59954 - DNA, 75 bp, synthetic construct
  source 1..75: mol_type = other DNA
cgttgaagcaccggcgccgtcccgcccgatagagcgtggtatcgcgggccccggattacttgcccgcgtgttaac

SEQ ID NO: 59955 - DNA, 75 bp, synthetic construct
  source 1..75: mol_type = other DNA
gcagcaatattccagctttgaattacgcctacgtaaacatttatcactggcggaagagtctctctggcaaaaatg

SEQ ID NO: 59956 - DNA, 75 bp, synthetic construct
  source 1..75: mol_type = other DNA
atgcttattactggagtgtttttaaaatcgccgaggcctttgggcttcaccgggacacagtaaaaaaacggctcc

SEQ ID NO: 59957 - DNA, 75 bp, synthetic construct
  source 1..75: mol_type = other DNA
cgcggtatgagtacgaccggtacggtcaacaaatcgccgttcaccgggaagaaggcatcagcacttacagcagtt

SEQ ID NO: 59958 - DNA, 75 bp, synthetic construct
  source 1..75: mol_type = other DNA
acccgtggtgcgtaaagccagctggcactgcagacaatgtcaccacgattattatggggagcggtactgcacaca

SEQ ID NO: 59959 - DNA, 75 bp, synthetic construct
  source 1..75: mol_type = other DNA
tatgaccgtagtggcaaacaggtgcgcagctttacttacgatgataaataccggggccggatggtggcgcaccgt

SEQ ID NO: 59960 - DNA, 75 bp, synthetic construct
  source 1..75: mol_type = other DNA
catggcgaataccacacacatattctggtgtggagcgatcgtaatggcgaggacagagaaaaaatttcatgctgc

SEQ ID NO: 59961 - DNA, 75 bp, synthetic construct
  source 1..75: mol_type = other DNA
acagtcacagatgaagtcgctgtccactgatgcgcagacggcgaatgccgatccggcagatctgtcatcacagat

SEQ ID NO: 59962 - DNA, 75 bp, synthetic construct
  source 1..75: mol_type = other DNA
tccacaaacagattatcaatattggtgagttaaaaacgtacctggccgaccagggcgtggagatcagggtatgtt

SEQ ID NO: 59963 - DNA, 75 bp, synthetic construct
  source 1..75: mol_type = other DNA
gcctgacgccgataagttgcttgcggcctctcgcggagaatttgttgcagggattagcgacccgaatgatccgaa

SEQ ID NO: 59964 - DNA, 75 bp, synthetic construct
  source 1..75: mol_type = other DNA
gattctggataatctgcctccccgtccttttaacatccggatggtccgggagacggcggacagcaccacggacca

SEQ ID NO: 59965 - DNA, 75 bp, synthetic construct
  source 1..75: mol_type = other DNA
tcgtgtttctcgcatcacccgcacggcttccggtgcaaatgccggtggcggaaataaaaccgatcgtaatcctga

SEQ ID NO: 59966 - DNA, 75 bp, synthetic construct
  source 1..75: mol_type = other DNA
agattctctagcgagtaaagcccatagaatcatctacactggacccattgatcagtacttcgactataggtttgg

SEQ ID NO: 59967 - DNA, 75 bp, synthetic construct
  source 1..75: mol_type = other DNA
tgatcgaccttgaaaccatgggaaaaaatcccgatgccccgattatctcaataggcgcaatatttttcgatccac

SEQ ID NO: 59968 - DNA, 75 bp, synthetic construct
  source 1..75: mol_type = other DNA
gggtcaccagcacggtgaaaaacgatatctatgcccatatcgacaaggacgggcgctaccgggtcaacctcgact

SEQ ID NO: 59969 - DNA, 75 bp, synthetic construct
  source 1..75: mol_type = other DNA
attgatgaattaggtgaaaaaacgttggtttactcgcctggtagtgatcatgagtgggataaagaaaaagccctg

SEQ ID NO: 59970 - DNA, 75 bp, synthetic construct
  source 1..75: mol_type = other DNA
ccggcaggctgaccggcgttcacaccaccgcagcgaatctggatatccgcatcccgtatgccacagacccggcag

SEQ ID NO: 59971 - DNA, 75 bp, synthetic construct
  source 1..75: mol_type = other DNA
aacaaacaagactacaggcgcgaatggatgagttacgggcagaaatggatgagttacgggcagagattgcatttg

SEQ ID NO: 59972 - DNA, 75 bp, synthetic construct
  source 1..75: mol_type = other DNA
gcacaacatcaactacgacaaatttgatatcagactgggaaatactctgactgagcctcactttggcgatgaaaa

SEQ ID NO: 59973 - DNA, 75 bp, synthetic construct
  source 1..75: mol_type = other DNA
ttgaaaccgagctccggacgctggaaaaacacagcggtgcgaatgagaaaatcagccagcagcgtcgcgatttat

SEQ ID NO: 59974 - DNA, 75 bp, synthetic construct
  source 1..75: mol_type = other DNA
gacggcgcgctggcagcttccgtattccacaaacaaataatcaatattggtgaattaaaagcgtacctggcaaca

SEQ ID NO: 59975 - DNA, 75 bp, synthetic construct
  source 1..75: mol_type = other DNA
ggatcgctttggcgtgcagtgtattgtggtcggtattgatacctggtacgacgccgaaaccggtaaatatcatgt

SEQ ID NO: 59976 - DNA, 75 bp, synthetic construct
  source 1..75: mol_type = other DNA
agacggtgtacggcagctacaaaaacaaaacggaaaagaatatccatttcgtaccgttcatgacggatgagaacg

SEQ ID NO: 59977 - DNA, 75 bp, synthetic construct
  source 1..75: mol_type = other DNA
tgtcacggaaaccgcaagtgacctggtacggctgggacggcgaccggctgaccacaatacagaacgacagaaccc

SEQ ID NO: 59978 - DNA, 75 bp, synthetic construct
  source 1..75: mol_type = other DNA
gccatttgcccatttccggctccataaaagcacgcggcgggatttatgaagtcctggcacatgcagaaaaactgg

SEQ ID NO: 59979 - DNA, 75 bp, synthetic construct
  source 1..75: mol_type = other DNA
atgcgcaccgtgcatccggataaaatctaccgtgaaattatatggttctgctccggttacctgcggaaatccgga

SEQ ID NO: 59980 - DNA, 75 bp, synthetic construct
  source 1..75: mol_type = other DNA
gccttttatggctggagaccgccatggtgtaaataacctccatgttgcatgggttcgctcaggagatgacgggaa

SEQ ID NO: 59981 - DNA, 75 bp, synthetic construct
  source 1..75: mol_type = other DNA
tatttattttttcatggcctgtattatctgcagatatccatgggcgtgttattcgtgtactggacggtgatacca

SEQ ID NO: 59982 - DNA, 75 bp, synthetic construct
  source 1..75: mol_type = other DNA
tcgaggtcatggactcacggaaggcggtgcggatcaggctggtaaatattgatgcgccggaaaagaaacaggatt

SEQ ID NO: 59983 - DNA, 75 bp, synthetic construct
  source 1..75: mol_type = other DNA
tccgaccatcaaatgtttatggactcgcactaaatagcccgttattccttccgcaaataataaaaaatgcaatca

SEQ ID NO: 59984 - DNA, 75 bp, synthetic construct
  source 1..75: mol_type = other DNA
gtcggctttggggcaatctcttgcggctttatttaatcgcggagcaacttctttccagaagtcattagctcgaaa

SEQ ID NO: 59985 - DNA, 75 bp, synthetic construct
  source 1..75: mol_type = other DNA
aaacaatggtcgacagggtctacaactcgctaaccaatagccttagtaaatctatagcgaaaggacttagcccaa

SEQ ID NO: 59986 - DNA, 75 bp, synthetic construct
  source 1..75: mol_type = other DNA
gccatatcctcaacgtcctgccggaatggccttctaaccgtgttgatgaactcctgccatggaacgtcgtactca

SEQ ID NO: 59987 - DNA, 75 bp, synthetic construct
  source 1..75: mol_type = other DNA
cagatgaacttttggcctatatagacctggtttcaggaggtaatcggtcagattatctgcggcgctgcattgaag

SEQ ID NO: 59988 - DNA, 75 bp, synthetic construct
  source 1..75: mol_type = other DNA
tgcgcacactgtcgaaagcttttgctctggcggggcttcgttgcggatttacgctggcaaacgaagaagtcatca

SEQ ID NO: 59989 - DNA, 75 bp, synthetic construct
  source 1..75: mol_type = other DNA
acgctggcaaacgaagaagtcatcaacctgctgatgaaagtgatcgccccctacccgctctcgacgccggttgcc

SEQ ID NO: 59990 - DNA, 75 bp, synthetic construct
  source 1..75: mol_type = other DNA
attgatgatgaagattaccgccggcgcattctgacccagcttaatcggggagaaagtcgccatgccgttgccaga

SEQ ID NO: 59991 - DNA, 75 bp, synthetic construct
  source 1..75: mol_type = other DNA
tcaggaagatcaactgggcgcactggggctggtcactaacgccgtcgtgttatggaacactatttatatgcaggc

SEQ ID NO: 59992 - DNA, 75 bp, synthetic construct
  source 1..75: mol_type = other DNA
agcgtcagggctcatcggtcacatcactgagcgatacagcagccacgcgtattccttatcccacggagtcacaga

SEQ ID NO: 59993 - DNA, 75 bp, synthetic construct
  source 1..75: mol_type = other DNA
tgcaggaaaaacggttaccgtcacatattttcagcgagatcgttatggtcgtattctcgggcaggtttatgcacc

SEQ ID NO: 59994 - DNA, 75 bp, synthetic construct
  source 1..75: mol_type = other DNA
ctgaaacagaaactccgccataagctggaagcacgtcttgatgcagaagtggatgccattctggatgagctgctt

SEQ ID NO: 59995 - DNA, 75 bp, synthetic construct
  source 1..75: mol_type = other DNA
accgaccactggatgctgtttaccccattgtttatcttgactgtatcgtcctgaaagttcggcaggacagtcgcc

SEQ ID NO: 59996 - DNA, 75 bp, synthetic construct
  source 1..75: mol_type = other DNA
tatgaaacaggtgaaaaaatagcatgcgcaagagctgaagaatgccgtaaaaagattaaggaaggtgcgaacaag

SEQ ID NO: 59997 - DNA, 75 bp, synthetic construct
  source 1..75: mol_type = other DNA
agtgcagaatattcccggtgtgctggctgtatttgcagaacgccgtaaagacagttttggcccgtatgtccggct

SEQ ID NO: 59998 - DNA, 75 bp, synthetic construct
  source 1..75: mol_type = other DNA
gcgcaggtgaaaaaatccggcgatgttatgtcaggtgacttgacgatcaaaaaagacacgccgtcactcttcctt

SEQ ID NO: 59999 - DNA, 75 bp, synthetic construct
  source 1..75: mol_type = other DNA
cctaagacatcaatcatctgctctccaatgactagtctaaaaactagtattaagactatcacttatttaagtgat

SEQ ID NO: 60000 - DNA, 75 bp, synthetic construct
  source 1..75: mol_type = other DNA
acagctatgcagtgcttgggctgggcgatgtggcgatggcgcgcaaagattatcccgccgccgaacgctattacc

SEQ ID NO: 60001 - DNA, 75 bp, synthetic construct
  source 1..75: mol_type = other DNA
actgttcaggcaaccattaataacggcttcggaacggcggctagtgcaacgaattacaagtatgacagtgcaagt

SEQ ID NO: 60002 - DNA, 75 bp, synthetic construct
  source 1..75: mol_type = other DNA
gaactgagcagctacctgatcgacatcactaaagacatcttcaccaaaaaagatgaagacggtaactacctggtt

SEQ ID NO: 60003 - DNA, 75 bp, synthetic construct
  source 1..75: mol_type = other DNA
acaaaggtaccggtaagtggaccagccagagctctttggatctcggtgaaccgctgtcgctgattactgaatcgg

SEQ ID NO: 60004 - DNA, 75 bp, synthetic construct
  source 1..75: mol_type = other DNA
cagcaggcgctgcgcgatgtcgtcgcttatgcagtacagaacggtatcccggttccgaccttcgccgctgcggtt

SEQ ID NO: 60005 - DNA, 75 bp, synthetic construct
  source 1..75: mol_type = other DNA
ttatatcgaggcgctctacagcaactggtatctggcagaattaagccgtaactggaacgaagtgctggaagcgga

SEQ ID NO: 60006 - DNA, 75 bp, synthetic construct
  source 1..75: mol_type = other DNA
atgaagaaatatataccagtggtattgtttgttttttcatataaggttttttctgctgatattcatggacgggtc

SEQ ID NO: 60007 - DNA, 75 bp, synthetic construct
  source 1..75: mol_type = other DNA
ggatcacgccgggtgagcacattatcagtgccgattctgcgctcagcagaaatatccggcattgtttctgccttt

SEQ ID NO: 60008 - DNA, 75 bp, synthetic construct
  source 1..75: mol_type = other DNA
aatgcagtcgttgtatgagtggctccaggggcagatgagcacgctgtcgcgtcactctgatacggcgaaagcgtt

SEQ ID NO: 60009 - DNA, 75 bp, synthetic construct
  source 1..75: mol_type = other DNA
ctgaagcgcagtcccgtattcaggacgccgactatgcgaccgaagtgtccaacatgtcgaaagcgcagatcattc

SEQ ID NO: 60010 - DNA, 75 bp, synthetic construct
  source 1..75: mol_type = other DNA
tgaacgtgaagcgcagcagaggatcgaccaggcgcgcaatgatgctcttgatgctgccgctcgcgctggccggtt

SEQ ID NO: 60011 - DNA, 75 bp, synthetic construct
  source 1..75: mol_type = other DNA
aaagctgtatcaacctctggaaacgatgttgatttcactaccgcaggttatagcgtcgacggcgcaactggcgct

SEQ ID NO: 60012 - DNA, 75 bp, synthetic construct
  source 1..75: mol_type = other DNA
tacagcgccgtttagctagtggggaacgttacgttacaaccgagagttgtgacaattttagcgaagttgatggct

SEQ ID NO: 60013 - DNA, 75 bp, synthetic construct
  source 1..75: mol_type = other DNA
gattttgcgtttactgcttttgtcgccatgttgagcacccctcataaaaaacaaatgcagtatgcaggaaaaaaa

SEQ ID NO: 60014 - DNA, 75 bp, synthetic construct
  source 1..75: mol_type = other DNA
ccagcctgtgttagaaaatctgctggagcaggatttttacgccagtggcccgaacgaagtgggcgggagacatca

SEQ ID NO: 60015 - DNA, 75 bp, synthetic construct
  source 1..75: mol_type = other DNA
acactggggcgctggacaggtgccgttgctgaactactggagccgctgtatgacgtcctgcgccagtatgtgctg

SEQ ID NO: 60016 - DNA, 75 bp, synthetic construct
  source 1..75: mol_type = other DNA
gataatctacgtcaggctcccttattccgaacgcccaccgcgtccgtcccgcacattccagcaacgcatctggag

SEQ ID NO: 60017 - DNA, 75 bp, synthetic construct
  source 1..75: mol_type = other DNA
ctacaaccgccttacccgcacaggcatgctgtccgcgaatgagcagaatcgggctttcagggccatgactgacag

SEQ ID NO: 60018 - DNA, 75 bp, synthetic construct
  source 1..75: mol_type = other DNA
cattatggtgtggatgattttccggtcattattcaggataaacggctggataactttggtacgccagaatacaac

SEQ ID NO: 60019 - DNA, 75 bp, synthetic construct
  source 1..75: mol_type = other DNA
agacgtggatacgagattaagaaatccctcagcctcgattatcgtctctggataatctacgtcaggctgccgtac

SEQ ID NO: 60020 - DNA, 75 bp, synthetic construct
  source 1..75: mol_type = other DNA
atgaatacccaatatttacagtatgttcgtgagcaacttatggcagctactgctgacttgaacggagcaacgaaa

SEQ ID NO: 60021 - DNA, 75 bp, synthetic construct
  source 1..75: mol_type = other DNA
cgtttttttgagtttttagggatatttccgttggcgctgactgaagcacgtctggctgtcttacggagtgggtat

SEQ ID NO: 60022 - DNA, 75 bp, synthetic construct
  source 1..75: mol_type = other DNA
gcggatgcggcgtctatgacggttctgaaattcatgaagcggtgttgacgttgttagctatttcacgcagcggtg

SEQ ID NO: 60023 - DNA, 75 bp, synthetic construct
  source 1..75: mol_type = other DNA
agagacaataacactgaagccagcgtccacggattatgtctataaaactgagtctgcaagcaaagataatggcta

SEQ ID NO: 60024 - DNA, 75 bp, synthetic construct
  source 1..75: mol_type = other DNA
agtctgcaagcaaagataatggctacgttttgtcaacatatatgaaaccgggatactggtcgagaacctcttcag

SEQ ID NO: 60025 - DNA, 75 bp, synthetic construct
  source 1..75: mol_type = other DNA
taggccagcgtgtgcgggaaggttacacgccgcgtgaggatggcgcgggcgcatcgtctcagtactcccgtagtg

SEQ ID NO: 60026 - DNA, 75 bp, synthetic construct
  source 1..75: mol_type = other DNA
caacaaccggtattcgtgatgaaggggtgtataacagccagacgggaaaatacgataaacatcgcgcacgttctt

SEQ ID NO: 60027 - DNA, 75 bp, synthetic construct
  source 1..75: mol_type = other DNA
tcccaccagaacaagccgtaacatgcagaaatggatcagcattgttaaaagcggtcgcgaagctactgccggtat

SEQ ID NO: 60028 - DNA, 75 bp, synthetic construct
  source 1..75: mol_type = other DNA
aaaacggcgcaggttcagggaaacttcaacaacatgatcatgctgcgtgtcagggagaacaggacggcagagctg

SEQ ID NO: 60029 - DNA, 75 bp, synthetic construct
  source 1..75: mol_type = other DNA
atgagtcaaaacgatatcattatcagaactcattataagtctcctcatagattgcacatcgatagcgacatacca

SEQ ID NO: 60030 - DNA, 75 bp, synthetic construct
  source 1..75: mol_type = other DNA
acgccccatgcactgaagaacaggccgaatggctgattcagaactaccgcagacgtgggtatgagtttaggaaag

SEQ ID NO: 60031 - DNA, 75 bp, synthetic construct
  source 1..75: mol_type = other DNA
aactttattcactgcgcaataaggacaataaggggagtaacctctttttctcggaaagcagggatgaattactga

SEQ ID NO: 60032 - DNA, 75 bp, synthetic construct
  source 1..75: mol_type = other DNA
agcctggaactccggcatatgagcgagcgttaaatcaggctgctaacgccgttcgccctctcctaactaacgaag

SEQ ID NO: 60033 - DNA, 75 bp, synthetic construct
  source 1..75: mol_type = other DNA
tgcgtccggacaaccgttatttcacggatgaaaaaagtgctctggggagcgacgttttccgcaatgccagcgcca

SEQ ID NO: 60034 - DNA, 75 bp, synthetic construct
  source 1..75: mol_type = other DNA
tatcacgggctttatgacagagttctccaacaagatcgtatcttattctattgatgataatacccgcagctatac

SEQ ID NO: 60035 - DNA, 75 bp, synthetic construct
  source 1..75: mol_type = other DNA
atatagagagtgatgaaataggtaatactacaaatccttatggaacttctaagtattttattgaaagaatccttg

SEQ ID NO: 60036 - DNA, 75 bp, synthetic construct
  source 1..75: mol_type = other DNA
ataacacagcggaaagagcgcttcgtgcagtctgtctcggaaagaaaaattacgtgttcttcggtagcgatcacg

SEQ ID NO: 60037 - DNA, 75 bp, synthetic construct
  source 1..75: mol_type = other DNA
ggatcacgccgggtgaacacattatcagtgctgattctgcgctcagcagaaatatccggcagtgtttctgccttt

SEQ ID NO: 60038 - DNA, 75 bp, synthetic construct
  source 1..75: mol_type = other DNA
cctctgtgtaatcgtcggcatttcatttttagtcatgctggttgccattttcttttccaccgcctggcgagtcct

SEQ ID NO: 60039 - DNA, 75 bp, synthetic construct
  source 1..75: mol_type = other DNA
ataactggcagcgactggcacaggtaaaggatctgacgccgggcgagatgacggcagaaccctacgatgataact

SEQ ID NO: 60040 - DNA, 75 bp, synthetic construct
  source 1..75: mol_type = other DNA
agtacaggatattcccggcgttcttgccgtgtttgcagaacgccgtaaggacagttttggcccgtatgtccggct

SEQ ID NO: 60041 - DNA, 75 bp, synthetic construct
  source 1..75: mol_type = other DNA
ttaactggaaaagactgtatgaagagggcttactgaatgatgaggatctccaggaatgccaggccgttccggtgg

SEQ ID NO: 60042 - DNA, 75 bp, synthetic construct
  source 1..75: mol_type = other DNA
gaaccatcattgatgcaacaagctggcgattggctcactggtggtcaaagtgcagggcaaattgcagaacaggct

SEQ ID NO: 60043 - DNA, 75 bp, synthetic construct
  source 1..75: mol_type = other DNA
ccgcgtgaaagtgcgcgaaccccgctttgatgtgcgtatcggtagcgatggcgctcactgtacggtaatccggta

SEQ ID NO: 60044 - DNA, 75 bp, synthetic construct
  source 1..75: mol_type = other DNA
ggtgatgtattgccaacaatgggtaaaggtttcgcccagtccgtccggggaacaggggagatggtccgtggactc

SEQ ID NO: 60045 - DNA, 75 bp, synthetic construct
  source 1..75: mol_type = other DNA
tttgttgatgaagaaaccggagcctgccttgaagatgaggacggacaggtgacgcactggtgccatatttcagct

SEQ ID NO: 60046 - DNA, 75 bp, synthetic construct
  source 1..75: mol_type = other DNA
ttgttcccgccggcttcacgctcatgtggatgacggtgtttggtaacagcgcaatctatctcattatgcaccagg

SEQ ID NO: 60047 - DNA, 75 bp, synthetic construct
  source 1..75: mol_type = other DNA
gattggcatgctgaaaaatcagctcagtgttgccggtcagcttgccagacgtaatgaatctgcgcaggtggcact

SEQ ID NO: 60048 - DNA, 75 bp, synthetic construct
  source 1..75: mol_type = other DNA
tctcctgagctggcaaagagagaattaggttggcaagctaagttcgaactaaaagatatgttacgcgactcttgg

SEQ ID NO: 60049 - DNA, 75 bp, synthetic construct
  source 1..75: mol_type = other DNA
gccttgaagatgaggacggacaggtgacgcactggtgccatctttcggccttgccggaattacaggggatacata

SEQ ID NO: 60050 - DNA, 75 bp, synthetic construct
  source 1..75: mol_type = other DNA
cttttatcttctgtcttcagaggtatcccactatgaaaatcatcacccgtggcgaagccatgcgtattcaccgtc

SEQ ID NO: 60051 - DNA, 75 bp, synthetic construct
  source 1..75: mol_type = other DNA
cgctgaaaggtccttctattatgcctggcgggcagaaagaggcttatgagctggttgcgcctatcctgactaaaa

SEQ ID NO: 60052 - DNA, 75 bp, synthetic construct
  source 1..75: mol_type = other DNA
aaaggcacgaagaattttcaccgccaggctccggtcctaaaagaaagcctggtattcgcatcgccgcgtgatact

SEQ ID NO: 60053 - DNA, 75 bp, synthetic construct
  source 1..75: mol_type = other DNA
caggcccctctgctgcatatgaatattttgcccgcagtgccagcggtcttgttgccgatgcacgggcaaccagtc

SEQ ID NO: 60054 - DNA, 75 bp, synthetic construct
  source 1..75: mol_type = other DNA
atgccattaacctcagatattagatcacattcatttaatcttggggtggaggttgttcgtgcccgaattgtagcc

SEQ ID NO: 60055 - DNA, 75 bp, synthetic construct
  source 1..75: mol_type = other DNA
ctggcccgtcaggtgcatacgagtattttgcccgcagcgccagcggtctggtgcgtgatgcgcgggctatcagcc

SEQ ID NO: 60056 - DNA, 75 bp, synthetic construct
  source 1..75: mol_type = other DNA
atttcccgtctggaagaaagtaaaaaaataacgctagataccctggaaaaacaacgtctgcaatacacagatgcg

SEQ ID NO: 60057 - DNA, 75 bp, synthetic construct
  source 1..75: mol_type = other DNA
actactggctgatcgcctttgttacgccgtccggcgatatcaggcatgtcatcacccggtatcgcaacaagagac

SEQ ID NO: 60058 - DNA, 75 bp, synthetic construct
  source 1..75: mol_type = other DNA
ccgcagaccgacatagtgctgagtaagtcgcaggcgtcgaactgcacagagtaccagataactatcgggggctcg

SEQ ID NO: 60059 - DNA, 75 bp, synthetic construct
  source 1..75: mol_type = other DNA
ggtggcaaaaattgaggatccttatgatttgaaaccccacccgtttttacctggactgatgcttcccacaataaa

SEQ ID NO: 60060 - DNA, 75 bp, synthetic construct
  source 1..75: mol_type = other DNA
actaaccagccaattgattttcgccaggtcggttttcatcgttccgctggatacattctgggagtggatccccga

SEQ ID NO: 60061 - DNA, 75 bp, synthetic construct
  source 1..75: mol_type = other DNA
gcctacatctactcttctgctcacttcgcgaacaacgtctttgttgatggtagcttgagctactctcacttcaac

SEQ ID NO: 60062 - DNA, 75 bp, synthetic construct
  source 1..75: mol_type = other DNA
gtaagagcagagctgctgtgcggccattattttttgcttcgtaaggaaaacgcttcgaactctgcgcctgacgat

SEQ ID NO: 60063 - DNA, 75 bp, synthetic construct
  source 1..75: mol_type = other DNA
aagataaaggggtggctgctgttgttaaactgtcacgttacctcggtctgagaaatgaagaagctatccagtcgg

SEQ ID NO: 60064 - DNA, 75 bp, synthetic construct
  source 1..75: mol_type = other DNA
agtattgttgggttacgtcgtccgactgacgggaaaattcatgtttttggcaaggatttaatggcactgtcaggt

SEQ ID NO: 60065 - DNA, 75 bp, synthetic construct
  source 1..75: mol_type = other DNA
cacacagattggcgatgttcgcgatcaacaggcactcgaccaggcattagctggttttgacactgttgtactgct

SEQ ID NO: 60066 - DNA, 75 bp, synthetic construct
  source 1..75: mol_type = other DNA
ctgccgccgtgaaaaaactggaagcgtatatcacggcacagcaccggctggggcgcgacatccgtctgtctgcca

SEQ ID NO: 60067 - DNA, 75 bp, synthetic construct
  source 1..75: mol_type = other DNA
aagagacggaggccttcctgcgttctgcgctggcacgtgccgaagaaaagatcgaagaagatgagcgggaaatag

SEQ ID NO: 60068 - DNA, 75 bp, synthetic construct
  source 1..75: mol_type = other DNA
aggaaaacgcctaccgtgaagttatctggcgtcagcgggtgaacgaagccgcgcaggcggtgacgctggcctact

SEQ ID NO: 60069 - DNA, 75 bp, synthetic construct
  source 1..75: mol_type = other DNA
aatcacgcctgaagggaaagctgcacgttatcagcaagcgttacactcagcgcattgagcggcataacctgaatc

SEQ ID NO: 60070 - DNA, 75 bp, synthetic construct
  source 1..75: mol_type = other DNA
ggtaatgaaagatgactctctcgccagcaacacttcagcatcaggctccggaacttcaaatgcgtccgtttatta

SEQ ID NO: 60071 - DNA, 75 bp, synthetic construct
  source 1..75: mol_type = other DNA
cgttatgcatcatctgaattcgggaggatttgttcatcccggattttccgagcagatgtttttttcctgcattgc

SEQ ID NO: 60072 - DNA, 75 bp, synthetic construct
  source 1..75: mol_type = other DNA
gcaaaacaggtcagggatgaagtcagaaatgaggtgcagaagctggacgtggcagggctgataggtgagcgcatc

SEQ ID NO: 60073 - DNA, 75 bp, synthetic construct
  source 1..75: mol_type = other DNA
agaaaaagatgatgttgaatcacgtattgaaaaactggagtgctatatcgctgaattgaaaaaagcatctcaaca

SEQ ID NO: 60074 - DNA, 75 bp, synthetic construct
  source 1..75: mol_type = other DNA
ctacaatcgccgcgttgaactgtatcgggagaaagaaaaaattacgtaccactggaagaagccggagcggttacg

SEQ ID NO: 60075 - DNA, 75 bp, synthetic construct
  source 1..75: mol_type = other DNA
acattgctgcaaccaaaccactgataattacctttccggcgctggtcaccacccttcacgattcaatgcgaccgc

SEQ ID NO: 60076 - DNA, 75 bp, synthetic construct
  source 1..75: mol_type = other DNA
gcaatgccacagttctggaagttactaagggcagaagtgcaagcgatatgatgacgggtatgcccaaatcagccc

SEQ ID NO: 60077 - DNA, 75 bp, synthetic construct
  source 1..75: mol_type = other DNA
cgctgtatgaaccccgcctgaagggaaagctgcacgttatcagcaagcgttacactcagcgcattgagcgacata

SEQ ID NO: 60078 - DNA, 75 bp, synthetic construct
  source 1..75: mol_type = other DNA
gtggcccacgtttttggtgaacgcacaatgttcacgctggagcgtcttctgagcctgctgtcggcctttgaggtc

SEQ ID NO: 60079 - DNA, 75 bp, synthetic construct
  source 1..75: mol_type = other DNA
atgaaaacgttattaccaaacgttaatacgtctgaaggttgttttgaaattggtgtcactatcagtaaccctgta

SEQ ID NO: 60080 - DNA, 75 bp, synthetic construct
  source 1..75: mol_type = other DNA
agactggcagatgatgtaaagctattgcgccaggaggaacaggaaaggcgaaaaaatatagaaaagttaattcag

SEQ ID NO: 60081 - DNA, 75 bp, synthetic construct
  source 1..75: mol_type = other DNA
ctggacgtcgatccgcgtcgcctgctcgaccaggcgtacgcttatgggggtgatgctgccaacttactgatttag

SEQ ID NO: 60082 - DNA, 75 bp, synthetic construct
  source 1..75: mol_type = other DNA
taagcaatatcgttttatttccggtaaaagaggatgacccacgtaatcaggttaattttctttatgaaccatcgg

SEQ ID NO: 60083 - DNA, 75 bp, synthetic construct
  source 1..75: mol_type = other DNA
caggcatggatcgatgatgggaacaccactatcgcgccagaaaaaattcaggtcccatttattctcacaccgcca

SEQ ID NO: 60084 - DNA, 75 bp, synthetic construct
  source 1..75: mol_type = other DNA
ccgtggcgtctgcgcgccgactggcagacggactaccagcatacccgcagcggtgatgacgacgaagacagcgac

SEQ ID NO: 60085 - DNA, 75 bp, synthetic construct
  source 1..75: mol_type = other DNA
ttttccgtgctggctgcatcatccgtgcgcagttcctgcagaaaatcaccgatgcttatgccgaaaatccgcaga

SEQ ID NO: 60086 - DNA, 75 bp, synthetic construct
  source 1..75: mol_type = other DNA
ctccaactctatccggatgcggagctgcgggaaagccataccattgatgtactgatgggacgtctgcgcaaaaaa

SEQ ID NO: 60087 - DNA, 75 bp, synthetic construct
  source 1..75: mol_type = other DNA
acacgaaaccttccagaccttccccggaagcgattaaacagcgattcggttcagctgcacacgttaagcggcccg

SEQ ID NO: 60088 - DNA, 75 bp, synthetic construct
  source 1..75: mol_type = other DNA
tcgccgcagtggctgaagacggtgagccatgcgttacctatattggtgccgatggcgcaggtcactatgtgaaga

SEQ ID NO: 60089 - DNA, 75 bp, synthetic construct
  source 1..75: mol_type = other DNA
gatggcgcgggtcactatgtgaagatggttcacaacggtattgaatacggtgatatgcaactgattgctgaagcc

SEQ ID NO: 60090 - DNA, 75 bp, synthetic construct
  source 1..75: mol_type = other DNA
ttgctgcttatcatactcacggtgcagatagtcatggcgattatgttgatgaatttttttcaagtagcgataaaa

SEQ ID NO: 60091 - DNA, 75 bp, synthetic construct
  source 1..75: mol_type = other DNA
caactgatcgactggggcggggcgttacgctggctgaaatcgacagccgatgacaatcaaatccatcgcatcgcc

SEQ ID NO: 60092 - DNA, 75 bp, synthetic construct
  source 1..75: mol_type = other DNA
cccgtaaaccgttaccggcctcacttccacgtgaaacccgggttatccggccggaagaggaatgctgcccggcct

SEQ ID NO: 60093 - DNA, 75 bp, synthetic construct
  source 1..75: mol_type = other DNA
ctccatgaaaattcaggttggcgcgaacgatggccagaccatcactatcgacctgaaaaaaattgactcgtctac

SEQ ID NO: 60094 - DNA, 75 bp, synthetic construct
  source 1..75: mol_type = other DNA
tgatgggctgtcgacctcgggtattcctaaccgcgataccattctgaagaactataagggaatggcgataaaatc

SEQ ID NO: 60095 - DNA, 75 bp, synthetic construct
  source 1..75: mol_type = other DNA
gcgtcctggtgtccaggtaaaagcacaagaagttaccgctgataataaccagcaagccgcaagcggtgctcagcc

SEQ ID NO: 60096 - DNA, 75 bp, synthetic construct
  source 1..75: mol_type = other DNA
tgacaggagtggttatatctgtgaccgaagcgaaatcggtcaacatccaccactgcaacgtgtttattcctctgc

SEQ ID NO: 60097 - DNA, 75 bp, synthetic construct
  source 1..75: mol_type = other DNA
tgctgcctgtctgatggcgtacagtcatcacgcctgtcgtacggagtgttacgccatgacggcccactattaccg

SEQ ID NO: 60098 - DNA, 75 bp, synthetic construct
  source 1..75: mol_type = other DNA
cagtacttatgggtttactgctgatgccgttactgatggcgggcatcaccaccactcacgctcgaaggataaaac

SEQ ID NO: 60099 - DNA, 75 bp, synthetic construct
  source 1..75: mol_type = other DNA
cgttacggggtatggcgaggcccccatgcctggtaacggggaaatgacctgttaccttctgcttcacaaccggaa

SEQ ID NO: 60100 - DNA, 75 bp, synthetic construct
  source 1..75: mol_type = other DNA
ttgccgaaggacagtaactcggcatggaaactcaccagtaatgccatgtcgatgatggcagatatgcaggcgacg

SEQ ID NO: 60101 - DNA, 75 bp, synthetic construct
  source 1..75: mol_type = other DNA
ccaaaacccatcgagcgcagttatgccagcccgggtctgttggcgcgaattatcatggcgaagttcgctgagcac

SEQ ID NO: 60102 - DNA, 75 bp, synthetic construct
  source 1..75: mol_type = other DNA
gtgaaactgacaacacatcatctacgggcgggggccgcattattgctggcaggaattctgctggcaggttgcgac

SEQ ID NO: 60103 - DNA, 75 bp, synthetic construct
  source 1..75: mol_type = other DNA
cttatttctatggatggggtacttctttttactacggcttcccatggtggattgtaggtgcaggtgttgatgatg

SEQ ID NO: 60104 - DNA, 75 bp, synthetic construct
  source 1..75: mol_type = other DNA
cgtgcagcgtgtcgaactggctgcaccactggccgacatcgtgctcaacagtacgcaggcgtctttctgtaccga

SEQ ID NO: 60105 - DNA, 75 bp, synthetic construct
  source 1..75: mol_type = other DNA
tagttttgttgattttgaacacttggatgaagtcctacgtcttattgtttggcttgagcaggttgaaaacactca

SEQ ID NO: 60106 - DNA, 75 bp, synthetic construct
  source 1..75: mol_type = other DNA
ttaagatctgcgctggcggtatggcaggcaccacggcagcggcactgggttttgcacccagcgtagcactcgcgg

SEQ ID NO: 60107 - DNA, 75 bp, synthetic construct
  source 1..75: mol_type = other DNA
tggtatcaacaacggtttgcaacgtctgagcaaaatggttggctggggcgcgttcctgctgccattactggtgct

SEQ ID NO: 60108 - DNA, 75 bp, synthetic construct
  source 1..75: mol_type = other DNA
cgtggtgaccaactgcacctatgacggcgtgtgttataacgctaaagaagcgcaggatctgctggaaaaaacctc

SEQ ID NO: 60109 - DNA, 75 bp, synthetic construct
  source 1..75: mol_type = other DNA
gactgatgaaacgtgtcggaataaaggctcaggttggataccgaagcccacgggcacgtaaaggcgaggccagta

SEQ ID NO: 60110 - DNA, 75 bp, synthetic construct
  source 1..75: mol_type = other DNA
ggtggtgcttgttaaagcgcctggcgcaaaagatgcaaaagtcgaaaaccagacgggggtgcgtaccgactggcg

SEQ ID NO: 60111 - DNA, 75 bp, synthetic construct
  source 1..75: mol_type = other DNA
tggcatcacaatggtatttatcgcgccctcatcctctgcgcaggacaaaccagccagcactgacaataccaatgt

SEQ ID NO: 60112 - DNA, 75 bp, synthetic construct
  source 1..75: mol_type = other DNA
ttcatacgaacgacagggtatcccctgcccatggcgctactgcaacgatcgcgatgtacgcacaatcgttgagct

SEQ ID NO: 60113 - DNA, 75 bp, synthetic construct
  source 1..75: mol_type = other DNA
gaaaatgctcactgtgtcgccaattatcaactgccaccagagagtcagcagcagttattaactcagctatcagct

SEQ ID NO: 60114 - DNA, 75 bp, synthetic construct
  source 1..75: mol_type = other DNA
tctgctgacgctagccgaagaggaacgcgcgctggaagcacgggatgtactgatgagtgaactggcggcaaacga

SEQ ID NO: 60115 - DNA, 75 bp, synthetic construct
  source 1..75: mol_type = other DNA
cgttgagctggggaaagccatagacttcgatgccagaacggctattccattcgaaggtgagcgccataatgcact

SEQ ID NO: 60116 - DNA, 75 bp, synthetic construct
  source 1..75: mol_type = other DNA
cggtttacccggtcattgtgctgttatgcgcgatactggcggcgctgataacgcaatatcaggtgaatacatgcg

SEQ ID NO: 60117 - DNA, 75 bp, synthetic construct
  source 1..75: mol_type = other DNA
gaagttgaactggctgaggctctgctgaaacaacgtgaacaggacagcgatcgttacagtgggcgggaagacgat

SEQ ID NO: 60118 - DNA, 75 bp, synthetic construct
  source 1..75: mol_type = other DNA
gactggcaacggaaccgggtgaaatccgctgctattactacgatatagtaacttttgaatatataggatggtcag

SEQ ID NO: 60119 - DNA, 75 bp, synthetic construct
  source 1..75: mol_type = other DNA
gggaagtctgcttctggggcttctgacttatctgacgaatctgtatttcaaaataagagaagataagcgtaaggc

SEQ ID NO: 60120 - DNA, 75 bp, synthetic construct
  source 1..75: mol_type = other DNA
agtcacaggtaaattctgttgatgcgaaatatcagaaactgcgggcagaactccatgaagcccggaaaaacattc

SEQ ID NO: 60121 - DNA, 75 bp, synthetic construct
  source 1..75: mol_type = other DNA
tttcgttcacgatctgacgtcactggcgcgcgacgtagccactggcgtactggctcgttcaatggacgtggacat

SEQ ID NO: 60122 - DNA, 75 bp, synthetic construct
  source 1..75: mol_type = other DNA
ctggcattgcctacggaacatctgctggtagtgcgggatactggtttttgcagtggttggatcaggtcagtccgt

SEQ ID NO: 60123 - DNA, 75 bp, synthetic construct
  source 1..75: mol_type = other DNA
ctgctgatgaactggctgatggcgtgatggagtctctgcgatttgatgcgcatgagctgctgattatccatcttc

SEQ ID NO: 60124 - DNA, 75 bp, synthetic construct
  source 1..75: mol_type = other DNA
gtacagcaactgaacacagggcaatatggtagggcttctgtatcaagtaatccgctatcagtcaacttgttcagg

SEQ ID NO: 60125 - DNA, 75 bp, synthetic construct
  source 1..75: mol_type = other DNA
gtcacctgatgcactgaacacgctgaacgaactggctgcggcgctgggcaatgacccgaattttgcgaccaccat

SEQ ID NO: 60126 - DNA, 75 bp, synthetic construct
  source 1..75: mol_type = other DNA
tggcatcaccatgatggctatccccttcgatgacaacatcaacggtgaagatgccacaactgctggcgatgacaa

SEQ ID NO: 60127 - DNA, 75 bp, synthetic construct
  source 1..75: mol_type = other DNA
gcgccggtcgtcaaacgtgcgcgcgataaagtcgaacatgattttaaccagcaggtgatcaatcgagacctcgcc

SEQ ID NO: 60128 - DNA, 75 bp, synthetic construct
  source 1..75: mol_type = other DNA
aacagccgaaaggtgctggtaaggcaccggcatttcagatccgtatcaacccggaactaaaagaacaaatggtta

SEQ ID NO: 60129 - DNA, 75 bp, synthetic construct
  source 1..75: mol_type = other DNA
ttctagcctcttctcttatatctggtagtgtttttgctcaaacggaaatttcgactgcaaattcgtctacagtta

SEQ ID NO: 60130 - DNA, 75 bp, synthetic construct
  source 1..75: mol_type = other DNA
acggcaaggacaattaacggcgtgaaatttgacggctcggcaaatattgaagtatttccgccaggtgttccgctg

SEQ ID NO: 60131 - DNA, 75 bp, synthetic construct
  source 1..75: mol_type = other DNA
aactggcgggaggccaggaagaaaacgcgcaggcagacgcccacgaggattgccaggattgcgaagtctctgtag

SEQ ID NO: 60132 - DNA, 75 bp, synthetic construct
  source 1..75: mol_type = other DNA
ggtaataaggagcttgctaaatttgtcgctgatctcgcgggcgttacagaacgtgatgtcaaagtggttcgcggt

SEQ ID NO: 60133 - DNA, 75 bp, synthetic construct
  source 1..75: mol_type = other DNA
gtgagttgctcaatgttgccagaagaacctggccagatattaatcaccgtgagctactgcaactcctcgatctaa

SEQ ID NO: 60134 - DNA, 75 bp, synthetic construct
  source 1..75: mol_type = other DNA
ctattccgaacgaggaaagtgatgcactgctgcgtgggcggatcattcacagttatgttctggaaacggataaat

SEQ ID NO: 60135 - DNA, 75 bp, synthetic construct
  source 1..75: mol_type = other DNA
ttaaaaccccttttgatttgttaaaacaccttgcggtctggcaactgcaagtgtcaaacaagaaatcaaaagggg

SEQ ID NO: 60136 - DNA, 75 bp, synthetic construct
  source 1..75: mol_type = other DNA
cttctgacaataatgatgattcagagcaagcagatttcgactggaaaaggcagctcgtgcttgcggccgtctatg

SEQ ID NO: 60137 - DNA, 75 bp, synthetic construct
  source 1..75: mol_type = other DNA
gcacgattacgacaaaacatcatcaaaaatgagaaaataccttcagagcatcaacgagtgcatgctccttataaa

SEQ ID NO: 60138 - DNA, 75 bp, synthetic construct
  source 1..75: mol_type = other DNA
tatggcagcggttacctggcgggaatgaagctgggcgggacgccgctggtcgagtatacgcgggacaggctgcac

SEQ ID NO: 60139 - DNA, 75 bp, synthetic construct
  source 1..75: mol_type = other DNA
cagaatcagccagaaacggaacagaacgaccagaaagcggaacagaacagcccaaatgcgttacaaaacgagcca

SEQ ID NO: 60140 - DNA, 75 bp, synthetic construct
  source 1..75: mol_type = other DNA
gctgactacactgatcggggtctgctgacaaaagagtggatgaaaggaaatcgtgtttcacgcatcacccgcacg

SEQ ID NO: 60141 - DNA, 75 bp, synthetic construct
  source 1..75: mol_type = other DNA
gaaatatcagaaactgcgggcagaactctatgaagcccggaaaaacattccgcccaaaaatcctgtcgatgcaga

SEQ ID NO: 60142 - DNA, 75 bp, synthetic construct
  source 1..75: mol_type = other DNA
tggcaatgctgctcttatcgggttgtgataatacgcaaagtaacaattcatccccgtcagaaacagaagtcggcg

SEQ ID NO: 60143 - DNA, 75 bp, synthetic construct
  source 1..75: mol_type = other DNA
tccggggatgttcagcagaacagcgtctggcagcaagaaaagccagagctgcgccactgatgcagtcactgtatg

SEQ ID NO: 60144 - DNA, 75 bp, synthetic construct
  source 1..75: mol_type = other DNA
acttgctgacaaaacgcttaaagaatattaatacacctgtaacttctgccctggcaagcttgcaactatctattt

SEQ ID NO: 60145 - DNA, 75 bp, synthetic construct
  source 1..75: mol_type = other DNA
ttatcaggctgcatggaatgaagcccgggcagcattacaacaagcacaggcactggtaaaagccgattgccagaa

SEQ ID NO: 60146 - DNA, 75 bp, synthetic construct
  source 1..75: mol_type = other DNA
catcgtggggtggcgggtctcatcgtccatggaaacgacattcgtgctggatgcactggagcaggcgttatgggc

SEQ ID NO: 60147 - DNA, 75 bp, synthetic construct
  source 1..75: mol_type = other DNA
ctgcaaccatcttgcgcaatggcagatgaacaggcaacggctgaaacagtggaaccggatgcaactgaacatcat

SEQ ID NO: 60148 - DNA, 75 bp, synthetic construct
  source 1..75: mol_type = other DNA
gatgcaggaatcctcagttggaccagcattgagcatgaactttgacatgcgcaaagacgttcgcggcgtgtttat

SEQ ID NO: 60149 - DNA, 75 bp, synthetic construct
  source 1..75: mol_type = other DNA
aattggttatggcgtaatcaaaggaaaatacttatcgatcccacaaaattttaagctcaataacattcgtttgga

SEQ ID NO: 60150 - DNA, 75 bp, synthetic construct
  source 1..75: mol_type = other DNA
caccgtgttaccgaatatctgaacaaagtactgaccgaaaccgaccatgccaaccctgatccagaaatcgtggat

SEQ ID NO: 60151 - DNA, 75 bp, synthetic construct
  source 1..75: mol_type = other DNA
gatgtacaacatcgcccgggtcgaatggggaacatgccgcgataaccccgttgaactggtgcgtaagccccgtgt

SEQ ID NO: 60152 - DNA, 75 bp, synthetic construct
  source 1..75: mol_type = other DNA
ctggggagtctgctgtttggcctgctgacgtatctgactaacctttatttcaagattaaagaagataagcgtaag

SEQ ID NO: 60153 - DNA, 75 bp, synthetic construct
  source 1..75: mol_type = other DNA
ctactctctggtcagcaaacatgcaaagagcgttaacatcagcataaaaacgccaacccggggtgaaatctcgca

SEQ ID NO: 60154 - DNA, 75 bp, synthetic construct
  source 1..75: mol_type = other DNA
atcgcattgcgaacggactaccagtgccctcaagtgaaaccttggatacacagttgttaaattcattgagtattt

SEQ ID NO: 60155 - DNA, 75 bp, synthetic construct
  source 1..75: mol_type = other DNA
tttgatggctctcactggcgcaccgttggtgttggtgagtatgtgtcgtcaggagcgccggggcgtgagtatttt

SEQ ID NO: 60156 - DNA, 75 bp, synthetic construct
  source 1..75: mol_type = other DNA
atgaaataaaactgaaggtaggaaagatggattctatagataaaaggtttcttgattttattcgatctaagaaaa

SEQ ID NO: 60157 - DNA, 75 bp, synthetic construct
  source 1..75: mol_type = other DNA
aacccgagttacttattggcgacaccagacgcgccgtgcgtctttttttacgtcgttgctcaggcacacccattt

SEQ ID NO: 60158 - DNA, 75 bp, synthetic construct
  source 1..75: mol_type = other DNA
agcggcaagttgctggaagagtttattgtggtggcggtagtctgtgcgctgtttctctggcatgtgcgctcggcg

SEQ ID NO: 60159 - DNA, 75 bp, synthetic construct
  source 1..75: mol_type = other DNA
ttttgcaatcagtatcctacagacagatcctgatgaagcaataagaatgttcaggatgtatgttgtttatgttat

SEQ ID NO: 60160 - DNA, 75 bp, synthetic construct
  source 1..75: mol_type = other DNA
ccagtcgcgtagctcttgttcctgtactggcgtcagaaccgaccggcatcgacaaactcaaacaactcgctggtt

SEQ ID NO: 60161 - DNA, 75 bp, synthetic construct
  source 1..75: mol_type = other DNA
acgacaaacgcgttttgtggaagcgagtagggcgcatcaggaaaaatgtcggcttcaaattgcgcgttatcacga

SEQ ID NO: 60162 - DNA, 75 bp, synthetic construct
  source 1..75: mol_type = other DNA
ctacctgagcaatggacacaaagggctgcaggtgatggacagcgcgaagttctacaagaacaagcccgctaacct

SEQ ID NO: 60163 - DNA, 75 bp, synthetic construct
  source 1..75: mol_type = other DNA
gatgcgcgatgcgcagttgtggagccacatcgaatttcaccccgaatgtaacgcgatttacgcagcactggactg

SEQ ID NO: 60164 - DNA, 75 bp, synthetic construct
  source 1..75: mol_type = other DNA
tgtgcttgctgcggtatgccagccgacgatccgcatcatctgattggtcacgggcagggcggaatgggaacaaaa

SEQ ID NO: 60165 - DNA, 75 bp, synthetic construct
  source 1..75: mol_type = other DNA
tggcacttcatccgcctgccggacggtggcggctacatgatgccggatggcgaccgtttccacatagtgaacggt

SEQ ID NO: 60166 - DNA, 75 bp, synthetic construct
  source 1..75: mol_type = other DNA
cagtaacaaacgagtgattcgtgctgctggcggcgctggtgcactgtctgactggttactgcgccatgtcaaatc

SEQ ID NO: 60167 - DNA, 75 bp, synthetic construct
  source 1..75: mol_type = other DNA
agtagcgtggtgcgtgcggcgcaggactggctgtgcgacagaaaacttgtggatatcacagatattctccggtga

SEQ ID NO: 60168 - DNA, 75 bp, synthetic construct
  source 1..75: mol_type = other DNA
gggaatcgccccttactgattcagaactggttggatacgggcgatgacaatgccgatcccagccagatcaaagtg

SEQ ID NO: 60169 - DNA, 75 bp, synthetic construct
  source 1..75: mol_type = other DNA
gtgctgatgccgcaggcatcatcctgacttcccttgtgattaaccgccagttgtggctgtaccacgacagcgggg

SEQ ID NO: 60170 - DNA, 75 bp, synthetic construct
  source 1..75: mol_type = other DNA
gttcggaaataacccggcagaaacgcggatgagcggcggtggtgtcacttactacgtcgagcaagcccgcgaacg

SEQ ID NO: 60171 - DNA, 75 bp, synthetic construct
  source 1..75: mol_type = other DNA
agcgggttggtttcgcaccctgccaaaagtcgttgtcagcggcgtgattattacgcttgcggtaacggtcgtcgc

SEQ ID NO: 60172 - DNA, 75 bp, synthetic construct
  source 1..75: mol_type = other DNA
tgatggcacggttaaaaccgtctcaaactggcctacagacagcggattcacgcagtatgagttaggctcagtccg

SEQ ID NO: 60173 - DNA, 75 bp, synthetic construct
  source 1..75: mol_type = other DNA
acacaaagagtcgccttgaagacatgatgcgggagctcacgcatcgccatgacttgaataagcagccgcacaaaa

SEQ ID NO: 60174 - DNA, 75 bp, synthetic construct
  source 1..75: mol_type = other DNA
gagcgtaggaactccggtggtggcatttaccgcgacttattggaggttgcccttatggctacgatcctcgcccct

SEQ ID NO: 60175 - DNA, 75 bp, synthetic construct
  source 1..75: mol_type = other DNA
catcatcaatcagcgcacaaagtttctacgatacaatatggactccagcagtattttacgcagtcgcccattcaa

SEQ ID NO: 60176 - DNA, 75 bp, synthetic construct
  source 1..75: mol_type = other DNA
tgggtattggtgcatgacgccgctcgtccttgtctgcatcaggatgacctcgcgcgattgttggcgttgagcgaa

SEQ ID NO: 60177 - DNA, 75 bp, synthetic construct
  source 1..75: mol_type = other DNA
tgccagaggcatttgaacgactggcagcaatcaaagccaaatatcccgatatgaagcacacagcgcttgttggag

SEQ ID NO: 60178 - DNA, 75 bp, synthetic construct
  source 1..75: mol_type = other DNA
gaaagcgatgctcgacgacgcggatgtcttcctgttgccatcggttacaggtgcggatggcgatatggaaggtat

SEQ ID NO: 60179 - DNA, 75 bp, synthetic construct
  source 1..75: mol_type = other DNA
gatgacgcccgttaccaggcaaaatacgtttcagctatctggcaaaaactgatcccgaatcaggctgatttttaa

SEQ ID NO: 60180 - DNA, 75 bp, synthetic construct
  source 1..75: mol_type = other DNA
cagtatgtggctgatacgcacacgccagaaattcaggctgcacgcggtcgcaagggcggttctaagtctaagcgc

SEQ ID NO: 60181 - DNA, 75 bp, synthetic construct
  source 1..75: mol_type = other DNA
aaaactcagcatcagagaaacagcagatgcaacgggctacagcactttgcaggtttgccgtattcaggcacttta

SEQ ID NO: 60182 - DNA, 75 bp, synthetic construct
  source 1..75: mol_type = other DNA
gtggtgaaatccagcgtcggtcacatccgcgatttgccgaccagtggctcagctgccaaaaagagtgccgactct

SEQ ID NO: 60183 - DNA, 75 bp, synthetic construct
  source 1..75: mol_type = other DNA
cccgctggaaggtgattaccgacgcctccgtggaagtgggacccgcgttgttcattagcctgctgatcatcaccc

SEQ ID NO: 60184 - DNA, 75 bp, synthetic construct
  source 1..75: mol_type = other DNA
tgtgtatgtcatttttgaagacggcaccgatctgtactgggcccgttcccgcgtgctggagtacctgaaccaggt

SEQ ID NO: 60185 - DNA, 75 bp, synthetic construct
  source 1..75: mol_type = other DNA
gcgaccaccggggactgccgctggcgcttatcagcgaagacggcaatacggcgtggagcgcggaatatgatgaat

SEQ ID NO: 60186 - DNA, 75 bp, synthetic construct
  source 1..75: mol_type = other DNA
ttgattgtggtgatattagtgctaaagatgcaaaaagcacacagaaagcctggaattgtcgtcactccagacagt

SEQ ID NO: 60187 - DNA, 75 bp, synthetic construct
  source 1..75: mol_type = other DNA
ctggtgggcggtctgcaatcaggtggctgatgcgcttcctgagtctgtattgcgtcgttcgctgggattaccggt

SEQ ID NO: 60188 - DNA, 75 bp, synthetic construct
  source 1..75: mol_type = other DNA
ctccatttgcacattatccctgacatatggtaccggaaccgcattaattttatgttataagagtttatttttaat

SEQ ID NO: 60189 - DNA, 75 bp, synthetic construct
  source 1..75: mol_type = other DNA
aaaacacaatgccagtctgccagcactgatgacaccagagcagatgaaagagtggatcgaaagctacaacagcac

SEQ ID NO: 60190 - DNA, 75 bp, synthetic construct
  source 1..75: mol_type = other DNA
gcgtaatctgccgtccggggtcgttcctgccgttcgccagccgctggcggaagataaatcattactgccattttt

SEQ ID NO: 60191 - DNA, 75 bp, synthetic construct
  source 1..75: mol_type = other DNA
acgaacagtccgcaggggccgtggtgggtactcggctggtgtgagcgggtgccggaggcggatgaggtgctgcct

SEQ ID NO: 60192 - DNA, 75 bp, synthetic construct
  source 1..75: mol_type = other DNA
aaggattactcccgcgccatcgtggttgcgtccgtgaaagaagcaccaattggtatagaggctactccccaccgt

SEQ ID NO: 60193 - DNA, 75 bp, synthetic construct
  source 1..75: mol_type = other DNA
agtacaggatattcccggtgtgctggccgtgtttgctgaacgccgtaaggacagttttagcccgtatgtccggct

SEQ ID NO: 60194 - DNA, 75 bp, synthetic construct
  source 1..75: mol_type = other DNA
ggttttatggcgatgcatctgggaacgaacttttatcttaaacagcacgacttattggtcgttgctgaccaaatg

SEQ ID NO: 60195 - DNA, 75 bp, synthetic construct
  source 1..75: mol_type = other DNA
ggcatcccgtctttttccgttctgcaacggtaagtaccgctggcacggcagtgctgagacgtataccggtcgtga

SEQ ID NO: 60196 - DNA, 75 bp, synthetic construct
  source 1..75: mol_type = other DNA
ctggtgtgccaacagcttcattgacagcgaaaggcatcactcagctcagtagtgccactaacagcacgtctgaag

SEQ ID NO: 60197 - DNA, 75 bp, synthetic construct
  source 1..75: mol_type = other DNA
agctgtgttgactgaactcggtgcttcgcaatctgctgaaaaaatgcctccttctgctactgattcggtgcagga

SEQ ID NO: 60198 - DNA, 75 bp, synthetic construct
  source 1..75: mol_type = other DNA
accggcgtggcgtgctcggtgtgtccgggcgggatgacttcgggcaacccggtaaatccgctgctgggggcgaag

SEQ ID NO: 60199 - DNA, 75 bp, synthetic construct
  source 1..75: mol_type = other DNA
ccgtcagcgcgtcgcaaaccgccgcgcccccatctctgcttgatgaaatcatggcgcaaacccgcgtccagccta

SEQ ID NO: 60200 - DNA, 75 bp, synthetic construct
  source 1..75: mol_type = other DNA
tgtattgatgaaattgccaaactggccggaacgggcgagatggtggcggaagtaaccgaacgggcgatgcgcggc

SEQ ID NO: 60201 - DNA, 75 bp, synthetic construct
  source 1..75: mol_type = other DNA
taaccgaatgcattaaaggtaccgtcaagaccattatggggtttgtgattttaggcgcaggggcgggtttagttg

SEQ ID NO: 60202 - DNA, 75 bp, synthetic construct
  source 1..75: mol_type = other DNA
aaccgtgcggagaggtgacaccacataaacagaaagaggcagagagccgtttaatgatgctgaatgaccgacgaa

SEQ ID NO: 60203 - DNA, 75 bp, synthetic construct
  source 1..75: mol_type = other DNA
gtgctaaagatgcaaaaagcacacagaaagcctggaattgtcgtcactccagacagtcaaacgataaaaaaagat

SEQ ID NO: 60204 - DNA, 75 bp, synthetic construct
  source 1..75: mol_type = other DNA
tggtgaaggccttccgctgccggagacatatgaccgtccggacccgcgcattaagcagctggcgcgtcgcagtac

SEQ ID NO: 60205 - DNA, 75 bp, synthetic construct
  source 1..75: mol_type = other DNA
cagacatgccgtgatgcgatacagcacagctataacgcatggttgcgcgagttcggcacaggtaacaaagaacat

SEQ ID NO: 60206 - DNA, 75 bp, synthetic construct
  source 1..75: mol_type = other DNA
gagcaggtggaacaattatttcaacaatgaccctgacagagaatagttatcctgtcgttatcggtgcaggcggtg

SEQ ID NO: 60207 - DNA, 75 bp, synthetic construct
  source 1..75: mol_type = other DNA
ccacaggaacagaaagaggcagagacccggctaatggtgctgaatgaccgacaaaaagccagaaaacctcgttga

SEQ ID NO: 60208 - DNA, 75 bp, synthetic construct
  source 1..75: mol_type = other DNA
agccgtgcggggaagtgacactacaggaacagaaagaggcagaggcccggctaatggtgctgaatgaccgacaaa

SEQ ID NO: 60209 - DNA, 75 bp, synthetic construct
  source 1..75: mol_type = other DNA
ctatatcccgaccgatatcacgttcacaccggcgctgtttgctgctctcgatgtgtctgaagaggcagtggcttc

SEQ ID NO: 60210 - DNA, 75 bp, synthetic construct
  source 1..75: mol_type = other DNA
ctgtttaagggcgacagcatccggcgcgcaaaactgatcagccgtacattccctgataacaccggacgaacgggc

SEQ ID NO: 60211 - DNA, 75 bp, synthetic construct
  source 1..75: mol_type = other DNA
ttactccgggaagaactgacgcctctcaggagcagacggatgttgcctcattcagtgtactggagccgacagcag

SEQ ID NO: 60212 - DNA, 75 bp, synthetic construct
  source 1..75: mol_type = other DNA
tgaagtgaaaacaatcacacacccccacttcggtgataaaccggtaaaggtatacgcgataaaggtgaatatcaa

SEQ ID NO: 60213 - DNA, 75 bp, synthetic construct
  source 1..75: mol_type = other DNA
cggaatatgacccgcttatcgggtgctacattccgaccgacatcacgttcacactggctctgtttgctgcccttg

SEQ ID NO: 60214 - DNA, 75 bp, synthetic construct
  source 1..75: mol_type = other DNA
cgtgcgggggttttctctctccagcaaccaatgccaccagggataaagcccccgcaacattgcgcctcaccggaa

SEQ ID NO: 60215 - DNA, 75 bp, synthetic construct
  source 1..75: mol_type = other DNA
gacctcgacggccgtttcctttgcatggctgagtgtcgtgccgccgtggcctttggcgataccgaggctggacgt

SEQ ID NO: 60216 - DNA, 75 bp, synthetic construct
  source 1..75: mol_type = other DNA
gcggtaagggctggggacaggcaaagcccgttgaacgtgccttcggcgtgggcggtctgggcgaatatatcgaca

SEQ ID NO: 60217 - DNA, 75 bp, synthetic construct
  source 1..75: mol_type = other DNA
ttaatctggataaagcccgcaggctgctatggccgatcaaaaagaaatacggatctagtatttcttggggagact

SEQ ID NO: 60218 - DNA, 75 bp, synthetic construct
  source 1..75: mol_type = other DNA
aaacggatgaatcaggggaggcccgggggcgggcctccgtttttccggagtcagtccggtctgtggtttatgaga

SEQ ID NO: 60219 - DNA, 75 bp, synthetic construct
  source 1..75: mol_type = other DNA
gcgaagtggagcgtcgtgtgaaggagcgcatgattctgtcacgtaaccgcaattacagccggctggccacagctt

SEQ ID NO: 60220 - DNA, 75 bp, synthetic construct
  source 1..75: mol_type = other DNA
gaaccggtggtccttaaatccgataacgccttcgctgcctatggcctggctggtaaatacgatgatgacggtttt

SEQ ID NO: 60221 - DNA, 75 bp, synthetic construct
  source 1..75: mol_type = other DNA
atgaaaaaactagtatttgccgctttgttaattccagtgatgggccacgccacaaccttttcctgtaaagcaata

SEQ ID NO: 60222 - DNA, 75 bp, synthetic construct
  source 1..75: mol_type = other DNA
acttctgcatcggcaccatgcacaccaaatcacccggtgaaacctttgcccggctgctggggttatttccaccgg

SEQ ID NO: 60223 - DNA, 75 bp, synthetic construct
  source 1..75: mol_type = other DNA
gacaaaaggatccgtcagcgccagcttcatgccagaaaagttacgacacgcgagttctctgttatcagcgaggcg

SEQ ID NO: 60224 - DNA, 75 bp, synthetic construct
  source 1..75: mol_type = other DNA
atggcgtatgtaatgccattctgctgccgtatgtagaatcatttaatttaattggcaacttaaatcggttcaggg

SEQ ID NO: 60225 - DNA, 75 bp, synthetic construct
  source 1..75: mol_type = other DNA
caggaaaactctccatcacccgggccacccgggccctgacgttcctgtcagagctgggactgattacctaccaga

SEQ ID NO: 60226 - DNA, 75 bp, synthetic construct
  source 1..75: mol_type = other DNA
ctgatgagtcaggcatcctcaacgcacccgcacttaacccgcttcggcgggttttgttttttcctggcattctgg

SEQ ID NO: 60227 - DNA, 75 bp, synthetic construct
  source 1..75: mol_type = other DNA
tgccactgtatcgtcagagtgaaatttttgcccgtcagggtgtcgaactgagccgtgcattactctccaactggg

SEQ ID NO: 60228 - DNA, 75 bp, synthetic construct
  source 1..75: mol_type = other DNA
gatccgcagtttgccgggcagaccaaagagcgtctctcttcgcgtcagtgcgcggcatttgtttctggcgtggtg

SEQ ID NO: 60229 - DNA, 75 bp, synthetic construct
  source 1..75: mol_type = other DNA
gagactgcgtgtcacgttcgcgctggactgctgtgatcgtgaggcactgcactgggcggtgactaccggcggctt

SEQ ID NO: 60230 - DNA, 75 bp, synthetic construct
  source 1..75: mol_type = other DNA
ggttaacgcggtcatgctggcggtttttggcggttcgctgtggtcggcaatgccgatagttgagcggctggcgcg

SEQ ID NO: 60231 - DNA, 75 bp, synthetic construct
  source 1..75: mol_type = other DNA
ggcaattccaagtcagcagccttcaaagcctggaaagcccgtatcagggagggaataaaaccggagaccatgctt

SEQ ID NO: 60232 - DNA, 75 bp, synthetic construct
  source 1..75: mol_type = other DNA
gcatcagcttctggccgcagcattttggcctcattccacagtgggtgaccctggaaccccgtgtcttcggctgga

SEQ ID NO: 60233 - DNA, 75 bp, synthetic construct
  source 1..75: mol_type = other DNA
gaatccattctgaacctgacagcctggcaatatgatatagcccgttttgacggcgaaccgctcacgctgtacaga

SEQ ID NO: 60234 - DNA, 75 bp, synthetic construct
  source 1..75: mol_type = other DNA
atgaaaacattgtctcagaacaccaccgcttcggcctgtgcaccggagactggcctgcaacaactggttgccact

SEQ ID NO: 60235 - DNA, 75 bp, synthetic construct
  source 1..75: mol_type = other DNA
attgagcaggctggatccctgcgtggtctgtcgctgtctgatgtgctgaatctgaaagcggataccatgttcacg

SEQ ID NO: 60236 - DNA, 75 bp, synthetic construct
  source 1..75: mol_type = other DNA
tggacgccctgcaagggaatttcccgtatgcaacagacccggcgggaaaccggctgccggacccggaactgcatc

SEQ ID NO: 60237 - DNA, 75 bp, synthetic construct
  source 1..75: mol_type = other DNA
acccggaagagagtaaatcaaaccgcgcaattggcgttgcgctgaatgatactgcatgtcgcgtattgaaaaaac

SEQ ID NO: 60238 - DNA, 75 bp, synthetic construct
  source 1..75: mol_type = other DNA
attagcttaacatatgggccatttgatacaaaaaacaacttaagttttattagtgcattatctatttactttatt

SEQ ID NO: 60239 - DNA, 75 bp, synthetic construct
  source 1..75: mol_type = other DNA
tttttggtttatccggcgatctgactgaaaaggacatcaaagcggcctacagaaaagcggctttaaaatatcatc

SEQ ID NO: 60240 - DNA, 75 bp, synthetic construct
  source 1..75: mol_type = other DNA
acagcatggcgagccactggtcgagagccgctacctctacgacccgctgggacggcgaatggcaaaacgggtctg

SEQ ID NO: 60241 - DNA, 75 bp, synthetic construct
  source 1..75: mol_type = other DNA
atgccatgacggtccactattaccggctgcgggattacgccctgcagcatccggaatgcagcgccattatgcgca

SEQ ID NO: 60242 - DNA, 75 bp, synthetic construct
  source 1..75: mol_type = other DNA
ctggtggcggagaacgacgccccggcactggcgggcaaactcagcgaactgcgccatcttgatgaacaaacgctg

SEQ ID NO: 60243 - DNA, 75 bp, synthetic construct
  source 1..75: mol_type = other DNA
cttcgccgcccgccggaggttttggcaaagcaacccgaagcccgcgatatccgcagccagttcccgcgcctgccc

SEQ ID NO: 60244 - DNA, 75 bp, synthetic construct
  source 1..75: mol_type = other DNA
ttacttcgtcaggccaatctgccggggcagtttccgctattagttggctattatcatcgcgaactgaaaaatctc

SEQ ID NO: 60245 - DNA, 75 bp, synthetic construct
  source 1..75: mol_type = other DNA
gacataatggcgtacttgctgccttgttattacgcgcattgtttaacggattattacaggaacagcttgcacacc

SEQ ID NO: 60246 - DNA, 75 bp, synthetic construct
  source 1..75: mol_type = other DNA
gtatggagatggacacagaggacagttaccttcagagcctgcttactgctgtgcgcgccgcacatcatgaactgg

SEQ ID NO: 60247 - DNA, 75 bp, synthetic construct
  source 1..75: mol_type = other DNA
gaaagcagggtgtatctgatattaataacagggtatttcagatataaacctgtgattcctgaatttacattaaaa

SEQ ID NO: 60248 - DNA, 75 bp, synthetic construct
  source 1..75: mol_type = other DNA
ccattgatctaattgaaaagttccaaaatctttatgcgataaccgatcaaattcgtaacacgacaggtttctgct

SEQ ID NO: 60249 - DNA, 75 bp, synthetic construct
  source 1..75: mol_type = other DNA
ggttggtacaaccactatggacgtgtctgggtgctgaaaaccgccccgggcgcaggtaacgtctttagcggctga

SEQ ID NO: 60250 - DNA, 75 bp, synthetic construct
  source 1..75: mol_type = other DNA
tgctttaacagatctacctataacgggatccggtggtgagtttcaggtgaccatatttgagtcggatggagccat

SEQ ID NO: 60251 - DNA, 75 bp, synthetic construct
  source 1..75: mol_type = other DNA
ccgcaggttccccgccagttgcgacagtcgcgccatcgtcgtccgttaccggaacatctgccccgcgaaatacac

SEQ ID NO: 60252 - DNA, 75 bp, synthetic construct
  source 1..75: mol_type = other DNA
atcatcgacagaatctgttggtatcggtgcaggtgttgacgcttcagttatgactctggcttgtagaacgtggca

SEQ ID NO: 60253 - DNA, 75 bp, synthetic construct
  source 1..75: mol_type = other DNA
gcaaggcgcaatttatagttactgccgttaaaggcgagatcaaacgccgccagcgccgcaaggccaaagagcagg

SEQ ID NO: 60254 - DNA, 75 bp, synthetic construct
  source 1..75: mol_type = other DNA
gggagcttcgttatatcgcggattaaagaacctgatacagtcagactgtatcttggattttacaaactcttattc

SEQ ID NO: 60255 - DNA, 75 bp, synthetic construct
  source 1..75: mol_type = other DNA
tgttgaaaaactacagcgaaagcgattttggcggcccgctggcaagtcaggctgattatcaggacccgtggctga

SEQ ID NO: 60256 - DNA, 75 bp, synthetic construct
  source 1..75: mol_type = other DNA
ttaggattagaaacactaaaatgcattaagccactgcattcaatgggcggaactggtgaaagaagcggtccagat

SEQ ID NO: 60257 - DNA, 75 bp, synthetic construct
  source 1..75: mol_type = other DNA
caatgttacgtatcgccgccatgaacctgattatgcacggcgtggaagcgccggatatccactatcaggacacca

SEQ ID NO: 60258 - DNA, 75 bp, synthetic construct
  source 1..75: mol_type = other DNA
agggaattaaaaccaagagaacgctattcacgtacacagaaaattgctgctgttgagcattatcttactcacggt

SEQ ID NO: 60259 - DNA, 75 bp, synthetic construct
  source 1..75: mol_type = other DNA
cagcctggcggatgcgcttcagcagtccggcggcgaagacggtggcagtgtggtgttcccgccggtgctggtgca

SEQ ID NO: 60260 - DNA, 75 bp, synthetic construct
  source 1..75: mol_type = other DNA
ttgggacttataaaaaatcaacccttaaaactgaaaaaatcactcgcggattattttcaaacgatgaaattacat

SEQ ID NO: 60261 - DNA, 75 bp, synthetic construct
  source 1..75: mol_type = other DNA
gcccgcacctcttcgctatcttcttctgacagttcccgccctctctcagcctcaccgttccccgacacactgccc

SEQ ID NO: 60262 - DNA, 75 bp, synthetic construct
  source 1..75: mol_type = other DNA
ctgtatcagaccttacacggggtgaattatctgttcagtatttcatccatgctgcagattaatattcctctttcg

SEQ ID NO: 60263 - DNA, 75 bp, synthetic construct
  source 1..75: mol_type = other DNA
ctgaacaacggcggggcatttatggcacctgaaccggatgaagatgatgacgaaaactgggtactgttcaatgcc

SEQ ID NO: 60264 - DNA, 75 bp, synthetic construct
  source 1..75: mol_type = other DNA
tgagaacgggggtgacagggctggcgctggctgtgatggtggcctgtgtgatgtttcgtgcggagagtggtattg

SEQ ID NO: 60265 - DNA, 75 bp, synthetic construct
  source 1..75: mol_type = other DNA
gtgcctgctaccgctgctgaccggttgcggaagtacgcggacagtttacgtgaatacaccggcggtactactgcc

SEQ ID NO: 60266 - DNA, 75 bp, synthetic construct
  source 1..75: mol_type = other DNA
cgcccgttacgctaccgatgataataatcatgaaggcgcgctgaatgtgattcaggcggtgctggataatatcgc

SEQ ID NO: 60267 - DNA, 75 bp, synthetic construct
  source 1..75: mol_type = other DNA
cgatctggatcaggataagatcgaccagcttgagagcggcctttctctatccgatatcgataaactgcttttttt

SEQ ID NO: 60268 - DNA, 75 bp, synthetic construct
  source 1..75: mol_type = other DNA
agcagacagccattccacaagttccggtaactccggatggttggataagctgtagtgagcgaatgccggacgaca

SEQ ID NO: 60269 - DNA, 75 bp, synthetic construct
  source 1..75: mol_type = other DNA
gccacagaatgtgattaccggaatttatgccagtaaagaatcctgccatcaggcaagagacgagcaaaaaatttc

SEQ ID NO: 60270 - DNA, 75 bp, synthetic construct
  source 1..75: mol_type = other DNA
cgctcggagtcatcgggccgctgattgccgccaaatatgatataccggtcgtgatgcaaaccgtaggcttcggcc

SEQ ID NO: 60271 - DNA, 75 bp, synthetic construct
  source 1..75: mol_type = other DNA
cgtggggcagtatgtgaaaaaaggtgatcagatttatttcgagggaatgctgagaaccagaaagtggaaagacca

SEQ ID NO: 60272 - DNA, 75 bp, synthetic construct
  source 1..75: mol_type = other DNA
gacggttgttctgagcggctgcgggctgattcagaaagtggtggatgaatcgaaaagcgtggcctcagccgtttt

SEQ ID NO: 60273 - DNA, 75 bp, synthetic construct
  source 1..75: mol_type = other DNA
gatccacatcgcgaccgtgcacagatgctgaaagtcgaaaacgtccagcaggcgtggcagcaatggatcaacaaa

SEQ ID NO: 60274 - DNA, 75 bp, synthetic construct
  source 1..75: mol_type = other DNA
gatagaagagctgcgcgttagttacttcgctcaacaacttggtacgccttatccgatttcagataagcgtatttt

SEQ ID NO: 60275 - DNA, 75 bp, synthetic construct
  source 1..75: mol_type = other DNA
tgaataccaggagctggcattactggcgggagtgacaactaaaaactggtccaaaacatttactcgtcactgggt

SEQ ID NO: 60276 - DNA, 75 bp, synthetic construct
  source 1..75: mol_type = other DNA
ggcgtggagcgcggaatatgatgaatggggcaaccagcttaatgaggagaacccgcatcacctgcaccagccgta

SEQ ID NO: 60277 - DNA, 75 bp, synthetic construct
  source 1..75: mol_type = other DNA
gtttggtgatttgaaattcaaatataggaacagggagttctggtgcagagggtattacgtcgatacggtgggtaa

SEQ ID NO: 60278 - DNA, 75 bp, synthetic construct
  source 1..75: mol_type = other DNA
acaagcctggaaagtggaacataaattatcggatattctattgttgactatttgtgccgttatttctggtgcgga

SEQ ID NO: 60279 - DNA, 75 bp, synthetic construct
  source 1..75: mol_type = other DNA
atgagcgaatatttcagaatatttcaggggctgccggacggctcctttacccgcgaacaggctgaagccgttgcc

SEQ ID NO: 60280 - DNA, 75 bp, synthetic construct
  source 1..75: mol_type = other DNA
agtaactttactttataccaaccgcaatatttttctctccagtattgtgcgcattataaataccttatcgttatt

SEQ ID NO: 60281 - DNA, 75 bp, synthetic construct
  source 1..75: mol_type = other DNA
tggggataaaaatttacgacaaaaataataaggaaatcaaagtgaacggtggtgagttgccaacagacatgggta

SEQ ID NO: 60282 - DNA, 75 bp, synthetic construct
  source 1..75: mol_type = other DNA
ggcggaaattcgccagcttgagcgcgagcttcgcatcgggctgcgtaccaacacctcgcgaatgacggaggtgct

SEQ ID NO: 60283 - DNA, 75 bp, synthetic construct
  source 1..75: mol_type = other DNA
tgagccaggaagatatctggcatgtgcgcacgctgacgctggacggactggtggggctgaatcccatcgcctatg

SEQ ID NO: 60284 - DNA, 75 bp, synthetic construct
  source 1..75: mol_type = other DNA
gcatggtggttatcaaggcatttatcgcggtacgggggctgggcctgcggcagggaggcgtcagtgaagaaacac

SEQ ID NO: 60285 - DNA, 75 bp, synthetic construct
  source 1..75: mol_type = other DNA
cactactgccaggtagttgagagcccagcaggttcacgcaaatggtacaaatacgagcataagacaggttgtatt

SEQ ID NO: 60286 - DNA, 75 bp, synthetic construct
  source 1..75: mol_type = other DNA
aaatgtggtttttatgatgaatacaatttccataaagggacatttagagctgatttaaccggaaaatgtagttat

SEQ ID NO: 60287 - DNA, 75 bp, synthetic construct
  source 1..75: mol_type = other DNA
tcatgtgcattagttcagcattaccactatgaattattgaacttaaatgaaatcgatattgctttgttcgctgcc

SEQ ID NO: 60288 - DNA, 75 bp, synthetic construct
  source 1..75: mol_type = other DNA
ggcataaagggccggaaatgttatttcgtcattatggttcatatttaaaggaatatgacggtaatacgaccagca

SEQ ID NO: 60289 - DNA, 75 bp, synthetic construct
  source 1..75: mol_type = other DNA
ttcagcgtgtactgcaacgtgcggtcttccatgtccagtcctccggtcgcaatgaggtaaccggtgcaaacgttc

SEQ ID NO: 60290 - DNA, 75 bp, synthetic construct
  source 1..75: mol_type = other DNA
acatcgacctgatagaagccgtaggaaatcaccctgacattatcgccgggagcaacaacggtgatggatacgact

SEQ ID NO: 60291 - DNA, 75 bp, synthetic construct
  source 1..75: mol_type = other DNA
catgtacctgccagagattcgcggcttcagcaaggaaatcgggctggcgttctggcgatacattctgactaacac

SEQ ID NO: 60292 - DNA, 75 bp, synthetic construct
  source 1..75: mol_type = other DNA
aaaccgcctgggagcattctctgttgtggagggtaaagctgataatgtcgtactggaaaatggcggacgcctgga

SEQ ID NO: 60293 - DNA, 75 bp, synthetic construct
  source 1..75: mol_type = other DNA
gtgataattctcatgtttagggatgataaatgtgacaaaacttaccgtgaaggttcgtttcccgaatttatttgt

SEQ ID NO: 60294 - DNA, 75 bp, synthetic construct
  source 1..75: mol_type = other DNA
cagcgccaaaatataaagcgttagacatgacagagctttccttaaaggtggcaatcagaacgatagaccgccacg

SEQ ID NO: 60295 - DNA, 75 bp, synthetic construct
  source 1..75: mol_type = other DNA
tgctgctgcaactggcggaagaccgtcgccgtctcaagggcgttcagtccacggtgaaaaaagcggaaataaagg

SEQ ID NO: 60296 - DNA, 75 bp, synthetic construct
  source 1..75: mol_type = other DNA
ataaaatcagcccgtctcatccgccaaaacctgccaccgtggcggtgccggaagagacggagaaaaaagcgcgtg

SEQ ID NO: 60297 - DNA, 75 bp, synthetic construct
  source 1..75: mol_type = other DNA
gtttgtcattaccccaccgcttttttccatgtaagcgtggtcaggaacaaataagcatctctcagcagcttggaa

SEQ ID NO: 60298 - DNA, 75 bp, synthetic construct
  source 1..75: mol_type = other DNA
aaaagcggggacagaatgatgtattccgctacccgcagggcgttaagctcgatcaggaaaacagccgtatttttc

SEQ ID NO: 60299 - DNA, 75 bp, synthetic construct
  source 1..75: mol_type = other DNA
ggccgcccgtgagggcggcagtgttcgccacgcgtcgggctatgacctgatgctgctgcagctggcggaagaccg

SEQ ID NO: 60300 - DNA, 75 bp, synthetic construct
  source 1..75: mol_type = other DNA
taaccgcaatgtgcaaaccgtgctggcagaggaaatggcagacgcggcacagagcgcaatgcttgccactaccgg

SEQ ID NO: 60301 - DNA, 75 bp, synthetic construct
  source 1..75: mol_type = other DNA
ttacgtttgtcagccacggtgagacgaccttactgaccgaaaagggcaaactgaaattgcagtcgcatctcgatc

SEQ ID NO: 60302 - DNA, 75 bp, synthetic construct
  source 1..75: mol_type = other DNA
gcagaattcgacggtaaagagaacgaagaactggaagcgctgaacatcgaagtcgccgttgctggccgcatgatg

SEQ ID NO: 60303 - DNA, 75 bp, synthetic construct
  source 1..75: mol_type = other DNA
attgccggtgagagcaacatgtttgccgactgggcggcatcccgccagggctgcacggtggggggaagcatggat

SEQ ID NO: 60304 - DNA, 75 bp, synthetic construct
  source 1..75: mol_type = other DNA
cgggagaaaccgtgagcggcggaacactgacaaatcatgacaaccagattgtcttcggtacggccaacggaatga

SEQ ID NO: 60305 - DNA, 75 bp, synthetic construct
  source 1..75: mol_type = other DNA
caaatcctcctttttgccgattgaagaggcttacgctatccgtttatcggacgcagaatatttttatatctacga

SEQ ID NO: 60306 - DNA, 75 bp, synthetic construct
  source 1..75: mol_type = other DNA
atcagtactatcgtattttatccggagaatcccgcccattccctggcatatatgaggctgtttccgaacaactcc

SEQ ID NO: 60307 - DNA, 75 bp, synthetic construct
  source 1..75: mol_type = other DNA
gtctatgccgagtttgaaagtcgtggaattaacgtttctatatcaggttaccatggcactggcgttttttatgta

SEQ ID NO: 60308 - DNA, 75 bp, synthetic construct
  source 1..75: mol_type = other DNA
aagtatccatgaccagcgttgaaattgcagagctggtgggtaaacgtcatgacaatgtgaaacgcactattgaaa

SEQ ID NO: 60309 - DNA, 75 bp, synthetic construct
  source 1..75: mol_type = other DNA
aaatggttgccgcgatggctcttgaagctgttcgtcagcagaaacggatcactcaggtggaagaaaaagtcagcc

SEQ ID NO: 60310 - DNA, 75 bp, synthetic construct
  source 1..75: mol_type = other DNA
tatgactgcgtgatgcctgtttatcagttccggcgtgatttcacgctggtgggccatcgtaaagacgtaaatcag

SEQ ID NO: 60311 - DNA, 75 bp, synthetic construct
  source 1..75: mol_type = other DNA
ttccggcaagaacgaccgatcgcgaccttattcgggccatgatggagggggggactgcacgggtgtatcactgta

SEQ ID NO: 60312 - DNA, 75 bp, synthetic construct
  source 1..75: mol_type = other DNA
atccaacggaaacagagaatgataatagccagtttcagagtcagaagctaagggagagtatcaacacaagcctcg

SEQ ID NO: 60313 - DNA, 75 bp, synthetic construct
  source 1..75: mol_type = other DNA
aattacgccaccagcatagcctacagcggtatgaatatcatgttgctatggtgcagtgcatcaaaacagggtttc

SEQ ID NO: 60314 - DNA, 75 bp, synthetic construct
  source 1..75: mol_type = other DNA
atgcaagtttatcagcaagcacgccttagtaacccggaattgcgtaagtctgccgccgatcgtgatgctgccttt

SEQ ID NO: 60315 - DNA, 75 bp, synthetic construct
  source 1..75: mol_type = other DNA
ctagcgcccctaacatcacagcggcgaccagcgtatccccgctggacccgtcaggctcctcaaaaacgaaatttt

SEQ ID NO: 60316 - DNA, 75 bp, synthetic construct
  source 1..75: mol_type = other DNA
aacgtaatatcgctgagttaaaaactcgagatttattagcacctattaaggccgtagaaatgtctggacgtcttg

SEQ ID NO: 60317 - DNA, 75 bp, synthetic construct
  source 1..75: mol_type = other DNA
cacacaaaacagcctgccttattgcacaacacgggaaaaatcacatgcatattgcctgcttgtttctgcgtaaag

SEQ ID NO: 60318 - DNA, 75 bp, synthetic construct
  source 1..75: mol_type = other DNA
ttaagtctgaccattctggttggcgcgttaaccattttgtttaatgccattgtcgatgtgctatatgcggttatc

SEQ ID NO: 60319 - DNA, 75 bp, synthetic construct
  source 1..75: mol_type = other DNA
tttttccaaaagaattaatatggttttttgtcgatagctatgtcgttgagaataacgcgctcagcttcggtgatg

SEQ ID NO: 60320 - DNA, 75 bp, synthetic construct
  source 1..75: mol_type = other DNA
gtctggaagcgattccgacgctatttattcttattactatttcgttctttatgatgcgcctcgctccgggcagtc

SEQ ID NO: 60321 - DNA, 75 bp, synthetic construct
  source 1..75: mol_type = other DNA
cgacaacaacgaccgcccctggtgggggctaccctgcaccgtgacgccctgtttcggggcacgtctggtgcagga

SEQ ID NO: 60322 - DNA, 75 bp, synthetic construct
  source 1..75: mol_type = other DNA
catttacggagtttatccccgcgacggtgcgtggaaaatggtccgcgcggctctcatttgttggtaactggtcgc

SEQ ID NO: 60323 - DNA, 75 bp, synthetic construct
  source 1..75: mol_type = other DNA
gcggcgattgaagaagaactggtgccagcgaaagcctgttctggtctgcgtcaggtgctggaagacgtgatgctc

SEQ ID NO: 60324 - DNA, 75 bp, synthetic construct
  source 1..75: mol_type = other DNA
atgataacgcgggataatccaccaatcccgggaaagcaatcgctggcgaaggtgacgtcaattcctctggtcagt

SEQ ID NO: 60325 - DNA, 75 bp, synthetic construct
  source 1..75: mol_type = other DNA
atgaataaccactatttacagtttgtgcgtgagctgctcattatcgctaccgccgatttgagtggggcaacaaaa

SEQ ID NO: 60326 - DNA, 75 bp, synthetic construct
  source 1..75: mol_type = other DNA
gatgaggtaaccggaaaaatgatcacgcgggataatcccccaatcccgggtaaacaatcactggcgaaaggctca

SEQ ID NO: 60327 - DNA, 75 bp, synthetic construct
  source 1..75: mol_type = other DNA
tggcgctcggctatttcacatacttttttagttacggcatttttctacctttctggagcgtctggcttaaaggga

SEQ ID NO: 60328 - DNA, 75 bp, synthetic construct
  source 1..75: mol_type = other DNA
aaagctgtgtgagtggaaaagagtacggattctggaagctgaatgctgtgcagatcatatccatatgcttgtgga

SEQ ID NO: 60329 - DNA, 75 bp, synthetic construct
  source 1..75: mol_type = other DNA
atcgggctggtgctctcgacgcgtcacgaaggtgttcaggacatcaccctttctgactggaaagataatggtgac

SEQ ID NO: 60330 - DNA, 75 bp, synthetic construct
  source 1..75: mol_type = other DNA
gtaaaacagcgcgaagcggaagccaacatgttgcgcgcggaagctgccggacaggctgatgcgattcgcacaaaa

SEQ ID NO: 60331 - DNA, 75 bp, synthetic construct
  source 1..75: mol_type = other DNA
gtgagctttccattcactgtactgagctgcgcctgctgactaaagcactacgtcctttaccagataaattccatg

SEQ ID NO: 60332 - DNA, 75 bp, synthetic construct
  source 1..75: mol_type = other DNA
tcccagagaaagacgcctatcgattggaaatcgttacagctggcgccctgaagtatcaagaaagtgcttaccgcc

SEQ ID NO: 60333 - DNA, 75 bp, synthetic construct
  source 1..75: mol_type = other DNA
aggacaaggagcgggtgctgaaaaaccagaatatcatatgggaggcgctgaaaaaaaacagaatgtttgacggca

SEQ ID NO: 60334 - DNA, 75 bp, synthetic construct
  source 1..75: mol_type = other DNA
aacagcgacatgaatcagttctttaataagctgggatttgcttccaataccacacaaccgggcgtctggcagggg

SEQ ID NO: 60335 - DNA, 75 bp, synthetic construct
  source 1..75: mol_type = other DNA
tcagtcaactcgactggaaattcaataacgctgcaattattaaaggtgcaattaattgggatttgatgccccaga

SEQ ID NO: 60336 - DNA, 75 bp, synthetic construct
  source 1..75: mol_type = other DNA
tggtctgaattcagggggtatctcggcgcgaagagggtggcaggcaagaccatggagcgcctgaagaagctgata

SEQ ID NO: 60337 - DNA, 75 bp, synthetic construct
  source 1..75: mol_type = other DNA
tccgcgagcaactcattgtggctactgctgatttgagcggagcaacgaaaggccagcttgaagcctggctggagc

SEQ ID NO: 60338 - DNA, 75 bp, synthetic construct
  source 1..75: mol_type = other DNA
tggttgataatggtgtgaaaattatttctgaaacaccaacaggagtcagaggtattactcaggttcagtatgaaa

SEQ ID NO: 60339 - DNA, 75 bp, synthetic construct
  source 1..75: mol_type = other DNA
aaagaaagagccagaaatgacggtcagatattatatcagttctgctgatttaaccgcagagaagttcgccacagc

SEQ ID NO: 60340 - DNA, 75 bp, synthetic construct
  source 1..75: mol_type = other DNA
ttccatggattggtggcaaacgtcgcctggcaaaacacatcctgccgctgtttccggcgcatgaatgttatgtgg

SEQ ID NO: 60341 - DNA, 75 bp, synthetic construct
  source 1..75: mol_type = other DNA
aagcatcctcgctacgatcctgaaggaaaacggtgtgaccgagtggagtccgctgttcagcgagccgcatccttc

SEQ ID NO: 60342 - DNA, 75 bp, synthetic construct
  source 1..75: mol_type = other DNA
gggagccacaacccttgccgaaatcaacgataactaccagtttgcctgccagcaggtgggaaggctgttgctcgc

SEQ ID NO: 60343 - DNA, 75 bp, synthetic construct
  source 1..75: mol_type = other DNA
caaccggaaaaaccatcctgaacctggtgaacgccggcaacagtgcgtcggggctggcgaccagcggtaagggta

SEQ ID NO: 60344 - DNA, 75 bp, synthetic construct
  source 1..75: mol_type = other DNA
gccgatgaccatccataacctcatcgcgcctaccgttgatggtgttctgggtatggaggccaaaacgcggactga

SEQ ID NO: 60345 - DNA, 75 bp, synthetic construct
  source 1..75: mol_type = other DNA
tttcccgatataaggccgtatatgctggatgaactaaaaagggaaatagccaaagcatgtaacgcatgtgcaaga

SEQ ID NO: 60346 - DNA, 75 bp, synthetic construct
  source 1..75: mol_type = other DNA
aatattacagggcgtgttaacccctcggattacggtaactttgattcccgttatgtgaaagatgttcgacttggt

SEQ ID NO: 60347 - DNA, 75 bp, synthetic construct
  source 1..75: mol_type = other DNA
ctggagtcgtgccacggacacctacggtgttaagcaccagcgaaaagaacgtccctgtgaagaaaaagaaagtta

SEQ ID NO: 60348 - DNA, 75 bp, synthetic construct
  source 1..75: mol_type = other DNA
gtcgatatgaagtggacgtaaggccgcagggtgcagacggaaaacgcatccggcgcaaatttaacacaaagggcg

SEQ ID NO: 60349 - DNA, 75 bp, synthetic construct
  source 1..75: mol_type = other DNA
tttaaatggagactggttcagcaaactcttttacccggtgcctgtgtcgcacaaatagctcgagagaatggaatt

SEQ ID NO: 60350 - DNA, 75 bp, synthetic construct
  source 1..75: mol_type = other DNA
gcaggaaaagaaatcgtgcttccgtatgacaaagatgatgaggagtgcgttcatatcatccgtatctctgacgat

SEQ ID NO: 60351 - DNA, 75 bp, synthetic construct
  source 1..75: mol_type = other DNA
taagggcacggttttgggtgttcatacagccgaagccatactgcttaacggcaacagagatacgaagatagtcaa

SEQ ID NO: 60352 - DNA, 75 bp, synthetic construct
  source 1..75: mol_type = other DNA
gtgtaatcgccagcgtcattgctgccggacaaaatcaaatctcaatcactgaactggtaagcctctccggtatta

SEQ ID NO: 60353 - DNA, 75 bp, synthetic construct
  source 1..75: mol_type = other DNA
tcgggctgcttctgtggggtaacagccacatggcagcggcggacgccgcctgcgaagggcgcttcgtcaatccga

SEQ ID NO: 60354 - DNA, 75 bp, synthetic construct
  source 1..75: mol_type = other DNA
cagacctaccaaaaggacaggctgtacatgttctacgccatacctttgctgctcactttatgattaatggaggaa

SEQ ID NO: 60355 - DNA, 75 bp, synthetic construct
  source 1..75: mol_type = other DNA
ggaggcggtgaatgcccttccggctccgcaggacgggcgtgatgccacggcactggaagtgctccccgctattga

SEQ ID NO: 60356 - DNA, 75 bp, synthetic construct
  source 1..75: mol_type = other DNA
ccaccgtcgctggagcggctgacgtttgagaccgagatcacctcggaatatctgttaaccctgaaggggaatagc

SEQ ID NO: 60357 - DNA, 75 bp, synthetic construct
  source 1..75: mol_type = other DNA
ttgtgttcgttgctgccggaacttttttatgggtgattatgcacagtatttttgatgcctgtattgattcgtgga

SEQ ID NO: 60358 - DNA, 75 bp, synthetic construct
  source 1..75: mol_type = other DNA
cggacatcatcggtatcggtgaaatcagggattatgaaacggcagatgcagccgtccaggcaggtaacaccggtc

SEQ ID NO: 60359 - DNA, 75 bp, synthetic construct
  source 1..75: mol_type = other DNA
aggttaaacccgaattaccagatggacaggccgtacatgttttgaggcacacatttgccacacattttataatga

SEQ ID NO: 60360 - DNA, 75 bp, synthetic construct
  source 1..75: mol_type = other DNA
atggcaaacactgctgagatattcaattttccagtgccggatgcggcacaaaaggagccgcgcgtggcagatctc

SEQ ID NO: 60361 - DNA, 75 bp, synthetic construct
  source 1..75: mol_type = other DNA
ctcgtgacgaggcagcatttattaacggtggtacggctggtcttgataatgccaaaaagtcatcagataaatcat

SEQ ID NO: 60362 - DNA, 75 bp, synthetic construct
  source 1..75: mol_type = other DNA
agatacctggcgtgatgatttgcggcagggatttaaagaagcctttcgtgtgttgcgtccatccggcgttctgat

SEQ ID NO: 60363 - DNA, 75 bp, synthetic construct
  source 1..75: mol_type = other DNA
ccatcaataacgacccaaagttcagcgaaactatcaataacgcactggctcttaaagctcctttggcaagcccgg

SEQ ID NO: 60364 - DNA, 75 bp, synthetic construct
  source 1..75: mol_type = other DNA
ttaaaagacattgatgatcttataacgggtgaaatgatttcaggtaaaagcagagtgaatcgttctgacgtagtc

SEQ ID NO: 60365 - DNA, 75 bp, synthetic construct
  source 1..75: mol_type = other DNA
ctgaatatcgccgccgattatgcggaatatgtggcagaggcgcgttacagaagaaaatttcctgaggatgtaagc

SEQ ID NO: 60366 - DNA, 75 bp, synthetic construct
  source 1..75: mol_type = other DNA
ttacccaatccaccgtgtattcattgatggcggtggtgttggtggcctttctggagtcgctggcgctggtcggtt

SEQ ID NO: 60367 - DNA, 75 bp, synthetic construct
  source 1..75: mol_type = other DNA
ccgggattatcggcggcatcgtggtgcattacctgaagaaaattccggtgcataaagttctgcgctcggtgatgc

SEQ ID NO: 60368 - DNA, 75 bp, synthetic construct
  source 1..75: mol_type = other DNA
cagagcgggcggaataccggcattaataatgtggtcagtgaatggtcaacattacccgaatcaggtaagaaaaat

SEQ ID NO: 60369 - DNA, 75 bp, synthetic construct
  source 1..75: mol_type = other DNA
gataaccgcatcgcagaggatgcgcactatgtttaccactatgatgaatacggcagactgacggagaagacggac

SEQ ID NO: 60370 - DNA, 75 bp, synthetic construct
  source 1..75: mol_type = other DNA
acaggagaagaaaatgaagcaggtatctggatgtataataaaggaaaacataatcgctggcgtgacaacagtagt

SEQ ID NO: 60371 - DNA, 75 bp, synthetic construct
  source 1..75: mol_type = other DNA
acaacatgcgtacccaggaagaattgggacggattgaaacagtggctgaatatttggcacgccgtgaagagcgtg

SEQ ID NO: 60372 - DNA, 75 bp, synthetic construct
  source 1..75: mol_type = other DNA
ggcgcaatcactggcttaataaagccaagaagctggcggaagatttgggattaggctttcttaattttgctgcat

SEQ ID NO: 60373 - DNA, 75 bp, synthetic construct
  source 1..75: mol_type = other DNA
aatatagacacatcaattaagaactggactcaggactattacacattattgtcgtcagacacaggtatctcgatc

SEQ ID NO: 60374 - DNA, 75 bp, synthetic construct
  source 1..75: mol_type = other DNA
atacaagaagcatcaagagcagttggaaaaattgtcgattgaactggatgccgcaaaacagcgcattgcagagct

SEQ ID NO: 60375 - DNA, 75 bp, synthetic construct
  source 1..75: mol_type = other DNA
gttttgaaaccggtcctaacggcccattagttccagaactgaaagcacaattccccgatgcaccttacattgctc

SEQ ID NO: 60376 - DNA, 75 bp, synthetic construct
  source 1..75: mol_type = other DNA
atgaacagcaaacctcctggccgctggtattgcagaacagcaaaaccattgtgctgtggggctctgatttgctga

SEQ ID NO: 60377 - DNA, 75 bp, synthetic construct
  source 1..75: mol_type = other DNA
tccgtgcgctgggtgaagaattctccacggtgctggcggatttacagcgcacatttgaggggaagatggcctcgc

SEQ ID NO: 60378 - DNA, 75 bp, synthetic construct
  source 1..75: mol_type = other DNA
tgggagcagccagccagacgctgaatcaacaggcggtaaccgccagtaatctggccaatgcctcaacgcccggtt

SEQ ID NO: 60379 - DNA, 75 bp, synthetic construct
  source 1..75: mol_type = other DNA
aggggaatgcgctgggctgaaattgattttcataagcggatatggactatacccgcagaaagaatgaaagccagg

SEQ ID NO: 60380 - DNA, 75 bp, synthetic construct
  source 1..75: mol_type = other DNA
cgcggctaattcggagttactgagtcttgttcaggagtacaacagaattgcaggtagtaacggttttgatgaaat

SEQ ID NO: 60381 - DNA, 75 bp, synthetic construct
  source 1..75: mol_type = other DNA
tcgcgcctggctacacagatgaggaaatttatgagtggatgacaaagaagctggcagctataaaccagcttcgtg

SEQ ID NO: 60382 - DNA, 75 bp, synthetic construct
  source 1..75: mol_type = other DNA
cttatcctgaggtcagtattgctgaagctgcacgtactgcccggataatgcgagagcaacttgctgcaggtgatg

SEQ ID NO: 60383 - DNA, 75 bp, synthetic construct
  source 1..75: mol_type = other DNA
atggaaatgaaaccggatgtattaccggcgcataatgactgcccgcaaacaaatggcacctcccgctcacgccgc

SEQ ID NO: 60384 - DNA, 75 bp, synthetic construct
  source 1..75: mol_type = other DNA
ccatcaggcgaaaataatttctgagctcggagataaaaatgatattgtttattctggctcaggctcgtcagaagt

SEQ ID NO: 60385 - DNA, 75 bp, synthetic construct
  source 1..75: mol_type = other DNA
agagattacaacatttgcttgagaaaatggggcgtgatcgtatttcacttaacgagttattttgcatgagttcag

SEQ ID NO: 60386 - DNA, 75 bp, synthetic construct
  source 1..75: mol_type = other DNA
aatgaaaattatgttgtacataacaaagtcgtcaggttgcagtcaacaggtggtgttattgagcaaacactgccc

SEQ ID NO: 60387 - DNA, 75 bp, synthetic construct
  source 1..75: mol_type = other DNA
gcgtttgcgaaccctttatcggacactgactggctgcgtcttgcgatggtgaaggatctgcagcctggcgaaatg

SEQ ID NO: 60388 - DNA, 75 bp, synthetic construct
  source 1..75: mol_type = other DNA
aggggaatatcctgtttgcctttgcagtggcggcacaggtgctgacgtggtgtgaaacgcgcagtgggtggcgta

SEQ ID NO: 60389 - DNA, 75 bp, synthetic construct
  source 1..75: mol_type = other DNA
atgtcgtcacgcaactctgtacatgattttataatgctgctcccggtgctactgttggtcgggtgggtagttttt

SEQ ID NO: 60390 - DNA, 75 bp, synthetic construct
  source 1..75: mol_type = other DNA
aaaagatgatggtagtgaaataatgcgattttacatgaataatcctgaagggtgggaagatgatatacgcccggt

SEQ ID NO: 60391 - DNA, 75 bp, synthetic construct
  source 1..75: mol_type = other DNA
gtcgtccggcgctgccgcccgcgtggtccttcggtctgtggctaaccacttcatttaccaccaactacgacgaag

SEQ ID NO: 60392 - DNA, 75 bp, synthetic construct
  source 1..75: mol_type = other DNA
accgatgatatccacaatcagtcatgggttggtgaaaaggtattctgtaacccaccatacagcgatattccgtcg

SEQ ID NO: 60393 - DNA, 75 bp, synthetic construct
  source 1..75: mol_type = other DNA
tgcagttaaataccttccaccagcagggcataacgggcttgttattaggtcaccgtttgcaagcgcaattgtcat

SEQ ID NO: 60394 - DNA, 75 bp, synthetic construct
  source 1..75: mol_type = other DNA
ccgaattgttcccgatgtcgaaaattaacgacgccattcagcatgtacgcgatggtaaagcgcgctaccgagtga

SEQ ID NO: 60395 - DNA, 75 bp, synthetic construct
  source 1..75: mol_type = other DNA
atgattaccagttatgaagccactgttgttactactgatgacattgttcacgaagtcagcctggaaggaaagcgt

SEQ ID NO: 60396 - DNA, 75 bp, synthetic construct
  source 1..75: mol_type = other DNA
gatgggctggatgttatctctggaattctttcagctgtatcagcaagctttattctgggaaacagtgacgcacat

SEQ ID NO: 60397 - DNA, 75 bp, synthetic construct
  source 1..75: mol_type = other DNA
cgccgaacgcgatgctcttcgtgaaggtgagatgggcgacgctaggcatagcaacacacgggccgcagctgatat

SEQ ID NO: 60398 - DNA, 75 bp, synthetic construct
  source 1..75: mol_type = other DNA
tccctgtccgatatgttcggtgatcttagtgcgcaactgaataatctgcaggacacggtaacgtctgccttaagt

SEQ ID NO: 60399 - DNA, 75 bp, synthetic construct
  source 1..75: mol_type = other DNA
taacgacttccgcgcccggggctggggctggctgggctcactggaaaccggtctgcccttcagtatcactgacaa

SEQ ID NO: 60400 - DNA, 75 bp, synthetic construct
  source 1..75: mol_type = other DNA
ggggcggtcgccaatggatacacactaaacttgaacgcatcaccaacaatgccacatttgcggctggtgggcaat

SEQ ID NO: 60401 - DNA, 75 bp, synthetic construct
  source 1..75: mol_type = other DNA
ctgggtcaccgttttgaaagaaacagagagttcatataataaaaagttcaattctgatcacaaaagtaataatca

SEQ ID NO: 60402 - DNA, 75 bp, synthetic construct
  source 1..75: mol_type = other DNA
ctgaataatctgcaggaaacggcaacatctgccttaagcgatataagtaaaacggtgggagggctgctgtcgtga

SEQ ID NO: 60403 - DNA, 75 bp, synthetic construct
  source 1..75: mol_type = other DNA
attcacgctcgaaatactggagaactatcaatacattgatgtatttaacacctatggtgccagttggtcagctac

SEQ ID NO: 60404 - DNA, 75 bp, synthetic construct
  source 1..75: mol_type = other DNA
acaacattcgccgcttacgtgagggtgaacgagccacacttgcccaagccatgacgctggtagaaagccgccatc

SEQ ID NO: 60405 - DNA, 75 bp, synthetic construct
  source 1..75: mol_type = other DNA
tgcgcaacacgttctgaaaaacaacgctgaatttattgctgcctttaatcccaagattgctttggcactactgga

SEQ ID NO: 60406 - DNA, 75 bp, synthetic construct
  source 1..75: mol_type = other DNA
tccctgacaatatgttaagtgggtcaggaacggcagctaaacccatcaatgcctttaaaggtaatgtgacgctgg

SEQ ID NO: 60407 - DNA, 75 bp, synthetic construct
  source 1..75: mol_type = other DNA
ttttcaataatgcgacattgactacaaaatcagcatttaatacagcatcatcaagcgtacgttccgctggaaaaa

SEQ ID NO: 60408 - DNA, 75 bp, synthetic construct
  source 1..75: mol_type = other DNA
gacgtgacggcaggtcttcctttgaagacctgattgcgtacacgtctgtgcgggatgatgtgcaggaaaatgagc

SEQ ID NO: 60409 - DNA, 75 bp, synthetic construct
  source 1..75: mol_type = other DNA
tttacggctggttctctcgtgggatacggacaataccgatctcgatctccatgttgtcacgcccgatggcgaaca

SEQ ID NO: 60410 - DNA, 75 bp, synthetic construct
  source 1..75: mol_type = other DNA
atgaaaaagatgatgatagccacactggctgccgccagcgtgctgcttgccgttgcaaatcaggcgcatgctggc

SEQ ID NO: 60411 - DNA, 75 bp, synthetic construct
  source 1..75: mol_type = other DNA
ctctaaaagaactgggtcacccgacccgtttgttcatattcaaacatcttgtaaaagctggagaacaaggtttac

SEQ ID NO: 60412 - DNA, 75 bp, synthetic construct
  source 1..75: mol_type = other DNA
ttaagtcaggtatagccggtctgatacacctcggtattcgatatgcagatgttgaggtcatgagaattgctggag

SEQ ID NO: 60413 - DNA, 75 bp, synthetic construct
  source 1..75: mol_type = other DNA
aagaagcaggtggaacacttaatgtagcagcaacagcagcggcttgttctgacgctaatagcaataaactagtgt

SEQ ID NO: 60414 - DNA, 75 bp, synthetic construct
  source 1..75: mol_type = other DNA
cagcagaatgtaccaagattatcactgcagccgcagggaatttctatacagcaggtgtaggaactgcaggtaatg

SEQ ID NO: 60415 - DNA, 75 bp, synthetic construct
  source 1..75: mol_type = other DNA
ataaattcaccgaagacaccgaactcctttctgaacgcagcaatatcatttgcatctcggacgaagcacatcgca

SEQ ID NO: 60416 - DNA, 75 bp, synthetic construct
  source 1..75: mol_type = other DNA
ggtaaagcaaaaggcgcaaccggccgtccggtggcgttgctggcacagttcctgttgaaccgcgccgggtttaac

SEQ ID NO: 60417 - DNA, 75 bp, synthetic construct
  source 1..75: mol_type = other DNA
ccgaagggtgataagggagagcgcggtgacaccggccctgtcggggcaaccggcgaacggggaccggcaggtgat

SEQ ID NO: 60418 - DNA, 75 bp, synthetic construct
  source 1..75: mol_type = other DNA
gcaggttaaaaaactagcagcaccgttatcaaagaatgcctatggacaatatctccttaagatgattaatggtga

SEQ ID NO: 60419 - DNA, 75 bp, synthetic construct
  source 1..75: mol_type = other DNA
atgaagggcgggtaatgatggacggtccccgtgatgaaatactgaaaaaactgtcagggaaacagcagagtgggg

SEQ ID NO: 60420 - DNA, 75 bp, synthetic construct
  source 1..75: mol_type = other DNA
atgaagggcgggtaatgatggacggtccccgtgatgaaatactgaaaaaactgtcagggaaacagcagagtgaag

SEQ ID NO: 60421 - DNA, 75 bp, synthetic construct
  source 1..75: mol_type = other DNA
aggggcccgcgggtcctcaggggccgaagggtgataagggagagcgcggtgacaccggccctgtcggggcaaccg

SEQ ID NO: 60422 - DNA, 75 bp, synthetic construct
  source 1..75: mol_type = other DNA
ccgttttatccgtcatcacccatgcgggcttgatatgcagataggggaaggaggtcaggggctgtcaggaggaca

SEQ ID NO: 60423 - DNA, 75 bp, synthetic construct
  source 1..75: mol_type = other DNA
ccactcgttttcagcaggcccgtctggctatgcagggggtgaatgaaattgttcgccgcccggtggaacgagaac

SEQ ID NO: 60424 - DNA, 75 bp, synthetic construct
  source 1..75: mol_type = other DNA
gatatcttaattataagtaccccacaagacacgcctcgctttgaacaattattaggtgatggtagtcaatgggga

SEQ ID NO: 60425 - DNA, 75 bp, synthetic construct
  source 1..75: mol_type = other DNA
gtgaatgccaaatattatccgcatatcattacggtctgcgtgattaacgcattgctgtcgatctgggttatgcag

SEQ ID NO: 60426 - DNA, 75 bp, synthetic construct
  source 1..75: mol_type = other DNA
tgcttttgctgtctggcctgcttttgttgactctggcgatcgcggtgttaaatacactcgtgccgctttggctcg

SEQ ID NO: 60427 - DNA, 75 bp, synthetic construct
  source 1..75: mol_type = other DNA
ttgctggtggttcgggtactcgtctgtatcctgtaaccatggcggtaagcaaacagctcttgccaatatatgata

SEQ ID NO: 60428 - DNA, 75 bp, synthetic construct
  source 1..75: mol_type = other DNA
acagcttgcaaaattagccaaagaactcaataaaaatgattacggtaaatatttgcagcatttagccaaagatta

SEQ ID NO: 60429 - DNA, 75 bp, synthetic construct
  source 1..75: mol_type = other DNA
atgaaaacgcgtaaaggtattattttagcgggtggttctggtactcgtctttatcctgtgactatggctgtcagt

SEQ ID NO: 60430 - DNA, 75 bp, synthetic construct
  source 1..75: mol_type = other DNA
gccacggaacagcgtaaaagtgaactgcttgaacagcgtgccgagccgtttccccggcgatctgtgccggatggt

SEQ ID NO: 60431 - DNA, 75 bp, synthetic construct
  source 1..75: mol_type = other DNA
ataacaatttcgcatggagcattggggccggtgttcgctatgacataaccccggatatcgctcttgacctcagct

SEQ ID NO: 60432 - DNA, 75 bp, synthetic construct
  source 1..75: mol_type = other DNA
tcagggctggcctgaattctcacagtggcttgatgccgtgattcagcgtgtcgaaatgtacaacgcatcgcttcc

SEQ ID NO: 60433 - DNA, 75 bp, synthetic construct
  source 1..75: mol_type = other DNA
gtatcatgtgcttcagcctggaggtctccgtaagacactttctcacgatgcattaatggccgtttattctggtta

SEQ ID NO: 60434 - DNA, 75 bp, synthetic construct
  source 1..75: mol_type = other DNA
gatgaactggctgattatctcgatttgagtgcctcagcgcgccgtagcatcgataaacattacgggatggggcga

SEQ ID NO: 60435 - DNA, 75 bp, synthetic construct
  source 1..75: mol_type = other DNA
atgagcagaaagaacctgtggcggccattgcgccgtctttatattagcgccagcgtatcagttccgacaaaacaa

SEQ ID NO: 60436 - DNA, 75 bp, synthetic construct
  source 1..75: mol_type = other DNA
tggttttttaatatttgatagtaaactatcttgtcaggttgtcgatactttaaattcagcagttgcattgtacca

SEQ ID NO: 60437 - DNA, 75 bp, synthetic construct
  source 1..75: mol_type = other DNA
gaccgccgtctgccggagctgatgtctctgctgcgcgatgacgacatcctgatcctcactgctgaccacggttgt

SEQ ID NO: 60438 - DNA, 75 bp, synthetic construct
  source 1..75: mol_type = other DNA
cgggtgatgcgatggtgcaaaaaatactgaatgcactttcacccgatcagcgccagatggcattagacctactga

SEQ ID NO: 60439 - DNA, 75 bp, synthetic construct
  source 1..75: mol_type = other DNA
cttttggctctgttgttacggccagaaacggggggagcagtattgccggagagaatggtcaggtttatctgagcg

SEQ ID NO: 60440 - DNA, 75 bp, synthetic construct
  source 1..75: mol_type = other DNA
ttattctcgttggtaatctgggtcaggacccggaagtacgctacatgccaaatggtggcgcagttgccaacatta

SEQ ID NO: 60441 - DNA, 75 bp, synthetic construct
  source 1..75: mol_type = other DNA
taaaggtatacatgttaactaaaagaatattattttctgtaatgctgatagtttcaccaagcgtggtggccagcg

SEQ ID NO: 60442 - DNA, 75 bp, synthetic construct
  source 1..75: mol_type = other DNA
agcgcacagtcagcggaacaaagcaggatagcggcggaagaggccgtaaaccgaatccccaccgtggtgggacct

SEQ ID NO: 60443 - DNA, 75 bp, synthetic construct
  source 1..75: mol_type = other DNA
tcgaaatgtacaacgcatcgcttcctgttccgctttcaccagctgaatgccgggctattggcaggagtattgcga

SEQ ID NO: 60444 - DNA, 75 bp, synthetic construct
  source 1..75: mol_type = other DNA
gatgaactggctgattatctcgatttgagcgcctcagcgcgtcgtagcatcgataaacattacgggatggggcga

SEQ ID NO: 60445 - DNA, 75 bp, synthetic construct
  source 1..75: mol_type = other DNA
cacagataacggcgttactgggtacacctgtatctgctgagactctggctgccggtactgtccgtacagatgtat

SEQ ID NO: 60446 - DNA, 75 bp, synthetic construct
  source 1..75: mol_type = other DNA
atggcgcgaggaaccctacactctcgacgaactggctgattatctcgatttgagcgcctcagcgcgccgtagcgt

SEQ ID NO: 60447 - DNA, 75 bp, synthetic construct
  source 1..75: mol_type = other DNA
acagcgcattcaccccttgggtgtccgcagggattggttatgcaagaattcatcagaaatcaacgggtgtcatca

SEQ ID NO: 60448 - DNA, 75 bp, synthetic construct
  source 1..75: mol_type = other DNA
acatctgcacgcacgctgaaaccgtgggaggcattagggatcagtcgcgcctggtattaccaacagaaaaaacga

SEQ ID NO: 60449 - DNA, 75 bp, synthetic construct
  source 1..75: mol_type = other DNA
gttgttctggtgcagtttccagatatgtcactgcctgccgtttgcgggattggatccatgctcggcattgcaggt

SEQ ID NO: 60450 - DNA, 75 bp, synthetic construct
  source 1..75: mol_type = other DNA
cgccgtgagaaccgcgcctgatgcgtcggttaaggcactgaagtacgctgccgcgatagagcgtgcgctgtgtga

SEQ ID NO: 60451 - DNA, 75 bp, synthetic construct
  source 1..75: mol_type = other DNA
gaaactttgtgctgatgtgaactacagcggactgatttgcaaaaacccgttccacctggaatggcaggtgatgga

SEQ ID NO: 60452 - DNA, 75 bp, synthetic construct
  source 1..75: mol_type = other DNA
aaccattaatgacaatacggtgacgtggtcgaatcttgagcagggtatgggatcttatatttatacattctgggg

SEQ ID NO: 60453 - DNA, 75 bp, synthetic construct
  source 1..75: mol_type = other DNA
gcagccatagtccgggtcaccattggcgaatacggtgcaacggggtttattaatggcacggtctgtacctgtacg

SEQ ID NO: 60454 - DNA, 75 bp, synthetic construct
  source 1..75: mol_type = other DNA
acagcagaacgtcgttgttcttcctgcagactcttttcctgaaggtgcgagaatcactatcaggcaggtgagtgg

SEQ ID NO: 60455 - DNA, 75 bp, synthetic construct
  source 1..75: mol_type = other DNA
ccggaggcactgcgtcgctttgaacaaatggtggaagaggcagcgcgtcacgccggggaggcgaagaagaatgcc

SEQ ID NO: 60456 - DNA, 75 bp, synthetic construct
  source 1..75: mol_type = other DNA
atgaaaggattattatctttactcattttttctatggtccttcctgcacatgccggaattgttatctacgggacg

SEQ ID NO: 60457 - DNA, 75 bp, synthetic construct
  source 1..75: mol_type = other DNA
tggggcgataaatataaatcagaagttgatgttaaaagtcatgacatcatgcttggtgtgacttataacttctga

SEQ ID NO: 60458 - DNA, 75 bp, synthetic construct
  source 1..75: mol_type = other DNA
tgggcgtgagtcgttgtcacactcagactctgctgacaactttgcatggagccttggggctggtgtccgttatga

SEQ ID NO: 60459 - DNA, 75 bp, synthetic construct
  source 1..75: mol_type = other DNA
atgcaaacattacaccctccctcccaccgaaaattcgcgaagcggtggataaagttaaggtagcaaaagctgtct

SEQ ID NO: 60460 - DNA, 75 bp, synthetic construct
  source 1..75: mol_type = other DNA
ttttttatcgccaacgaagtctcgccgcgttttgatcatctggtgaaagaagataccggttttatcggcttcaaa

SEQ ID NO: 60461 - DNA, 75 bp, synthetic construct
  source 1..75: mol_type = other DNA
ccgatggaattgcgtctgttcaactatctggtcgagcgtaaagatctgattcagatcccggtgtatccgttcgaa

SEQ ID NO: 60462 - DNA, 75 bp, synthetic construct
  source 1..75: mol_type = other DNA
atggggctagtaaaaaatcgctgtaaaaatggcgaccactattgggtaagtgcttatgtaacgccaatagctaag

SEQ ID NO: 60463 - DNA, 75 bp, synthetic construct
  source 1..75: mol_type = other DNA
atgcgccagaatttaccagtgacgggtcgaaacttagaactcccaaaagatgccaatattctttcgactacctcc

SEQ ID NO: 60464 - DNA, 75 bp, synthetic construct
  source 1..75: mol_type = other DNA
gtcctggccccaccagcaaagccgactgtctgaacaacgtgctggacgccatcacccaatttgagcgtagcgcca

SEQ ID NO: 60465 - DNA, 75 bp, synthetic construct
  source 1..75: mol_type = other DNA
gatgccgtctacaccgacgccccgccgccagtaagcgtgatgcaggtgctgacggaccaccatattcaactggag

SEQ ID NO: 60466 - DNA, 75 bp, synthetic construct
  source 1..75: mol_type = other DNA
gctatccgggccgattattgaagatcaactggcgtttcgcctcagcgccgatcgtcagcggcgtgacagcttcgt

SEQ ID NO: 60467 - DNA, 75 bp, synthetic construct
  source 1..75: mol_type = other DNA
ctataaccaccacaaccagttaacgtcagccaccgggcctgacgggctggaattgcgccgggaatatgatgaatt

SEQ ID NO: 60468 - DNA, 75 bp, synthetic construct
  source 1..75: mol_type = other DNA
atggcacccggccgcggttgaatctttcgctggacgggcgttccctgacctacaacgagctggcgtttgggccgc

SEQ ID NO: 60469 - DNA, 75 bp, synthetic construct
  source 1..75: mol_type = other DNA
atatgctgatgcccggactggaattgagcggagacgttcgctttaccgatacctattattcccagtatgacaacg

SEQ ID NO: 60470 - DNA, 75 bp, synthetic construct
  source 1..75: mol_type = other DNA
atgaaaacgaaaaaacatacttcacgtaccgcgattaaaactccggaacgtgacctgtatcagcttgtgaccgac

SEQ ID NO: 60471 - DNA, 75 bp, synthetic construct
  source 1..75: mol_type = other DNA
gtggctgtcgcctcagcattgtggtggtggcaggtctatccggtgcagcagcaactgttacaggttaacgacacc

SEQ ID NO: 60472 - DNA, 75 bp, synthetic construct
  source 1..75: mol_type = other DNA
tagttgctacaattattgcaacaaccatttccagctaggtctttccggagaacgggagtggctggctcgcaatgt

SEQ ID NO: 60473 - DNA, 75 bp, synthetic construct
  source 1..75: mol_type = other DNA
cgtaaaccgaatccccaccgtggtgggacctcccgggccaaagggggaacaggggcccgctggccctcaggggcc

SEQ ID NO: 60474 - DNA, 75 bp, synthetic construct
  source 1..75: mol_type = other DNA
gatgtcagtggtctggccttcgatcgcatctttatgatcacggaacctgacggtacgtttattaccgctcgccag

SEQ ID NO: 60475 - DNA, 75 bp, synthetic construct
  source 1..75: mol_type = other DNA
cagcagcaagcagatgataatgctgcaaaagcattgacaaaatggtggaacgatacagcatcacaaagaatattt

SEQ ID NO: 60476 - DNA, 75 bp, synthetic construct
  source 1..75: mol_type = other DNA
ggaaatgcctgtgaaggtcagcggttttaaacagccgatagataatgcggaatggaccattacgactctgacaca

SEQ ID NO: 60477 - DNA, 75 bp, synthetic construct
  source 1..75: mol_type = other DNA
cccgtaccaggtggcccgcttcgtggagaagccggaccgcgagcgcgccgaggcctacctcgcctccggggagta

SEQ ID NO: 60478 - DNA, 75 bp, synthetic construct
  source 1..75: mol_type = other DNA
attgatccatctggtacatctggtattcaacaggggagtgatatatttgttccagtgacgcatgaaatatcaatt

SEQ ID NO: 60479 - DNA, 75 bp, synthetic construct
  source 1..75: mol_type = other DNA
ttcgttccgtcccctacccaatgctggatatgatcgcccgcagcatggagcgtttaggtcgcaagtcagctaaag

SEQ ID NO: 60480 - DNA, 75 bp, synthetic construct
  source 1..75: mol_type = other DNA
tgcacagaacaagctcagtgtaaacacgctgatgctgaatgcgtattatgatttcagaaacagcagtgcattcac

SEQ ID NO: 60481 - DNA, 75 bp, synthetic construct
  source 1..75: mol_type = other DNA
tggctgagcagaaagcccgcatgtcaggcattaacgatctgtttgccatgttcggcggtcgctatcagacgcttc

SEQ ID NO: 60482 - DNA, 75 bp, synthetic construct
  source 1..75: mol_type = other DNA
aattatcggttcgatgaaagaagcgctgcatccggaaatcgacggctgcgaaggtattctcaatgcgatggcgcg

SEQ ID NO: 60483 - DNA, 75 bp, synthetic construct
  source 1..75: mol_type = other DNA
cctatgatgacgctactaatggtgttactggcgcgactcagaacggtcagctgatcaaagtaacttctgacgcca

SEQ ID NO: 60484 - DNA, 75 bp, synthetic construct
  source 1..75: mol_type = other DNA
actattcaaggcaaagattaccttgctggtgcagacggtaaggatgcaattgaaaacggtggtgacgctgcaaca

SEQ ID NO: 60485 - DNA, 75 bp, synthetic construct
  source 1..75: mol_type = other DNA
tgcgtatcgatcacgtaattcactatagtgataaatctgcggtagacgacttacgttacgcccttagctatctgg

SEQ ID NO: 60486 - DNA, 75 bp, synthetic construct
  source 1..75: mol_type = other DNA
tggggcgataaatataagtcagaagttgatgttaaaagtcatgacatcatgcttggtatgacttataacttctga

SEQ ID NO: 60487 - DNA, 75 bp, synthetic construct
  source 1..75: mol_type = other DNA
cggtttcaaaggcacttgatgataatactgcggcaaaagcaacagataataaagttgttgttgaattatcaacag

SEQ ID NO: 60488 - DNA, 75 bp, synthetic construct
  source 1..75: mol_type = other DNA
ttgtcgcctttgcggcctacgccttattaaagaaacgtactgcagcagaaaaaacaggagaacaaaaagtcacag

SEQ ID NO: 60489 - DNA, 75 bp, synthetic construct
  source 1..75: mol_type = other DNA
ggccagcgcggccattgatattaacgctgacccaaacctgacaggagccgcgccgcttaccggtattctgaacgg

SEQ ID NO: 60490 - DNA, 75 bp, synthetic construct
  source 1..75: mol_type = other DNA
cggcgtggtgacacgctgaccattaatggtgagatattctgggtggatcgtgtttctccggatgacgggggcagc

SEQ ID NO: 60491 - DNA, 75 bp, synthetic construct
  source 1..75: mol_type = other DNA
cgattgcactgggaaatgaccctaaggcagagcgcgataattatcgtgcgatgccaacgcttagtgagttttttc

SEQ ID NO: 60492 - DNA, 75 bp, synthetic construct
  source 1..75: mol_type = other DNA
cccaatgcaacagccccagccgcgcagatacagcaacaaacgaactgacagcagtaagatggagcgtttcttttg

SEQ ID NO: 60493 - DNA, 75 bp, synthetic construct
  source 1..75: mol_type = other DNA
ggaagaagcggcgcgtcacgctgaggaggcgaagaagaatgccggagaggcggagacgtcagcgaggaatgccgg

SEQ ID NO: 60494 - DNA, 75 bp, synthetic construct
  source 1..75: mol_type = other DNA
ggaaaacagaactggcgctggatatcatcgacaaagtgactgaacaggggcgcggtgttcttctgttcacaatgg

SEQ ID NO: 60495 - DNA, 75 bp, synthetic construct
  source 1..75: mol_type = other DNA
acgttgatgaccggtattgatgaactggacgcaaaaacaggcggcatggagcccggcgacctggtatttattgcg

SEQ ID NO: 60496 - DNA, 75 bp, synthetic construct
  source 1..75: mol_type = other DNA
gtaatgaacgtttcaccacctttgaagtggcggagctggttatgccgcgtgttgtaaaaagcaacgacgtgcgtg

SEQ ID NO: 60497 - DNA, 75 bp, synthetic construct
  source 1..75: mol_type = other DNA
tacggctgcaaccgttaccggcataaaccgcctgggagcattctctgttgtggagggtaaagctgataatgtcgt

SEQ ID NO: 60498 - DNA, 75 bp, synthetic construct
  source 1..75: mol_type = other DNA
aaaaactataaccgctgggtgcgtaacctggataaagatatacaggttaacttatctacaggagcaacgttatag

SEQ ID NO: 60499 - DNA, 75 bp, synthetic construct
  source 1..75: mol_type = other DNA
gagaaaacggttgctgaagcgcgccgctatccgtccgaaccacaagaaaacctgctctattttatggagaaaaat

SEQ ID NO: 60500 - DNA, 75 bp, synthetic construct
  source 1..75: mol_type = other DNA
ggtgaggaactgcgccgggtactgctggttaacgggctgtcttatatcagcaccaccggtgaggcacgcgcacgc

SEQ ID NO: 60501 - DNA, 75 bp, synthetic construct
  source 1..75: mol_type = other DNA
aactcgccacgctgtcagatggcacagtctttgggcctgtaaacagttttcagaaaaaccagaagacgctggcga

SEQ ID NO: 60502 - DNA, 75 bp, synthetic construct
  source 1..75: mol_type = other DNA
gcactatctttaccggtatgaccgtcacggcaggctgacagagaaaaccgacctcatcccggaaggggttatccg

SEQ ID NO: 60503 - DNA, 75 bp, synthetic construct
  source 1..75: mol_type = other DNA
ttgatgtgatgctcgaacagcaaaacgaagacggcagcatcgagttgctggaacgttgcccgccaagaatgggaa

SEQ ID NO: 60504 - DNA, 75 bp, synthetic construct
  source 1..75: mol_type = other DNA
tggaaggtgtcagctacataccatacgaagatatcgttggcgtatggactgtatgtcatggacacaccggaaaag

SEQ ID NO: 60505 - DNA, 75 bp, synthetic construct
  source 1..75: mol_type = other DNA
ggtccggtacatgcccggttgctgcgtcaggcactggaactgatcgctgatgcagagtcggccagaaaaaagtag

SEQ ID NO: 60506 - DNA, 75 bp, synthetic construct
  source 1..75: mol_type = other DNA
aggtgccggtatatctcctgcagacagacctgctgaaagatcaactaagcaataacctgcaacgtgaaatgcccg

SEQ ID NO: 60507 - DNA, 75 bp, synthetic construct
  source 1..75: mol_type = other DNA
gagattacagctatccctgaacttcttaacatgctggatattaaaggaaaaatcatcacaactgatgcgatgggt

SEQ ID NO: 60508 - DNA, 75 bp, synthetic construct
  source 1..75: mol_type = other DNA
gacgctggaggtcatggtgccgcaggggcatttcggctatcagccgcaggccgaacgccaggggcgctatctggc

SEQ ID NO: 60509 - DNA, 75 bp, synthetic construct
  source 1..75: mol_type = other DNA
tggcaaaagtcgagtcggaaacccgtgatgcggtgaccattacctttgcggtgccccagcctttgcaggaggcgt

SEQ ID NO: 60510 - DNA, 75 bp, synthetic construct
  source 1..75: mol_type = other DNA
gttgccggaagagatgagcggcaaaaagcagcgtcgccggaagcgttatccggaaactggttatcactaccccga

SEQ ID NO: 60511 - DNA, 75 bp, synthetic construct
  source 1..75: mol_type = other DNA
aacgaggcagttgaaagagctaagcaagatataagcaatgcaactgatatcgatgtatcttctattacgataact

SEQ ID NO: 60512 - DNA, 75 bp, synthetic construct
  source 1..75: mol_type = other DNA
gcggattatgcagaggaagaacttgtcgcggagctgggaagtgcctttctgatggctgatctgggaattgatgga

SEQ ID NO: 60513 - DNA, 75 bp, synthetic construct
  source 1..75: mol_type = other DNA
tcggtcgtcattcctcctatggcgctggcgcgattatttgaatgctacaacatacccgcaggtgattcctgcacg

SEQ ID NO: 60514 - DNA, 75 bp, synthetic construct
  source 1..75: mol_type = other DNA
gatagccagaacaacattatttcccctgctggtggaacattaccgctctctattcctgatgatgcagacagtatc

SEQ ID NO: 60515 - DNA, 75 bp, synthetic construct
  source 1..75: mol_type = other DNA
aaattatttttaataatggttttttaagtataaatagggaagttataattatcttcttgatctactttattctgg

SEQ ID NO: 60516 - DNA, 75 bp, synthetic construct
  source 1..75: mol_type = other DNA
ggtgcttataatgttcagaatatcaataagatatttatttcaggatggcatccaaataaaagccagtcagagctt

SEQ ID NO: 60517 - DNA, 75 bp, synthetic construct
  source 1..75: mol_type = other DNA
ctgaatctcgacctggctgatgacagtttgatggaaacgccgcatcgcatcgctaaaatgtatgtcgatgaaatt

SEQ ID NO: 60518 - DNA, 75 bp, synthetic construct
  source 1..75: mol_type = other DNA
aagaatatccagatggccgtaaggaactggtgagtttcatgactggtacagaaaaagtagttgaggttaagctct

SEQ ID NO: 60519 - DNA, 75 bp, synthetic construct
  source 1..75: mol_type = other DNA
tcaaaatcctggtgccgtccgcactggcgctggcggtgctgatcggtatcaaaagctgtcagccggagacaccgg

SEQ ID NO: 60520 - DNA, 75 bp, synthetic construct
  source 1..75: mol_type = other DNA
aaccggcacaatactccagactccagaagacagaaatacggatgtatacctgactaccatacagaacaatgtatt

SEQ ID NO: 60521 - DNA, 75 bp, synthetic construct
  source 1..75: mol_type = other DNA
ccaaaaggtgatctacagataatatatcaggtagctacaaaaatggtgaatcaggcgatgattgtatccctgcca

SEQ ID NO: 60522 - DNA, 75 bp, synthetic construct
  source 1..75: mol_type = other DNA
taatacagataaaaaaattaaatttatgggtaattgggataatagcgagtatgggcgccagctaaaaaaatatta

SEQ ID NO: 60523 - DNA, 75 bp, synthetic construct
  source 1..75: mol_type = other DNA
tcgctgtagttggcacagtgggtgttcctgcttgttatggtgggtttgaatcacttgttcagaatctaattgatt

SEQ ID NO: 60524 - DNA, 75 bp, synthetic construct
  source 1..75: mol_type = other DNA
ccaaactgcagtttgtctgactccagagcaattaacattattaggctttactgatgagattattgaagtggctca

SEQ ID NO: 60525 - DNA, 75 bp, synthetic construct
  source 1..75: mol_type = other DNA
atggcagccgctgtcagccacgccgctggcagatgtcctgaaacaatgtgcggttccccccgcgctgcccggcaa

SEQ ID NO: 60526 - DNA, 75 bp, synthetic construct
  source 1..75: mol_type = other DNA
atgtatatgtcctccaccagcgattccgccggtagcgtgacaattacccttaccttccagtccgggaccgatcct

SEQ ID NO: 60527 - DNA, 75 bp, synthetic construct
  source 1..75: mol_type = other DNA
atgacaacacaatcccaccatgaccacgtagaaaagcagtttagctcgcaggccagtgagtatttaaccagtacc

SEQ ID NO: 60528 - DNA, 75 bp, synthetic construct
  source 1..75: mol_type = other DNA
acagccatggctggttcccggatacagatggcgcactcatcaccggactgacctttcttgaccccaaagatgcca

SEQ ID NO: 60529 - DNA, 75 bp, synthetic construct
  source 1..75: mol_type = other DNA
tttctgaccaaagtgaatatcgtgccggtcgacgagctgaaaggcgaaaaagtcggggtgggtgttaacggtacg

SEQ ID NO: 60530 - DNA, 75 bp, synthetic construct
  source 1..75: mol_type = other DNA
cttccatctgcgtaaaggtgtgaagtggcacgacaataaagaattcaaaccgacgcgtgaactgaacgccgatga

SEQ ID NO: 60531 - DNA, 75 bp, synthetic construct
  source 1..75: mol_type = other DNA
tgacaaactgactgcgattactgactggaccgctgaaaacgttcatcacgctattcaggcgacggcggatgagct

SEQ ID NO: 60532 - DNA, 75 bp, synthetic construct
  source 1..75: mol_type = other DNA
atggcctatatgctcagcggcgagctggcggtcgatccttccaatgccggcaccacgggtctgctggatctcaaa

SEQ ID NO: 60533 - DNA, 75 bp, synthetic construct
  source 1..75: mol_type = other DNA
ccctcatccttgtcgcacctgccgtggtgcagggggcgccggatatcacgcgtgaaatccagactgacgtggccc

SEQ ID NO: 60534 - DNA, 75 bp, synthetic construct
  source 1..75: mol_type = other DNA
gatggaacagctggagctgcgcgaagaactggacgagatcgaacaggcgaaagatgaagcgcggctggaaagctt

SEQ ID NO: 60535 - DNA, 75 bp, synthetic construct
  source 1..75: mol_type = other DNA
atggatgttgagtacggtcagtacagcgtcattctgttggtggagggatttcctccgtcacatgccgggaccatc

SEQ ID NO: 60536 - DNA, 75 bp, synthetic construct
  source 1..75: mol_type = other DNA
tggtggtgcaaaagcgcggcgcggcggatgcggtgctgccgtccaagctgaccaacattctggccgtgggcggga

SEQ ID NO: 60537 - DNA, 75 bp, synthetic construct
  source 1..75: mol_type = other DNA
gtggtacagggggctccggatatcacccgggaaatccagcaggatatcgcccggcgaatgagggcggagccatga

SEQ ID NO: 60538 - DNA, 75 bp, synthetic construct
  source 1..75: mol_type = other DNA
gcaagcgaatataagatgcaactacctgatgagaaacgactcgcagatgaactcgttcgaacacaggcggtgcta

SEQ ID NO: 60539 - DNA, 75 bp, synthetic construct
  source 1..75: mol_type = other DNA
caatttggatgatgtcagagaaaataatttctatcttcggattaatctttgttacttcttttgtagctaagtatg

SEQ ID NO: 60540 - DNA, 75 bp, synthetic construct
  source 1..75: mol_type = other DNA
atgaccacaacgccaaaaacgactgacgttacggccccccgacgcagccactggtggtggacggtgccaggatgt

SEQ ID NO: 60541 - DNA, 75 bp, synthetic construct
  source 1..75: mol_type = other DNA
ttctgattatttcggtggtttgcgcaattggtattatgcgaattattcattcagtaaaaaagattgaacgttttt

SEQ ID NO: 60542 - DNA, 75 bp, synthetic construct
  source 1..75: mol_type = other DNA
cgtccgcagggtgaagtttatcgtcgttacgatccacgcattcgcaggatgctgagtttccgcattgccgatccc

SEQ ID NO: 60543 - DNA, 75 bp, synthetic construct
  source 1..75: mol_type = other DNA
tcttcacttgatgaaaatcgcgtatcagtttcccataaactaaaattcacacgcccgacaatgcgtggtagtaaa

SEQ ID NO: 60544 - DNA, 75 bp, synthetic construct
  source 1..75: mol_type = other DNA
ggatgatgaaagggcttgatgcccggcggacatcatggcctaaagggagctatatatcgatgttccgtggcagca

SEQ ID NO: 60545 - DNA, 75 bp, synthetic construct
  source 1..75: mol_type = other DNA
agcttaaaaaaacctatccaggcggcgttcaggcgcttcgtggaatagatttgcaggtcgaagcgggtgattttt

SEQ ID NO: 60546 - DNA, 75 bp, synthetic construct
  source 1..75: mol_type = other DNA
ctttttttcatcattaactatcaactggtatcggaacgcgcggtaaaacgtgccgatagccgctttgaacttatt

SEQ ID NO: 60547 - DNA, 75 bp, synthetic construct
  source 1..75: mol_type = other DNA
actggacgccgtggcgattggtgatgtgcgcgacggcggcgatcggctggagaatctggagaagatgatcaacgc

SEQ ID NO: 60548 - DNA, 75 bp, synthetic construct
  source 1..75: mol_type = other DNA
tgaatcaatgctggaagcaacagaagatgctcgtcatccgggctgtccggtatttgccttcatgaaattaccgta

SEQ ID NO: 60549 - DNA, 75 bp, synthetic construct
  source 1..75: mol_type = other DNA
tgccaatcagcgtaaaggccgctgtggtcgtgtgtccgaagggatctgtattcgtctctattccgaagacgattt

SEQ ID NO: 60550 - DNA, 75 bp, synthetic construct
  source 1..75: mol_type = other DNA
atgccagatggttcaattgaacagtggggacgaattagttttcctggtgaacacgggcctgtatccgccaatgtt

SEQ ID NO: 60551 - DNA, 75 bp, synthetic construct
  source 1..75: mol_type = other DNA
cgctggaacagaagcaggcaatgtggaacggtcttcgccgtttactgctgctaaatattccatcgccgatcaagt

SEQ ID NO: 60552 - DNA, 75 bp, synthetic construct
  source 1..75: mol_type = other DNA
ttgtccagcgtcaggcgctcgatttcatcatggccgggttcaacggtaccacccgtgctgacacctcagaccgca

SEQ ID NO: 60553 - DNA, 75 bp, synthetic construct
  source 1..75: mol_type = other DNA
aaaacccgaaactcgaccgcgtggagaactacgagtcaatgaacattgattacgtggtggaagactacgccgccg

SEQ ID NO: 60554 - DNA, 75 bp, synthetic construct
  source 1..75: mol_type = other DNA
ttctgattatttcggtggcctgcgccattgggattatgcgaattattaattcagtaaaaaagattgaacgctttt

SEQ ID NO: 60555 - DNA, 75 bp, synthetic construct
  source 1..75: mol_type = other DNA
cgcaacgaagccccggcgcgcgtgatgagcaaaatcaccgctgagggcggtagcgttatttctgacgtgattcgc

SEQ ID NO: 60556 - DNA, 75 bp, synthetic construct
  source 1..75: mol_type = other DNA
gtgcgtgtgccgtatttcccggcgaatgcggtattcgtgaccacgctggaaaacctctctgtctacttcatggat

SEQ ID NO: 60557 - DNA, 75 bp, synthetic construct
  source 1..75: mol_type = other DNA
ctgccggagatccgcattcgggaaaacttccgcctcaagcccagccagtacgccattttcatcaacggcattaag

SEQ ID NO: 60558 - DNA, 75 bp, synthetic construct
  source 1..75: mol_type = other DNA
cgtttttctcgccgtctgcacggtgtgaagaaggttaaaaatcctgatgcacaacaggccattttccaggagatg

SEQ ID NO: 60559 - DNA, 75 bp, synthetic construct
  source 1..75: mol_type = other DNA
agacaacgacgatccgattatctccccggcgggctcctgcacctacgcggttaaaagctacccgacgtatctggc

SEQ ID NO: 60560 - DNA, 75 bp, synthetic construct
  source 1..75: mol_type = other DNA
gagtttaaatggttgctgctggcgacggcggtatttttgtgggttggtggctggctgtgctggcggttatggcgc

SEQ ID NO: 60561 - DNA, 75 bp, synthetic construct
  source 1..75: mol_type = other DNA
atgattttattcgccgactataacaccccttatcttttcgctatttcctttgtactgttgatcggccttttagaa

SEQ ID NO: 60562 - DNA, 75 bp, synthetic construct
  source 1..75: mol_type = other DNA
ttgcgctgcttaagcacaatggtgacagccgcgcggaaaaccaccgcgaaagctttgagacttgcccggaatgta

SEQ ID NO: 60563 - DNA, 75 bp, synthetic construct
  source 1..75: mol_type = other DNA
tgccgatactgcagaacatcctgacgacgatttatgggcatcattatgttttgccggtcacgatttgatgagtca

SEQ ID NO: 60564 - DNA, 75 bp, synthetic construct
  source 1..75: mol_type = other DNA
gagcgccagatgaccgaaggggagttaaaacgacttgcagaacggcaactggcgaaatgggcaaagcatgttggt

SEQ ID NO: 60565 - DNA, 75 bp, synthetic construct
  source 1..75: mol_type = other DNA
aataaagacccgtacgctattgtgaaaactacgtttcgcggtactaatgcttatggtggagtggttaagcagact

SEQ ID NO: 60566 - DNA, 75 bp, synthetic construct
  source 1..75: mol_type = other DNA
aaccgggtgaaggggatccctttccggctggtgaaagaacgtgtccgggtactgaaagccagtccgtcaggaaaa

SEQ ID NO: 60567 - DNA, 75 bp, synthetic construct
  source 1..75: mol_type = other DNA
atgctatttagcgcagttaccgttaatctcaataaaatcggttttaattttactaccgatcaactctttttatta

SEQ ID NO: 60568 - DNA, 75 bp, synthetic construct
  source 1..75: mol_type = other DNA
ctacggccttgttgcaccatgggttactgcgtcaggcagcactgacgccacaggaaactgcgctgatcagtccta

SEQ ID NO: 60569 - DNA, 75 bp, synthetic construct
  source 1..75: mol_type = other DNA
ggtgaatggtattcaagtaatgttacatgggatgtaaaaaaactatatacaaataaagtcctggttataaataca

SEQ ID NO: 60570 - DNA, 75 bp, synthetic construct
  source 1..75: mol_type = other DNA
gaggctcttgataatcgttcgtcaatggattggtgtgttgctgtccatgatatgaatgcagggtttgatgaaaag

SEQ ID NO: 60571 - DNA, 75 bp, synthetic construct
  source 1..75: mol_type = other DNA
tcgacaacctgaatgcggggctgataagcgcgggcggtagcctggacctgagcgccatcggggatatcagcaata

SEQ ID NO: 60572 - DNA, 75 bp, synthetic construct
  source 1..75: mol_type = other DNA
gtttacggtaaccgcttggggaataactgccaaggggatggctggaaatatcgtggtcgtggcctgcttcaaatc

SEQ ID NO: 60573 - DNA, 75 bp, synthetic construct
  source 1..75: mol_type = other DNA
gagtttggtgtggcgctgacagctgaacagattgctcagcttgacggcagcatactgtggtgggagtcagtcacc

SEQ ID NO: 60574 - DNA, 75 bp, synthetic construct
  source 1..75: mol_type = other DNA
atgcctgatatcgactcgatatctgttgcgttccccgttaaaagcatgcggagtgctgaacattttgtgatgaat

SEQ ID NO: 60575 - DNA, 75 bp, synthetic construct
  source 1..75: mol_type = other DNA
attctgcaattccgggacgttacactgctcaggcaccttataaagcgggtgccgggcgtggaaacccgaaattca

SEQ ID NO: 60576 - DNA, 75 bp, synthetic construct
  source 1..75: mol_type = other DNA
ccagcgtcatggtgccgtcattgcggctcaggcaggagagggcgcgtcagatgccgtggggtataccggggttat

SEQ ID NO: 60577 - DNA, 75 bp, synthetic construct
  source 1..75: mol_type = other DNA
aggcgtgatccctgatatgcgtggctggacgattaagggcaaacccgccagtggtcgtgccgtattgtctcagga

SEQ ID NO: 60578 - DNA, 75 bp, synthetic construct
  source 1..75: mol_type = other DNA
tgaagtgatgagtttctttatttcgcaatcattatatttagagagtcgcgaactttccaatgaagcggaagaagt

SEQ ID NO: 60579 - DNA, 75 bp, synthetic construct
  source 1..75: mol_type = other DNA
gaatgaaccaggcgcagttgccggtgttgccggaattacggttaagtctggaattgaagatttttccattatccc

SEQ ID NO: 60580 - DNA, 75 bp, synthetic construct
  source 1..75: mol_type = other DNA
cgaccaggcgtttgagcgcagctacagccagtcagtcatcacccgtatgaccgaagagcaaattcgtcaactgat

SEQ ID NO: 60581 - DNA, 75 bp, synthetic construct
  source 1..75: mol_type = other DNA
tgtaagccccatggatgttgcgctggacattggtccaggtctggcgaaagcctgtatcgcagggcgcgttaatgg

SEQ ID NO: 60582 - DNA, 75 bp, synthetic construct
  source 1..75: mol_type = other DNA
ggattgaggaacaattaaaaagtattattgaacaaaaagatgtagacatctcaatttttatatcagatgatttat

SEQ ID NO: 60583 - DNA, 75 bp, synthetic construct
  source 1..75: mol_type = other DNA
tgtcgtggtggttcggcattcacccagggcacggaggggacattcagcgagtccacgggggccagtcaggattcg

SEQ ID NO: 60584 - DNA, 75 bp, synthetic construct
  source 1..75: mol_type = other DNA
tcattattgaagcatttccggaaacactggctggtgaaaaaggtcagaatgccgatgtcgtgttattagggccgc

SEQ ID NO: 60585 - DNA, 75 bp, synthetic construct
  source 1..75: mol_type = other DNA
ggaacctgcctgccgatctcgcctggtttaaacgcaacaccttaaataaacccgtgattatgggccgccatacct

SEQ ID NO: 60586 - DNA, 75 bp, synthetic construct
  source 1..75: mol_type = other DNA
tgaccctgcacagcgcggacgggcttaccaacagtggcgcgctgctgagccagaactcgctgacgctgagcgcag

SEQ ID NO: 60587 - DNA, 75 bp, synthetic construct
  source 1..75: mol_type = other DNA
ttactggacccacagccagtcgcagatcgctcgttttgcgctcagggacttgccgggcgttcgctggtcgcctgg

SEQ ID NO: 60588 - DNA, 75 bp, synthetic construct
  source 1..75: mol_type = other DNA
cagagcgtggccgtcagttttgtcgccgcctgggcgattctggcgacggttatctgtgtggttgccggtggtgtc

SEQ ID NO: 60589 - DNA, 75 bp, synthetic construct
  source 1..75: mol_type = other DNA
gacggaagcgacaaatatccgtggcctcagcctgtgctgtaccacatctgcctcgaaatgcgtaccagagggatt

SEQ ID NO: 60590 - DNA, 75 bp, synthetic construct
  source 1..75: mol_type = other DNA
agggagagtgagggcgtttattttgtgcccttcatgacagacggtaacggcgtcaataccgccactaacgcgccg

SEQ ID NO: 60591 - DNA, 75 bp, synthetic construct
  source 1..75: mol_type = other DNA
atgaaattattaaccacagaaacggcgctggatattctgattgcgtggctgcaggacaatattgactgcgaatcg

SEQ ID NO: 60592 - DNA, 75 bp, synthetic construct
  source 1..75: mol_type = other DNA
ccgaagccaatggctcacgtattgagaatgacgcaaataacaacatccagacccgacttggtttccgcaccttta

SEQ ID NO: 60593 - DNA, 75 bp, synthetic construct
  source 1..75: mol_type = other DNA
tttgatcgccataacttaccactccaacgcattgcaatccgaacgtcagatgtatgtctggaccccgccaggata

SEQ ID NO: 60594 - DNA, 75 bp, synthetic construct
  source 1..75: mol_type = other DNA
atcattaaccacggaaaccgcactggatattctgattgcgtggctacaggacaatatcgactgcgaatcgggaat

SEQ ID NO: 60595 - DNA, 75 bp, synthetic construct
  source 1..75: mol_type = other DNA
gagctggttaaccgtgcggcggtgtcgcaggtgccgcgctacgaattcattaaacgcgaaattagctggcaaagt

SEQ ID NO: 60596 - DNA, 75 bp, synthetic construct
  source 1..75: mol_type = other DNA
agatgatgtaaagctattgcgccaggaggaacaggaaaggcggaaaaatatagaaaagttaattcagattgagcg

SEQ ID NO: 60597 - DNA, 75 bp, synthetic construct
  source 1..75: mol_type = other DNA
cgtcctcattgccatcggaaaaggtcacggtaattacatttttattgttaattacagtaacgttatattcttcct

SEQ ID NO: 60598 - DNA, 75 bp, synthetic construct
  source 1..75: mol_type = other DNA
atgtcgtgccagtgcacgcattatgggcgttggcctcaacacggttttacgtcacttaaaaaactcaggccgcag

SEQ ID NO: 60599 - DNA, 75 bp, synthetic construct
  source 1..75: mol_type = other DNA
acaggcgacagctaccagagcgaatcggacctggaacgtgaactgattcaggacctgcggaatcagggctatgaa

SEQ ID NO: 60600 - DNA, 75 bp, synthetic construct
  source 1..75: mol_type = other DNA
accagcgcgatgaacagtagtgcgaaggaatttctggatgcagccattgatgactataacgcctgctttaaaacc

SEQ ID NO: 60601 - DNA, 75 bp, synthetic construct
  source 1..75: mol_type = other DNA
catcggctgcatttacggagatttgtgaatatgaatcaaccacacgcagacaaccttcagggccaacatccagat

SEQ ID NO: 60602 - DNA, 75 bp, synthetic construct
  source 1..75: mol_type = other DNA
caaaatatggacacttaaataatggcggatatggagcgagacccaacaaaccgcctacgcccgatccaagtaaat

SEQ ID NO: 60603 - DNA, 75 bp, synthetic construct
  source 1..75: mol_type = other DNA
caattaggtgatactaaatatacaaagccaataactgaattgcttaagtttgttattgaggctgaaaatacaaaa

SEQ ID NO: 60604 - DNA, 75 bp, synthetic construct
  source 1..75: mol_type = other DNA
atttgataaaaatacaaggtcttcagagcttctgtttaatttttatgagtgttgctataagtttttaccaagagc

SEQ ID NO: 60605 - DNA, 75 bp, synthetic construct
  source 1..75: mol_type = other DNA
ctgatcatgctgcggtctggtgaattttctaaatcgcctattcgagtttcattttgcccgttctgtggtgaaagt

SEQ ID NO: 60606 - DNA, 75 bp, synthetic construct
  source 1..75: mol_type = other DNA
gtgaatatttatcgactctcttttgtatcctgcctggtcgtggcgatgccttgcgcattggcggtcgaattcaac

SEQ ID NO: 60607 - DNA, 75 bp, synthetic construct
  source 1..75: mol_type = other DNA
tctgacgcccgggtgggtgtcattcaatggtgaaaaaccggagattgccatcgtcccccggagtctgcaccggct

SEQ ID NO: 60608 - DNA, 75 bp, synthetic construct
  source 1..75: mol_type = other DNA
tctgctggttcatcatccgatgctggaaggcattctcctgtctgaatgtgaacgtctgaggcagcgttcgctggc

SEQ ID NO: 60609 - DNA, 75 bp, synthetic construct
  source 1..75: mol_type = other DNA
taaataatggcggatatggagcgagacccaacaaaccgcctacgcccgatccaagtaaattgccggacatagcga

SEQ ID NO: 60610 - DNA, 75 bp, synthetic construct
  source 1..75: mol_type = other DNA
tctgacgcccggttgggtgtcattcaatggtgaaaaaccggagattgccatcgtaccccagagcctgcaccggct

SEQ ID NO: 60611 - DNA, 75 bp, synthetic construct
  source 1..75: mol_type = other DNA
ggagaggaagaggttattgctattgtcccccagtgcctgcaccggattatttatggtagagcagcagccccactg

SEQ ID NO: 60612 - DNA, 75 bp, synthetic construct
  source 1..75: mol_type = other DNA
tatgataaatattccgatatggttaaaaagtatgtaatagatggtgaggatcacctaattaaatattatatgtaa

SEQ ID NO: 60613 - DNA, 75 bp, synthetic construct
  source 1..75: mol_type = other DNA
atctttaccggtatgaccgtcacggcaggctgacagagaaaaccgacctcatcccggaaggggttatccgcacgg

SEQ ID NO: 60614 - DNA, 75 bp, synthetic construct
  source 1..75: mol_type = other DNA
tctcttttgtatcctgcctggtcatggcgatgccttccgccatggcggttgaattcaacctgaatgtcctcgaca

SEQ ID NO: 60615 - DNA, 75 bp, synthetic construct
  source 1..75: mol_type = other DNA
aagccgaacagaaagaagttcaggccgagaattcgggggcatatacattcgaaaccattgctcgtgaatggcacg

SEQ ID NO: 60616 - DNA, 75 bp, synthetic construct
  source 1..75: mol_type = other DNA
ctacaaaatggccgatggtggcggtttgtatcttgaggtttcggctaaaggttccaaatactggcgaatgaaata

SEQ ID NO: 60617 - DNA, 75 bp, synthetic construct
  source 1..75: mol_type = other DNA
actggtggggattgtgctctttgtttctattttatggtttaaacaaggcatggcggggtttggcgaactggtgtc

SEQ ID NO: 60618 - DNA, 75 bp, synthetic construct
  source 1..75: mol_type = other DNA
ggaattatcttcgacaacgatgaggataaaacagattcggcagcactgttgccctgtatcgaacaggccagggag

SEQ ID NO: 60619 - DNA, 75 bp, synthetic construct
  source 1..75: mol_type = other DNA
gaacggcgcagagctggccgccgcactggcaccggagctgatggggattaaaaaccagcccgcgatgataaaaaa

SEQ ID NO: 60620 - DNA, 75 bp, synthetic construct
  source 1..75: mol_type = other DNA
ggaaaaccggcggcgcgtcagggcgacatgacgcagtatggcggtagcattgttcagggttcagccggggtgcgc

SEQ ID NO: 60621 - DNA, 75 bp, synthetic construct
  source 1..75: mol_type = other DNA
agcacaacagacggtgcctgtgttggtcgtcgtgctgttgacgagattaaggaatggactgagccgggaaacggt

SEQ ID NO: 60622 - DNA, 75 bp, synthetic construct
  source 1..75: mol_type = other DNA
ggtaatgcggggagttcagcgtgtgctagcgcaaggctgaaagttattgcgtcgaaagaagggtacgaagatggc

SEQ ID NO: 60623 - DNA, 75 bp, synthetic construct
  source 1..75: mol_type = other DNA
aattgctgggaatataggttcttcaattggttcagaaggatcaggagctataatccaagaacagttaaaaaatca

SEQ ID NO: 60624 - DNA, 75 bp, synthetic construct
  source 1..75: mol_type = other DNA
ccgtcaggtggatgcgcacctgaagcgtctgcgtgaactggaagccggtaaggccgccacggcacagccggtgaa

SEQ ID NO: 60625 - DNA, 75 bp, synthetic construct
  source 1..75: mol_type = other DNA
tgatcgaaaataccgaccagcgttctcaggattatagtgcgattaaggacgttttccgtccaggccatgccgatt

SEQ ID NO: 60626 - DNA, 75 bp, synthetic construct
  source 1..75: mol_type = other DNA
gctttgatcgctctgatttagccgttatcgccgcgatgaatcatattggggtggcgatgggaaggaaacgcctgg

SEQ ID NO: 60627 - DNA, 75 bp, synthetic construct
  source 1..75: mol_type = other DNA
tgcattgagtgagggtattaatgcgtctccccgttatccgaaaaactggaagacatccggcgatccggcgcgaga

SEQ ID NO: 60628 - DNA, 75 bp, synthetic construct
  source 1..75: mol_type = other DNA
aacttaatgagcagatgaacctggaactgtactcttcactgctttatcagcaaatgagcgcctggtgcagctatc

SEQ ID NO: 60629 - DNA, 75 bp, synthetic construct
  source 1..75: mol_type = other DNA
gccgttgaactgtcaggacggcttgaggttgcttcacgattacaacagcgaaccacggcaattatgcgctatgcc

SEQ ID NO: 60630 - DNA, 75 bp, synthetic construct
  source 1..75: mol_type = other DNA
tacggtttgttcagtgaagttcgcggcttaggtttgttgattggttgcgtgttgaataccgattacgccgggcaa

SEQ ID NO: 60631 - DNA, 75 bp, synthetic construct
  source 1..75: mol_type = other DNA
tttccagagcaaccatgcgggcggcattcttggcggtatcagcagcgggcagcaaatcattgcccatatggcgct

SEQ ID NO: 60632 - DNA, 75 bp, synthetic construct
  source 1..75: mol_type = other DNA
tgatgccctgtgcgtggtgtttaaagtaggcgcttatggcagggaaataaaagggggtattcctgaagaatgcca

SEQ ID NO: 60633 - DNA, 75 bp, synthetic construct
  source 1..75: mol_type = other DNA
atgggatgctttgtctgttcttgttaaagcccttttcagcagtgaagtaaaaatatcgacagtcaatgcactgag

SEQ ID NO: 60634 - DNA, 75 bp, synthetic construct
  source 1..75: mol_type = other DNA
gagctgggaatggacagcgacgaagtgctgcgcctgaagcaaattaacggcctgcaagagttgtttgccgaccgt

SEQ ID NO: 60635 - DNA, 75 bp, synthetic construct
  source 1..75: mol_type = other DNA
tcgcctggcaacaactcgtcgaaaaaagccagctcatgttacgcctggcaacggaagaacaatgggacgaactca

SEQ ID NO: 60636 - DNA, 75 bp, synthetic construct
  source 1..75: mol_type = other DNA
tatcgacagccaacgggatgcccaacgcattctatattccattaaaaatgaggcggtaaatgccattatcgccac

SEQ ID NO: 60637 - DNA, 75 bp, synthetic construct
  source 1..75: mol_type = other DNA
cacacagtgacttaccctgcgcaacggaagatgccaccggcagccggaaaaccatgacatggagccgttacggtc

SEQ ID NO: 60638 - DNA, 75 bp, synthetic construct
  source 1..75: mol_type = other DNA
ctagcggctttaacgaggccgctgcagcattttcatggaacggcccgaaaaaggccattaacccttatctggacc

SEQ ID NO: 60639 - DNA, 75 bp, synthetic construct
  source 1..75: mol_type = other DNA
ctatttgcgtgagacgattaagccatgtctggagcgactggattgtgtacgtgacagtcagctatctgtttcttt

SEQ ID NO: 60640 - DNA, 75 bp, synthetic construct
  source 1..75: mol_type = other DNA
gtaaatatcacctcatcagaaccgcttatgaaatcaacgaagagccaaccgcctatggcgatcacggtattcgta

SEQ ID NO: 60641 - DNA, 75 bp, synthetic construct
  source 1..75: mol_type = other DNA
aaatgagtcaggatcaggtgaagcgcctgtctacccttgtcgctgcgcatatgagcatgtgccttgatgccgctt

SEQ ID NO: 60642 - DNA, 75 bp, synthetic construct
  source 1..75: mol_type = other DNA
gcggctgcgtcgtctgccagtgctgcgtcaacaagtgccgggcaggcctcagccagtgccaccgctgccggaaaa

SEQ ID NO: 60643 - DNA, 75 bp, synthetic construct
  source 1..75: mol_type = other DNA
gaacaaagactaatgcgtcgataatctctatttttcaaagattttcagacatatctatcatgataattacactat

SEQ ID NO: 60644 - DNA, 75 bp, synthetic construct
  source 1..75: mol_type = other DNA
gctgtggccggatattgaactggtcagcggacagcgtctgctgaaactgctgaacgggcgattactgaccggtga

SEQ ID NO: 60645 - DNA, 75 bp, synthetic construct
  source 1..75: mol_type = other DNA
tatttaaccaaacgctgtgggccggaagagttagtgcaggcggtgcgctcggtcgggctgggcgggcattatctc

SEQ ID NO: 60646 - DNA, 75 bp, synthetic construct
  source 1..75: mol_type = other DNA
aacagatcggcagttattcaaaacagattcgttcagcaatcgaagacggtgtagtggaaccgcatgagaagacag

SEQ ID NO: 60647 - DNA, 75 bp, synthetic construct
  source 1..75: mol_type = other DNA
tgagccgccgctttcaccagaacagaaaatatcagatgcagaaaacatgaaagccacatttcgtgcaaaagctga

SEQ ID NO: 60648 - DNA, 75 bp, synthetic construct
  source 1..75: mol_type = other DNA
tgacattgcaaaatatttaatgtgcatagctatgattcttggtcgccttgaaatttatcctgttattatattgtt

SEQ ID NO: 60649 - DNA, 75 bp, synthetic construct
  source 1..75: mol_type = other DNA
acaaaagatttaaaaacagacacaaaactgaaaaaaatgtttgctcggtggtttatcggcattctgataggccag

SEQ ID NO: 60650 - DNA, 75 bp, synthetic construct
  source 1..75: mol_type = other DNA
tcttggatgttctgccagcattagcaatataggtgaagtatacgaagggaaagatataactgatagagcagaaag

SEQ ID NO: 60651 - DNA, 75 bp, synthetic construct
  source 1..75: mol_type = other DNA
caggtggaagtctcgccaaacagcgttcagggctatgactacgaagcggatggtaatggcatcgtactgttaccg

SEQ ID NO: 60652 - DNA, 75 bp, synthetic construct
  source 1..75: mol_type = other DNA
cggcagaccaaacccaacttggacaaatgcgacggtaagacaaagcagcgattatctggtcggcatgtttgctgc

SEQ ID NO: 60653 - DNA, 75 bp, synthetic construct
  source 1..75: mol_type = other DNA
ctgttcgatcgtccctgcgcatccgtggatttatgggctgggacagcagacagcgaacggggcatatctcagccc

SEQ ID NO: 60654 - DNA, 75 bp, synthetic construct
  source 1..75: mol_type = other DNA
atgagctgaagagtgcccgggagcaacaaaaaaggcgcgatgaacgcgctgatggttccgtcccgctgaaactgt

SEQ ID NO: 60655 - DNA, 75 bp, synthetic construct
  source 1..75: mol_type = other DNA
gggccccctgaactggacatacgacaaaacatcaggcacaggtaccctgagccagggcagtaaaaactggaccat

SEQ ID NO: 60656 - DNA, 75 bp, synthetic construct
  source 1..75: mol_type = other DNA
atgcgttggcaagggcgacgtgaaagtgacaatgttgaagacaggcgcaatagctccggcggtccgtcaatgggc

SEQ ID NO: 60657 - DNA, 75 bp, synthetic construct
  source 1..75: mol_type = other DNA
ccaggcagacgttggcgcagtggtttgaagagaagggatttcagaagggatttcagaagggatataaagagggac

SEQ ID NO: 60658 - DNA, 75 bp, synthetic construct
  source 1..75: mol_type = other DNA
cccaccgttcgttgtttgcacagtaccctgaattacgcccggcaggaaataatcgtcatcgctgggctgaactgg

SEQ ID NO: 60659 - DNA, 75 bp, synthetic construct
  source 1..75: mol_type = other DNA
gcgcgcattatcgaacctgccgttaacccggcactgattggcgcggtgaaagttccggatggcaccgttgatcca

SEQ ID NO: 60660 - DNA, 75 bp, synthetic construct
  source 1..75: mol_type = other DNA
agaaagctggatacgcatcgtattaggtaacactgtaacagtgggtagcggagcgaccattttaagcacagaaat

SEQ ID NO: 60661 - DNA, 75 bp, synthetic construct
  source 1..75: mol_type = other DNA
agcattctcatggagcagcccgaaaaaggccattaacccttatctggacccggcggaagttgcgccggtttctgc

SEQ ID NO: 60662 - DNA, 75 bp, synthetic construct
  source 1..75: mol_type = other DNA
agagcttgttgcagataactccacgtttctgatgcataccaacaacagccaggcagatcatctgaatgtcacgga

SEQ ID NO: 60663 - DNA, 75 bp, synthetic construct
  source 1..75: mol_type = other DNA
ctggatatctgcagtttgcaaacgattacaaggtgtctgccctgaacgggcagacatggatgggaggaggagtta

SEQ ID NO: 60664 - DNA, 75 bp, synthetic construct
  source 1..75: mol_type = other DNA
ataaccttacctttacccggattcaggcggctgactacggagccatcattaccaataccagcgagaaaaaatcaa

SEQ ID NO: 60665 - DNA, 75 bp, synthetic construct
  source 1..75: mol_type = other DNA
ggacgccttatttacacaattggctcggagctacagcgatacaccattatcgccggattacaggataaatacctg

SEQ ID NO: 60666 - DNA, 75 bp, synthetic construct
  source 1..75: mol_type = other DNA
gcgacacgctggatatggaagacgtggtaaacgccagcagcagcaaccctgcacatcgccgcaatgagatgatgg

SEQ ID NO: 60667 - DNA, 75 bp, synthetic construct
  source 1..75: mol_type = other DNA
atgtcagccagtacaaaaaatcatcttaacgtacaatatcttccgtttcccaaacggagcccaccaacgacggag

SEQ ID NO: 60668 - DNA, 75 bp, synthetic construct
  source 1..75: mol_type = other DNA
gcatctccctatgtcagctatgaagcagtgacgcataaacgtgagcagcgccgcaagtcgctggagtttttccgt

SEQ ID NO: 60669 - DNA, 75 bp, synthetic construct
  source 1..75: mol_type = other DNA
gttacagaggctatacagtcgctttctgaagtcactgagaggggtttaatagatgttgatgaggttatcatatag

SEQ ID NO: 60670 - DNA, 75 bp, synthetic construct
  source 1..75: mol_type = other DNA
tggatatcgcttatctttctgaaattgaccccacctggacggacagcagcctgaccaccattctcaatccggaag

SEQ ID NO: 60671 - DNA, 75 bp, synthetic construct
  source 1..75: mol_type = other DNA
tgaagtacgaagagcgtataatcgctccacctacatagcgcaacgtattgaattaatgagttggtggggaaaata

SEQ ID NO: 60672 - DNA, 75 bp, synthetic construct
  source 1..75: mol_type = other DNA
aattaccgtagccctgaagtgttgctggcgatggtggatgttttactctgttaccttgcgaaaggtgctgagtac

SEQ ID NO: 60673 - DNA, 75 bp, synthetic construct
  source 1..75: mol_type = other DNA
caaagtttttaaacagtaaaaaaacgtttgaatgggatgaactggtcgttttgttttcctctttgggatatgtca

SEQ ID NO: 60674 - DNA, 75 bp, synthetic construct
  source 1..75: mol_type = other DNA
ttcggactgctcatggcctctttccactggtggcgcaggaaagttaaccggctgccaccatggaatgatgtgtaa

SEQ ID NO: 60675 - DNA, 75 bp, synthetic construct
  source 1..75: mol_type = other DNA
gaaatatatgttcatatactttttttatggtgaatttatttatcttaattttatccgtaatcaatgaaggttttt

SEQ ID NO: 60676 - DNA, 75 bp, synthetic construct
  source 1..75: mol_type = other DNA
atggctcagaatgatttagttttagctaacattccgtttagccaggctggaactgtaaggcacagagatgcctat

SEQ ID NO: 60677 - DNA, 75 bp, synthetic construct
  source 1..75: mol_type = other DNA
tgcgccgtcagtcgcaatctttttacggcgatcaggctgagcaatcgctgcaaaattaccacttcgatatgctgt

SEQ ID NO: 60678 - DNA, 75 bp, synthetic construct
  source 1..75: mol_type = other DNA
atggcgcgtatcacacgccccctcactaacaatgaaatccttaaagccaaaccccgtgaaaaagacttcaccctt

SEQ ID NO: 60679 - DNA, 75 bp, synthetic construct
  source 1..75: mol_type = other DNA
atgcatcagcctcccgttcacttcacttaccgcctgctgagttacctggtgagcagtctgcttgcgacgcagcct

SEQ ID NO: 60680 - DNA, 75 bp, synthetic construct
  source 1..75: mol_type = other DNA
catcaggtggcgctggaaatcaataattcctcatttttacactcacgtaagggcagtgaagacaattgtcgtgcg

SEQ ID NO: 60681 - DNA, 75 bp, synthetic construct
  source 1..75: mol_type = other DNA
taaaacgctgaacgtattcattggcgataatggcccgggctggcctgaggcattgttgccttcgttattgaagcc

SEQ ID NO: 60682 - DNA, 75 bp, synthetic construct
  source 1..75: mol_type = other DNA
gctggcactgtccctgatttacccgcagagcgtggccgtcagttttgtcgctgcctgggcgattctggcgacggt

SEQ ID NO: 60683 - DNA, 75 bp, synthetic construct
  source 1..75: mol_type = other DNA
taaaattgccggggcatcagcacagcgtacagcacgtgaaaatctggatatctatgatgccagcctgaacaaaaa

SEQ ID NO: 60684 - DNA, 75 bp, synthetic construct
  source 1..75: mol_type = other DNA
agcttcggggaccagttcaagggcaacatgccgggcggaatgatttcggcggcaggcaacagcggccatgccgaa

SEQ ID NO: 60685 - DNA, 75 bp, synthetic construct
  source 1..75: mol_type = other DNA
gctggatctgattattgccggttttcatgagccggtttttgcgccacatgacaaagcgaccaatacacaagcgat

SEQ ID NO: 60686 - DNA, 75 bp, synthetic construct
  source 1..75: mol_type = other DNA
ctggactatctggccgaccgccggatgctggaactggtgaaggagccgtccggcacctggttcggtgatttaacc

SEQ ID NO: 60687 - DNA, 75 bp, synthetic construct
  source 1..75: mol_type = other DNA
tcgggctgaaaccggaaaaagattatcgcttcctgggggatgccgcttttgatacccgctatgtatcgaactata

SEQ ID NO: 60688 - DNA, 75 bp, synthetic construct
  source 1..75: mol_type = other DNA
ctaacattccgtttagccaggctggaactgtaaggcacagagatgcctatgaagcatatgttcgtggttggcgat

SEQ ID NO: 60689 - DNA, 75 bp, synthetic construct
  source 1..75: mol_type = other DNA
cgaccccgaacgtatccgtagttgacctgaccgttcgtctggaaaaagctgcaacttacgagcagatcaaagctg

SEQ ID NO: 60690 - DNA, 75 bp, synthetic construct
  source 1..75: mol_type = other DNA
agttatcaacgataacttcggcatcatcgaaggtctgatgaccaccgttcacgctactaccgctactcagaaaac

SEQ ID NO: 60691 - DNA, 75 bp, synthetic construct
  source 1..75: mol_type = other DNA
atgaatgctttacagagagtggcaggtggtaccgcgccgtatattgctgaaattatcaaacagaccaccccggac

SEQ ID NO: 60692 - DNA, 75 bp, synthetic construct
  source 1..75: mol_type = other DNA
acggttgaggatggcagtggtaacctgatcgaaggtctcactgtgtacttcgccttaaaaagcggctctgccaca

SEQ ID NO: 60693 - DNA, 75 bp, synthetic construct
  source 1..75: mol_type = other DNA
cgaagccgcagaggaagagcagcaaatcgctctggaaagtattttttcaacggtcgccgctaactggttcaagct

SEQ ID NO: 60694 - DNA, 75 bp, synthetic construct
  source 1..75: mol_type = other DNA
caatctaaagattttagctgcgatcaatctaaaattaaaatagctgagaccttatttttcaatctcgataaagaa

SEQ ID NO: 60695 - DNA, 75 bp, synthetic construct
  source 1..75: mol_type = other DNA
atctacagcgatctggagcagttgagccgggtaattatggaagggcatcagggcgatgagtatgacgaggcgctc

SEQ ID NO: 60696 - DNA, 75 bp, synthetic construct
  source 1..75: mol_type = other DNA
tctcggtggtatccgtggtgttcctgccaccgacgctggtggcttccagctacgggatgaactttgaatttatgc

SEQ ID NO: 60697 - DNA, 75 bp, synthetic construct
  source 1..75: mol_type = other DNA
cccggaaagctggtagtggaagatccactgccgcccgtcgcccacataaactgcatccagtgcagcaccgcgcat

SEQ ID NO: 60698 - DNA, 75 bp, synthetic construct
  source 1..75: mol_type = other DNA
accatgctcaacggtgtgaaacgctatgctgcctgggtgcgtgtctcaggaaataccggcacccagttcgtgaag

SEQ ID NO: 60699 - DNA, 75 bp, synthetic construct
  source 1..75: mol_type = other DNA
atgacgatggagccgggggagtatgcggtttccgtaacggtgagaggtaaaagccaggtctatggccgggtacgc

SEQ ID NO: 60700 - DNA, 75 bp, synthetic construct
  source 1..75: mol_type = other DNA
cctccgccttcatcagtggtaaggcaccggaaatcaaaccctcgcccggcggcaacacgccatcgggtccgtctg

SEQ ID NO: 60701 - DNA, 75 bp, synthetic construct
  source 1..75: mol_type = other DNA
tctggtcgaggtgagtatcagtgatgaactgctgacagatttccggcagatacagaacaacgttgcagatgacct

SEQ ID NO: 60702 - DNA, 75 bp, synthetic construct
  source 1..75: mol_type = other DNA
atgaagatgttatctggcgaacgcatctccagccacaggatgctgggcttgcacaagccgtacgtgcgacgatcg

SEQ ID NO: 60703 - DNA, 75 bp, synthetic construct
  source 1..75: mol_type = other DNA
acgacacgctgtcatcgggtcaaaatggcccaatgatcttacagagaatacaacagagattactacagagaataa

SEQ ID NO: 60704 - DNA, 75 bp, synthetic construct
  source 1..75: mol_type = other DNA
ataccgaatatgttttcaaccctgaaacacgacagaatgatattctgtcatatcagagttatgttgtcttacccg

SEQ ID NO: 60705 - DNA, 75 bp, synthetic construct
  source 1..75: mol_type = other DNA
taccaacggcaaaatcaactggggcattggcataggccttgcggggagtacttatgataataactacccggaaga

SEQ ID NO: 60706 - DNA, 75 bp, synthetic construct
  source 1..75: mol_type = other DNA
agggagagcgcggacctcagggcataccgggccagaaaggtgatacaggagaacggggacctcagggagtgcagg

SEQ ID NO: 60707 - DNA, 75 bp, synthetic construct
  source 1..75: mol_type = other DNA
gttcggacaacttccgtgcctcttctattcagggcattatgaagcgcatcaaggcaaaaggtattccggttatta

SEQ ID NO: 60708 - DNA, 75 bp, synthetic construct
  source 1..75: mol_type = other DNA
cacgcagggcaaccggcctgatgacccgcagcaactacagcacggtgaacaatatcacccggggtaaacacagcg

SEQ ID NO: 60709 - DNA, 75 bp, synthetic construct
  source 1..75: mol_type = other DNA
tttactggtatttcagtttctacagatacagatatgtatacgccaagtgaaatcgattatacaccagaaattcat

SEQ ID NO: 60710 - DNA, 75 bp, synthetic construct
  source 1..75: mol_type = other DNA
ggaacttgcgcagcaatttgttgacaaaaatgaactagagaaagctgccgcccagttacaacaggggctggcaga

SEQ ID NO: 60711 - DNA, 75 bp, synthetic construct
  source 1..75: mol_type = other DNA
tacgttattatcgcgacgccaacggattacgaccctaaaactaactattttaatacgtccagcgttgagtcggtt

SEQ ID NO: 60712 - DNA, 75 bp, synthetic construct
  source 1..75: mol_type = other DNA
gtgtagatatgctcaatgagcgtatctcgcccattgtggacaaggagatccagcagtatctgcgttcaggggagc

SEQ ID NO: 60713 - DNA, 75 bp, synthetic construct
  source 1..75: mol_type = other DNA
agtgctaaagatgcaaaaagcacacagaaagcctggaattgtcgtcactccagacagtcaaacgataaaaaaaga

SEQ ID NO: 60714 - DNA, 75 bp, synthetic construct
  source 1..75: mol_type = other DNA
atgaaaacattacccgtcaccatctggcagacactgctcacccgactgctggaccagcactacggcctcacgctg

SEQ ID NO: 60715 - DNA, 75 bp, synthetic construct
  source 1..75: mol_type = other DNA
gctatgtcggtctctcgaacggcctgctgattgcgcaaaaccatgacgtcgtggcgctggatatcattccttcac

SEQ ID NO: 60716 - DNA, 75 bp, synthetic construct
  source 1..75: mol_type = other DNA
gctgtaatgcaacttagtgctgatatggcactgaatgaggccagcaaaattatcatggctgatatggaggtggtg

SEQ ID NO: 60717 - DNA, 75 bp, synthetic construct
  source 1..75: mol_type = other DNA
tgggataacagtccaatggaacgcttcttccgcagtctgaaaacagaatgggtgccaaccgatggctacacaggc

SEQ ID NO: 60718 - DNA, 75 bp, synthetic construct
  source 1..75: mol_type = other DNA
ccgctgctcggcgcgaaggtccttcccggcgaaaccgaccttgccctgcccggcccgctgccgttcatcctctcc

SEQ ID NO: 60719 - DNA, 75 bp, synthetic construct
  source 1..75: mol_type = other DNA
acatccaggcggcgcactgggtcgtaaacttctgctgcgcgtaaacgatattatgcatacgggcgatgagatccc

SEQ ID NO: 60720 - DNA, 75 bp, synthetic construct
  source 1..75: mol_type = other DNA
atcatcatctgacccgtatcgccacgttttgcgcgctgctgtattgcaatactgctttcagtgctgaactcgttg

SEQ ID NO: 60721 - DNA, 75 bp, synthetic construct
  source 1..75: mol_type = other DNA
accggactgatgacccgaaacgattacagaacggtgaccgacatcaccaccggtaaataccgggaggtgcagcca

SEQ ID NO: 60722 - DNA, 75 bp, synthetic construct
  source 1..75: mol_type = other DNA
ttcaaaaaaatccgaagttcaggatgttaagaaaattgttcaaatgcttaaaatgcaagaacgttctgaatatct

SEQ ID NO: 60723 - DNA, 75 bp, synthetic construct
  source 1..75: mol_type = other DNA
aaggaccccaactattccagataaagtaaaagcagactatgtgcgaaccgctcaaaagttgggattcaatgtcaa

SEQ ID NO: 60724 - DNA, 75 bp, synthetic construct
  source 1..75: mol_type = other DNA
gtcacgacagataaagatacagataaagaattaaaccccacacataacgcgcacgtgcgcgagagtgctccgacc

SEQ ID NO: 60725 - DNA, 75 bp, synthetic construct
  source 1..75: mol_type = other DNA
caggtacagcctggtgttgataatgcctggcgtgaatcccgtggcgatattggtaaaggaatggagagcgtacct

SEQ ID NO: 60726 - DNA, 75 bp, synthetic construct
  source 1..75: mol_type = other DNA
tatctggcggcgctagtcgtcattttgttgaacaggctgcttgatggtctggacggtgcgctggcgcggcgcaga

SEQ ID NO: 60727 - DNA, 75 bp, synthetic construct
  source 1..75: mol_type = other DNA
tatgcgggcgatacgcagaacagttcttccagtgcagttaccgaaagcctggcaaaatccggcaaagagacgaac

SEQ ID NO: 60728 - DNA, 75 bp, synthetic construct
  source 1..75: mol_type = other DNA
atggcgactaccaacaaaaacgctaaatcacaattgaccaccgtcagagtcccccacgatgttatggagggcatg

SEQ ID NO: 60729 - DNA, 75 bp, synthetic construct
  source 1..75: mol_type = other DNA
taatgactctgcggtagagacggacgtggtggggctgggggtcgaattgcagcaaaacggtcagcgttttcaaca

SEQ ID NO: 60730 - DNA, 75 bp, synthetic construct
  source 1..75: mol_type = other DNA
aagccttacctgatgatttactgcaacgcctgcaagagcatttcaccgttcaccaggtggcaaacctcagcccac

SEQ ID NO: 60731 - DNA, 75 bp, synthetic construct
  source 1..75: mol_type = other DNA
gaatccgtaaaactggacggtgaaagcaacgccggattcatagtaaccgccatgcgcggtgaaatcgcccgccgc

SEQ ID NO: 60732 - DNA, 75 bp, synthetic construct
  source 1..75: mol_type = other DNA
ggtaatcgctatcgtaggatttgtagctggtaaggttattttttctgacaatgtagtgtttaggcgaagaatgta

SEQ ID NO: 60733 - DNA, 75 bp, synthetic construct
  source 1..75: mol_type = other DNA
gcttcctgtcggcaggcgctgcgcttgccgccgtacctctgctccacagccccgctgcacgcgcgctggggcgta

SEQ ID NO: 60734 - DNA, 75 bp, synthetic construct
  source 1..75: mol_type = other DNA
tcttgtggcgctggcggcggagaatgcacttgctcgtaaagcagttcaggcattctgcgatgttgttggcgacaa

SEQ ID NO: 60735 - DNA, 75 bp, synthetic construct
  source 1..75: mol_type = other DNA
aagcaaatagaaaactaacagcggtattggcaaagtatcattttgctccaactttttcttcaaaagaaaatttaa

SEQ ID NO: 60736 - DNA, 75 bp, synthetic construct
  source 1..75: mol_type = other DNA
gggaatccggtgccggtgccttacggtgaaatgctggttggttcacgacggatatcccaggacatcagcacccgt

SEQ ID NO: 60737 - DNA, 75 bp, synthetic construct
  source 1..75: mol_type = other DNA
aacacctacctggcgatgcgcgtggcgtactttaacgaactggatagctacgcagaaagtttaggtctgaattcc

SEQ ID NO: 60738 - DNA, 75 bp, synthetic construct
  source 1..75: mol_type = other DNA
aacgccagcggccccatggcgcaagtgattggccgcatggaggccatctccgccgataccggctgttctatcgtg

SEQ ID NO: 60739 - DNA, 75 bp, synthetic construct
  source 1..75: mol_type = other DNA
tggttcaggcggtatgacggcggagtgctcaagcccgccgtgctggaaaagcagcgcaagagcaagggggtgccc

SEQ ID NO: 60740 - DNA, 75 bp, synthetic construct
  source 1..75: mol_type = other DNA
tgcattgtagatgcttctattagcaacaataaacagacaaagccaatcaaattagttaaagctgatggtgtatgg

SEQ ID NO: 60741 - DNA, 75 bp, synthetic construct
  source 1..75: mol_type = other DNA
gatttttaaaaagcagaaagtggatgataaggtgctgtttatcgacgccagccgcgaattcaaggcgggtaaaaa

SEQ ID NO: 60742 - DNA, 75 bp, synthetic construct
  source 1..75: mol_type = other DNA
ttgcctcggaagataaagatacccgtgccgtgttcggtgattatgtctctatctacgatattcaggatgcggttg

SEQ ID NO: 60743 - DNA, 75 bp, synthetic construct
  source 1..75: mol_type = other DNA
ttcctgcatggtctgaaattccaccaccaacacatgaggaacagattgctgcagccgaactggaaaagcagcaac

SEQ ID NO: 60744 - DNA, 75 bp, synthetic construct
  source 1..75: mol_type = other DNA
agatgcctggcgtgatgattcgcgacagagatttaaagaagcctttcgggtgttgaggccgcacggcgttctgat

SEQ ID NO: 60745 - DNA, 75 bp, synthetic construct
  source 1..75: mol_type = other DNA
aacataatatcaaagcatggcgcactaaggtacgatgcctttcctcgtttcgaactgattgatatgtacaaattg

SEQ ID NO: 60746 - DNA, 75 bp, synthetic construct
  source 1..75: mol_type = other DNA
tgagcattattccggtcgtgcaacatgggatattcggaagccgtatatagataaagtgttggtcattaattcatc

SEQ ID NO: 60747 - DNA, 75 bp, synthetic construct
  source 1..75: mol_type = other DNA
cgatattagctcttaccttcatggcaacgagtactcatgcagccccccataatggagtgacttatgaaagccttg

SEQ ID NO: 60748 - DNA, 75 bp, synthetic construct
  source 1..75: mol_type = other DNA
ctacgaatcccgcttggcaaagctcgacctgaaccatgaggagctggaaacgctctccgatcaggtggatgagct

SEQ ID NO: 60749 - DNA, 75 bp, synthetic construct
  source 1..75: mol_type = other DNA
accaacactggcatcgctcctgcttgaatcacgcaaccccaaatggtcccaggaacaacaaaattctttcaagtg

SEQ ID NO: 60750 - DNA, 75 bp, synthetic construct
  source 1..75: mol_type = other DNA
cgctgggtgcttttgcaaaaaaacattcttttagtcaacatcagttatttacactattggccgctaaaaatcatg

SEQ ID NO: 60751 - DNA, 75 bp, synthetic construct
  source 1..75: mol_type = other DNA
ataaaaatattcttatttgctatccgtatggtaactatgaatatgacaatattatctatgttgaaaagaaaacta

SEQ ID NO: 60752 - DNA, 75 bp, synthetic construct
  source 1..75: mol_type = other DNA
cggatgtactgcagcaggcggtgaatgatgcggttgcgaatattccggtaccggcggacggcaaaagtattaccc

SEQ ID NO: 60753 - DNA, 75 bp, synthetic construct
  source 1..75: mol_type = other DNA
tgattggcaaaatctggccgggatttttaactctcggtggtgatttcacgctgttagggctttctctaccgggct

SEQ ID NO: 60754 - DNA, 75 bp, synthetic construct
  source 1..75: mol_type = other DNA
acaaaaccactcacggcggctctgttatgacctgttcagacaccatgatatttggtgggattggcgtggcacgta

SEQ ID NO: 60755 - DNA, 75 bp, synthetic construct
  source 1..75: mol_type = other DNA
tcaataaagcacttgagcgctttcattttcgcataagcgcatcaggcactcatgctgaactcgcagcccgagagt

SEQ ID NO: 60756 - DNA, 75 bp, synthetic construct
  source 1..75: mol_type = other DNA
atgggcaaagaatataaaactctcattaacaaagcacttgagcgtttttattttcgcttaagcgcatcaggcgct

SEQ ID NO: 60757 - DNA, 75 bp, synthetic construct
  source 1..75: mol_type = other DNA
cgggcaacctttgccggatgatgccgacctgcgtaaagagcgcagcgacgaaatcccggaagcggcaaaagagat

SEQ ID NO: 60758 - DNA, 75 bp, synthetic construct
  source 1..75: mol_type = other DNA
agcggtaatgaaagtgacccgtcaaccgtgacgtcaaaaactgatggtgtggcagatgccccggttctgagcatt

SEQ ID NO: 60759 - DNA, 75 bp, synthetic construct
  source 1..75: mol_type = other DNA
acaaaggtacccagcatgatggctaccgtgagacagtcatcattgcggcttcatcgacggtatttattgatggat

SEQ ID NO: 60760 - DNA, 75 bp, synthetic construct
  source 1..75: mol_type = other DNA
cacggatagcaataatatccgcgattataaaacgggagtagtcccgtgttttggagagctttaccaggaagatgt

SEQ ID NO: 60761 - DNA, 75 bp, synthetic construct
  source 1..75: mol_type = other DNA
cgactggccgccgtgcaacgggccatgcagcagggggccgcgaatgatgactggtttatgccggaggctgcgtaa

SEQ ID NO: 60762 - DNA, 75 bp, synthetic construct
  source 1..75: mol_type = other DNA
tgcgtgaagcggcagaacgcgcaattccggcaatggaacgcctgttaacgttgccagccgatgatgacttgttaa

SEQ ID NO: 60763 - DNA, 75 bp, synthetic construct
  source 1..75: mol_type = other DNA
acgccatgccagtgaacgttgatgaatggctggcaagccccgccagtgaaggctggcgtctgctgtggctgacgc

SEQ ID NO: 60764 - DNA, 75 bp, synthetic construct
  source 1..75: mol_type = other DNA
atgatgccagaaattggtaacgggctgctgtgtctggcgctaggaattgcgctgctgctgtccgtgtatccgcta

SEQ ID NO: 60765 - DNA, 75 bp, synthetic construct
  source 1..75: mol_type = other DNA
accaggcacaacagccaggatagcgacaaaaggcgacctgatgatagtgatgttccgacaggagaaagcaaatgg

SEQ ID NO: 60766 - DNA, 75 bp, synthetic construct
  source 1..75: mol_type = other DNA
tcaatgcgtagtaggcgcgctgattgttagcggaattggctggttcgccgccaaaaatgacgcagaccgtcagca

SEQ ID NO: 60767 - DNA, 75 bp, synthetic construct
  source 1..75: mol_type = other DNA
taatgtgccggtcggtctggcgatgccactttcactgacgacccgtatcgggcatgcaatggtggccagttacga

SEQ ID NO: 60768 - DNA, 75 bp, synthetic construct
  source 1..75: mol_type = other DNA
tccgtgaccgttccgggcgcaccatcgccggcgataaaaccgatgaatggctgcaaccagcctgtaatgaaatgt

SEQ ID NO: 60769 - DNA, 75 bp, synthetic construct
  source 1..75: mol_type = other DNA
agggctggaaatattcaggcaatcgtcatcacccgacggaaaagcctgttagcagcctgcaaccgctgattgaga

SEQ ID NO: 60770 - DNA, 75 bp, synthetic construct
  source 1..75: mol_type = other DNA
cagtattcttattgcctgtgctgggtgatattggttttgctaacaccaccttcagtgatgctgactttggcgcac

SEQ ID NO: 60771 - DNA, 75 bp, synthetic construct
  source 1..75: mol_type = other DNA
tcgctggcccgtcgattgtcgggcatgctctccgcagggctgcattttgatcacagtattatcaatgacccgaat

SEQ ID NO: 60772 - DNA, 75 bp, synthetic construct
  source 1..75: mol_type = other DNA
gacggctttaaatattcacattgcacatgcgcttgcgccttcaaaaaaaaccggacaagcattcatcctttcgcc

SEQ ID NO: 60773 - DNA, 75 bp, synthetic construct
  source 1..75: mol_type = other DNA
gacggagaggttatgctgacctgtcattttcgcagcgggaaaaaatatactcgtccgctttctgtatgtcagata

SEQ ID NO: 60774 - DNA, 75 bp, synthetic construct
  source 1..75: mol_type = other DNA
ccgcaccattccgctgaactccctggcgcggcaggaggaagatttacatctgctgacaacagcggccccgacagt

SEQ ID NO: 60775 - DNA, 75 bp, synthetic construct
  source 1..75: mol_type = other DNA
gccgcctctgtcgcgccgtggcctgcgctcccggcatcccggcaaaaggccgccgggatgtaaggggcaacgccg

SEQ ID NO: 60776 - DNA, 75 bp, synthetic construct
  source 1..75: mol_type = other DNA
ccacaaaacccgctgccggacgtgctgggctggaaatattcgggcaatcgtcatcacccgacggaaaagcccgtt

SEQ ID NO: 60777 - DNA, 75 bp, synthetic construct
  source 1..75: mol_type = other DNA
agcagcagagaacaaccttattgatagtgaatgccatgttgctgaactggaagaagcgctacgcgataagcaggc

SEQ ID NO: 60778 - DNA, 75 bp, synthetic construct
  source 1..75: mol_type = other DNA
actatgatcctaaaactaattatttcaatacatccagtgtagaatcagtaattaaagacgtagtagagataaatc

SEQ ID NO: 60779 - DNA, 75 bp, synthetic construct
  source 1..75: mol_type = other DNA
ccctgcgtggcaagtcgggacggctgtatagagccaacagatatggcagcagaaatcagagaggtaaaacatgaa

SEQ ID NO: 60780 - DNA, 75 bp, synthetic construct
  source 1..75: mol_type = other DNA
aatgaagctatccgccaactggagcaggcattatctctggcccgaagtatggcgaaggccgcaactgctgcaaat

SEQ ID NO: 60781 - DNA, 75 bp, synthetic construct
  source 1..75: mol_type = other DNA
gtcgatatgaagtggacatccgccctactggacgtaacggaaaacgcatccgtaggaagtttgataagaaaagcg

SEQ ID NO: 60782 - DNA, 75 bp, synthetic construct
  source 1..75: mol_type = other DNA
gacacctttgatccgacgcatgatctggatgcgtactgcgattttgcttccggtaccatcaatattgcgattatg

SEQ ID NO: 60783 - DNA, 75 bp, synthetic construct
  source 1..75: mol_type = other DNA
tgttgcacagatgctggcccctaaacccaaaaccccccgcacacagacaacggataacggcaaacagaacaccta

SEQ ID NO: 60784 - DNA, 75 bp, synthetic construct
  source 1..75: mol_type = other DNA
accatcactgtgcatttcaccgcaaaaagaggtgactggtgtgacatctggggtagcgaggatgtatcggtgtgg

SEQ ID NO: 60785 - DNA, 75 bp, synthetic construct
  source 1..75: mol_type = other DNA
cttccccctgggagagaagcgtgtcctgatgttctcgccgcagggcatggcggcggaagggtatcactatcgcaa

SEQ ID NO: 60786 - DNA, 75 bp, synthetic construct
  source 1..75: mol_type = other DNA
tatttcagataaaggagtgaaaatcactccgctggagaacggggttctgaggtgtactggcaatagcggacacta

SEQ ID NO: 60787 - DNA, 75 bp, synthetic construct
  source 1..75: mol_type = other DNA
ggcagtgtggtgttcccgccggtgctggtgcagatgctcgaccggctggaaagtgaaatcctggctgaccgggtg

SEQ ID NO: 60788 - DNA, 75 bp, synthetic construct
  source 1..75: mol_type = other DNA
gcggcgctgattgcggtggcatggtggaaccctgtgggctggctgggtgccgcggctgtatcgggtatgtatgcg

SEQ ID NO: 60789 - DNA, 75 bp, synthetic construct
  source 1..75: mol_type = other DNA
cacctgaacagaggtgatatgctcacctcagaacaacacaggtgccataatgaaaaaaagaaatttcagcgcaga

SEQ ID NO: 60790 - DNA, 75 bp, synthetic construct
  source 1..75: mol_type = other DNA
atgaagctgagctataagctggttatcgctggtttcttcgttactgtcattggttctttcatctggtcggccaac

SEQ ID NO: 60791 - DNA, 75 bp, synthetic construct
  source 1..75: mol_type = other DNA
cactactacagcaaatatcagcacgaaaagaaacgcgctgatgaggctgtacgaaatgctgaatcagcaactgcc

SEQ ID NO: 60792 - DNA, 75 bp, synthetic construct
  source 1..75: mol_type = other DNA
cgttgttacggtgccattcaggatgcgcaggcgttgtccgaaggtgtggtggcctcttcccgttatccgaaacac

SEQ ID NO: 60793 - DNA, 75 bp, synthetic construct
  source 1..75: mol_type = other DNA
gtcagtggagtgtatccggcccgcacattaagcccgggaaggatttctggttttacgtgcgcagcgtcaacctgg

SEQ ID NO: 60794 - DNA, 75 bp, synthetic construct
  source 1..75: mol_type = other DNA
tggctatcaaaaccaacagacaaacgacgtctgtcggaactgacacagatctggtgggatttaaagggtaaacac

SEQ ID NO: 60795 - DNA, 75 bp, synthetic construct
  source 1..75: mol_type = other DNA
cacttgatcttgatgatatagaaataccaattagaactattatcaacgacgaatgcttcactaaaaaaactcttg

SEQ ID NO: 60796 - DNA, 75 bp, synthetic construct
  source 1..75: mol_type = other DNA
tgctgcgtcgcttccacgaggcgacggcacagaatgcaccggacgtggtggtatggggcagcggtacaccgatgc

SEQ ID NO: 60797 - DNA, 75 bp, synthetic construct
  source 1..75: mol_type = other DNA
ggctgccggacgtggtgttgtatcgccggagaatatcgcgttcacacgctggctgacacacctgcagaacggtgt

SEQ ID NO: 60798 - DNA, 75 bp, synthetic construct
  source 1..75: mol_type = other DNA
tttttgcgctttctgcgcccatggaaatacttaatcagggttgcaaacccgcgcatgactcgccaaaaatgtata

SEQ ID NO: 60799 - DNA, 75 bp, synthetic construct
  source 1..75: mol_type = other DNA
tctagctatcagtgacaggatcgcaaccagcaaaggaaaagcaatcacaacgtcaacctggttagatcgctatca

SEQ ID NO: 60800 - DNA, 75 bp, synthetic construct
  source 1..75: mol_type = other DNA
attgatcaaagaagaaaatctcaatgaagaggcggcgaaacgctatattcgcacgtctttaaaacgcgaatacgc

SEQ ID NO: 60801 - DNA, 75 bp, synthetic construct
  source 1..75: mol_type = other DNA
tagctgatatgtattttgcagcaaccggggataggcctgagtggagtaactggttcggtttttcagatgcagtag

SEQ ID NO: 60802 - DNA, 75 bp, synthetic construct
  source 1..75: mol_type = other DNA
atgaaacaacagtatcagacccgttacgagctgctccacgaaagctaccagaaatggctgaccggcttcacccgg

SEQ ID NO: 60803 - DNA, 75 bp, synthetic construct
  source 1..75: mol_type = other DNA
tggacagaggttatggccctgcataacaagggatgtagtttcagggaaatatcccgtattacaggcctgtcgcga

SEQ ID NO: 60804 - DNA, 75 bp, synthetic construct
  source 1..75: mol_type = other DNA
atgcgcaaatggtatttcaggtatacggaaaatggatgtctgaaaacaataatgcacaggtagctttgttaaata

SEQ ID NO: 60805 - DNA, 75 bp, synthetic construct
  source 1..75: mol_type = other DNA
aaagtggtgatgagcggtggcgcaatcgtgatgccgatctttcatgaaataatccccatcaatatgaatactctg

SEQ ID NO: 60806 - DNA, 75 bp, synthetic construct
  source 1..75: mol_type = other DNA
aaaaagaatctcatgcgcaataaggtgcagattatccagcagtttgaacaggcgggttctcatgctaaccgttat

SEQ ID NO: 60807 - DNA, 75 bp, synthetic construct
  source 1..75: mol_type = other DNA
acttctggctatcaatttcgtgatgggttaactgatgctggtactggtattgcacaattatctaacgtagaaatt

SEQ ID NO: 60808 - DNA, 75 bp, synthetic construct
  source 1..75: mol_type = other DNA
gatgcggcaaggaaatacataaagatgccacatcctgccccaattgtggagcacctcaaagaacagcaagttcaa

SEQ ID NO: 60809 - DNA, 75 bp, synthetic construct
  source 1..75: mol_type = other DNA
acggaaccgtccgcttttcctgataccctgccgggttacaccgaatatggccgggacaacggcatccgtctgtct

SEQ ID NO: 60810 - DNA, 75 bp, synthetic construct
  source 1..75: mol_type = other DNA
gtaattcaaaaatggcgcattttccaattacgcctaatttagataagttatctactgaagcactaagttttaaaa

SEQ ID NO: 60811 - DNA, 75 bp, synthetic construct
  source 1..75: mol_type = other DNA
tccacaccgaagaggtgatgctggacaaaattaccggaaaaacgccggtggcggcctatgtctccccggtcgttg

SEQ ID NO: 60812 - DNA, 75 bp, synthetic construct
  source 1..75: mol_type = other DNA
tgaacaggttaagcgtgaaaatccaccagtcgaaacagaggcatggaaagacgctattgactgggtgctcaaaga

SEQ ID NO: 60813 - DNA, 75 bp, synthetic construct
  source 1..75: mol_type = other DNA
aaacgtgtcagagaaaacctcggtgttcctgacaccgccaaaaaccggaagatcgcaggtgaacttcgcacttcc

SEQ ID NO: 60814 - DNA, 75 bp, synthetic construct
  source 1..75: mol_type = other DNA
atcagccagaccttttatccgattggtgctgcgtctggtattttattgggcaaatatctggttttctccgagggg

SEQ ID NO: 60815 - DNA, 75 bp, synthetic construct
  source 1..75: mol_type = other DNA
agacgcagacagcaacctgcagagtctgtgctggccttgccataaagagaaaacagcgcgcgaacgtatcaactg

SEQ ID NO: 60816 - DNA, 75 bp, synthetic construct
  source 1..75: mol_type = other DNA
gaatggggggttaaacctaaaattcttggtgttggtggtggggtaggcatcagaggtggatttaaggggagcctg

SEQ ID NO: 60817 - DNA, 75 bp, synthetic construct
  source 1..75: mol_type = other DNA
atgaatacagaaaaacaactgccgtccggcattgataacaaccatgatgaggatggcaacatggcaaaatattat

SEQ ID NO: 60818 - DNA, 75 bp, synthetic construct
  source 1..75: mol_type = other DNA
acttatgtttaattgcaaagacgatttttctcctgataatgtgattcaacaggtcgaatgtcttaaaaaattatc

SEQ ID NO: 60819 - DNA, 75 bp, synthetic construct
  source 1..75: mol_type = other DNA
aatacctgagccatcagaagagactgtgaaaaaaatgattgatgagaaaaagaatcaactgaagggaccattatg

SEQ ID NO: 60820 - DNA, 75 bp, synthetic construct
  source 1..75: mol_type = other DNA
tttcactcggtacactgcaggaggtctgctcgaaaaaatttggtttaggtgcgcaggccgttcttgatatagccc

SEQ ID NO: 60821 - DNA, 75 bp, synthetic construct
  source 1..75: mol_type = other DNA
cgacgggcgtcgcttctacaccgacgggccacgagcacacgagtttttgcacgagatgaaccgcgatgtgtttac

SEQ ID NO: 60822 - DNA, 75 bp, synthetic construct
  source 1..75: mol_type = other DNA
tgcggaaaagcggtgcgtgaatgtgcaggctgccacaagcgtccagtcgcagtgtcgtcaggccggtgttgctgt

SEQ ID NO: 60823 - DNA, 75 bp, synthetic construct
  source 1..75: mol_type = other DNA
taaggcagatgaagtagtgattgccaccgatgctgatcgggaaggcgaaattattgccagagaactgcttgatta

SEQ ID NO: 60824 - DNA, 75 bp, synthetic construct
  source 1..75: mol_type = other DNA
ggtacgctgctggatatcgaccacggtacatatccgtacgtaacttcttccaacaccactgctggtggcgtggcg

SEQ ID NO: 60825 - DNA, 75 bp, synthetic construct
  source 1..75: mol_type = other DNA
aatggtgccgtgatccatattgtgccgcgcctggcgggagccaaaagtggcggcgtgtttcaggccgtgctgggc

SEQ ID NO: 60826 - DNA, 75 bp, synthetic construct
  source 1..75: mol_type = other DNA
cacgacggcggcgtgttgaagcctgctgtactggagcggcagtgcaaggtgaaaaggagacagcgtgaagaagcc

SEQ ID NO: 60827 - DNA, 75 bp, synthetic construct
  source 1..75: mol_type = other DNA
gcaggcgggcctgatttacttgaaataggcgagtttcccaccgggcaagtggtctatctgcctgctgaagatcca

SEQ ID NO: 60828 - DNA, 75 bp, synthetic construct
  source 1..75: mol_type = other DNA
taactgccgcagttgacggtaaccgctaccttgaaagtctgcgtaatgcccccattaaggtctatgccctgaacg

SEQ ID NO: 60829 - DNA, 75 bp, synthetic construct
  source 1..75: mol_type = other DNA
gacatcaatgagtccaagggctcattttatggttgaaagtgttatacctggaacggaaggtaaacttgatgttga

SEQ ID NO: 60830 - DNA, 75 bp, synthetic construct
  source 1..75: mol_type = other DNA
agcgccgaggaacggcaagccgtggctgacggcctgctgatccagccgctgatcggcagcctgcccaacatcatg

SEQ ID NO: 60831 - DNA, 75 bp, synthetic construct
  source 1..75: mol_type = other DNA
atggcaaataatacgtcgtcccgtcaggcgtgccatgccgcccggtatgttgtcgcccgggttctgcgtggactg

SEQ ID NO: 60832 - DNA, 75 bp, synthetic construct
  source 1..75: mol_type = other DNA
ttattcttcctatacgtgccgcgttccaggcggcgactatgagggctatgtcgatgcccatgtgcgccggctgga

SEQ ID NO: 60833 - DNA, 75 bp, synthetic construct
  source 1..75: mol_type = other DNA
gtgaacgaggtctatgtcatcgccggtggggaatggttacggaacaacctgaatgccattgccgcctttatgggg

SEQ ID NO: 60834 - DNA, 75 bp, synthetic construct
  source 1..75: mol_type = other DNA
gttcacctcagagagtatggcagaacagaaaaacaaaaatgcacctttgtttttcaacctgaagtgtcagcgaga

SEQ ID NO: 60835 - DNA, 75 bp, synthetic construct
  source 1..75: mol_type = other DNA
tcaggttattgcagacagcgtaatcagtgcccgtgcggcacgtcctggcgggaacagacgcaaaaccacaggcgc

SEQ ID NO: 60836 - DNA, 75 bp, synthetic construct
  source 1..75: mol_type = other DNA
atgacagcacagatagcggcttacgggcggctggtggctgacccgcagttaaagaccaccagcaagggcacaaca

SEQ ID NO: 60837 - DNA, 75 bp, synthetic construct
  source 1..75: mol_type = other DNA
cgttcgatacccaatggtggattgaggcactgcgcaaagctattcctcaggcaagagtcagagcatggaaaagcg

SEQ ID NO: 60838 - DNA, 75 bp, synthetic construct
  source 1..75: mol_type = other DNA
agcccgtcttaatgaaccgctggcaaatggtgctgtgatccatatcgtgccgcgtctggcaggagccaaaagtgg

SEQ ID NO: 60839 - DNA, 75 bp, synthetic construct
  source 1..75: mol_type = other DNA
ttttaacgtttattgcttgtgttgctggtggtcttgtctggtcagcgaatcactatcatggaaagtttctggagg

SEQ ID NO: 60840 - DNA, 75 bp, synthetic construct
  source 1..75: mol_type = other DNA
catgatatggatgctaaagcaacccaggactttaaggaggcgagtgattactttactagccgtaaagtcagtgaa

SEQ ID NO: 60841 - DNA, 75 bp, synthetic construct
  source 1..75: mol_type = other DNA
gccgcgccacaaatgaaggtattcagctgtttctggccggaagtgccggacttctgcagattactgaaaatatcc

SEQ ID NO: 60842 - DNA, 75 bp, synthetic construct
  source 1..75: mol_type = other DNA
cggtgtttttcaggcagtgctgggtgcggcgctgattgcggtggcatggtggaaccctgtgggctggctgggtgc

SEQ ID NO: 60843 - DNA, 75 bp, synthetic construct
  source 1..75: mol_type = other DNA
gttatgtgtttgccctgatgtggctgcagtcatggccactcttgtacgccattctgaacagtgccatgacatttt

SEQ ID NO: 60844 - DNA, 75 bp, synthetic construct
  source 1..75: mol_type = other DNA
agtatctgatcgaccaactgcttgctgaagcccgcaaaggcggtgtcaacgtagccgcaggcaccggtatcagca

SEQ ID NO: 60845 - DNA, 75 bp, synthetic construct
  source 1..75: mol_type = other DNA
atgccaaactggtgcagtaaccgtatgtatttttctgccgaaccggcacagatcgctgagattaaacgactggcc

SEQ ID NO: 60846 - DNA, 75 bp, synthetic construct
  source 1..75: mol_type = other DNA
gtgccattggcggagattattccggatgccagcgtaacgtttaatgtgaataaactccgtctggaaatttcagta

SEQ ID NO: 60847 - DNA, 75 bp, synthetic construct
  source 1..75: mol_type = other DNA
gcccggaaaaatgaaatgtgtccgggtgggaaccgcagatgaacgactgagggaagtacttgctgaagatgcttc

SEQ ID NO: 60848 - DNA, 75 bp, synthetic construct
  source 1..75: mol_type = other DNA
aagactttaaagaggccagcgattactttaccagtcgcaaggtcagtgaatccggcagccatactgacaataatg

SEQ ID NO: 60849 - DNA, 75 bp, synthetic construct
  source 1..75: mol_type = other DNA
cgcggcatccaaatctccgccgggaatgctgtctcctttgtggcactgactaacattgagatgaagcgtgcctcg

SEQ ID NO: 60850 - DNA, 75 bp, synthetic construct
  source 1..75: mol_type = other DNA
aaaccacccgcaaagcaagccgtaaatatgcaaaaacgcaggaaacagtcctgtctgccctgctggcgcagacgg

SEQ ID NO: 60851 - DNA, 75 bp, synthetic construct
  source 1..75: mol_type = other DNA
aaagacaaccgctgggtgcctggctggatgtgtgcaccacatccacagacggataccactgaacgcaccgataac

SEQ ID NO: 60852 - DNA, 75 bp, synthetic construct
  source 1..75: mol_type = other DNA
caaggaatttcgcagtgccttaactgtagctgacattctgcttactctcgttaagccgtcttcagatttcgaagc

SEQ ID NO: 60853 - DNA, 75 bp, synthetic construct
  source 1..75: mol_type = other DNA
ggatgatcgaagctgttcgtccggatactgatattactgaagtggcgaaaaataacacgctgactgatgatgatt

SEQ ID NO: 60854 - DNA, 75 bp, synthetic construct
  source 1..75: mol_type = other DNA
tggcatggacgctctgcctgaatgtgtttggcagcggggcgtacagtaatcccgcaaaaattcgtctggaatgtg

SEQ ID NO: 60855 - DNA, 75 bp, synthetic construct
  source 1..75: mol_type = other DNA
aattatctggcggaaagttttgatgagtctttaataacgtactcatcatctgaacaaaaaataggtagtaagatt

SEQ ID NO: 60856 - DNA, 75 bp, synthetic construct
  source 1..75: mol_type = other DNA
gaggtggatttcgggcgctctgaaggaaataacattgagcaggctgacggtaaaaaatggtctgagcaggaccgt

SEQ ID NO: 60857 - DNA, 75 bp, synthetic construct
  source 1..75: mol_type = other DNA
ggtgcaggcgtggctgcgtgaacatcagccggacattatgaccaccgacgacgggcgggaaaaaggattcacctg

SEQ ID NO: 60858 - DNA, 75 bp, synthetic construct
  source 1..75: mol_type = other DNA
ctggcagcatattgctgaagatattaaagcgcactatgacgactatgatggttttgtcattctgcacggcaccga

SEQ ID NO: 60859 - DNA, 75 bp, synthetic construct
  source 1..75: mol_type = other DNA
ctcagccaggaggttctgttatccctgctcagtttctgcactgcatgcagcatccacggcgttcagacccgtgag

SEQ ID NO: 60860 - DNA, 75 bp, synthetic construct
  source 1..75: mol_type = other DNA
caagcaggtctgggaaaatcttctcattaaactaaagctggaaaacaatgaaaatgtgttttctgaaactaaaaa

SEQ ID NO: 60861 - DNA, 75 bp, synthetic construct
  source 1..75: mol_type = other DNA
caatagctacagcgtaccgttttccagcgtgccattactccagcgtcaggggcgaatcaaatacgcggtgacact

SEQ ID NO: 60862 - DNA, 75 bp, synthetic construct
  source 1..75: mol_type = other DNA
caattaaaggtcaaccagccgcagtgacatttgaagccgatatcaacgcatttcgcggcaagttcctcaatgtaa

SEQ ID NO: 60863 - DNA, 75 bp, synthetic construct
  source 1..75: mol_type = other DNA
ccagcgccctgtttaactattttctgcgccataccgagattgtcagccgggaagatgttctgaaaaaagtctggg

SEQ ID NO: 60864 - DNA, 75 bp, synthetic construct
  source 1..75: mol_type = other DNA
tgccaaatcgcaataacctgcacaattacctcgatgacctggtcgacaaagccgtctctccggtggtgtatctca

SEQ ID NO: 60865 - DNA, 75 bp, synthetic construct
  source 1..75: mol_type = other DNA
agacggtcagcgtgatggcggacaacggtgcaacggtcgctccgactgccatcacagggccggacggtacggtgg

SEQ ID NO: 60866 - DNA, 75 bp, synthetic construct
  source 1..75: mol_type = other DNA
cggagcgtacagtaaaccagcacaaatcagcctggaatgtaaacattattcgctgaccagcgatgcgccgtcagg

SEQ ID NO: 60867 - DNA, 75 bp, synthetic construct
  source 1..75: mol_type = other DNA
tgtggccagagagcagtgtgagtttgattgcagtatcggtcactttacggtgaggagtgattgttattcagtgta

SEQ ID NO: 60868 - DNA, 75 bp, synthetic construct
  source 1..75: mol_type = other DNA
aacacctatactggagaaattctatcagacgcatcctcgctcggctcaacttattggaagaagtataatctcact

SEQ ID NO: 60869 - DNA, 75 bp, synthetic construct
  source 1..75: mol_type = other DNA
tggcaccgcgtggtgctgttcggcaagctcgcggaagtggcaggtgaatatctgcgtaagggcgcgcaggtctac

SEQ ID NO: 60870 - DNA, 75 bp, synthetic construct
  source 1..75: mol_type = other DNA
tccacccacagcaacatctggcggactacagaggtatcctgcaggccgatgcatatgcgggttacaatgctcttt

SEQ ID NO: 60871 - DNA, 75 bp, synthetic construct
  source 1..75: mol_type = other DNA
attaacgtgaaataccgttatgagtttacggacacgctgggaatggtgacgtcattcagctatgcaggagacaag

SEQ ID NO: 60872 - DNA, 75 bp, synthetic construct
  source 1..75: mol_type = other DNA
gacaacaaggggaaaacgcacgatgtgctgaccggaagtgatgacggtcgccacagcaacacgtctctggcgtgg

SEQ ID NO: 60873 - DNA, 75 bp, synthetic construct
  source 1..75: mol_type = other DNA
tccagcgacatggtgacaatacctgtaagaaacaatattcaccgattaccattcagtgctcttgttgaagttaat

SEQ ID NO: 60874 - DNA, 75 bp, synthetic construct
  source 1..75: mol_type = other DNA
ggcagtactttcctaaaaagacatgtcttgcccaatatactcaacatgaactagatctggttgctgctcagctaa

SEQ ID NO: 60875 - DNA, 75 bp, synthetic construct
  source 1..75: mol_type = other DNA
tgaacacggggcgacgctgtttgatggtcgccccgttgtttttgacgaagaggattttcccgcggtcgcggttta

SEQ ID NO: 60876 - DNA, 75 bp, synthetic construct
  source 1..75: mol_type = other DNA
ctgcggttgcagcatctgtcctgatggcaatgtctgcgcaagcagctgaaatctacaacaaagacggtaataaac

SEQ ID NO: 60877 - DNA, 75 bp, synthetic construct
  source 1..75: mol_type = other DNA
ggaaactttctgggcgcatggcttcggcaaagtcaccgataaatttggcgtaccgtggatgattaatgtcgtcaa

SEQ ID NO: 60878 - DNA, 75 bp, synthetic construct
  source 1..75: mol_type = other DNA
tggtgaaacccgcgtgttgcgtccgggctacgtcaagccgaaacacgaatttaattaccagcaggcggttgagcg

SEQ ID NO: 60879 - DNA, 75 bp, synthetic construct
  source 1..75: mol_type = other DNA
cggtcttgtgaatattgccattatggacggtactgtctggcgtctgctgaatggctttaagcttttccgcgaaaa

SEQ ID NO: 60880 - DNA, 75 bp, synthetic construct
  source 1..75: mol_type = other DNA
aaataacatcagcaggcagcggtaaaaaatggtcaaaacaggaccgtgacacgttcgacccgacacatgatatcg

SEQ ID NO: 60881 - DNA, 75 bp, synthetic construct
  source 1..75: mol_type = other DNA
cgtccgggctacgtcaagccgaaacacgaatttaattaccagcaggcggttgagcgccttcctggtgaagatccg

SEQ ID NO: 60882 - DNA, 75 bp, synthetic construct
  source 1..75: mol_type = other DNA
gcgtcaaaaaaataaattatccggtgctgtatgagtccggaataacacctccgttatgtgaagtcagtgcaccag

SEQ ID NO: 60883 - DNA, 75 bp, synthetic construct
  source 1..75: mol_type = other DNA
acagacggtgtgggtcggcgaaacggagccgatgcacggtttacaggtgatgacaggtttcaccctgcgccctga

SEQ ID NO: 60884 - DNA, 75 bp, synthetic construct
  source 1..75: mol_type = other DNA
tgatccggaagtccgttacatccccaacgggggcgcagtggcaaacctgcaggtggccacgtcagaaagctggcg

SEQ ID NO: 60885 - DNA, 75 bp, synthetic construct
  source 1..75: mol_type = other DNA
tatcactaatctcggaactaatcttggttatgacggccacggcgaaatgaatatcagtaatgaggggcttgttgt

SEQ ID NO: 60886 - DNA, 75 bp, synthetic construct
  source 1..75: mol_type = other DNA
cctatggctgtattcaggatgcggatgcattgagtgagggtattaatgcgtctccccgttatccgaaaaactgga

SEQ ID NO: 60887 - DNA, 75 bp, synthetic construct
  source 1..75: mol_type = other DNA
caattgactggcatgatggggttttgttagaagtaaaaacgacattcaaagaatctcattttaacatgacgttat

SEQ ID NO: 60888 - DNA, 75 bp, synthetic construct
  source 1..75: mol_type = other DNA
aaggagagacaaagcatattactggcgcaaccctctgacgaaagaagaatttacactaggtaaaatttcaagaag

SEQ ID NO: 60889 - DNA, 75 bp, synthetic construct
  source 1..75: mol_type = other DNA
gcacatctttggcgaaatacccacggggattgtcgttgaacgcgacgttcctgctctgttagcagcgatcggact

SEQ ID NO: 60890 - DNA, 75 bp, synthetic construct
  source 1..75: mol_type = other DNA
gcgtaatttcctggggtcaattaacaatttaatttccgaacagttttctactgaagatataagtaaagagtatgt

SEQ ID NO: 60891 - DNA, 75 bp, synthetic construct
  source 1..75: mol_type = other DNA
ggagactctgaatggcgctcggttggatgacaaagcccgccgtacctggccgccgttcgatcccgcaacggccgg

SEQ ID NO: 60892 - DNA, 75 bp, synthetic construct
  source 1..75: mol_type = other DNA
atgaacgaaagaaaaagatttatccgtttacctgaagtattaaatagaacgggcctttgtaaagcttggatctat

SEQ ID NO: 60893 - DNA, 75 bp, synthetic construct
  source 1..75: mol_type = other DNA
tcgaccgataccacgaacaagatactggggcaggagtttgccaaaattcgcatcattgccgggtatgacggtata

SEQ ID NO: 60894 - DNA, 75 bp, synthetic construct
  source 1..75: mol_type = other DNA
ctcagctggaacatttgagcaaatcagagcgcaaagttgccgaggtcattctggcttcgcccgataacgcgatcc

SEQ ID NO: 60895 - DNA, 75 bp, synthetic construct
  source 1..75: mol_type = other DNA
ttcgatcgcaatgtataacgatgaaatacaggttcgcgttaataataatatcgtgccacttaaagaaggtaattc

SEQ ID NO: 60896 - DNA, 75 bp, synthetic construct
  source 1..75: mol_type = other DNA
gtttcatctcgataatcccagcgattattttatcaactactgccgccgctacagcgacatgccgatgctggtaat

SEQ ID NO: 60897 - DNA, 75 bp, synthetic construct
  source 1..75: mol_type = other DNA
gctggctgatgtggccgggactaatgatgcagtagatgtactgtgtctgtgccttgatattgccgaccaagacgg

SEQ ID NO: 60898 - DNA, 75 bp, synthetic construct
  source 1..75: mol_type = other DNA
gaaggagcttttccaatagatcgtgaaagtctacaatggatctgtgtaaaggcgattcctccaaaatatgaggac

SEQ ID NO: 60899 - DNA, 75 bp, synthetic construct
  source 1..75: mol_type = other DNA
cccgaccgaatccgtggccattgaccttgcttatgaaggctccggcagtggtgactggcacactgacggtttcat

SEQ ID NO: 60900 - DNA, 75 bp, synthetic construct
  source 1..75: mol_type = other DNA
ttttcacggtgtacatcgatggcgaaaacaagctggggcgggtgacgtccttcacgccgcctaaactgacccgaa

SEQ ID NO: 60901 - DNA, 75 bp, synthetic construct
  source 1..75: mol_type = other DNA
tatttatccgctttattgattttcgcggtgaactgttattacgcgcatccgctattgatggagtggctccggcgg

SEQ ID NO: 60902 - DNA, 75 bp, synthetic construct
  source 1..75: mol_type = other DNA
cgctatgtttttgaacatgcggatatttgcgatgcagctgcaatggcacggatttttgctcagcatcagccggat

SEQ ID NO: 60903 - DNA, 75 bp, synthetic construct
  source 1..75: mol_type = other DNA
atggcacagtttaaagttgatgattttttgattgagctaggttttagctctcagcgagttttaaaaggcttggaa

SEQ ID NO: 60904 - DNA, 75 bp, synthetic construct
  source 1..75: mol_type = other DNA
atcagcctggaatgtaaacattattcgctgaccagcgatgcgccgtcagggaaggaaggtgccgcattcctggcg

SEQ ID NO: 60905 - DNA, 75 bp, synthetic construct
  source 1..75: mol_type = other DNA
gatgtgtcatacaccgcgggtggcaagataaaagtgtcagttacccttatggatgagcagaaaaacctggtgaaa

SEQ ID NO: 60906 - DNA, 75 bp, synthetic construct
  source 1..75: mol_type = other DNA
gtctggtccccggaagagattcaggccctcgctgacggaatggatatttccctgtccgatcatgaaatcaggacc

SEQ ID NO: 60907 - DNA, 75 bp, synthetic construct
  source 1..75: mol_type = other DNA
gtcaccgatgcgttcgggaatgtacttgccggccagacggttagcgtgacggcggacaacggcgcaacggttgct

SEQ ID NO: 60908 - DNA, 75 bp, synthetic construct
  source 1..75: mol_type = other DNA
tgcgtgagttagcaaaacaggcaacacagggcgaatgggtcgcatttatttcgtctggtactggtacgtatgcgg

SEQ ID NO: 60909 - DNA, 75 bp, synthetic construct
  source 1..75: mol_type = other DNA
cagttagatcctgaaataatgttgtatgagggagcacagtacccaattcctccaaaggataaatttggtgcattt

SEQ ID NO: 60910 - DNA, 75 bp, synthetic construct
  source 1..75: mol_type = other DNA
cttaagaacagcaatgacttcggtccgtacggtaatcttggtctggccgttcgcgggatacagatttacctcccc

SEQ ID NO: 60911 - DNA, 75 bp, synthetic construct
  source 1..75: mol_type = other DNA
agtctgatgaaagagaaaacccgtctggaggctctgttgccggagaactggcagaaagatttcaccacattcttc

SEQ ID NO: 60912 - DNA, 75 bp, synthetic construct
  source 1..75: mol_type = other DNA
tatgactcggcaacaggcaaataccttcttatccctcacggaactcgcgtgataggtacatattcaagcgatgtt

SEQ ID NO: 60913 - DNA, 75 bp, synthetic construct
  source 1..75: mol_type = other DNA
cgggccgaacaggaagccgcacttcttcgtgggcagatagctgaagaaaaacgcagggtggaactgctgacgtct

SEQ ID NO: 60914 - DNA, 75 bp, synthetic construct
  source 1..75: mol_type = other DNA
tgtccgcagccatttgtctggccttatccggtgcgcctgcatgggcgtctgaacatcagtccacgctgagcgcgg

SEQ ID NO: 60915 - DNA, 75 bp, synthetic construct
  source 1..75: mol_type = other DNA
gaaattgattatcagtacgtgatggataatttaaatgaaagggccaagataaaaaacatggaaggttggcttgct

SEQ ID NO: 60916 - DNA, 75 bp, synthetic construct
  source 1..75: mol_type = other DNA
ttaccaatcatcaaagaattattccattgatggcattatttgcgatatcagtgaccttgatcgcagtgcgtttac

SEQ ID NO: 60917 - DNA, 75 bp, synthetic construct
  source 1..75: mol_type = other DNA
gcggcatcttatggataacgtagccggtcaatgtggcgcaacatggcaattcgtggacggtcaacgccagatggt

SEQ ID NO: 60918 - DNA, 75 bp, synthetic construct
  source 1..75: mol_type = other DNA
aagcaatgcgccgtagtacctcacgccacggcgctgatagtgattattctgattctttggccttgcggcgctgga

SEQ ID NO: 60919 - DNA, 75 bp, synthetic construct
  source 1..75: mol_type = other DNA
cgacgggcgcgcctttacaaaagaacaatatcctgttctggccagagtctacccgaccctccgtcttcccgattt

SEQ ID NO: 60920 - DNA, 75 bp, synthetic construct
  source 1..75: mol_type = other DNA
gtccactattctctcaggaatttcaggatctgccagacggtgctgagacgacgcttacgtatgatgaagaggacg

SEQ ID NO: 60921 - DNA, 75 bp, synthetic construct
  source 1..75: mol_type = other DNA
gtgaagttatctctgctccatgttctattaaaccaggtgacgaagatttaactgtaaatctgggtgaagtagcag

SEQ ID NO: 60922 - DNA, 75 bp, synthetic construct
  source 1..75: mol_type = other DNA
gccgggagctggcagcaaagtatccgggagacacgccgctgatgctggttatctggtccccggaagagattcagg

SEQ ID NO: 60923 - DNA, 75 bp, synthetic construct
  source 1..75: mol_type = other DNA
gaaagtcagggatatattatcgcacgaccgcagtcgggttattacgttgcgccacaggcaataaaaatgccgaaa

SEQ ID NO: 60924 - DNA, 75 bp, synthetic construct
  source 1..75: mol_type = other DNA
tgacatcgctgatcgggacttttttattggtgacacacggtaatccgacgtcattatcgatctctcctgccgcgt

SEQ ID NO: 60925 - DNA, 75 bp, synthetic construct
  source 1..75: mol_type = other DNA
aatggcgcaggatgatttaaccattagcagccttgcaaagggcgaaaccaccaaagctgcgtttaatcagatggt

SEQ ID NO: 60926 - DNA, 75 bp, synthetic construct
  source 1..75: mol_type = other DNA
gcctttgcggataatacgccggtctttgcctgccaggattttcgtcaggatattagcctggccctgttgccaaaa

SEQ ID NO: 60927 - DNA, 75 bp, synthetic construct
  source 1..75: mol_type = other DNA
caccggaagacagcctcgccctgaaacacacttatacgggaagcattgcctctgtcagtgccatggatagtctgg

SEQ ID NO: 60928 - DNA, 75 bp, synthetic construct
  source 1..75: mol_type = other DNA
caggcatatgatgcaaaagccggtggtgttacgttcagagtatatattgatcaaaaaacaggaattgtaagtaac

SEQ ID NO: 60929 - DNA, 75 bp, synthetic construct
  source 1..75: mol_type = other DNA
cagtccaggaaaatccgtgcgctatggcttgaaatggctgctgccggcattgttcgtgaccgttcagaaaatgca

SEQ ID NO: 60930 - DNA, 75 bp, synthetic construct
  source 1..75: mol_type = other DNA
ccgtcacaaaagagtggctgcgggcacattgtgacgatgtggaagtgatccccctgtgccgtatgcatgacggtc

SEQ ID NO: 60931 - DNA, 75 bp, synthetic construct
  source 1..75: mol_type = other DNA
gaaggtgctccagctattggcgttccgttcttctggccgtccgctgcaatgccaaatactgtaatcgacagctgg

SEQ ID NO: 60932 - DNA, 75 bp, synthetic construct
  source 1..75: mol_type = other DNA
actcaggccgcagtggcagaaggcactatcaccatccgggacagggacaatcagaagcagaatctggcgaacctg

SEQ ID NO: 60933 - DNA, 75 bp, synthetic construct
  source 1..75: mol_type = other DNA
atttggattaaatgtgccgtttggtgatattacgacttcgctgaattacagctattccaataatatatggcaaaa

SEQ ID NO: 60934 - DNA, 75 bp, synthetic construct
  source 1..75: mol_type = other DNA
agtgaaggtattgtgtcgatgtttcgtgtggacccggatctggctggtccattaatggcgatggtgaccaccatg

SEQ ID NO: 60935 - DNA, 75 bp, synthetic construct
  source 1..75: mol_type = other DNA
aagcgtgctggcgaccggaaagctggacgcgctgcgtaaggttgacgtgggcgcgcaggtcagcggtcagttgaa

SEQ ID NO: 60936 - DNA, 75 bp, synthetic construct
  source 1..75: mol_type = other DNA
ctcaggtaatgttcaccaggcgttggatgatatcatttatatgaatgatacaaaaaagaaagtaaaaggcgcact

SEQ ID NO: 60937 - DNA, 75 bp, synthetic construct
  source 1..75: mol_type = other DNA
aggtaaccagatatcaaagtatcgaattacctataccaaaacaaaaggaaagaaaaaccgaactgttcctatttc

SEQ ID NO: 60938 - DNA, 75 bp, synthetic construct
  source 1..75: mol_type = other DNA
gataaatcgttctcaaataaaacaggtgccaggccacgaaaaaattcgtgatgccgtccgcgcctggtctgctga

SEQ ID NO: 60939 - DNA, 75 bp, synthetic construct
  source 1..75: mol_type = other DNA
agcattggcagcaactttcgaatgttttctcaattagaccgtgattttcatgccatgctgttatccgctgctgac

SEQ ID NO: 60940 - DNA, 75 bp, synthetic construct
  source 1..75: mol_type = other DNA
cggataacgcccaactggaactgaaatataaaaaaggcaaaacaccactcagccatcgcaattggccaggcgaac

SEQ ID NO: 60941 - DNA, 75 bp, synthetic construct
  source 1..75: mol_type = other DNA
aatgtgaacgatgcgctttcgattgatggtaaaacggtgctgttcgcggcgttgaccggcagcctggaaaaccat

SEQ ID NO: 60942 - DNA, 75 bp, synthetic construct
  source 1..75: mol_type = other DNA
ggtgacgtccggccatccggtcaatcccctgctcggtgcaaaggtccttcccggtgaaaccgacatcgccctgcc

SEQ ID NO: 60943 - DNA, 75 bp, synthetic construct
  source 1..75: mol_type = other DNA
atttgataccgatccggccagtgataaaggaggcagcagtgccgcaacgaaacgacaggagccgcagcacaccga

SEQ ID NO: 60944 - DNA, 75 bp, synthetic construct
  source 1..75: mol_type = other DNA
atccgacaaataccggcgtcagtaccaccagcagtagttcgctcacgggcagcaacgccgcagatttacaaagca

SEQ ID NO: 60945 - DNA, 75 bp, synthetic construct
  source 1..75: mol_type = other DNA
ctacaagatagcaatggccgtaaggcaactattaatatttggcaaattgatgaagcgaataacacggttgccctt

SEQ ID NO: 60946 - DNA, 75 bp, synthetic construct
  source 1..75: mol_type = other DNA
ggccggggaaaatatcggattcaacatccgtgctggcgttcagtattacgatcgccagacaaaaaagaaagaatg

SEQ ID NO: 60947 - DNA, 75 bp, synthetic construct
  source 1..75: mol_type = other DNA
tcatggcgtgcgtgcgccaaccaaatccacgcagctcatgcaagatgtcaccccagacgcatggccatcctggcc

SEQ ID NO: 60948 - DNA, 75 bp, synthetic construct
  source 1..75: mol_type = other DNA
tgcatcagcagataactccataacgggtactcaaaggacagcggaggataattttaccggggcatggatatcaat

SEQ ID NO: 60949 - DNA, 75 bp, synthetic construct
  source 1..75: mol_type = other DNA
cgtaagcaatttgctaccaaaggcgaagccattgcgtttgaaagcttcacaatggaagaagtgaacaaaaaacca

SEQ ID NO: 60950 - DNA, 75 bp, synthetic construct
  source 1..75: mol_type = other DNA
aaaacggtgcagtggtatctggctaatgaaagctggtggaagcaggtgcaggacggcagctatcagggcgagcgt

SEQ ID NO: 60951 - DNA, 75 bp, synthetic construct
  source 1..75: mol_type = other DNA
tttggccgatggaaataataatcaaagcactgctaattaccttcaaccaaaatccaatgatactagtgcacaggg

SEQ ID NO: 60952 - DNA, 75 bp, synthetic construct
  source 1..75: mol_type = other DNA
aaccattgaaaatggtgaagtaatttactcaaaacatctgttggataatgaattcgttggctgcatggatacatt

SEQ ID NO: 60953 - DNA, 75 bp, synthetic construct
  source 1..75: mol_type = other DNA
accccagccattactgaaaaacggtggtgtggctacagagctggcaatgattatccgtcgtttgtgggcggaatg

SEQ ID NO: 60954 - DNA, 75 bp, synthetic construct
  source 1..75: mol_type = other DNA
ggtgtacacgccggcgcgaaaaatccacctgtaccactgcgaccatcgcggcctgccgctggcgcttgtcagcac

SEQ ID NO: 60955 - DNA, 75 bp, synthetic construct
  source 1..75: mol_type = other DNA
gagttgttgctggaaaaagtctgccactatgatgcgcaggttcccctgcgggtggtttacctgaccgcagggatc

SEQ ID NO: 60956 - DNA, 75 bp, synthetic construct
  source 1..75: mol_type = other DNA
gtggtttgccgaagaaggcaaacgtatttatggcgacaccattcccggtcatcaggccgataaacgcctgattgt

SEQ ID NO: 60957 - DNA, 75 bp, synthetic construct
  source 1..75: mol_type = other DNA
tgttattacgggtgataatgccacagtaaacaacaatggcaaaaccaccgttgacggcaaggattccaccggtac

SEQ ID NO: 60958 - DNA, 75 bp, synthetic construct
  source 1..75: mol_type = other DNA
gcggcctatgtctccccggttgttgaaggaaaagtgctgcgtcatcgtggtggtgaaacccgcgtgttacgtccg

SEQ ID NO: 60959 - DNA, 75 bp, synthetic construct
  source 1..75: mol_type = other DNA
tcggtacggtgttagacaacgccgactgcttcgacgccaccctgtttggctattcgcgacaggaagcggagtcga

SEQ ID NO: 60960 - DNA, 75 bp, synthetic construct
  source 1..75: mol_type = other DNA
tcagcggcggcggtcacggtattgatatcaccggtgacagcgcgacggtagataacaagggcaccatgaccgtta

SEQ ID NO: 60961 - DNA, 75 bp, synthetic construct
  source 1..75: mol_type = other DNA
gcgaggatggctactggacgcacccagaatacgccaacctgtttggggatagagaggtaatttcagctgatgagt

SEQ ID NO: 60962 - DNA, 75 bp, synthetic construct
  source 1..75: mol_type = other DNA
gtcatttatctttctgcatacagaccagcaactccgcccatttatcaattcggattatcagccagccggtgccag

SEQ ID NO: 60963 - DNA, 75 bp, synthetic construct
  source 1..75: mol_type = other DNA
ggcatcaccgttttacccatccccggtgatgaattaggccgcggacgtggcggcgcacgttgcatgagttgccct

SEQ ID NO: 60964 - DNA, 75 bp, synthetic construct
  source 1..75: mol_type = other DNA
actcacactttcaaaccgtttataaatacagactatcagcctgtgggagcaaactggaaaagtgaaaagggatat

SEQ ID NO: 60965 - DNA, 75 bp, synthetic construct
  source 1..75: mol_type = other DNA
gagggcggcaacgtctgcataccttcagcttctgttgttatttcaaaggcaattattgaaatgctcagcgcaggc

SEQ ID NO: 60966 - DNA, 75 bp, synthetic construct
  source 1..75: mol_type = other DNA
agtcacagaccctgaccaacagcggtctgttgcagggggaggcctcactcaccgttaacacacagaggcttgata

SEQ ID NO: 60967 - DNA, 75 bp, synthetic construct
  source 1..75: mol_type = other DNA
tgaaatcaacagaaaaagacccggcagtaaacgccattgctcacgccattctgggcggcgcagtggcggcaatgc

SEQ ID NO: 60968 - DNA, 75 bp, synthetic construct
  source 1..75: mol_type = other DNA
cgacgctggcagaaaatatcagtatgctccgtaacgatttattcgccaggctggacgtcagtgacccactccggc

SEQ ID NO: 60969 - DNA, 75 bp, synthetic construct
  source 1..75: mol_type = other DNA
tcctgtgaacattattctggtgctgcctcatggtctaacttttccagatatatagataaggtactggttattaat

SEQ ID NO: 60970 - DNA, 75 bp, synthetic construct
  source 1..75: mol_type = other DNA
ataaaatggattcggcagcactgctgccctgtattgaacaggccagggaggatatccgtaccctgcaccaactgc

SEQ ID NO: 60971 - DNA, 75 bp, synthetic construct
  source 1..75: mol_type = other DNA
gacgcctcaattaacgggtaaaggccagcagtggttaactcgcaagctacttgatgctggcttgttaaaaccggt

SEQ ID NO: 60972 - DNA, 75 bp, synthetic construct
  source 1..75: mol_type = other DNA
acgaaagcgggcaaagctcagttgacatcgaccgggtaaaccatcaggtggtgaatgtcgaagcggtgaattttc

SEQ ID NO: 60973 - DNA, 75 bp, synthetic construct
  source 1..75: mol_type = other DNA
ataaaacggattcagttacactgctaccctgtattaaacaggcgcgacaggatgtccgtaccctgcgccatatgc

SEQ ID NO: 60974 - DNA, 75 bp, synthetic construct
  source 1..75: mol_type = other DNA
gccgaccaccacgccgctggataaaattttcaacaccatcgatctcgccgggcaaacctatctggagagcattca

SEQ ID NO: 60975 - DNA, 75 bp, synthetic construct
  source 1..75: mol_type = other DNA
agaagccctacgcctggctgccgagttggcagaacagaaattgcagctggaacaacagctggtggccgcagcccc

SEQ ID NO: 60976 - DNA, 75 bp, synthetic construct
  source 1..75: mol_type = other DNA
ggtatcgaaggtaacagttccggtgagacaatttatagattgcaaactttgctaaagcgtaagctcaatgaatat

SEQ ID NO: 60977 - DNA, 75 bp, synthetic construct
  source 1..75: mol_type = other DNA
aatttgaggatggcaaagagccacctgttagcgccaatcttgatgttgctggtggcaggcttgtttcggttctat

SEQ ID NO: 60978 - DNA, 75 bp, synthetic construct
  source 1..75: mol_type = other DNA
ttttgattgccgccgggattggtctggtagtccaaaacacgctgatggtgcgcatcactcagacctcctcaacca

SEQ ID NO: 60979 - DNA, 75 bp, synthetic construct
  source 1..75: mol_type = other DNA
ggattgcaaaaaatctgaccctgaaggcgaactcactgaccagtgcgggtgacatcaccggtgtggatactctca

SEQ ID NO: 60980 - DNA, 75 bp, synthetic construct
  source 1..75: mol_type = other DNA
acagtacctcgacagggaaacggggctgcactacaatctgcacaggtactatgatccggatgtcgggcggttcat

SEQ ID NO: 60981 - DNA, 75 bp, synthetic construct
  source 1..75: mol_type = other DNA
attttagtactgcaacgaatcttgggccattctaacattagggaaaccatgagatacgctcattttgcaccagat

SEQ ID NO: 60982 - DNA, 75 bp, synthetic construct
  source 1..75: mol_type = other DNA
tcggggtggggtatagccatggtgccggtgtggaatccccgtggaacgcggtggctggtgcgaactggtcgttct

SEQ ID NO: 60983 - DNA, 75 bp, synthetic construct
  source 1..75: mol_type = other DNA
cgcggtcaactcacacacgttctgcgccatacgtttgcggcgcacttcatgatgtcgggtggaaacattctggcc

SEQ ID NO: 60984 - DNA, 75 bp, synthetic construct
  source 1..75: mol_type = other DNA
atgcttatcccactggcaaatattcttggctgcgatccgatgtggttattgactggtagcaatgctgcaaaggag

SEQ ID NO: 60985 - DNA, 75 bp, synthetic construct
  source 1..75: mol_type = other DNA
taaatggagagagaaatcttggggaggcccttaattcatctggttacattttcccatccaaacagatgataatgg

SEQ ID NO: 60986 - DNA, 75 bp, synthetic construct
  source 1..75: mol_type = other DNA
tgagctggcgaaaacgcagcgccgcagcctggcggatacccttcagcagtccggcggcgaagacggtggcagtgt

SEQ ID NO: 60987 - DNA, 75 bp, synthetic construct
  source 1..75: mol_type = other DNA
aagccctagcttactaatgattgcaaaaatatgcctggctactggcgcacggtggagtgaagccgaaaatctgca

SEQ ID NO: 60988 - DNA, 75 bp, synthetic construct
  source 1..75: mol_type = other DNA
accgcgaagcacggttaaaaggtgaagtacgaaatgaagatggcacgcttatgtcgcccgttaagccccgcacgg

SEQ ID NO: 60989 - DNA, 75 bp, synthetic construct
  source 1..75: mol_type = other DNA
agagagagtgcatcagcagaagaaaaaccagaacagaaaaaaccgtcaatcagctgtgagcaggtcgtcgagatt

SEQ ID NO: 60990 - DNA, 75 bp, synthetic construct
  source 1..75: mol_type = other DNA
tccgggaaggtgttctgcgtgaggatgaagatatctccgtacatgcggccagaaaacgctggtatctgcagcgca

SEQ ID NO: 60991 - DNA, 75 bp, synthetic construct
  source 1..75: mol_type = other DNA
ggactggaaagtgacagcccgtgccggtctgggctaccagttcgacctgctggctaacggcgaaaccgtattgcg

SEQ ID NO: 60992 - DNA, 75 bp, synthetic construct
  source 1..75: mol_type = other DNA
gaagttgggttaaatatgtacagcggagaagtaagtaacatcacactagcaaatatcgattcaggtgaaattaat

SEQ ID NO: 60993 - DNA, 75 bp, synthetic construct
  source 1..75: mol_type = other DNA
cataaatgctcaaggtaataagagttccagcaacgcctccacggcaatttttgctcaaaagggtagcttattgaa

SEQ ID NO: 60994 - DNA, 75 bp, synthetic construct
  source 1..75: mol_type = other DNA
ttacagccgtaacaattaatgcggcagataaagatcttaatgttacttttggcggtcatgatattactgctgaat

SEQ ID NO: 60995 - DNA, 75 bp, synthetic construct
  source 1..75: mol_type = other DNA
atattattttgccgtactggtattaggactgttttctgcggcgtcttatcaaaagaccgttcgggacaagtatga

SEQ ID NO: 60996 - DNA, 75 bp, synthetic construct
  source 1..75: mol_type = other DNA
aaccactgctggatgtgttgatgatcctcgatgccttagaaaaagaaggcagttttgcggcggcgtcggccaaac

SEQ ID NO: 60997 - DNA, 75 bp, synthetic construct
  source 1..75: mol_type = other DNA
taccgtgagtggcgtctcgtcactgggcgaagccggggatacggaattcctgaaggaagtcaagggggcttacca

SEQ ID NO: 60998 - DNA, 75 bp, synthetic construct
  source 1..75: mol_type = other DNA
aaaaaataccggtaaaggtggtgcgctgatgaatggcctcaattatgccacctgcgaccaggtttttttaagtga

SEQ ID NO: 60999 - DNA, 75 bp, synthetic construct
  source 1..75: mol_type = other DNA
aagctgtcggcacgtaaacagaagcaggtgcaggaatttattggggtgattgccggtaaacagaaagttgcctga

SEQ ID NO: 61000 - DNA, 75 bp, synthetic construct
  source 1..75: mol_type = other DNA
gtactacggcacgacgcagggcgtcaccgaaaaggtgctggatgccaaccccggactctgtcagcaggtatttct

SEQ ID NO: 61001 - DNA, 75 bp, synthetic construct
  source 1..75: mol_type = other DNA
tcttccgttgcactggtgacctctggactggaacgtttgtcgaacttactctcgaagaaagactctgtttttgtc

SEQ ID NO: 61002 - DNA, 75 bp, synthetic construct
  source 1..75: mol_type = other DNA
cgcgatagcttgcaatttctgttttcactgtcattatgggtgggtaaaaatttacccataggcattgaaatggat

SEQ ID NO: 61003 - DNA, 75 bp, synthetic construct
  source 1..75: mol_type = other DNA
tgttttacgcgtatgacaggatacagaggacggttgtggcgcacgtcttcggtgaacgcactctggccacactgg

SEQ ID NO: 61004 - DNA, 75 bp, synthetic construct
  source 1..75: mol_type = other DNA
ggttatgctctggttgcctggtctggtcacgacgccggtatcgtttatatgggtatggcggctattgcggtcggt

SEQ ID NO: 61005 - DNA, 75 bp, synthetic construct
  source 1..75: mol_type = other DNA
tccagcggagtatgggttactactcaggaatggctgtcagagcgattcatgcttcctgaatcgcaaagatcaaac

SEQ ID NO: 61006 - DNA, 75 bp, synthetic construct
  source 1..75: mol_type = other DNA
aatatcagagtgagtatcagacagatagataacatttcgaagaataatgttgactttcaccttgttatggagctc

SEQ ID NO: 61007 - DNA, 75 bp, synthetic construct
  source 1..75: mol_type = other DNA
tggttgcgtgaaaagatgaagaccctgttcttcggctctggccatggtggtgagcggggagcgctactgtacagc

SEQ ID NO: 61008 - DNA, 75 bp, synthetic construct
  source 1..75: mol_type = other DNA
gctccgccccgctcttctcaacggtattaatgctggcaactccggcgcgtattgcgggctgtaaaaaagtggtgc

SEQ ID NO: 61009 - DNA, 75 bp, synthetic construct
  source 1..75: mol_type = other DNA
atgtccgatccgatttccggcacagggttagctggtggagccctaacgggcgctagtatttatggactgctgacc

SEQ ID NO: 61010 - DNA, 75 bp, synthetic construct
  source 1..75: mol_type = other DNA
atggccgcctgtgccaccggcccttatgcgctggttctggtgcctgcgctgatgtatgccagctataaggcgagt

SEQ ID NO: 61011 - DNA, 75 bp, synthetic construct
  source 1..75: mol_type = other DNA
atggaagcatacaggaatgagcatacgcatcttaatcttgtagaggatgtttttattcagaacagattctggaca

SEQ ID NO: 61012 - DNA, 75 bp, synthetic construct
  source 1..75: mol_type = other DNA
cctgccagaaaaaagaaacgaaaaaaagtgacgcccgatgaggataacccctgggtgacttccggaggatggtta

SEQ ID NO: 61013 - DNA, 75 bp, synthetic construct
  source 1..75: mol_type = other DNA
gtggtgcttgttaaagcgcctggcgcaaaagatgtaaaagtcgaaaaccagacgggggtgcgtaccgactggcgc

SEQ ID NO: 61014 - DNA, 75 bp, synthetic construct
  source 1..75: mol_type = other DNA
atgcacgcttatcttcactgtctttcccactcgccgctggtgggctatgtcgacccggcacaggctgtgctcgac

SEQ ID NO: 61015 - DNA, 75 bp, synthetic construct
  source 1..75: mol_type = other DNA
atgccggttttatggatcgcgtcagcgccggcgcatcgcttctgtttcccgccggtccggtattaatggagtttg

SEQ ID NO: 61016 - DNA, 75 bp, synthetic construct
  source 1..75: mol_type = other DNA
gaaggggtgtgggcggacagatacaaaggcggcgatgaccatgacacagtattcagtggcggtatcgcggctggt

SEQ ID NO: 61017 - DNA, 75 bp, synthetic construct
  source 1..75: mol_type = other DNA
tgattggggcgataaatataaatcagatgttgatgtaaaaagtcatgacattatgcttggtgtaacctataactt

SEQ ID NO: 61018 - DNA, 75 bp, synthetic construct
  source 1..75: mol_type = other DNA
caaatcagataacacgcgcttcatgggaaaaaacagttaagcaattctatgacacgctggtggtccggtttgata

SEQ ID NO: 61019 - DNA, 75 bp, synthetic construct
  source 1..75: mol_type = other DNA
gaaaaagcgtgagctcaatagtgcaggagtctggttgcgtgaaggtcaggtcattgatcgtaacggcaacgtttc

SEQ ID NO: 61020 - DNA, 75 bp, synthetic construct
  source 1..75: mol_type = other DNA
ctccctgtcttacaaggatgcagaaggggataaatataaatcagaggctgacgttaaaagtcatgacatcatgtt

SEQ ID NO: 61021 - DNA, 75 bp, synthetic construct
  source 1..75: mol_type = other DNA
ctacgccaaaaaggcgctttcgctggccgacggggatgccgcagctggtagcactattgctggtgctgctggtcg

SEQ ID NO: 61022 - DNA, 75 bp, synthetic construct
  source 1..75: mol_type = other DNA
caccgttaccgctgcacctgcgccgcaagaaagcgcatgggggcctgctgcaactattgcggcgcgacagtcagc

SEQ ID NO: 61023 - DNA, 75 bp, synthetic construct
  source 1..75: mol_type = other DNA
gccagtatgggcaaagtgtacgaaaggtgtgtatccgtcttactgggaagaatggaaaaaaatccgggaggtggt

SEQ ID NO: 61024 - DNA, 75 bp, synthetic construct
  source 1..75: mol_type = other DNA
ggctcactgggtcaccgtgaaaccttcgcggatatcggccagactctggcaaaatattttggtacttctgatatg

SEQ ID NO: 61025 - DNA, 75 bp, synthetic construct
  source 1..75: mol_type = other DNA
gatgttgaacggccacagcagtacggacaaatcagcgtacccttaccgggggcggagctattcttcgcctgtcct

SEQ ID NO: 61026 - DNA, 75 bp, synthetic construct
  source 1..75: mol_type = other DNA
gctgcacggagaggctaaccataatgccgaagaaggcacggcagatcttgaattccacggcgaagagggaggata

SEQ ID NO: 61027 - DNA, 75 bp, synthetic construct
  source 1..75: mol_type = other DNA
gcgaatggatcgccgacttctacaccgtcaaccgtagtaatggtaagaacgggaagcgcatacgtaaaaaatttg

SEQ ID NO: 61028 - DNA, 75 bp, synthetic construct
  source 1..75: mol_type = other DNA
ggcgacctacgaacaggatgcgcgggggcggctgacagaagcggatgcgcggctggactaccacctgttttatga

SEQ ID NO: 61029 - DNA, 75 bp, synthetic construct
  source 1..75: mol_type = other DNA
aagccgctcgcaattactggtctgctcttgatagcgacaagaaaaatagcttccgttttcatcatatttctactg

SEQ ID NO: 61030 - DNA, 75 bp, synthetic construct
  source 1..75: mol_type = other DNA
aacgcgaaaaatagcgagacagcagcaaagacgagcgaaaccaacgcaaagtccagccaggcggcagcgaaaaca

SEQ ID NO: 61031 - DNA, 75 bp, synthetic construct
  source 1..75: mol_type = other DNA
ttgcgttctttatattctggttatgatggtttttctaactctagaaaaactgccttagtggatatgggatttaac

SEQ ID NO: 61032 - DNA, 75 bp, synthetic construct
  source 1..75: mol_type = other DNA
tttttggtcatatccgtaatctgcgtatctggcataaagaattaactgatgcgcaaatgggggagagtattaaat

SEQ ID NO: 61033 - DNA, 75 bp, synthetic construct
  source 1..75: mol_type = other DNA
tcatggatatgtttatcgatggcgcgcgccgtggctttactatcgccacgaccaacctgctgccaaacgtggtga

SEQ ID NO: 61034 - DNA, 75 bp, synthetic construct
  source 1..75: mol_type = other DNA
tatcgcgatttatcagaatgaattaaacctcctgtctgatgtggtcaatttacttgttaaacgcgctgtattcca

SEQ ID NO: 61035 - DNA, 75 bp, synthetic construct
  source 1..75: mol_type = other DNA
gctgcgaatgtgatactggaaatctgccgtcaggcggacgtggagccggggatattcacggtaatccacacatgg

SEQ ID NO: 61036 - DNA, 75 bp, synthetic construct
  source 1..75: mol_type = other DNA
tggccgcagcatttacgacagccgccctgcccgcctttgcggtggaaccatccgttcaggttggctactcgcctg

SEQ ID NO: 61037 - DNA, 75 bp, synthetic construct
  source 1..75: mol_type = other DNA
gtgtaaaagtcgctcctgcccgcactgcggagtgaaggctggcgcacagtggatacagtatctgctgagtctggt

SEQ ID NO: 61038 - DNA, 75 bp, synthetic construct
  source 1..75: mol_type = other DNA
gtgaagttctacggagcgggacatggcgcagggattaagcctatcgtcggggcagattttaacgtccagtgcgac

SEQ ID NO: 61039 - DNA, 75 bp, synthetic construct
  source 1..75: mol_type = other DNA
caggttttatcggcttccatatcgcgcagcgcctgctgaatgaagggcatgatgttgtcggaatcgacaacatga

SEQ ID NO: 61040 - DNA, 75 bp, synthetic construct
  source 1..75: mol_type = other DNA
gccgcaacaaccggttgcgccacagcagcaatatcagcagccgcaacagccggttgcgccgcagccgcagtatca

SEQ ID NO: 61041 - DNA, 75 bp, synthetic construct
  source 1..75: mol_type = other DNA
gttactggcagagatgagccgcattgctgcggatgtgatactggaaatctgccgccaggcagatgtggagccggg

SEQ ID NO: 61042 - DNA, 75 bp, synthetic construct
  source 1..75: mol_type = other DNA
ctgtcggtgtgaacgcgatgatcctgagcatgctttataaagcacagccagaagatgtgcgtttcatcatgatcg

SEQ ID NO: 61043 - DNA, 75 bp, synthetic construct
  source 1..75: mol_type = other DNA
attttgtcgggaatcagagaacaacagcatatgggataaatgaaacccgtccacggaatattgcatttaactata

SEQ ID NO: 61044 - DNA, 75 bp, synthetic construct
  source 1..75: mol_type = other DNA
cagctcaacggtaaaaaaggggcgattaatgtcctggatgctgtccgccgcattctcggtggccacaccccgccc

SEQ ID NO: 61045 - DNA, 75 bp, synthetic construct
  source 1..75: mol_type = other DNA
agcgtttgctgcacaggcgctttcggttggcaagatgcttgaatgggatgagcgtcgggtcaatgtcaatggtgg

SEQ ID NO: 61046 - DNA, 75 bp, synthetic construct
  source 1..75: mol_type = other DNA
ttgaaaatgaacttagaaatcttattgagtcagtaaagcgctacaatttaaaaataaaaaaggatagtgtggtat

SEQ ID NO: 61047 - DNA, 75 bp, synthetic construct
  source 1..75: mol_type = other DNA
caggatattcaggaaatggccgaaacctttgacccgcgtgtctatggttgccgcattaacctggaacatctgcgc

SEQ ID NO: 61048 - DNA, 75 bp, synthetic construct
  source 1..75: mol_type = other DNA
actggcggcaggcggcgggttacacgattctggccccgactgtggaggtggcggccaacgccttcaaccctgccc

SEQ ID NO: 61049 - DNA, 75 bp, synthetic construct
  source 1..75: mol_type = other DNA
gcaggttgcacaggctgtcagccagatggatcaggtgactcagcagaacgcctcgctggtagaagaagcggcggt

SEQ ID NO: 61050 - DNA, 75 bp, synthetic construct
  source 1..75: mol_type = other DNA
acgccgccgtcgagctttctcaccagaccaacaccctgccggaaattaccggacgcgtttgtccgcaagaccgtt

SEQ ID NO: 61051 - DNA, 75 bp, synthetic construct
  source 1..75: mol_type = other DNA
tctctgggacggttgaaagcggatataaagttgttgcaccaatttattcaacaacagttggtgaagttgcagaat

SEQ ID NO: 61052 - DNA, 75 bp, synthetic construct
  source 1..75: mol_type = other DNA
actggtctgattaaagcgaatattccgacccgtatcgcctttaccgtatccagtaagattgactcacgtaccatt

SEQ ID NO: 61053 - DNA, 75 bp, synthetic construct
  source 1..75: mol_type = other DNA
gcaatttacttgctgttccctttagtgccgctaccgatttcaccgatttggcggagtactgcgatcgcgttgcca

SEQ ID NO: 61054 - DNA, 75 bp, synthetic construct
  source 1..75: mol_type = other DNA
atgaagaatttttgtgttctgtttgtgatgtatttctggagtacattacttcatgctgtatcttcagagccattt

SEQ ID NO: 61055 - DNA, 75 bp, synthetic construct
  source 1..75: mol_type = other DNA
cttatctctgatgcgggtaatgcgctggagacggatattgcccatttccgttatgcctacgcgtcagataatcag

SEQ ID NO: 61056 - DNA, 75 bp, synthetic construct
  source 1..75: mol_type = other DNA
agtgtgccggatggcgttaatttccttgtggcgacagtggatgtgcaggcgggacgtcatcgccgttttgtggtt

SEQ ID NO: 61057 - DNA, 75 bp, synthetic construct
  source 1..75: mol_type = other DNA
atgaaacccaatgccgggacgctgcgcggtgtcagtctggcagcggtcgcgaactccgaagtcgatgcactgatt

SEQ ID NO: 61058 - DNA, 75 bp, synthetic construct
  source 1..75: mol_type = other DNA
aaaatcctgacgttcctgaataatcaggatatcggctcgctggtggcgctcataacgcgccggggaggttcaggt

SEQ ID NO: 61059 - DNA, 75 bp, synthetic construct
  source 1..75: mol_type = other DNA
agacagagaacgcagataaaagcgaatccccggacagcaacgatgactgccctgaatgtgaaatccccgtctcca

SEQ ID NO: 61060 - DNA, 75 bp, synthetic construct
  source 1..75: mol_type = other DNA
gaccacgccagcgatagtgaaactggcgagacggcagatcccttaattacggtgaacggtcatcgcattatcaca

SEQ ID NO: 61061 - DNA, 75 bp, synthetic construct
  source 1..75: mol_type = other DNA
tgtcgttcattatcggcgtgctgggcgcagaggttctggcatcctggctggtaaagcatacagggtttgacggtg

SEQ ID NO: 61062 - DNA, 75 bp, synthetic construct
  source 1..75: mol_type = other DNA
atatccatttatcgacaactgccggtggtgtgacgtcgggccacacctggaaaaatcttcatttttacgcccgta

SEQ ID NO: 61063 - DNA, 75 bp, synthetic construct
  source 1..75: mol_type = other DNA
agacagtgagaaaaacggcgatgcaaatcacctggagagggatgtatcagaggttactgaaggttgacccgctga

SEQ ID NO: 61064 - DNA, 75 bp, synthetic construct
  source 1..75: mol_type = other DNA
tggaaacaccaatctatggttatgtgtggctgaacatggaaacggcacatcagcttgagttgctatcgaatctga

SEQ ID NO: 61065 - DNA, 75 bp, synthetic construct
  source 1..75: mol_type = other DNA
gtcttgagaagaagatcagtagccgccccgcggaaaaaatccgccagtggcgacagcgttatgcccgtccgatac

SEQ ID NO: 61066 - DNA, 75 bp, synthetic construct
  source 1..75: mol_type = other DNA
gtgacggaagaggtcttcgaatcccctaactctatcgtctttgatgaagcagaaaaccgcatgcataccattaaa

SEQ ID NO: 61067 - DNA, 75 bp, synthetic construct
  source 1..75: mol_type = other DNA
tggtgttgttcatctccggactgttgccacactaaaaaggtctgcttccggtgtaaaagccgctcctgtccgcac

SEQ ID NO: 61068 - DNA, 75 bp, synthetic construct
  source 1..75: mol_type = other DNA
ttgcacttatccggagcgcccaccctgagttttatcactacccgggacgccttcaggggtatatcaatgccaacc

SEQ ID NO: 61069 - DNA, 75 bp, synthetic construct
  source 1..75: mol_type = other DNA
gctgttatcaccctgacggacagcaatgccagttttatggatcgcgtcagtgcaggcgcatcgcttctgtttccc

SEQ ID NO: 61070 - DNA, 75 bp, synthetic construct
  source 1..75: mol_type = other DNA
atctgttcactggcgctgattgctaacctgcaaaacaccgatgccgccgcaggtatgaccaaagaactggcgcag

SEQ ID NO: 61071 - DNA, 75 bp, synthetic construct
  source 1..75: mol_type = other DNA
gtaaatcctgcaagggctgtactcaagaggaatttcaccggttcttatggtcaaaattttgacttggttattaat

SEQ ID NO: 61072 - DNA, 75 bp, synthetic construct
  source 1..75: mol_type = other DNA
actggccgggatgattaaacaggcctggtgcagtgccctgggggtggatgccggatgctatgccacgctggcgca

SEQ ID NO: 61073 - DNA, 75 bp, synthetic construct
  source 1..75: mol_type = other DNA
cagaggcaaaatgcgcccgatggaggatgtgctgcttgatctctataaggcgacacaaaaatacggacaggtgga

SEQ ID NO: 61074 - DNA, 75 bp, synthetic construct
  source 1..75: mol_type = other DNA
agggagatgatgcagtggtatgcggattatattggttccctgacaagagagaatgttatccatggggattttaag

SEQ ID NO: 61075 - DNA, 75 bp, synthetic construct
  source 1..75: mol_type = other DNA
ttacggacacactggggatggtgacgtcgttcagctatgcaggagacaagaatcgccagctgacccattacagcg

SEQ ID NO: 61076 - DNA, 75 bp, synthetic construct
  source 1..75: mol_type = other DNA
ttaaatagacatgtcaataacgatttagttgatgagttagatttggaatatggctccgttatcatcaatatcggt

SEQ ID NO: 61077 - DNA, 75 bp, synthetic construct
  source 1..75: mol_type = other DNA
ccggaatgatgggcgttgctgccgcgcctgcagagcttccaccgttacatcctttggcacttcccgcgaaaggcg

SEQ ID NO: 61078 - DNA, 75 bp, synthetic construct
  source 1..75: mol_type = other DNA
tctggaaacgctggataaactgcgcgaaaagtccctctcagggcgcattgtggtattcagcgtctctaaccatga

SEQ ID NO: 61079 - DNA, 75 bp, synthetic construct
  source 1..75: mol_type = other DNA
taagtatgctgtgcgaaggaactcctaacgtaatgaatactattcaagaaagctttgatgtatttgttgctctaa

SEQ ID NO: 61080 - DNA, 75 bp, synthetic construct
  source 1..75: mol_type = other DNA
gctgactatctggcgaaggagcataccaaagttcactgcaccggtgagcgcaactttggctgcagtcgtggctga

SEQ ID NO: 61081 - DNA, 75 bp, synthetic construct
  source 1..75: mol_type = other DNA
tatttaagcaacttgaaccaatctcaaaacatcatcctctggtctttatcggtaggaacgatcctcgcaagccaa

SEQ ID NO: 61082 - DNA, 75 bp, synthetic construct
  source 1..75: mol_type = other DNA
gatatgggcatctaccacaatgtattctgatttgccgaaaaacatgctagcaaaaagccaaacctttgatactga

SEQ ID NO: 61083 - DNA, 75 bp, synthetic construct
  source 1..75: mol_type = other DNA
ttggcggcggcatggtggggctggcggttgcctgcggcttacaggggagcggcttacgcgttgccgtactggagc

SEQ ID NO: 61084 - DNA, 75 bp, synthetic construct
  source 1..75: mol_type = other DNA
tcgggtacaaaaccaactccccatttccttggtgcggttgtactggaacctcaatcaaaaaaaggattattaggt

SEQ ID NO: 61085 - DNA, 75 bp, synthetic construct
  source 1..75: mol_type = other DNA
gcgaatatgggtatcagagggagtgatgccgggacggcaatgcgtgccagcctggctcgtctggcatcaccgcca

SEQ ID NO: 61086 - DNA, 75 bp, synthetic construct
  source 1..75: mol_type = other DNA
atgaaaatcgccgatctcgctgaagcaataggagtggatgcggcgaatatctcgcgcctggaaacaggtaagcag

SEQ ID NO: 61087 - DNA, 75 bp, synthetic construct
  source 1..75: mol_type = other DNA
aaattgggattggtccctccagttcgcatactgtggggccaatgaatgccggaaaaagttttattgatcggctgg

SEQ ID NO: 61088 - DNA, 75 bp, synthetic construct
  source 1..75: mol_type = other DNA
caacaccggcactgacgcccctgatgctggatgaagccaccgggaaactggtggtctgggatggacagaaagccg

SEQ ID NO: 61089 - DNA, 75 bp, synthetic construct
  source 1..75: mol_type = other DNA
ccggcgattaccgcgctccgggatcactggccgggatgattaaacaggcgtggtgcagtgccctgggagtggata

SEQ ID NO: 61090 - DNA, 75 bp, synthetic construct
  source 1..75: mol_type = other DNA
ccttcgggaagccgagggctggggatggtgtgccggacgcatggaggccgttggtgagtgccgtgaggatgccgg

SEQ ID NO: 61091 - DNA, 75 bp, synthetic construct
  source 1..75: mol_type = other DNA
atggcgacgctgacagaagatgatgtgcttgagcaactggatgcacaggacaatttattttcatttatgaaaact

SEQ ID NO: 61092 - DNA, 75 bp, synthetic construct
  source 1..75: mol_type = other DNA
atgaatggcagggaaacaatagtggagaaaaatgtgaagaattctattttgttatttctgattgtttgttttttt

SEQ ID NO: 61093 - DNA, 75 bp, synthetic construct
  source 1..75: mol_type = other DNA
gttcttcttgagcaggtgctggctaacctggtactcaatgccgcccaggcaggcgctacgacggtatggtttagc

SEQ ID NO: 61094 - DNA, 75 bp, synthetic construct
  source 1..75: mol_type = other DNA
ccgacgaaagcaaacttcttcggacacctgaaaaagccgcagattatcgcagccctgaatgatgccggactgtcc

SEQ ID NO: 61095 - DNA, 75 bp, synthetic construct
  source 1..75: mol_type = other DNA
gatatcgttcatgccaggaaaattattaatgactggcggcaggattataacgaatgccgcccgcactccacgctg

SEQ ID NO: 61096 - DNA, 75 bp, synthetic construct
  source 1..75: mol_type = other DNA
cgacagtatggttaacggcgagcaatcgcagattgtgagcttaagagcgcaacttactgaagcaaaatataacct

SEQ ID NO: 61097 - DNA, 75 bp, synthetic construct
  source 1..75: mol_type = other DNA
acaaccgctgggtgcctggctggatgtgttcaccacgtccacagacggatgccactgaacgcgccgataacctgg

SEQ ID NO: 61098 - DNA, 75 bp, synthetic construct
  source 1..75: mol_type = other DNA
ccgtggccattgatattgcttatgaaggctccggcagtggcgactggcgcactgacggtttcatcgtgggtgtcg

SEQ ID NO: 61099 - DNA, 75 bp, synthetic construct
  source 1..75: mol_type = other DNA
cgctgccgctcgctaccaccgcgctgaatatgttcacctccgccagtaatgccggattcggtcgggaagatgaca

SEQ ID NO: 61100 - DNA, 75 bp, synthetic construct
  source 1..75: mol_type = other DNA
tcattctcgtgggacgcctgggaaaagatccggaagtccgttacatccccaacgggggcgcagtggcaaacctgc

SEQ ID NO: 61101 - DNA, 75 bp, synthetic construct
  source 1..75: mol_type = other DNA
aatgctggttggctcccgccgtatatcccaggacatcagcacccgtgatgaaggcgggggcggaacggtcgtggt

SEQ ID NO: 61102 - DNA, 75 bp, synthetic construct
  source 1..75: mol_type = other DNA
atggcagttcgtggaattaacaaggtcattctcgtgggacgtctgggaaaagatccggatgtccgttacatcccc

SEQ ID NO: 61103 - DNA, 75 bp, synthetic construct
  source 1..75: mol_type = other DNA
tcacgccagacaaactgggcgtggtggcgctggacccggatgcactctctatcagcggtttgcacaactatgtga

SEQ ID NO: 61104 - DNA, 75 bp, synthetic construct
  source 1..75: mol_type = other DNA
gcgactgacgacgctgaccgcacggaacaggtgcaggagaaagcgcccgtggaggaaatcagtctgccactgctg

SEQ ID NO: 61105 - DNA, 75 bp, synthetic construct
  source 1..75: mol_type = other DNA
taggcacaatgcttcacaggttccgcgttgatattccgcctttcgaagtgacaacgttttcgagctattacgatt

SEQ ID NO: 61106 - DNA, 75 bp, synthetic construct
  source 1..75: mol_type = other DNA
acggcaccttgtggctttaggtcggcaaacgctggcagtccaacgcctggaagaacaacaaaaatatttgcagaa

SEQ ID NO: 61107 - DNA, 75 bp, synthetic construct
  source 1..75: mol_type = other DNA
gggcttgcttcatcgggcaacgccgcaggtttacttactgcgccgttgtcgtctttacgccgcaccgcatcactg

SEQ ID NO: 61108 - DNA, 75 bp, synthetic construct
  source 1..75: mol_type = other DNA
gtgctgaccggaagtgatgacggtcgccacagcaacacgtctctggcgtggggggctggcgtgcagtttaacccg

SEQ ID NO: 61109 - DNA, 75 bp, synthetic construct
  source 1..75: mol_type = other DNA
aacgttattccggcgaacaaccggctggggcgaatccgttctcgctggatgattttgaattttcgccaatgaaag

SEQ ID NO: 61110 - DNA, 75 bp, synthetic construct
  source 1..75: mol_type = other DNA
gaagggacttaacaactttaagattgatattgcccgactattgagtcttaaaattcacaagctgtctctgggggt

SEQ ID NO: 61111 - DNA, 75 bp, synthetic construct
  source 1..75: mol_type = other DNA
gtccgctgctgcatcccgtgaaatgcggcgtgcactggcagaagtgacggatcagataaatacagctaaatcttc

SEQ ID NO: 61112 - DNA, 75 bp, synthetic construct
  source 1..75: mol_type = other DNA
tgtcacgggaccttgcccgttcactttcgacggtggcggtgcgtgtcgttgaagttattcctggcaaaccctatg

SEQ ID NO: 61113 - DNA, 75 bp, synthetic construct
  source 1..75: mol_type = other DNA
gcaccgttgtactgattaagatgaagcgcacccaatacatctgggttaccgttatcccggcagtatggctgctta

SEQ ID NO: 61114 - DNA, 75 bp, synthetic construct
  source 1..75: mol_type = other DNA
tgattgccgatgccaaacccgcaagtcgccaccttatcggcctgaacattatccaggacattcctggctatctgt

SEQ ID NO: 61115 - DNA, 75 bp, synthetic construct
  source 1..75: mol_type = other DNA
cttaccgccaccggcagattggtgaattatccggagggcaaaagaagcgggtgttcctcgcgcgttctattgcac

SEQ ID NO: 61116 - DNA, 75 bp, synthetic construct
  source 1..75: mol_type = other DNA
ttcatggcagaaaggtacactggtcggcggtcatgacgataacgattctgcgcttgatatctcgtacatgagtaa

SEQ ID NO: 61117 - DNA, 75 bp, synthetic construct
  source 1..75: mol_type = other DNA
ttggtgtacctgttccgtggcccactgccacaccgccagcaggctggttaaagtgcgacgggcgcacctttacaa

SEQ ID NO: 61118 - DNA, 75 bp, synthetic construct
  source 1..75: mol_type = other DNA
gcgcactgcgccgggccattgagccgctgggatacctcattcgcgtgtctgagtggtgggagttcggcggagaac

SEQ ID NO: 61119 - DNA, 75 bp, synthetic construct
  source 1..75: mol_type = other DNA
actattccccgaaatcgccaggcctgactgatgcatccgcctcgacatcaaaagatgcactgagtatcactgatg

SEQ ID NO: 61120 - DNA, 75 bp, synthetic construct
  source 1..75: mol_type = other DNA
gcatcaatgactgaaaacggtcatcgtcgggatatgcaccctgccgaacagattgccggattccgtgcgatggcg

SEQ ID NO: 61121 - DNA, 75 bp, synthetic construct
  source 1..75: mol_type = other DNA
gactgatgcatcggcctcaacgtcgaaagatgcgctgagtatcactgatgtgatggccgcgcagggcatgacaca

SEQ ID NO: 61122 - DNA, 75 bp, synthetic construct
  source 1..75: mol_type = other DNA
tcaaaatttcggcaaattcgcagtcattccagtcggagatccagcgggcttcccgcatgggcagtgaatattacc

SEQ ID NO: 61123 - DNA, 75 bp, synthetic construct
  source 1..75: mol_type = other DNA
gcagcagagcgcttgttcccgtcggtgcggtttcgtgtcagggaacgcagtcgccataaatccgcgctggtcatg

SEQ ID NO: 61124 - DNA, 75 bp, synthetic construct
  source 1..75: mol_type = other DNA
aagtaaataacaaaatacttgctgaccttatcaaggttggcgcatcagaagatgttgctaaaaatatcataacag

SEQ ID NO: 61125 - DNA, 75 bp, synthetic construct
  source 1..75: mol_type = other DNA
aacgtggtcacgctgacgggcgtgcataccgacctcgccactttgctggcgaatcatcagttgatggtggtgtag

SEQ ID NO: 61126 - DNA, 75 bp, synthetic construct
  source 1..75: mol_type = other DNA
agatgagtcctcgcagttcgatgacgaaatcgttgacaatatcttcggtgcactcaccagagactttctgaagta

SEQ ID NO: 61127 - DNA, 75 bp, synthetic construct
  source 1..75: mol_type = other DNA
tggatcacctggtcggcaaactgtttatggattatctgtcaccgctgaaacaacaacgtattcgtcagaaagttg

SEQ ID NO: 61128 - DNA, 75 bp, synthetic construct
  source 1..75: mol_type = other DNA
tgcggttccgtgtcagggaacgcagtcgccataaatccgcactggtcatgcagaagtacagccgtcagcaggcga

SEQ ID NO: 61129 - DNA, 75 bp, synthetic construct
  source 1..75: mol_type = other DNA
cgtcagtaaaatcaaaacatgatccgtcagataaaaaaccttctcgtccggacgcttcgcaaccggacacgcaga

SEQ ID NO: 61130 - DNA, 75 bp, synthetic construct
  source 1..75: mol_type = other DNA
atgactaaaaatatccgcaatctggcactggcaacgatgtcggggtttcgccataaaactgttgatgtgcctgaa

SEQ ID NO: 61131 - DNA, 75 bp, synthetic construct
  source 1..75: mol_type = other DNA
atggctctaaccgatatacagatcaaacgtgcaaaaccacaagacaaaccatacacattgaacgatggacaaggt

SEQ ID NO: 61132 - DNA, 75 bp, synthetic construct
  source 1..75: mol_type = other DNA
acggtcaatgacaaagcgggcaacccggcgagcaccacgcataatctggcggtggatctcaccgttccggtgctg

SEQ ID NO: 61133 - DNA, 75 bp, synthetic construct
  source 1..75: mol_type = other DNA
tgaaccaaattgttctgtctggaaccgatcttacccctgaacagctactggtaaggaaacggcaacaagcgatag

SEQ ID NO: 61134 - DNA, 75 bp, synthetic construct
  source 1..75: mol_type = other DNA
ccaaagtttccacgccagtgcatttacgaaaagcacgtacttgctatgatcatttagctggcgaagttgccgtta

SEQ ID NO: 61135 - DNA, 75 bp, synthetic construct
  source 1..75: mol_type = other DNA
ataccggaatgacgcccgccgattttcgcggctttgtttgtcagctcgccgactcgttgaatttcccgcaggatg

SEQ ID NO: 61136 - DNA, 75 bp, synthetic construct
  source 1..75: mol_type = other DNA
ttacccatccggtcaccgtcgatctggcggcggtcgccatcaccattaacactctctccggcgatgatgtgatca

SEQ ID NO: 61137 - DNA, 75 bp, synthetic construct
  source 1..75: mol_type = other DNA
caaaagcaagcaggtatcgacctgctgccggtgggtgattttgcctggtacgatcatgtcctgaccaccagcctg

SEQ ID NO: 61138 - DNA, 75 bp, synthetic construct
  source 1..75: mol_type = other DNA
cgcaaaccggaaatgatcaggcggtgaaagccgattgtgataaggtctggcaggaaattcgcagtaataacaaat

SEQ ID NO: 61139 - DNA, 75 bp, synthetic construct
  source 1..75: mol_type = other DNA
atgtcagtaacaaagtctgaaccaaaatctacccgtaaagcaagccgtaaacttgcaaaaacgcaggaaactgtc

SEQ ID NO: 61140 - DNA, 75 bp, synthetic construct
  source 1..75: mol_type = other DNA
tgtctgagaggagaggccggtgaaattgcagaatatgtacagccatccatcagcccggaaaaagccagagaactc

SEQ ID NO: 61141 - DNA, 75 bp, synthetic construct
  source 1..75: mol_type = other DNA
gagcactagagaagaccagaaaagtgcgccaaagatgcggtgaggtctttcgttatgcaatcataactggccgag

SEQ ID NO: 61142 - DNA, 75 bp, synthetic construct
  source 1..75: mol_type = other DNA
ctgatgagatacccgaatttctgcgtgccttagagagttacaccgggagtaaaattgtccagatagcaacgaaat

SEQ ID NO: 61143 - DNA, 75 bp, synthetic construct
  source 1..75: mol_type = other DNA
atgggatatacccgcagggaggcctgtgagcagcacggtgtttctcaggggtatttatcaggagcgctggttcgg

SEQ ID NO: 61144 - DNA, 75 bp, synthetic construct
  source 1..75: mol_type = other DNA
ccgtgagcaggtgctggccgtctatggtccggtacatgcccgcttgctgcgtcaggcactggaactgatcgctga

SEQ ID NO: 61145 - DNA, 75 bp, synthetic construct
  source 1..75: mol_type = other DNA
caaaaacattatccgttcttatccgcagaagagttacctcattttattcgagatctggaggcatataccggcagt

SEQ ID NO: 61146 - DNA, 75 bp, synthetic construct
  source 1..75: mol_type = other DNA
ttatccgcaggaagccgctgaatttacccgccgtatgaaaggcgaaatgccgtctgacttcgacgccaaagcgaa

SEQ ID NO: 61147 - DNA, 75 bp, synthetic construct
  source 1..75: mol_type = other DNA
aatgcccgcgacagtgggcaggtcattgatacagggttttgcctttttgctctgggaagactggcacaggagatc

SEQ ID NO: 61148 - DNA, 75 bp, synthetic construct
  source 1..75: mol_type = other DNA
actgacgcccgctatgcttgatttcctgaaaaccgatatagcaaaggcggcaaaccgatgcgcatcaacggcaga

SEQ ID NO: 61149 - DNA, 75 bp, synthetic construct
  source 1..75: mol_type = other DNA
cacctggcatccgttcttgaacatcggtcatcagaaggacatccggccattgtttctaacagtgacacatccctg

SEQ ID NO: 61150 - DNA, 75 bp, synthetic construct
  source 1..75: mol_type = other DNA
atggccgtttccggcctgcatggcatgatttgcgcttttggacgggagattcagcgtgctgattggctatgtaag

SEQ ID NO: 61151 - DNA, 75 bp, synthetic construct
  source 1..75: mol_type = other DNA
ctcatcccggaagggggtatccgtacggatgatgagcgcacccaccggtaccattacgacagtcagcaccggctg

SEQ ID NO: 61152 - DNA, 75 bp, synthetic construct
  source 1..75: mol_type = other DNA
atgaccagaagcaacgaggagcagccgatcaatctcgtcaaaactggcttacatgcttaggatcgctctatgaat

SEQ ID NO: 61153 - DNA, 75 bp, synthetic construct
  source 1..75: mol_type = other DNA
aaccgacggcttacctgtcgagtgtcaggctaacacacaaccagagacgggggtgattcatgaaaatcaagcatg

SEQ ID NO: 61154 - DNA, 75 bp, synthetic construct
  source 1..75: mol_type = other DNA
gtgaaaactgaaatcgcgaaagcctccaatgttgcagctaaagccggtgaaaacgtgggcaggtggattgatgat

SEQ ID NO: 61155 - DNA, 75 bp, synthetic construct
  source 1..75: mol_type = other DNA
gatgtcaaacgttattcacagggtaacccaacgcctcctggcgtttataacgtccgtgtgtttatcaaccaacaa

SEQ ID NO: 61156 - DNA, 75 bp, synthetic construct
  source 1..75: mol_type = other DNA
tgtttctaacagtgacacatccctgattcgttcgctgtatcgcaatttcactcaccactacatcaaggcaaaacg

SEQ ID NO: 61157 - DNA, 75 bp, synthetic construct
  source 1..75: mol_type = other DNA
gatattcacggtaatccacacatggggacgagaccagcagtggcatccgcacattcacctgtcaacaacagccgg

SEQ ID NO: 61158 - DNA, 75 bp, synthetic construct
  source 1..75: mol_type = other DNA
ggaagatgttgtgtacgtcataacggagacggtgagaaagacggcgatgcaaatcaggtggagagggatgtatca

SEQ ID NO: 61159 - DNA, 75 bp, synthetic construct
  source 1..75: mol_type = other DNA
atctgtactgttaaaaccattcacagcaatgaatttaagcaactggtttccgctggtggcgcggtggttgagcat

SEQ ID NO: 61160 - DNA, 75 bp, synthetic construct
  source 1..75: mol_type = other DNA
aacgaatgacccatgcgcatttcaaattacgaaatcgcttatcagccagtactgcgccacccgaagaagtcaggg

SEQ ID NO: 61161 - DNA, 75 bp, synthetic construct
  source 1..75: mol_type = other DNA
atgacgtatgcgcatttttcgccggactttttacaggatgcaatcagctttaatccgctggctgaaagtgtccat

SEQ ID NO: 61162 - DNA, 75 bp, synthetic construct
  source 1..75: mol_type = other DNA
cgactcgatggagatgcgcggcgtgttgccattctgtgtctttccacgggggcaaggtggggtgaagcagctggt

SEQ ID NO: 61163 - DNA, 75 bp, synthetic construct
  source 1..75: mol_type = other DNA
actatggtttacgctcattttgcgccagagtaccttcaggacgccatttctcttaatccgctaagaggtggtact

SEQ ID NO: 61164 - DNA, 75 bp, synthetic construct
  source 1..75: mol_type = other DNA
ctggctggcatcgtgcggcctgaccgtggagcagatgcaaaaccagatggacccggtgtacacgccggcgcgaaa

SEQ ID NO: 61165 - DNA, 75 bp, synthetic construct
  source 1..75: mol_type = other DNA
ccagaaaaacacgctgaactgaatacgaaagtagacaataacaaaactagcactgaccgtgttattgcttccaac

SEQ ID NO: 61166 - DNA, 75 bp, synthetic construct
  source 1..75: mol_type = other DNA
caagcgcgataccgccgatcgcgcactgctaactcgccatgttcgtcatcatggtgacgccgttgccatcgtcgt

SEQ ID NO: 61167 - DNA, 75 bp, synthetic construct
  source 1..75: mol_type = other DNA
gttcggcagcaagtgttgttatcaccagttcgctattcgaatgccgaaagcaccagcatatcgttgatgcactga

SEQ ID NO: 61168 - DNA, 75 bp, synthetic construct
  source 1..75: mol_type = other DNA
gccctgaccggagacggggggaataacctgctggcagcgttctacatccagacagatgcaaaagacctgaatgtg

SEQ ID NO: 61169 - DNA, 75 bp, synthetic construct
  source 1..75: mol_type = other DNA
gttgcttgtggtgatttgtacatatccggtaaatacggtgtttttgtatcagaacaggcgtatcaggcgtggtgt

SEQ ID NO: 61170 - DNA, 75 bp, synthetic construct
  source 1..75: mol_type = other DNA
tggtgctgttcgtcaccggactgttgccacaccaaaaagatctgcttccggtgtaaagccgctcctgtccgaact

SEQ ID NO: 61171 - DNA, 75 bp, synthetic construct
  source 1..75: mol_type = other DNA
tcagcggaatgcctttagcgggaaaagttcaggtgaaatggggagaagaggaaaatgctcactgtgtcgccaatt

SEQ ID NO: 61172 - DNA, 75 bp, synthetic construct
  source 1..75: mol_type = other DNA
ttgtcattcttggagctgaaaaaacattcaataatatctacataaccagtggtgatggaactgtccgactgaatg

SEQ ID NO: 61173 - DNA, 75 bp, synthetic construct
  source 1..75: mol_type = other DNA
ttcgtctaccttgctgaactattcacggctcactatacggagctgcgcggccgcacgctggccgccgctgccgct

SEQ ID NO: 61174 - DNA, 75 bp, synthetic construct
  source 1..75: mol_type = other DNA
ttgttcgccagagcccgggggtgcagggggaggaggcgattgtcctccccctgcgcgctccttgcgccagtggca

SEQ ID NO: 61175 - DNA, 75 bp, synthetic construct
  source 1..75: mol_type = other DNA
cccaacgatcctgataatcgtcgcgagttaccacctagtgcattgcgcggtctggtcaaatcgggctttatcaat

SEQ ID NO: 61176 - DNA, 75 bp, synthetic construct
  source 1..75: mol_type = other DNA
taccaaaagagatggctacgcctgctgaattcgctgaatgggaaggtatttcccgtgggtctgtttaccaaaaaa

SEQ ID NO: 61177 - DNA, 75 bp, synthetic construct
  source 1..75: mol_type = other DNA
cagttaaagccaggtgcgtattttcatgaaaggagatcactcaataacttccatcgagatcgggtaataacattt

SEQ ID NO: 61178 - DNA, 75 bp, synthetic construct
  source 1..75: mol_type = other DNA
ccggatagccctgaaaagagattacaacaagctattgaatcattacattcagaggcaagggctaataaaaacaca

SEQ ID NO: 61179 - DNA, 75 bp, synthetic construct
  source 1..75: mol_type = other DNA
ggtccctggtgttccacaaccggtggttactggcagagatgagccgcattgcagcggatgtgatactggaaatct

SEQ ID NO: 61180 - DNA, 75 bp, synthetic construct
  source 1..75: mol_type = other DNA
tgctgacgctccgggaagtgattatcacaagcacaaccaccacgcaggtggctccaaagtccaatatgaagttag

SEQ ID NO: 61181 - DNA, 75 bp, synthetic construct
  source 1..75: mol_type = other DNA
gtatcaacaagagtaaccaaatgtctatcagaaagcgataacggtatctatgatgctttaaataaaggtataaat

SEQ ID NO: 61182 - DNA, 75 bp, synthetic construct
  source 1..75: mol_type = other DNA
gttccgtactgatgtattgcgtaagttcggtttctctgatcgtactaaagtcgaagaccttgatctcacctggac

SEQ ID NO: 61183 - DNA, 75 bp, synthetic construct
  source 1..75: mol_type = other DNA
tattggtattatcgggggaggtaaacataaaccctgtggcaatattgatattgcggtggtgcagtccatatccag

SEQ ID NO: 61184 - DNA, 75 bp, synthetic construct
  source 1..75: mol_type = other DNA
aatggcgttgatatgcgcaacatacggaaccgcgttcttgaaatgctggcctacaatcgccgcgttgaactgtat

SEQ ID NO: 61185 - DNA, 75 bp, synthetic construct
  source 1..75: mol_type = other DNA
agcgcaaaatcagcagcggaagactttgcgaaggcagtctttgatcgcatcgagttcattcgtactaacggaggt

SEQ ID NO: 61186 - DNA, 75 bp, synthetic construct
  source 1..75: mol_type = other DNA
atgattttacaacacatggggcgaaaaggtcgtacacccgctcatgtccgcgcgtggacacctgaagaagatgcg

SEQ ID NO: 61187 - DNA, 75 bp, synthetic construct
  source 1..75: mol_type = other DNA
aatgatgtggatatgcgcaacatacggatccgcgttcttgaaatgctggcataccgtcgccgcgtgcagacgtac

SEQ ID NO: 61188 - DNA, 75 bp, synthetic construct
  source 1..75: mol_type = other DNA
gcgccggagtcggtgctgatgcaggatggcgcattcagcctgacggcaccgccggtacagggaatgccggtacag

SEQ ID NO: 61189 - DNA, 75 bp, synthetic construct
  source 1..75: mol_type = other DNA
ctggacacagcgcagaaggtcattgtgggtgcagcattgctggcaaaggtcagaaagccggaggaggtgcagttg

SEQ ID NO: 61190 - DNA, 75 bp, synthetic construct
  source 1..75: mol_type = other DNA
ataatcataatgacaagccatttgttagaaagttagcgagagaccttgaaaatcacggtgtccattattggcttg

SEQ ID NO: 61191 - DNA, 75 bp, synthetic construct
  source 1..75: mol_type = other DNA
actatgcgcgtgttgttgctgaggtgatgcgccgtgatggtatagaacttaatggcgtggatatgcgcaacatac

SEQ ID NO: 61192 - DNA, 75 bp, synthetic construct
  source 1..75: mol_type = other DNA
ttcagtacaccagtaactcagtaggagatggtgttaattttattgccgtcagaccacgtaacattgcatttaact

SEQ ID NO: 61193 - DNA, 75 bp, synthetic construct
  source 1..75: mol_type = other DNA
ggccgggcggttatgccctggtatttactgactggcgacaactaccagctttaaccgatgcgtttcaggccagcg

SEQ ID NO: 61194 - DNA, 75 bp, synthetic construct
  source 1..75: mol_type = other DNA
ctcgtcccaacctactcaggcgggataattactgtccgaatggaccttgatcaaagccagttgcaggaagggaaa

SEQ ID NO: 61195 - DNA, 75 bp, synthetic construct
  source 1..75: mol_type = other DNA
aaggtgcgcctgtactccaagatcggccaggccctgctggaggccaaggaaagcggcagcgatccctacgccgcc

SEQ ID NO: 61196 - DNA, 75 bp, synthetic construct
  source 1..75: mol_type = other DNA
atgccgcgtcgctcgattctctcggccactgagcgagacaccttgcttgcgctgccagaaagccaggatgacctg

SEQ ID NO: 61197 - DNA, 75 bp, synthetic construct
  source 1..75: mol_type = other DNA
gaccaggttgcggcaggacgtcagcaactcgagcgcggcgatgtgcttccccatgacatggtcgaatcttctgct

SEQ ID NO: 61198 - DNA, 75 bp, synthetic construct
  source 1..75: mol_type = other DNA
aaaaaatccgatggcgacagtcagtgccggtgatggttatccggtcgccattctgaatcgcaatcagccggcatt

SEQ ID NO: 61199 - DNA, 75 bp, synthetic construct
  source 1..75: mol_type = other DNA
gaaataggcgagaaatttgaattatccgagagtacggtgaattttatttatcaccatcgccggactgccgaagat

SEQ ID NO: 61200 - DNA, 75 bp, synthetic construct
  source 1..75: mol_type = other DNA
cttccccatgacatggtcgaatcttctgctgctgcatggcgggatgaaatgagcaggaaggttgccggtaaatga

SEQ ID NO: 61201 - DNA, 75 bp, synthetic construct
  source 1..75: mol_type = other DNA
cctggtacttccagcaggcaggcaacgggattttcgctcgccaggcgttactggcactggttctgaatcgcgatc

SEQ ID NO: 61202 - DNA, 75 bp, synthetic construct
  source 1..75: mol_type = other DNA
gaagcaaccgttaatcgcgagcagtcatatctacatgctgtttttgccgaactgaagcgccttggggagtggtct

SEQ ID NO: 61203 - DNA, 75 bp, synthetic construct
  source 1..75: mol_type = other DNA
gctggtgatcaccggctgggtggaggcgacgcccgttcgttacgatgcccgttcggtcagcaccggtattgccgg

SEQ ID NO: 61204 - DNA, 75 bp, synthetic construct
  source 1..75: mol_type = other DNA
ggtcaggtattcgatcagactatcggtaacactatccagcccgtgactgctgtgtctggtctttcggctctggag

SEQ ID NO: 61205 - DNA, 75 bp, synthetic construct
  source 1..75: mol_type = other DNA
tatcgctcctgaagtaagaggaaaaacgatgctcttggggcattggtttggtggaaaggatattcctgatcctta

SEQ ID NO: 61206 - DNA, 75 bp, synthetic construct
  source 1..75: mol_type = other DNA
ttttaactggtcgtatacggtgacggagttcaccctttacgcctcctcgtttgcccgtggacgcacacgctacac

SEQ ID NO: 61207 - DNA, 75 bp, synthetic construct
  source 1..75: mol_type = other DNA
caagccgcatagcgttagtaccggtaatggctgcagagcccactggcatcgagaaactcagagagctggttgttt

SEQ ID NO: 61208 - DNA, 75 bp, synthetic construct
  source 1..75: mol_type = other DNA
aggtgatgagtatgtggcgttaccggataacgcggttactgtcacggaaatatccggacctggtgataccggatg

SEQ ID NO: 61209 - DNA, 75 bp, synthetic construct
  source 1..75: mol_type = other DNA
tctataaaaaggttgccgctgattgtgaggtgtttatatctcgtgccagagctttatttgaggacgcaaacaggg

SEQ ID NO: 61210 - DNA, 75 bp, synthetic construct
  source 1..75: mol_type = other DNA
atggacagcgaggagcctccgaacgttcgggtcgcctgctcgggtgatatcgacgaggttgtgcggctgatgcac

SEQ ID NO: 61211 - DNA, 75 bp, synthetic construct
  source 1..75: mol_type = other DNA
cgcgtgcagaaagatgaaacgcttgccgacgccttcgcccgcttaacgcaggcggagctgggcctgagcctgccg

SEQ ID NO: 61212 - DNA, 75 bp, synthetic construct
  source 1..75: mol_type = other DNA
cagatattcccgtggcgagcgataacccagcgcactatgcggatgccattcgttataatgctcgaacgcctctgc

SEQ ID NO: 61213 - DNA, 75 bp, synthetic construct
  source 1..75: mol_type = other DNA
acaactctaatgagcgggcaattggtgaaatgtatgtcgttcctgccgatactcgcccacggaatatcgcattta

SEQ ID NO: 61214 - DNA, 75 bp, synthetic construct
  source 1..75: mol_type = other DNA
ctggcactgcttacacccttcaacatcggcatgctgaccagcgatgactggggcagctatggccgggaggtgccg

SEQ ID NO: 61215 - DNA, 75 bp, synthetic construct
  source 1..75: mol_type = other DNA
ctgaagaatacccggaactggcaaaggcttatccgacaaataaattacctgatttacgcggtgagtttattcgtg

SEQ ID NO: 61216 - DNA, 75 bp, synthetic construct
  source 1..75: mol_type = other DNA
ctgatcgggattggtgttctcggtgaatatataggtagaatttacttagaaacaaaatcaagacctaagtatatt

SEQ ID NO: 61217 - DNA, 75 bp, synthetic construct
  source 1..75: mol_type = other DNA
tatagcgcctgaagttagggggaaaacgatgctatttggtcactggttggagcagcgcgatatacctgaccccta

SEQ ID NO: 61218 - DNA, 75 bp, synthetic construct
  source 1..75: mol_type = other DNA
atgcctgccggtagtgcatttgctatagtagggcacttttttaattccatcacggatgtcgtagttcagaccatg

SEQ ID NO: 61219 - DNA, 75 bp, synthetic construct
  source 1..75: mol_type = other DNA
tgagaaaaacggcgatgcaaatcaggtggagagggatgtatcagaggttaccgactggcagagctggtcctgatg

SEQ ID NO: 61220 - DNA, 75 bp, synthetic construct
  source 1..75: mol_type = other DNA
taccgacactcaagttaatgcagggaaagttcttcctgaagtatttgcttccggtaaaaatgcagaagtttgggc

SEQ ID NO: 61221 - DNA, 75 bp, synthetic construct
  source 1..75: mol_type = other DNA
gcaaaacgcgctgccgccgtgctctggacaagcctttccggcagataacaatggctatgcgccgccaccgtgtcg

SEQ ID NO: 61222 - DNA, 75 bp, synthetic construct
  source 1..75: mol_type = other DNA
ttacaacgattatatctcagcgatcgcctatgcacgggcggaagaagaatgggagaggaaattctccccctgtcc

SEQ ID NO: 61223 - DNA, 75 bp, synthetic construct
  source 1..75: mol_type = other DNA
atggctaaatcagcagcagagcgcaaagccgctcagagagccagacaagctgaatccggtgtacgtaagctggag

SEQ ID NO: 61224 - DNA, 75 bp, synthetic construct
  source 1..75: mol_type = other DNA
tcagcgtcaaaatacgaaaacaacctggcatggagccttggtgtcggtgttaaatacgatgtgacgcaggatttc

SEQ ID NO: 61225 - DNA, 75 bp, synthetic construct
  source 1..75: mol_type = other DNA
gcctgaagaactcccagttcgattttctccatccgtggtatgaaacgcctgataatctctttttcagtcagcata

SEQ ID NO: 61226 - DNA, 75 bp, synthetic construct
  source 1..75: mol_type = other DNA
caaaagcggctgcggctgtccgtaaaatcacgattgaagcaaaccagaccgctgattttgaagataatgacttca

SEQ ID NO: 61227 - DNA, 75 bp, synthetic construct
  source 1..75: mol_type = other DNA
cggtcccgacccctggtcggcggaatccgtcgaatttacggctaaggacggtactcgtctgcaaggctggtttat

SEQ ID NO: 61228 - DNA, 75 bp, synthetic construct
  source 1..75: mol_type = other DNA
tgtcgccttaaccgattacgaccgttttccggagaatatcgacagcgagggtgatggtttctccctggcctcaaa

SEQ ID NO: 61229 - DNA, 75 bp, synthetic construct
  source 1..75: mol_type = other DNA
catgactattaccggctttacgccgcttgctgacagcactgttgaagcccgcgcacgtcgaggtcgcaaaggggc

SEQ ID NO: 61230 - DNA, 75 bp, synthetic construct
  source 1..75: mol_type = other DNA
attctggagatgtcccgcgccctgatgtaccgccgtctgcgtgccgcgaccgaatccctgaacagtgacagcgac

SEQ ID NO: 61231 - DNA, 75 bp, synthetic construct
  source 1..75: mol_type = other DNA
tgatgctgcagatgccgctgccatttgtgaagctgttacccgtcctaatatgcggtttgttcccataaaatcagt

SEQ ID NO: 61232 - DNA, 75 bp, synthetic construct
  source 1..75: mol_type = other DNA
acaggataacgaagctcctccggtaaaaatgccttttctgaccgcgttaaaaacagttagtaaaaataaacgctt

SEQ ID NO: 61233 - DNA, 75 bp, synthetic construct
  source 1..75: mol_type = other DNA
actggtggcagccgacaaaagcaaacttcttcggacacctgaaaaagccgcagattatcgcagccctgaatgagg

SEQ ID NO: 61234 - DNA, 75 bp, synthetic construct
  source 1..75: mol_type = other DNA
cggtattgccagcggtactattattagtagtggtttccagctcatttccagtggcggcagtgccactgacaccac

SEQ ID NO: 61235 - DNA, 75 bp, synthetic construct
  source 1..75: mol_type = other DNA
atgctgcccttgccggggtggacagaacgattgttgaagtgatggggctctgtgcgcagttcacctcgggggcac

SEQ ID NO: 61236 - DNA, 75 bp, synthetic construct
  source 1..75: mol_type = other DNA
gcgccgcaactggtttctccataccgtatgggtggccgtcatgggaaaaatgatgctgcagatgccgctgccatt

SEQ ID NO: 61237 - DNA, 75 bp, synthetic construct
  source 1..75: mol_type = other DNA
tggtggccgcagcctgtgtatttgcagcaaatgcaggtgctgaggaaggtaaaagcggtttttatctgaccggta

SEQ ID NO: 61238 - DNA, 75 bp, synthetic construct
  source 1..75: mol_type = other DNA
tgtacttatctccattggtggttttggtcatcagataatttcctgcatgttaagtgccctggtcgttgaatcttt

SEQ ID NO: 61239 - DNA, 75 bp, synthetic construct
  source 1..75: mol_type = other DNA
ccgattgttccgcaatgagtaacacctggcgaggttctctggagtcattggcgtggtttatgcgctactggcgcg

SEQ ID NO: 61240 - DNA, 75 bp, synthetic construct
  source 1..75: mol_type = other DNA
gccattttaccctcctttttaagctatgcggaaagttatttcaacccggcatttttattagagaatggcacatcc

SEQ ID NO: 61241 - DNA, 75 bp, synthetic construct
  source 1..75: mol_type = other DNA
catggctattatgtttgtccgatgagaagactgcatcgatgtgacaggccatcaataaagagagatttggttgat

SEQ ID NO: 61242 - DNA, 75 bp, synthetic construct
  source 1..75: mol_type = other DNA
gaaatatgtcccgacaaaagaggattgtaacgacagaccaaactatgaaattcaggcgttattcacggccccgcc

SEQ ID NO: 61243 - DNA, 75 bp, synthetic construct
  source 1..75: mol_type = other DNA
cggtgatgcgtttgatgctgaccggatgctggaggatgaaacgctctctttaagcctgaccggtactaacgggca

SEQ ID NO: 61244 - DNA, 75 bp, synthetic construct
  source 1..75: mol_type = other DNA
gatattatgctgccggacgtgaacggctgggatatcgtgcgcatgttgcgttccgccaataaagggatgccgatt

SEQ ID NO: 61245 - DNA, 75 bp, synthetic construct
  source 1..75: mol_type = other DNA
gcaaaacctgatcgatggttgttaccctatcgaaaaagaaaaacaaattacaacttatctcgataaagggaaaat

SEQ ID NO: 61246 - DNA, 75 bp, synthetic construct
  source 1..75: mol_type = other DNA
tgcactgaaagccggtgataaatacgccacgatacgtacgatgctgacagatatatttaacagtaattaccagtg

SEQ ID NO: 61247 - DNA, 75 bp, synthetic construct
  source 1..75: mol_type = other DNA
gaggcctactaaaggatattgagtcaagcaatgtacttacagttgagcagcaggcagagacagatcaaatagcaa

SEQ ID NO: 61248 - DNA, 75 bp, synthetic construct
  source 1..75: mol_type = other DNA
acaaactggttcgtgacactgacaaagttttccctaatcctggtaattcaaacctgggactgataactgcttttt

SEQ ID NO: 61249 - DNA, 75 bp, synthetic construct
  source 1..75: mol_type = other DNA
atgaaccgattctcaaaaactcaaatttatttacattggataacgctgcttttcgttgcaataacctatgccgcg

SEQ ID NO: 61250 - DNA, 75 bp, synthetic construct
  source 1..75: mol_type = other DNA
gggtagacactatgccgactgataacccgaacattactgacgttaatcacagctcgactgacagcgctgccgttg

SEQ ID NO: 61251 - DNA, 75 bp, synthetic construct
  source 1..75: mol_type = other DNA
ttaaagagcattatcgttgtcatcctaaaatcattcaattttgtaataagcagttttatgataatgctctgatac

SEQ ID NO: 61252 - DNA, 75 bp, synthetic construct
  source 1..75: mol_type = other DNA
tttaaatccgagctacaaagcgccctgatgcaatgggattacagcgcgaaggataaggctgaccgtatccttaac

SEQ ID NO: 61253 - DNA, 75 bp, synthetic construct
  source 1..75: mol_type = other DNA
atcattttccctaaaattggcggagcaattgcaactaataaacgaagaattttagttcaggatacagctattgat

SEQ ID NO: 61254 - DNA, 75 bp, synthetic construct
  source 1..75: mol_type = other DNA
gtcgatggtattaatctcgctgaactgattaacaaggtcgctgaaaacggttattcactccgcgtggtggatgaa

SEQ ID NO: 61255 - DNA, 75 bp, synthetic construct
  source 1..75: mol_type = other DNA
acggcggaagctaaaggggatatggcgactgcggttggttttaatgcgctggctaatgccggtaatgctctggcc

SEQ ID NO: 61256 - DNA, 75 bp, synthetic construct
  source 1..75: mol_type = other DNA
cggcagctgcttaccagacactctcgcaactcgtttacaaactgcttactgcagaacaggaatacgagacaaccg

SEQ ID NO: 61257 - DNA, 75 bp, synthetic construct
  source 1..75: mol_type = other DNA
tatccgcgccatgcgcctaccggtacccctgttttagtggacggcgtgcgcaccatgacggtggggaccgtctcg

SEQ ID NO: 61258 - DNA, 75 bp, synthetic construct
  source 1..75: mol_type = other DNA
agaggcaaatgccgctcagaatgaaacggttgccctggggcatggagcaaccgttactgtcgcaaaggggaacgt

SEQ ID NO: 61259 - DNA, 75 bp, synthetic construct
  source 1..75: mol_type = other DNA
aaaaaggcgcacttgaagtggcgcgggaaatagcctgccggctttggaatatgggctggccgccggaacggattc

SEQ ID NO: 61260 - DNA, 75 bp, synthetic construct
  source 1..75: mol_type = other DNA
ctgcaactgaccgatatatcaaaatcggcgacgtatacgctgctgattgacagcattgcggtggaagtgaacagc

SEQ ID NO: 61261 - DNA, 75 bp, synthetic construct
  source 1..75: mol_type = other DNA
cggaagaaacccgcaaacaaatcctggatgtggcagagttctgcttttgtgagacgggcttttcgaagacgacac

SEQ ID NO: 61262 - DNA, 75 bp, synthetic construct
  source 1..75: mol_type = other DNA
gtgcgctgatttcgacagctggttatggtgcggagttcatccagccagttgtgagtgaggggagcatctcatcac

SEQ ID NO: 61263 - DNA, 75 bp, synthetic construct
  source 1..75: mol_type = other DNA
gggaaccaatcgtgtgattcaccttattaagcccgcaatcgacgctctccggagtcagatggcactaacgagact

SEQ ID NO: 61264 - DNA, 75 bp, synthetic construct
  source 1..75: mol_type = other DNA
atacggaaagttatttaaaaaacttgataccagtccatataaaatgtcaattatcctagcattagcaattgattg

SEQ ID NO: 61265 - DNA, 75 bp, synthetic construct
  source 1..75: mol_type = other DNA
ctttggcgcatttgataacgaatggcatacgctggctttccgctttgccgggaataacagccttcaggtgacgcc

SEQ ID NO: 61266 - DNA, 75 bp, synthetic construct
  source 1..75: mol_type = other DNA
tgagcgtacggtttaagttgccgggttcactggtgccgaatcagtttgccctgggcatttactggcagttgtcgt

SEQ ID NO: 61267 - DNA, 75 bp, synthetic construct
  source 1..75: mol_type = other DNA
aaagatgggttcccgcccggctttacgcacgatataccgccgctgacaccgtgctttgcgaactgctaccggact

SEQ ID NO: 61268 - DNA, 75 bp, synthetic construct
  source 1..75: mol_type = other DNA
tgcgcacttcagaaagggctaccttcagaatcccgtcttgccgaaagcatcattgaaaagtgcctcgaaaaatat

SEQ ID NO: 61269 - DNA, 75 bp, synthetic construct
  source 1..75: mol_type = other DNA
aaaccagatccgaacgttctggcgcaaagccggagtgataacccgccagcttgacgggcatgggttcacgatgca

SEQ ID NO: 61270 - DNA, 75 bp, synthetic construct
  source 1..75: mol_type = other DNA
gacaatggcggcgctagtctgtatcgcgcaaaatgacagccaacagttgctcgacgaaatcgtccaacaagaggg

SEQ ID NO: 61271 - DNA, 75 bp, synthetic construct
  source 1..75: mol_type = other DNA
ggatgagtgagcctgttcatgtggatacggatatcaccgaagtggcgaaaaataatgcgcttactgatgatgatt

SEQ ID NO: 61272 - DNA, 75 bp, synthetic construct
  source 1..75: mol_type = other DNA
cgttacaacagtcaccgaacaaaacgggaagaatacctgttgatgagtggagatgagttcatggaaaggttctcc

SEQ ID NO: 61273 - DNA, 75 bp, synthetic construct
  source 1..75: mol_type = other DNA
aattacgatccctccaacgtgattatgctcaccggacgcgcctccgttgtggagcgccttacggaagtgatccag

SEQ ID NO: 61274 - DNA, 75 bp, synthetic construct
  source 1..75: mol_type = other DNA
caccatcgctgcgtccttcggtaacgtacacggtgtttacaagccgggtaacgtggttctgactccgaccatcct

SEQ ID NO: 61275 - DNA, 75 bp, synthetic construct
  source 1..75: mol_type = other DNA
ctaaaattcagcgattttttatctaattccgaaaaagaagaagatcgaaacctagcgttaaaaataatatctgca

SEQ ID NO: 61276 - DNA, 75 bp, synthetic construct
  source 1..75: mol_type = other DNA
aagttcaaaaaactcggcatgattgactgggtttcacacggtaaattctcagttttctcggtagagaaatatgac

SEQ ID NO: 61277 - DNA, 75 bp, synthetic construct
  source 1..75: mol_type = other DNA
tggcaatggcgaacaagctggcacggacagtgtgggcaatagtcgctcatgatcgtaagtacgacaaaaatcatg

SEQ ID NO: 61278 - DNA, 75 bp, synthetic construct
  source 1..75: mol_type = other DNA
tatatgccaacagccctgctgcgcggtatttttcataatgttcccgattcgtgtttccggcagtggattaaatag

SEQ ID NO: 61279 - DNA, 75 bp, synthetic construct
  source 1..75: mol_type = other DNA
ccggtgattgccgacaataacgatctcacgacactaacagcaacagtcgctgatacagagggcaatgcgatagcc

SEQ ID NO: 61280 - DNA, 75 bp, synthetic construct
  source 1..75: mol_type = other DNA
atgaatgcagccattgttaacggactgaaatcactctccggtgccggagggtggcttggtacggtcggcggatgg

SEQ ID NO: 61281 - DNA, 75 bp, synthetic construct
  source 1..75: mol_type = other DNA
agcattaatgttactccggtgcttgatggtgtggatggacaggcgtttgacctggtgaaatgggccaatactgct

SEQ ID NO: 61282 - DNA, 75 bp, synthetic construct
  source 1..75: mol_type = other DNA
aaaaagagctcagttggttatcgttcaatgaacgcgtgcttcaggaagcggcggacaaatctaacccgctgattg

SEQ ID NO: 61283 - DNA, 75 bp, synthetic construct
  source 1..75: mol_type = other DNA
actttaacgaaaaaaccgcgcgtctttatactgactattcgttgctgaccgccgatgcgcgcatcaccaacgaag

SEQ ID NO: 61284 - DNA, 75 bp, synthetic construct
  source 1..75: mol_type = other DNA
acagcgataacgcgtttgccctgctgatgcccgcagaaacgcacgatcgcggctttgcgatgaccagcagcatta

SEQ ID NO: 61285 - DNA, 75 bp, synthetic construct
  source 1..75: mol_type = other DNA
aggaatgcctgacggtcactgttgccttcgggatttcaggcgtgcaggtcacgcgtattctggacagcattgcgc

SEQ ID NO: 61286 - DNA, 75 bp, synthetic construct
  source 1..75: mol_type = other DNA
ctccgagttcacttatgtcgaagcacgcgtgcatggggaactggaaattctggatgtcatcccgcgtaaagaagg

SEQ ID NO: 61287 - DNA, 75 bp, synthetic construct
  source 1..75: mol_type = other DNA
ccggtaaatgcaggtattctcctggttccgtgctgtcgtggtggctcagcattcacctccggagatgatggcgca

SEQ ID NO: 61288 - DNA, 75 bp, synthetic construct
  source 1..75: mol_type = other DNA
ggtgatgtcaccacacctgtggtggtgaggccgtcggatggagaaggcacagttatcagcaccaccagcgaaccg

SEQ ID NO: 61289 - DNA, 75 bp, synthetic construct
  source 1..75: mol_type = other DNA
atgattctctcagtgaaaaaatggtctctggctggagtcaccctgcataactatggggtgaacggttacagaaat

SEQ ID NO: 61290 - DNA, 75 bp, synthetic construct
  source 1..75: mol_type = other DNA
acaggtcagctttgatgacttcagcggtgggcttaaaatgaccgctcgcgaagtgatggatattgacgaagcccg

SEQ ID NO: 61291 - DNA, 75 bp, synthetic construct
  source 1..75: mol_type = other DNA
cctggatttgtggcgacacgacatacgcgtggaaacaagaacacggtacgcaatatgaagtggtatatggtgcat

SEQ ID NO: 61292 - DNA, 75 bp, synthetic construct
  source 1..75: mol_type = other DNA
gtctgctggcgtccggcgaagacctggcatcacagggctggcgctattatcacaaaccggcgagcggagacaatg

SEQ ID NO: 61293 - DNA, 75 bp, synthetic construct
  source 1..75: mol_type = other DNA
ctttaatcacatcgttttaaaagccagtgaaaatggcgtgcccgtttatctgcgtgatgttgcgaaggtccaggt

SEQ ID NO: 61294 - DNA, 75 bp, synthetic construct
  source 1..75: mol_type = other DNA
ggtagcggagttaatacaccgacaaacaacccgtcagaagatcctgatattgccgggtctggttattacggttcg

SEQ ID NO: 61295 - DNA, 75 bp, synthetic construct
  source 1..75: mol_type = other DNA
aactttgctgaatgaagccgatgcccgttttgccataaatctggttcgttccatcatgacttatgttgatgagtt

SEQ ID NO: 61296 - DNA, 75 bp, synthetic construct
  source 1..75: mol_type = other DNA
aaagaaaagaacaacgttgagtcggtgttcgccgttaacggcttcggctttgcgggacgtggtcagaataccggt

SEQ ID NO: 61297 - DNA, 75 bp, synthetic construct
  source 1..75: mol_type = other DNA
attttacctggtcgcccaagatgcaggaactggtgaaaagcaatgctattgaagcctactgtttccctggtggcg

SEQ ID NO: 61298 - DNA, 75 bp, synthetic construct
  source 1..75: mol_type = other DNA
gcaccatcagcctgcgtgtacgcccggatatggcacagaacaatgctgacagactggtcattgacggtggcaggg

SEQ ID NO: 61299 - DNA, 75 bp, synthetic construct
  source 1..75: mol_type = other DNA
ctaatgcagccggtgcgatagctacagggcttttatctctcaatattccggttccactgacaacagttcagtggg

SEQ ID NO: 61300 - DNA, 75 bp, synthetic construct
  source 1..75: mol_type = other DNA
cttccccggtcgttacaaggcgctttcgggcctgggtaacaattatggtactcagcgtggctttatcggtctttt

SEQ ID NO: 61301 - DNA, 75 bp, synthetic construct
  source 1..75: mol_type = other DNA
tggctgcgtgatccatcagtctgagcttgaccagagcaacgggcggtggatctgtgaaaacacgggcatgtggac

SEQ ID NO: 61302 - DNA, 75 bp, synthetic construct
  source 1..75: mol_type = other DNA
atgagcagcaataaagagttaatgcagcgccgcagtcaggcagttcctcgtggcgttgggcaaattcacccgatt

SEQ ID NO: 61303 - DNA, 75 bp, synthetic construct
  source 1..75: mol_type = other DNA
tttgatgagtacaatgagaagaaagcatccgcccagaaagacattctcattaaggtactggatgacggcatcacg

SEQ ID NO: 61304 - DNA, 75 bp, synthetic construct
  source 1..75: mol_type = other DNA
gcatcgttaattgctcctggtggcgcaggcggcggaaagtcaggagtcacaaacacaaacggtggtaacggaggt

SEQ ID NO: 61305 - DNA, 75 bp, synthetic construct
  source 1..75: mol_type = other DNA
aaacaaagtgccggaaggggcagaatataaatacatcaccaccagcgatcgcggtgaacccatcgcgctggctac

SEQ ID NO: 61306 - DNA, 75 bp, synthetic construct
  source 1..75: mol_type = other DNA
atggttaatgatatttctgctaataagatactggtgtgggcggctgtagctgcggcaaaccataagcttcccaaa

SEQ ID NO: 61307 - DNA, 75 bp, synthetic construct
  source 1..75: mol_type = other DNA
ttaagggcaagcccgccagtggtcgtgccgtattgtctcaggaacaggacggcattaaatcgcacacccacagcg

SEQ ID NO: 61308 - DNA, 75 bp, synthetic construct
  source 1..75: mol_type = other DNA
ggagctcatgctcacacagtagcaataggtgcgcatacacatacgctcgctattggttcgcatacacacaccatt

SEQ ID NO: 61309 - DNA, 75 bp, synthetic construct
  source 1..75: mol_type = other DNA
tttcccgcgtctgctgggataccggtggtatcgaccaggacattgtgtatcagcgttccagaaaacacggcactt

SEQ ID NO: 61310 - DNA, 75 bp, synthetic construct
  source 1..75: mol_type = other DNA
aggaagcagtattggctgataatgtcggaacacagattaaacagcttggtgaagcagttaaccgctatatcagta

SEQ ID NO: 61311 - DNA, 75 bp, synthetic construct
  source 1..75: mol_type = other DNA
atgaagtctatggcgaccttgaatcaacaacagatcttttcactgaaataacaccatatgcgccaagtagccctt

SEQ ID NO: 61312 - DNA, 75 bp, synthetic construct
  source 1..75: mol_type = other DNA
gacagtgatgatggtttgtggctccagaggagctgctatttatgatggtaatgcctggaatgtcctctttgattc

SEQ ID NO: 61313 - DNA, 75 bp, synthetic construct
  source 1..75: mol_type = other DNA
agtctttttattctggcatatggatgttattttcttcttttcattcctccgctctggttatatctgagaaccaga

SEQ ID NO: 61314 - DNA, 75 bp, synthetic construct
  source 1..75: mol_type = other DNA
caaaggctcctgccagatcgaaaaagccgctaacgagtcggcacatttcatgcgtttttacgtgccctgtccgca

SEQ ID NO: 61315 - DNA, 75 bp, synthetic construct
  source 1..75: mol_type = other DNA
acaagcagcaggtattcgtttggcttcgctttatagctggaaaggggatttagttcccgaaggtcgcgcgatgcg

SEQ ID NO: 61316 - DNA, 75 bp, synthetic construct
  source 1..75: mol_type = other DNA
gtggctgggatgacggacgtggagtggatgccgggcgacaattattatcttcacagggggatgcaataagaaata

SEQ ID NO: 61317 - DNA, 75 bp, synthetic construct
  source 1..75: mol_type = other DNA
caatcagcgagaacaaaaacgaaatagatcacgatccaagcgcaacaaatgaaaaatttataaacaaatatcttt

SEQ ID NO: 61318 - DNA, 75 bp, synthetic construct
  source 1..75: mol_type = other DNA
cacaccacaagctcaaaattcgtggcctgcaaagtccggtggatgtgctgaccttcgaaggccgcgaacaactga

SEQ ID NO: 61319 - DNA, 75 bp, synthetic construct
  source 1..75: mol_type = other DNA
cggagcttctcccatttctaaaatattacgcggctttgttgatcgccaatatgagacgccatcggggtgtcccca

SEQ ID NO: 61320 - DNA, 75 bp, synthetic construct
  source 1..75: mol_type = other DNA
aacggccttactctgcacgctacattgccgaccacattaacttgtccagccgtgggggggaaagtaaaaaaagag

SEQ ID NO: 61321 - DNA, 75 bp, synthetic construct
  source 1..75: mol_type = other DNA
cgcggcatcagtttagcggcgcgtttgtggaggtgaactgtgccactctgcgcggcgataccgccatgtcagcgc

SEQ ID NO: 61322 - DNA, 75 bp, synthetic construct
  source 1..75: mol_type = other DNA
gatctttaaatgaaatgatgttaagcttgtttaataaatcaactattgttgacttgtcaagtgagacaatatctg

SEQ ID NO: 61323 - DNA, 75 bp, synthetic construct
  source 1..75: mol_type = other DNA
atgacagtaaaaatttctggtgtgcttaaagatggcaccggcaaaccggtaccgggatgtacgattgaactcaaa

SEQ ID NO: 61324 - DNA, 75 bp, synthetic construct
  source 1..75: mol_type = other DNA
ccacgctgggcgagacctgggaagaggccgtgggcgaaaaactcgatcaccaggtactgatggataaggtggtgc

SEQ ID NO: 61325 - DNA, 75 bp, synthetic construct
  source 1..75: mol_type = other DNA
ttgcagatttactgatctcaaaggattcatataatttccgttttctagaagggcaaccatatccaatatgtaatg

SEQ ID NO: 61326 - DNA, 75 bp, synthetic construct
  source 1..75: mol_type = other DNA
ttgtggtggtacgtatcgtgccagaagtgatgctttttacgatgccagtaactcttcgccattagactctctcaa

SEQ ID NO: 61327 - DNA, 75 bp, synthetic construct
  source 1..75: mol_type = other DNA
cacgacgtatgggaaacctattcatggggggaatttctgcgttcgcgtgaagagacatttctggcgatgaccatt

SEQ ID NO: 61328 - DNA, 75 bp, synthetic construct
  source 1..75: mol_type = other DNA
aaccgccaccgctattatgacccgctgcaggggcgatatatcactcaggatccgattgggctgaaggggggatgg

SEQ ID NO: 61329 - DNA, 75 bp, synthetic construct
  source 1..75: mol_type = other DNA
cccgccagtggtcgggccgtattatctcaggaacaggacggcattaaatcgcacacccacagcgccagcgcatcc

SEQ ID NO: 61330 - DNA, 75 bp, synthetic construct
  source 1..75: mol_type = other DNA
ttaaactcaatgaacacgctgagactgtaagactgattttcaagctgctgctaagtggtgaaagtctgcataaca

SEQ ID NO: 61331 - DNA, 75 bp, synthetic construct
  source 1..75: mol_type = other DNA
ggcagagaaacggctggcagaacggcaggagaaaagcgtcccgcagatgaaggcgttgttcgcgtggctgacaga

SEQ ID NO: 61332 - DNA, 75 bp, synthetic construct
  source 1..75: mol_type = other DNA
gacatgccggctgaatggagtggatccggaaagctggttgcgtgaggtaatcagctgtatcgacccagtttacca

SEQ ID NO: 61333 - DNA, 75 bp, synthetic construct
  source 1..75: mol_type = other DNA
tcatcccggagtacgtgattatggaatgtgacaagctcatcgccctgccaccggcagcaaaccagagctcggttg

SEQ ID NO: 61334 - DNA, 75 bp, synthetic construct
  source 1..75: mol_type = other DNA
caaatggcactccgtgcattctgcccgcgtccgctcattataccgcagagtcaatggtagctcaggcggggcagc

SEQ ID NO: 61335 - DNA, 75 bp, synthetic construct
  source 1..75: mol_type = other DNA
actggccgcttctggtgtgatgctgacgtcggacgagaacgtagtgcgcgttgagatgaacgtgcagtaccgcgt

SEQ ID NO: 61336 - DNA, 75 bp, synthetic construct
  source 1..75: mol_type = other DNA
gcataatgtctggttatgttcagatgaaatccatagtgattttgtttttaatcgtagctttacatccgcgcttaa

SEQ ID NO: 61337 - DNA, 75 bp, synthetic construct
  source 1..75: mol_type = other DNA
ggcgcaggtaaaaccacatttttacattacacacgaaatatatctgccgcatcgtatttcgaaaaatcaaataat

SEQ ID NO: 61338 - DNA, 75 bp, synthetic construct
  source 1..75: mol_type = other DNA
tcagttgtctgtgatgccgcgagtgaacggccaaaatgccgttgctcagccactggtgctgaacgttgcaggtga

SEQ ID NO: 61339 - DNA, 75 bp, synthetic construct
  source 1..75: mol_type = other DNA
tgccaccattgaagacgacaaaacgtggatcctgcatggtgtgaatcataaaaaatggctgaatggcaaagaaac

SEQ ID NO: 61340 - DNA, 75 bp, synthetic construct
  source 1..75: mol_type = other DNA
tcagcgcccggggggatgaaattccgccgccgcgctccatcacgttccatatctggacggcgtacagtccgttca

SEQ ID NO: 61341 - DNA, 75 bp, synthetic construct
  source 1..75: mol_type = other DNA
tatgcatcagtggattgcgccagataaaacgccgtttttgcgtttcctctttgccattgagcttgagcaaatatg

SEQ ID NO: 61342 - DNA, 75 bp, synthetic construct
  source 1..75: mol_type = other DNA
atggaactgaagtggaccagtaaggcgctttctgatttgtcgcggttatttgattttctggtgctggccagtaaa

SEQ ID NO: 61343 - DNA, 75 bp, synthetic construct
  source 1..75: mol_type = other DNA
ggttctttatcaggatgtcgctcttcctgtttattatgaatcttcttatcgacatatatatccgtattactggaa

SEQ ID NO: 61344 - DNA, 75 bp, synthetic construct
  source 1..75: mol_type = other DNA
aaaagctggtaaagcgtgggataaagacatttacagcgcgtggaagcgtcagggtaacaatattaaaagaatcaa

SEQ ID NO: 61345 - DNA, 75 bp, synthetic construct
  source 1..75: mol_type = other DNA
ctgaaactgatcagtgagatggaagacggtcagggacgccctttatggttgccggatattgttggtgtggcacct

SEQ ID NO: 61346 - DNA, 75 bp, synthetic construct
  source 1..75: mol_type = other DNA
ttacttattaaaaagcattgattttagccaatttaatgttggttcaggtgtacccacattaaatagaaaccacct

SEQ ID NO: 61347 - DNA, 75 bp, synthetic construct
  source 1..75: mol_type = other DNA
tagattatgaatttaatcttgcaccagataaatattgccaacatatcgcaaaaacaaacactcttatatttagta

SEQ ID NO: 61348 - DNA, 75 bp, synthetic construct
  source 1..75: mol_type = other DNA
atacttaaggttgcgcacaaccatcttactgaactgccccctttacctaggagactgcaacttctttttgcatat

SEQ ID NO: 61349 - DNA, 75 bp, synthetic construct
  source 1..75: mol_type = other DNA
tgaaatttgtggtacctgctgtggtactggcggggctggtgatcacgatgaaaagctgcagcacaccggagagcg

SEQ ID NO: 61350 - DNA, 75 bp, synthetic construct
  source 1..75: mol_type = other DNA
gatctgaaaaccaatgaagtggtgtggaagaaacgtattggtacgccgcaggacagtatgccgttcccgatgcct

SEQ ID NO: 61351 - DNA, 75 bp, synthetic construct
  source 1..75: mol_type = other DNA
cctctaattaaagttggagatgttaaagatggttatatagcatcgcagccaagtttttttattagccctgaagtg

SEQ ID NO: 61352 - DNA, 75 bp, synthetic construct
  source 1..75: mol_type = other DNA
ggacttctgttggagggcattttccttctcactggcagttcttcaagcttgaagaactcttagaaaatgctaaag

SEQ ID NO: 61353 - DNA, 75 bp, synthetic construct
  source 1..75: mol_type = other DNA
ctgtttctgaatgattttattgaacaatttccaatgatcaaccctggcgttcccatcaaaagagcgcatacacca

SEQ ID NO: 61354 - DNA, 75 bp, synthetic construct
  source 1..75: mol_type = other DNA
tccggcagcactggaagatcgcgcgttgcagatgattaactcaaccgcacctttcggggctgataaaaacagcgg

SEQ ID NO: 61355 - DNA, 75 bp, synthetic construct
  source 1..75: mol_type = other DNA
cgtgtaagtgaattgcttttgttagaaaaaaactcaattaaacctaacatcaagggcgtacagttcagtatcata

SEQ ID NO: 61356 - DNA, 75 bp, synthetic construct
  source 1..75: mol_type = other DNA
aaggcagtagcttcactttatctgtggttcatctgcatgaggcagaacctaaggttatccatcaggcgctggaag

SEQ ID NO: 61357 - DNA, 75 bp, synthetic construct
  source 1..75: mol_type = other DNA
atatctgatattgagcaatccattgaaattattgagaataatattaacagactaaaaaaagaagatattcatgaa

SEQ ID NO: 61358 - DNA, 75 bp, synthetic construct
  source 1..75: mol_type = other DNA
tgaagccaaagatgagctccgtcttttaggtggatggagccataatagccgcatgccagaactctatgcccgccg

SEQ ID NO: 61359 - DNA, 75 bp, synthetic construct
  source 1..75: mol_type = other DNA
tgttatggtcagtcaggaccgtgatgttatgagttataaagaagatgtatacaaaggagtagaagaaagtataaa

SEQ ID NO: 61360 - DNA, 75 bp, synthetic construct
  source 1..75: mol_type = other DNA
ttctttgacccgaataccggagaaacaggagaagagttctcggtaaatatctcgcttgagtcatcaatgcgatat

SEQ ID NO: 61361 - DNA, 75 bp, synthetic construct
  source 1..75: mol_type = other DNA
tcagccaatgcactatctttgcgctcaatgctatgaatcttctgtgaaatccatacttcaatacgaaggatttgc

SEQ ID NO: 61362 - DNA, 75 bp, synthetic construct
  source 1..75: mol_type = other DNA
aaccagtcagcaaccgtaagtctgtctgattccacctggaaaggtaacgtgggtgacggtctggatggtggtgcg

SEQ ID NO: 61363 - DNA, 75 bp, synthetic construct
  source 1..75: mol_type = other DNA
gaaatgacgcctgtgaaggggacaattaacgccgttgctgcagagactgaaaatggcgaggaggagatgccataa

SEQ ID NO: 61364 - DNA, 75 bp, synthetic construct
  source 1..75: mol_type = other DNA
aatcaggcgcttacaatgtcacccgctctggcgacagctatattctggttaacttctataccggagtcggaagtt

SEQ ID NO: 61365 - DNA, 75 bp, synthetic construct
  source 1..75: mol_type = other DNA
cctgaaaagagattaatttccattacgtttaccctctccaaaaaatatcgcatatatggtcgtcgcgcaacaggg

SEQ ID NO: 61366 - DNA, 75 bp, synthetic construct
  source 1..75: mol_type = other DNA
catttcgcccacaaaaatctcttgctatcgccattggcgtgcttgccgtggttgtgctgccatttctctcgtatt

SEQ ID NO: 61367 - DNA, 75 bp, synthetic construct
  source 1..75: mol_type = other DNA
cgttgatgtgatgcctgaatcattgccagctgtgttttctcgtctggtcgtggataaagttggtcagttcgaaaa

SEQ ID NO: 61368 - DNA, 75 bp, synthetic construct
  source 1..75: mol_type = other DNA
cggtattcgggtgatcgccgggcctgttgaagcctcgacgctcggcaatatcggcatccagttaatgacgctgga

SEQ ID NO: 61369 - DNA, 75 bp, synthetic construct
  source 1..75: mol_type = other DNA
cgcaggcgatctcatcttctcaatggtgctgatttgcggcctgtataccctgttcctggtggcagaattgttctt

SEQ ID NO: 61370 - DNA, 75 bp, synthetic construct
  source 1..75: mol_type = other DNA
cttatcagatgatccccggaatttttcgttttgtctgcacaaatggcctggtgtgcgggaataattttggcgaaa

SEQ ID NO: 61371 - DNA, 75 bp, synthetic construct
  source 1..75: mol_type = other DNA
gcgaaaggagaaaacgaagccgcgtttgccgcccgtattcactcgctttttaccgtaccgaagacctgtattctg

SEQ ID NO: 61372 - DNA, 75 bp, synthetic construct
  source 1..75: mol_type = other DNA
gtgcctggtttgctgtgtgcggtcgtgctgatgtttaccgtctacctcgtcgcccgcagaacaaacgccaaaccc

SEQ ID NO: 61373 - DNA, 75 bp, synthetic construct
  source 1..75: mol_type = other DNA
acgcaaagtccttcactactggctattccgttttttattttgctgggtacgctaatgagctacaccggcattgca

SEQ ID NO: 61374 - DNA, 75 bp, synthetic construct
  source 1..75: mol_type = other DNA
aacgcaagcccgacgcttaatgacgctggaagatatcgtcagtggttattccaacgtgttgatttccctggcaga

SEQ ID NO: 61375 - DNA, 75 bp, synthetic construct
  source 1..75: mol_type = other DNA
cttatcaagtcgtatttatccgcaagcggactcgagacaattatcgttatatgccgctcatggcgatgcgatatt

SEQ ID NO: 61376 - DNA, 75 bp, synthetic construct
  source 1..75: mol_type = other DNA
aggctcagcattacctgttggggtgcctgttccgtggccttcagccactccgccaacaggctggttgaaatgcaa

SEQ ID NO: 61377 - DNA, 75 bp, synthetic construct
  source 1..75: mol_type = other DNA
gtagggcaatttgtaatcatactaacgcaattttggttctggtttacccctatagtatacgtaaggaacattctg

SEQ ID NO: 61378 - DNA, 75 bp, synthetic construct
  source 1..75: mol_type = other DNA
ttcgatatcgcggctttattgttgacagtattaagcgggattttcagtcccgttaccaggctagttttttaggcg

SEQ ID NO: 61379 - DNA, 75 bp, synthetic construct
  source 1..75: mol_type = other DNA
tcccctaacgggcttgtaggccgcgacagtacaggggcgatactttcgtgccaatccggtacgtggcagaaaaat

SEQ ID NO: 61380 - DNA, 75 bp, synthetic construct
  source 1..75: mol_type = other DNA
tcccctaacgggcttgtaggccgcgacagtacaggggcgatactttcgtgccaatccggtgtgtggagggcatta

SEQ ID NO: 61381 - DNA, 75 bp, synthetic construct
  source 1..75: mol_type = other DNA
agttaacactggagtatattctttccgataaagatctaaaggccccaattctaagtgaatctattgagaatattt

SEQ ID NO: 61382 - DNA, 75 bp, synthetic construct
  source 1..75: mol_type = other DNA
attaaaggaaaaatcatcacaactgatgcgatgggctgccagaaagatattgcagaaaagatacaaaaacaggga

SEQ ID NO: 61383 - DNA, 75 bp, synthetic construct
  source 1..75: mol_type = other DNA
accttgactggctggaagatggcattgccgaactggtatttgatgccccaggttcagttaataaactcgacactg

SEQ ID NO: 61384 - DNA, 75 bp, synthetic construct
  source 1..75: mol_type = other DNA
cttggctaagtcttgcagaatcgatcctgtacgctccagtttgtgacgcattcggcacaaatagcgacagattta

SEQ ID NO: 61385 - DNA, 75 bp, synthetic construct
  source 1..75: mol_type = other DNA
attacccgagtcagaaaaagaaaagcaactaattgaattagaagataaagttgaaaactttaatcgtttatttga

SEQ ID NO: 61386 - DNA, 75 bp, synthetic construct
  source 1..75: mol_type = other DNA
agtcgatgaagctccgacagagtggcatgactggaagaaccgcattagttatagcaagtcgaaattagggcgtat

SEQ ID NO: 61387 - DNA, 75 bp, synthetic construct
  source 1..75: mol_type = other DNA
tgccattcgaaatataattggtgcattagtagatgtcaggtttaatacctatccttctgattctggcgtttttac

SEQ ID NO: 61388 - DNA, 75 bp, synthetic construct
  source 1..75: mol_type = other DNA
cgtctcttcgtctggattttttaggttataacgcccaaattattcaacgatcggacaatacctgcgaacttacca

SEQ ID NO: 61389 - DNA, 75 bp, synthetic construct
  source 1..75: mol_type = other DNA
atttcagagagttacgactaaaaacaatggaaaaagcaacaatgttgtaaccatttctggacaacatggtttgat

SEQ ID NO: 61390 - DNA, 75 bp, synthetic construct
  source 1..75: mol_type = other DNA
attaacgtcattaacagcggtgaccgatcaaaacggaatcgcgacaacaagcgtgaaaggagcgataacggggag

SEQ ID NO: 61391 - DNA, 75 bp, synthetic construct
  source 1..75: mol_type = other DNA
gcaactggcagcggtgatggccgggcagttgttgccggagggggcgacagcctggctggccactgtgccgggggc

SEQ ID NO: 61392 - DNA, 75 bp, synthetic construct
  source 1..75: mol_type = other DNA
tccgtttattcgtccggcctttgatacgacagaggaactggccgcacaggttgccatacagcgaatgaatcaggc

SEQ ID NO: 61393 - DNA, 75 bp, synthetic construct
  source 1..75: mol_type = other DNA
tatctatgcccaccgtaagatccccaaatatcgcgacattcacaaatcgccttacgttatttttgtcgtaaacct

SEQ ID NO: 61394 - DNA, 75 bp, synthetic construct
  source 1..75: mol_type = other DNA
taatattttgaacaatatggcattgaatgataagagcgcttgcgttcgagctacggcaatcgagtcaacggctca

SEQ ID NO: 61395 - DNA, 75 bp, synthetic construct
  source 1..75: mol_type = other DNA
cctacgccaagctatcctggctgcaagcctggcacatccgagacgaaacctactcggcggccctagccgagctgg

SEQ ID NO: 61396 - DNA, 75 bp, synthetic construct
  source 1..75: mol_type = other DNA
cagtgaacacctcttacgtaccattcaacggtcagcaaattatcaccgccatggctgccggagttgcatatgttg

SEQ ID NO: 61397 - DNA, 75 bp, synthetic construct
  source 1..75: mol_type = other DNA
aattgaacaaatcccgcttgccgtagagtacatccacagggtagtgcttgaaggtgaattcattggcaaacaaga

SEQ ID NO: 61398 - DNA, 75 bp, synthetic construct
  source 1..75: mol_type = other DNA
cgagtgtagcgatcggcgttgatggtactgtgctggtgacggccacatgtgcgaatagcggttcggttgcggcga

SEQ ID NO: 61399 - DNA, 75 bp, synthetic construct
  source 1..75: mol_type = other DNA
ctgaggatgggaaacgacgcaatatggtatccctgccacttcgaaaacttgcgggctggttacaaaccatcaatc

SEQ ID NO: 61400 - DNA, 75 bp, synthetic construct
  source 1..75: mol_type = other DNA
cccggagcggtaagcgactggaacgtatacccgatgctgtcgtgaatgaagtgctggcccgactggaggccattc

SEQ ID NO: 61401 - DNA, 75 bp, synthetic construct
  source 1..75: mol_type = other DNA
caagaagatattaacagaaatatctaaaatgccagaagatagtatttttactaagatcaatacaaggattcctcg

SEQ ID NO: 61402 - DNA, 75 bp, synthetic construct
  source 1..75: mol_type = other DNA
gccgctgtgggaattaatacccgcaatcttgcacatgatgagcagggactgaaaaaccgtatcagtgaaaccacc

SEQ ID NO: 61403 - DNA, 75 bp, synthetic construct
  source 1..75: mol_type = other DNA
gttcaggcgggcggactctggcacggaatggtatcgattactttacctccgcaaaatctgcagacgtttaacgaa

SEQ ID NO: 61404 - DNA, 75 bp, synthetic construct
  source 1..75: mol_type = other DNA
acaataccgtcgctgtgacggtcagggatgtgcatcaaaatttactgcagggacaaaatgttaccttcacggtcg

SEQ ID NO: 61405 - DNA, 75 bp, synthetic construct
  source 1..75: mol_type = other DNA
ggggatcagcgcgcctgattaccagacaatactggacaccctgaccaactactttaagcagatatatggcagcga

SEQ ID NO: 61406 - DNA, 75 bp, synthetic construct
  source 1..75: mol_type = other DNA
ttctgttcttgctgatcccattgaatcgccgcgcccggaactgttcccgacgcaaacattgattgtctggacagg

SEQ ID NO: 61407 - DNA, 75 bp, synthetic construct
  source 1..75: mol_type = other DNA
ttgaccggaaaactcacgcagagtgaagatgaggggcttatcaccctctggcattacgatgcgtcagaccgtatc

SEQ ID NO: 61408 - DNA, 75 bp, synthetic construct
  source 1..75: mol_type = other DNA
agaatcgaaacagagaatggcgaacaggcgaaggcgcggcaccggagcctggcggaggtgttgcaggaggacacg

SEQ ID NO: 61409 - DNA, 75 bp, synthetic construct
  source 1..75: mol_type = other DNA
gcacgcccagggcaaactggtccgctgtgtggaaggtgaggtgtttgatgtggcggtggatatccgtcgttcatc

SEQ ID NO: 61410 - DNA, 75 bp, synthetic construct
  source 1..75: mol_type = other DNA
cagaggaactcaatcaaggaggctcagattttattctgacttccctcgaggctatgcgtaagaagttattggacc

SEQ ID NO: 61411 - DNA, 75 bp, synthetic construct
  source 1..75: mol_type = other DNA
tttgggcgtacccagctttttagagacgtacttagttcagggccatttagtcaacatgggcaagtattatctaca

SEQ ID NO: 61412 - DNA, 75 bp, synthetic construct
  source 1..75: mol_type = other DNA
tacgccggagactctgcgtgtctgggtacgacagcatgagcgggataccggaggcggtgatggagggctcaccac

SEQ ID NO: 61413 - DNA, 75 bp, synthetic construct
  source 1..75: mol_type = other DNA
gtcgagtacacgcgggaccggctgcaccgtgagacggcccgcagcttcggcggggaggcctatgaacttgccacc

SEQ ID NO: 61414 - DNA, 75 bp, synthetic construct
  source 1..75: mol_type = other DNA
gaatggcaaaacgggtctggcggcgggagcgtgacctgacggggtggatgtcgctgtcgcgtaaaccggaggtga

SEQ ID NO: 61415 - DNA, 75 bp, synthetic construct
  source 1..75: mol_type = other DNA
gtttgataacaaagaatatctctattacaaagcgattgcgccagatatcgccttcattcgcgctaccacctgcga

SEQ ID NO: 61416 - DNA, 75 bp, synthetic construct
  source 1..75: mol_type = other DNA
cagcgcatccagtacggatttggggacgaaaaccacatcgtcgtttgattacggcactaaatccacgaataacac

SEQ ID NO: 61417 - DNA, 75 bp, synthetic construct
  source 1..75: mol_type = other DNA
gctaaaggaactacacggataggaagaataagcaccaaggaacgggaaaattgcgtatggctgaaaagacgactt

SEQ ID NO: 61418 - DNA, 75 bp, synthetic construct
  source 1..75: mol_type = other DNA
tctgcctcggtcagtggccccgccgcaacggcatgattgattacctgcaaatggcgcaggacgcccaacgttgct

SEQ ID NO: 61419 - DNA, 75 bp, synthetic construct
  source 1..75: mol_type = other DNA
ttgttcaaagccaatcatgttccggtattaatgtatcatcatgtcagtcattgccccggactggttacactttct

SEQ ID NO: 61420 - DNA, 75 bp, synthetic construct
  source 1..75: mol_type = other DNA
aaaaagaatacagtagttacttgggaacaccaaataacacctatctaaaatataatcccaaagctaaagggaatg

SEQ ID NO: 61421 - DNA, 75 bp, synthetic construct
  source 1..75: mol_type = other DNA
taaaaaatgctttaatagtatcaagtaaagatcagaaagggaaagctttcgctgatttcataattgaaagcaatg

SEQ ID NO: 61422 - DNA, 75 bp, synthetic construct
  source 1..75: mol_type = other DNA
atgaaaaatggccttgaactgaaagcgcctgtaactgatgacatcagcagagcactggcttttgccattaagtgg

SEQ ID NO: 61423 - DNA, 75 bp, synthetic construct
  source 1..75: mol_type = other DNA
ggtatttcagtacaacacttgggagacttatacggctgaatgctcttgcagcaaggcttgcaccttattatacag

SEQ ID NO: 61424 - DNA, 75 bp, synthetic construct
  source 1..75: mol_type = other DNA
ggaagatttacatattcaactatttgagcgtacaactcgcaaggttacgttaacaaaagcaggaaaaaggttgct

SEQ ID NO: 61425 - DNA, 75 bp, synthetic construct
  source 1..75: mol_type = other DNA
tcccggccatcactctgttggaaggcatgtttcccgagctatcaacaaaccagcttaaagtctgcgttttttacg

SEQ ID NO: 61426 - DNA, 75 bp, synthetic construct
  source 1..75: mol_type = other DNA
aaaggtgatattacgagtgaagacggctggctaatcaccagaaacaataagggatggatgaatatcacacatggt

SEQ ID NO: 61427 - DNA, 75 bp, synthetic construct
  source 1..75: mol_type = other DNA
agacctggtatcctacgtctctgtccgggatgacatgaccgatgaggaactggatttatcttcttcttcgcaggc

SEQ ID NO: 61428 - DNA, 75 bp, synthetic construct
  source 1..75: mol_type = other DNA
aaaaccctctcgaacgtaatggcgaggctactcactgcgcaacgtgtaacaaagatttcatagtccaggctcttt

SEQ ID NO: 61429 - DNA, 75 bp, synthetic construct
  source 1..75: mol_type = other DNA
gaggaattatctattacgtggcctagaggaaatgaactaaacttatcaaataaagatcagcaacatccgagcttt

SEQ ID NO: 61430 - DNA, 75 bp, synthetic construct
  source 1..75: mol_type = other DNA
ccggagttaaatatagattggcctctaactgatctaggcaatgatgtattgctactatcctcaaaggataaaacc

SEQ ID NO: 61431 - DNA, 75 bp, synthetic construct
  source 1..75: mol_type = other DNA
ttttttgagagctttaaccagaaggtttttgaggaagctgtaggccgcaaagttgaatttgttcaggataaccat

SEQ ID NO: 61432 - DNA, 75 bp, synthetic construct
  source 1..75: mol_type = other DNA
aatgtgaagcagcgcttgctggagttctctaatgttgatgacatctatttcgatggctatctgtttgattcatgg

SEQ ID NO: 61433 - DNA, 75 bp, synthetic construct
  source 1..75: mol_type = other DNA
acatgtgaaattattaaagagtatatatcaaaggatgattctatatttttgtatgagggtgataacattggtgtc

SEQ ID NO: 61434 - DNA, 75 bp, synthetic construct
  source 1..75: mol_type = other DNA
cggtgaaactgcaggcggcaaagcggtgacggattcagttttaatttctgtgaaggataataaagtcacagtaca

SEQ ID NO: 61435 - DNA, 75 bp, synthetic construct
  source 1..75: mol_type = other DNA
atgaacgtaattaaaacagaaattccagacgtattaattttcgaaccgaaagtttttggtgacgagcgtggtttc

SEQ ID NO: 61436 - DNA, 75 bp, synthetic construct
  source 1..75: mol_type = other DNA
tgcactatccgcgagctggcgcaaaccatcgccaaagtggtgggttacaaaggtcgggtggtttttgatgccagc

SEQ ID NO: 61437 - DNA, 75 bp, synthetic construct
  source 1..75: mol_type = other DNA
atttcgtaccggcatacgctcatggatcccaacgggaaaagatgtggcattagggcgtaatgaactcacgattgc

SEQ ID NO: 61438 - DNA, 75 bp, synthetic construct
  source 1..75: mol_type = other DNA
ctgatgtgttaatttttgagccgaaagtttttggtgatgagcgtggtttctttatggaaagctttaatcagaaag

SEQ ID NO: 61439 - DNA, 75 bp, synthetic construct
  source 1..75: mol_type = other DNA
ttaaaacatataaacaatcagtggctggtttaggtgccgcagcctcagaaacgcgtccgcgtaatattgcattta

SEQ ID NO: 61440 - DNA, 75 bp, synthetic construct
  source 1..75: mol_type = other DNA
gcgtcaaaaagtacgtaatagtgcagattttaaaccacttccggcggaaatccgctcgcttttcccaagtgaatt

SEQ ID NO: 61441 - DNA, 75 bp, synthetic construct
  source 1..75: mol_type = other DNA
ggtcattatcaccacggcaacgcgaaccgcaggcgatccgatgaataactgcgagtttaacggatttgttatgcc

SEQ ID NO: 61442 - DNA, 75 bp, synthetic construct
  source 1..75: mol_type = other DNA
ggggcgtgaagcagatatttcaggttcaaaagccgatcttgagcagcgcctggcggaatgggaagaggaggccgc

SEQ ID NO: 61443 - DNA, 75 bp, synthetic construct
  source 1..75: mol_type = other DNA
cgctggaacagcctttcagaaattatctgggacgagtttcgcgaacagttcacgccgggggcttttgctgactat

SEQ ID NO: 61444 - DNA, 75 bp, synthetic construct
  source 1..75: mol_type = other DNA
agcgcggtacagccctgaagctgaccggcagcactgtgctgaacggtgccattgaccccacgaatgtcactctcg

SEQ ID NO: 61445 - DNA, 75 bp, synthetic construct
  source 1..75: mol_type = other DNA
ttgggctgaaggggggatggaatttttatcagtatccgttgaatccgatctcaaatatagatccattaggattag

SEQ ID NO: 61446 - DNA, 75 bp, synthetic construct
  source 1..75: mol_type = other DNA
aacagataaaagttatttatcgttaaatccagataagtatcctaattatcgtcttctgattcactcagccaaatt

SEQ ID NO: 61447 - DNA, 75 bp, synthetic construct
  source 1..75: mol_type = other DNA
cctcactggacaacatgattgcccagggtaacccgatgccggtgccttacggtgaaatgctggttggttcacgac

SEQ ID NO: 61448 - DNA, 75 bp, synthetic construct
  source 1..75: mol_type = other DNA
ggatgccaggaatcagtatcgctttcagtaacattctcttttctatgggggcagcgatgacgcttggtggtgtcg

SEQ ID NO: 61449 - DNA, 75 bp, synthetic construct
  source 1..75: mol_type = other DNA
cccgcatcagctgcagcagcttatccggctgccggggcagcagtatgatgaggagtccggcctgtattacaaccg

SEQ ID NO: 61450 - DNA, 75 bp, synthetic construct
  source 1..75: mol_type = other DNA
gtcacgaacccgtgattggcattatgggtaaaagcggggccggtaaatcctcactctgtaatgcgctgtttcagg

SEQ ID NO: 61451 - DNA, 75 bp, synthetic construct
  source 1..75: mol_type = other DNA
tttagctccagaacatttaaaaacaataacagaaaaaactaatatagggagtctttcagatacggaaaaggctga

SEQ ID NO: 61452 - DNA, 75 bp, synthetic construct
  source 1..75: mol_type = other DNA
acaggctggtatggaatcacattacaggcaccctggtggtggcttccgaactggcacgctcacggggaaaaggcg

SEQ ID NO: 61453 - DNA, 75 bp, synthetic construct
  source 1..75: mol_type = other DNA
aagctgccggcattgctgcctgtctgatgacgtacagtcatcatgcctgtcgtacggagtgttatgccatgacgg

SEQ ID NO: 61454 - DNA, 75 bp, synthetic construct
  source 1..75: mol_type = other DNA
gattgcgatgattaatcctgcgaatggcaacacaaagccgatgtttgttggtcagggcgatcagatattcatgaa

SEQ ID NO: 61455 - DNA, 75 bp, synthetic construct
  source 1..75: mol_type = other DNA
aatgccatgaacggcaaccgcgctgaaatgagcccggcagccgccggcattgccgcctgtctgatggcgtacagt

SEQ ID NO: 61456 - DNA, 75 bp, synthetic construct
  source 1..75: mol_type = other DNA
gtaatctttatcaggactcagtttctctgatgcagatttccgcgcaaatcagcaagttgcccggtattcaacagg

SEQ ID NO: 61457 - DNA, 75 bp, synthetic construct
  source 1..75: mol_type = other DNA
tacggcggcaaccgtcaccggcagcaaccgtctgggcaatttcgcggtggaaaacggtaaggctgacggcgttgt

SEQ ID NO: 61458 - DNA, 75 bp, synthetic construct
  source 1..75: mol_type = other DNA
acctggtggcaactaaccggagattctgcgctgaaaacactgaaaagtacaaacagcatggtctatttcactgac

SEQ ID NO: 61459 - DNA, 75 bp, synthetic construct
  source 1..75: mol_type = other DNA
ccaatattcgcatagtccaacactcagaagattagttaactattacatagacagcttaccagaaactgatataaa

SEQ ID NO: 61460 - DNA, 75 bp, synthetic construct
  source 1..75: mol_type = other DNA
caggggccagtatgatcctgggtggtgtggcccagatgctggcaccgaaagcccggacgcccacagcgaccagca

SEQ ID NO: 61461 - DNA, 75 bp, synthetic construct
  source 1..75: mol_type = other DNA
aatgggacgaagttggtgttgacgttgtcgctgaagcaactggtctgttcctgactgacgaaactgctcgtaaac

SEQ ID NO: 61462 - DNA, 75 bp, synthetic construct
  source 1..75: mol_type = other DNA
attcatgccacagctaaatggtctactgctcaattgaagaaaacgcaggcagaacaagctgcccggccgtgcttg

SEQ ID NO: 61463 - DNA, 75 bp, synthetic construct
  source 1..75: mol_type = other DNA
ggtgtggcctacaccagcagtgatgtggtggtggatgataacggcgtggggtttcgctacagcttcagcgccctg

SEQ ID NO: 61464 - DNA, 75 bp, synthetic construct
  source 1..75: mol_type = other DNA
tggtactttcgccatcaacttctcccgcccggcgggtcaggtgattgcacagtactatgaattcctgcgcctcgg

SEQ ID NO: 61465 - DNA, 75 bp, synthetic construct
  source 1..75: mol_type = other DNA
aacacgtatttttcctcactggacaacatgattgctcaggggaacccgatgccggtgccttacggtgaaatgctg

SEQ ID NO: 61466 - DNA, 75 bp, synthetic construct
  source 1..75: mol_type = other DNA
gggtggataattcctggtgcgtcgtggaaaccgtcacactggatgccgctaccagaaccgccgcaggaggtgaat

SEQ ID NO: 61467 - DNA, 75 bp, synthetic construct
  source 1..75: mol_type = other DNA
tggctggcactggcgttctgctttgctggcggtgtcattgccatgatctccttgcgtcatgttaaaacgcctgga

SEQ ID NO: 61468 - DNA, 75 bp, synthetic construct
  source 1..75: mol_type = other DNA
caattgaaaaaccgctctcctccctgccttattcactttcccgtcacatcctggaacatctgcgcaaactcacca

SEQ ID NO: 61469 - DNA, 75 bp, synthetic construct
  source 1..75: mol_type = other DNA
gggcgctggccacgcagattccggcgtttcgccagaaactgaatgagggctggtatcaggtgcgcatttccgggc

SEQ ID NO: 61470 - DNA, 75 bp, synthetic construct
  source 1..75: mol_type = other DNA
ttagtgtgctgcagagtgatccggatgaagttgtcaaaatgctggggatgtatatcccttatctatgtgcttttg

SEQ ID NO: 61471 - DNA, 75 bp, synthetic construct
  source 1..75: mol_type = other DNA
tgatggcgatcgggtggagatttatcgtcctctcattgccgatccgaaagagcttcgcaggcaacgagcagaaaa

SEQ ID NO: 61472 - DNA, 75 bp, synthetic construct
  source 1..75: mol_type = other DNA
atagtctttcaatgttgccaccaatggttgtagcattgttttataaagaaaaaagcctgttcgttttctttataa

SEQ ID NO: 61473 - DNA, 75 bp, synthetic construct
  source 1..75: mol_type = other DNA
ttgtccacacagctcccggcgtttcgtcagaaactgaatgacggctggtatcaggtgcgcattgctgggcgtgat

SEQ ID NO: 61474 - DNA, 75 bp, synthetic construct
  source 1..75: mol_type = other DNA
tgattatccttggtcgggtaggacaagacccggaagttcgatactcaccatcaggtacagcgttcgctaacctga

SEQ ID NO: 61475 - DNA, 75 bp, synthetic construct
  source 1..75: mol_type = other DNA
ttgcaatggtgctggcaacatcatgtggatatgccgccacaataaaagtccccatgaaccttgttaatgccgatg

SEQ ID NO: 61476 - DNA, 75 bp, synthetic construct
  source 1..75: mol_type = other DNA
gaacctgcgaccaccaccttccggattaacgcgcctgcaaaacccgccaccattgagctgacgccggggtatttt

SEQ ID NO: 61477 - DNA, 75 bp, synthetic construct
  source 1..75: mol_type = other DNA
atcatcaaaaatatctcggcaatcgaacaaaaaaaaatagtaaacgctgatactaaccaaaccctcgaacaaatg

SEQ ID NO: 61478 - DNA, 75 bp, synthetic construct
  source 1..75: mol_type = other DNA
cgctgactaatttgagtggaaaggatgtcgctggtcttctcgcataccttggtttgggagaaggtgctccagcta

SEQ ID NO: 61479 - DNA, 75 bp, synthetic construct
  source 1..75: mol_type = other DNA
tctgctggttcatcatccgatgctggaaggcattctgctgtctgaatgcgtgcgtctgcggaaaaaatcactggc

SEQ ID NO: 61480 - DNA, 75 bp, synthetic construct
  source 1..75: mol_type = other DNA
gcatcagcttctggccgcagcattttggcctcattccacagtgggtcaccctggatccccgtgtcttcggctgga

SEQ ID NO: 61481 - DNA, 75 bp, synthetic construct
  source 1..75: mol_type = other DNA
aatggtgaaaaaccggagattgccatcgttccccgtagtctgcaccggctgatttatggtccggacaaacggagt

SEQ ID NO: 61482 - DNA, 75 bp, synthetic construct
  source 1..75: mol_type = other DNA
gaaaatctctgccaccaatacgttccatgccctcgctacggaatggcaccagcataaatctttgtcatggtctga

SEQ ID NO: 61483 - DNA, 75 bp, synthetic construct
  source 1..75: mol_type = other DNA
gcaaataagtctgaaaaatacgttcgaggctattgctcgcgaatggcaccagtcaaaagccgatcggtggtcatt

SEQ ID NO: 61484 - DNA, 75 bp, synthetic construct
  source 1..75: mol_type = other DNA
cggcgattatcgtcacccgcgtcagcgacaacggcgatatcgcccatgacgtgcgtaaccagctgctggcaagcc

SEQ ID NO: 61485 - DNA, 75 bp, synthetic construct
  source 1..75: mol_type = other DNA
gctgtttatgcaaatggacaaaattcaacaattgatactaatgggcatacaattactacaaccggaacacgctca

SEQ ID NO: 61486 - DNA, 75 bp, synthetic construct
  source 1..75: mol_type = other DNA
gcagattgataacggtcagcttgcgcctgacctggcggaaatcagaacgtccatcacggatgtcagtaatgaaat

SEQ ID NO: 61487 - DNA, 75 bp, synthetic construct
  source 1..75: mol_type = other DNA
ggagcgctggatcaactggcgtcgtcgccgtaccgcggcggtggcggtgatcaccggtgtgaactacggcagtgc

SEQ ID NO: 61488 - DNA, 75 bp, synthetic construct
  source 1..75: mol_type = other DNA
catgctgaaggtacagaaaacaaaaaatggcataccctatgttgccggtattggagcggggattgaggatactga

SEQ ID NO: 61489 - DNA, 75 bp, synthetic construct
  source 1..75: mol_type = other DNA
tgttcctgaaatatctgacggctcccaccattaccagcggcggtaatcctccggcattttccctgacaccggacg

SEQ ID NO: 61490 - DNA, 75 bp, synthetic construct
  source 1..75: mol_type = other DNA
cgttaacagaagtgcaaaggattcagagctttatgatgcggttcgatttagctggcgcattaatgtctctcgcgc

SEQ ID NO: 61491 - DNA, 75 bp, synthetic construct
  source 1..75: mol_type = other DNA
atgaatatttactgcgatgatggttcaactaatgttaagctggcatggtttgaaggcgatgagcttcagacccgg

SEQ ID NO: 61492 - DNA, 75 bp, synthetic construct
  source 1..75: mol_type = other DNA
ccgtcaggtggatgcgcacctgaagcgcctgcgtgaactggaagccggtaaggccgccacggcgcagccggtgaa

SEQ ID NO: 61493 - DNA, 75 bp, synthetic construct
  source 1..75: mol_type = other DNA
acgaatggctccacgaaagctaccagaaatggctgaccggcttcacccggcacgccgtatcctggggcgtgtgtc

SEQ ID NO: 61494 - DNA, 75 bp, synthetic construct
  source 1..75: mol_type = other DNA
agagtcaggtgctgctggcggcagacaggattgcgatgattaatcctgcgaatggcaacacaaagccgatgtttg

SEQ ID NO: 61495 - DNA, 75 bp, synthetic construct
  source 1..75: mol_type = other DNA
cttgacggcatgaccggacacgccggatgcctgccgaactgcgattgctggccagaagtgcagatccctgagttt

SEQ ID NO: 61496 - DNA, 75 bp, synthetic construct
  source 1..75: mol_type = other DNA
cttttgtgaaatcggcgattgcagcaatggtgggttctgcacctgaggcactggatacactgaacgaactggcgg

SEQ ID NO: 61497 - DNA, 75 bp, synthetic construct
  source 1..75: mol_type = other DNA
atttttcctcactggataacatggttgctcagggcaatgttttgcctgttctgtacggtgaaatgcgtgtggggt

SEQ ID NO: 61498 - DNA, 75 bp, synthetic construct
  source 1..75: mol_type = other DNA
tgtacggacatccccctttgcagtaaaagaaccctgttacagcaatgccgctgtggaaaagctttcattgcccac

SEQ ID NO: 61499 - DNA, 75 bp, synthetic construct
  source 1..75: mol_type = other DNA
cttctatattctgaaatctgccagctatggtaacactctgtgggggaacagcctgaatgatccggctcagtggga

SEQ ID NO: 61500 - DNA, 75 bp, synthetic construct
  source 1..75: mol_type = other DNA
gtttgttggcatgaacaaaaacaaagcagttcagacagtaaaagataggatcctggccgggcgggcaaaacaacc

SEQ ID NO: 61501 - DNA, 75 bp, synthetic construct
  source 1..75: mol_type = other DNA
ctgccattagaggcggccggaagaataagagaaattcaggagcgtgcgatacaggctgtcatccatggtgagcgc

SEQ ID NO: 61502 - DNA, 75 bp, synthetic construct
  source 1..75: mol_type = other DNA
ctgagtacaggcaatggcatcttctggccatccgtctgtgaccggaacggttacgcgtacggctgtccggaattt

SEQ ID NO: 61503 - DNA, 75 bp, synthetic construct
  source 1..75: mol_type = other DNA
cgggacgctcaacaacgtcacgattaacgagaactgtcgggttctgggaaaattgtccgcgaaccagattgaagg

SEQ ID NO: 61504 - DNA, 75 bp, synthetic construct
  source 1..75: mol_type = other DNA
atgaaacgagttattaccctgtttgctgtactgctgatgggctggtcggtaaatgcctggtcattcgcctgtaaa

SEQ ID NO: 61505 - DNA, 75 bp, synthetic construct
  source 1..75: mol_type = other DNA
acggatgttaatggtctggcgactattgatctgaaaagtagtaagcaggaagacaacacggttgaagtcaccctt

SEQ ID NO: 61506 - DNA, 75 bp, synthetic construct
  source 1..75: mol_type = other DNA
gtggtggatgataacggcgtggggtttcgctacagcttcagcgccctgaaggaccgccacacggcggtggaggtg

SEQ ID NO: 61507 - DNA, 75 bp, synthetic construct
  source 1..75: mol_type = other DNA
accgtgcgggcgttggctctcaatatatccgttatgcaaatggcacagataaactactgcaggcttacactccag

SEQ ID NO: 61508 - DNA, 75 bp, synthetic construct
  source 1..75: mol_type = other DNA
gacagcagtgcctccgccgatgctttcaaaggtaaaacaaaatctgtgggggccggactctatgcttccgccatg

SEQ ID NO: 61509 - DNA, 75 bp, synthetic construct
  source 1..75: mol_type = other DNA
tgggcagtgaagctgcagcagatgcaggacggacgcctttatattgcgggtatcggtgccggtattgagaacacc

SEQ ID NO: 61510 - DNA, 75 bp, synthetic construct
  source 1..75: mol_type = other DNA
cgctgactaatttgagtggaaaggatgtagctggtcttctcacataccttggtttgggagaagccagatatgtca

SEQ ID NO: 61511 - DNA, 75 bp, synthetic construct
  source 1..75: mol_type = other DNA
gccagtatgacgcttggcggtgttgcacagatgctggcccctaaacccaaaaccccccgcacacagacaacggat

SEQ ID NO: 61512 - DNA, 75 bp, synthetic construct
  source 1..75: mol_type = other DNA
tgctgtttgggctgctgacatatctgactaacctgtatttcaaaatcagagaggaccgtcgtaaggctgcacggg

SEQ ID NO: 61513 - DNA, 75 bp, synthetic construct
  source 1..75: mol_type = other DNA
aacctttggtaaggatgcataggataaatcttcaaaaaaactttgatgttgaacttaactataaaaaacctgctg

SEQ ID NO: 61514 - DNA, 75 bp, synthetic construct
  source 1..75: mol_type = other DNA
tgcgtgctgtgcggaagtcagatgcggtttacgggactgaagcggggctaccgtctggcagagctggttatgatg

SEQ ID NO: 61515 - DNA, 75 bp, synthetic construct
  source 1..75: mol_type = other DNA
ctgaactgttgctggaagactacaaagcctccctgaaatatctcagcgatcacccgaaactgcagggtattgccc

SEQ ID NO: 61516 - DNA, 75 bp, synthetic construct
  source 1..75: mol_type = other DNA
gttaaccctgcgcgagcggttctcaaacaaagctttaaaagttcttatggtcaaaacttcgacttgattgttaat

SEQ ID NO: 61517 - DNA, 75 bp, synthetic construct
  source 1..75: mol_type = other DNA
gcccattcgccttttggcggggtaagcattacagtagagttaccgctggaacgggatttacagagagaagtatga

SEQ ID NO: 61518 - DNA, 75 bp, synthetic construct
  source 1..75: mol_type = other DNA
atgtgcacaaggacggacttgcgctgaacacggtaattaacgaggggggctggcaggttgttaaggcaggtggtg

SEQ ID NO: 61519 - DNA, 75 bp, synthetic construct
  source 1..75: mol_type = other DNA
tccgtgaccgttccgggcgcaccattgccggtgacgttaacgatgactggctgcaacctgccagtaatgagatgt

SEQ ID NO: 61520 - DNA, 75 bp, synthetic construct
  source 1..75: mol_type = other DNA
ggacaccaacaaccagtatcagcgatctgctggttgtggtgatgaagaaagccaccgcaggcatcagtatcagct

SEQ ID NO: 61521 - DNA, 75 bp, synthetic construct
  source 1..75: mol_type = other DNA
agtcgccgcgctgactcaatcgtgggtaacagcaatcagggaggccgccaccacaggaaaaatcacaccggcaat

SEQ ID NO: 61522 - DNA, 75 bp, synthetic construct
  source 1..75: mol_type = other DNA
attaaggcgatgaaatcgcttacgctgcgttttattcttgccttttcgttcacattgctgacagcggcagatatc

SEQ ID NO: 61523 - DNA, 75 bp, synthetic construct
  source 1..75: mol_type = other DNA
ggccgcgcgtcgccgggtattgtcggagtattcagataccggcaccgaaaaagcagagaagtatccgtactttga

SEQ ID NO: 61524 - DNA, 75 bp, synthetic construct
  source 1..75: mol_type = other DNA
ctcgcatcttatttatgatgtgatcccggatggagataaaacggttgttcagcctgatattttaattcttgaagg

SEQ ID NO: 61525 - DNA, 75 bp, synthetic construct
  source 1..75: mol_type = other DNA
gttctttggcccatttatcggtgccatcgcgcggtcggttggtggtgctatttccgataagttcggcggcgtgcg

SEQ ID NO: 61526 - DNA, 75 bp, synthetic construct
  source 1..75: mol_type = other DNA
atgttcttcggcagcgatcacggcggcgagcgaggagcactgttgtacgggctgatcggcacctgccgactgaac

SEQ ID NO: 61527 - DNA, 75 bp, synthetic construct
  source 1..75: mol_type = other DNA
gcaaactgcgtgagcagtgaaagccgccagtggcttgcgcagtgcgggctgacggtggagcggctggcggcacag

SEQ ID NO: 61528 - DNA, 75 bp, synthetic construct
  source 1..75: mol_type = other DNA
atccgggaaaacacggacggcacctttgccatcacggcggtgcagcacgtaccggaaaaagaagccatcgtggat

SEQ ID NO: 61529 - DNA, 75 bp, synthetic construct
  source 1..75: mol_type = other DNA
cgtattgaccgctttatggcggcctggaaacgcgccggattcagcgtggtagggcaccttgtgttcaccaaaaac

SEQ ID NO: 61530 - DNA, 75 bp, synthetic construct
  source 1..75: mol_type = other DNA
atgaaatccatcacaggtatcaaccagcaaatcagcaaagtgcagtcagccattatggcgcttatggcaacgaac

SEQ ID NO: 61531 - DNA, 75 bp, synthetic construct
  source 1..75: mol_type = other DNA
tctccggatgacgggggcagctgttatctctggctcaaccgtgggcaaccacccgcagttaaccggcgacgataa

SEQ ID NO: 61532 - DNA, 75 bp, synthetic construct
  source 1..75: mol_type = other DNA
atgaagttaaaacaacaaactgtgcgactttcacgtcgcacactgactgacccgccgtacctcgtcggttttcgt

SEQ ID NO: 61533 - DNA, 75 bp, synthetic construct
  source 1..75: mol_type = other DNA
acaccctgtatgacctctctgaacgtctgcgtctgcgcggctggcaggttccggccttcactctcggcggtgaag

SEQ ID NO: 61534 - DNA, 75 bp, synthetic construct
  source 1..75: mol_type = other DNA
ttggtatcaacttcgctctgggtgtggctaccggtctgactatggagttccagttcgggactaactggtcttact

SEQ ID NO: 61535 - DNA, 75 bp, synthetic construct
  source 1..75: mol_type = other DNA
aaagtcgaaacgtacggcgcggaactgggggctgtctggaaaccaacgctggattttgaactgaacagttccgtt

SEQ ID NO: 61536 - DNA, 75 bp, synthetic construct
  source 1..75: mol_type = other DNA
acgcatgccattatgatatttatgagggcgcattttttgaacgtgtagcagctgtgcagacacaatggtttaaaa

SEQ ID NO: 61537 - DNA, 75 bp, synthetic construct
  source 1..75: mol_type = other DNA
gatgtcgacaaaccgctgccgcatattcgtcttgatgctgcgctggaatttttaataggagataaattgcgatga

SEQ ID NO: 61538 - DNA, 75 bp, synthetic construct
  source 1..75: mol_type = other DNA
ccgccacgctgtttttcccgatggcgttgattttgtatgattttgccgcgtacctgtcgacggatctgatccagc

SEQ ID NO: 61539 - DNA, 75 bp, synthetic construct
  source 1..75: mol_type = other DNA
gagccgtattgagcagatgctgtctcaggacaaacgcattgaagctctggcagaagatttctctgacaaacatca

SEQ ID NO: 61540 - DNA, 75 bp, synthetic construct
  source 1..75: mol_type = other DNA
cggtggcaaagtgctggttatctcatgtataaccggaatggggacggcggaaaagatcaaaaaggtgctggagga

SEQ ID NO: 61541 - DNA, 75 bp, synthetic construct
  source 1..75: mol_type = other DNA
tccgtgaccgttccgggcgcaccattgccggtgacgttaatgatgactggctgcaacctgccagcaatgagatgt

SEQ ID NO: 61542 - DNA, 75 bp, synthetic construct
  source 1..75: mol_type = other DNA
cattcacgctgaagcctacgctgcaggcgagctgaaacacggcccgctggcgctgattgacgcggatatgccggt

SEQ ID NO: 61543 - DNA, 75 bp, synthetic construct
  source 1..75: mol_type = other DNA
gcgtgcgtgttatggccacgattcctgataacgccattgatttcatcttaaccgacccaccatatctcgtcggtt

SEQ ID NO: 61544 - DNA, 75 bp, synthetic construct
  source 1..75: mol_type = other DNA
gatcgcctcgcttttggtgtttggcctacggtgacactagctcaggcaagagcaaagcgtgacgaagctaaaaag

SEQ ID NO: 61545 - DNA, 75 bp, synthetic construct
  source 1..75: mol_type = other DNA
tcggaacccctgaacgttatcgctcaaaccatgtcttttcgtgaaatgctgttacgccagcgggtcaatgagggt

SEQ ID NO: 61546 - DNA, 75 bp, synthetic construct
  source 1..75: mol_type = other DNA
caaagcgccaacgccagcggtggggaataataccacgcaacttgctacgaccgcgtttgttcaggcggcactgac

SEQ ID NO: 61547 - DNA, 75 bp, synthetic construct
  source 1..75: mol_type = other DNA
caaggttatgagtgagaacacggtaaacggtgcattgcgtgcgatgggctatgacacgaaaaccgaggtctgcgg

SEQ ID NO: 61548 - DNA, 75 bp, synthetic construct
  source 1..75: mol_type = other DNA
cagcctcgaaggatccggtgattgccgacaataacgatctcacgacactaacagcaacagtcgctgatacagagg

SEQ ID NO: 61549 - DNA, 75 bp, synthetic construct
  source 1..75: mol_type = other DNA
ttgcaggtgccgctgcgtgacctgtgggatccggcgacctgtccggtcagtttcctgccttatctcgcctgggcg

SEQ ID NO: 61550 - DNA, 75 bp, synthetic construct
  source 1..75: mol_type = other DNA
gcacgatgcgctggataaattccaggccgacaccggtatcgacatcgacatgcacatcgacgctgccagcggtgg

SEQ ID NO: 61551 - DNA, 75 bp, synthetic construct
  source 1..75: mol_type = other DNA
actttcgccatcaacttctcccgcccggcgggtcaggtaattgcacagtactatgaattcctgcgcctcggtcgt

SEQ ID NO: 61552 - DNA, 75 bp, synthetic construct
  source 1..75: mol_type = other DNA
gcctgtcgtttctatcaacgtaccgatggcggcgaaacctggcaccgtcgggcgtattttgccggggatggatgc

SEQ ID NO: 61553 - DNA, 75 bp, synthetic construct
  source 1..75: mol_type = other DNA
agcagccaaaaaatcagaaaccaacgcgaaaaacagcgagacagccgcaaagacgagcgaaaccaacgcaaagtc

SEQ ID NO: 61554 - DNA, 75 bp, synthetic construct
  source 1..75: mol_type = other DNA
tgcgcaaatgtgcaacgccaaaaattacattggcgacgacaccatcgttcccgttaccagccgtgaagatttgcg

SEQ ID NO: 61555 - DNA, 75 bp, synthetic construct
  source 1..75: mol_type = other DNA
agttggtgggtgaacgccggcgatgctttcatgatatacagccttgctgaaaatttttgcagtagcaatggctac

SEQ ID NO: 61556 - DNA, 75 bp, synthetic construct
  source 1..75: mol_type = other DNA
gtgatacaggtgaaacggaattatcagcccgtcttaatgaaccgctggcaaatggtgctgtgatccatatcgtgc

SEQ ID NO: 61557 - DNA, 75 bp, synthetic construct
  source 1..75: mol_type = other DNA
tggaagcggtaattataactatttttcaggtgttcctcaggataaatggttagttgaaccagggcagttactatt

SEQ ID NO: 61558 - DNA, 75 bp, synthetic construct
  source 1..75: mol_type = other DNA
tcgctggcaaacatcaaagcagtgaatgagaaagggcagagctcggtggatattgaccgggtagatcagcatgtg

SEQ ID NO: 61559 - DNA, 75 bp, synthetic construct
  source 1..75: mol_type = other DNA
ctggtgcgggaaaaaccacactgcttaaaacattatcccactgctggccgtggtttaaaggtgatatttcttctc

SEQ ID NO: 61560 - DNA, 75 bp, synthetic construct
  source 1..75: mol_type = other DNA
ccacattcacagtacgcgccaaaagccagcccgacatttaccggaacccccaaagcgccaacgccagcggcgggg

SEQ ID NO: 61561 - DNA, 75 bp, synthetic construct
  source 1..75: mol_type = other DNA
gatgcagagtatgaagccctgtaccgtgacattctgctcgaactggacctggtactgtggctgattaaagccgat

SEQ ID NO: 61562 - DNA, 75 bp, synthetic construct
  source 1..75: mol_type = other DNA
ttgctggaagactacaaagcctccctgaaatatctcagcgatcacccgaaactgcagggtattgcccaacagaac

SEQ ID NO: 61563 - DNA, 75 bp, synthetic construct
  source 1..75: mol_type = other DNA
gggtctgcctgggggagccggttgcccgttccgggaaactgccgacactggcaccgccgttactgcgtcagctgg

SEQ ID NO: 61564 - DNA, 75 bp, synthetic construct
  source 1..75: mol_type = other DNA
taagtatcacggggggttttttgttcggactgtgcatggcctctttccactggtggcgcaggaaagttaaccggc

SEQ ID NO: 61565 - DNA, 75 bp, synthetic construct
  source 1..75: mol_type = other DNA
ggtatttagcggcggggttattcataaccgtttgctgcgtgcacgtctggcgcattatctcgctgatttcacatt

SEQ ID NO: 61566 - DNA, 75 bp, synthetic construct
  source 1..75: mol_type = other DNA
tgaaggtgtacgtggatgacctgatggcaaaacatcttgccgcgccggacccgcattcacagtatgcacccaaag

SEQ ID NO: 61567 - DNA, 75 bp, synthetic construct
  source 1..75: mol_type = other DNA
ggccagtatgatcctgggtggtgtggcccagatgctggcaccgaaagcccggacgcccacagcgaccagcacgga

SEQ ID NO: 61568 - DNA, 75 bp, synthetic construct
  source 1..75: mol_type = other DNA
gtgttcttcggtagcgatcacggcggcgagtgtggtgcactgctgtacgggctgatcggcacctgccgtctgaac

SEQ ID NO: 61569 - DNA, 75 bp, synthetic construct
  source 1..75: mol_type = other DNA
aacggtatcgatccggaagcgtatctgcgccatatcctgagcgtactgccggaatggccttccaaccgagttgac

SEQ ID NO: 61570 - DNA, 75 bp, synthetic construct
  source 1..75: mol_type = other DNA
atcacgaacacggcacaggtggaaaaatctgcccgttatctggggaccggcagtcagtggactgtccaggggagc

SEQ ID NO: 61571 - DNA, 75 bp, synthetic construct
  source 1..75: mol_type = other DNA
cggtgcgggaggctcttcttcgtgatttcaatactccccctttaagaaagagcctgatgactggatccagccggg

SEQ ID NO: 61572 - DNA, 75 bp, synthetic construct
  source 1..75: mol_type = other DNA
aatcgcaatactccctgatagataagggcgagtttattcagttgcaggttccggaagcgtttgagcaggaagtga

SEQ ID NO: 61573 - DNA, 75 bp, synthetic construct
  source 1..75: mol_type = other DNA
cttattatcaagaagataaagttatttacgctacgtttgattcttgcttttccgttcatgttactgacagctgca

SEQ ID NO: 61574 - DNA, 75 bp, synthetic construct
  source 1..75: mol_type = other DNA
tctgggacggcagtctgaaaccggcatacagcaacaacccggcctggtgtctgtgggacatgctgacccacccgc

SEQ ID NO: 61575 - DNA, 75 bp, synthetic construct
  source 1..75: mol_type = other DNA
ttaaaacggcggaagacgttaaggataccgtggagatcccggaactggacgaacaccagcaggatgcaccactta

SEQ ID NO: 61576 - DNA, 75 bp, synthetic construct
  source 1..75: mol_type = other DNA
aatggcaacccactaaaagataaagaaatcaccttctctgtgccaaacgacgtcgcaagtcggttctcgattagc

SEQ ID NO: 61577 - DNA, 75 bp, synthetic construct
  source 1..75: mol_type = other DNA
gttctttggcccatttatcggtgccatcgcgcgatcggttggtggtgctatttccgataaattcggcggcgtgcg

SEQ ID NO: 61578 - DNA, 75 bp, synthetic construct
  source 1..75: mol_type = other DNA
tcggcgtcaatgacccatcgggagcaactctgactgtaaggttaactcatgcaaacggggctccattgagccatg

SEQ ID NO: 61579 - DNA, 75 bp, synthetic construct
  source 1..75: mol_type = other DNA
tgggacgacgaaaatgtccacaaattgatggatttatccattaacaaaaactggatcgacaaagaagaatatccg

SEQ ID NO: 61580 - DNA, 75 bp, synthetic construct
  source 1..75: mol_type = other DNA
cagacgttgagcgcggattcccattcaaccgccacactgacttttattgcgcatgatgcagcaggtaatcctgtt

SEQ ID NO: 61581 - DNA, 75 bp, synthetic construct
  source 1..75: mol_type = other DNA
gcacctgaactggacaacgattatgaagcacgcccggccaatggctgggatgtacgcgcagaaggctggttaccc

SEQ ID NO: 61582 - DNA, 75 bp, synthetic construct
  source 1..75: mol_type = other DNA
atggataagaagcaagtaacggatttaaggtcggaactactcgattcacgttttggtgcaaagtctatttccact

SEQ ID NO: 61583 - DNA, 75 bp, synthetic construct
  source 1..75: mol_type = other DNA
gtgaaatgcgcgtggggtcacgtgttgtctctcaggagatcagcacggcagacgagggggacggtggtcaggttg

SEQ ID NO: 61584 - DNA, 75 bp, synthetic construct
  source 1..75: mol_type = other DNA
atggtgttactctcgctgaactgattaacgtggtctgcgataacggttactcccttcgtgttgttgatgaatctg

SEQ ID NO: 61585 - DNA, 75 bp, synthetic construct
  source 1..75: mol_type = other DNA
tcgtaaatgtcagtaatggtgccacccttaattcaacgggctatggatttatcggaggaaatgcctccggtaagg

SEQ ID NO: 61586 - DNA, 75 bp, synthetic construct
  source 1..75: mol_type = other DNA
ctgtgggggaatgtcggtgtgcaactaggtgataaaggctatagcgatactcagggcatgctgggagtgaaatat

SEQ ID NO: 61587 - DNA, 75 bp, synthetic construct
  source 1..75: mol_type = other DNA
agtatcaatattaagccgggccatgattattatttttatatccgcagtgtgaatactgttggcaaatcggcattc

SEQ ID NO: 61588 - DNA, 75 bp, synthetic construct
  source 1..75: mol_type = other DNA
tgaagcgtcggcggcgagtgcagaggaagcgaagaaacgggcagagaatgcccggggaccggcgggcgagaaggg

SEQ ID NO: 61589 - DNA, 75 bp, synthetic construct
  source 1..75: mol_type = other DNA
agctttaccttggtgagattggttattcgccactgttaacggccgaagaagaagtttatttcgcgcgtcgcgcac

SEQ ID NO: 61590 - DNA, 75 bp, synthetic construct
  source 1..75: mol_type = other DNA
gacaatttcgtgattgataatattgaaatgattaatagcgccgggatgttaatcggttatggggtaattaaaggc

SEQ ID NO: 61591 - DNA, 75 bp, synthetic construct
  source 1..75: mol_type = other DNA
cgacttactatgtttgtgctcaacgtcttacgcagttcgaaaagatttcgcaccagttcacctttttctggatga

SEQ ID NO: 61592 - DNA, 75 bp, synthetic construct
  source 1..75: mol_type = other DNA
gatattgatgcatctggaaaacaacttaatattcggcgtattaaaaatggtttctcgacaacacatcctcttctt

SEQ ID NO: 61593 - DNA, 75 bp, synthetic construct
  source 1..75: mol_type = other DNA
attgtcgttgttgcccagttgtcgccagagttcaccgctcgccttgttgaccgttggcgagagcttgaagaagct

SEQ ID NO: 61594 - DNA, 75 bp, synthetic construct
  source 1..75: mol_type = other DNA
taaccgacggttgctgggacaactgggtcatatcccgccggcagaagcggaaaaggcatattacgcttccatcgg

SEQ ID NO: 61595 - DNA, 75 bp, synthetic construct
  source 1..75: mol_type = other DNA
tggttcacatggacacaccatcaccgttaacgctgctggtaacgcggaaaacaccgttaaaaacatcgcatttaa

SEQ ID NO: 61596 - DNA, 75 bp, synthetic construct
  source 1..75: mol_type = other DNA
gcgttgtcgttattgctggcctttcggtcgctctcgtcaagagttgctctcacgccagtaatcttcagagcgata

SEQ ID NO: 61597 - DNA, 75 bp, synthetic construct
  source 1..75: mol_type = other DNA
tttaaccgtctcgttgctatcgcacagcttgctggattcggtaaccactggcggtaaaggggttggctggctgtg

SEQ ID NO: 61598 - DNA, 75 bp, synthetic construct
  source 1..75: mol_type = other DNA
cgttatggcgtcagtctcattcatctggacgccggcgcagaatgtctgccggggctccccactttcgactggtaa

SEQ ID NO: 61599 - DNA, 75 bp, synthetic construct
  source 1..75: mol_type = other DNA
aacaggtcgatccgcgcaaagccgccgtcgaagccgctattgcccgtgccaaagcgcgcaagctggaacagcaac

SEQ ID NO: 61600 - DNA, 75 bp, synthetic construct
  source 1..75: mol_type = other DNA
ccggcgaaaccgaccttgccctgcccggcccgctgccgttcatcctctcccgcacctacagcagttaccggacaa

SEQ ID NO: 61601 - DNA, 75 bp, synthetic construct
  source 1..75: mol_type = other DNA
gttaacgcaggggagattcactttgatactcagatgacacaggatgccgtactgagccgtgctgttgcaaaaggc

SEQ ID NO: 61602 - DNA, 75 bp, synthetic construct
  source 1..75: mol_type = other DNA
atgtttgcagatgaagaacttgttatggagttactggtcaacgcggggcaggcacgttctgacgcgatggaagcc

SEQ ID NO: 61603 - DNA, 75 bp, synthetic construct
  source 1..75: mol_type = other DNA
ctttatttctatgacaatgacgttgtggaaatggcgaaaaaccttaagccttctgcccgaggtgaactggaaatt

SEQ ID NO: 61604 - DNA, 75 bp, synthetic construct
  source 1..75: mol_type = other DNA
ggtaaccctgttccagggagcctggtgacctttaatctgccccggggtgtcaagccgcttacaggcgataatgtc

SEQ ID NO: 61605 - DNA, 75 bp, synthetic construct
  source 1..75: mol_type = other DNA
tgccgtaacgtgctcagcccgtcgaagctgcgggaaaaatgggatgagctttccctgcgcttatcgccgtccgtc

SEQ ID NO: 61606 - DNA, 75 bp, synthetic construct
  source 1..75: mol_type = other DNA
gatattctgattatcagtacgccgcaggatacaccacgttttcaacaattgcttggtgatggaagccagtggggg

SEQ ID NO: 61607 - DNA, 75 bp, synthetic construct
  source 1..75: mol_type = other DNA
atcgcaaagggtttattgatgcggagcaggtgaagaagctggctgagccgctgaagaaaaatgcctatggtcaat

SEQ ID NO: 61608 - DNA, 75 bp, synthetic construct
  source 1..75: mol_type = other DNA
tgcaaacagtagatataacgctggtggctggcccggcagacacctcgcagtccgtccttaagagcaatcggtcat

SEQ ID NO: 61609 - DNA, 75 bp, synthetic construct
  source 1..75: mol_type = other DNA
tcgaaacacaacgtccgaaacaggcctgttgccggtgcgaccatatcgtgcaggcaccagtaccttcaaaaccca

SEQ ID NO: 61610 - DNA, 75 bp, synthetic construct
  source 1..75: mol_type = other DNA
ttaaagctgacctgagtcagtcagcgttagtcatttcattaccccaggcttaccttgaatataccgacatcaact

SEQ ID NO: 61611 - DNA, 75 bp, synthetic construct
  source 1..75: mol_type = other DNA
tgggacgtggtgattttgacaggctttgcaatgcatctggcttgatttacaacagctcctctgaggatgattccg

SEQ ID NO: 61612 - DNA, 75 bp, synthetic construct
  source 1..75: mol_type = other DNA
gtatcgacacattaaaagcacttcgccagacacaccagacgcctgtcattatgttgacggcgcgcggcagtgaac

SEQ ID NO: 61613 - DNA, 75 bp, synthetic construct
  source 1..75: mol_type = other DNA
gaagaaacgacggcggggaaaattgatagtgaagcgcaaaagcactatgaaataaacctgttaagaccggaatct

SEQ ID NO: 61614 - DNA, 75 bp, synthetic construct
  source 1..75: mol_type = other DNA
atttataattggtgaagaatttatcggtaacgattcttgtgctttagtcctcggcgacaatgttttctatggtca

SEQ ID NO: 61615 - DNA, 75 bp, synthetic construct
  source 1..75: mol_type = other DNA
ttccgttgtatggatgactattacaccagtattgatatggcgaccgcactgcatccgcagaccctactgacgctg

SEQ ID NO: 61616 - DNA, 75 bp, synthetic construct
  source 1..75: mol_type = other DNA
atggttaatgccaatccttgcgcacgcccagaattcatctggcgtttctattcctgtaaaaaacaccactatcac

SEQ ID NO: 61617 - DNA, 75 bp, synthetic construct
  source 1..75: mol_type = other DNA
tagccggtggttcgggtactcgcctttaccccgtgacgatggcggttagtaaacagctgctgccaatctatgata

SEQ ID NO: 61618 - DNA, 75 bp, synthetic construct
  source 1..75: mol_type = other DNA
gatattgattcgttttttataaatcaacgattaagtaagctggaaagttttatagataagtggagggagggtaaa

SEQ ID NO: 61619 - DNA, 75 bp, synthetic construct
  source 1..75: mol_type = other DNA
tttattcatgggtttcatattgcaaacggagcgataattattctgtgtggtttttgaattgtccggatgtaaata

SEQ ID NO: 61620 - DNA, 75 bp, synthetic construct
  source 1..75: mol_type = other DNA
atcgtcaacaatctggtgagatgggaccgatggggattgcatcttatcaccgggcaacaggcagatcgactcgct

SEQ ID NO: 61621 - DNA, 75 bp, synthetic construct
  source 1..75: mol_type = other DNA
aagagatggactctagctattattgcagatgaatttaatgtatcagagataacaataaggaaaaggcttgagtca

SEQ ID NO: 61622 - DNA, 75 bp, synthetic construct
  source 1..75: mol_type = other DNA
tttcaacgtttttctaaactgttacctttcagaattgattttgcctacaggaaagacacgcccagttttggtcat

SEQ ID NO: 61623 - DNA, 75 bp, synthetic construct
  source 1..75: mol_type = other DNA
atcagcgatgatcataactttgaccgtcaaatcattattccgcccattatctttaacggtatagcgtatgacgat

SEQ ID NO: 61624 - DNA, 75 bp, synthetic construct
  source 1..75: mol_type = other DNA
agaacgggaacttgttggcgtaatgcaatggggttacgcccttaacccaaacagtggtgcacgcgtcgtaacggg

SEQ ID NO: 61625 - DNA, 75 bp, synthetic construct
  source 1..75: mol_type = other DNA
caccatcagcgatgatcataactttgaccgccagattattattccgcccattatttttaacggtatagcgtatga

SEQ ID NO: 61626 - DNA, 75 bp, synthetic construct
  source 1..75: mol_type = other DNA
gcagtgcaaagcggtttgatcgattacaatcctgctcaggagatggctggggcagttgcttccagtaatcgtgtc

SEQ ID NO: 61627 - DNA, 75 bp, synthetic construct
  source 1..75: mol_type = other DNA
agatggaaggtaagtttgtcgaatggggaaaacctccaacgcttgatggcatgaccggtcacgctggcgagctcc

SEQ ID NO: 61628 - DNA, 75 bp, synthetic construct
  source 1..75: mol_type = other DNA
gatttcggccctatcgacgagctgcgtaaaaaacatggcgatctggcggccgttgcgccgttgccgcgagctcac

SEQ ID NO: 61629 - DNA, 75 bp, synthetic construct
  source 1..75: mol_type = other DNA
atgtttcagtcccgaacttgtatccgctctatagcagaaaagtaaataaagtttattggcgatataagcatccag

SEQ ID NO: 61630 - DNA, 75 bp, synthetic construct
  source 1..75: mol_type = other DNA
tcgttacaacggccgggacaatgatcagcaggttccgcgtcagttgcgccagtcccgtcatcgtcgcccgttacc

SEQ ID NO: 61631 - DNA, 75 bp, synthetic construct
  source 1..75: mol_type = other DNA
gcgttgggtaacggacataacctacatcaggacccacgaaggctggctgtatcttgccgttgttgttgatctgtt

SEQ ID NO: 61632 - DNA, 75 bp, synthetic construct
  source 1..75: mol_type = other DNA
tatcactattaacggcaatacagtcagttggtcaaatttatacaagggacttggatcttatatatatacatattg

SEQ ID NO: 61633 - DNA, 75 bp, synthetic construct
  source 1..75: mol_type = other DNA
gttgaaacgtgaacggataaagaaaaagatctacggaacgcgggaagaagcccgcagtgatatttttgattacat

SEQ ID NO: 61634 - DNA, 75 bp, synthetic construct
  source 1..75: mol_type = other DNA
ctgatgagcgttgggtaacggacataacctacatcaggacccacgaaggctggctgtatcttgccgttgttgttg

SEQ ID NO: 61635 - DNA, 75 bp, synthetic construct
  source 1..75: mol_type = other DNA
tccagaacgttccgccgtctggttgtcacacttacccgacgttatggcgtcagtctcattcatctggatgccagc

SEQ ID NO: 61636 - DNA, 75 bp, synthetic construct
  source 1..75: mol_type = other DNA
tggcgtccgttgagctgagtattgatgccagcacagtgatggcgacgcaggattacgtcgatgacaaaatcgcag

SEQ ID NO: 61637 - DNA, 75 bp, synthetic construct
  source 1..75: mol_type = other DNA
taacaagaataaaaactatatcgtggctgaactggttgtaccgccagaagtgggcggcttctggatgcgtgagct

SEQ ID NO: 61638 - DNA, 75 bp, synthetic construct
  source 1..75: mol_type = other DNA
gaggcgttcgcaccagctcttaacagtcatactcgggagtcttttttttcgtgcatcgcagcgcaactccaccaa

SEQ ID NO: 61639 - DNA, 75 bp, synthetic construct
  source 1..75: mol_type = other DNA
cggtgggcaaaactcaaatgcgccaaaggcaagtgatgtaagtgaggcgttggcctatattcgccagaacaacga

SEQ ID NO: 61640 - DNA, 75 bp, synthetic construct
  source 1..75: mol_type = other DNA
gtcgatggtgttgagcttgccgaactgattaacgtggtctgcgataatggctactcccttcgtgttgttgatgaa

SEQ ID NO: 61641 - DNA, 75 bp, synthetic construct
  source 1..75: mol_type = other DNA
gttactctcgctgaactgattaacgtggtctgcgataatggctactcccttcgtgttgttgatgaatctgaccgg

SEQ ID NO: 61642 - DNA, 75 bp, synthetic construct
  source 1..75: mol_type = other DNA
agtgcaggatattcccggtgtgctggccgtgtttgccgaacgccgtaaggacagttttggcccgtatgtccggct

SEQ ID NO: 61643 - DNA, 75 bp, synthetic construct
  source 1..75: mol_type = other DNA
tattcagtcgtagcgttacaggggttaacgctggtgctgtttatcttctttatgtgggttgcttcacgcggtatg

SEQ ID NO: 61644 - DNA, 75 bp, synthetic construct
  source 1..75: mol_type = other DNA
tgcgtgggatgatgccgcgcgtcgtgacatccatgctgcccgatcattccgctgtactggcggaggactgccatt

SEQ ID NO: 61645 - DNA, 75 bp, synthetic construct
  source 1..75: mol_type = other DNA
tgacggaaaatttccaaaagtcacggctgctgaaattgccaccaaaggagagggtaatttccctgcggcatcata

SEQ ID NO: 61646 - DNA, 75 bp, synthetic construct
  source 1..75: mol_type = other DNA
ctcaccgtaccggatctggtgatcccgacgttaatggtaaaagtgctgccaccgtttgctgccgggatcttcctg

SEQ ID NO: 61647 - DNA, 75 bp, synthetic construct
  source 1..75: mol_type = other DNA
aagttccgctacgatcattaaagatctctatctgaatatccgtccggatcaaatgcaaaacgagacgcgtctgaa

SEQ ID NO: 61648 - DNA, 75 bp, synthetic construct
  source 1..75: mol_type = other DNA
agtgcaggatattcccggtgtgctggccgtgtttgctgaacgccgtaaggacagttttggcccgtatgtccggtt

SEQ ID NO: 61649 - DNA, 75 bp, synthetic construct
  source 1..75: mol_type = other DNA
gaaatcacaaacaatcgacttgtattacagaaaaaaacatgcctatctttttaaacttcacagcaggcagtatct

SEQ ID NO: 61650 - DNA, 75 bp, synthetic construct
  source 1..75: mol_type = other DNA
actcgctgtcgcatcagacgaatgacaccggcgaatcagaatggattcattttacaggtagcggatatctgttac

SEQ ID NO: 61651 - DNA, 75 bp, synthetic construct
  source 1..75: mol_type = other DNA
ttacctgccgccgccagagaatatgacaggcctttgcctgatggctaacggtattgccgccgggtttgccggtaa

SEQ ID NO: 61652 - DNA, 75 bp, synthetic construct
  source 1..75: mol_type = other DNA
acaaaccgtctggggcatttctccgtgggaaatggcatggcagataacgtcgttctggaaaatggcggtcgcctg

SEQ ID NO: 61653 - DNA, 75 bp, synthetic construct
  source 1..75: mol_type = other DNA
atgagtcttctttttgctgaacgcccactggttataaacacgcagctggcaatgaaaatcggcttaaacgaagcc

SEQ ID NO: 61654 - DNA, 75 bp, synthetic construct
  source 1..75: mol_type = other DNA
gcttcgtgctgtccaacggccacggctccatgctgatctacagcctgctgcacctcaccggttacgatctgccga

SEQ ID NO: 61655 - DNA, 75 bp, synthetic construct
  source 1..75: mol_type = other DNA
tgtatcgcactggttgtattaagttttacacgctcatggtggcataattcgtcccgcgtgattgctccgccgatg

SEQ ID NO: 61656 - DNA, 75 bp, synthetic construct
  source 1..75: mol_type = other DNA
cctctcccgtcagaacctggcgcagcaggaacgtactgaagagcaactggcaaacatcgcgcgcggtggttatgt

SEQ ID NO: 61657 - DNA, 75 bp, synthetic construct
  source 1..75: mol_type = other DNA
acgtaccgctctcttatcgtacgctggtgtttatcctcggcggcttctcgatggtggtgtctaacctcggcttga

SEQ ID NO: 61658 - DNA, 75 bp, synthetic construct
  source 1..75: mol_type = other DNA
tatgatcttcccggcagaaaccatgactgttgagcagatggcgctgaccattcgccacggtagcggtattgtttg

SEQ ID NO: 61659 - DNA, 75 bp, synthetic construct
  source 1..75: mol_type = other DNA
atgaataactctcggttattccgtttgagcaggattgttattgcgttaactgccgccagcggcatgatggtaaat

SEQ ID NO: 61660 - DNA, 75 bp, synthetic construct
  source 1..75: mol_type = other DNA
atgagcactacgaccaccacaccggctgtctacgtgggcacatatcacaaatacaactgcggcagtatctacggc

SEQ ID NO: 61661 - DNA, 75 bp, synthetic construct
  source 1..75: mol_type = other DNA
tgcactggcacgtgccgaggaaaagatcgaagaggaggagcgggaaatagaacatctgagggcccagatagaaaa

SEQ ID NO: 61662 - DNA, 75 bp, synthetic construct
  source 1..75: mol_type = other DNA
aaatacgcgggttgccggtgtctgaacgcctggcggtcagacaaatgcagagtaaaccgctactgacttccctgt

SEQ ID NO: 61663 - DNA, 75 bp, synthetic construct
  source 1..75: mol_type = other DNA
cagaacaaaatagccttaaagctattattgctaaccgggtgcagggttggtgaattgcagaaaatgagaagggaa

SEQ ID NO: 61664 - DNA, 75 bp, synthetic construct
  source 1..75: mol_type = other DNA
ccgcagcttaatcccatcgatagctatctgatgaataaacacttcatgcgtaagcacggacccaacgcttattac

SEQ ID NO: 61665 - DNA, 75 bp, synthetic construct
  source 1..75: mol_type = other DNA
cttcgggctgatgtatctccagttgttcaggataatatatctgaaataattagttcattgcatagcgaatataaa

SEQ ID NO: 61666 - DNA, 75 bp, synthetic construct
  source 1..75: mol_type = other DNA
gcattacgtaatcgaacctcagtacctttggacaagcattgccgaaatggcgcggactcaacatgtgaaactgct

SEQ ID NO: 61667 - DNA, 75 bp, synthetic construct
  source 1..75: mol_type = other DNA
gtcattacagagcctgcaacaaccgtcatttccattgagcccgccaatcctgatgtggtctatattcccaactac

SEQ ID NO: 61668 - DNA, 75 bp, synthetic construct
  source 1..75: mol_type = other DNA
tgctgctgtcacatcagtcccggcactggctgctgacaaggttgtacaggcgggagaaaccgtgaacgacggaac

SEQ ID NO: 61669 - DNA, 75 bp, synthetic construct
  source 1..75: mol_type = other DNA
gatgacggtctggcggaggcggacaataacacagcggaaagagcgcttcgtgcagtctgtctcggaaagaaaaat

SEQ ID NO: 61670 - DNA, 75 bp, synthetic construct
  source 1..75: mol_type = other DNA
acaccaccggaaggctttgagtcctccggagctgaaaccggactgggcgtggaagtgacgaaggcaaaaccggtg

SEQ ID NO: 61671 - DNA, 75 bp, synthetic construct
  source 1..75: mol_type = other DNA
taaagttcgcgagcgcagtccatcgtttggcgaatattattcccatccgcgtctgttctggctaagtcagacgcc

SEQ ID NO: 61672 - DNA, 75 bp, synthetic construct
  source 1..75: mol_type = other DNA
tgtgtgcagaggaaggggtaactcaggcagagttgatagaaaggcttattgagaaagaggcctgtcaccggaata

SEQ ID NO: 61673 - DNA, 75 bp, synthetic construct
  source 1..75: mol_type = other DNA
gccgtttatgtggggatcctcgggtttggcgtcaacacagagcgtctgaaagagaaaaacctgcctgtgccgaag

SEQ ID NO: 61674 - DNA, 75 bp, synthetic construct
  source 1..75: mol_type = other DNA
tacactctgaacaacggcggggcatttatggcccccgaaccggatgacgatgatggcgaaaactggttactgttc

SEQ ID NO: 61675 - DNA, 75 bp, synthetic construct
  source 1..75: mol_type = other DNA
cgatatttgcatgggtgctggccattattctgatgatggcgggtgtactggcgatcctacaattgcccgtcgccc

SEQ ID NO: 61676 - DNA, 75 bp, synthetic construct
  source 1..75: mol_type = other DNA
acggccgccagtatggagcaattaaccgccacggtagggcaaaacgccgataacgcacgacaggcgtcggaactg

SEQ ID NO: 61677 - DNA, 75 bp, synthetic construct
  source 1..75: mol_type = other DNA
tgcgctcacggtaagcggaattaaaacggccagcgtgacggcttctgattctgttactgccacggtgccggtggt

SEQ ID NO: 61678 - DNA, 75 bp, synthetic construct
  source 1..75: mol_type = other DNA
ccggtgcggtctggctgatgtccagcaccaatgccctggcactgtccatgcgtaaaaatgcgctgggtcagaagg

SEQ ID NO: 61679 - DNA, 75 bp, synthetic construct
  source 1..75: mol_type = other DNA
caggaacaccagactgatttcgcaggctttaacatcagctatgacaactatcactcgacgcacagcgaagagaac

SEQ ID NO: 61680 - DNA, 75 bp, synthetic construct
  source 1..75: mol_type = other DNA
ttgtgctccctgttctggtcatacagacaaatctgagtctgtctgtatgggctgccctgctgatgcttggctcaa

SEQ ID NO: 61681 - DNA, 75 bp, synthetic construct
  source 1..75: mol_type = other DNA
gtcaaaattgagcaaaatggcgctttagggatcaccaaaaatataggtacagcagagatcaacaaccgcgggaaa

SEQ ID NO: 61682 - DNA, 75 bp, synthetic construct
  source 1..75: mol_type = other DNA
tacacgccgcccattgagcgcatggatctcgctatgttggccaatatcgcaccgtatcacggcgcggtattgcgt

SEQ ID NO: 61683 - DNA, 75 bp, synthetic construct
  source 1..75: mol_type = other DNA
ggtagctccacgcttagcacgtccattcaagtcgacgctgatgcgtctacggcacatctcacctcgctatataca

SEQ ID NO: 61684 - DNA, 75 bp, synthetic construct
  source 1..75: mol_type = other DNA
agtgctgagctacatcttgttttgcacgatatatcaggcaatccgatcaaagtttctgaagggatggaatttgtg

SEQ ID NO: 61685 - DNA, 75 bp, synthetic construct
  source 1..75: mol_type = other DNA
ggacttatggtggacggttttattttacgtgaagatgaatttgtcacatcattacaggctttgaaagagatagga

SEQ ID NO: 61686 - DNA, 75 bp, synthetic construct
  source 1..75: mol_type = other DNA
tacgtgaagatgaatttgtcacatcattacaggctttgaaagagataggacttaaggctggattttttgcttttg

SEQ ID NO: 61687 - DNA, 75 bp, synthetic construct
  source 1..75: mol_type = other DNA
gcgaggttgggtatcgtcacatgcatgtgctcgatcacattctgacgcctctgcggatatatgaaggtggtgcgc

SEQ ID NO: 61688 - DNA, 75 bp, synthetic construct
  source 1..75: mol_type = other DNA
agcgcgcattgttgcagctcctacccgatggcctggcatgggataaacgtcctgaatccgtgttgtcagccttat

SEQ ID NO: 61689 - DNA, 75 bp, synthetic construct
  source 1..75: mol_type = other DNA
ggcattcgctatcgttacgactggaaagcttaccgacaacaagacttatccggtgatatgtctcgtgataacgtt

SEQ ID NO: 61690 - DNA, 75 bp, synthetic construct
  source 1..75: mol_type = other DNA
aagcgttatctctatgctaatatggaagttaacggacaacgattttcttatggaattactggtgggaatgttttt

SEQ ID NO: 61691 - DNA, 75 bp, synthetic construct
  source 1..75: mol_type = other DNA
cagtcttacgacagcatgcgttatgaactgggtgtagatgcaggttataccttcacctacagcgaagaccaggct

SEQ ID NO: 61692 - DNA, 75 bp, synthetic construct
  source 1..75: mol_type = other DNA
caccgccatcaccgcagacacggagcaccgtttcagtggcctgccactgggggaatacaccctgacggtgcgggc

SEQ ID NO: 61693 - DNA, 75 bp, synthetic construct
  source 1..75: mol_type = other DNA
taacgatgtgaacggtgattccatcgataacggtactgaagggtctgcggtacgtgttggtctgggtactcagtt

SEQ ID NO: 61694 - DNA, 75 bp, synthetic construct
  source 1..75: mol_type = other DNA
cgatataaaaactttaatgaatatcttattgcctatttaaatgatgatttaagcgcatctgaacactcctggcgt

SEQ ID NO: 61695 - DNA, 75 bp, synthetic construct
  source 1..75: mol_type = other DNA
aacagggtggagcactggtcaccagtactgcggcaacggttcttggcagcaaccgtctgggcaatttcacggtgg

SEQ ID NO: 61696 - DNA, 75 bp, synthetic construct
  source 1..75: mol_type = other DNA
ctggacgtacgtggtggatatcgtagcggaagccatgcctatgagactcgactcaaagtcagtgagggatggcaa

SEQ ID NO: 61697 - DNA, 75 bp, synthetic construct
  source 1..75: mol_type = other DNA
atttattattggtgaagagttcattggtaaagatgattgtgctctagtattgggcgataatattttctatggaca

SEQ ID NO: 61698 - DNA, 75 bp, synthetic construct
  source 1..75: mol_type = other DNA
cagagtatgctcgatcttagcaaccttggactgacttcactccctgaaaatttgcctccacatctgattgaattt

SEQ ID NO: 61699 - DNA, 75 bp, synthetic construct
  source 1..75: mol_type = other DNA
gatggggaggggctatgcttggctggatacgggaacacatcaaagcctgatagaagcgagcaactttattgctac

SEQ ID NO: 61700 - DNA, 75 bp, synthetic construct
  source 1..75: mol_type = other DNA
ctgactgccgacagttaatccatgtggaaaatggaaaacattttattatccgcaatattacatcgcgtaatgtaa

SEQ ID NO: 61701 - DNA, 75 bp, synthetic construct
  source 1..75: mol_type = other DNA
gctgtgacattgttggcattaacatcgttgaaccgactgaaaccatcaagcaggtcacggcgctggggcgtcgtt

SEQ ID NO: 61702 - DNA, 75 bp, synthetic construct
  source 1..75: mol_type = other DNA
gctggatgtccgcaacggtggtaccgccactgccgtatccatgggaaatggcggggtactgctggccgattccgg

SEQ ID NO: 61703 - DNA, 75 bp, synthetic construct
  source 1..75: mol_type = other DNA
aaggtaaagttgcggtcgtcactggttgtgatactggactgggccaggggatggcgttggggctggcgcaagcgg

SEQ ID NO: 61704 - DNA, 75 bp, synthetic construct
  source 1..75: mol_type = other DNA
acgtggaacgataacgggcaactggtgcgcatcagcggcccgcaggagagccggaagtaccgttacagcgacacg

SEQ ID NO: 61705 - DNA, 75 bp, synthetic construct
  source 1..75: mol_type = other DNA
agcttcctgcttcgcctgaccgtggcagcggacgatggcagtgagcggctggtcagtacggcaaggacgacggaa

SEQ ID NO: 61706 - DNA, 75 bp, synthetic construct
  source 1..75: mol_type = other DNA
agaagctgggcgtgaaggtcaacgccttctttgccccggactacgcgggcattatccaggggatgcgcttcaata

SEQ ID NO: 61707 - DNA, 75 bp, synthetic construct
  source 1..75: mol_type = other DNA
gcagtgaaagagttgttaatgtcagtgattagttctccagtgatggaaaaaaggcagtggcaattggtgagctaa

SEQ ID NO: 61708 - DNA, 75 bp, synthetic construct
  source 1..75: mol_type = other DNA
tgacgtttatttctgccagaggatatatcaaaacgctgggagtaatttgcttcgcagctattgtactggcctttg

SEQ ID NO: 61709 - DNA, 75 bp, synthetic construct
  source 1..75: mol_type = other DNA
cgctcatgagtttacttttcagcaattacgccgtattaccggaacgccgtttgaagcactggtgcggcagaaagt

SEQ ID NO: 61710 - DNA, 75 bp, synthetic construct
  source 1..75: mol_type = other DNA
atgagaaatcataccacacacccgcaagggcgggacccgcacaacctgaataaatacatctggcgttttatcgcc

SEQ ID NO: 61711 - DNA, 75 bp, synthetic construct
  source 1..75: mol_type = other DNA
tttacgtacaagacaaactgcgcgaacagggcgcagagctgtggcgctggatcaatgacggtgcccacatttatg

SEQ ID NO: 61712 - DNA, 75 bp, synthetic construct
  source 1..75: mol_type = other DNA
aggtatcttctgaagtggcgtaataaaaatgttgattacggaaaacatacagaaggtacaaacggagatgatagt

SEQ ID NO: 61713 - DNA, 75 bp, synthetic construct
  source 1..75: mol_type = other DNA
ataatgctgcgcatgtaacataccttgtttcttcttcttataagcttgctatatatagcaacacaggaaaggttc

SEQ ID NO: 61714 - DNA, 75 bp, synthetic construct
  source 1..75: mol_type = other DNA
ttctgaccagcaataaagtcggtacatatacggtgactgcatcgttccataacggcgtaacaatacagacacaga

SEQ ID NO: 61715 - DNA, 75 bp, synthetic construct
  source 1..75: mol_type = other DNA
atggcagagctgcagggcttactctggggaccgggagtgtattcactctgcaggaaggtgacagcactagtgaca

SEQ ID NO: 61716 - DNA, 75 bp, synthetic construct
  source 1..75: mol_type = other DNA
tgtcagcatggctggtaaatgactggtatcccacagcaagtatcagcgatttgctggttgtggtgatgaagaaag

SEQ ID NO: 61717 - DNA, 75 bp, synthetic construct
  source 1..75: mol_type = other DNA
atggacgtgacaaacgatgattacatccgcctgttatcggcactgttgccgcccggtcctgcatggtcagccagc

SEQ ID NO: 61718 - DNA, 75 bp, synthetic construct
  source 1..75: mol_type = other DNA
cgatggaattgattccgccattgcattcagtcaggctcagattccggatgttgttcatcagttgctggtatggaa

SEQ ID NO: 61719 - DNA, 75 bp, synthetic construct
  source 1..75: mol_type = other DNA
ccgcaaaagaacgccatccagactgtcagattgtgaagcgaaaaggacggctgtatgtgatttgtaaatctaatc

SEQ ID NO: 61720 - DNA, 75 bp, synthetic construct
  source 1..75: mol_type = other DNA
gtcaggtgctgctggcggcagacaggattgcgatgattaatcctgcgaatggcaacacaaagccgatgtttgttg

SEQ ID NO: 61721 - DNA, 75 bp, synthetic construct
  source 1..75: mol_type = other DNA
ggttgagcatattcagatcctcgcctgtggtacttcttataactccggtatggtttcccgctactggtttgaatc

SEQ ID NO: 61722 - DNA, 75 bp, synthetic construct
  source 1..75: mol_type = other DNA
gtaatccagactaaagaagcgctggagacagaagggcaggtgagccgcatcgttgagtttatcgaaaagccggat

SEQ ID NO: 61723 - DNA, 75 bp, synthetic construct
  source 1..75: mol_type = other DNA
gctgcatggcaaagatgttccggtgcgtgaagccctcgccggacaagtgcccagcgcaggcgtcggcacctgttt

SEQ ID NO: 61724 - DNA, 75 bp, synthetic construct
  source 1..75: mol_type = other DNA
cagaaggcaatgaatgcgttttccgaagccttcgggattgacagcatggagccaggagatccagctcgcgtaatt

SEQ ID NO: 61725 - DNA, 75 bp, synthetic construct
  source 1..75: mol_type = other DNA
ctgtaggtgcatatcgatatgccctgcaaatgcgtccggcggcccctggcgcaatacctgaaggtaacaaagcaa

SEQ ID NO: 61726 - DNA, 75 bp, synthetic construct
  source 1..75: mol_type = other DNA
atggagactgtttttgacgcactgaaagcaatggggaaagccacgtcggcagaactggctgcgcgacttgatatc

SEQ ID NO: 61727 - DNA, 75 bp, synthetic construct
  source 1..75: mol_type = other DNA
cgcgctgagccgtgctgttgcaaaaagtaactccccggtaacgttccataaactgaccaccacgaacctcaccgg

SEQ ID NO: 61728 - DNA, 75 bp, synthetic construct
  source 1..75: mol_type = other DNA
gtatgttgctactcacttacagtggcacattgagcaggaaaatatcgatacccgtaacggcccgcagctggctga

SEQ ID NO: 61729 - DNA, 75 bp, synthetic construct
  source 1..75: mol_type = other DNA
cacgcaggacatctgcggtcatggtttccgcacactggcatgtagtgctctgattgaatcagggctatggtctga

SEQ ID NO: 61730 - DNA, 75 bp, synthetic construct
  source 1..75: mol_type = other DNA
cacgccgacgaacaaaaagagcgcacctatctgtaccagggcatcgctgaacgcaactttgaacgcaaattccag

SEQ ID NO: 61731 - DNA, 75 bp, synthetic construct
  source 1..75: mol_type = other DNA
atcaaagatattgttctggtgacgcactcctcgaagaatgcggtggaaaaccacttcgacacctcctacgagctg

SEQ ID NO: 61732 - DNA, 75 bp, synthetic construct
  source 1..75: mol_type = other DNA
aaaccgcaggtggggtcatcgatcgggacaccattaagtggtggctgaaacagtcacgcgaagcacaatcctcca

SEQ ID NO: 61733 - DNA, 75 bp, synthetic construct
  source 1..75: mol_type = other DNA
gtgaatgttaacttttacgtcacctgcattggtgatgcgtttaaatcccggatggcacaaaaaagcgtgctgtta

SEQ ID NO: 61734 - DNA, 75 bp, synthetic construct
  source 1..75: mol_type = other DNA
ctggagcaattgggttgcaatgtccatttccccgaaaaacagggatgttgcggtcagccagcgataaatggcggt

SEQ ID NO: 61735 - DNA, 75 bp, synthetic construct
  source 1..75: mol_type = other DNA
gagggaccggtgtggatcttcggttatggatcgttgatgtggaatccggcactggagtttaccgagtcgtgcacc

SEQ ID NO: 61736 - DNA, 75 bp, synthetic construct
  source 1..75: mol_type = other DNA
gcgctgacggatcgccttgccagtatcaaaaatcgtatgcatatgaacggggaagtgacgctcagtaatggtgca

SEQ ID NO: 61737 - DNA, 75 bp, synthetic construct
  source 1..75: mol_type = other DNA
gtttctgatgcagaacgtttcacccgctggatgaatgatccgcgcgttgagtatttctgggagcaaagtggctca

SEQ ID NO: 61738 - DNA, 75 bp, synthetic construct
  source 1..75: mol_type = other DNA
tctgaaaacatcaatgtcgcgtaaaggtaactgttacgacaacgctccgatggaaagcttctggggaacgctgaa

SEQ ID NO: 61739 - DNA, 75 bp, synthetic construct
  source 1..75: mol_type = other DNA
ttttcacaacgcgaaccctgtacgcggtatacgcaaactgaaagttcagaacacagaaatggcctttctttctga

SEQ ID NO: 61740 - DNA, 75 bp, synthetic construct
  source 1..75: mol_type = other DNA
acagttacgattgcggtaagaaaataggttacatgaaggcgtttgttcaatatgggctacgcaatctgaaagaag

SEQ ID NO: 61741 - DNA, 75 bp, synthetic construct
  source 1..75: mol_type = other DNA
gtcgatgagctggcgcctgaactgattaaacgtaatgctattggatacgaaagcgcttcgcagttgctgatcacg

SEQ ID NO: 61742 - DNA, 75 bp, synthetic construct
  source 1..75: mol_type = other DNA
ctgtccgccgggcgtgaccattatgaacgtgcgtcagggcgaacctttaggtttaggccactccattttgtgtgc

SEQ ID NO: 61743 - DNA, 75 bp, synthetic construct
  source 1..75: mol_type = other DNA
agaagaaatccgtattcatattgtttgcgatgtccctgatgaacttattgatttcacgtttgaatggaaaggact

SEQ ID NO: 61744 - DNA, 75 bp, synthetic construct
  source 1..75: mol_type = other DNA
gatcgctgagattaaacgactggccagcggtgcagtcacaccgttttatcgccgcgccacaaatgaaggtattca

SEQ ID NO: 61745 - DNA, 75 bp, synthetic construct
  source 1..75: mol_type = other DNA
gctgtatgccggtataccgctgaaggtcctgcagagcctgatggggcataagtccatcagctcaacggaggtcta

SEQ ID NO: 61746 - DNA, 75 bp, synthetic construct
  source 1..75: mol_type = other DNA
tgctgtttccccggaaggcattatgcactctgatgagagcgggtctgatcaaaattacacagacgatggtgagca

SEQ ID NO: 61747 - DNA, 75 bp, synthetic construct
  source 1..75: mol_type = other DNA
tattctcctgtgacgggggaactctacacagcatggctcactgaacgtcgtatgctaagctcatctcgcggtccg

SEQ ID NO: 61748 - DNA, 75 bp, synthetic construct
  source 1..75: mol_type = other DNA
atgtcgcaaaaatcgcttatcaccgtcacaatttgtatgacggttatcttcactatctggatgttgcacggttcg

SEQ ID NO: 61749 - DNA, 75 bp, synthetic construct
  source 1..75: mol_type = other DNA
cttatcgatcagataccagagaagcaaaagagtcgctatcatatcaacgaagatgcattgggtaatgctgccaac

SEQ ID NO: 61750 - DNA, 75 bp, synthetic construct
  source 1..75: mol_type = other DNA
aaaacatctgcgtccggtagcgcgtcagccgctggaagtggttcgtgacaaactggccgcgattactgactggac

SEQ ID NO: 61751 - DNA, 75 bp, synthetic construct
  source 1..75: mol_type = other DNA
tgcccttcagtatcactgacaatctgatgctggagccacaactgcagtacacctggcagggactctccctggatg

SEQ ID NO: 61752 - DNA, 75 bp, synthetic construct
  source 1..75: mol_type = other DNA
ggtatgccctggaaatatggactgcagggctgagcggaatggaatttgaggaagcgtatgccgcagtaagtgaag

SEQ ID NO: 61753 - DNA, 75 bp, synthetic construct
  source 1..75: mol_type = other DNA
cttcttgacgctcggcattgtgctcggttccgcatgggcctattacgaactcggctggggcggctggtggttctg

SEQ ID NO: 61754 - DNA, 75 bp, synthetic construct
  source 1..75: mol_type = other DNA
gcaatgagcttgatattgttggcccccccgttcccgacggtaaaaggactcgtctggaaattctttgtaaaacag

SEQ ID NO: 61755 - DNA, 75 bp, synthetic construct
  source 1..75: mol_type = other DNA
acaggctggtatggaatcacattacgggtaccctggtggtggcctccgaactggcccgctcacggggaaaacgcg

SEQ ID NO: 61756 - DNA, 75 bp, synthetic construct
  source 1..75: mol_type = other DNA
gaagcactggcgctgacgcggggggatttttcgctcacgcctccgtatccgtttgtgcagctggccactctgaag

SEQ ID NO: 61757 - DNA, 75 bp, synthetic construct
  source 1..75: mol_type = other DNA
cgcgtcgctgaaaaaaatggtctttgtctcaaaggccaccgtgggacaaaatttacctctgcattagctcgacag

SEQ ID NO: 61758 - DNA, 75 bp, synthetic construct
  source 1..75: mol_type = other DNA
cattgccgttgatccggagtcaccggctcagtatctccagcgccagaaaccacaacgggaagagatgcctgtata

SEQ ID NO: 61759 - DNA, 75 bp, synthetic construct
  source 1..75: mol_type = other DNA
agattcctcattacccacagaccgtgaatcgttattctggttgaatgtacaggaagtaccgccaaaaccagatgt

SEQ ID NO: 61760 - DNA, 75 bp, synthetic construct
  source 1..75: mol_type = other DNA
atgcagaacatcacacttattggtatcgatctcggaaagtattcctttcacattcattgtcaagacaagtctggt

SEQ ID NO: 61761 - DNA, 75 bp, synthetic construct
  source 1..75: mol_type = other DNA
ataactgtaaacggacaaccagtaaaactaagtgattcggtaatggataagatttctcagtttgcaccaaagagt

SEQ ID NO: 61762 - DNA, 75 bp, synthetic construct
  source 1..75: mol_type = other DNA
tgatttatcgaccgaaagccttagttacaggacgtcatgatgccgagaaaaaaatgcaaataatacatcgtggaa

SEQ ID NO: 61763 - DNA, 75 bp, synthetic construct
  source 1..75: mol_type = other DNA
ttgttttatcgtcactgtcacactttgcggcggctgaaagttacactgaaaaattttatcgtaaattaacaactg

SEQ ID NO: 61764 - DNA, 75 bp, synthetic construct
  source 1..75: mol_type = other DNA
acgtaagattccttcatggtgcttagataaattaccatgtgacgcacagattttaggtgatgatgggatgtattc

SEQ ID NO: 61765 - DNA, 75 bp, synthetic construct
  source 1..75: mol_type = other DNA
ggcgacatgtcctccctctgttgttgtaatggaagcctgtgcgggtgctcactttatggctcgccgtatctctga

SEQ ID NO: 61766 - DNA, 75 bp, synthetic construct
  source 1..75: mol_type = other DNA
cgtttgggtaaagtgagcatcgcgaaagataccgcatcggtattccgtaacggtcaaacagcagagtatcagatg

SEQ ID NO: 61767 - DNA, 75 bp, synthetic construct
  source 1..75: mol_type = other DNA
aaggctcttctgcgtaaaaaatttacccgcactaagctgatgcagtttctggcgacatgtcctccctctgttgtt

SEQ ID NO: 61768 - DNA, 75 bp, synthetic construct
  source 1..75: mol_type = other DNA
gatggaagatgcggcgacggctgaaatttcccgtacctcgatctggcagtggatccatcatcaaaaaacgttgag

SEQ ID NO: 61769 - DNA, 75 bp, synthetic construct
  source 1..75: mol_type = other DNA
aatggatggtcaaataatttcctcaatgccgcctttacctcggcattaatgtttggttatttcatcggctcactt

SEQ ID NO: 61770 - DNA, 75 bp, synthetic construct
  source 1..75: mol_type = other DNA
cccatgtgctggcgctaatttgcagtgccgggctttgtgccgcctctaccgggctatatataaaaagccgcacag

SEQ ID NO: 61771 - DNA, 75 bp, synthetic construct
  source 1..75: mol_type = other DNA
atacagaaacggttggcctcttgcgtatagtgattatgctgaaggctggaacgactgccgcgaagccatgcttca

SEQ ID NO: 61772 - DNA, 75 bp, synthetic construct
  source 1..75: mol_type = other DNA
gtggcttcgacattacagtgggcagacatacccaactggatggtgcggtgattgcctccactgccacaccggata

SEQ ID NO: 61773 - DNA, 75 bp, synthetic construct
  source 1..75: mol_type = other DNA
cctctcatatgtgggtaagccggagtacccgccaaccgttatcgacagcattaatgccaaagtcacggcgaacca

SEQ ID NO: 61774 - DNA, 75 bp, synthetic construct
  source 1..75: mol_type = other DNA
ggtactacgtcgatacagtgggtaagaacacggcgaagatacaggattacataaagcaccagcttgaagaggata

SEQ ID NO: 61775 - DNA, 75 bp, synthetic construct
  source 1..75: mol_type = other DNA
tgatcttgaaatcgtcgttgatgtcagaagctttacgattacacatcttgctgaaccagaagagattgtattacc

SEQ ID NO: 61776 - DNA, 75 bp, synthetic construct
  source 1..75: mol_type = other DNA
ccaacaccggatgagattagacgtttcccaagtcgtcataaaaaagaaataccggaacacgataatagtttggat

SEQ ID NO: 61777 - DNA, 75 bp, synthetic construct
  source 1..75: mol_type = other DNA
gaacaacaccactaccaacctgtctgaagcgcagtcccgtattcaggacgccgactatgcgaccgaagtgtccaa

SEQ ID NO: 61778 - DNA, 75 bp, synthetic construct
  source 1..75: mol_type = other DNA
gttcgtgcagctggccacgctcaagcagcgcgccgagaaagcggccaggacggcaggtcgtgctcccgcaggcag

SEQ ID NO: 61779 - DNA, 75 bp, synthetic construct
  source 1..75: mol_type = other DNA
tcgggcgctgtgcagcaggtgatgaccgcaaggccggagcaatcacaccaactgcagcagcctgaagccgattcc

SEQ ID NO: 61780 - DNA, 75 bp, synthetic construct
  source 1..75: mol_type = other DNA
gaatgcagtggaagtgtttgcctgccaaacgtagctatttacgcggcaggctaccggaaatcaaaacaactgacg

SEQ ID NO: 61781 - DNA, 75 bp, synthetic construct
  source 1..75: mol_type = other DNA
gtgcgttctggcttgaagttgaaggtaattccatgaccgcgccaacaggatccaagccaagctttcctgacggga

SEQ ID NO: 61782 - DNA, 75 bp, synthetic construct
  source 1..75: mol_type = other DNA
acgagtcacgacagataaagatacagataaagatacagatcaagaagatcaaaacactatggtccatggcgtaaa

SEQ ID NO: 61783 - DNA, 75 bp, synthetic construct
  source 1..75: mol_type = other DNA
atgttttcattaacgacctcgacggcggggtatttgttaacaaacttggcgcggtattaagtgaagttgcctttg

SEQ ID NO: 61784 - DNA, 75 bp, synthetic construct
  source 1..75: mol_type = other DNA
ggaacgttctcggtcaagatggccgaaatatccggtgagatggtgaaagagaaagtcttacatctgatggatgca

SEQ ID NO: 61785 - DNA, 75 bp, synthetic construct
  source 1..75: mol_type = other DNA
gtgtagggctggtgttttcaggcctggtcctgtggaaacccgtccagtgttcgttgctaagtacgctgctaggtg

SEQ ID NO: 61786 - DNA, 75 bp, synthetic construct
  source 1..75: mol_type = other DNA
aacaaacaaaccacgcaccgtcccgatctcagaggctgttgccaaaatgatcgcggataacaaacgaggtttttt

SEQ ID NO: 61787 - DNA, 75 bp, synthetic construct
  source 1..75: mol_type = other DNA
tgataatacagatcctgacaaattattcgtttcttcaaatggtaccaactattacgctgctagttacgataaaga

SEQ ID NO: 61788 - DNA, 75 bp, synthetic construct
  source 1..75: mol_type = other DNA
gcggatgaaatcgccaaactggggccgtatgagttcatctgtaccggtcgcccggacgaaggcatcccggcggtt

SEQ ID NO: 61789 - DNA, 75 bp, synthetic construct
  source 1..75: mol_type = other DNA
gtaatggaagcctgtgcgggtgcacactttatggctcgctgtatctctgattttgggcatgaaactaagctgatt

SEQ ID NO: 61790 - DNA, 75 bp, synthetic construct
  source 1..75: mol_type = other DNA
tggattctgcggtcaccaacctgaataacaccaccaccaacctgtctgaagcgcagtcccgtattcaggacgccg

SEQ ID NO: 61791 - DNA, 75 bp, synthetic construct
  source 1..75: mol_type = other DNA
catattatattagcgcctgtttccgcacctgctcatattgttgaaagctcctcagcactctggaatgaagttgaa

SEQ ID NO: 61792 - DNA, 75 bp, synthetic construct
  source 1..75: mol_type = other DNA
agtcgtcttgttgattatgcgacacgccttcgaaatgagtcattcgtggcgctggttgatgtcatgaaggacggc

SEQ ID NO: 61793 - DNA, 75 bp, synthetic construct
  source 1..75: mol_type = other DNA
atggctagcgtacgcagtactgatgtgcaggtatttatcgtagaactggacggcggcgtatttgaaaccaaactc

SEQ ID NO: 61794 - DNA, 75 bp, synthetic construct
  source 1..75: mol_type = other DNA
atggataagaagcaagtaacggatttaaggtcggaactactcgattcacgttttggcgctaagtcgatttctact

SEQ ID NO: 61795 - DNA, 75 bp, synthetic construct
  source 1..75: mol_type = other DNA
tggatggctgggatcgcaacagggaaggtgtacagcttgactcgtttggtccctcctggtgtgcagaaaaactca

SEQ ID NO: 61796 - DNA, 75 bp, synthetic construct
  source 1..75: mol_type = other DNA
aaacatcgtttattgaagagctggatacctattcctcccgcgtcgctattcgagccaataaggtggcgacacaag

SEQ ID NO: 61797 - DNA, 75 bp, synthetic construct
  source 1..75: mol_type = other DNA
gcagccgaccggcgaacatgaaacatcgctacttcccgtgacgttaactccggagccggataataaaatcccggc

SEQ ID NO: 61798 - DNA, 75 bp, synthetic construct
  source 1..75: mol_type = other DNA
tttttcagcgccggtattgattcgtggaaagctgacccggaattaaataatttgatttatatgtggaacatcctg

SEQ ID NO: 61799 - DNA, 75 bp, synthetic construct
  source 1..75: mol_type = other DNA
atggaagttcgtgaacttctgtctcagtacgacttcccgggcgacgacactccgatcgttcgtggttctgctctg

SEQ ID NO: 61800 - DNA, 75 bp, synthetic construct
  source 1..75: mol_type = other DNA
gatatgttagttgaatggggtggtgattcctgggcttccgctgacaacttcatgaacggtcgtaccaacggtgtt

SEQ ID NO: 61801 - DNA, 75 bp, synthetic construct
  source 1..75: mol_type = other DNA
ggttaatgaacagtacacgcgctgggttaagacgcagccgtgtgcatgttgtggaaagccagctgatgatccgca

SEQ ID NO: 61802 - DNA, 75 bp, synthetic construct
  source 1..75: mol_type = other DNA
agtgctactttccaacttgaagacttttccagttcctgctacgaccgtttttgtgatgctctggaagcacttaag

SEQ ID NO: 61803 - DNA, 75 bp, synthetic construct
  source 1..75: mol_type = other DNA
agcctgttagtgtgggctgaactgtggttcggttggtcctttatgattgctgcaggcattatgtttattaacgct

SEQ ID NO: 61804 - DNA, 75 bp, synthetic construct
  source 1..75: mol_type = other DNA
atgaaagaaaacaaaaagaatcaggaattcaaaatcagaaaaattaaacgggatattgagcgcagttgtgataac

SEQ ID NO: 61805 - DNA, 75 bp, synthetic construct
  source 1..75: mol_type = other DNA
tgccgaaccggtttcttccagctttgcagtgagaaaacgcgccaatgatatcgcgctcaaatgcaaatactgcga

SEQ ID NO: 61806 - DNA, 75 bp, synthetic construct
  source 1..75: mol_type = other DNA
tattgatgatactgcgaagaacgccgcggatattgcccggatgattcttacctctactgagtttatggctaatgc

SEQ ID NO: 61807 - DNA, 75 bp, synthetic construct
  source 1..75: mol_type = other DNA
tatcggccacgttgaccatggtaaaacgactctgaccgctgcaatcaccaccgtactggctaaaacctacggcgg

SEQ ID NO: 61808 - DNA, 75 bp, synthetic construct
  source 1..75: mol_type = other DNA
aatgttgtgaagaagtgctggaggtcaaagacagtgagatgaagaacaaaaaacatctcgcgcaatggcgttcca

SEQ ID NO: 61809 - DNA, 75 bp, synthetic construct
  source 1..75: mol_type = other DNA
aaagaatctgcccgcagaaaaaaaagccggatttctggcaactctgattgcaatgaaattaggcggtgaaatctg

SEQ ID NO: 61810 - DNA, 75 bp, synthetic construct
  source 1..75: mol_type = other DNA
gtgttttttctccaggctggaaagctgcgaggttgcgatcaagagcgttaatccgcgcttatgaggccgtgaaac

SEQ ID NO: 61811 - DNA, 75 bp, synthetic construct
  source 1..75: mol_type = other DNA
agagattgcagctgaaaatatggtgcatctgaagtttacccgccggctgcaccagacgcgtggtacatccatgtt

SEQ ID NO: 61812 - DNA, 75 bp, synthetic construct
  source 1..75: mol_type = other DNA
taatcgtaaactgtctaaagaaaatggtgacggtttcggtatgtccacttcctatgactttgacttcgggttaag

SEQ ID NO: 61813 - DNA, 75 bp, synthetic construct
  source 1..75: mol_type = other DNA
tcatgcaggcattcatggacatggcaaaagccgagaagaaagaaaagcgccggtgtaagcgagcggaagcaaaag

SEQ ID NO: 61814 - DNA, 75 bp, synthetic construct
  source 1..75: mol_type = other DNA
aaagaacccgtctgagtattccctttgacgatcgccaacgtgcaatacgtgcggccggcaaactggctgatggca

SEQ ID NO: 61815 - DNA, 75 bp, synthetic construct
  source 1..75: mol_type = other DNA
acgatccccatcacctgattggtcatggtcagggcggaatgggaacaaaatcccacgatattttcacgctaccgc

SEQ ID NO: 61816 - DNA, 75 bp, synthetic construct
  source 1..75: mol_type = other DNA
acgatggcgactgcgttacggtgaaagaggcgactgacgccctgctgcattgtgcggaacagcttcacaagggag

SEQ ID NO: 61817 - DNA, 75 bp, synthetic construct
  source 1..75: mol_type = other DNA
gtggatgcactacctgaggctgtatcgcgtcgttcgctgggattaccagcggaaaaaatctgctcggtgtaccgc

SEQ ID NO: 61818 - DNA, 75 bp, synthetic construct
  source 1..75: mol_type = other DNA
tactgtttgccgcactgtctgccgggcaggcaatggcctcagatgtggcattcaggggtaatctgcttgacagac

SEQ ID NO: 61819 - DNA, 75 bp, synthetic construct
  source 1..75: mol_type = other DNA
tgacataccagtctgtgccggtaccgaaccgtattcagcgtaaaacattcagttacgacagtaccaccaggaaag

SEQ ID NO: 61820 - DNA, 75 bp, synthetic construct
  source 1..75: mol_type = other DNA
aaacacggcagccagctgttgttgctgattcgttttttaatgcacgcgagaaattcgggtgttctgaagtggaaa

SEQ ID NO: 61821 - DNA, 75 bp, synthetic construct
  source 1..75: mol_type = other DNA
agagcaggtgaaagccctgggtgcaaatcccgtcaccgcgaccggtgagcctgtaccgcagacgccagcctcacc

SEQ ID NO: 61822 - DNA, 75 bp, synthetic construct
  source 1..75: mol_type = other DNA
ggttaatgaaaagtacacgcgctgggttaagacgcagccgtgcgcatgttgtggaaaacctgctgatgatcccca

SEQ ID NO: 61823 - DNA, 75 bp, synthetic construct
  source 1..75: mol_type = other DNA
taataagacctttgaccgtctggaagctagagcaaaaaatactaaagctttccgtttcacaagtcaggttaatga

SEQ ID NO: 61824 - DNA, 75 bp, synthetic construct
  source 1..75: mol_type = other DNA
tgtgcgtgttgtggtaagccagcggacgatcctcatcatctgattggtcatggtcagggcggaatgggaacaaaa

SEQ ID NO: 61825 - DNA, 75 bp, synthetic construct
  source 1..75: mol_type = other DNA
accgtggcatttgaagagaagtatggctcccaactggagctgatatttcgttttatcgatcgcgcgctggcgatt

SEQ ID NO: 61826 - DNA, 75 bp, synthetic construct
  source 1..75: mol_type = other DNA
attcgcggtcagggggtggtgaaaaatcagggacgagaatttgtctgccgaccgggtgatattttgctgttcccg

SEQ ID NO: 61827 - DNA, 75 bp, synthetic construct
  source 1..75: mol_type = other DNA
accgttgttaccggtcgtgtagaacgcggtatcatcaaagttggtgaagaagttgaaatcgttggtatcaaggag

SEQ ID NO: 61828 - DNA, 75 bp, synthetic construct
  source 1..75: mol_type = other DNA
aaaattcggaggtggcactccgctttccaatatggtcaaagaggttgcggctgattttgccgcgaaacttcgcaa

SEQ ID NO: 61829 - DNA, 75 bp, synthetic construct
  source 1..75: mol_type = other DNA
acgcctttaaatgattctctcaaggtcatggaaagaaatgtcgataaaactgtttccaagattgagcagcgtctt

SEQ ID NO: 61830 - DNA, 75 bp, synthetic construct
  source 1..75: mol_type = other DNA
aacataatctcggcaagattattctcggtcgcccggcctcgcgccgctggtggcgtcgggaaacgtttgctgacc

SEQ ID NO: 61831 - DNA, 75 bp, synthetic construct
  source 1..75: mol_type = other DNA
gttgaaaaggcagctttgcagtcagcacaaagaattgaacgtaatttgaatagggcgtttaaggtcgataccaag

SEQ ID NO: 61832 - DNA, 75 bp, synthetic construct
  source 1..75: mol_type = other DNA
gttgttcaatgttggcatgaacgcacagataaaggacaacatgcgctttggtctggagtttgagaaatccgcctt

SEQ ID NO: 61833 - DNA, 75 bp, synthetic construct
  source 1..75: mol_type = other DNA
attatatgaatttaaatcaaaaaatatagatgatattggaatatttgcattggcaatgtgtaatggagaatcaat

SEQ ID NO: 61834 - DNA, 75 bp, synthetic construct
  source 1..75: mol_type = other DNA
atgacatttttacagcttattttattgtatttctgcacggcagtatgtgcgttatatctggtgagtggtggttat

SEQ ID NO: 61835 - DNA, 75 bp, synthetic construct
  source 1..75: mol_type = other DNA
accgtggcatttgaagagaagtatggctcccagctggagctgatatttcgttttatcgatcgcgcgctggcaatt

SEQ ID NO: 61836 - DNA, 75 bp, synthetic construct
  source 1..75: mol_type = other DNA
gaactgaaaaactaccttaccagtctgtgtgcagaggaaggtgtaactcaggcagagttgatagaaaggcttatc

SEQ ID NO: 61837 - DNA, 75 bp, synthetic construct
  source 1..75: mol_type = other DNA
ataactggacaccaacaaccagtatcagcgatctgctggttgtggtgatgaagaaatccacagcaggtatcagta

SEQ ID NO: 61838 - DNA, 75 bp, synthetic construct
  source 1..75: mol_type = other DNA
ggactcggtggcaaaccgggtactgcttaaaccggccacgcagctcagcaatgttaccgtgcacgacctttacgc

SEQ ID NO: 61839 - DNA, 75 bp, synthetic construct
  source 1..75: mol_type = other DNA
gttgcaggaagagctctgcagcgtggtggaggcatccggtgccagcctggagaaggggcggcatgaccagctgct

SEQ ID NO: 61840 - DNA, 75 bp, synthetic construct
  source 1..75: mol_type = other DNA
aaggtggacgccgcgcctttgatgatttatcgcgcctgttcagccgtcttgcccgtacaaaacaacttcgcaagg

SEQ ID NO: 61841 - DNA, 75 bp, synthetic construct
  source 1..75: mol_type = other DNA
atgcgcagtcgtgtatgttgattagcgtacagtgcgagaatgatcccggcgacagcacctggcagcagtttactc

SEQ ID NO: 61842 - DNA, 75 bp, synthetic construct
  source 1..75: mol_type = other DNA
ggtctgggatgcagtacaggctatgcgttgccatccttaccgcagactggaaacgtgggagtgggaaacggcgca

SEQ ID NO: 61843 - DNA, 75 bp, synthetic construct
  source 1..75: mol_type = other DNA
taagcaaccctgaagcaagcatcgagagcttgcaggaacggcgtttttggttgcagtgtgagcgtgcttacacct

SEQ ID NO: 61844 - DNA, 75 bp, synthetic construct
  source 1..75: mol_type = other DNA
gagacggaagaaacacctgtttcatcaagtgaaaaggtagctaatgataatgaggaggatgtgttagagaatttt

SEQ ID NO: 61845 - DNA, 75 bp, synthetic construct
  source 1..75: mol_type = other DNA
actgagggtggtggcagaaaacgaatgggcaaactgtacggcgatcacacttaacatgagtggagtgtctgatga

SEQ ID NO: 61846 - DNA, 75 bp, synthetic construct
  source 1..75: mol_type = other DNA
gtacgttacacgttctcgctaaaggtggacgtattgcgcacgtccgcgattcttcaggccgcgtcacttccgttg

SEQ ID NO: 61847 - DNA, 75 bp, synthetic construct
  source 1..75: mol_type = other DNA
accgtggtatttgaagagaagtatggctcccagttggagctgatatttcgttttattgatcgtgcgctggcaatt

SEQ ID NO: 61848 - DNA, 75 bp, synthetic construct
  source 1..75: mol_type = other DNA
gcaaactttgccacgctgacagaacgggagattgccgaagcggaacaggtaacaaccatcaacgttaaaaccgga

SEQ ID NO: 61849 - DNA, 75 bp, synthetic construct
  source 1..75: mol_type = other DNA
actgcctggtcgctgtgggggaacgccagtaatacttcttctaatgatgagcgttcttcagaaaaatatgcggcg

SEQ ID NO: 61850 - DNA, 75 bp, synthetic construct
  source 1..75: mol_type = other DNA
cgggtaaacaatttaaaaaataatttcacaaacactatgcagctggatggtaaaaaacaagagttatcatcgatt

SEQ ID NO: 61851 - DNA, 75 bp, synthetic construct
  source 1..75: mol_type = other DNA
acttcaggcattaaatgaaagggttcctgagctcattactgacagtaaggcgctgagggaagagctggagacaat

SEQ ID NO: 61852 - DNA, 75 bp, synthetic construct
  source 1..75: mol_type = other DNA
caaaaccgcacgttaacgtaggtactatcggccacgttgaccaaggtaaaacaacactgaccgctgcaatcacga

SEQ ID NO: 61853 - DNA, 75 bp, synthetic construct
  source 1..75: mol_type = other DNA
atgcattcactccaacgtaaagttctgcgtactatttgtccggaccaaaaaggtctgatcgcacgtattaccaat

SEQ ID NO: 61854 - DNA, 75 bp, synthetic construct
  source 1..75: mol_type = other DNA
ctctaatagaaaaacaaacgctggtacgtaacaacggtgcagaggttcagtcagagcaggacactgactgtcgtc

SEQ ID NO: 61855 - DNA, 75 bp, synthetic construct
  source 1..75: mol_type = other DNA
tatcggccacgttgaccatggtaaaaccactctgaccgctgcaatcacgaccgtactggctaaaacctacggcgg

SEQ ID NO: 61856 - DNA, 75 bp, synthetic construct
  source 1..75: mol_type = other DNA
gtctggcgttgatgctgcaatcaaaccaggtaacaccctgccgatgcgcaacatcccggttggttctactgttca

SEQ ID NO: 61857 - DNA, 75 bp, synthetic construct
  source 1..75: mol_type = other DNA
tatcggccacgttgaccatggtaaaactacactgaccgctgcaatcaccaccgtactggctaaaacctacggcgg

SEQ ID NO: 61858 - DNA, 75 bp, synthetic construct
  source 1..75: mol_type = other DNA
agctgaagatatgatgcgcgcaggtcgtgacgtcgagaaaaacgtcttaagtcgcgcgctctacaaagtactggc

SEQ ID NO: 61859 - DNA, 75 bp, synthetic construct
  source 1..75: mol_type = other DNA
ggaggctgccacatgctggctactacccctacccaaaaaccgcaatttatctggattatcgccgcagttcgccgc

SEQ ID NO: 61860 - DNA, 75 bp, synthetic construct
  source 1..75: mol_type = other DNA
gaagcacctcttcgaatgtttacatctaactgggagactgaaaaaaataagccaagaggacaaaaagtagctgca

SEQ ID NO: 61861 - DNA, 75 bp, synthetic construct
  source 1..75: mol_type = other DNA
gatatttcattttccagaactacctgtacctgacttttctgctgtttccaacaaaggtgcaacaacatcaattgg

SEQ ID NO: 61862 - DNA, 75 bp, synthetic construct
  source 1..75: mol_type = other DNA
atgcggataccgtggcatttgaagagaagtatggctcccagctggagctgatatttcgttttatcgatcgtgcgc

SEQ ID NO: 61863 - DNA, 75 bp, synthetic construct
  source 1..75: mol_type = other DNA
atcgcgaaggtaaagtcagccgcattgttgaattcatcgaaaaaccggatcagccgcaaacgctggactcagaca

SEQ ID NO: 61864 - DNA, 75 bp, synthetic construct
  source 1..75: mol_type = other DNA
caacgccactatcagctctgattccagtgacttcatcgacgggcaaacgctgcatgagtttcagtttgtgcttga

SEQ ID NO: 61865 - DNA, 75 bp, synthetic construct
  source 1..75: mol_type = other DNA
cgttctgctggaatcacgattgataaccttgaagcaaagtgcgcggcgctggctgctgaaaaagagaaattcgct

SEQ ID NO: 61866 - DNA, 75 bp, synthetic construct
  source 1..75: mol_type = other DNA
tctgctgcgtggtatcaaacgtgaagaaatcgaacgtggtcaggtactggctaagccgggcaccatcaagccgca

SEQ ID NO: 61867 - DNA, 75 bp, synthetic construct
  source 1..75: mol_type = other DNA
aaaattgcgatgatgaccgtattgaggctgttaaggctgttttgcgtagactggctggcaactctccggtaactc

SEQ ID NO: 61868 - DNA, 75 bp, synthetic construct
  source 1..75: mol_type = other DNA
tggaagcgcgggaaataaaaccagccaaaggtgaagttctggtcgttgtatctggttttactggttgcggaaaaa

SEQ ID NO: 61869 - DNA, 75 bp, synthetic construct
  source 1..75: mol_type = other DNA
ttcaaatttctgaccggaccagaaaccgtgctggcgctgctggatgaacgggaaagaaaccagcaatacatcaaa

SEQ ID NO: 61870 - DNA, 75 bp, synthetic construct
  source 1..75: mol_type = other DNA
ggggggacaaaaccacctgcggcggcaaaattattgaaggcgcggacgaccatacgatcatgggtatcccacagg

SEQ ID NO: 61871 - DNA, 75 bp, synthetic construct
  source 1..75: mol_type = other DNA
gtgagcaagattgactatcaggcactgcgtgctaaggcagaaaaagcaacgtgtggcgagtggtcgctcgaatat

SEQ ID NO: 61872 - DNA, 75 bp, synthetic construct
  source 1..75: mol_type = other DNA
aagtcgatctgacggaggataacgccagcagactggatgagttttcgaaagagtggaaggacgctaacgataaat

SEQ ID NO: 61873 - DNA, 75 bp, synthetic construct
  source 1..75: mol_type = other DNA
gtgaggcggcggaacgtgcaattccagcaatggaacgcctgttaatgttgccagttgatgatgatttgttaagtg

SEQ ID NO: 61874 - DNA, 75 bp, synthetic construct
  source 1..75: mol_type = other DNA
atgggggattctgtgacaccggagatacttggcaacatgattcgtcagtatttcagtcaggtacgaactgaagaa

SEQ ID NO: 61875 - DNA, 75 bp, synthetic construct
  source 1..75: mol_type = other DNA
cggcaccaaagcgccgccataccggtattgcatcggcacgacgagcagcaaagagacgcaggagagcaaaacgat

SEQ ID NO: 61876 - DNA, 75 bp, synthetic construct
  source 1..75: mol_type = other DNA
atccgcccaccctttccgggcgccggagccgtgtgggaatccgcccaccttgccgggcgccggtgccgtgtggga

SEQ ID NO: 61877 - DNA, 75 bp, synthetic construct
  source 1..75: mol_type = other DNA
agcaacgacacgataatagacaaaccattgaaataaatgacgaatatgacgttcaggatttatttcatgctcttt

SEQ ID NO: 61878 - DNA, 75 bp, synthetic construct
  source 1..75: mol_type = other DNA
ttagtttccaaaaaatatgatgatgaagtcattagtaatgatatagattatataattggcgcatcgatgtttttc

SEQ ID NO: 61879 - DNA, 75 bp, synthetic construct
  source 1..75: mol_type = other DNA
cagataaaagtatagggatttgcggttctcgtttagtctattttgccgacagagagatgcagcaaggactaggtg

SEQ ID NO: 61880 - DNA, 75 bp, synthetic construct
  source 1..75: mol_type = other DNA
gagcttcagaagggggccagcaacgtagcggcggacgcgatcaagaatggcggtaatgcacaggctgcggtggat

SEQ ID NO: 61881 - DNA, 75 bp, synthetic construct
  source 1..75: mol_type = other DNA
acgtcaccgatttcgcgcaagcagtgggtcagtggttaagcgccgaaactgtacagacgcaaacctatgaattat

SEQ ID NO: 61882 - DNA, 75 bp, synthetic construct
  source 1..75: mol_type = other DNA
gcgccgatgcgtgcaaaagtatgccctgtggatgttgactccgaccctggcatggcgcatttcaaaataccaaaa

SEQ ID NO: 61883 - DNA, 75 bp, synthetic construct
  source 1..75: mol_type = other DNA
ctgccgtcttttatcgacaacatcgataatttaatggcgaaacatggtgtcagcgatgagcatatcgtgatgcgt

SEQ ID NO: 61884 - DNA, 75 bp, synthetic construct
  source 1..75: mol_type = other DNA
aggacgatgggctgaatgatttgctggtatcggtaaaaaaactgctggcggagaattatccggatggtgtgttac

SEQ ID NO: 61885 - DNA, 75 bp, synthetic construct
  source 1..75: mol_type = other DNA
aggtgctgggcagggaggcaggcacaggtaaacgcctgaagggctggctgccggtggcctgtattaatcctgaga

SEQ ID NO: 61886 - DNA, 75 bp, synthetic construct
  source 1..75: mol_type = other DNA
aaagattacgagacagtctatggctaccaaactgcaggacgggaatataccttgtctggcagctacaccttctga

SEQ ID NO: 61887 - DNA, 75 bp, synthetic construct
  source 1..75: mol_type = other DNA
acacgccggttgaggcaaaggacaatcttaagtccacgcagatgatgagcgtgattgatgccatcggtgagggac

SEQ ID NO: 61888 - DNA, 75 bp, synthetic construct
  source 1..75: mol_type = other DNA
atcagcatggtgggtaaatggctggtatcccacagcaagtatcagcgatttgctggttgttgtgatgaagaaagc

SEQ ID NO: 61889 - DNA, 75 bp, synthetic construct
  source 1..75: mol_type = other DNA
cgagctgttcagtatcacccgtcaggccattatcaatgatgatctgaatatgctgaccgatgtcccgatgaaact

SEQ ID NO: 61890 - DNA, 75 bp, synthetic construct
  source 1..75: mol_type = other DNA
cgtcagagggggtgggggtggttttcaggacgaaaccgtccctgccggacaccgaccgcctcctcaaatttttgt

SEQ ID NO: 61891 - DNA, 75 bp, synthetic construct
  source 1..75: mol_type = other DNA
tgaactaccatatccgcggtcgcatcatccaggtaccgtcaaactatgacccggaaaaacgcacgtacagcggca

SEQ ID NO: 61892 - DNA, 75 bp, synthetic construct
  source 1..75: mol_type = other DNA
accacggttaatggtggtactgttcattttaagggggaaattgttgatgctgcatgtgccgtaagcctcaattca

SEQ ID NO: 61893 - DNA, 75 bp, synthetic construct
  source 1..75: mol_type = other DNA
tgagagcagaaaccccgccctgagcgcaaaggctgacgcagaaagaataatgatcaaaatggcttctttgctggg

SEQ ID NO: 61894 - DNA, 75 bp, synthetic construct
  source 1..75: mol_type = other DNA
tgacccggatcgcattagcgctggcactggcaggttattgtgtggcacctgtggcgctggctgaagacagtgcct

SEQ ID NO: 61895 - DNA, 75 bp, synthetic construct
  source 1..75: mol_type = other DNA
aggatgaagttctcagattgaaacagattagcgggctgacggagctgtttcaggaagaggatttcagcccggcat

SEQ ID NO: 61896 - DNA, 75 bp, synthetic construct
  source 1..75: mol_type = other DNA
cggcggatgttcgcgggacggcggagatatccatctatgaggaaattggtggctttggtattaccgcgaagcagt

SEQ ID NO: 61897 - DNA, 75 bp, synthetic construct
  source 1..75: mol_type = other DNA
atgggggatcctttaacgccggaaatactgacagtcatgatccgtcagtatttctgtcagcacctgtcagaagaa

SEQ ID NO: 61898 - DNA, 75 bp, synthetic construct
  source 1..75: mol_type = other DNA
aaatatcacaatctgataatattactgtaattttcacacataaccactgtctgtcgaaaattgcaaaaaagatga

SEQ ID NO: 61899 - DNA, 75 bp, synthetic construct
  source 1..75: mol_type = other DNA
tccttttgcacaggagcctgtggactgcgtgctgtgggtgaaagcggatgaggtggtggccaacgattataatcc

SEQ ID NO: 61900 - DNA, 75 bp, synthetic construct
  source 1..75: mol_type = other DNA
tgaaaaaaccgaacgtgataatgtctacaacgggatgaccctgcgtgaatatgcccgtatgtcactgactgaacg

SEQ ID NO: 61901 - DNA, 75 bp, synthetic construct
  source 1..75: mol_type = other DNA
tttaaaattgcccatcgtgtgggtatggggggcttcagtgctctgcgtcaggtgcgtgaaggggcggaatataaa

SEQ ID NO: 61902 - DNA, 75 bp, synthetic construct
  source 1..75: mol_type = other DNA
gaaaggggcaggcgacccgtatggccgcgaccatccgtcataaccgggccagaggaaagcatcagattacatcaa

SEQ ID NO: 61903 - DNA, 75 bp, synthetic construct
  source 1..75: mol_type = other DNA
atgccacgtttttttgcccgccatgccgccacgctgtttttcccgatggcgttgattttgtatgactttgccgcc

SEQ ID NO: 61904 - DNA, 75 bp, synthetic construct
  source 1..75: mol_type = other DNA
cgacctgctcttcagttgaagcgaatcccagaactattacggcgcatagatagttataccggtagacctcttact

SEQ ID NO: 61905 - DNA, 75 bp, synthetic construct
  source 1..75: mol_type = other DNA
ccggttggaaaatatatacaacgtcgaagggtcagccgtgcggcggtcttgttacgcttaacaaacttaccatta

SEQ ID NO: 61906 - DNA, 75 bp, synthetic construct
  source 1..75: mol_type = other DNA
agaaaaggaatttgtgaaacgcctgaagttaatccgcgccgatattcactcacaactggcctcttgtggttgcga

SEQ ID NO: 61907 - DNA, 75 bp, synthetic construct
  source 1..75: mol_type = other DNA
tgcagaagtggaactggccacactcacgtgggtggactggtataacaatcgacgattgctggaaaggctgggcca

SEQ ID NO: 61908 - DNA, 75 bp, synthetic construct
  source 1..75: mol_type = other DNA
gcgtaagcgcgatgatgtggcttttatcggtggcggacagtgctttatagccagacctgatgagtcatgccctga

SEQ ID NO: 61909 - DNA, 75 bp, synthetic construct
  source 1..75: mol_type = other DNA
gcgcgcgacgtagccactggcgtactggcccgttcaatggatctggacatctataaccttcatccggcacacgct

SEQ ID NO: 61910 - DNA, 75 bp, synthetic construct
  source 1..75: mol_type = other DNA
atgtggtcactggggacaatcgccgcgtatttctgaactcgcagaacaaaataaaattattgcttataactatcc

SEQ ID NO: 61911 - DNA, 75 bp, synthetic construct
  source 1..75: mol_type = other DNA
ggggctagaaaatacctggatcagatgaaagatgttagggaacgtgctaccaaatcttatgacgaggctgaatat

SEQ ID NO: 61912 - DNA, 75 bp, synthetic construct
  source 1..75: mol_type = other DNA
gggtagtctggtatttggcctgctgacgtacctgacaaacctttatttcaagattaaagaagataagcgcaaggc

SEQ ID NO: 61913 - DNA, 75 bp, synthetic construct
  source 1..75: mol_type = other DNA
atgaccgaaccgttaaaaccacgtattgatttcgacggtccgctggaggtcgatcagaatccaaaattcagggcg

SEQ ID NO: 61914 - DNA, 75 bp, synthetic construct
  source 1..75: mol_type = other DNA
ggcctgctgacgtatctgacaaacctttatttcaagattaaagaagataagcgtaaggctgcgagaggtgaataa

SEQ ID NO: 61915 - DNA, 75 bp, synthetic construct
  source 1..75: mol_type = other DNA
gcatacgcttggcattattgatgcactgttggttcataagatggccagggctttattgtcgttggtggacgctgg

SEQ ID NO: 61916 - DNA, 75 bp, synthetic construct
  source 1..75: mol_type = other DNA
gttggtaaatatatccagagacggagaataacacgggcagcgacttacttacgcttaacaagccttccagtatca

SEQ ID NO: 61917 - DNA, 75 bp, synthetic construct
  source 1..75: mol_type = other DNA
tgttcccgggggatcatgacgcaactaaggttatgagtgaaaacacggtaaacagcgcattgcgtgcgatgggct

SEQ ID NO: 61918 - DNA, 75 bp, synthetic construct
  source 1..75: mol_type = other DNA
accggctggtgcactacacgcggacacaatatgcagagccgctggtcgaaagtcgctatctttacgacccgctgg

SEQ ID NO: 61919 - DNA, 75 bp, synthetic construct
  source 1..75: mol_type = other DNA
caaaaccagtcacctgttagccccgattaaaaaagttgatgcaagtggtaaacacgatgttgctcagcgcctgca

SEQ ID NO: 61920 - DNA, 75 bp, synthetic construct
  source 1..75: mol_type = other DNA
aaaaactggatcgacaaagaagaatatccgcaatctgcagcaatcgatctgcgttgcgtaaacatggttgccgat

SEQ ID NO: 61921 - DNA, 75 bp, synthetic construct
  source 1..75: mol_type = other DNA
tatttggaggcgctacggctgctgctggcgtgatggctgttagtaaaacctctgaatttatggctaacagcttcg

SEQ ID NO: 61922 - DNA, 75 bp, synthetic construct
  source 1..75: mol_type = other DNA
tcatggaagtcaaaagggtttacggtatctctggaagcaggatattcatggaaggctggagagtttaccgacaat

SEQ ID NO: 61923 - DNA, 75 bp, synthetic construct
  source 1..75: mol_type = other DNA
atgaacgcatacctcacctgcgaccgcatagaggagcgtcgctggattaatcagcaaattcaggatgaaaaggat

SEQ ID NO: 61924 - DNA, 75 bp, synthetic construct
  source 1..75: mol_type = other DNA
taggcgtttctctttccgataatctttcacctttattatatgatggctgggacggcaaaagtctgacaaaatcag

SEQ ID NO: 61925 - DNA, 75 bp, synthetic construct
  source 1..75: mol_type = other DNA
gagattgacagcgatgcgctgtatctcgatgaaattacgcttaccagcgagcaggatgcagttctgcgctatggt

SEQ ID NO: 61926 - DNA, 75 bp, synthetic construct
  source 1..75: mol_type = other DNA
atcgggggtgctgatgcggatcagtgcccttaaggagtatgaggatgcggaactcactgcggcgcgtattgccgc

SEQ ID NO: 61927 - DNA, 75 bp, synthetic construct
  source 1..75: mol_type = other DNA
gttactggagcagcgcatcagtgaactggaagcgcgcaataattcggtagcagatcttcaatctcctccggctat

SEQ ID NO: 61928 - DNA, 75 bp, synthetic construct
  source 1..75: mol_type = other DNA
tccgctggcatttgaagaaaagcatggttcccagattgatttaatttttcgttttcttgatcgcgcctttgcaac

SEQ ID NO: 61929 - DNA, 75 bp, synthetic construct
  source 1..75: mol_type = other DNA
atcgggggtgctgatgcggatcagtgcccttaaggaatatgaggatgcggaactgacggctgcgcgtattgccgc

SEQ ID NO: 61930 - DNA, 75 bp, synthetic construct
  source 1..75: mol_type = other DNA
ttcatattgccacctttttattgtcaggtaaaagtcgtaatctgtcagaatactggaaagccgaagtcatcatgc

SEQ ID NO: 61931 - DNA, 75 bp, synthetic construct
  source 1..75: mol_type = other DNA
tttggcctgctgacgtacctgacaaacctttatttcaagattaaagaagataagcgcaaggctgcgagaggtgaa

SEQ ID NO: 61932 - DNA, 75 bp, synthetic construct
  source 1..75: mol_type = other DNA
aaaatggctgaactggaaatgatggtggaggcgacagagcgtacggcagaactggaaaccgcactactcgaaagc

SEQ ID NO: 61933 - DNA, 75 bp, synthetic construct
  source 1..75: mol_type = other DNA
agcacaggcagataaagccaatgctaaagcacaattagccgctcaacgtgtagttgcaagagaacaaaaagccct

SEQ ID NO: 61934 - DNA, 75 bp, synthetic construct
  source 1..75: mol_type = other DNA
atgctattttagattacattgaagataatattgaaattagcccgatagatatcaacagtctggttgaatactcag

SEQ ID NO: 61935 - DNA, 75 bp, synthetic construct
  source 1..75: mol_type = other DNA
atgattgactggtttaccgggatcctaccttgcatacaccgaccattaccggctggtagtgtcgtcagcgttgat

SEQ ID NO: 61936 - DNA, 75 bp, synthetic construct
  source 1..75: mol_type = other DNA
tggttccggtgtaaccggtagcaatattacagtgcataattccggaggaatattgggcggtaatggcgtaaacgg

SEQ ID NO: 61937 - DNA, 75 bp, synthetic construct
  source 1..75: mol_type = other DNA
acttttcgtaatggtcagttgcgtgccgtggcggcgggcagtcgtctgaattttttccagtacagcgcgcaacta

SEQ ID NO: 61938 - DNA, 75 bp, synthetic construct
  source 1..75: mol_type = other DNA
gtgtctacggtgtaaacttcacactaaataataatggtagtatttggggaggagatggatataatggtggagttg

SEQ ID NO: 61939 - DNA, 75 bp, synthetic construct
  source 1..75: mol_type = other DNA
cgcggtatgcggttccgttcagaccatttgtggaggcacactggttgcacaatagtcgtgttttcggcaccagta

SEQ ID NO: 61940 - DNA, 75 bp, synthetic construct
  source 1..75: mol_type = other DNA
atgaagttaaaattcatctccatggctgtattttcagccctgaccctgggtgttgcgacaagtgcgtctgctgct

SEQ ID NO: 61941 - DNA, 75 bp, synthetic construct
  source 1..75: mol_type = other DNA
ttatctgaccctgggcggaagcctgcgggtaactggtgatatcacctgtaatgatgaatccagcgatggctttac

SEQ ID NO: 61942 - DNA, 75 bp, synthetic construct
  source 1..75: mol_type = other DNA
aacccgtaccggacggctgtgggtctatgttcgtgacgatcgcaacgccggttcgaccatgccggcagcggtgtg

SEQ ID NO: 61943 - DNA, 75 bp, synthetic construct
  source 1..75: mol_type = other DNA
ccggaccagaaaggtatccatccacaaaatcacctggccggttacagcggtgtgcttcaggccgatgcttacggt

SEQ ID NO: 61944 - DNA, 75 bp, synthetic construct
  source 1..75: mol_type = other DNA
ccttgtggatctcgccctggaagagagtggcatcgcagaacaacatgacgcaggatggtggaatgctgccacctg

SEQ ID NO: 61945 - DNA, 75 bp, synthetic construct
  source 1..75: mol_type = other DNA
gtgctttgacgaattctacgacgcagtcatcgccttccagcgcaaacgtcatcaggttgaggtggaaaaatcgtg

SEQ ID NO: 61946 - DNA, 75 bp, synthetic construct
  source 1..75: mol_type = other DNA
cattgaacatatccaggactggccggcaaaccgggtacgcgatctgttgccctggaaagttgatctgagctctca

SEQ ID NO: 61947 - DNA, 75 bp, synthetic construct
  source 1..75: mol_type = other DNA
atgttgcttagcataatcactgtcgcgtttcgtaacctcgaagggatagtcaaaacacacgcctcgctggcgcat

SEQ ID NO: 61948 - DNA, 75 bp, synthetic construct
  source 1..75: mol_type = other DNA
cgtcactgtttacaacagtgccagacgccgtaccgccgttgtgcacatactggtaccccccattcagcgtggtat

SEQ ID NO: 61949 - DNA, 75 bp, synthetic construct
  source 1..75: mol_type = other DNA
gtgcgggtattacttcgacctgttccggtaccggaactcggggtggttatcgttaagccaggccgtgaatcaatg

SEQ ID NO: 61950 - DNA, 75 bp, synthetic construct
  source 1..75: mol_type = other DNA
acccgcagacggaagcactgctctggcagcatgagaccagacatgcgtacaacgcgcagggactggcgaaccgct

SEQ ID NO: 61951 - DNA, 75 bp, synthetic construct
  source 1..75: mol_type = other DNA
gggcgcaacctgctgaagatggatgcgttcggctgtaccagtcgcggtcaggcccaccgtgccgggctgtgggtg

SEQ ID NO: 61952 - DNA, 75 bp, synthetic construct
  source 1..75: mol_type = other DNA
ctgtgggacatgctgactcacccgcgctacgggatggggaaacgcctgggggccgcggacgtggacaaatgggcg

SEQ ID NO: 61953 - DNA, 75 bp, synthetic construct
  source 1..75: mol_type = other DNA
gcagagcctgttaggctgggaatattatcagcctcgttatgataccaaacctgatgttcaggaagcgattaaatg

SEQ ID NO: 61954 - DNA, 75 bp, synthetic construct
  source 1..75: mol_type = other DNA
agcttggctacgatcacgctttgtttgtggaggtcggtactgagggacaatcgattatcacggcgctcgagtggg

SEQ ID NO: 61955 - DNA, 75 bp, synthetic construct
  source 1..75: mol_type = other DNA
ggcaaattgttattccggcggtggcattcagcggcgctaaacatgagagagagcatactgatatttactcctcat

SEQ ID NO: 61956 - DNA, 75 bp, synthetic construct
  source 1..75: mol_type = other DNA
ggtattcacacgaagacggtgaatacctttctgtatacgggaatggcgaaaaacgggctgtatggtgtgagcgtg

SEQ ID NO: 61957 - DNA, 75 bp, synthetic construct
  source 1..75: mol_type = other DNA
aacgtcacgattaacgagaactgtcgggttctgggaaaactgtccgcgaaccagattgaaggcgatctcgttaaa

SEQ ID NO: 61958 - DNA, 75 bp, synthetic construct
  source 1..75: mol_type = other DNA
gccggtagatgatatgttgctggtagacgaaatgcagcaatcgctggggcgcaacccggatggtaagcatctgat

SEQ ID NO: 61959 - DNA, 75 bp, synthetic construct
  source 1..75: mol_type = other DNA
agcgccgcagatggtcagtcagacccctttatggcgatgattggctgggcagaaaaagcgatttcaaaagccatt

SEQ ID NO: 61960 - DNA, 75 bp, synthetic construct
  source 1..75: mol_type = other DNA
agacctgcagccaccttctttctgcgcaccagcggtgaatcgatgaaccaggctggcgtgcagaatggtgatctg

SEQ ID NO: 61961 - DNA, 75 bp, synthetic construct
  source 1..75: mol_type = other DNA
ctatgagcgtaataccacgccgaagctggcccaggagaaaaatctggcggcgttccgtggctattcttgtgacac

SEQ ID NO: 61962 - DNA, 75 bp, synthetic construct
  source 1..75: mol_type = other DNA
ggatctgaacagctattgcatcagcagacctgcagccaccttctttctgcgcgccagcggtgaatcgatgaacca

SEQ ID NO: 61963 - DNA, 75 bp, synthetic construct
  source 1..75: mol_type = other DNA
aaaaatttagttccagaccacttttttttatttttttcggactctcactttgtgaattttttcagaaacaatctg

SEQ ID NO: 61964 - DNA, 75 bp, synthetic construct
  source 1..75: mol_type = other DNA
ggagcgtccggcaagtcttcctggaagtagcagaaaaattgtcagaaaaagttgagtcttatctgcagcatcagt

SEQ ID NO: 61965 - DNA, 75 bp, synthetic construct
  source 1..75: mol_type = other DNA
atgaaaggcattgaagtggagacgccagccagtctggatttaacaagagcggcagcttttgccattcgtattgtg

SEQ ID NO: 61966 - DNA, 75 bp, synthetic construct
  source 1..75: mol_type = other DNA
cctgctgggtcaaggtagattttcatcttcatacccgtgcagataaagaatttcgctatgccggtgaatccgaca

SEQ ID NO: 61967 - DNA, 75 bp, synthetic construct
  source 1..75: mol_type = other DNA
ctcccgtgacgccagataatcccgcaggtgatgatgcggggtacgatgatgattttcagcagatgcgtgaagagg

SEQ ID NO: 61968 - DNA, 75 bp, synthetic construct
  source 1..75: mol_type = other DNA
acccgcagcagccggcgcaaatgccggtggccattgactatcccgccgcgctggccctgcgccagatggcgctcg

SEQ ID NO: 61969 - DNA, 75 bp, synthetic construct
  source 1..75: mol_type = other DNA
atgtggctgcacggcaccgggtgcagttttcgatgcctgagtccgatgcggtgtctatgctcaaaagaattccat

SEQ ID NO: 61970 - DNA, 75 bp, synthetic construct
  source 1..75: mol_type = other DNA
gtacaggcagcccttcagcaggaaaagcatcatgcccttttcctgatggtgatttttctgctggtactggtagtg

SEQ ID NO: 61971 - DNA, 75 bp, synthetic construct
  source 1..75: mol_type = other DNA
tgttgcatctcggcagttttgccgtcagcagtttctttccgctgatggcgcaacgtcgctggaagccggagcgca

SEQ ID NO: 61972 - DNA, 75 bp, synthetic construct
  source 1..75: mol_type = other DNA
tttcgcgatatcagcctcgagtttgatcacctggcgaacattacccctatccagcttggctttgaaaaagcggtg

SEQ ID NO: 61973 - DNA, 75 bp, synthetic construct
  source 1..75: mol_type = other DNA
tgatggttctggataatgaagaacttgatgaattggccgacggcggcacagttgccggcctgacgcttgacgacg

SEQ ID NO: 61974 - DNA, 75 bp, synthetic construct
  source 1..75: mol_type = other DNA
gtgctggcactgcgacaaccagctgcgcgaccagacttccgaatcacttgttcatcttgctcaacaaaatctgtc

SEQ ID NO: 61975 - DNA, 75 bp, synthetic construct
  source 1..75: mol_type = other DNA
gcggacgcactaccggaggtagtattacgtcgttctctggggttacgtgcggaaaaaattcgctcggtgtaccgc

SEQ ID NO: 61976 - DNA, 75 bp, synthetic construct
  source 1..75: mol_type = other DNA
agttgaaaaaagcgggcgttgatgtgctgggtatcagcaccgataaacccgaaaaactctcccgttttgcggaaa

SEQ ID NO: 61977 - DNA, 75 bp, synthetic construct
  source 1..75: mol_type = other DNA
agtatctgctgagcctggtccccgactgcccgtggcagcatattgtgttcacacttccctgccagtactggtccc

SEQ ID NO: 61978 - DNA, 75 bp, synthetic construct
  source 1..75: mol_type = other DNA
agctggctaaagacggaacagtatccaaagatacccatgccagccggattggtcaggcggtatggagactggagg

SEQ ID NO: 61979 - DNA, 75 bp, synthetic construct
  source 1..75: mol_type = other DNA
tttcactggatccgattgcaggtcacgagcaaagcggaaaacgtccggtgcttatcgtatcgaaggcatcgttta

SEQ ID NO: 61980 - DNA, 75 bp, synthetic construct
  source 1..75: mol_type = other DNA
aacgcgttcgctcacggacgcctatcgtcgccacaatgtcggggccacaccacgcgatatggcctggatcgacgt

SEQ ID NO: 61981 - DNA, 75 bp, synthetic construct
  source 1..75: mol_type = other DNA
caccgcacaggcgttctacataaaacgcttacgcttcattgttgactcgaactcgacttcagataaatcacgctt

SEQ ID NO: 61982 - DNA, 75 bp, synthetic construct
  source 1..75: mol_type = other DNA
gattgaaggcgatctcgttaaaacagtgggcaaagctttcccccgggactcccgtgcaccggagcggtggccatc

SEQ ID NO: 61983 - DNA, 75 bp, synthetic construct
  source 1..75: mol_type = other DNA
aggagcaacggaatgctacaataaaggtcagtccacacaaattcctgtatctctggggataaaaacaccttctcg

SEQ ID NO: 61984 - DNA, 75 bp, synthetic construct
  source 1..75: mol_type = other DNA
ggtacttctacgcagatcccagcttcacccgagataaaaaccccccggcgttttaaacgcgtattatctgtaggg

SEQ ID NO: 61985 - DNA, 75 bp, synthetic construct
  source 1..75: mol_type = other DNA
aataagcgattcatagcagcagccaatccggctaccgtcttggcactgctggatgaacgggaaagaaaccagcaa

SEQ ID NO: 61986 - DNA, 75 bp, synthetic construct
  source 1..75: mol_type = other DNA
atggatgtcatgagaagtgttctgggaatggtggtattgctggcaattgcgtttttactgtcagtaaacaagaag

SEQ ID NO: 61987 - DNA, 75 bp, synthetic construct
  source 1..75: mol_type = other DNA
gaaggagcacatccagaaagcggtttcgatgaagatttccaaatggaacagcaggccaatgctgaattcatcgcc

SEQ ID NO: 61988 - DNA, 75 bp, synthetic construct
  source 1..75: mol_type = other DNA
gacgaagttgaagtgaccgaaatcctggtgaaagttggcgataaagttgaagctgaacagtcgctgatcaccgta

SEQ ID NO: 61989 - DNA, 75 bp, synthetic construct
  source 1..75: mol_type = other DNA
tggttaacggtgcgattgccttcgattcacctgaagagtcgaaacctgccgaggcggaagatacctttggtctgt

SEQ ID NO: 61990 - DNA, 75 bp, synthetic construct
  source 1..75: mol_type = other DNA
atattgtgctgcgtgagctgcgtctggcgatacgactgccgggccgtgtgaccacctcccgcctgctgcataccg

SEQ ID NO: 61991 - DNA, 75 bp, synthetic construct
  source 1..75: mol_type = other DNA
attctcgccaatgcatctgatggcaaatttaccgccgaatggttacgcaatgtagcgaatcctgatcgtcaacga

SEQ ID NO: 61992 - DNA, 75 bp, synthetic construct
  source 1..75: mol_type = other DNA
actggaaacaatgaagccaatcagcgcacacagggaacatgtttttcccagccttaaaaatccaatgctgccaat

SEQ ID NO: 61993 - DNA, 75 bp, synthetic construct
  source 1..75: mol_type = other DNA
taccacaggtgttgtgcgttgcgatcaaccccggacaattgatatgaaagcccggggcggaaaacgactcgaacg

SEQ ID NO: 61994 - DNA, 75 bp, synthetic construct
  source 1..75: mol_type = other DNA
atgaactgaagtttgacgatgcgacagggaaagaacaggtctacatccacgcgcagaagaacatgaacaccgagg

SEQ ID NO: 61995 - DNA, 75 bp, synthetic construct
  source 1..75: mol_type = other DNA
atgaaaacctatatttatcaggacgaaaaatcacataaattctgggcggtggagcagcagagaaacgagctgcat

SEQ ID NO: 61996 - DNA, 75 bp, synthetic construct
  source 1..75: mol_type = other DNA
tctggagtttaagattttccagaaaggcaatcagggggcaggcaatatcaccgactgtacggtgattgtgaccaa

SEQ ID NO: 61997 - DNA, 75 bp, synthetic construct
  source 1..75: mol_type = other DNA
ataaactcagttattgttcgtggttccaattcaaatgaatttttctattatcaaatcgaatttaatgtaaaaacc

SEQ ID NO: 61998 - DNA, 75 bp, synthetic construct
  source 1..75: mol_type = other DNA
cttacctgtttttcaccggtaagggaggtgtaggcaaaacttcgatttcctgcgcaacggctatacgtctggctg

SEQ ID NO: 61999 - DNA, 75 bp, synthetic construct
  source 1..75: mol_type = other DNA
ggctttatgggatatctgaaagggaaaagcagtctgatactttacgagcagtttggtgatttgaaattcaaatac

SEQ ID NO: 62000 - DNA, 75 bp, synthetic construct
  source 1..75: mol_type = other DNA
cagggattgaggatactgatggccagccactgagcaacatactgctgctggctgaccgtatcgcgatgataaatc

SEQ ID NO: 62001 - DNA, 75 bp, synthetic construct
  source 1..75: mol_type = other DNA
ccgccagggcggctcttcctgtcggtggaactcaagaatcaaattttgcagaacatgaagtatctcagcccgcaa

SEQ ID NO: 62002 - DNA, 75 bp, synthetic construct
  source 1..75: mol_type = other DNA
ttggagcaatattccagatttgaattacgcctacgtaaacatttatcactggcggaagagtctctctggcaaaaa

SEQ ID NO: 62003 - DNA, 75 bp, synthetic construct
  source 1..75: mol_type = other DNA
tgtcatcactcaaagataataaattatatcgatactttgatgaacattttaacgttattacatgcattagtgtca

SEQ ID NO: 62004 - DNA, 75 bp, synthetic construct
  source 1..75: mol_type = other DNA
ccttctggcatgatttagcggttccggtcattactggcattcttgccagtatgatcgtgagctggctgaacaagc

SEQ ID NO: 62005 - DNA, 75 bp, synthetic construct
  source 1..75: mol_type = other DNA
aaacgcattgcagaactggagactaatcttgctgcacttgcggcggagaatgcggggctgaataaatttatcgta

SEQ ID NO: 62006 - DNA, 75 bp, synthetic construct
  source 1..75: mol_type = other DNA
actattggcagtgtaaccagtttcctcggcgcgtgggtcagttactttctggacggcgcgacaggtggaatcatc

SEQ ID NO: 62007 - DNA, 75 bp, synthetic construct
  source 1..75: mol_type = other DNA
acacccacgggtaaaaagggcgaagccctctcaccaatgcgagacacctttggtgctgaacaacggattaaaaaa

SEQ ID NO: 62008 - DNA, 75 bp, synthetic construct
  source 1..75: mol_type = other DNA
ttgttgatgcggtagcgcgtaatggtagttttagcgccgcagcccaggagttgcatcgcgttccttctgcggtca

SEQ ID NO: 62009 - DNA, 75 bp, synthetic construct
  source 1..75: mol_type = other DNA
atggttcggcaccaacaagtacgaatgtgcggaatcttaaaagaatttatccgtaaggagatggcagtgaacacc

SEQ ID NO: 62010 - DNA, 75 bp, synthetic construct
  source 1..75: mol_type = other DNA
aaaatcaataacttaggttttaaagttcaatatgagcattacctgtttgaaggagaacaaggtaagcgcgacagt

SEQ ID NO: 62011 - DNA, 75 bp, synthetic construct
  source 1..75: mol_type = other DNA
gactgaacgcaaattactacatagcatcatgctcaggaccagataatcgcgccaataagcgattcatagcagcag

SEQ ID NO: 62012 - DNA, 75 bp, synthetic construct
  source 1..75: mol_type = other DNA
tgctggagcctgagccggaacgttattcatcttttgccagtggtgccgttccggcggcatcacaaccgctggcgg

SEQ ID NO: 62013 - DNA, 75 bp, synthetic construct
  source 1..75: mol_type = other DNA
ctgtgggtggctgattttacttacgtcagcacatggcagggcttcgtctatgtggcgttcatcattgatgtgttt

SEQ ID NO: 62014 - DNA, 75 bp, synthetic construct
  source 1..75: mol_type = other DNA
tttctgccaaagagctggagtcagaagtctgacgagaagagccgcacggatatggttattctgttacaggtcaaa

SEQ ID NO: 62015 - DNA, 75 bp, synthetic construct
  source 1..75: mol_type = other DNA
cctggccgccgagcaataaccgctactaccgccataatcgcgggcgcacgcacatcagcgcagaagggcaggcat

SEQ ID NO: 62016 - DNA, 75 bp, synthetic construct
  source 1..75: mol_type = other DNA
gtcacgcgccgatccgcagcgtcagccgtcaaatccagaatatcacctcgaaagatctcgacgttcgccttgacc

SEQ ID NO: 62017 - DNA, 75 bp, synthetic construct
  source 1..75: mol_type = other DNA
agtcagtggcgaatcattgccgagcgtcttcgattacctggtcgtgagcaagagttaatggcagaggcgttcagg

SEQ ID NO: 62018 - DNA, 75 bp, synthetic construct
  source 1..75: mol_type = other DNA
ccgctggaacgagaaaaaggccacgcataaacgccagcgtttttctgtggactggaaaacgctgcataacgggct

SEQ ID NO: 62019 - DNA, 75 bp, synthetic construct
  source 1..75: mol_type = other DNA
gtaaagaggctcgtgaccatctggatgaagaagccacaaacgatgagatcgataaagaaattgaaacagagctgg

SEQ ID NO: 62020 - DNA, 75 bp, synthetic construct
  source 1..75: mol_type = other DNA
cagcgtgtcacgcagtccatcgatgcgcgcctcatccagcttactgaaaaacagaataaaacaggtggtgacttc

SEQ ID NO: 62021 - DNA, 75 bp, synthetic construct
  source 1..75: mol_type = other DNA
gccaggaccgctattgctgtgttatgccgtcaggaaatggttgtgcttaaacagagaatgccgggcagcagataa

SEQ ID NO: 62022 - DNA, 75 bp, synthetic construct
  source 1..75: mol_type = other DNA
gtctggctgatttccgtattaaagccgatgtcgtcaattactctccggggccggttatcactcgctttgaactta

SEQ ID NO: 62023 - DNA, 75 bp, synthetic construct
  source 1..75: mol_type = other DNA
gccaatgaaagcgttgctggatgatggtccacacgaaccgctgtttacgccaattgttgaacctgtacagcagcc

SEQ ID NO: 62024 - DNA, 75 bp, synthetic construct
  source 1..75: mol_type = other DNA
gcgttacctgctgcaggtgaagcagcgtgacggtgagtttgtgccggggggaacctgggcacgtgacagtaagaa

SEQ ID NO: 62025 - DNA, 75 bp, synthetic construct
  source 1..75: mol_type = other DNA
cgcgccaaagaatcagtacaactcattcggtaaatataaatacagaagctgcgaagacattcttgaaggcgttaa

SEQ ID NO: 62026 - DNA, 75 bp, synthetic construct
  source 1..75: mol_type = other DNA
tatgacgccaacggcagcagcgggaagggggactgcggggcgctgtcggtgtgcgtgccaccccttgttgccggt

SEQ ID NO: 62027 - DNA, 75 bp, synthetic construct
  source 1..75: mol_type = other DNA
acatttcattcagctccggtacgctgaatgcgatgtatgaactgttcagaacagataaccgctttaaggtggtat

SEQ ID NO: 62028 - DNA, 75 bp, synthetic construct
  source 1..75: mol_type = other DNA
acaaagcccgtacgttgaagtctcgcgtggctgggtgcgcttgcgactgctgaacgcgtcgaactctcgtcgcta

SEQ ID NO: 62029 - DNA, 75 bp, synthetic construct
  source 1..75: mol_type = other DNA
gcctgggcaaccatgcttgctgttatcaatgagccaattggtgcggagcgtgaggataatcgcggctttgcaatg

SEQ ID NO: 62030 - DNA, 75 bp, synthetic construct
  source 1..75: mol_type = other DNA
tatctcctttccggcccgacgatgatgatgccaggccacggtcacgggcatatggaacacagcaactggcggatg

SEQ ID NO: 62031 - DNA, 75 bp, synthetic construct
  source 1..75: mol_type = other DNA
attacgcccggagtggatagccggagagacaggtatgtcagtacgtagtttgtaccgaatgtttgccgataaagg

SEQ ID NO: 62032 - DNA, 75 bp, synthetic construct
  source 1..75: mol_type = other DNA
atggcattaaccgatattaaagtgaaaaccgcaaagccaaaagaaaagccctataagattgctgatggcggcggt

SEQ ID NO: 62033 - DNA, 75 bp, synthetic construct
  source 1..75: mol_type = other DNA
tgggacacgaaatttgacgttacctatgattcgccgtttacattcccagtttggcattcctcttgaaagcttggt

SEQ ID NO: 62034 - DNA, 75 bp, synthetic construct
  source 1..75: mol_type = other DNA
cagcaagcgttacactcagcgcattgagcgacataacctgaatctgagacaacatctggcaaggctgggacggaa

SEQ ID NO: 62035 - DNA, 75 bp, synthetic construct
  source 1..75: mol_type = other DNA
atggcgaaaaggccaaaaccgtgcttactggatcaaaatttaccattgcgaaagcttgttctggaaaagctggag

SEQ ID NO: 62036 - DNA, 75 bp, synthetic construct
  source 1..75: mol_type = other DNA
cgttcactttcgacggtggcggtgcgtgtcgttgaagttattcctggcaaaccctatgtaggtctggagttacca

SEQ ID NO: 62037 - DNA, 75 bp, synthetic construct
  source 1..75: mol_type = other DNA
aattgctgaagccgatcgcatgatgcgtccgattccagacccgtactggaagccgggtgacagtatggatgccca

SEQ ID NO: 62038 - DNA, 75 bp, synthetic construct
  source 1..75: mol_type = other DNA
agaaaatgaaagaagaggcaagaaaaaagcttgccaaatatcatgagctacgtaaacaacgtggtatgagtcttc

SEQ ID NO: 62039 - DNA, 75 bp, synthetic construct
  source 1..75: mol_type = other DNA
ttgacccttcccgccagcgaaaaggtgaaggtagcggtattgggctggcgatagtgaaatcgattgttgtcgcgc

SEQ ID NO: 62040 - DNA, 75 bp, synthetic construct
  source 1..75: mol_type = other DNA
acccggacagcggcaaaattcattacatgccgcatattcaggtagaaaactgggggctggtagaagcactggaag

SEQ ID NO: 62041 - DNA, 75 bp, synthetic construct
  source 1..75: mol_type = other DNA
cgtcctgaccttgttgaaaaactgaatgatattattgcacggcattatcctggtgcattgccgccacgagtctga

SEQ ID NO: 62042 - DNA, 75 bp, synthetic construct
  source 1..75: mol_type = other DNA
caagaaatgccggtaatgagtaaagtcgaacaaatgcaggcaacgcccgcgcgtggcgagccggataaactggcg

SEQ ID NO: 62043 - DNA, 75 bp, synthetic construct
  source 1..75: mol_type = other DNA
agcgtcacgcacagcgggtatgacgcggcaggaaggctcacggcgcagacggacgcggcgggacggcggacagag

SEQ ID NO: 62044 - DNA, 75 bp, synthetic construct
  source 1..75: mol_type = other DNA
cggaagccttccgtaaacagcgcgcctcttccttatcttccccggccagtccccgttctgtttcctcttctcagg

SEQ ID NO: 62045 - DNA, 75 bp, synthetic construct
  source 1..75: mol_type = other DNA
acaagaactgcgttttgcacgctgggaagatatcgattttgagacaaaattgtgggagatcccggcagaagtaat

SEQ ID NO: 62046 - DNA, 75 bp, synthetic construct
  source 1..75: mol_type = other DNA
tattaatgaattgatctatgcccgtgataaccattttttatgctcatcgctgatagcgcctgtaaacggctatac

SEQ ID NO: 62047 - DNA, 75 bp, synthetic construct
  source 1..75: mol_type = other DNA
cgctgaaaatgcccgcctgaagcggcaactggcggagcaggcagaggaactggctatcctccaaaaggccgcgac

SEQ ID NO: 62048 - DNA, 75 bp, synthetic construct
  source 1..75: mol_type = other DNA
gccttcaacaaagatgtgttcccttacattggcaaaaaaccaatcgccgaaatcaaaccacttgaacttctgaat

SEQ ID NO: 62049 - DNA, 75 bp, synthetic construct
  source 1..75: mol_type = other DNA
cccccgacagggcgtcctgtaaacgggtttcatcataaaaaaaccaaccgtccggactgggacggaatgtactga

SEQ ID NO: 62050 - DNA, 75 bp, synthetic construct
  source 1..75: mol_type = other DNA
tcgtgtagctggtaaagagaagctgttagcactaggtgtgtatcctgaagttaccttggctgatgctcgtgcaaa

SEQ ID NO: 62051 - DNA, 75 bp, synthetic construct
  source 1..75: mol_type = other DNA
gctacaccgcgccggaacgtatcaaccactggatcaccgccttctgcttcatcctggcggcggtgagcgggctgg

SEQ ID NO: 62052 - DNA, 75 bp, synthetic construct
  source 1..75: mol_type = other DNA
taacgatgcggcgattcagacggatgtcacgggattagggattgaactccagcaaaacggtcagccctttaagct

SEQ ID NO: 62053 - DNA, 75 bp, synthetic construct
  source 1..75: mol_type = other DNA
ggcgattattttcctggttctgctgctggtgagcggcgtgattatctggcgtccttattttgcacctgctttctc

SEQ ID NO: 62054 - DNA, 75 bp, synthetic construct
  source 1..75: mol_type = other DNA
tcatgcgcaatatctggacgggcggcgcgagatgctccagtggtacgccgactatatggattcgctcgaacatgg

SEQ ID NO: 62055 - DNA, 75 bp, synthetic construct
  source 1..75: mol_type = other DNA
ggagtgatcaggctcgccagaagttagggcaggaagcaaaggcaatgctggaaaaaatgcaggaaaagaaagaca

SEQ ID NO: 62056 - DNA, 75 bp, synthetic construct
  source 1..75: mol_type = other DNA
caatctggtcggtaaacttgataaagccccgatggctgatttcagcagcgccactattgctactggtagtctgcc

SEQ ID NO: 62057 - DNA, 75 bp, synthetic construct
  source 1..75: mol_type = other DNA
gctgtggactgaatgttgcacctgctcaggcgcataaatttgccagcaattaccattgttttatggttcgtcgtt

SEQ ID NO: 62058 - DNA, 75 bp, synthetic construct
  source 1..75: mol_type = other DNA
gttgatgttgatacagctgctgctcgccttaaacgttattacgagtttatatctttcgatgaaattgaagctatc

SEQ ID NO: 62059 - DNA, 75 bp, synthetic construct
  source 1..75: mol_type = other DNA
atgacccctaacatttcaataactctgaatacgccacacgtcacaattgagcgttatagcgaacttactggtctt

SEQ ID NO: 62060 - DNA, 75 bp, synthetic construct
  source 1..75: mol_type = other DNA
ttgattgcatcaccatttcgtttggtctgcgtaacgtcaccgacaaagataaagcactgcgttcaatgtatcgcg

SEQ ID NO: 62061 - DNA, 75 bp, synthetic construct
  source 1..75: mol_type = other DNA
tcactttgacccgaaaaaaaccgggaagcatcttggcccctggtctcctgacggacatctcggtgatctccctgc

SEQ ID NO: 62062 - DNA, 75 bp, synthetic construct
  source 1..75: mol_type = other DNA
atgctgaatgagttcgatcaatacctgcatgagcgctacctgagcgggaaagccagaaaagatcggtggtactgg

SEQ ID NO: 62063 - DNA, 75 bp, synthetic construct
  source 1..75: mol_type = other DNA
ccccgccgcacgtcttgttgctgtgccggatgccatccgttgtgtgaactgccagaacatcatggaggcccgtca

SEQ ID NO: 62064 - DNA, 75 bp, synthetic construct
  source 1..75: mol_type = other DNA
aaacttacaggacatggatttaggcatacattatcaacaatactccatgaaaatggttttaatactgcttggatt

SEQ ID NO: 62065 - DNA, 75 bp, synthetic construct
  source 1..75: mol_type = other DNA
aatcaaaccattagaactacttgaagtattgcgacgaatagagaaacgtggagcactagagaaaacacgtaaggt

SEQ ID NO: 62066 - DNA, 75 bp, synthetic construct
  source 1..75: mol_type = other DNA
ctcaggtatagcgctgggatcagtactgggcagcattactataagccacgccggtatcgtgtataccggtatcag

SEQ ID NO: 62067 - DNA, 75 bp, synthetic construct
  source 1..75: mol_type = other DNA
gaaatgcaattagctcatgtagataaaaacacaattcgaggcacatataaccatgcacaatatttagagaaaagg

SEQ ID NO: 62068 - DNA, 75 bp, synthetic construct
  source 1..75: mol_type = other DNA
gaaatagagaaaacgaaattaagttgtcgtgtatatactgagtacaggagtacagctttagctggttctttatgg

SEQ ID NO: 62069 - DNA, 75 bp, synthetic construct
  source 1..75: mol_type = other DNA
aattaaaccactagaactacttgaagtacttaaacgcatagaaaaacgcggagcactggagaaaacaagaaaagt

SEQ ID NO: 62070 - DNA, 75 bp, synthetic construct
  source 1..75: mol_type = other DNA
agccagtgggagatttgtttagtctgtctctttccggctggcagcggagttactacccggcatctgtaatcagcg

SEQ ID NO: 62071 - DNA, 75 bp, synthetic construct
  source 1..75: mol_type = other DNA
tttctcctaaccagaaaaacgggcaggggaatcgccgtttccatgaaggcgcatcctattatccggcatttctgt

SEQ ID NO: 62072 - DNA, 75 bp, synthetic construct
  source 1..75: mol_type = other DNA
gcccgctctggcaggagttgagggcatctttgctgaagaccattacccgaaaagaaaacgtatttatcagctggg

SEQ ID NO: 62073 - DNA, 75 bp, synthetic construct
  source 1..75: mol_type = other DNA
aaagaaaacgtatttatcagttgggtgatgcgattgctgattgtcgtcagtctcgcctggacggggtgggctatt

SEQ ID NO: 62074 - DNA, 75 bp, synthetic construct
  source 1..75: mol_type = other DNA
cgaatgctttggttgaggccagctacaagttgaccctacaggaacaacgttttctgttgctgtgtatcagtcgat

SEQ ID NO: 62075 - DNA, 75 bp, synthetic construct
  source 1..75: mol_type = other DNA
cttcacttcatgcacgggattttatcaaaagacgaaccgagaaaatattgcagtgaagcttgtgccgaaaaagac

SEQ ID NO: 62076 - DNA, 75 bp, synthetic construct
  source 1..75: mol_type = other DNA
tgaaatggtggatggcgtgacacattttgtgtcggaactatggcagcccaccgtggccagtgcggccccgggctc

SEQ ID NO: 62077 - DNA, 75 bp, synthetic construct
  source 1..75: mol_type = other DNA
tccctgcgcctgtattgcgcacctgccattaatttatttatccaccatgcagaagccatcacgctggacaaccgg

SEQ ID NO: 62078 - DNA, 75 bp, synthetic construct
  source 1..75: mol_type = other DNA
gacagttttcaggtaattcgccatctccgggcaataccgccatgtccggcagtttcagcgacgatgacgacagta

SEQ ID NO: 62079 - DNA, 75 bp, synthetic construct
  source 1..75: mol_type = other DNA
tgttctacgcagctgaccacggtgagtcaattaatgaacgcgagcacctgcacggcacgccgcgtgaactggcac

SEQ ID NO: 62080 - DNA, 75 bp, synthetic construct
  source 1..75: mol_type = other DNA
tacgcctttagccaggcacgttttacacccaaaggcatcgagtggatcggcggcctgtggacggcacacatcgct

SEQ ID NO: 62081 - DNA, 75 bp, synthetic construct
  source 1..75: mol_type = other DNA
acacacccgcaaaacgggcaaacctacgaggagtattggtttaacaaacgtgattctctggtgatcgtcgccagg

SEQ ID NO: 62082 - DNA, 75 bp, synthetic construct
  source 1..75: mol_type = other DNA
gtgattgcgctggtggatgcggtacatgccgatgagcagatgaaccagttcaccatcgcccagtcacaggttggc

SEQ ID NO: 62083 - DNA, 75 bp, synthetic construct
  source 1..75: mol_type = other DNA
aaagctttaacggtgaaattaaggttctgtatgatgggaaagcgttgggatgggaaaaatatgttgatggcccgg

SEQ ID NO: 62084 - DNA, 75 bp, synthetic construct
  source 1..75: mol_type = other DNA
gtcaggggcattcaggatgaccaccacctttatggggttacaggggagccagtcgcctctccccggttattacct

SEQ ID NO: 62085 - DNA, 75 bp, synthetic construct
  source 1..75: mol_type = other DNA
cgcagtgcaaagacaatttcacatcaaaagaaacagctctttgagaaactggggattcagagcgatattactttc

SEQ ID NO: 62086 - DNA, 75 bp, synthetic construct
  source 1..75: mol_type = other DNA
ttgatgacaggactccgcttcgtgatgctgtaaatatgctggtcagcaaaaagcatctaatgtacccagaagctt

SEQ ID NO: 62087 - DNA, 75 bp, synthetic construct
  source 1..75: mol_type = other DNA
atgaatgagcctcgttgtattgctcagttactgcgtaacgaaagccccagggcgattgacttcaccatcacccac

SEQ ID NO: 62088 - DNA, 75 bp, synthetic construct
  source 1..75: mol_type = other DNA
tctggaatatgccactgaggttgtcattgcactgcaattcatccgcttcgactgggattatgatgcccatcttat

SEQ ID NO: 62089 - DNA, 75 bp, synthetic construct
  source 1..75: mol_type = other DNA
aggcacaggagagcgaacgaaaacaggcgatccagaaacgaatcgaggggaagaaacaacgacgggaacgcaatc

SEQ ID NO: 62090 - DNA, 75 bp, synthetic construct
  source 1..75: mol_type = other DNA
cgacttctttatgccgatcgttgataatcctttcgattttggccgcattgcggcgactaacgccatcagcgatat

SEQ ID NO: 62091 - DNA, 75 bp, synthetic construct
  source 1..75: mol_type = other DNA
tgtacgatacgcattatcctgctccgggttcgcctgcgctggcacagcatctggttgagctgttagcgccggtcc

SEQ ID NO: 62092 - DNA, 75 bp, synthetic construct
  source 1..75: mol_type = other DNA
gaagaaagtcatggatgcagggaaaagaataccgccattacgctgtagaaggtgatccggggcactacagtgaat

SEQ ID NO: 62093 - DNA, 75 bp, synthetic construct
  source 1..75: mol_type = other DNA
aaagaagcaaacagccttgtatggttatgggattatgccaaccgctcacaggcattattccgcgaactgtatccg

SEQ ID NO: 62094 - DNA, 75 bp, synthetic construct
  source 1..75: mol_type = other DNA
cacatcggagagccgcctgtcagccgggccctggaagcatggcgcgtcaccctcgaagatgtcacatggggtcag

SEQ ID NO: 62095 - DNA, 75 bp, synthetic construct
  source 1..75: mol_type = other DNA
gtgagcaagattgactatcaggtactgcgtgaggcagcagtagcaattgaaacagtagcaacgcctcaaaaattg

SEQ ID NO: 62096 - DNA, 75 bp, synthetic construct
  source 1..75: mol_type = other DNA
gcgctggttaaacttaagcagcttaactctggagcaccggacaaagccaatttactcgcagaagcctatatctat

SEQ ID NO: 62097 - DNA, 75 bp, synthetic construct
  source 1..75: mol_type = other DNA
gaatagaatacaggtaggattatcagtgggatcaattctgattgaagctgcattgaatagcggcactatgactca

SEQ ID NO: 62098 - DNA, 75 bp, synthetic construct
  source 1..75: mol_type = other DNA
cgaagattttgagtctgcggaggcaatgcttgcgaccactcgcgctgaattacattctctgaatgccaaactggt

SEQ ID NO: 62099 - DNA, 75 bp, synthetic construct
  source 1..75: mol_type = other DNA
tcatttgtaccttgacactgttgatcattattatcaccgttttgttcacctttctgagaagctctgatgtgccag

SEQ ID NO: 62100 - DNA, 75 bp, synthetic construct
  source 1..75: mol_type = other DNA
atgtggccagccacggcacatatgatggctattctcggtatccaccctgagacctacctggttcgtataacttca

SEQ ID NO: 62101 - DNA, 75 bp, synthetic construct
  source 1..75: mol_type = other DNA
tttattttcactctggcgatggccctgaaatgctacccgctgctccccggtggtctgttggctatcgaagcggta

SEQ ID NO: 62102 - DNA, 75 bp, synthetic construct
  source 1..75: mol_type = other DNA
ggattatctggatgcactggaaatggtcgatatttccagtgctccagatattgaatggcctacgcctccggtagt

SEQ ID NO: 62103 - DNA, 75 bp, synthetic construct
  source 1..75: mol_type = other DNA
cggggaaatcgtggcgtgggaaacggcctgcaggcctgcagaggagctggtgaagcggatgttaaataaggggct

SEQ ID NO: 62104 - DNA, 75 bp, synthetic construct
  source 1..75: mol_type = other DNA
tgacgttccgtatcacgccggatatcgatgaacgggcatttattaagcgctatctcggcaatatgaacattgcga

SEQ ID NO: 62105 - DNA, 75 bp, synthetic construct
  source 1..75: mol_type = other DNA
attctctccagcgtgaatggaatgccagcctgggctgatattccaccgccaactcatgaggaacaaattgccgca

SEQ ID NO: 62106 - DNA, 75 bp, synthetic construct
  source 1..75: mol_type = other DNA
aacctcacagacgctggctgccggttacacggtcgctgatgtgaaccgtgcgctgatgaaagacttcgaagccaa

SEQ ID NO: 62107 - DNA, 75 bp, synthetic construct
  source 1..75: mol_type = other DNA
atcacgctatcttgtttatgatccagaacagcatcagtcactaacttttagtcgggatgagttcgaaaaactgta

SEQ ID NO: 62108 - DNA, 75 bp, synthetic construct
  source 1..75: mol_type = other DNA
acctgtcattttttcccgagtccctaatacaggaatatatcgatgctggctgggatttatcagatgccgttgcaa

SEQ ID NO: 62109 - DNA, 75 bp, synthetic construct
  source 1..75: mol_type = other DNA
aaacagtaagcaatggcctggtaaagcggcgattggtcgcctgaaaggtggggaactggcgcaatataatttgtg

SEQ ID NO: 62110 - DNA, 75 bp, synthetic construct
  source 1..75: mol_type = other DNA
ggcgatgagcgcgcgcggcacttcggcttcatgagcgcctgtttcgggttcgggatggtcgcgggacctgtgctc

SEQ ID NO: 62111 - DNA, 75 bp, synthetic construct
  source 1..75: mol_type = other DNA
tcggcggaaaaaatgtggcgtgggcgcagtctgaaatcactgcatggatggcggatcgcattgccgaacgtaacc

SEQ ID NO: 62112 - DNA, 75 bp, synthetic construct
  source 1..75: mol_type = other DNA
ggcgctggtcgccgcagttagcgccaatgttaaagctattgatgaacggcagccttttgccgcgcagctggcggc

SEQ ID NO: 62113 - DNA, 75 bp, synthetic construct
  source 1..75: mol_type = other DNA
aaaaatcacataaattctgggcggtggagcagcagggaaacgagctgcatattagctggggtaaagtcagcacca

SEQ ID NO: 62114 - DNA, 75 bp, synthetic construct
  source 1..75: mol_type = other DNA
cggcgtacactgctaaaccttgaggctagtggagagttcccggagcgtgtgcaggttacggaagggcgtaaggcc

SEQ ID NO: 62115 - DNA, 75 bp, synthetic construct
  source 1..75: mol_type = other DNA
tcgcaacgagggtattaactataccgcaagccgtcttgctgctgctttcaatcacggatttatcaataagtcttt

SEQ ID NO: 62116 - DNA, 75 bp, synthetic construct
  source 1..75: mol_type = other DNA
ttattacaatgaggcgataagagaggaaccgatagactttctggacagatcgttttcctccagctcatggccttt

SEQ ID NO: 62117 - DNA, 75 bp, synthetic construct
  source 1..75: mol_type = other DNA
ccttcgaacgaattcgaagatttactttacctgaagggaaaaaccaagttttcctttgggatacggacgtaacaa

SEQ ID NO: 62118 - DNA, 75 bp, synthetic construct
  source 1..75: mol_type = other DNA
cgaattaaagacaagatcgaaggtgaacgtatcatccctctcactccttatgtttctgaattgttaaatgtacta

SEQ ID NO: 62119 - DNA, 75 bp, synthetic construct
  source 1..75: mol_type = other DNA
aatcctgttcatcatgatggtcatgtgcagggaggctacagcgttcccctgattattaccgccagtgacatcacg

SEQ ID NO: 62120 - DNA, 75 bp, synthetic construct
  source 1..75: mol_type = other DNA
ctggcagtggctggagcaacaccccgcactggcctctgatgtgctggagcgtctcaaacgctggcaccgccgcaa

SEQ ID NO: 62121 - DNA, 75 bp, synthetic construct
  source 1..75: mol_type = other DNA
cagcgcattaacgagataatgatttatgccgtaaacactggtctgattgatgccaatccagcatcaggtattggg

SEQ ID NO: 62122 - DNA, 75 bp, synthetic construct
  source 1..75: mol_type = other DNA
tgtcttctcaggcattagagattctggaagtgatgaagccaatcagtgctcatcgtgaacatatttttccaagta

SEQ ID NO: 62123 - DNA, 75 bp, synthetic construct
  source 1..75: mol_type = other DNA
ttgacggtcaggcggaggcagacataatgccgcggaaaaagccctttgtgccatctgtctcggaaataaaaactc

SEQ ID NO: 62124 - DNA, 75 bp, synthetic construct
  source 1..75: mol_type = other DNA
ttcaggggcagatgatgaataaagacaaatgccgtatgtacgggagaaaacgttatacagcgggagcaatgtgct

SEQ ID NO: 62125 - DNA, 75 bp, synthetic construct
  source 1..75: mol_type = other DNA
aagcactgagtgctgattttaatatagtagaggggctggctcagcaggaggctctgggcattttaaataagtacc

SEQ ID NO: 62126 - DNA, 75 bp, synthetic construct
  source 1..75: mol_type = other DNA
agatgcactggcgaatgcgtccggcaagccttatacccagttgtttgaagagcagattacccgtccgttggggat

SEQ ID NO: 62127 - DNA, 75 bp, synthetic construct
  source 1..75: mol_type = other DNA
atgttttcaattcaacaaccactactggtttttagcgatcttgatggcaccctgctggacagtcatagttatgac

SEQ ID NO: 62128 - DNA, 75 bp, synthetic construct
  source 1..75: mol_type = other DNA
aacggcaatctgggcctttatgttcttcattctcagtaaagaggaactgctggcgtggggatggcgtataccgtt

SEQ ID NO: 62129 - DNA, 75 bp, synthetic construct
  source 1..75: mol_type = other DNA
cagccgtaccgtctgccagggcagcagcatgatgaggaatcagggctgtactataaccgtcaccggtactacgat

SEQ ID NO: 62130 - DNA, 75 bp, synthetic construct
  source 1..75: mol_type = other DNA
agtccacatcactgaaaaaactaatgctctgaaagatgccacggagcacacgctacaagcagtttctcgaaagtg

SEQ ID NO: 62131 - DNA, 75 bp, synthetic construct
  source 1..75: mol_type = other DNA
ctggtgaacgagttgagagatattgcggttcagtaccacggaacgcagcaattgcgggagaagattgccagagca

SEQ ID NO: 62132 - DNA, 75 bp, synthetic construct
  source 1..75: mol_type = other DNA
ggtgcacctcaggccagacaggtggccgatcgatggcacctgctaaaaaatattggtgatgagcctgaacgaatg

SEQ ID NO: 62133 - DNA, 75 bp, synthetic construct
  source 1..75: mol_type = other DNA
ttcagaaaatattcggaaatacaggttgtctcgcgtgatcgcagtggagtctgtgcgacagcagcacgtgaaggt

SEQ ID NO: 62134 - DNA, 75 bp, synthetic construct
  source 1..75: mol_type = other DNA
ggacagagctcatttttatgggttacagaacgagcaaaacgctgatggaatcagattacttaccgtgaccaagca

SEQ ID NO: 62135 - DNA, 75 bp, synthetic construct
  source 1..75: mol_type = other DNA
gttgatgaccttaatgggattgttgatcgtgctgtgctggctaccgctggcgacgcggatgtcgcatcaggggca

SEQ ID NO: 62136 - DNA, 75 bp, synthetic construct
  source 1..75: mol_type = other DNA
cgctatggcttgtattttccgtccgccacaggtacagccgtaacccggcttgttcacgaaaaatttttgccgagt

SEQ ID NO: 62137 - DNA, 75 bp, synthetic construct
  source 1..75: mol_type = other DNA
ctacaccaattcaggccgtggcgtgacaggggaaaatggtgaattttcctttagctggggcgaaaccatctcctt

SEQ ID NO: 62138 - DNA, 75 bp, synthetic construct
  source 1..75: mol_type = other DNA
cggtggtattgcccgtggggccacgccggaaagcaacggcagctatggcttcgtccgtctggagggtgacctgct

SEQ ID NO: 62139 - DNA, 75 bp, synthetic construct
  source 1..75: mol_type = other DNA
gggatgcggtcgtagatctcttgccagaatcagacgggcggctactgccttgtcctggcggcgcgccagctaacg

SEQ ID NO: 62140 - DNA, 75 bp, synthetic construct
  source 1..75: mol_type = other DNA
gttgctgaaggttttatcgatggctgcctaagtatgctggatgtgaaacttgaaatggatgactactctgagtct

SEQ ID NO: 62141 - DNA, 75 bp, synthetic construct
  source 1..75: mol_type = other DNA
aacgttggggggcatgggcagcgagtgatagctcaggagttgactattcgtctatagctgctgggtttaaggggc

SEQ ID NO: 62142 - DNA, 75 bp, synthetic construct
  source 1..75: mol_type = other DNA
gcttcagtcgtctggaaaatgaaattgctgaactgaataaaaaactgtcggtgctgatgccttctgaagatgcaa

SEQ ID NO: 62143 - DNA, 75 bp, synthetic construct
  source 1..75: mol_type = other DNA
gcagaagtagctaaagctgtggggtgtaaagtggaagaggtggataaagagttaatattagggctgatattacaa

SEQ ID NO: 62144 - DNA, 75 bp, synthetic construct
  source 1..75: mol_type = other DNA
ggatggacgacggctcaagagttgtggcgaaacgagatcctgccacgcaccactattttgatgcagcagacatca

SEQ ID NO: 62145 - DNA, 75 bp, synthetic construct
  source 1..75: mol_type = other DNA
gatgatattccggaagaagactgggagcaggtagaggttatcggctggctgtatcagttctatatttcggaaaag

SEQ ID NO: 62146 - DNA, 75 bp, synthetic construct
  source 1..75: mol_type = other DNA
cgctgtatgaatcacgcctgaagggagaactgcacgttatcagcaagcgatataggcagcgcattgagcggcata

SEQ ID NO: 62147 - DNA, 75 bp, synthetic construct
  source 1..75: mol_type = other DNA
ttatcaatctctcgttatccaacggtgcgacgctgggggaaggtgagcaagtcgttaatctgcctaacgaattta

SEQ ID NO: 62148 - DNA, 75 bp, synthetic construct
  source 1..75: mol_type = other DNA
tgacggcggtcccggcgcggatcacgccggcgccctccggtgaacggctgaatattgaggtgtttcccgtccgtt

SEQ ID NO: 62149 - DNA, 75 bp, synthetic construct
  source 1..75: mol_type = other DNA
tgagaattgctggagatgcccagctttctaccccatgcactgacagcatcataaacagcattgcaacaggcattc

SEQ ID NO: 62150 - DNA, 75 bp, synthetic construct
  source 1..75: mol_type = other DNA
tcgcctccatgcggctgtttgcccgcttatccctggatagcgccgtgccggagcgcaccaccatcatgaatttcc

SEQ ID NO: 62151 - DNA, 75 bp, synthetic construct
  source 1..75: mol_type = other DNA
agcgcaaatcggcggaagcgtcgaaaagcctcgctttcctcgcgcaacagttaccggaagtacgtagccgcctcg

SEQ ID NO: 62152 - DNA, 75 bp, synthetic construct
  source 1..75: mol_type = other DNA
gatatttagatataaacggaaaagacactgagttctcccggttacaggctgttgattatggggctgcaattatta

SEQ ID NO: 62153 - DNA, 75 bp, synthetic construct
  source 1..75: mol_type = other DNA
gttattggggtttcgctccgtacaattgcaaagaagcggaaatgctcagatggtacgatcagaaaggaattgcaa

SEQ ID NO: 62154 - DNA, 75 bp, synthetic construct
  source 1..75: mol_type = other DNA
atcgcaggctaagaaccgatggttcaccgttgagtgaagccaagaaatttaaatcggcgcataccgaacttctga

SEQ ID NO: 62155 - DNA, 75 bp, synthetic construct
  source 1..75: mol_type = other DNA
ttagccatcgtttacacgaccgtctgggtgagccgcagtatatagattcactgcattctcaggggtcggcaagca

SEQ ID NO: 62156 - DNA, 75 bp, synthetic construct
  source 1..75: mol_type = other DNA
cggtattttactggtagttgcctggcaagatcatacagtacatattgaaattggctacggacttgagggtattct

SEQ ID NO: 62157 - DNA, 75 bp, synthetic construct
  source 1..75: mol_type = other DNA
ttgcatcaagaaagcttgaaaaagtacaagagtccattatctaccgaaagtcattacttgagaaaagccctgatg

SEQ ID NO: 62158 - DNA, 75 bp, synthetic construct
  source 1..75: mol_type = other DNA
attcactgcattctcaggggtcggcaagcagtatgtggatgcgtcatgtcggagggcacgaacgttcaagggccg

SEQ ID NO: 62159 - DNA, 75 bp, synthetic construct
  source 1..75: mol_type = other DNA
ctggaagcggcccgcgaaatggggctggtgctgcgctacgtggcgcgtttcgatgccaatggcaaagcgcgtgtg

SEQ ID NO: 62160 - DNA, 75 bp, synthetic construct
  source 1..75: mol_type = other DNA
cgctgtataactggtttgataacagcgtcagttccgataaccgttctgctgacgactatgattctcgcggtgtga

SEQ ID NO: 62161 - DNA, 75 bp, synthetic construct
  source 1..75: mol_type = other DNA
gagacatttggctattgtctctgtttattatcttctgttatgtgtttttttcacttggctcgatcgtttagaaga

SEQ ID NO: 62162 - DNA, 75 bp, synthetic construct
  source 1..75: mol_type = other DNA
ctggtcaccaacgactgaacatccagctatcgctattcagcgtaaagaacacgatgaaagaattaagcttgagca

SEQ ID NO: 62163 - DNA, 75 bp, synthetic construct
  source 1..75: mol_type = other DNA
gaaagcaaaacgcgacgcagctcgacaacgcaaaaaagaatattacgcacattcacctacccccattccggcatg

SEQ ID NO: 62164 - DNA, 75 bp, synthetic construct
  source 1..75: mol_type = other DNA
accgtcgtctggtcatcctgcgttccctgatggactgcaataacgaagccaacgaatccatccttcaggactgtc

SEQ ID NO: 62165 - DNA, 75 bp, synthetic construct
  source 1..75: mol_type = other DNA
caacaacttttcttggtgatgcgtatattgatacacaaacgcttgaaattaatatgacaggcggtgctgcctcaa

SEQ ID NO: 62166 - DNA, 75 bp, synthetic construct
  source 1..75: mol_type = other DNA
atgagtgatttcattactgaagatcagcgtctggtcattctgcggtcgctggcagattacaacggtgaactgggt

SEQ ID NO: 62167 - DNA, 75 bp, synthetic construct
  source 1..75: mol_type = other DNA
aggcacaccaccacaaatgatgtctttattcatcgtaaacatactaaatctattatttcatcaaaatccatatga

SEQ ID NO: 62168 - DNA, 75 bp, synthetic construct
  source 1..75: mol_type = other DNA
tggctacgtgaacagggactcgtcaccctgtcagatgtctccgggtgttacgtcgccggcatcacaggacgcggt

SEQ ID NO: 62169 - DNA, 75 bp, synthetic construct
  source 1..75: mol_type = other DNA
attaccgtctatgaaggctccagaccaggtacgctgaatgattttctcggtgccatgacggaagatgatgtcatg

SEQ ID NO: 62170 - DNA, 75 bp, synthetic construct
  source 1..75: mol_type = other DNA
tgctgcaattttgctacacctcagaagtggccgacagtgcgctgaaaatcctcgacgaagcgggattacctggcg

SEQ ID NO: 62171 - DNA, 75 bp, synthetic construct
  source 1..75: mol_type = other DNA
gactggctggcagagcagcaactggtcaccgtggaaaacctgcgcggcttttatgtcgtaacgctgacctcccgt

SEQ ID NO: 62172 - DNA, 75 bp, synthetic construct
  source 1..75: mol_type = other DNA
aagacgttccaaaagttcttcaaagtatccctgaagggttccggttaattgatgtcagacaagcattaaggggtt

SEQ ID NO: 62173 - DNA, 75 bp, synthetic construct
  source 1..75: mol_type = other DNA
actaacgcaaagtccagccagacggcagcgaagaccagcgaaacgaatgccaaagccagcgaaactgcggcgaaa

SEQ ID NO: 62174 - DNA, 75 bp, synthetic construct
  source 1..75: mol_type = other DNA
tgaaggtgtattctggaccgcgaatcagctcttcggtattaagtttgtcgaacgttttgatattcctgtctacca

SEQ ID NO: 62175 - DNA, 75 bp, synthetic construct
  source 1..75: mol_type = other DNA
ttgcccgcgcgtgaagccacggaaaaatcaatgggcgagatttctggcgcactggttgccattgcgctggtgttg

SEQ ID NO: 62176 - DNA, 75 bp, synthetic construct
  source 1..75: mol_type = other DNA
tatagggactgccgctgcacaaacattaataactatcgtccattggtttataatacaaagttcattgaagacaac

SEQ ID NO: 62177 - DNA, 75 bp, synthetic construct
  source 1..75: mol_type = other DNA
tatccagcactgccaccgtggtgcttaccgtggataacaccatggtgatggccacagtggattacgtggatgaca

SEQ ID NO: 62178 - DNA, 75 bp, synthetic construct
  source 1..75: mol_type = other DNA
gggaagcttcacgccgctcctgagaatcgaaacagagaatggtgaacaggcgaaggcgcggcaccgtagcctggc

SEQ ID NO: 62179 - DNA, 75 bp, synthetic construct
  source 1..75: mol_type = other DNA
ggccttgtgattggcttaatgctggattccattggtccggcggcgaaagcgatggcggaaaatttcgacctgaat

SEQ ID NO: 62180 - DNA, 75 bp, synthetic construct
  source 1..75: mol_type = other DNA
acaggagcgcattcgctttatctggaataacgaagcacgcacgctgaaaaactggcatcacgacacggggaaata

SEQ ID NO: 62181 - DNA, 75 bp, synthetic construct
  source 1..75: mol_type = other DNA
gatatgactctcggttggatcgtctggcaacaacgagctggcattcatttttcaacaatatcacagcaagaggtg

SEQ ID NO: 62182 - DNA, 75 bp, synthetic construct
  source 1..75: mol_type = other DNA
gatgtcacaggtgatgaaaaatatgtgaccatttcatgccgtgtaagaagtgatgttgaaaatataaggtgtcgt

SEQ ID NO: 62183 - DNA, 75 bp, synthetic construct
  source 1..75: mol_type = other DNA
tggcggcgctgctcgacagcggtattaacgatgcggtgtatgcggaagtggtgggccacggtgaagtgtggtcgg

SEQ ID NO: 62184 - DNA, 75 bp, synthetic construct
  source 1..75: mol_type = other DNA
ccgggcaaggctggcggatgctggtggagtgcctctcggtaggccgcggcatcaccctgccttccaactcaaccg

SEQ ID NO: 62185 - DNA, 75 bp, synthetic construct
  source 1..75: mol_type = other DNA
cagaacgaaagaaagttgaaacccggctaaaaattatacttggtgcggaagtagctaaggctatgaactgtagtg

SEQ ID NO: 62186 - DNA, 75 bp, synthetic construct
  source 1..75: mol_type = other DNA
gtcacccgtaacccgctgcattgccaccgcttctggcagcaactgaaaggccagccggtcgaatttacctggcag

SEQ ID NO: 62187 - DNA, 75 bp, synthetic construct
  source 1..75: mol_type = other DNA
tattacttccgtacagggattatcatgaccctgcctgtgctgtttgtgacgctggctgcgctggcgctacgtctc

SEQ ID NO: 62188 - DNA, 75 bp, synthetic construct
  source 1..75: mol_type = other DNA
aacattttcccgagtattgataccggtgtttgcgccgcatcagtacgtaagtttaaccaactggcaaccgagatc

SEQ ID NO: 62189 - DNA, 75 bp, synthetic construct
  source 1..75: mol_type = other DNA
acaccgccgcaccccgccgtacatgttcaccgaggaggtggcgctcgcggccatgcgcgctcacgctgccggtga

SEQ ID NO: 62190 - DNA, 75 bp, synthetic construct
  source 1..75: mol_type = other DNA
cacggtggacgaggcggaaaagttatcggttttatgatgccaaaagtttctggtaaagaaccgattcatatgatc

SEQ ID NO: 62191 - DNA, 75 bp, synthetic construct
  source 1..75: mol_type = other DNA
aatcaacgttaaaggcgacctctatatcgacgatcaccacaccgtcgaagataccggcctggcgctgggcgaagc

SEQ ID NO: 62192 - DNA, 75 bp, synthetic construct
  source 1..75: mol_type = other DNA
atggtgtggcgtgtggtttgccgtgcaggtatgatcctgttcgcaatcgcatgttatgccactgagtcaatggta

SEQ ID NO: 62193 - DNA, 75 bp, synthetic construct
  source 1..75: mol_type = other DNA
cgttgggttcatcagccggcgtaagtaagatgctgtcgctaaaaaatttctttagcggagctgagatactgttaa

SEQ ID NO: 62194 - DNA, 75 bp, synthetic construct
  source 1..75: mol_type = other DNA
ctcgcagttagggggcgatctgttaaccggtggttttaccgatagtgacagttggcgtttgggagtgatggctgg

SEQ ID NO: 62195 - DNA, 75 bp, synthetic construct
  source 1..75: mol_type = other DNA
atgcataatcatgaagcgcatgtacccgtagtgcttaatgtgccagatgatttcaccggacgcgtactggtttac

SEQ ID NO: 62196 - DNA, 75 bp, synthetic construct
  source 1..75: mol_type = other DNA
ttgcgcatcggaaaatgaaatcgcagatgttgatgataccgtttatgagcaggcatacaggaacaccggtgagga

SEQ ID NO: 62197 - DNA, 75 bp, synthetic construct
  source 1..75: mol_type = other DNA
aagcggagcactaacctttgaggctgtagcaagaaattggcatgcatcctgtagcaaaaaatggtctgagtccca

SEQ ID NO: 62198 - DNA, 75 bp, synthetic construct
  source 1..75: mol_type = other DNA
ccatgaaagtcatcgcctgcattgaagaccctatagtgatcaagcagatccttgatcacctgaagcacaaagccg

SEQ ID NO: 62199 - DNA, 75 bp, synthetic construct
  source 1..75: mol_type = other DNA
tctccctgtaaatgtgacgctgataaccgatcagcctgattctgaaatcagatctgcttttgtttctgcatggga

SEQ ID NO: 62200 - DNA, 75 bp, synthetic construct
  source 1..75: mol_type = other DNA
cccgcagcaggcctgctgtgacagcacttccggagcagaaactgctggcaccacgcccgctgtttaccgctgccc

SEQ ID NO: 62201 - DNA, 75 bp, synthetic construct
  source 1..75: mol_type = other DNA
atgaaaaaaagaaattttagcgcagagtttaaacgcgaatccgctcaactggttgttgaccagaaatacacggtg

SEQ ID NO: 62202 - DNA, 75 bp, synthetic construct
  source 1..75: mol_type = other DNA
attgaccacagtaaaacgccaacatcgccctgcgctggatctttcacgcctgcctgaacttctgtcgcgcattga

SEQ ID NO: 62203 - DNA, 75 bp, synthetic construct
  source 1..75: mol_type = other DNA
actgctggggcgcaccaaatccggcactctggtactgactgaggacaacaccgggctacgttttgaactgacacc

SEQ ID NO: 62204 - DNA, 75 bp, synthetic construct
  source 1..75: mol_type = other DNA
tactcatatcgacaggccagtgaagcgatgaatgtcggttcaaccacgcttgagagctgggtacgccagctcagg

SEQ ID NO: 62205 - DNA, 75 bp, synthetic construct
  source 1..75: mol_type = other DNA
ttgtccgcacctgcccgccgatgagtgcgactgccgtaagccgaaagtaaaactggtggagcgttatctggctga

SEQ ID NO: 62206 - DNA, 75 bp, synthetic construct
  source 1..75: mol_type = other DNA
cgttaacagaagtgcaaaggattcagagctttatgatgcggttcgatttagctggcgcatcaatgcctcgcgcgc

SEQ ID NO: 62207 - DNA, 75 bp, synthetic construct
  source 1..75: mol_type = other DNA
ttcgctttcaggataaacgaaatctgatatacatttatgctattggacttattctgataggcttttattggaaaa

SEQ ID NO: 62208 - DNA, 75 bp, synthetic construct
  source 1..75: mol_type = other DNA
cgcggtatttgccgctttggttttgtgctgccgatggacgaatgccttgcccgctgcgcgctggatatctctggt

SEQ ID NO: 62209 - DNA, 75 bp, synthetic construct
  source 1..75: mol_type = other DNA
atcagtggggactacgaattggtattcataggcgatcaccagcccgatagaccaatgagtgagaacactgttaac

SEQ ID NO: 62210 - DNA, 75 bp, synthetic construct
  source 1..75: mol_type = other DNA
tggatttgtgcgttcgctggatcttggcgtcaatggcgagccgccgctttctctggtggtggatgattgtggcat

SEQ ID NO: 62211 - DNA, 75 bp, synthetic construct
  source 1..75: mol_type = other DNA
gccggggctggagataaaagttcagggcgacgacgcgcctgcggtgttccgcaagggcgtactgattaccggcgt

SEQ ID NO: 62212 - DNA, 75 bp, synthetic construct
  source 1..75: mol_type = other DNA
cggaaggggcaacagcgtggtgcgcagaatatgatgaatggggcaacctgctgaatgaagagaacccgcatcagc

SEQ ID NO: 62213 - DNA, 75 bp, synthetic construct
  source 1..75: mol_type = other DNA
gcaattacagcgcaaccatcagcaacagcgtaatggctatttatgggcgccaggcttaacgctgtggaagtcagc

SEQ ID NO: 62214 - DNA, 75 bp, synthetic construct
  source 1..75: mol_type = other DNA
gatcgtactttcatccagggaaccattgtcagatgcaaagcccgaatacggagctatgcacaattattcttcact

SEQ ID NO: 62215 - DNA, 75 bp, synthetic construct
  source 1..75: mol_type = other DNA
tattttccttctggatgaatatgtagataaaggcgtaatgaccagggcacaagctgactttatttgtcgagcaat

SEQ ID NO: 62216 - DNA, 75 bp, synthetic construct
  source 1..75: mol_type = other DNA
ttgacgcctggaacaccggacacgaaggcggcgcggcctcacttcacgctaacaacacactttcggctctcacgc

SEQ ID NO: 62217 - DNA, 75 bp, synthetic construct
  source 1..75: mol_type = other DNA
gtaatatacctgtgctggcaaccacggaagtgttagttgttggtggtggtccatcgggtattgccgcagcaatga

SEQ ID NO: 62218 - DNA, 75 bp, synthetic construct
  source 1..75: mol_type = other DNA
tgcagccagagagtatgcaagccaggcagcagagccgtataaatatgtcttacagccactgcctgatgtgtggat

SEQ ID NO: 62219 - DNA, 75 bp, synthetic construct
  source 1..75: mol_type = other DNA
gtgctcgcaacattgctgaactaggcacccgcgatctgttaattcctattaaggccgtggagaaatccggacgtc

SEQ ID NO: 62220 - DNA, 75 bp, synthetic construct
  source 1..75: mol_type = other DNA
atgcgataatcacctacgcgccttcagcgctatatcagaataatgtcggcgttaccattgccgcagatcaccctg

SEQ ID NO: 62221 - DNA, 75 bp, synthetic construct
  source 1..75: mol_type = other DNA
gtgcgcggcgatattttgaattcaatgatccccattgagcgtaatggtgaaatcctcggctatatctgggccaat

SEQ ID NO: 62222 - DNA, 75 bp, synthetic construct
  source 1..75: mol_type = other DNA
aggtattgataacgaaactcatgaatttatgaatgatgatgatgctgctttcctgacagagtttgacaaagtcgt

SEQ ID NO: 62223 - DNA, 75 bp, synthetic construct
  source 1..75: mol_type = other DNA
tgatgagtcagaacgttcagacatcgttctggttgtcgatcagacatttaatgatatgtcagtgacgtatggcaa

SEQ ID NO: 62224 - DNA, 75 bp, synthetic construct
  source 1..75: mol_type = other DNA
aagcgcacagcacgcgccccgcgtgtttttttgtgccgcatagtcacaccttatcaatggtgggctgtacggggg

SEQ ID NO: 62225 - DNA, 75 bp, synthetic construct
  source 1..75: mol_type = other DNA
agggcaataatttactcggcgtaataacagagagtaaatctggtcgtcaggctattttggcaaatgtcattattg

SEQ ID NO: 62226 - DNA, 75 bp, synthetic construct
  source 1..75: mol_type = other DNA
aacgcagtattggtcaccaggatcccggcgcgacctcggtgatgtttatgatgcaaatgttggcgttagccgcaa

SEQ ID NO: 62227 - DNA, 75 bp, synthetic construct
  source 1..75: mol_type = other DNA
atcaagattggcgctactgcggtagcttaccgtctctccgaagttcaggcatggattaggggggaatggcggaca

SEQ ID NO: 62228 - DNA, 75 bp, synthetic construct
  source 1..75: mol_type = other DNA
tggaactgctcacagtgtgcgatcgagtactatggtgaacgctattgtctgacctgtcgcactggagacttcagc

SEQ ID NO: 62229 - DNA, 75 bp, synthetic construct
  source 1..75: mol_type = other DNA
gcggcagtgcactcagataccacccgcaatacgacactgagcgtccctggtttgaacacactgacgacgggctga

SEQ ID NO: 62230 - DNA, 75 bp, synthetic construct
  source 1..75: mol_type = other DNA
acccggagtgaaacattcgcaccgtggttcgaaaatgcgaactccacaccttgttcctttgagttgtcaggcatt

SEQ ID NO: 62231 - DNA, 75 bp, synthetic construct
  source 1..75: mol_type = other DNA
attcttaaatatgcaggtctgacctctgcatttattgccggtgtggcccctgatggtgaagccctgcctcagccc

SEQ ID NO: 62232 - DNA, 75 bp, synthetic construct
  source 1..75: mol_type = other DNA
aaacttcacaattcacgatttcaggcgtaccgcccgcacccatttagcggcgttgggtgtcgatcccgtagtcgc

SEQ ID NO: 62233 - DNA, 75 bp, synthetic construct
  source 1..75: mol_type = other DNA
cacacgacccggcatacccggatgaacagccgactgcgccgctggcgcgctacacgtacacggccggtggtgaac

SEQ ID NO: 62234 - DNA, 75 bp, synthetic construct
  source 1..75: mol_type = other DNA
gcaatacgacaccgaacggccctggtttgaacacactgacgatgggctgacggagcacgcgcagcaatgtcctta

SEQ ID NO: 62235 - DNA, 75 bp, synthetic construct
  source 1..75: mol_type = other DNA
tacgcagtgacagcaccagtgctgctctgggctggttctgggcagtttactctattggtatcggcgtattcggca

SEQ ID NO: 62236 - DNA, 75 bp, synthetic construct
  source 1..75: mol_type = other DNA
tatacaagtgacctatcttctcccgggcgagcatcatcattaaaagatgcacaaataacattatcagcttgtcag

SEQ ID NO: 62237 - DNA, 75 bp, synthetic construct
  source 1..75: mol_type = other DNA
tttcgcaactggtaaagcgttctgcgctcgccgacaacgcggctattgtgttgtggcaagcgcagactcaacgtg

SEQ ID NO: 62238 - DNA, 75 bp, synthetic construct
  source 1..75: mol_type = other DNA
cagtcatagtgctgtgtttaacggtgctgggatttacgcttctggtcggagactcgctgtgtgagtttacggtga

SEQ ID NO: 62239 - DNA, 75 bp, synthetic construct
  source 1..75: mol_type = other DNA
tactgggaaggtaagctggagcaagaatacgaagtgcagatgattttaaaaactaccgtatctcaccagcaggca

SEQ ID NO: 62240 - DNA, 75 bp, synthetic construct
  source 1..75: mol_type = other DNA
tcaacgcacgtgaaagtgccttgtgggaaacagcggtgaatacgcttaaaacgaccacacgggaagagcgacgaa

SEQ ID NO: 62241 - DNA, 75 bp, synthetic construct
  source 1..75: mol_type = other DNA
tcagaaaatgaggactatgacgaaaaggccatgcgcattgatatgggtaatatcggtttgttactggcaatgctt

SEQ ID NO: 62242 - DNA, 75 bp, synthetic construct
  source 1..75: mol_type = other DNA
taatgcttattataaaaatacaggcaccgcagggggggtgaaaattgagttggttgataaagctagtccaagtgt

SEQ ID NO: 62243 - DNA, 75 bp, synthetic construct
  source 1..75: mol_type = other DNA
tttgactccgttgctgaacaaaccgggatgttttccggagatggcggcttcgatatcacggtcggcaaccacacc

SEQ ID NO: 62244 - DNA, 75 bp, synthetic construct
  source 1..75: mol_type = other DNA
ttttgaggcgctgagctctcaggttgagcagctcggtcagcagtgtctgactgcgtttctctgtgcggggaaatc

SEQ ID NO: 62245 - DNA, 75 bp, synthetic construct
  source 1..75: mol_type = other DNA
atcaccctgggcgttcaggcaggttatgtccacagcgtcagcggcagcagcgctgaaggctataacggtcaggcc

SEQ ID NO: 62246 - DNA, 75 bp, synthetic construct
  source 1..75: mol_type = other DNA
ggtcaacaaaaactggccaccgagttaaagtttttccagtatcgattttccgattcgtttgggggttacccaccg

SEQ ID NO: 62247 - DNA, 75 bp, synthetic construct
  source 1..75: mol_type = other DNA
gtcagagcatcacccttcagcaggtggttcagcggatcacggaaagctgccatattccggtacggatcacacctg

SEQ ID NO: 62248 - DNA, 75 bp, synthetic construct
  source 1..75: mol_type = other DNA
ggcgcttatcagcccggaaggggaaacggcgtggtgcggggagtatgacgaatggggaaacctgctgggcgaaac

SEQ ID NO: 62249 - DNA, 75 bp, synthetic construct
  source 1..75: mol_type = other DNA
gtctatctggcagcacagtatacccagacatataatgccacacttgccggcaacctgggctgggcaaacaaagcc

SEQ ID NO: 62250 - DNA, 75 bp, synthetic construct
  source 1..75: mol_type = other DNA
ggcgctgatatacccgataagggacgcttcctgaacaacattaacgcggtcagtaaaacagactttgctgataag

SEQ ID NO: 62251 - DNA, 75 bp, synthetic construct
  source 1..75: mol_type = other DNA
ggaagatttgggaatgtaaaatttcaggcgctctctaaaaatattggattagccagcgcccaaaacatgggcatc

SEQ ID NO: 62252 - DNA, 75 bp, synthetic construct
  source 1..75: mol_type = other DNA
cacagaactccgccgtcaccaaaaacatgacgccggtgcccatgcaggtggccagccagcagggctatatcgaag

SEQ ID NO: 62253 - DNA, 75 bp, synthetic construct
  source 1..75: mol_type = other DNA
cagcggcaccgcctcctcctcatccggcagcagtaccggcagtaacgccggcaccctcagcggggaggccagcaa

SEQ ID NO: 62254 - DNA, 75 bp, synthetic construct
  source 1..75: mol_type = other DNA
atgactgcagagcaggtcaaagcccatttccgccgcaacggaatcacctttacccagtgggcaaaacagaacaac

SEQ ID NO: 62255 - DNA, 75 bp, synthetic construct
  source 1..75: mol_type = other DNA
atgactgcagaccaggtcaaagctcatttccgtcgcaatgggatcacttttacccagtgggcaaaacagaacaac

SEQ ID NO: 62256 - DNA, 75 bp, synthetic construct
  source 1..75: mol_type = other DNA
tctgccgcatggcacggcgattgacctgccagacgttgaaacatcacccacggcggagaccctgaacctatggga

SEQ ID NO: 62257 - DNA, 75 bp, synthetic construct
  source 1..75: mol_type = other DNA
gctgccgcacggcaccgccgtcgaactgcccgacgttcagaccgcgcccgtggctgaaactgtcaatctgtggga

SEQ ID NO: 62258 - DNA, 75 bp, synthetic construct
  source 1..75: mol_type = other DNA
atagcatttttactaagatcaatacaaggattcctcgagacacaatgcccatccttcgtcgttatcacctatggc

SEQ ID NO: 62259 - DNA, 75 bp, synthetic construct
  source 1..75: mol_type = other DNA
cctggttgattaaattctgggcacccatccctgcggtcatcgcggcgggtattctctccacttactattttggca

SEQ ID NO: 62260 - DNA, 75 bp, synthetic construct
  source 1..75: mol_type = other DNA
ctcccggcaaatgggtatctgaagagcagttaattgcgctgaaaggaataaaaaaaggaacactgaaaaaagcca

SEQ ID NO: 62261 - DNA, 75 bp, synthetic construct
  source 1..75: mol_type = other DNA
tccatgagtctctccgacaaaccggttattgagaattatgagagcggtggaagtaaagcccagctgccgaatgtg

SEQ ID NO: 62262 - DNA, 75 bp, synthetic construct
  source 1..75: mol_type = other DNA
attctgcaatttcgggacgttacactgtctccgcaccttataaagcgggtgccgggattggcgtcctgaaattgt

SEQ ID NO: 62263 - DNA, 75 bp, synthetic construct
  source 1..75: mol_type = other DNA
ggcaggcgctggaaaaagtggccgccacgggagactgccggcaggtggctcagggactgctggacggcaccgggg

SEQ ID NO: 62264 - DNA, 75 bp, synthetic construct
  source 1..75: mol_type = other DNA
aatggctgggtgagtaatgagtccagtccgttgcagtcctccctgctggtcagtgaacgcatggcgttcaagctg

SEQ ID NO: 62265 - DNA, 75 bp, synthetic construct
  source 1..75: mol_type = other DNA
ctggatatacaacgccagaacccgggcggcttataatccgttgtacgaccttatgtaccgggccggagtaccgtt

SEQ ID NO: 62266 - DNA, 75 bp, synthetic construct
  source 1..75: mol_type = other DNA
atatgctgaaccaccgtgaagcgcagtcgctctgttgtgaggacgggcgtgtggaactggacaataatatcgcag

SEQ ID NO: 62267 - DNA, 75 bp, synthetic construct
  source 1..75: mol_type = other DNA
ttggcgcatccgttggtggtcctgttggcgctgttgctggtgcagtaattggcggcattgctggttctttgtttt

SEQ ID NO: 62268 - DNA, 75 bp, synthetic construct
  source 1..75: mol_type = other DNA
ataaatacctggtggctgttctgaccggagtccgggcagatgagtccctcaaccgctttatgggactggtatccc

SEQ ID NO: 62269 - DNA, 75 bp, synthetic construct
  source 1..75: mol_type = other DNA
acgtgattaacgccaccgaaaaaggcgcggatctgcaaatttccggcaccagtaatcagccagcaggcaccacaa

SEQ ID NO: 62270 - DNA, 75 bp, synthetic construct
  source 1..75: mol_type = other DNA
gtgcatataattgtcttaagtcatatgcttactacgaaaacttaaattttttcctaaaggaagaaatcgctcaat

SEQ ID NO: 62271 - DNA, 75 bp, synthetic construct
  source 1..75: mol_type = other DNA
agacattaagattattttatggtgctcatacctgtattgccaccagtagcggcaccgatgcgttaaaaatagctc

SEQ ID NO: 62272 - DNA, 75 bp, synthetic construct
  source 1..75: mol_type = other DNA
cagggcgcttgaattaaaaacggtactggatgaattaaccgaaaataacaccgagcgggggggtatttactttct

SEQ ID NO: 62273 - DNA, 75 bp, synthetic construct
  source 1..75: mol_type = other DNA
ctcgatacagaatccttaatttgcactgtgaaaatgagatcgcaacaaaaagcaaccttttcacgacgagatatt

SEQ ID NO: 62274 - DNA, 75 bp, synthetic construct
  source 1..75: mol_type = other DNA
caccacgccgggcgtggaaattggtcgtcgccacttcccgctgaacgtaccgttccagaacggaccgacgcgcgg

SEQ ID NO: 62275 - DNA, 75 bp, synthetic construct
  source 1..75: mol_type = other DNA
gcactccacttctaaaatctattcattttagaatgacagccatattaccgccaagaatcgttaaatttaatgtgc

SEQ ID NO: 62276 - DNA, 75 bp, synthetic construct
  source 1..75: mol_type = other DNA
tgtcccagcgcaaactgagatatgccgatgataagccttggaccacggcatcgcctgaagggttttactacacta

SEQ ID NO: 62277 - DNA, 75 bp, synthetic construct
  source 1..75: mol_type = other DNA
tatcaatatcgaggctttacatcaatggcgatgatacagaagaaccaaaagttattttaaccgttaaggataaaa

SEQ ID NO: 62278 - DNA, 75 bp, synthetic construct
  source 1..75: mol_type = other DNA
aattagccaatatttttaataaaaaacataaagaacacatggatgatcctctattccatctaatccgaagcaata

SEQ ID NO: 62279 - DNA, 75 bp, synthetic construct
  source 1..75: mol_type = other DNA
ccagtcgtgtaatggccatcgcctttatatttatgtcagtgcttattgttctcagcctctctgttaacctcattc

SEQ ID NO: 62280 - DNA, 75 bp, synthetic construct
  source 1..75: mol_type = other DNA
gtgggagtaacaaccaaaaactggtccaagacatttactggtcactgggttgcaatgaaacacatttttcatcgg

SEQ ID NO: 62281 - DNA, 75 bp, synthetic construct
  source 1..75: mol_type = other DNA
acccagttacggctacccgtttatgctggcttcgcaggtggtttattcgctcaacgcccgcacgggtctttccgt

SEQ ID NO: 62282 - DNA, 75 bp, synthetic construct
  source 1..75: mol_type = other DNA
gcgttctgaggaagtcttacctgactcaccgtctgcaaatgcgattgatgatgtacttcaacaagtgaaaaaaca

SEQ ID NO: 62283 - DNA, 75 bp, synthetic construct
  source 1..75: mol_type = other DNA
tcgcagggatgattgcactggcaatttcacacaccgctatggctgacgatattaaagtcgccgttgtcggcgcga

SEQ ID NO: 62284 - DNA, 75 bp, synthetic construct
  source 1..75: mol_type = other DNA
gtgatgccggaaagaacggcagaacattaccgtaacaagatagctatctacctgcgctggtatcagacccgggga

SEQ ID NO: 62285 - DNA, 75 bp, synthetic construct
  source 1..75: mol_type = other DNA
acgctgagcctggtgtactggaacagacggcccgagcttacattgaatcacatggtgccattgaacgtcatcttg

SEQ ID NO: 62286 - DNA, 75 bp, synthetic construct
  source 1..75: mol_type = other DNA
gcggattatcttgctttattggctaatggaatcgaccctcaaattcaggccaaagttgcagaggaacaacagcaa

SEQ ID NO: 62287 - DNA, 75 bp, synthetic construct
  source 1..75: mol_type = other DNA
attttgatattgccgatgagtacgcgaccgaatgcgcagagcctgtcgcagacgctgaacgcacaccgctggccc

SEQ ID NO: 62288 - DNA, 75 bp, synthetic construct
  source 1..75: mol_type = other DNA
gttgtcatcaccatttttgcatactcctttcattattcgaaatatcttcgtaacaaatgagcagtatgtaaatgc

SEQ ID NO: 62289 - DNA, 75 bp, synthetic construct
  source 1..75: mol_type = other DNA
ataaacaatggacacaatcacacagcgataaagtactcaaaagcctcgagacgcatgttttcccttttatcggca

SEQ ID NO: 62290 - DNA, 75 bp, synthetic construct
  source 1..75: mol_type = other DNA
aacgggcctgccgcgatgcattgcgcgccattaaaaaggagaatgttggcgaattttctctgcggggcgtttgtg

SEQ ID NO: 62291 - DNA, 75 bp, synthetic construct
  source 1..75: mol_type = other DNA
aaagtggccgccacgggggactgccggcaggtggcccgggcgttgctgaataaccccggagataaacaaaaatga

SEQ ID NO: 62292 - DNA, 75 bp, synthetic construct
  source 1..75: mol_type = other DNA
tcaccgtgacgctgaataatgtggattacaccacggtggtggatggttccggcaactggagtctgggcgttccgg

SEQ ID NO: 62293 - DNA, 75 bp, synthetic construct
  source 1..75: mol_type = other DNA
tgtctcagcgcaaactgagatatgccgatgataagccctggaccacggcatcgcctgaaggcttttattacacca

SEQ ID NO: 62294 - DNA, 75 bp, synthetic construct
  source 1..75: mol_type = other DNA
aaattcttaccggagaaaatgttctgcgtgcagcaaccgcccgcattgagtggatttttgaaacttttcagtctg

SEQ ID NO: 62295 - DNA, 75 bp, synthetic construct
  source 1..75: mol_type = other DNA
gaatggaattactttttatctccgatcgggttcatccggtattaagaataattgttgtcctgggaatgttattcc

SEQ ID NO: 62296 - DNA, 75 bp, synthetic construct
  source 1..75: mol_type = other DNA
tctgccattgctaagattacgtactatagacagtgatatagaagggaagttgggcgcgtttttgtcaggcctgtc

SEQ ID NO: 62297 - DNA, 75 bp, synthetic construct
  source 1..75: mol_type = other DNA
gggatattccgtcctggcgacgtatctgtaagacactcataaagaatgatttctggtgccggaccctctccttca

SEQ ID NO: 62298 - DNA, 75 bp, synthetic construct
  source 1..75: mol_type = other DNA
gtacagctgttcctctgtcacaactgcgcgaactgggtcagttgctgattcagatccatggtcagcacgctcatc

SEQ ID NO: 62299 - DNA, 75 bp, synthetic construct
  source 1..75: mol_type = other DNA
attgctggcgattaaggcaatctttggtgatgatttgccagacaatagcttgtttactgcaaaagtgacggaagc

SEQ ID NO: 62300 - DNA, 75 bp, synthetic construct
  source 1..75: mol_type = other DNA
gcgtatcgcacgcgtccattactggttgttctgcctaagcaaatggaacaggtgacagcgattctggctgtctgc

SEQ ID NO: 62301 - DNA, 75 bp, synthetic construct
  source 1..75: mol_type = other DNA
atgattgcttttgtggcatatttctggcttttttcatttctgacaggatattacaaaccgcagtttaagaaagaa

SEQ ID NO: 62302 - DNA, 75 bp, synthetic construct
  source 1..75: mol_type = other DNA
gccgctgaatgatgccctgtaccgttatgtgatgaatacccgcaagcttcacactgacgacacaccggtaaaggt

SEQ ID NO: 62303 - DNA, 75 bp, synthetic construct
  source 1..75: mol_type = other DNA
aggaatttgacgctcagggcgtggcagtccggttcattgatgacgggatcagtaccgacggtgatatggggcaaa

SEQ ID NO: 62304 - DNA, 75 bp, synthetic construct
  source 1..75: mol_type = other DNA
tggtgttctgctcagtaaccgggagtttactgaagatgccattaatatgaggaaatatgagccttatctgctcaa

SEQ ID NO: 62305 - DNA, 75 bp, synthetic construct
  source 1..75: mol_type = other DNA
ttggttgtatctgcctgatggcgatagtggcggtgatggaagaacgcaaaatccgccgcgagaaaaaaattcagc

SEQ ID NO: 62306 - DNA, 75 bp, synthetic construct
  source 1..75: mol_type = other DNA
ctggtggcttgggggttacccagatgttgggcggattgggggcattatcgctcagtgctaatgtgtcaaaggcca

SEQ ID NO: 62307 - DNA, 75 bp, synthetic construct
  source 1..75: mol_type = other DNA
gccaagagtttctctgccagaactgatctacagttactgacataccgttatcagagtaaagggtatgtggagttt

SEQ ID NO: 62308 - DNA, 75 bp, synthetic construct
  source 1..75: mol_type = other DNA
gtgccctggctgaaatggagcgtgaactgattgttgaacgaacaaaagctggactggaagctgctcgcgcacagg

SEQ ID NO: 62309 - DNA, 75 bp, synthetic construct
  source 1..75: mol_type = other DNA
tgatgagaacggagttgaggtttttgacgagaaagccttagttgaagaggaacccagtgataacgatttggctga

SEQ ID NO: 62310 - DNA, 75 bp, synthetic construct
  source 1..75: mol_type = other DNA
cagggcttctaaccaccaacgataacgagagtatcgaggtagctatgagaaatcataccacacacccgcaagggc

SEQ ID NO: 62311 - DNA, 75 bp, synthetic construct
  source 1..75: mol_type = other DNA
actgatagttgaacgtaccagggcggggctggctgcagctcgtgctaagggcagagtaggtggacgccgtcctaa

SEQ ID NO: 62312 - DNA, 75 bp, synthetic construct
  source 1..75: mol_type = other DNA
gaaacagaattgatttgttgttaaacttcatgatactgaaagtcaaaccattgatgattccggagagaaggctgg

SEQ ID NO: 62313 - DNA, 75 bp, synthetic construct
  source 1..75: mol_type = other DNA
atgaggttgttttatatcgggaaagcggctcgcaaatattcgcgggctcgtaggcatgataagacgcgccagcgt

SEQ ID NO: 62314 - DNA, 75 bp, synthetic construct
  source 1..75: mol_type = other DNA
atgcgtgatattcagatggttctggatcgttggggagcatgggcggcgagtgatagttctggagtagactattct

SEQ ID NO: 62315 - DNA, 75 bp, synthetic construct
  source 1..75: mol_type = other DNA
gtgtgcagattgctggcgaaatccctgccaatgcctttgcagtagttctagaaagcgatagtatgtctgccgctg

SEQ ID NO: 62316 - DNA, 75 bp, synthetic construct
  source 1..75: mol_type = other DNA
tcggtaaaagctcagaaaaacttcgcgctaaaaccgaacggcagatacaggaagcacaggagcgaatcagcgcac

SEQ ID NO: 62317 - DNA, 75 bp, synthetic construct
  source 1..75: mol_type = other DNA
acacaagatggtgaaaaactaaaaggtggagttcacatgcgagtctatacggccttttgtagtggtgaggcagct

SEQ ID NO: 62318 - DNA, 75 bp, synthetic construct
  source 1..75: mol_type = other DNA
acccgggaggaggcccggcatctggaagcgtttctggcagagcacggtggctggaaggcatttttgtggaagcca

SEQ ID NO: 62319 - DNA, 75 bp, synthetic construct
  source 1..75: mol_type = other DNA
actgaggtttagttgcaaagatgatttttctcccgataatgtgattcaacaggttgagtgtctaagaaaattatc

SEQ ID NO: 62320 - DNA, 75 bp, synthetic construct
  source 1..75: mol_type = other DNA
aagaaaaaggttttttatatcgtttaacatcacgatatcgccattatgccgcatttgagcgagcgactttcgagc

SEQ ID NO: 62321 - DNA, 75 bp, synthetic construct
  source 1..75: mol_type = other DNA
acggcgtgaaaggcaaacaggcattagccgcactggaacgctacaaaggggccagaaacgccggaaaaacgccca

SEQ ID NO: 62322 - DNA, 75 bp, synthetic construct
  source 1..75: mol_type = other DNA
cgtcatagtgacggcactggtaacaaggaaagacctctgcgaggtacgaatccgaaccggccagacggaggtcgc

SEQ ID NO: 62323 - DNA, 75 bp, synthetic construct
  source 1..75: mol_type = other DNA
gcgtgaaggtggtgacgaattcagccaggcatggaagcaggaagtgaagatcagcaaagacggcaaggaaggtga

SEQ ID NO: 62324 - DNA, 75 bp, synthetic construct
  source 1..75: mol_type = other DNA
atggagaaaccggaaaccgcaatgaaagccatcacacgcaatcttgatcgcgaactctggcgtgacctgatgcaa

SEQ ID NO: 62325 - DNA, 75 bp, synthetic construct
  source 1..75: mol_type = other DNA
ggctccgcgcacatcacgttcagaaaaccggaactggttgatcggctaaatgacatcattgcgaagcattatccg

SEQ ID NO: 62326 - DNA, 75 bp, synthetic construct
  source 1..75: mol_type = other DNA
caaaacctgcgagctggcttgtaaagactacaaagatttgacgccagaagtcagcttccgccgcatttatgaata

SEQ ID NO: 62327 - DNA, 75 bp, synthetic construct
  source 1..75: mol_type = other DNA
acgctaatgatgggtggataattcctggtgcgtcgtggaaaccgtcacactggatgccgctaccagagcctccac

SEQ ID NO: 62328 - DNA, 75 bp, synthetic construct
  source 1..75: mol_type = other DNA
cgaatgccggataccaaaacagccgttcttgttgccgtggagtttgacaggaaaggtgactggcgaatgaaatgg

SEQ ID NO: 62329 - DNA, 75 bp, synthetic construct
  source 1..75: mol_type = other DNA
aaaagccgttacccggcgtggcaaacatcggaacacgcccaacggttgccggtattcgccagcagctggaagtgc

SEQ ID NO: 62330 - DNA, 75 bp, synthetic construct
  source 1..75: mol_type = other DNA
ggtgtgatcaacctcttcagagggctgagctggaattacaaaaccaattgcccctgtaaatttggcaataaaatt

SEQ ID NO: 62331 - DNA, 75 bp, synthetic construct
  source 1..75: mol_type = other DNA
ataaaactcgccctccacgcgtacagataacgtacgatgttgaaaccggagatgccgaaacagcgaaagagttac

SEQ ID NO: 62332 - DNA, 75 bp, synthetic construct
  source 1..75: mol_type = other DNA
gtcaccgacgctagggccaactctggggggctggatcactgataacctcgactggcgatggctattttatatcaa

SEQ ID NO: 62333 - DNA, 75 bp, synthetic construct
  source 1..75: mol_type = other DNA
gcggtgctgctgggcggcatggttggcgcgggtattgtgctggggcgtaacgcgctgcgtaattacaacgcgaag

SEQ ID NO: 62334 - DNA, 75 bp, synthetic construct
  source 1..75: mol_type = other DNA
tgagcacatttgaacaactgcaccagaacaaagatgaagtgtttgagcgaggggtgatcaacgtcttcaggggat

SEQ ID NO: 62335 - DNA, 75 bp, synthetic construct
  source 1..75: mol_type = other DNA
acgggagacggaaaacagtgtcgtttctccatggcaggactgaaggccaacacgaataaagttcaggaggttcgt

SEQ ID NO: 62336 - DNA, 75 bp, synthetic construct
  source 1..75: mol_type = other DNA
gtgttctgctgatgaacatgctggctgagccgacatctgtcagcgtggatacgggagacggaaaacagtgtcgtt

SEQ ID NO: 62337 - DNA, 75 bp, synthetic construct
  source 1..75: mol_type = other DNA
atgaagcagcaaaaagcgatgttaatcgctctgatcgtcatctgtttaaccgtcattgtgacggcactggtaacg

SEQ ID NO: 62338 - DNA, 75 bp, synthetic construct
  source 1..75: mol_type = other DNA
gggctggaagcggccagagccaaaggtcgtattggtggcagacgtcctaaactctccacgagtgagtgggagcag

SEQ ID NO: 62339 - DNA, 75 bp, synthetic construct
  source 1..75: mol_type = other DNA
acaaaaagttcaactgcagaactttgccaactggccgaaacactctctctccaccctatttcactttcccttctc

SEQ ID NO: 62340 - DNA, 75 bp, synthetic construct
  source 1..75: mol_type = other DNA
ataacaatacccaccaggcagcttggtactattttgttggaagcaaaacgtacaagtttaaataataaaggactg

SEQ ID NO: 62341 - DNA, 75 bp, synthetic construct
  source 1..75: mol_type = other DNA
agtttaaacgcgaatccgctcaactggttgttgaccagacatacacggtggcagatgccgccaaagctatggatg

SEQ ID NO: 62342 - DNA, 75 bp, synthetic construct
  source 1..75: mol_type = other DNA
gggctgaccgtcattctgttgagcgcgctaccgttcaggcgatacaatggctgacccgagcacccgatcgcttta

SEQ ID NO: 62343 - DNA, 75 bp, synthetic construct
  source 1..75: mol_type = other DNA
gttgaccaccgaacagtgggcacagattggacgtttactcgaggccggagaatcaagactgcgtattgcactgat

SEQ ID NO: 62344 - DNA, 75 bp, synthetic construct
  source 1..75: mol_type = other DNA
gcactgatttttgatgtgggcgtttctaccatttatagaaaatttccggtgaatgagagcaatgaatcgccctga

SEQ ID NO: 62345 - DNA, 75 bp, synthetic construct
  source 1..75: mol_type = other DNA
ggtgaagaaaattatgctttccgatttattagtctgatgtgtgaaaaagaaccggagttgaaaatagcgcagcaa

SEQ ID NO: 62346 - DNA, 75 bp, synthetic construct
  source 1..75: mol_type = other DNA
ccatcaaggaaacagccgtgattcatctgattttgatatctatgatattggtgtatccggactgggtattattat

SEQ ID NO: 62347 - DNA, 75 bp, synthetic construct
  source 1..75: mol_type = other DNA
tatgcccgcctgttccactggtattgacccgggcgaaaacattccggggaaagtggcagtatttacgggtaaggg

SEQ ID NO: 62348 - DNA, 75 bp, synthetic construct
  source 1..75: mol_type = other DNA
tatgccattccgtatacgttatatgcgcttgcagccgggtttcttgttacattttttttctgtccccaatgtacg

SEQ ID NO: 62349 - DNA, 75 bp, synthetic construct
  source 1..75: mol_type = other DNA
actttacttaacacgttacaacctggtggaaaatgcattatcactggtgattttcaaaaagaattagcgtactta

SEQ ID NO: 62350 - DNA, 75 bp, synthetic construct
  source 1..75: mol_type = other DNA
ggactggcagctgcacgcgaacagggacgcattggcggacgtcgcccgaagttgacaaaagaacaacatgagcaa

SEQ ID NO: 62351 - DNA, 75 bp, synthetic construct
  source 1..75: mol_type = other DNA
tcagcggcaggcccatccccgacaaccgggaaaatatcatcatccgtctggatgaccacattcagtccgttcagg

SEQ ID NO: 62352 - DNA, 75 bp, synthetic construct
  source 1..75: mol_type = other DNA
taatggtatgtggattcagatgcgcgataacaacgctatctttgggaaaaatatagttaacactgatagcgccca

SEQ ID NO: 62353 - DNA, 75 bp, synthetic construct
  source 1..75: mol_type = other DNA
tggaggctgctaaagacagccctgagttcgaagaactgatggatgcctaccggcgcgaggcaatggcaattatcg

SEQ ID NO: 62354 - DNA, 75 bp, synthetic construct
  source 1..75: mol_type = other DNA
cggaagtggtcaacgggcatacggacgttatctgctcaaccagtatccgccacattctggctgtacgaaagagtg

SEQ ID NO: 62355 - DNA, 75 bp, synthetic construct
  source 1..75: mol_type = other DNA
ctactgcggtggtatctggaatctgtacagtctgaacaacggcggggcatttatggcccccgaaccggatgacga

SEQ ID NO: 62356 - DNA, 75 bp, synthetic construct
  source 1..75: mol_type = other DNA
aattgaacaaatcccgctggccgtagagtacatccacagggtagtgcttgaaggtgagttcattggcaaacaaga

SEQ ID NO: 62357 - DNA, 75 bp, synthetic construct
  source 1..75: mol_type = other DNA
agctatcaaatttcggtgttatagagattaaagaattatctttctctacattcaatctcaaaagactagataaag

SEQ ID NO: 62358 - DNA, 75 bp, synthetic construct
  source 1..75: mol_type = other DNA
agcgtctgtgtggttgcggaaagcatgatggccgtgaacacgtgcagtcgcttacagcacaactgcgactgggac

SEQ ID NO: 62359 - DNA, 75 bp, synthetic construct
  source 1..75: mol_type = other DNA
tgtttcgcaagccctcgacacgctggaaaacaaattagtcgacttctcggcattaaccgccggtcttgatatgtc

SEQ ID NO: 62360 - DNA, 75 bp, synthetic construct
  source 1..75: mol_type = other DNA
acactatcggcaggtgacactctggttgtctggaagctggacaggttggggcgcagtatgcggcatctcgttacg

SEQ ID NO: 62361 - DNA, 75 bp, synthetic construct
  source 1..75: mol_type = other DNA
gtaaagaggactatgaagacgagatgttcagtattaaatactttaagaaaggctcagtacacatcacgttcagga

SEQ ID NO: 62362 - DNA, 75 bp, synthetic construct
  source 1..75: mol_type = other DNA
tcccgcgaggaggccagggcgctggagtcgtttctggctgagcacgggggctggaaagcctttctgtggacgccg

SEQ ID NO: 62363 - DNA, 75 bp, synthetic construct
  source 1..75: mol_type = other DNA
atgttattattgatgaagcctcgcagcaggatattgttccgggcattctgggactgggatgtgcccgtaatgtaa

SEQ ID NO: 62364 - DNA, 75 bp, synthetic construct
  source 1..75: mol_type = other DNA
tgacctgtgctgcgtggtcatcacgggttcgcatgctgcgggtggaattcagtgccgagtttaagcaggtggtga

SEQ ID NO: 62365 - DNA, 75 bp, synthetic construct
  source 1..75: mol_type = other DNA
gatcagagcatttctccgtcggcatttcagataacgtttcttgaaccaccttattcagattcggataacgagaaa

SEQ ID NO: 62366 - DNA, 75 bp, synthetic construct
  source 1..75: mol_type = other DNA
atgcgagatttaattatcaaattcacagacaaggccgacttttcggcctttatgaagagtgctggctattatgat

SEQ ID NO: 62367 - DNA, 75 bp, synthetic construct
  source 1..75: mol_type = other DNA
aaaagcgccgcccgccaggtgacgaatcagattgtacgcgggatgttggggagtttgctgggggggagaagaagg

SEQ ID NO: 62368 - DNA, 75 bp, synthetic construct
  source 1..75: mol_type = other DNA
attgtgcgatggtggcggcgggggaaacatccggtcgtttggacgtggtgctcagtcgtctggctgactataccg

SEQ ID NO: 62369 - DNA, 75 bp, synthetic construct
  source 1..75: mol_type = other DNA
agtagcgcatcggttggtgccatccagcgcggattactgtcgctggagcaacaaggtgcggcgcatttctttggc

SEQ ID NO: 62370 - DNA, 75 bp, synthetic construct
  source 1..75: mol_type = other DNA
cgcgctcgatgttctgtggcgatggatactctcccgatcatttcgcagttgtgaagaggcagaaaacgccgccgc

SEQ ID NO: 62371 - DNA, 75 bp, synthetic construct
  source 1..75: mol_type = other DNA
cacgtgctgccgcccgcctcgccgctggacgagccgcgcaaggcgcagctgaaaaccctgctgcaacagctcaag

SEQ ID NO: 62372 - DNA, 75 bp, synthetic construct
  source 1..75: mol_type = other DNA
ttccgacagtcgcgttcctgcagaacgtttaaccggtcttgagccgggcgaactctttgttcaccgtaatgttgc

SEQ ID NO: 62373 - DNA, 75 bp, synthetic construct
  source 1..75: mol_type = other DNA
ctgcgcagcatgatccataccgtcaaaggtgcccatccgcacttcaccgtgctctgcggctacgacgatcatctg

SEQ ID NO: 62374 - DNA, 75 bp, synthetic construct
  source 1..75: mol_type = other DNA
cgcctttttgccgacaacggccataccgattccagactggcgagctcgctgtcgtttgaaaaggtgtacgtgctt

SEQ ID NO: 62375 - DNA, 75 bp, synthetic construct
  source 1..75: mol_type = other DNA
gtttcactgggacaggtataacccggcaacggaggcgagttcgtgctgggtgggcgtgtctcaggcgtgggcggg

SEQ ID NO: 62376 - DNA, 75 bp, synthetic construct
  source 1..75: mol_type = other DNA
gtttcactgggacaggtataacccggcaacggaggcgagttcgtgctgggtgcgtgtgtcacaggcgtgggcggg

SEQ ID NO: 62377 - DNA, 75 bp, synthetic construct
  source 1..75: mol_type = other DNA
gataacgcactttacgaggcgaaagagaccgggcgtaataaggtggtagtaaaagaggcagaaattcttatcaac

SEQ ID NO: 62378 - DNA, 75 bp, synthetic construct
  source 1..75: mol_type = other DNA
tggtgatgatcgaggtgacgatgaggatgaacctgaaaaatatactctccagttccattttacagacgatgacgg

SEQ ID NO: 62379 - DNA, 75 bp, synthetic construct
  source 1..75: mol_type = other DNA
gtttcactgggacaggtataacccggcaacggaggcgagttcgtgctgggtgtgcgtgtcgcaggcgtgggcggg

SEQ ID NO: 62380 - DNA, 75 bp, synthetic construct
  source 1..75: mol_type = other DNA
gagaatatgataaaaggtggattatcggggcgaagtgcctccgggaaaaataccaggacaagagccattacaggt

SEQ ID NO: 62381 - DNA, 75 bp, synthetic construct
  source 1..75: mol_type = other DNA
cgtgcaaggcaaacgcaaagccggaagctctattgaagaaacactgccggatctgtatgcggaatatatcgctaa

SEQ ID NO: 62382 - DNA, 75 bp, synthetic construct
  source 1..75: mol_type = other DNA
gtttcactgggacaggtataacccggcaacggaggcgagttcgtgctgggtgagtgtgtcccaggcgtgggcggg

SEQ ID NO: 62383 - DNA, 75 bp, synthetic construct
  source 1..75: mol_type = other DNA
catgccgcctgatagtacggaaaaacggtgctgaaatttataaccgtaccgcgctggataatacgctgatttaca

SEQ ID NO: 62384 - DNA, 75 bp, synthetic construct
  source 1..75: mol_type = other DNA
atcagggaggggcactggttaccagtactgctgcaacggttcttggcagcaaccgtctgggcaatttcgcggtgg

SEQ ID NO: 62385 - DNA, 75 bp, synthetic construct
  source 1..75: mol_type = other DNA
cagcctgtttcgcatgcgtcagatgtggatgtttgttctctacacgattggtgtggcctgtgtctatgatgtatt

SEQ ID NO: 62386 - DNA, 75 bp, synthetic construct
  source 1..75: mol_type = other DNA
atgaaaaagaaaaattctggctttactgccagcggtctctctcggcctgaaatcagacacggagatatttaccgc

SEQ ID NO: 62387 - DNA, 75 bp, synthetic construct
  source 1..75: mol_type = other DNA
gtggcgggttttggcatgcaggagaataacggctggcagatgcgttatcacctgcgtattgagccgccgttatgg

SEQ ID NO: 62388 - DNA, 75 bp, synthetic construct
  source 1..75: mol_type = other DNA
acaatatctctctgttatttatgagcaggtatagcgtgtccatttggtatattagtcgcactattgaagtagtca

SEQ ID NO: 62389 - DNA, 75 bp, synthetic construct
  source 1..75: mol_type = other DNA
ggattatatcggcattgccaacgagctgaagcaggcgctgaaaacctataccgattcaaaaggcaaaggacagac

SEQ ID NO: 62390 - DNA, 75 bp, synthetic construct
  source 1..75: mol_type = other DNA
ggtacctacagtgaatgtatcgagaaaatcatcattgatgcgacggagtcacgcgaatggttgtatcaccccatg

SEQ ID NO: 62391 - DNA, 75 bp, synthetic construct
  source 1..75: mol_type = other DNA
aacagtacaacacattcagcagttcaccggacggcgtggaaaatacgctgctgtttgtgggcaatgcacaaaaca

SEQ ID NO: 62392 - DNA, 75 bp, synthetic construct
  source 1..75: mol_type = other DNA
cagcgattcttttatgcagacggcggagatgctgctggagaagaacgcaacgctgactatctggcagggtgtcat

SEQ ID NO: 62393 - DNA, 75 bp, synthetic construct
  source 1..75: mol_type = other DNA
gctttgaggatgcgacggataaggaacaggtctatatccacgcgcagaagaacatggacacggaggtacttaacg

SEQ ID NO: 62394 - DNA, 75 bp, synthetic construct
  source 1..75: mol_type = other DNA
caggtgatcatcaacacttttgcgggcgataacattgtcaacaacgccgaagcggcggcagatcaaactctgagc

SEQ ID NO: 62395 - DNA, 75 bp, synthetic construct
  source 1..75: mol_type = other DNA
gctgggatacctcattcgcgtgtctgagtggtgggagttcgacggcgaacccggaacattcaaggttgatgttgg

SEQ ID NO: 62396 - DNA, 75 bp, synthetic construct
  source 1..75: mol_type = other DNA
ccgtgggttatgtcgttataacaagagcggacatttcaacattccctacgggaattataaaaatccgtatttccc

SEQ ID NO: 62397 - DNA, 75 bp, synthetic construct
  source 1..75: mol_type = other DNA
gccgctcggctatctcatcaacgtgacggagtggtgggaaaacagtgacccgcccggcaccttccgccttgatat

SEQ ID NO: 62398 - DNA, 75 bp, synthetic construct
  source 1..75: mol_type = other DNA
gatagcgcccaatggctggcgacaacaccgctgcttcccaataacgtacgtgatgcgctggcgggcgagagcaca

SEQ ID NO: 62399 - DNA, 75 bp, synthetic construct
  source 1..75: mol_type = other DNA
gcgttggaagatcctgaaacgctggaaatcatgctcaacccggatggcaagctgtggcgtgagaaattcggtcag

SEQ ID NO: 62400 - DNA, 75 bp, synthetic construct
  source 1..75: mol_type = other DNA
tccggcagtgcagcacctgacggtggaggtgagcgcagctgacggccagtatctggcgcaggcgaaatgggacac

SEQ ID NO: 62401 - DNA, 75 bp, synthetic construct
  source 1..75: mol_type = other DNA
tcgttcaggaccgcccgtcggatgtggtgtggccgtacaccagcagcgatgtggtggtggatgataacggcgtgg

SEQ ID NO: 62402 - DNA, 75 bp, synthetic construct
  source 1..75: mol_type = other DNA
tttctctgctgagtgaaaaaaatagcgctgctgctgttaccgtaaatcagccagacatccaggaggaaagcattg

SEQ ID NO: 62403 - DNA, 75 bp, synthetic construct
  source 1..75: mol_type = other DNA
tcatgccgtctgatagtgcggaaaaacggtgctgaaatttataaccgtaccgcgctggataatacgctgatttac

SEQ ID NO: 62404 - DNA, 75 bp, synthetic construct
  source 1..75: mol_type = other DNA
gaaacgtgggattgccaacggcgatatggtgcgggtgtttaaccatcgtggcgaagttcggctaccagccaaagt

SEQ ID NO: 62405 - DNA, 75 bp, synthetic construct
  source 1..75: mol_type = other DNA
actttctaaggagctggcttctgtatctcaagggaaacaaattaagagtgtggatgatgcactgaacgcttttga

SEQ ID NO: 62406 - DNA, 75 bp, synthetic construct
  source 1..75: mol_type = other DNA
tgaaatataaatccaacggcgcagtgctgcctgcagggcgttattctgacaacgtacgccttgacccgtgggtat

SEQ ID NO: 62407 - DNA, 75 bp, synthetic construct
  source 1..75: mol_type = other DNA
atgaccggtcacgctggtgagctgccgaactgccgctgttacaaagaaatcgtcttccccaaccctcattcttat

SEQ ID NO: 62408 - DNA, 75 bp, synthetic construct
  source 1..75: mol_type = other DNA
gtgaagggtatctggaaattttccgggggctgatagatgagacgcttctgggtcaggcactgaaagagcgcattg

SEQ ID NO: 62409 - DNA, 75 bp, synthetic construct
  source 1..75: mol_type = other DNA
gaccaggttaaccatactgcggcgggtggtgataaagcagacgcgtggactgctgggctaaaatacgatgctaac

SEQ ID NO: 62410 - DNA, 75 bp, synthetic construct
  source 1..75: mol_type = other DNA
agtgcagaaatgcaaaaattatattgctatgtttcagattgggagaaatcaggggggatatgttttgaaacacaa

SEQ ID NO: 62411 - DNA, 75 bp, synthetic construct
  source 1..75: mol_type = other DNA
gatgaaaatggtgacaaatcctacatgcgtatggggatcaagggggaaacccagatcaacgatgatttgacggga

SEQ ID NO: 62412 - DNA, 75 bp, synthetic construct
  source 1..75: mol_type = other DNA
ttggatgaagatgacagcttctacgctgccaatggcatctctaccgatgatattgtcgctttaggtctggtttat

SEQ ID NO: 62413 - DNA, 75 bp, synthetic construct
  source 1..75: mol_type = other DNA
aacggtggcgcatttatagcacctgaaccggatgaagatgatggagaaacctggatactgttcaatgccatgaac

SEQ ID NO: 62414 - DNA, 75 bp, synthetic construct
  source 1..75: mol_type = other DNA
ctataattgatttctcagaacaaattaaagccattgtagaagatttcataacaggaaagaaaaaatgggtattaa

SEQ ID NO: 62415 - DNA, 75 bp, synthetic construct
  source 1..75: mol_type = other DNA
ggtctgggctaccagttcgacctgctggctaacggcgaaaccgtattgcgggatgcatctggtgaaaaacgcatc

SEQ ID NO: 62416 - DNA, 75 bp, synthetic construct
  source 1..75: mol_type = other DNA
agccgatcacaggcttgcggaactcacaatgaataaactctacgataaagtccctccatccgtctggaaatatgt

SEQ ID NO: 62417 - DNA, 75 bp, synthetic construct
  source 1..75: mol_type = other DNA
atgagcgaatatttcagaatacttcaggggctgcctgacggtccttttacccgcaaacaggccgaagccgttgcc

SEQ ID NO: 62418 - DNA, 75 bp, synthetic construct
  source 1..75: mol_type = other DNA
tgagctggaattacagaaccaactccccctgtaaatttggtaataaaattatcgtcaacaatctggtgagatggg

SEQ ID NO: 62419 - DNA, 75 bp, synthetic construct
  source 1..75: mol_type = other DNA
atgatccaactgataaaagagtttgatgctcagggtgtcgcggttcggtttattgacgacgggatcagtaccgac

SEQ ID NO: 62420 - DNA, 75 bp, synthetic construct
  source 1..75: mol_type = other DNA
gagtgttgagctgaaaaccatcaaccagaccatcgacctgaaatcagatcagacggtgatcctgagcggattcca

SEQ ID NO: 62421 - DNA, 75 bp, synthetic construct
  source 1..75: mol_type = other DNA
ccggctactggatcgttgccctcctgctgttgttgagtttgcagagctactggcagacggcgaaaaccgtcgagc

SEQ ID NO: 62422 - DNA, 75 bp, synthetic construct
  source 1..75: mol_type = other DNA
atgggggaactccggttgagcaataacaccagtacagagcgcggatggttaataccaaccagtggcgatccggat

SEQ ID NO: 62423 - DNA, 75 bp, synthetic construct
  source 1..75: mol_type = other DNA
ttctgataaagataaaactcgtcttgcgtttgcagggcttcgctttggcgattatggttcgctcgactatggtcg

SEQ ID NO: 62424 - DNA, 75 bp, synthetic construct
  source 1..75: mol_type = other DNA
cggcggcagccgggcacaggtacccacggtggacctgaaaaccatcaaccagaccatcgacctgaaatcaggtca

SEQ ID NO: 62425 - DNA, 75 bp, synthetic construct
  source 1..75: mol_type = other DNA
atcgtcgtctcaagaacaaacaggtgccagatggactattgatattaaggtgcgtattaccgtgaaggagatcgg

SEQ ID NO: 62426 - DNA, 75 bp, synthetic construct
  source 1..75: mol_type = other DNA
cagataacagcagtaccggtgctggcggtgtatgacccgacggtacagtctgaattctggttctcagaaaaacgc

SEQ ID NO: 62427 - DNA, 75 bp, synthetic construct
  source 1..75: mol_type = other DNA
tggcatcaaaatatggacacttaaataatggcggatatggagcgagacccaacaaaccgcctacgcccgatccaa

SEQ ID NO: 62428 - DNA, 75 bp, synthetic construct
  source 1..75: mol_type = other DNA
cggaatacggtttttgaaaatcctgacattgtaaaaacctgtacggtcagggatttgaagaatgattttgtgaac

SEQ ID NO: 62429 - DNA, 75 bp, synthetic construct
  source 1..75: mol_type = other DNA
cgccgctggctggcatcgtgcggcctgacggtggagcagatgcaaaaccagatggacccggtgtacacgccggcg

SEQ ID NO: 62430 - DNA, 75 bp, synthetic construct
  source 1..75: mol_type = other DNA
cctgtggctgccgttttatctctctcttcctacgctcgtggtgagctacggcctgggttgggcgctgaacggcca

SEQ ID NO: 62431 - DNA, 75 bp, synthetic construct
  source 1..75: mol_type = other DNA
ggacgcctttatatcgcgggtattggtgccggtattgagaacacccctgacggcatgcagagtcaggtgctgctg

SEQ ID NO: 62432 - DNA, 75 bp, synthetic construct
  source 1..75: mol_type = other DNA
catcaaagtgatgatcctgccggaactgggcggtcgggtgcatcgcgcgtgggataaagtgaaacagcgcgattt

SEQ ID NO: 62433 - DNA, 75 bp, synthetic construct
  source 1..75: mol_type = other DNA
tgacctggctgaaatcaggacgtccattacggatgtcagcaatgaaatcacacagaccgtcaataagaaactgga

SEQ ID NO: 62434 - DNA, 75 bp, synthetic construct
  source 1..75: mol_type = other DNA
ccgccacccgctggtggtggagatgaagcgccagctgtgccgtaacgagaaaatgaaaacgctgcttctcgcagg

SEQ ID NO: 62435 - DNA, 75 bp, synthetic construct
  source 1..75: mol_type = other DNA
cgctggcttgaattgcagttgcgtatgctgctggagcaggtggaacaatttgaaaatatcgttggcttcttctgg

SEQ ID NO: 62436 - DNA, 75 bp, synthetic construct
  source 1..75: mol_type = other DNA
accgcgagatctgaaagtaaatgaaacagatgctgaatacctggtgcgtaaattcgatgcgcttgaagctaaatg

SEQ ID NO: 62437 - DNA, 75 bp, synthetic construct
  source 1..75: mol_type = other DNA
ataatgccgcggaaagagcgcttcgtgcagtctgtctcggaaagaaaaactttatgttcttcggcagcgatcacg

SEQ ID NO: 62438 - DNA, 75 bp, synthetic construct
  source 1..75: mol_type = other DNA
gccgagggtggtgaagggcgtgcgcttcagtctgcgcctgaccagtggaagcggtgagaacagccgcctgctgac

SEQ ID NO: 62439 - DNA, 75 bp, synthetic construct
  source 1..75: mol_type = other DNA
acgctgaatggggggtaccagtatgtgcacaacggcggtacagcgactgacactgttgttaacagtgacggctgg

SEQ ID NO: 62440 - DNA, 75 bp, synthetic construct
  source 1..75: mol_type = other DNA
cgtggcggtatttgccctgagcggggcgattgccagcgtgttgcataacccggatctccagccgctgatccagac

SEQ ID NO: 62441 - DNA, 75 bp, synthetic construct
  source 1..75: mol_type = other DNA
acttacgctttggtgcctggctgacggcggacagcatcatcaactatctcaacaccaacctttcaacgctggtgc

SEQ ID NO: 62442 - DNA, 75 bp, synthetic construct
  source 1..75: mol_type = other DNA
gtcatcgaaaactttatgacctcatcggcaaaatatgccgacattctgctgccagacctgatgaccgttgagcag

SEQ ID NO: 62443 - DNA, 75 bp, synthetic construct
  source 1..75: mol_type = other DNA
tcaatgatggaaatattgccgaatccgattaccttgcctgttccggtataaatgaaaatcatgatgagtatttcg

SEQ ID NO: 62444 - DNA, 75 bp, synthetic construct
  source 1..75: mol_type = other DNA
cgtgcgggttgcgtgcgcggattgacagtgaacagggctggcacaagtcactgtccaacgtggcgctgaaaaatg

SEQ ID NO: 62445 - DNA, 75 bp, synthetic construct
  source 1..75: mol_type = other DNA
tcgacgcttaccagaagcgtaagcgtcgtgaaggtaaacgcgtgcatcccaccaccctgcattacgcctgggccc

SEQ ID NO: 62446 - DNA, 75 bp, synthetic construct
  source 1..75: mol_type = other DNA
atctacagaaattctcccgttccggtttgtgtccgtaacaaaaaccggaaaatcctttatgccaatggggctttt

SEQ ID NO: 62447 - DNA, 75 bp, synthetic construct
  source 1..75: mol_type = other DNA
ggtgaatggcttcgcatggcatcacttcaaaagcttcctccgaccattcctgcaatcaatttagaagtttggcaa

SEQ ID NO: 62448 - DNA, 75 bp, synthetic construct
  source 1..75: mol_type = other DNA
gttccgtactgatgtattgcgtaagttcggtttctcggatcgtactaaagtcgaagaccttgatctcacctggac

SEQ ID NO: 62449 - DNA, 75 bp, synthetic construct
  source 1..75: mol_type = other DNA
gaaacgaaggcagccacaccgaaagctgtgaaggcggcaatggatgaggccagggcagcgaaacagaaggcagaa

SEQ ID NO: 62450 - DNA, 75 bp, synthetic construct
  source 1..75: mol_type = other DNA
aaatcgtattgctatacatatcgatggtaagagcaaagatagccaacttactcatacagagcttttcgctgtgaa

SEQ ID NO: 62451 - DNA, 75 bp, synthetic construct
  source 1..75: mol_type = other DNA
aaaaaataccggtaaaggtggtgcgctgatgaatggcctcaattacgccacctgcgatcaggtttttttaagtga

SEQ ID NO: 62452 - DNA, 75 bp, synthetic construct
  source 1..75: mol_type = other DNA
ggaattaatggacatcattaataaaggatttggcttgttaatgaaaaagaaagggattcgaatagctccccttga

SEQ ID NO: 62453 - DNA, 75 bp, synthetic construct
  source 1..75: mol_type = other DNA
cgcctctctgcggcgattgctgcaagggaaaaagatgaaaacacactgaaaacactccgtgccggaaacgcagat

SEQ ID NO: 62454 - DNA, 75 bp, synthetic construct
  source 1..75: mol_type = other DNA
gttcctgtgcagtgatgatggagacggattaccccagctatctggtagcggatattaatcctgatttaatcaacc

SEQ ID NO: 62455 - DNA, 75 bp, synthetic construct
  source 1..75: mol_type = other DNA
aggatattcccggtgtgctggccgtgtttgctgaacgccgtaaggacagttttggtccgtatgtccggctgatga

SEQ ID NO: 62456 - DNA, 75 bp, synthetic construct
  source 1..75: mol_type = other DNA
cacaacaggcccgtctgctcgggcagcagacacggaatgacagggccatttcagaggcccggaataaactcagtt

SEQ ID NO: 62457 - DNA, 75 bp, synthetic construct
  source 1..75: mol_type = other DNA
atgccagtcgtaccaacagtatccggccgtcaggttcagagccgtggagttcagtcagcaggcttgcagacgttt

SEQ ID NO: 62458 - DNA, 75 bp, synthetic construct
  source 1..75: mol_type = other DNA
caatttcacatgagaatgttgagcgaaataattttgaaattcatgaacatattggatttcagaatgttgagttag

SEQ ID NO: 62459 - DNA, 75 bp, synthetic construct
  source 1..75: mol_type = other DNA
acgaaaaactccgtaaagaggtcgaggatttgagggctgccagcgaatcagaccttcagcccggcaccattgatt

SEQ ID NO: 62460 - DNA, 75 bp, synthetic construct
  source 1..75: mol_type = other DNA
gcggcacgcactgaatgttcatccccgcctgacggcattgcgggttgacctgcgtctcccggatgtaccggcagc

SEQ ID NO: 62461 - DNA, 75 bp, synthetic construct
  source 1..75: mol_type = other DNA
tatccgatgccgtcgatgggcgctttcctgcaactgctgccgaaagggttcgcctcccgcgtggcgcgtaccact

SEQ ID NO: 62462 - DNA, 75 bp, synthetic construct
  source 1..75: mol_type = other DNA
tattgtcctgaaagtacggcaggacagccgggttatcagcaaagcggtgttcctggctctgggtattaaccttga

SEQ ID NO: 62463 - DNA, 75 bp, synthetic construct
  source 1..75: mol_type = other DNA
tgtcattccggagcttacaggcaatgatattttaacgcttgatggctctgtcagtatatcaggagatatgtcaaa

SEQ ID NO: 62464 - DNA, 75 bp, synthetic construct
  source 1..75: mol_type = other DNA
acgtctccagtgtgatgatgatgaaggcatcatgatagacggttgtgtggctcggttgcgaaagtataaaccaga

SEQ ID NO: 62465 - DNA, 75 bp, synthetic construct
  source 1..75: mol_type = other DNA
tagcaaagaaacggaaatgctctgacgggtcaatcagaaaacaacttcaagcagcaataggagtgattgaaggta

SEQ ID NO: 62466 - DNA, 75 bp, synthetic construct
  source 1..75: mol_type = other DNA
gatgtggacagactttcccgcctgtcaggggaagactggaatacgttgaagaaaatgatccggcagaaagacatc

SEQ ID NO: 62467 - DNA, 75 bp, synthetic construct
  source 1..75: mol_type = other DNA
gttggtacagcagggcggctttgacgggcggacgcaacgttatcattatgacctgaccggaaaactcacgcagag

SEQ ID NO: 62468 - DNA, 75 bp, synthetic construct
  source 1..75: mol_type = other DNA
gcgcgcgtgtcacaatcgcagggtgatgatattcagacgcggctgggtttacacagcgaatggcgtaccgctgtt

SEQ ID NO: 62469 - DNA, 75 bp, synthetic construct
  source 1..75: mol_type = other DNA
taaactattaaagatctactataatgtttatgtcggcggtgatttaacagaacatgagattgcacatattttcta

SEQ ID NO: 62470 - DNA, 75 bp, synthetic construct
  source 1..75: mol_type = other DNA
gtagtgtcggcccggcaggtccgcggggtgagaaaggcgagcagggggagcgtggaccacagggattacaggggc

SEQ ID NO: 62471 - DNA, 75 bp, synthetic construct
  source 1..75: mol_type = other DNA
gcgtcatcgtcgcccgttaccggcgcatctgccccgcgaaataaaccgcctggagccaggaaagctgttgcccgg

SEQ ID NO: 62472 - DNA, 75 bp, synthetic construct
  source 1..75: mol_type = other DNA
aactaatgtttgcggcctgattacattaaaaagtaaatactcattaatctacaaatttctgttttactggctaac

SEQ ID NO: 62473 - DNA, 75 bp, synthetic construct
  source 1..75: mol_type = other DNA
atgagtgaaactcgttttcatggtgcccgtgttacggaaagtaccgacctggtaacagcgattaatgatgttgat

SEQ ID NO: 62474 - DNA, 75 bp, synthetic construct
  source 1..75: mol_type = other DNA
gaccggcgggagagcggggacctcaggggccacagggtgtagctggtcctgtcggccctgcaggcgaaccgggag

SEQ ID NO: 62475 - DNA, 75 bp, synthetic construct
  source 1..75: mol_type = other DNA
ctgctgatataaatatatccggacaacttagtgattcgtcacagtatactgctttttacagagcaggcgctggca

SEQ ID NO: 62476 - DNA, 75 bp, synthetic construct
  source 1..75: mol_type = other DNA
gcgtcactattcgggtattcactacccacagggagccgtccggtcaggttgttcaggtctgggaagacggggaaa

SEQ ID NO: 62477 - DNA, 75 bp, synthetic construct
  source 1..75: mol_type = other DNA
tacgtgaacgtttttcaccgaaaccagcgcctaaatgctctgtttgtggcgaggaaatgtcaatgcagcgcatat

SEQ ID NO: 62478 - DNA, 75 bp, synthetic construct
  source 1..75: mol_type = other DNA
cctgcgctatgcctgggcgcaggatgcgatccgccattatctggcgcagggattcaggaaaaggaatccctggcg

SEQ ID NO: 62479 - DNA, 75 bp, synthetic construct
  source 1..75: mol_type = other DNA
gcgctacagctccgtgtggtttgattccaatgatcattacgttactccgggtaacggcgatgacagcggtgatgc

SEQ ID NO: 62480 - DNA, 75 bp, synthetic construct
  source 1..75: mol_type = other DNA
aacacttggatgagcgtaaaatgatgctgcagtggtgggcagattttcttgatgtaaatcgggtgaagggcgtca

SEQ ID NO: 62481 - DNA, 75 bp, synthetic construct
  source 1..75: mol_type = other DNA
tgcacaacggaggcacagcctctgacacggttgtaaacagtgacggctggcagattatcaaggaaggtggcctgg

SEQ ID NO: 62482 - DNA, 75 bp, synthetic construct
  source 1..75: mol_type = other DNA
gcgattggtcgtctgaaaggtgaggaactggcacaatataatttgtggctggattatctggatgcactggaaatg

SEQ ID NO: 62483 - DNA, 75 bp, synthetic construct
  source 1..75: mol_type = other DNA
tccctgagttgcttacaaaaatagatagctatactggtaggccgctaacccgatgggcgacagaactcactttgc

SEQ ID NO: 62484 - DNA, 75 bp, synthetic construct
  source 1..75: mol_type = other DNA
catgaacagtaagcaatggcccggtaaagccgctattggtcgtctgaaaggtgacgaactggcgcaatataattt

SEQ ID NO: 62485 - DNA, 75 bp, synthetic construct
  source 1..75: mol_type = other DNA
atgacacgaaaacggaagtgtgtggacatggtttcaggacgatggcgtgtagttctttgattgaatcgggattgt

SEQ ID NO: 62486 - DNA, 75 bp, synthetic construct
  source 1..75: mol_type = other DNA
gagtctgcgcaggccctgtatacctttatagagagtctgccacgggatccggcgccgatatctctggcgcgtctg

SEQ ID NO: 62487 - DNA, 75 bp, synthetic construct
  source 1..75: mol_type = other DNA
ttgttacaacatcatgggcttatcgcttgtgaggtgaatctggaaaaagcgttatggctggcgcatgaagttgaa

SEQ ID NO: 62488 - DNA, 75 bp, synthetic construct
  source 1..75: mol_type = other DNA
aaccccgcagatcattttcaaataattttaaacttcaaatggttaaactggctttgcaactaggagcctctgttg

SEQ ID NO: 62489 - DNA, 75 bp, synthetic construct
  source 1..75: mol_type = other DNA
aggggccaggcgtggtacatggatatgatgtgcgaagcgcgcggtgcggcggatcttcgttcggcgtcgtcttta

SEQ ID NO: 62490 - DNA, 75 bp, synthetic construct
  source 1..75: mol_type = other DNA
gcagggaaactatcagccaggcgattttctcctggtcgattctgcgctggaactggtccccggcgaggatgttct

SEQ ID NO: 62491 - DNA, 75 bp, synthetic construct
  source 1..75: mol_type = other DNA
ttggaacattagttgacgtttcaaggcgtttgctggatggttatattcagaaaaaaattgacgacttaattggct

SEQ ID NO: 62492 - DNA, 75 bp, synthetic construct
  source 1..75: mol_type = other DNA
ttctttggtcacctgaaagaagaaatgtactatcgccgggactacagaagtgtagaagagctggaaaatgccgtt

SEQ ID NO: 62493 - DNA, 75 bp, synthetic construct
  source 1..75: mol_type = other DNA
acgaatttgccgacctgatgatgacggtaggtaaaaaagtggaagagctgatagcacgtctggcgcaaaaagccc

SEQ ID NO: 62494 - DNA, 75 bp, synthetic construct
  source 1..75: mol_type = other DNA
tcgattactggactccggtcggtggggcgatcacacctcgcgaacgagaaatggtgttcggcttcgttgattacc

SEQ ID NO: 62495 - DNA, 75 bp, synthetic construct
  source 1..75: mol_type = other DNA
gagcaatatctgaatacagttgcgacacgcagaacccgggatacggcattgctaaagtcgtttgaggctttccgc

SEQ ID NO: 62496 - DNA, 75 bp, synthetic construct
  source 1..75: mol_type = other DNA
acctggcctgctggaaagtggaccgtttcagaacagaggctcagctgacagtggatgacggacgggctggcggac

SEQ ID NO: 62497 - DNA, 75 bp, synthetic construct
  source 1..75: mol_type = other DNA
tacaggtcactggaatatgataattttccggaaatcagcgaagcgaacattctgagcacatttgtaagcgtgcag

SEQ ID NO: 62498 - DNA, 75 bp, synthetic construct
  source 1..75: mol_type = other DNA
aaaacctgggtgagagtgcgaaggttgagctggataaagctgcagccgagttgcgaaaccaggcaagctatttac

SEQ ID NO: 62499 - DNA, 75 bp, synthetic construct
  source 1..75: mol_type = other DNA
tattctgacagccggcattggcggggtgtcttcacttatatctaaagttggcgatgtcgctaacaaagttggttc

SEQ ID NO: 62500 - DNA, 75 bp, synthetic construct
  source 1..75: mol_type = other DNA
ttccggaaatcagcgaagcgaacattctgagcacatttgaacaactgcaccagaacaaagatgaagtgtttgaac

SEQ ID NO: 62501 - DNA, 75 bp, synthetic construct
  source 1..75: mol_type = other DNA
gtggcgttcatcattgatgtgtttgccggatacatcgtggggtggcgggtctcatcgtccatggaaacgacattc

SEQ ID NO: 62502 - DNA, 75 bp, synthetic construct
  source 1..75: mol_type = other DNA
taccgtcagccggaaagccgttgccgcaggcgaccgcgtaaaccgtcagtttgtggcagaacgtcctgaccagtt

SEQ ID NO: 62503 - DNA, 75 bp, synthetic construct
  source 1..75: mol_type = other DNA
ccagggaagcgaccgaaattaacactccggcagagacatggcagattgattttactgcccgactggtgggaatgg

SEQ ID NO: 62504 - DNA, 75 bp, synthetic construct
  source 1..75: mol_type = other DNA
gcgcaatccccaaattctgacgtaaataaggagggttgggttttcagaagtaacagtaaaagtggcaaaattatt

SEQ ID NO: 62505 - DNA, 75 bp, synthetic construct
  source 1..75: mol_type = other DNA
aaacaggcggaatcgctcatcggtaaggctggcagtatggcgaccagattcacgggtatgacgggggcgggataa

SEQ ID NO: 62506 - DNA, 75 bp, synthetic construct
  source 1..75: mol_type = other DNA
tcaaattcgtgaagcacatcgaggaggaaaaccgctaccggaaaaagctgtagtgctgacttttgatgacggcta

SEQ ID NO: 62507 - DNA, 75 bp, synthetic construct
  source 1..75: mol_type = other DNA
ccccgctatgtgatgagcacgcggcaaattcctgtcagccgtcagcgactgtttctggggcggggatttcgctgg

SEQ ID NO: 62508 - DNA, 75 bp, synthetic construct
  source 1..75: mol_type = other DNA
gctcacatttcaaatggttataaacatatttatatagcgattaattcaccagagatatttatgtcggtttgttct

SEQ ID NO: 62509 - DNA, 75 bp, synthetic construct
  source 1..75: mol_type = other DNA
agcgcgtctggctgatttccgtattaaagccgatgtcgtcaattactctccggggccggttatcactcgctttga

SEQ ID NO: 62510 - DNA, 75 bp, synthetic construct
  source 1..75: mol_type = other DNA
agtggctgaagccatgcggcgtcattaccacaccggagaggggtggtggcatgaagccccggccgtgaatgtgcc

SEQ ID NO: 62511 - DNA, 75 bp, synthetic construct
  source 1..75: mol_type = other DNA
aacggtgcgggtattaactatgtacgtaccaacgacagcggcttagcgttcaacgatgccagcgcagcaggtatt

SEQ ID NO: 62512 - DNA, 75 bp, synthetic construct
  source 1..75: mol_type = other DNA
catcagcgcaggctctccagcatcgtttctgccatcacccacaatgcgcgattgagcttaatgtcggtatcaatg

SEQ ID NO: 62513 - DNA, 75 bp, synthetic construct
  source 1..75: mol_type = other DNA
ttatgtgaataatattgccgacctttatatccgttatgctggtaaggtgatcagcgaacagatgccggaactgga

SEQ ID NO: 62514 - DNA, 75 bp, synthetic construct
  source 1..75: mol_type = other DNA
gctgcttatctcgcgaaagagtacaccaaagtcaacggtaccggtgagcgcaattttggctgtagccggagttga

SEQ ID NO: 62515 - DNA, 75 bp, synthetic construct
  source 1..75: mol_type = other DNA
ttgaaagccggttacgacttcaaactgggtgatgctggttacgtgactccttacggcagcgtttctggtctgttc

SEQ ID NO: 62516 - DNA, 75 bp, synthetic construct
  source 1..75: mol_type = other DNA
atgttacctcatcatgcaggaggtaatgactccaacttattgatagtgttttatgttcagataatgcccgatgac

SEQ ID NO: 62517 - DNA, 75 bp, synthetic construct
  source 1..75: mol_type = other DNA
ccatcaatggcggcggtgatgttctcttctggcctgagtggaaccaccaggcattgtgccagacgtgccacaacc

SEQ ID NO: 62518 - DNA, 75 bp, synthetic construct
  source 1..75: mol_type = other DNA
ccatattctgagcgtactgccggaatggccctccaaccgtgttgacgaactcctgccatggaacgtagttctcac

SEQ ID NO: 62519 - DNA, 75 bp, synthetic construct
  source 1..75: mol_type = other DNA
atgaacatactaaaaaaacttatgcagcgtctgtgtggttgcggaaagcatgatgaccgtgaacacggggagtta

SEQ ID NO: 62520 - DNA, 75 bp, synthetic construct
  source 1..75: mol_type = other DNA
cattaccgacagattttccggagaacgtggtgacggcagttgaaaccaatgtgttgaggttgcatggacggttaa

SEQ ID NO: 62521 - DNA, 75 bp, synthetic construct
  source 1..75: mol_type = other DNA
ggggaaacacatcccgactcaacaatgcacagtctggtcctcggacagatcaagacggatgagaaatccaatgag

SEQ ID NO: 62522 - DNA, 75 bp, synthetic construct
  source 1..75: mol_type = other DNA
aaaggagaggtcatcattaaagatgatggtcatggcatgtctaaagatgacattattaataagttcctaaaagtc

SEQ ID NO: 62523 - DNA, 75 bp, synthetic construct
  source 1..75: mol_type = other DNA
gtgaaagtactcaacgagctaaggcagttttaccctcttgatgagcttctcaaggcagcggagataccgcgcagt

SEQ ID NO: 62524 - DNA, 75 bp, synthetic construct
  source 1..75: mol_type = other DNA
gcactgaacgaatactgccgcaatggctgggttgagatcgacaataatctgtgcgaaaacgcacttcgtgtggtt

SEQ ID NO: 62525 - DNA, 75 bp, synthetic construct
  source 1..75: mol_type = other DNA
cagttcgtggcagaatgccccaaccagctgtgggtggctgacttcacgtatggtgtgcccggagttcagggcggg

SEQ ID NO: 62526 - DNA, 75 bp, synthetic construct
  source 1..75: mol_type = other DNA
atatcaccacggaagccctgcagcgtatcggtgaactgtatgccatcgaggcagaagtccggggatgttcagcag

SEQ ID NO: 62527 - DNA, 75 bp, synthetic construct
  source 1..75: mol_type = other DNA
aaccgcagggtattttcagtaagtcaccggcaacgccgctgcaggataaaacgaacacagtacacaacgagaagc

SEQ ID NO: 62528 - DNA, 75 bp, synthetic construct
  source 1..75: mol_type = other DNA
gcgaactcatccgcatcagcagcccgcgccagacccggagttacagctacagcgactccggcaggctgaccggcg

SEQ ID NO: 62529 - DNA, 75 bp, synthetic construct
  source 1..75: mol_type = other DNA
tttacaaccatgctcagtatctcgataagcgcagagaaatgatgcagtggtgggcagactggcttgatgggaagg

SEQ ID NO: 62530 - DNA, 75 bp, synthetic construct
  source 1..75: mol_type = other DNA
ctacacacagcggcttaaggaagccggattactggcatcaacaggaagtacaggcgactcgtatgacaacgcgat

SEQ ID NO: 62531 - DNA, 75 bp, synthetic construct
  source 1..75: mol_type = other DNA
aacttaaccccatcatcacccgcgtgctattcccggcgttcgccaaaattcaggacgatagcgaaaaactgcgcg

SEQ ID NO: 62532 - DNA, 75 bp, synthetic construct
  source 1..75: mol_type = other DNA
accaactcaccctgtaaatttggcagtaaaattatcgtcaacaatctggtgaggtgggaccggtggggatttcat

SEQ ID NO: 62533 - DNA, 75 bp, synthetic construct
  source 1..75: mol_type = other DNA
cgcctgtcgtcactgccgacagaagccgaggtcaaccgtctgaatgtggaaatcgtgaccctgcggggtgaactg

SEQ ID NO: 62534 - DNA, 75 bp, synthetic construct
  source 1..75: mol_type = other DNA
ctcttaccgacaaattcctgagtttaccgtcagaactcagaaaatcactgacatgggacagaggaatggaactgg

SEQ ID NO: 62535 - DNA, 75 bp, synthetic construct
  source 1..75: mol_type = other DNA
cgaagtaataactgctggtttagaaattgatgagatatatgttttttattcgttagctgttgtaaacatttcctt

SEQ ID NO: 62536 - DNA, 75 bp, synthetic construct
  source 1..75: mol_type = other DNA
cagtattgatacctcaaccccgatggggcgatttttctttcacatcatgggcgctcttgcagaaatggaacgcga

SEQ ID NO: 62537 - DNA, 75 bp, synthetic construct
  source 1..75: mol_type = other DNA
gtgagttccatgcttgagattttttttccgctttgcgccactgatcccatccgctggcagcaccgtaccgccgac

SEQ ID NO: 62538 - DNA, 75 bp, synthetic construct
  source 1..75: mol_type = other DNA
agccggatatggaggtgaactcgcagccgtcggtgcgtgaagtgcgttttggtgacgggtattcgcagcgtatgg

SEQ ID NO: 62539 - DNA, 75 bp, synthetic construct
  source 1..75: mol_type = other DNA
atactctggtccaggttgagcagaaacagggcaacgccattctcagcggcctgagcgatatgatccctaactcat

SEQ ID NO: 62540 - DNA, 75 bp, synthetic construct
  source 1..75: mol_type = other DNA
ccaaattgagaggctgtttgatatttccacagcttttgtattgcatctcctattttcggtttgtatattcatgca

SEQ ID NO: 62541 - DNA, 75 bp, synthetic construct
  source 1..75: mol_type = other DNA
accgggactgaaaaaactgctcagaacattatcagcaggtgacactctggtagtctggaagctggacaggctggg

SEQ ID NO: 62542 - DNA, 75 bp, synthetic construct
  source 1..75: mol_type = other DNA
attcctcattcccggcacacgaaggttctctgctggatttacgggacattgagcaggggctggatttaggtaaca

SEQ ID NO: 62543 - DNA, 75 bp, synthetic construct
  source 1..75: mol_type = other DNA
atgcgcctgcttacaacaagagtaatgaaaaatcattaaaacctgtgagcgaaaacggtttaagtggagtattga

SEQ ID NO: 62544 - DNA, 75 bp, synthetic construct
  source 1..75: mol_type = other DNA
gcagaaagagcgcttcgtgccgtctgtctcgggaaaaagaattcttatgacctttgtcaaatattaagtccaaaa

SEQ ID NO: 62545 - DNA, 75 bp, synthetic construct
  source 1..75: mol_type = other DNA
cgacagcgacaggtcgatgtcctggctggcctgggagccatgtctgacaaattcggtaaatccagtgacaaattg

SEQ ID NO: 62546 - DNA, 75 bp, synthetic construct
  source 1..75: mol_type = other DNA
ggacatcaaaagatagttccttttgccgcattaataaaagctgatgaatgcatcatttcaaaaattgcttcatat

SEQ ID NO: 62547 - DNA, 75 bp, synthetic construct
  source 1..75: mol_type = other DNA
cgcttatgatggtattctattatcattttttgactcgcatacaatgcgtgttatggacctgaaaataaaagtttc

SEQ ID NO: 62548 - DNA, 75 bp, synthetic construct
  source 1..75: mol_type = other DNA
tatgacagaagaacaagccagagagagtggtgctgatattcaggtggtgacattgcctgtagctgcaattccgcg

SEQ ID NO: 62549 - DNA, 75 bp, synthetic construct
  source 1..75: mol_type = other DNA
acgtattgcagggcggcgcaagtctgattaatgcaatcagtcaggggcttggtggacccaaggttttggatgatg

SEQ ID NO: 62550 - DNA, 75 bp, synthetic construct
  source 1..75: mol_type = other DNA
caacaaatgaacaaaataccgcgctacagcgtgacgcgctggaacggtcgggatgtgagctaattttcgaggata

SEQ ID NO: 62551 - DNA, 75 bp, synthetic construct
  source 1..75: mol_type = other DNA
tgatggccgtgaacacgtgcagtcgcttacagcacaactgcgactggggccggcagacatcctggagtcagatga

SEQ ID NO: 62552 - DNA, 75 bp, synthetic construct
  source 1..75: mol_type = other DNA
ggtgatatcctggccggcaacagtctgtgggtacagaaggatgcttccggcggtgcaaacacagagattatcaat

SEQ ID NO: 62553 - DNA, 75 bp, synthetic construct
  source 1..75: mol_type = other DNA
ggaacaatcacaccaactgcagcagcctgaagccgattccgccattcagcgggaagccgatcaggtagtcccgga

SEQ ID NO: 62554 - DNA, 75 bp, synthetic construct
  source 1..75: mol_type = other DNA
caacaacgtatgcgtattttcatgaaaggagatcactcaataacttccatcgagatcgggtaataacatttgaac

SEQ ID NO: 62555 - DNA, 75 bp, synthetic construct
  source 1..75: mol_type = other DNA
aagcgcgggcggtagcctggacctgagcgccatcggggatatcagcaatatcagctcagtcatcagcggtaaaac

SEQ ID NO: 62556 - DNA, 75 bp, synthetic construct
  source 1..75: mol_type = other DNA
caatggaacgctgactgccggtaaaggcaacagtgttttcagcgcacagcgtcttttccttaacgcaccgggttc

SEQ ID NO: 62557 - DNA, 75 bp, synthetic construct
  source 1..75: mol_type = other DNA
gtcagtgaatattttcggtggctacaaagtccaggggcgcggcgatgaagcgggcgatcaactgctcagcgatgc

SEQ ID NO: 62558 - DNA, 75 bp, synthetic construct
  source 1..75: mol_type = other DNA
ctgaatttaagcaacagcggacaatggattgcaaaaaatctgaccctgaaggcgaactcactgaccagtgcgggt

SEQ ID NO: 62559 - DNA, 75 bp, synthetic construct
  source 1..75: mol_type = other DNA
gcgcattaccgagagaactaaaacctcttgggcaggcgttgaataaaatgcatcatgctttagtcaaagattttg

SEQ ID NO: 62560 - DNA, 75 bp, synthetic construct
  source 1..75: mol_type = other DNA
cggttgaactggcaaaacgcattaccgaagcactggcgatcccggttatcggtattggcgcaggcaacgtcactg

SEQ ID NO: 62561 - DNA, 75 bp, synthetic construct
  source 1..75: mol_type = other DNA
tacagataaagatacagatcaagaagatcaaaacactatggtccatggcgtaaaaaacgccacgaaccaggcagg

SEQ ID NO: 62562 - DNA, 75 bp, synthetic construct
  source 1..75: mol_type = other DNA
agctttatgatcggcccttccgctcatgaaatcggtgttggctaccgctatgtgaacgaatcgacccacgagatg

SEQ ID NO: 62563 - DNA, 75 bp, synthetic construct
  source 1..75: mol_type = other DNA
tgaacccggaagcgatcccgggctataaaaaatttgcacaggccattgaggccgataacttcgttcaggctgatg

SEQ ID NO: 62564 - DNA, 75 bp, synthetic construct
  source 1..75: mol_type = other DNA
tacaccctgaacaacggcggggcatttatggcccccgaaccggatgacgatgatgacgaaacatgggtactgttc

SEQ ID NO: 62565 - DNA, 75 bp, synthetic construct
  source 1..75: mol_type = other DNA
tcatgagtattacatccgctcatacgacgataacaacaaaggcctttacgccggtcagccgcgcacgctgtatct

SEQ ID NO: 62566 - DNA, 75 bp, synthetic construct
  source 1..75: mol_type = other DNA
aaagagacgcacaacctgatggtgggcggcacagcggacaacggttttggcaccgcgctgctctactccggcacg

SEQ ID NO: 62567 - DNA, 75 bp, synthetic construct
  source 1..75: mol_type = other DNA
tggatgacaaaatcgacatcggcaactggaccatcacgccgggtatgcgtttcgaacatatcgagtcataccaga

SEQ ID NO: 62568 - DNA, 75 bp, synthetic construct
  source 1..75: mol_type = other DNA
gacatcatcctgataaacgcagcgcccgtgcgcagcgcgatgactggctgaagagagagatacagtgcgtatacg

SEQ ID NO: 62569 - DNA, 75 bp, synthetic construct
  source 1..75: mol_type = other DNA
ttaactgccagagcggcgacgttcgtcagttttttcatgtcagggaatatcagacctgtgatgatgccctgcgtg

SEQ ID NO: 62570 - DNA, 75 bp, synthetic construct
  source 1..75: mol_type = other DNA
tagccaggacgagaaagaaaagcgaaaaagcaatacgaattgagatgcagatagccgaagggtttattgacggat

SEQ ID NO: 62571 - DNA, 75 bp, synthetic construct
  source 1..75: mol_type = other DNA
gtctgatgtgtgaaaaagaacctgagctgaaaatagcgcagcaactggcactcgagttctaccgtattctgaaaa

SEQ ID NO: 62572 - DNA, 75 bp, synthetic construct
  source 1..75: mol_type = other DNA
ccgtgcaaggccattctatggctgtttatgatgcgtatggtacacagcagttctattttcctaatgtgctgaagt

SEQ ID NO: 62573 - DNA, 75 bp, synthetic construct
  source 1..75: mol_type = other DNA
gtcaccacggatatcatcgctcatcgcggcacggccctgaagctgaccggcagcacagtgctgaacggtgccatt

SEQ ID NO: 62574 - DNA, 75 bp, synthetic construct
  source 1..75: mol_type = other DNA
aggtggtggccgcactgatggccatcgagagagagttgcgcagcttacggcaggtggtcagggaacagagagtgc

SEQ ID NO: 62575 - DNA, 75 bp, synthetic construct
  source 1..75: mol_type = other DNA
tggaaatatcaccaacggatgctgccgcctttggtcagctttttgccgactacgaactgctaccaccgttccgcc

SEQ ID NO: 62576 - DNA, 75 bp, synthetic construct
  source 1..75: mol_type = other DNA
tttccggctgaactggtgcggctgctggacaggctggaggaagaaatccgggcagaccgcgtgagcagtgaaagc

SEQ ID NO: 62577 - DNA, 75 bp, synthetic construct
  source 1..75: mol_type = other DNA
gtggctgttgaagcagacgatgcggcactttctgccgattttccggcggcggtggcactggctgaggcctgcccg

SEQ ID NO: 62578 - DNA, 75 bp, synthetic construct
  source 1..75: mol_type = other DNA
ccggataattggtaagcatctggccgtccctcgctggcaggatacatgtgattattataatcagatgatggagcg

SEQ ID NO: 62579 - DNA, 75 bp, synthetic construct
  source 1..75: mol_type = other DNA
attcaggtggattttgacacgccgtggtgtcagccagaaagcgacgttattgcagaattaagccgccgtttcagt

SEQ ID NO: 62580 - DNA, 75 bp, synthetic construct
  source 1..75: mol_type = other DNA
tcgtcagggatgcggttgccaaatggcgtaaaggctggaacccaccggttactactgccgtcagacttccttcag

SEQ ID NO: 62581 - DNA, 75 bp, synthetic construct
  source 1..75: mol_type = other DNA
ttgttgccagtgagttgtcaccaaagaaatcacctgatccagaaccatctgtgcctgcagcatcgctccgtcgtc

SEQ ID NO: 62582 - DNA, 75 bp, synthetic construct
  source 1..75: mol_type = other DNA
gcattgccgacccagggctgcagccggaacgcacatcactggcgtggtttcgtaccatgctgggctacggcgcgt

SEQ ID NO: 62583 - DNA, 75 bp, synthetic construct
  source 1..75: mol_type = other DNA
caattacgtcgcttagcctgtagtgtgtcgcaacgggataataaaacagccacatttgacttcagcgcctgttct

SEQ ID NO: 62584 - DNA, 75 bp, synthetic construct
  source 1..75: mol_type = other DNA
cttgcctcattagaaaaatatcacgagccatatgccatttttgatgattactattgtggtgcgatatggtcagcc

SEQ ID NO: 62585 - DNA, 75 bp, synthetic construct
  source 1..75: mol_type = other DNA
attgatagtaagtatattatggcgataataatatggctttatttttctgtcaggagggtatattcaatggtttgt

SEQ ID NO: 62586 - DNA, 75 bp, synthetic construct
  source 1..75: mol_type = other DNA
atgttgataagaaatctggaaaaaggacaatccttagttgataatggagtgctcgactgggatctggacataaat

SEQ ID NO: 62587 - DNA, 75 bp, synthetic construct
  source 1..75: mol_type = other DNA
atggggtctccgcatcttcatggttatcaccgtctgaccctggcacacttttttctgccggaaaaaggcactatc

SEQ ID NO: 62588 - DNA, 75 bp, synthetic construct
  source 1..75: mol_type = other DNA
gagttcgaccgcctctggaaaaaaatgatgccactgctggataagctgcgtgagcagtacggggtcggaccggta

SEQ ID NO: 62589 - DNA, 75 bp, synthetic construct
  source 1..75: mol_type = other DNA
gacacctcaagcagtatctaaagcattagcagcagttcgcaaagattttttgcttcctgctaacaggccaggaaa

SEQ ID NO: 62590 - DNA, 75 bp, synthetic construct
  source 1..75: mol_type = other DNA
taagttaagacagcgttttgcgtcaactataacggaaatcgttatggttgctgaggatgggaaacgacgcaatat

SEQ ID NO: 62591 - DNA, 75 bp, synthetic construct
  source 1..75: mol_type = other DNA
aacgagaaaagcggattatttgatcaagaaggttcaggtaacggtaatggacgtaaacttgctaaagagaacggc

SEQ ID NO: 62592 - DNA, 75 bp, synthetic construct
  source 1..75: mol_type = other DNA
ggacggtgaggggtgtgtgccgggagtggagcgtcacggataacgcccggtacagtgatttcagttgcacgatag

SEQ ID NO: 62593 - DNA, 75 bp, synthetic construct
  source 1..75: mol_type = other DNA
cttttacgtgaagccgagctggtcatcgaccgtcgcgaaggaaaatgggtgcattaccgactgtcgccacacatg

SEQ ID NO: 62594 - DNA, 75 bp, synthetic construct
  source 1..75: mol_type = other DNA
tgagatgccgaattctcctacgttgatggcttacgaaaagatctcaaccgtactgtttggatacgtatgtcagca

SEQ ID NO: 62595 - DNA, 75 bp, synthetic construct
  source 1..75: mol_type = other DNA
gcgatacctatgctggcgctgacaacttcatgaacggtcgtgctaatggtgttgcaacctaccgtaacaatggct

SEQ ID NO: 62596 - DNA, 75 bp, synthetic construct
  source 1..75: mol_type = other DNA
cttcaacccaggcgatgcagcgaaaactcggcaaacactggcaacagttgcataacttcgtctatcttgtcgcga

SEQ ID NO: 62597 - DNA, 75 bp, synthetic construct
  source 1..75: mol_type = other DNA
gtgcctgagcctgaagtttttaactggatcccccgtgaggggatggagacgacacgaaagccatcagttattacg

SEQ ID NO: 62598 - DNA, 75 bp, synthetic construct
  source 1..75: mol_type = other DNA
ttatgagcaacgaagtccaaatggacttaatcattctctgcgcgttttcacctgtgatttcaaagttgaggcgaa

SEQ ID NO: 62599 - DNA, 75 bp, synthetic construct
  source 1..75: mol_type = other DNA
tgcctaagcacaggcgcacgctggcgagaagcaataaatcttacccgctcgcaagtgaccaaataccgaattacc

SEQ ID NO: 62600 - DNA, 75 bp, synthetic construct
  source 1..75: mol_type = other DNA
ttgcaaaaaatcctcggacatcacgatataaaaatgactatgcgttacgctcatctggcaccggatcatctggaa

SEQ ID NO: 62601 - DNA, 75 bp, synthetic construct
  source 1..75: mol_type = other DNA
aacattattatatatacgatacaaagtttcttacgctctaccttgagcagacagagatgaagaatttgccgattg

SEQ ID NO: 62602 - DNA, 75 bp, synthetic construct
  source 1..75: mol_type = other DNA
ctgacagctgggcagcatgtctatgacaaattgctgttgatggttgacgctctgggcaatccccttgcaaccgat

SEQ ID NO: 62603 - DNA, 75 bp, synthetic construct
  source 1..75: mol_type = other DNA
cgtaaacaattcgccaccaaaggtgaagctctggcttttgagcgtcacacgatggaagaaaccgaagcaaagccc

SEQ ID NO: 62604 - DNA, 75 bp, synthetic construct
  source 1..75: mol_type = other DNA
tcgtatcacaattagcattggcttgcactttggcaatcgcctctcaggcaaatgctgcaacgaatgacatctctg

SEQ ID NO: 62605 - DNA, 75 bp, synthetic construct
  source 1..75: mol_type = other DNA
gtgcgggaagtattaattcacaaattactgtcacctatacctatgcgtaaatattatcccctctttaagaaaagc

SEQ ID NO: 62606 - DNA, 75 bp, synthetic construct
  source 1..75: mol_type = other DNA
ttcgaatgggcagcgctgcacgtttcccgctggggtaacggtcgtggacgtttgctctttacgtatatcgttctg

SEQ ID NO: 62607 - DNA, 75 bp, synthetic construct
  source 1..75: mol_type = other DNA
atggctatccgtgatgaaaatgaaatgattattgaaagccgaccaagtgcacttgatattcacgaattaactttg

SEQ ID NO: 62608 - DNA, 75 bp, synthetic construct
  source 1..75: mol_type = other DNA
tgaattatgaacagttaacacaggctgctgagcaactgttatccagatgtaagccaaccccgaatactccatctg

SEQ ID NO: 62609 - DNA, 75 bp, synthetic construct
  source 1..75: mol_type = other DNA
cctgtcactggataaagccattccagaccgcactaccatcatgaatttccggcatttgctggagcagcatgaact

SEQ ID NO: 62610 - DNA, 75 bp, synthetic construct
  source 1..75: mol_type = other DNA
agtcaactggcgatgttattcaccctggcgaacctggttcgagttgaccaattgatacgggcacaggcgagatct

SEQ ID NO: 62611 - DNA, 75 bp, synthetic construct
  source 1..75: mol_type = other DNA
ccgatgctgatggtctgtgcctgttcaccaaacgcctggaggaaggccagtttatctggcctgcggtgcgtgacg

SEQ ID NO: 62612 - DNA, 75 bp, synthetic construct
  source 1..75: mol_type = other DNA
gccgacgggcgtgtcgcggatatctctgtcaccagtccgtctccggcctgcgtcaccatctccgtgctgtcacgt

SEQ ID NO: 62613 - DNA, 75 bp, synthetic construct
  source 1..75: mol_type = other DNA
gcaaatagactcgatcctgaacccatcggtcccaaatttgtcccagtcaaaaaataaggaaggtactaatgatgt

SEQ ID NO: 62614 - DNA, 75 bp, synthetic construct
  source 1..75: mol_type = other DNA
agaaatgaaggtggagacgttcggcaataaattgcaggtcagcaacctgctggatattgatccgaaaggtggcgg

SEQ ID NO: 62615 - DNA, 75 bp, synthetic construct
  source 1..75: mol_type = other DNA
gaagccggcggtgaaattgaactggataccgttaacttccagcttcttggtgaagccgcgcgtgaagcagggagc

SEQ ID NO: 62616 - DNA, 75 bp, synthetic construct
  source 1..75: mol_type = other DNA
tctgaacagtgagaacgttcgcccggtggctgaccgtctgacggttcgcagcgcagaaatcatcccgtatcgcgt

SEQ ID NO: 62617 - DNA, 75 bp, synthetic construct
  source 1..75: mol_type = other DNA
tctttgccgccctgcatgttgagggggtgcagcgtgtggagctggcttctcctcaggcggatgtggtcctgaaca

SEQ ID NO: 62618 - DNA, 75 bp, synthetic construct
  source 1..75: mol_type = other DNA
ctgataatgccgttaaaataggtttggggtcgttgttgactattttagggggttggctgactcttaagctaacac

SEQ ID NO: 62619 - DNA, 75 bp, synthetic construct
  source 1..75: mol_type = other DNA
ctatgtcgttaatggtaagtacttgatctacaccaagagcatcaaatccatcgacgcgatggcagaccttatccg

SEQ ID NO: 62620 - DNA, 75 bp, synthetic construct
  source 1..75: mol_type = other DNA
gaagatatcgccgccgcccatctgctgggtaaaaccgaagccgagttcctgaaaatgaaagaggaaatgcaataa

SEQ ID NO: 62621 - DNA, 75 bp, synthetic construct
  source 1..75: mol_type = other DNA
gataacgatcacgtcaggtttagccataaggaaagcagcatttaaactccagtttgatgtttctactttcatttt

SEQ ID NO: 62622 - DNA, 75 bp, synthetic construct
  source 1..75: mol_type = other DNA
aatcacagacatgccatcaaccgtaaaaaatctacatattgaattaactgattcaccatttatacatttcatatc

SEQ ID NO: 62623 - DNA, 75 bp, synthetic construct
  source 1..75: mol_type = other DNA
gaaggcgacggaacagcagaaaaagacctgctggatgtggtggagaacgccctgaacagtgagaacgtccgcccg

SEQ ID NO: 62624 - DNA, 75 bp, synthetic construct
  source 1..75: mol_type = other DNA
ggcatgaaagcgcacattggcgtggacgccaaaagtggcctgacccacagtctggtgaccacggcggctaacgag

SEQ ID NO: 62625 - DNA, 75 bp, synthetic construct
  source 1..75: mol_type = other DNA
gggaagtgaaaacggttgttccggtcagttcagttacgccggtaacacctcctcgtccgctaagaacgggtgagc

SEQ ID NO: 62626 - DNA, 75 bp, synthetic construct
  source 1..75: mol_type = other DNA
tgacacagttcgttgtatctgtcgtggcgacagtaaagcccgggatgaaatagcaaaatgtcgcaacattactga

SEQ ID NO: 62627 - DNA, 75 bp, synthetic construct
  source 1..75: mol_type = other DNA
cactttttccatttccggcaatttagcgaccaatatgttgctggaaaatggcggtaatttattggtattagcagg

SEQ ID NO: 62628 - DNA, 75 bp, synthetic construct
  source 1..75: mol_type = other DNA
ggtgcttttattgcctggggttttattactgcgttatttattcccaccggttggctgcctaacgaacatttcgcc

SEQ ID NO: 62629 - DNA, 75 bp, synthetic construct
  source 1..75: mol_type = other DNA
gctgcggcaaagcttgaatgcgaaattattgagatggacggggagccagaccatgtacacctgctggttgcctac

SEQ ID NO: 62630 - DNA, 75 bp, synthetic construct
  source 1..75: mol_type = other DNA
tggaaaataccggcgaactgacggtagtggctaaaacctcggcgaaaaatactaccgttgatgctggcggtaagc

SEQ ID NO: 62631 - DNA, 75 bp, synthetic construct
  source 1..75: mol_type = other DNA
caggcggttattaatgctgcctacctggtggcctatgcagatggtgaatgtgagacttcagagaaagcgaagatc

SEQ ID NO: 62632 - DNA, 75 bp, synthetic construct
  source 1..75: mol_type = other DNA
atgacttcataccgtagaatgcttaccaatttcgggcaccgattacccgtgacctcagaacggatactttttatg

SEQ ID NO: 62633 - DNA, 75 bp, synthetic construct
  source 1..75: mol_type = other DNA
gcagaagaacgccggaggctgttcgatgatataaggaaaaacagcccgaaagccggaagaccaaccgtaaataaa

SEQ ID NO: 62634 - DNA, 75 bp, synthetic construct
  source 1..75: mol_type = other DNA
aaccaaagaacgcctgcgtcgtgcaggtaaaaaagttcgtgaagacaatccagaatggaatggtgatgtcggttt

SEQ ID NO: 62635 - DNA, 75 bp, synthetic construct
  source 1..75: mol_type = other DNA
ttggttactgggagccgatggcgctgacggacgtcacccggtcaccgggatgcatggttaacctgggcttcagcc

SEQ ID NO: 62636 - DNA, 75 bp, synthetic construct
  source 1..75: mol_type = other DNA
acagtgccacccgttcgggcgcagcgtgacccgctgggaaaccgggaaaaatccgcccaacacaaagaaaaactt

SEQ ID NO: 62637 - DNA, 75 bp, synthetic construct
  source 1..75: mol_type = other DNA
tatgttcgtaataagcttatcgacctctttcgagaggcctatgacctgatccttggaatgcagcaagtatttttc

SEQ ID NO: 62638 - DNA, 75 bp, synthetic construct
  source 1..75: mol_type = other DNA
gggctggcgacaaccggcgtggtagccacgttaaaagtgggcgacggagagaaaagtattggcctgcgggcggat

SEQ ID NO: 62639 - DNA, 75 bp, synthetic construct
  source 1..75: mol_type = other DNA
gtccgttgcagtcctccctgctggtcagtgaacgcatggcgttcaagctgcaccgtcagggcatgattatggaaa

SEQ ID NO: 62640 - DNA, 75 bp, synthetic construct
  source 1..75: mol_type = other DNA
agttaaatattaatcaactggcagccatttcaggtctgcaccggcagactgttgccgccagaatggcggatgttc

SEQ ID NO: 62641 - DNA, 75 bp, synthetic construct
  source 1..75: mol_type = other DNA
attgtttcttgggatcaactcactggtctattacgtgattattggctggcttccggcgatcctcatcagtcacgg

SEQ ID NO: 62642 - DNA, 75 bp, synthetic construct
  source 1..75: mol_type = other DNA
gcacaaagatatgactggtgggcttatgtatcagctcgcccccgcaatatcgcatttaactatatcgtgagggcg

SEQ ID NO: 62643 - DNA, 75 bp, synthetic construct
  source 1..75: mol_type = other DNA
gggaaaaatccgcccaacacaaagaaaaacttcggctacctgatgtggcgtaaacgtaactgtgtattcctgtaa

SEQ ID NO: 62644 - DNA, 75 bp, synthetic construct
  source 1..75: mol_type = other DNA
gattagcagggcttttaagtatgcgcttgatggactcaccaataaaaaacgcccggtgtgcaagaccgagcgttc

SEQ ID NO: 62645 - DNA, 75 bp, synthetic construct
  source 1..75: mol_type = other DNA
attgtcttcgcggtggtactggtcacgttgggaaaatatctcttcccggcaaaacccgtagttgcgccagttatt

SEQ ID NO: 62646 - DNA, 75 bp, synthetic construct
  source 1..75: mol_type = other DNA
tgctattagcaatcttcgcgaggttaccaaagagcagaatcaggcaaacatgatacccagaaagaaaacaaaatc

SEQ ID NO: 62647 - DNA, 75 bp, synthetic construct
  source 1..75: mol_type = other DNA
tgaaaaccgttctggccgtcagtcgcggacaaattccacccttattgaatttccacacccccaacccggcgctga

SEQ ID NO: 62648 - DNA, 75 bp, synthetic construct
  source 1..75: mol_type = other DNA
gaagaatgcggatgccagcgatctggccttcacggccctgcacgcgcgccgtctcgatcttcctttccgcctggc

SEQ ID NO: 62649 - DNA, 75 bp, synthetic construct
  source 1..75: mol_type = other DNA
cgcccttcttccgcgcactggtcgattatgtcaatcagggcaatagcgcttttgactgcccgggtcatcagctgt

SEQ ID NO: 62650 - DNA, 75 bp, synthetic construct
  source 1..75: mol_type = other DNA
acgatgaccggtgacggaatgactgttattaacggtgaaactgtcacatcacagaagataaaatttctgggaaaa

SEQ ID NO: 62651 - DNA, 75 bp, synthetic construct
  source 1..75: mol_type = other DNA
ggtgccacacaacctgtaccggatgcgcctgtgccgaaagatttaccccccggaatgccggatatgcggcaattt

SEQ ID NO: 62652 - DNA, 75 bp, synthetic construct
  source 1..75: mol_type = other DNA
acacgcattgatgcagaactttcgatggtggcattacgagaatatcgtgaaaaattcccggcatggcaggacgcg

SEQ ID NO: 62653 - DNA, 75 bp, synthetic construct
  source 1..75: mol_type = other DNA
tcacgcagtctggggagcgcttgctgcacaactgggcggaaacaatgcggcttccggtgctgcaggggcattcag

SEQ ID NO: 62654 - DNA, 75 bp, synthetic construct
  source 1..75: mol_type = other DNA
aaacttgcggacccggcggaatagcgtacggcatgcgttccattggcggcgtcctggaactggtggattatatgg

SEQ ID NO: 62655 - DNA, 75 bp, synthetic construct
  source 1..75: mol_type = other DNA
ggtgttattagccgttgatgaagcgcactgtatctcccaatggggccacgatttccgcccggaatatgccgcgct

SEQ ID NO: 62656 - DNA, 75 bp, synthetic construct
  source 1..75: mol_type = other DNA
atcaggaaattaaggcgctggatttacgccagtttgtaagttctgccgcacaaaaaccggcatcagcatcaacag

SEQ ID NO: 62657 - DNA, 75 bp, synthetic construct
  source 1..75: mol_type = other DNA
tgcagcgcctgaaagaagcggcagaaaaagcgaaaatcgaactgtcttccgctcagcagaccgacgttaacctgc

SEQ ID NO: 62658 - DNA, 75 bp, synthetic construct
  source 1..75: mol_type = other DNA
gaaagctgaaagcggagggaggttgcggcggcgaacggcagagcgaaacctttaactgctggctagccgtcgaag

SEQ ID NO: 62659 - DNA, 75 bp, synthetic construct
  source 1..75: mol_type = other DNA
gtacgcatcggtgcccccaccggcgtggcctgttcggtgtgccccggcggggtgacgtccggccatccggtcaat

SEQ ID NO: 62660 - DNA, 75 bp, synthetic construct
  source 1..75: mol_type = other DNA
gttatgaattacatggaatatctggtaacttgtcagttggatgaacaacaaatgtcatcactgctttatgaaaga

SEQ ID NO: 62661 - DNA, 75 bp, synthetic construct
  source 1..75: mol_type = other DNA
ggatctcaatcgcaaatgcgactgttcttgaagttacgaaaggcagaagtgccagcgatatgatgacggggatgc

SEQ ID NO: 62662 - DNA, 75 bp, synthetic construct
  source 1..75: mol_type = other DNA
aggcaggtaggttacattgaaacccacggcaccggcacaccgctgggcgacgcgattgaaattgaagcgttacgc

SEQ ID NO: 62663 - DNA, 75 bp, synthetic construct
  source 1..75: mol_type = other DNA
cgcgctcgccgtaatgcggcaaggtccgatggaagggatatcctcactggcagacattgaagactttttgcagca

SEQ ID NO: 62664 - DNA, 75 bp, synthetic construct
  source 1..75: mol_type = other DNA
aatggttcagcgcgtatgcgatggtgggtgtggcttacagccgtgtgtcgactttctccggggattatctccgcg

SEQ ID NO: 62665 - DNA, 75 bp, synthetic construct
  source 1..75: mol_type = other DNA
cccggccgaatccgtggccgttgatgtcgcttatgaaggctccggcagtggcgactggcgcactgacgggttcat

SEQ ID NO: 62666 - DNA, 75 bp, synthetic construct
  source 1..75: mol_type = other DNA
aatccaggtggtaatagctttattaaaatgccagcttccagtactggtaacccagcaggggtagatatatatggt

SEQ ID NO: 62667 - DNA, 75 bp, synthetic construct
  source 1..75: mol_type = other DNA
ttgggtaacggacataacctacataaggacccacgaaggctggctgtatcttgccgtggttgttgatctgttctc

SEQ ID NO: 62668 - DNA, 75 bp, synthetic construct
  source 1..75: mol_type = other DNA
ttcaccgctcagtactttccttattgatagctgccatgatatatgccccgcctgggatgacggccttcacttcta

SEQ ID NO: 62669 - DNA, 75 bp, synthetic construct
  source 1..75: mol_type = other DNA
aaaccccggaacaactggaaaaaatgctggaaggacttggggatgtggatattgacagtcacgcacaggacgtcg

SEQ ID NO: 62670 - DNA, 75 bp, synthetic construct
  source 1..75: mol_type = other DNA
gcggtgcgcatgaccctgcattcgccgcaatggggcgagattgaacgcatctggttgttacgcgggccgcaatta

SEQ ID NO: 62671 - DNA, 75 bp, synthetic construct
  source 1..75: mol_type = other DNA
gcgacgttacttatcaagcgtcacggcggcgtactgccgccgctcctggcctctgccattcagaaactgaccgga

SEQ ID NO: 62672 - DNA, 75 bp, synthetic construct
  source 1..75: mol_type = other DNA
ctgtcattttgtaaaaaaatacttaattcaaataacattgatggtgtttttattaaaggttcggcgctgaatttc

SEQ ID NO: 62673 - DNA, 75 bp, synthetic construct
  source 1..75: mol_type = other DNA
accgctattggcgacactgtaggtctggtcattgcgaacgttgatagcgccctgttggacgcgatgaaacttgaa

SEQ ID NO: 62674 - DNA, 75 bp, synthetic construct
  source 1..75: mol_type = other DNA
acaggccacaccacgcaaacagcccaccagcaacgccagggcacgggcgaacattcagaaaatgaaaaacatgat

SEQ ID NO: 62675 - DNA, 75 bp, synthetic construct
  source 1..75: mol_type = other DNA
ggttgccctgaacaaaacccgcccttacaccgccagcgaaacgttgctgctggacgtgtcccgtgccatctaccc

SEQ ID NO: 62676 - DNA, 75 bp, synthetic construct
  source 1..75: mol_type = other DNA
gatcgtgacctatttcctgactatctttgctggtactggcaacatatctctggcgacactgccagttatcgctga

SEQ ID NO: 62677 - DNA, 75 bp, synthetic construct
  source 1..75: mol_type = other DNA
gtcgtcagtacaggcgatccctgtggcagtgcgcatgactctgcattcgccgcaatggggcgagattgaacgcat

SEQ ID NO: 62678 - DNA, 75 bp, synthetic construct
  source 1..75: mol_type = other DNA
gctggcaaaccgcgtcacgccggacagtctgccgccggtggagtggctgacctacggcagcggctatcttgcggg

SEQ ID NO: 62679 - DNA, 75 bp, synthetic construct
  source 1..75: mol_type = other DNA
gacggcaatacggcgtggagcgcggaatatgatgaatggggcaaccagcttaatgaggagaacccgcatcatgtg

SEQ ID NO: 62680 - DNA, 75 bp, synthetic construct
  source 1..75: mol_type = other DNA
ctggtgcgcatcagcggcccgcgacagacgcgggaatacggctacagcgccacgggcaggctggagagtgtgcgc

SEQ ID NO: 62681 - DNA, 75 bp, synthetic construct
  source 1..75: mol_type = other DNA
gcggtccgggaggttgcccgggaaaatctgctgcaggagcgtctgcagcagatggagcgggatatggttcgtgac

SEQ ID NO: 62682 - DNA, 75 bp, synthetic construct
  source 1..75: mol_type = other DNA
cgccctggaatgtatccgatacaccgccacgcggtcgctgaatgacgctaaaaatattcttgttgctgattgtga

SEQ ID NO: 62683 - DNA, 75 bp, synthetic construct
  source 1..75: mol_type = other DNA
cttcacccccaaattccagcgcgtcgacctgttcaactacaacgtgctggtcagaaattatgacagcagcgcctt

SEQ ID NO: 62684 - DNA, 75 bp, synthetic construct
  source 1..75: mol_type = other DNA
atcctgaaacgtaacggaagaatggttgcagaacgaatggataactcggactcatggcaactggttggtgactac

SEQ ID NO: 62685 - DNA, 75 bp, synthetic construct
  source 1..75: mol_type = other DNA
tttacgatgtggtccgggagcttgaggatgtatatggccataaagagctatggctgtattcaggagcggcatacg

SEQ ID NO: 62686 - DNA, 75 bp, synthetic construct
  source 1..75: mol_type = other DNA
tttgttgattggccagcagtagatggtggcgatgaggacgacgacgacgatgattttggtgatcatgtagaccag

SEQ ID NO: 62687 - DNA, 75 bp, synthetic construct
  source 1..75: mol_type = other DNA
atgaagaaatccatcaccacgcttgatctcaatctgctgctctgtctgcaactgctgatgcaggagcgcagcgta

SEQ ID NO: 62688 - DNA, 75 bp, synthetic construct
  source 1..75: mol_type = other DNA
gaaacatctgtgctggcgcactacaggctggcggggacgtgtggaatggcgataaaaccacacgatatgcaggca

SEQ ID NO: 62689 - DNA, 75 bp, synthetic construct
  source 1..75: mol_type = other DNA
ccgccgttggtgctgagtttaatgcctggaaatgggcacagttacgtaccggttaccgccagaatctggccagca

SEQ ID NO: 62690 - DNA, 75 bp, synthetic construct
  source 1..75: mol_type = other DNA
gctgaacgtcgtcgtgaagcagagcagacgcgaattctggctgaacgacagattcaggaaacagaaatcgaccgc

SEQ ID NO: 62691 - DNA, 75 bp, synthetic construct
  source 1..75: mol_type = other DNA
ctgcatcgtacccgacagggttttatcgaagagaaaacagcaacatataatcgtcttcgagggttgatatcagaa

SEQ ID NO: 62692 - DNA, 75 bp, synthetic construct
  source 1..75: mol_type = other DNA
ttactggcagcaaataaatccggcggtctggttgtgaacgatatcgcgcagctggcaggaatgagtgagcaagag

SEQ ID NO: 62693 - DNA, 75 bp, synthetic construct
  source 1..75: mol_type = other DNA
ccggtcgcgtgctggagtcggtttatccccgctttttagtggatctggcgcagggcgatgatgcccgccttccac

SEQ ID NO: 62694 - DNA, 75 bp, synthetic construct
  source 1..75: mol_type = other DNA
gcatcacggcctcagtgaataatgctcagaagacggttacggtgaaattcaaggcggatttcagtaccggtcagg

SEQ ID NO: 62695 - DNA, 75 bp, synthetic construct
  source 1..75: mol_type = other DNA
cgccgcatctccagaacgtgtagattctctggtggcggacgggaagactactgcaacaatgacggttaccctgat

SEQ ID NO: 62696 - DNA, 75 bp, synthetic construct
  source 1..75: mol_type = other DNA
cactgccagtgttgcagccattgaaaaagcaaaaaaagcaggtattcccgttatattaattaatcgcgaaatacc

SEQ ID NO: 62697 - DNA, 75 bp, synthetic construct
  source 1..75: mol_type = other DNA
ctgcgggaggtggtccgggaagcccggaccgaaatccgcagcatggcggatgccctggcaaaaatccggaaatga

SEQ ID NO: 62698 - DNA, 75 bp, synthetic construct
  source 1..75: mol_type = other DNA
cgtgcggctggatgcgccccggctggcgacgttactcgttaaccgccacgatggcgtgctgccgccgcacctggc

SEQ ID NO: 62699 - DNA, 75 bp, synthetic construct
  source 1..75: mol_type = other DNA
cgccatcacgtgatggccgtgaccgaactgctgcgcgacaccggccgggccaccgccaccgtcaacacctatctt

SEQ ID NO: 62700 - DNA, 75 bp, synthetic construct
  source 1..75: mol_type = other DNA
tgtctgtgggttgattggcactctggcacagagccttgtggatctgactggtggggcctacctcttcattgctcc

SEQ ID NO: 62701 - DNA, 75 bp, synthetic construct
  source 1..75: mol_type = other DNA
gtaaagaaaaaacagagcctgaatttcttattgaggcttcagcagatagtgccagcgcgctttcatactctcgtg

SEQ ID NO: 62702 - DNA, 75 bp, synthetic construct
  source 1..75: mol_type = other DNA
aaagcagcacatcagcttacctggcaacaagcaccgaaatcatcagagccgctaaacgattctgacctggaacag

SEQ ID NO: 62703 - DNA, 75 bp, synthetic construct
  source 1..75: mol_type = other DNA
aactccattattgccatttctgcgattgttgccatggcaacggtaatggatgtctgtgggttgattggcactctg

SEQ ID NO: 62704 - DNA, 75 bp, synthetic construct
  source 1..75: mol_type = other DNA
gcggggccgtctgtgcgcgtgaatgaatggttcagcgcgtatgcgatcgcgggtgtggcttacagccgtgtgtcg

SEQ ID NO: 62705 - DNA, 75 bp, synthetic construct
  source 1..75: mol_type = other DNA
gcgcaggcggtgatggtggcttacgcgatgggcggcgatctggaccagctcgctgccaactacaacgtgacacgc

SEQ ID NO: 62706 - DNA, 75 bp, synthetic construct
  source 1..75: mol_type = other DNA
agattgaatgggtagcaacccccggtgttctgatcatcattgccagcgtgattggcgggttgattcagaaagcat

SEQ ID NO: 62707 - DNA, 75 bp, synthetic construct
  source 1..75: mol_type = other DNA
atgcgcgcctttatctgatgcccccggaggctttcgctgtccagccttatgctttctaccagcaaatacccggac

SEQ ID NO: 62708 - DNA, 75 bp, synthetic construct
  source 1..75: mol_type = other DNA
tgcgttggcacaaaccatcgatcagctgattgtgatgcgtttcttccacgggctggctgcggctgcggccagcgt

SEQ ID NO: 62709 - DNA, 75 bp, synthetic construct
  source 1..75: mol_type = other DNA
atcaagaaaatcacgggaggcgatcccgttgaaattaacccgaaatatgagaagcgattcacgacgataataagg

SEQ ID NO: 62710 - DNA, 75 bp, synthetic construct
  source 1..75: mol_type = other DNA
gggagttaagcagatcaaggcgtggactgatcgcctgcgcgcggcagttgatatttgcagatcgtggggggaaac

SEQ ID NO: 62711 - DNA, 75 bp, synthetic construct
  source 1..75: mol_type = other DNA
cgtctccggcaaatgtgacggtttccatcctgtccactgaaggcgacggcacagcaacggaggcgttgcttaata

SEQ ID NO: 62712 - DNA, 75 bp, synthetic construct
  source 1..75: mol_type = other DNA
cccgaccgaatccgtggccattgatattgcttatgaaggctccggtagtggtgactggcgcactgacggtttcat

SEQ ID NO: 62713 - DNA, 75 bp, synthetic construct
  source 1..75: mol_type = other DNA
ttaatgaggcatggcgaaaagcaagaacagcggcagccaactatcttggaagacctctggattgtacatttcatg

SEQ ID NO: 62714 - DNA, 75 bp, synthetic construct
  source 1..75: mol_type = other DNA
gctcttgaacgatgctgtactccacgtaccggaggtaaatgtgatgtacttaaccctgtggaccctgttacgacg

SEQ ID NO: 62715 - DNA, 75 bp, synthetic construct
  source 1..75: mol_type = other DNA
aaattgaatggatcgcaacccccggtgttctgattatcattgccagtgttattggcggcttgatacagaaagcat

SEQ ID NO: 62716 - DNA, 75 bp, synthetic construct
  source 1..75: mol_type = other DNA
atggcgagatttatgcctcaatggtcaacgatatttatgacgttcctcgtcatgtaacgctgacacttgaagatg

SEQ ID NO: 62717 - DNA, 75 bp, synthetic construct
  source 1..75: mol_type = other DNA
ggtggtgctgacagttcttagccgcgaaggcgacggaatagcagaaaaagacttgctggatgtggtggagaacgc

SEQ ID NO: 62718 - DNA, 75 bp, synthetic construct
  source 1..75: mol_type = other DNA
gcgaatttttccgtcgccatccggcggggaatcagtttgtggaatactttggtgaggcgctgttccgtgctgact

SEQ ID NO: 62719 - DNA, 75 bp, synthetic construct
  source 1..75: mol_type = other DNA
tcagggactgttcacaatgtcggatgccgttattgcagggatacggtattccggccatgtgcatcatgataacgg

SEQ ID NO: 62720 - DNA, 75 bp, synthetic construct
  source 1..75: mol_type = other DNA
tcgattgttctgcgctgtaattcgtaagatcgttaataagcatgggcatgttatacacccaacgaaaacaaaact

SEQ ID NO: 62721 - DNA, 75 bp, synthetic construct
  source 1..75: mol_type = other DNA
gtgggtatctggttccgcttcgccaccgacgcccggctgaaaatcgaagttatcgaattttacgacgaccagagc

SEQ ID NO: 62722 - DNA, 75 bp, synthetic construct
  source 1..75: mol_type = other DNA
caaaagacatcaagagttggtttaagattgatacatatcgcaaatttgaagacctctcattgctccagttttacc

SEQ ID NO: 62723 - DNA, 75 bp, synthetic construct
  source 1..75: mol_type = other DNA
acagaagtgaatgatctaccggtccggcaaacgccgatgtttacgctgctgcgtgaggcgggattttcaagttcg

SEQ ID NO: 62724 - DNA, 75 bp, synthetic construct
  source 1..75: mol_type = other DNA
aaaaaaataaaaaaaggactaagcatttatgataaaagcgcaatgcaacttcaacttttagcatcaaacctatcg

SEQ ID NO: 62725 - DNA, 75 bp, synthetic construct
  source 1..75: mol_type = other DNA
gcgtgagcgttgatacccctgaaacggtcttcaccggcgatgtcatcgtggaaaaaaatctgcatgtgaaaggca

SEQ ID NO: 62726 - DNA, 75 bp, synthetic construct
  source 1..75: mol_type = other DNA
acaacgttaacagaaaagggattagcaaccacaaagctgattcctaaaaatagtatattagtttgttgtatcggt

SEQ ID NO: 62727 - DNA, 75 bp, synthetic construct
  source 1..75: mol_type = other DNA
cccacctaagcatctacaagatgagtatgagattatttataaaaaaataaaaaaaggactaagcatttatgataa

SEQ ID NO: 62728 - DNA, 75 bp, synthetic construct
  source 1..75: mol_type = other DNA
cagcgggattatctccacactggcgcagtcgattgtcgatctgaccggcagctcgtacgtcttcctcgccccggt

SEQ ID NO: 62729 - DNA, 75 bp, synthetic construct
  source 1..75: mol_type = other DNA
gcgtatatgtgccgcgctgtacatgattatggcgaaccggtacgactggcagatgttcattgaggccaccggaga

SEQ ID NO: 62730 - DNA, 75 bp, synthetic construct
  source 1..75: mol_type = other DNA
gttatgatggttcacatatcacgttctattatcttgatacccggaccttcccggtgacctatatggacagccagg

SEQ ID NO: 62731 - DNA, 75 bp, synthetic construct
  source 1..75: mol_type = other DNA
catcaccgaatcaaccatgatcggtcacaacccgaaaactccgggcggagtggggctgggcgtagggctcaccat

SEQ ID NO: 62732 - DNA, 75 bp, synthetic construct
  source 1..75: mol_type = other DNA
caggccttcaaccttggtattgggaaagatttaggactttttggtgccttttctttcgatatcacgcaggccaat

SEQ ID NO: 62733 - DNA, 75 bp, synthetic construct
  source 1..75: mol_type = other DNA
gctttatgcagcaatcctggcaaatgtacatttacaacgtcatcaggatgccatcatgctcattgagaaaatact

SEQ ID NO: 62734 - DNA, 75 bp, synthetic construct
  source 1..75: mol_type = other DNA
cgaaagtctgggtgagaacggtgtctatctacatggtatgccaaatgcctttgcaccaaaagaacagcgcagtgt

SEQ ID NO: 62735 - DNA, 75 bp, synthetic construct
  source 1..75: mol_type = other DNA
cctgttcatcttccgtggccgacggagtgacatgattaaaatcctctgggctgatgctgatggtctgtgcctgtt

SEQ ID NO: 62736 - DNA, 75 bp, synthetic construct
  source 1..75: mol_type = other DNA
acggttacggcgggcgttacaaccgtgaccctgtcacggtggaggggcgggacaactggcttgtccgtctcgacc

SEQ ID NO: 62737 - DNA, 75 bp, synthetic construct
  source 1..75: mol_type = other DNA
gtttctgaatatcaagaacgtgagccgggacgacatgatggcggcacaccgtgtgccgccgcaaatgatggggat

SEQ ID NO: 62738 - DNA, 75 bp, synthetic construct
  source 1..75: mol_type = other DNA
atgagtttaagaattgacgctgaactgaaggatgcttttatggccgctgcaaaaagcatggaccgtaatggctct

SEQ ID NO: 62739 - DNA, 75 bp, synthetic construct
  source 1..75: mol_type = other DNA
tggcggctgctaagactgaactgaatcagactattacttcaacccgcgatactatcaacgcaacaattaacaaga

SEQ ID NO: 62740 - DNA, 75 bp, synthetic construct
  source 1..75: mol_type = other DNA
tcgcaatcagggaaaatttttccccgaagtgcatgaagatgcctttgactacctgacgatgctgatccagcaatg

SEQ ID NO: 62741 - DNA, 75 bp, synthetic construct
  source 1..75: mol_type = other DNA
actacagaagcgactacatgaactaaacgaatgggtgggtgcagaagtaatacgttttgatgactatgttttagg

SEQ ID NO: 62742 - DNA, 75 bp, synthetic construct
  source 1..75: mol_type = other DNA
ttcttattttcatgttacgcctgaatcagcgaatgcgaattataaaacatggatcgctaccacagggatggatag

SEQ ID NO: 62743 - DNA, 75 bp, synthetic construct
  source 1..75: mol_type = other DNA
ggggatgtggaaaaggctagctgtgtgtttgtgaggaatgagctaataccattacaggaaagaataaaaggatta

SEQ ID NO: 62744 - DNA, 75 bp, synthetic construct
  source 1..75: mol_type = other DNA
tctttgatagtctaccattccggggtgtaatgctgggttcggatgaaagtatggtgccttataaccaacgggcat

SEQ ID NO: 62745 - DNA, 75 bp, synthetic construct
  source 1..75: mol_type = other DNA
cggtagctatggcagtggtgtcttttggtgtaaatgctgctccacaggggcagggaaaagtaacttttaacggaa

SEQ ID NO: 62746 - DNA, 75 bp, synthetic construct
  source 1..75: mol_type = other DNA
cattcacacaatatacctgttggtcacactggcgcggggaatggtgtatcagccggttataacgctgcgttaggt

SEQ ID NO: 62747 - DNA, 75 bp, synthetic construct
  source 1..75: mol_type = other DNA
ctgattaaccagaaacgcattgcaccgctgaatcttctgaatgttgactctaacaatcagagccagattattgcg

SEQ ID NO: 62748 - DNA, 75 bp, synthetic construct
  source 1..75: mol_type = other DNA
gggatggggcctttccggcccccatcaagctgggccgcagttcccgatggctgaaaagtgaagtggaagcctggc

SEQ ID NO: 62749 - DNA, 75 bp, synthetic construct
  source 1..75: mol_type = other DNA
atgaaaaaaagtgtcgattttattggtgtcgggacagggccatttaatctcagcattgctgcattgtcacatcag

SEQ ID NO: 62750 - DNA, 75 bp, synthetic construct
  source 1..75: mol_type = other DNA
gaaacgtggagccacgcctgatgattatcttttccactatcatcgctatgctttgcctgtgtctgaagcattatc

SEQ ID NO: 62751 - DNA, 75 bp, synthetic construct
  source 1..75: mol_type = other DNA
tctacaaaaaatgtttctagaaataaataattggttaaacgatagaattataaatttttcaacctacgaactaaa

SEQ ID NO: 62752 - DNA, 75 bp, synthetic construct
  source 1..75: mol_type = other DNA
tcagggcggtgtcgccgtcagaccttgctgatgcacttgctcaaaaaattcgtgaaggatggcaaccatacggcg

SEQ ID NO: 62753 - DNA, 75 bp, synthetic construct
  source 1..75: mol_type = other DNA
tgttgatagtcaaaacaaagtattatatataagcgatagcgatattaagacctctggaagcgtatctgacaaaga

SEQ ID NO: 62754 - DNA, 75 bp, synthetic construct
  source 1..75: mol_type = other DNA
aatgagatgtatcactaccatcgggcaacgattgtggcgaataacgacctgcgccggggagatttgctgtttttc

SEQ ID NO: 62755 - DNA, 75 bp, synthetic construct
  source 1..75: mol_type = other DNA
ataaatttgatgttgtcttttcttactgcggagataatataaaggaatttatacttttattaccctataataaat

SEQ ID NO: 62756 - DNA, 75 bp, synthetic construct
  source 1..75: mol_type = other DNA
gtgacgacaaatgtagaaatttcttgtccaactagcgatgaggcaagtttcgaaaatgaagccaaacgtaaaagc

SEQ ID NO: 62757 - DNA, 75 bp, synthetic construct
  source 1..75: mol_type = other DNA
agagccggtggcgtgagctggcgtgccggtgaccttgtggtgccactgtatgacgacagcggcgaactggttaac

SEQ ID NO: 62758 - DNA, 75 bp, synthetic construct
  source 1..75: mol_type = other DNA
caacgattgtggcgaataacgacctgcgccggggagatttgctgtttttccatatccacagccgcgagattgccg

SEQ ID NO: 62759 - DNA, 75 bp, synthetic construct
  source 1..75: mol_type = other DNA
tgtctgctgatgaacaggcagcagtgaaggcgctcggcattactgaggctgagtatctgaaaatgaaacaggaac

SEQ ID NO: 62760 - DNA, 75 bp, synthetic construct
  source 1..75: mol_type = other DNA
caggatgaagagagcgggctgtggtataatttacaccgctactacgacgccgggacggggcagtatttaagccag

SEQ ID NO: 62761 - DNA, 75 bp, synthetic construct
  source 1..75: mol_type = other DNA
aaagcgggaaaggggaattctggagctgccagcgttatccggagtgtaagggagtgatttcagagcagaaaccga

SEQ ID NO: 62762 - DNA, 75 bp, synthetic construct
  source 1..75: mol_type = other DNA
agcctctgatggttaccagactgacctgccgctgtcagtgtttgatccgcagtattatcacccactaccggtgtc

SEQ ID NO: 62763 - DNA, 75 bp, synthetic construct
  source 1..75: mol_type = other DNA
ctgccagcgttatccggagtgtaagggagtgatttcagagcagaaaccgacatccgggaaacggggcggcagaaa

SEQ ID NO: 62764 - DNA, 75 bp, synthetic construct
  source 1..75: mol_type = other DNA
caagcgccgataagtgtgattgcagacgtgatcacagcatgggagttggacgcaaaacgtattattaccgaaacc

SEQ ID NO: 62765 - DNA, 75 bp, synthetic construct
  source 1..75: mol_type = other DNA
ctgacgccggagacgacagtgtctcagaacggaccattcggtctggcttccgccacactgaattttgctgtggta

SEQ ID NO: 62766 - DNA, 75 bp, synthetic construct
  source 1..75: mol_type = other DNA
ggggatgtggagaaggccagccgcgtattcgttcgtaatgaacttattccgcttcagagacgctttgaggagctt

SEQ ID NO: 62767 - DNA, 75 bp, synthetic construct
  source 1..75: mol_type = other DNA
atggctgatcattttgagtacgaggaagattttgaaacagatgattttgatatcaaaaaaaacgagagtgagatt

SEQ ID NO: 62768 - DNA, 75 bp, synthetic construct
  source 1..75: mol_type = other DNA
atttttgcagtgatgcaaatgcagttgccggtgtgatgcgcacctgcaccctgacgccggagacgacagtgtctc

SEQ ID NO: 62769 - DNA, 75 bp, synthetic construct
  source 1..75: mol_type = other DNA
ccctgttgcgtgaggtgatggccgaagcccgcacagagattaaacatgttcgcgacgccctggcatcaatccggc

SEQ ID NO: 62770 - DNA, 75 bp, synthetic construct
  source 1..75: mol_type = other DNA
tttatcagcgccgacgcgcaggacaaggcgcagggtcaggtgcgcgaaatggctccggcgatggcaatactggat

SEQ ID NO: 62771 - DNA, 75 bp, synthetic construct
  source 1..75: mol_type = other DNA
aaatccagacaattgctgcaacgactctcggtgatagtctggtgaaaattgacccggcatacaccaaaaaagaaa

SEQ ID NO: 62772 - DNA, 75 bp, synthetic construct
  source 1..75: mol_type = other DNA
gatattgagttagtaaattgcgatattacagcttttaaacaaggtcaagcactgatgaatcccctaatgattttt

SEQ ID NO: 62773 - DNA, 75 bp, synthetic construct
  source 1..75: mol_type = other DNA
gactggttcatggcagtatcaagatcgaacttaaaggagaatcaatgcggaaaatacaatctccgttgaccgaag

SEQ ID NO: 62774 - DNA, 75 bp, synthetic construct
  source 1..75: mol_type = other DNA
ccagggcgaaattatcaacctgattacagggcaggatattgacttttcaaatatctacacgctgaggctgaaaaa

SEQ ID NO: 62775 - DNA, 75 bp, synthetic construct
  source 1..75: mol_type = other DNA
aatccccctccaaaaaaggctgcaagaactcaatgattggttacaagaagatgtaatacgctttgaaccctacaa

SEQ ID NO: 62776 - DNA, 75 bp, synthetic construct
  source 1..75: mol_type = other DNA
ggcgcgcacagccagccaggcatggtcacagcgagaaaacgacgtcgcctcctccctgcagtcctgcctgtcccg

SEQ ID NO: 62777 - DNA, 75 bp, synthetic construct
  source 1..75: mol_type = other DNA
agaaagagcaggaactgtttcatgaagacggcccgccttacagcttatgtgctttctgccacgcctggcattcac

SEQ ID NO: 62778 - DNA, 75 bp, synthetic construct
  source 1..75: mol_type = other DNA
gccgcaaggtcaaattcagcaacaactggcagaagcagaaacgcaaaatacagcgactgcattcccgtatcgcat

SEQ ID NO: 62779 - DNA, 75 bp, synthetic construct
  source 1..75: mol_type = other DNA
ctgacaactggtttgagcgagccaaaggaatggaatgggagcccgaacgtgggaggcgttgtactatgtgttttg

SEQ ID NO: 62780 - DNA, 75 bp, synthetic construct
  source 1..75: mol_type = other DNA
accacatcgtcgtttgattacggcactaaatccacgaataacactggtgcgcatacccatagtgttagcggtacg

SEQ ID NO: 62781 - DNA, 75 bp, synthetic construct
  source 1..75: mol_type = other DNA
atattccaccaacgctttacaagaatcagggagaaataatcaacctaattacagggcaggatattgacttctcaa

SEQ ID NO: 62782 - DNA, 75 bp, synthetic construct
  source 1..75: mol_type = other DNA
gcaaaagatcgcttacaggatctggagaaatacggtaaggcatatgtctcccgtcatgaagaccgtatgggggaa

SEQ ID NO: 62783 - DNA, 75 bp, synthetic construct
  source 1..75: mol_type = other DNA
ctgaaagccaatctgctggataacgtgactttccgtaaagagctggaaaaaattctgcgtgacccggcactgagt

SEQ ID NO: 62784 - DNA, 75 bp, synthetic construct
  source 1..75: mol_type = other DNA
tgtcagacctacaccgacaatcctgcctgtaccctggtgtcacaccagtgcgccttttactccgaagaaggtgcc

SEQ ID NO: 62785 - DNA, 75 bp, synthetic construct
  source 1..75: mol_type = other DNA
tcaccgtgaaagaaatcaatcgcctcaaaatccttcaggatgtcatcgatcgcaatatccgtcctggacaggctg

SEQ ID NO: 62786 - DNA, 75 bp, synthetic construct
  source 1..75: mol_type = other DNA
atgacaatcgtaaaaacccataccggcatcgtgatcaccaaagacggtccgcaggtaaaaaaactgcaccagacg

SEQ ID NO: 62787 - DNA, 75 bp, synthetic construct
  source 1..75: mol_type = other DNA
cggtgctcatgctccggcatttattcgttcacgacgggatacgaccgacgcaaactggtcgccgtgggcgcagct

SEQ ID NO: 62788 - DNA, 75 bp, synthetic construct
  source 1..75: mol_type = other DNA
ttctggggatgggaacagtaatcttttttactggttctgcgtcttctctgttagcgaacacgaggcaagaaaagg

SEQ ID NO: 62789 - DNA, 75 bp, synthetic construct
  source 1..75: mol_type = other DNA
gatggtggagggtaagtggtatccgttgtcctaccggcagtgggtggaacaacaggcggcgcaaggcgacagagc

SEQ ID NO: 62790 - DNA, 75 bp, synthetic construct
  source 1..75: mol_type = other DNA
attggtatttttgcgctgaaaacatataaaaattattttgcagatgaccagcagaaagcatcagaatcaacaggc

SEQ ID NO: 62791 - DNA, 75 bp, synthetic construct
  source 1..75: mol_type = other DNA
cgtaacattttagcggcggggcacgccgttcttgcctgtggagagatggtgcagtcaggccgctcgttgaagcag

SEQ ID NO: 62792 - DNA, 75 bp, synthetic construct
  source 1..75: mol_type = other DNA
cgcagcggcggtgtgtcacgtcgccgggtgattattcacttcccggaacagattgccccggaggaacgcgacccg

SEQ ID NO: 62793 - DNA, 75 bp, synthetic construct
  source 1..75: mol_type = other DNA
gtgccgggatgatgattgctggttgtatggcgatcgtcgtggggatttttctctgctggcggctgcgcgatcgcc

SEQ ID NO: 62794 - DNA, 75 bp, synthetic construct
  source 1..75: mol_type = other DNA
gacgataattttcatgaagaaatggtggagcagtacgggcgcgttcgtcgtttcctgccccatctgctgaatacc

SEQ ID NO: 62795 - DNA, 75 bp, synthetic construct
  source 1..75: mol_type = other DNA
ctgtcgtctgcagccgtatcagtgcagtgcgggcatctggaccgacggtattggtaatacatctggcgtcattcc

SEQ ID NO: 62796 - DNA, 75 bp, synthetic construct
  source 1..75: mol_type = other DNA
gctatgggcgtttgccgtgctctgggtgctgaacgcctttttccagggctggggttcaccggtgtgtgcgcgtct

SEQ ID NO: 62797 - DNA, 75 bp, synthetic construct
  source 1..75: mol_type = other DNA
gagaagtgttactgaagtccaaggagatttgggaatctcaaaagaaatgaaaccaagcaatgtccccagctcaat

SEQ ID NO: 62798 - DNA, 75 bp, synthetic construct
  source 1..75: mol_type = other DNA
ctgccgtggggtgatgtcgttaccaacccactgaaggcgcaacgactggctgaagaacttaacgaaaagcaggtg

SEQ ID NO: 62799 - DNA, 75 bp, synthetic construct
  source 1..75: mol_type = other DNA
gtccctgcgttctgaactgcgtaaagctggcttcgttactcgtgacgctcgtcaggttgaacgtaagaaagtcgg

SEQ ID NO: 62800 - DNA, 75 bp, synthetic construct
  source 1..75: mol_type = other DNA
tgaaactaattgccgattacgaaggctgccgtctgcagccgtatcagtgcagtgcaggtgtctggaccgacggca

SEQ ID NO: 62801 - DNA, 75 bp, synthetic construct
  source 1..75: mol_type = other DNA
cagaaattcaacgcatatcttcaatcatctcaccgttagaacgtcaaacggccttctccaggcttttacaaaatc

SEQ ID NO: 62802 - DNA, 75 bp, synthetic construct
  source 1..75: mol_type = other DNA
actgcattcctgtatcgcaaatatccgcagggactaccttcacaaagtcacaacgaccgtcagcaaaaaccacgc

SEQ ID NO: 62803 - DNA, 75 bp, synthetic construct
  source 1..75: mol_type = other DNA
atgaacgacgaaaacaaaatgcctgtgccggatgaagcgcaggcattcccggcacacgctgaggatgatattgcc

SEQ ID NO: 62804 - DNA, 75 bp, synthetic construct
  source 1..75: mol_type = other DNA
gacccgcgtgaaagacaacgtctggattgtgccgggtctgtgcatcaataatgccgataaccataacgtcatgcg

SEQ ID NO: 62805 - DNA, 75 bp, synthetic construct
  source 1..75: mol_type = other DNA
gtttcgttttcaatcgtgcactggcacttcagaatgagaattatgaggccgggaataaatacatcccttacacga

SEQ ID NO: 62806 - DNA, 75 bp, synthetic construct
  source 1..75: mol_type = other DNA
tcagggcggcgtcgccgtcagaccttgctgaacgactgacacaaaaactgaaggaggggtggcagccatttggca

SEQ ID NO: 62807 - DNA, 75 bp, synthetic construct
  source 1..75: mol_type = other DNA
gggcaccgttttcctcaggaaaaattgcctcactggtggaaacattaaagttaattgttccgcagcagcaaaatc

SEQ ID NO: 62808 - DNA, 75 bp, synthetic construct
  source 1..75: mol_type = other DNA
gaaggacgcggaacatggttctgcaatcagtgcggagccggggatggtttagcgcttgtcaccagggcactgaat

SEQ ID NO: 62809 - DNA, 75 bp, synthetic construct
  source 1..75: mol_type = other DNA
cattacctgacaccaacggcatgtttatggggaacgccaatattgtcccacgccagccacgtacctacctttacc

SEQ ID NO: 62810 - DNA, 75 bp, synthetic construct
  source 1..75: mol_type = other DNA
tcgcaagggctggttattcaggcgctggcaggccatggggtgactgggaaacctctgccgcgttgacacgccaac

SEQ ID NO: 62811 - DNA, 75 bp, synthetic construct
  source 1..75: mol_type = other DNA
gtataccggtaagcctgctggctattctgattatataaacaatatttatctcaatgcattacctttttatggatt

SEQ ID NO: 62812 - DNA, 75 bp, synthetic construct
  source 1..75: mol_type = other DNA
cagtggaaaaagctgagcttcctgaaagacgcgatgcgttcgcggtggatgtggaatatgcggcaacggcttctg

SEQ ID NO: 62813 - DNA, 75 bp, synthetic construct
  source 1..75: mol_type = other DNA
ttcccgctcagcgagctgcaggcgtgcatggtagacagctgggaagtctggactgactttcatgcactggccctg

SEQ ID NO: 62814 - DNA, 75 bp, synthetic construct
  source 1..75: mol_type = other DNA
aaaagaaaaacccggccttatgggtgccctcctggaacaaagtggtgattcggccctgcttgccagagtggaaaa

SEQ ID NO: 62815 - DNA, 75 bp, synthetic construct
  source 1..75: mol_type = other DNA
ttcctggatgcgggcggtctgcgcgatatcggggttgaggctgtcaccaaaatgctggcctgcggcacgcggata

SEQ ID NO: 62816 - DNA, 75 bp, synthetic construct
  source 1..75: mol_type = other DNA
gtgatccacgcggcgttcggcggctccaccaatttactgctgcacattccggccatcgcccacgcggcgggctgc

SEQ ID NO: 62817 - DNA, 75 bp, synthetic construct
  source 1..75: mol_type = other DNA
cggtttccccgttggacagacagggacgaatgttgttttcccgctacctttccccgcgcgggtcgaatcaattac

SEQ ID NO: 62818 - DNA, 75 bp, synthetic construct
  source 1..75: mol_type = other DNA
ctccaatatgcgaggctataaacgaaacaaaatcgaaatcaaaacaggctgtcttcaatatgtatttgcaaaata

SEQ ID NO: 62819 - DNA, 75 bp, synthetic construct
  source 1..75: mol_type = other DNA
ccttgatgaagccaactggcctgaaatgatcgactggctactggtaaacctgacggcatttgaaaaagcgttaga

SEQ ID NO: 62820 - DNA, 75 bp, synthetic construct
  source 1..75: mol_type = other DNA
tccttttatcgccccactgaatatggcactgaaagagatttcaaacgcgccggaagaagtggaagagcctgcgac

SEQ ID NO: 62821 - DNA, 75 bp, synthetic construct
  source 1..75: mol_type = other DNA
tgcgaccggaagaaaatccgcttcacgtacctgtgggacggcgacagtattgcggaaatccgggaataccgcgat

SEQ ID NO: 62822 - DNA, 75 bp, synthetic construct
  source 1..75: mol_type = other DNA
gaagagctggatgcagatacctggcgggccacactgcatattgaggtgtttttaccggcacaggtacctgattcg

SEQ ID NO: 62823 - DNA, 75 bp, synthetic construct
  source 1..75: mol_type = other DNA
tgcaacagctgcgcaaatgaccatgcatgagttacaggatacccgcgagaacttcgtgcagggagtacaaaatac

SEQ ID NO: 62824 - DNA, 75 bp, synthetic construct
  source 1..75: mol_type = other DNA
gttctggtccggtgcgctgttcaaccgtgggcgcaacaaagccgacaaggtggacatcgacctgtcccacagcaa

SEQ ID NO: 62825 - DNA, 75 bp, synthetic construct
  source 1..75: mol_type = other DNA
ctgaaacagcacatcccggagaagttttttaagatggtgaggtacttcgggttccttgccaaccgggtgtgtgga

SEQ ID NO: 62826 - DNA, 75 bp, synthetic construct
  source 1..75: mol_type = other DNA
accctaacgtcgccaaccgcaataaaggcccacgccgtcagcctgaaaagaatgttttcaccgatgaacagattg

SEQ ID NO: 62827 - DNA, 75 bp, synthetic construct
  source 1..75: mol_type = other DNA
gggtgccagcgtggtgggcttctccgacagcgccaatacatcactgggtaaaaagggcgaaacgctggccgatac

SEQ ID NO: 62828 - DNA, 75 bp, synthetic construct
  source 1..75: mol_type = other DNA
agtgtggtgccggtgacggcctgaaactggttgaaaaggtgtttggtgtttccccgtccgacgcggccgcaaagg

SEQ ID NO: 62829 - DNA, 75 bp, synthetic construct
  source 1..75: mol_type = other DNA
gcactgatgttagggattgcgcataccctgatgacacaaggcaaacacgataaagtgttccttgaaaaatacact

SEQ ID NO: 62830 - DNA, 75 bp, synthetic construct
  source 1..75: mol_type = other DNA
attacatcctttcctgtttacaggatttggtcgaaaacggtgtggaaattaagcccgacagcgatctcgtcaacg

SEQ ID NO: 62831 - DNA, 75 bp, synthetic construct
  source 1..75: mol_type = other DNA
gcactgggggccttatggccatctggttcgagaattgcattttcatgcccgagaaaacggactacacgattatct

SEQ ID NO: 62832 - DNA, 75 bp, synthetic construct
  source 1..75: mol_type = other DNA
caaacggcacgccgtcgtcaacggtgtccttatggttcaccgtggatgggataaggggaaagactctgatgcgtg

SEQ ID NO: 62833 - DNA, 75 bp, synthetic construct
  source 1..75: mol_type = other DNA
gggaaagtaacggaacgttttatgctggagtttttgcacagccacaccaatgtggtcttccagccgccctataac

SEQ ID NO: 62834 - DNA, 75 bp, synthetic construct
  source 1..75: mol_type = other DNA
tggccctgttcgataaagacgatcggcaaagtaatcctcatgccataaccgctggacttaactatacccccttcc

SEQ ID NO: 62835 - DNA, 75 bp, synthetic construct
  source 1..75: mol_type = other DNA
atcatggatatgaatcaggaaaatcaaaaatgcctatggaagcaggtatgaagctgtttaagcatccacgctttc

SEQ ID NO: 62836 - DNA, 75 bp, synthetic construct
  source 1..75: mol_type = other DNA
cagtgaacgcatggcgttcaagctgcaccgtcagggcatgattatggaaaccatcgggaaaaataacgccgtctg

SEQ ID NO: 62837 - DNA, 75 bp, synthetic construct
  source 1..75: mol_type = other DNA
atggttaagctgaaaccgtttatggattacatcgacatgcgcctggcagagaatgtctggaatagtgaggttatc

SEQ ID NO: 62838 - DNA, 75 bp, synthetic construct
  source 1..75: mol_type = other DNA
tacagtgatggtgaccgcaacatgttccgtcagtggtgcagtggcggcgctggctggaactatcactgaaattaa

SEQ ID NO: 62839 - DNA, 75 bp, synthetic construct
  source 1..75: mol_type = other DNA
ccgtgaccggccagacggtgggcgagaaccttgaatggtggcaggcgtccgagcgccgggcgcgcttccgccagt

SEQ ID NO: 62840 - DNA, 75 bp, synthetic construct
  source 1..75: mol_type = other DNA
cgccactcgacgctattcgtgagaacctaggcaaagggcactccatttcacaggttcgctctgagattcgcgccc

SEQ ID NO: 62841 - DNA, 75 bp, synthetic construct
  source 1..75: mol_type = other DNA
aataactggattcctgaacggaaatggtaattcaaacaatcaggtattactaaacctgttggccacgtcaggtaa

SEQ ID NO: 62842 - DNA, 75 bp, synthetic construct
  source 1..75: mol_type = other DNA
agttttattgatgaagacctgcggcaatattattccgacctcttgtggtctgtgaaaacgcaggagggagcgggt

SEQ ID NO: 62843 - DNA, 75 bp, synthetic construct
  source 1..75: mol_type = other DNA
aggataatgaacaaaaggtggttttacgtgagttgataaataattttgtaatggacggggcatacaataattcat

SEQ ID NO: 62844 - DNA, 75 bp, synthetic construct
  source 1..75: mol_type = other DNA
attgtatgtctacccatagttgttattggtgtcatttttgcctcattcataatgacaacatggatgggacctgat

SEQ ID NO: 62845 - DNA, 75 bp, synthetic construct
  source 1..75: mol_type = other DNA
gttaaagtttggtggctggattactgtaagtaatattattagtccggtcatgagttattttgatcggtttatatt

SEQ ID NO: 62846 - DNA, 75 bp, synthetic construct
  source 1..75: mol_type = other DNA
tatgactgcgtgatgcctgtttatcagttccggcgtgatttttctctggtacagaacgcaacacgcggtaagccc

SEQ ID NO: 62847 - DNA, 75 bp, synthetic construct
  source 1..75: mol_type = other DNA
catctcacgccgattgagttccgcctgctggcggtgctgctgaataatgccgggaaagtgctcacccagcgccag

SEQ ID NO: 62848 - DNA, 75 bp, synthetic construct
  source 1..75: mol_type = other DNA
ttaattgatgggcatgatttatcacttgcagatccagaatggttacgacgccagattggtgttgtattgcaggaa

SEQ ID NO: 62849 - DNA, 75 bp, synthetic construct
  source 1..75: mol_type = other DNA
gaagacccgagaaagcggttaagcctttctgaaaaagcaatatcactcggaagccttcgctgcaagaaagtagat

SEQ ID NO: 62850 - DNA, 75 bp, synthetic construct
  source 1..75: mol_type = other DNA
tggtatgggctttcctgcttactggtatagccgtgtgcatctgcgccggattcgccctggttgccctgctgaccc

SEQ ID NO: 62851 - DNA, 75 bp, synthetic construct
  source 1..75: mol_type = other DNA
ttggatgaagatgacagtttctacgctgccaacggcatctctaccgatgatatcgtcgctttaggtctggtttat

SEQ ID NO: 62852 - DNA, 75 bp, synthetic construct
  source 1..75: mol_type = other DNA
gcatggtacaagctggatacacaggccaaagataaaaaatggacagcgttagctgcattccctggcggaccgaga

SEQ ID NO: 62853 - DNA, 75 bp, synthetic construct
  source 1..75: mol_type = other DNA
aaagcttaaagcagcatacagcctgaaagagctgtccgacgctgttcgggcatgggaacagcaaaaaaataccgg

SEQ ID NO: 62854 - DNA, 75 bp, synthetic construct
  source 1..75: mol_type = other DNA
atatcacccgtctgggctttcgttcgtcgctgctgcaagcgagctttaactacgaaaggatgcaggcgggcggtt

SEQ ID NO: 62855 - DNA, 75 bp, synthetic construct
  source 1..75: mol_type = other DNA
accggacatgaccgcgcactgggaatcggtgctgacgcaaatcagcgaaaagcagtgtcgctatcaggactttat

SEQ ID NO: 62856 - DNA, 75 bp, synthetic construct
  source 1..75: mol_type = other DNA
ggtttttcaggcataaaaaaagcggccccgatatggagccgcctttctgaacaattaacctgctgcgccttatgt

SEQ ID NO: 62857 - DNA, 75 bp, synthetic construct
  source 1..75: mol_type = other DNA
aaagttattaaacttggtcaggctgctgcagctcagaatgtggatacagttgctattaatgatgcaaatgtgaca

SEQ ID NO: 62858 - DNA, 75 bp, synthetic construct
  source 1..75: mol_type = other DNA
gctaccggcgaagaaaccattgaagaggtgggctggaagttgttccactttattctcgacgtcgccagcgggaag

SEQ ID NO: 62859 - DNA, 75 bp, synthetic construct
  source 1..75: mol_type = other DNA
gccgccggtgctgaaacagacgctgcccggaagaacgccgccgcactggcacaaaccctgatggcgaaaacccgt

SEQ ID NO: 62860 - DNA, 75 bp, synthetic construct
  source 1..75: mol_type = other DNA
gcggtttaagaacttacatttttgcacatagtacaagtcggattgatgttgagttgggtgccaaactcttccggc

SEQ ID NO: 62861 - DNA, 75 bp, synthetic construct
  source 1..75: mol_type = other DNA
gcgaatagcggaagcgtttgtttgcctgaagttgcactgtatgctgctggttacagaaggcaaaaactaattaca

SEQ ID NO: 62862 - DNA, 75 bp, synthetic construct
  source 1..75: mol_type = other DNA
gccagcctggcaactctgacaaaagtcgggcgggatattcttgcgaaatcgaccgttgccgccgttatcgaatac

SEQ ID NO: 62863 - DNA, 75 bp, synthetic construct
  source 1..75: mol_type = other DNA
ggatggtcagccggttgacatgccgccgcactgcgacatgattttcgcagtgatggatacggcactgaaaggcgg

SEQ ID NO: 62864 - DNA, 75 bp, synthetic construct
  source 1..75: mol_type = other DNA
ttgattccggtgcctatatcgacctgattggcaagtatgttcaccatgataatgagtacaccgcaacctttgccg

SEQ ID NO: 62865 - DNA, 75 bp, synthetic construct
  source 1..75: mol_type = other DNA
tggaagtaaactaaaacttccggaggtaccgtttcctgacttctcccctgtagcaaataaaggctcaaccacatc

SEQ ID NO: 62866 - DNA, 75 bp, synthetic construct
  source 1..75: mol_type = other DNA
ccaacatacgcctttgcttctcgcatggatgcatctaatttttacatccgtgactacctggattttgcgcaaaac

SEQ ID NO: 62867 - DNA, 75 bp, synthetic construct
  source 1..75: mol_type = other DNA
cgacttcgtttactacggcggttatcacccggaaatggggcaaatcctgcgtcaggcacgcgcggcagggctgaa

SEQ ID NO: 62868 - DNA, 75 bp, synthetic construct
  source 1..75: mol_type = other DNA
ggggcgaagtggaaatgctaaagattaccaattcagttactccaataactggcaacacattagttatactttctc

SEQ ID NO: 62869 - DNA, 75 bp, synthetic construct
  source 1..75: mol_type = other DNA
ttaataccgtatggcgtatgacgggagattccgggcttaataccctcaaaaccagcaaatccctgacagtattca

SEQ ID NO: 62870 - DNA, 75 bp, synthetic construct
  source 1..75: mol_type = other DNA
tacggccgccaggcaaattcttttctaatctgccgaactttaacctaaaaagtggtgctgatacccagagtcgaa

SEQ ID NO: 62871 - DNA, 75 bp, synthetic construct
  source 1..75: mol_type = other DNA
caatccgccgtgccactaccgccagcggcaaccgccctacctacgaagcgagccgcagcgaagaagccagccacg

SEQ ID NO: 62872 - DNA, 75 bp, synthetic construct
  source 1..75: mol_type = other DNA
ttaagtacatcaaatcgctacccctcgaggcggctgacagggtgtacgacatccagaatcgggcgatagaagctg

SEQ ID NO: 62873 - DNA, 75 bp, synthetic construct
  source 1..75: mol_type = other DNA
tttacagccattccttttaaggagggcaataaagagctgactgcgggagcattcacagcgtcagcgaatatgagt

SEQ ID NO: 62874 - DNA, 75 bp, synthetic construct
  source 1..75: mol_type = other DNA
tttttgcgttgttttttcttggatgaggataatttctttaatgatttgtcagtcatcgtagatacctgtaaccct

SEQ ID NO: 62875 - DNA, 75 bp, synthetic construct
  source 1..75: mol_type = other DNA
ctatcataatggcttcatttgccgcaaacgcgtctgtattaccggaaactcctgtgccatttaaaagtggtaccg

SEQ ID NO: 62876 - DNA, 75 bp, synthetic construct
  source 1..75: mol_type = other DNA
tttatctggcctgcggtgcgtgacggtaaggtatccattacccgctcacaactggcaatgctcctcgataagctg

SEQ ID NO: 62877 - DNA, 75 bp, synthetic construct
  source 1..75: mol_type = other DNA
aagaaatctcgttgctggaagcatggaaaaagtatcgggtattgctgaaccgtgttgatacgtcaactgcacctg

SEQ ID NO: 62878 - DNA, 75 bp, synthetic construct
  source 1..75: mol_type = other DNA
tttgaaggcacgggcgttgaagagaagggcattgtggtttccgtcaccgggcatgatgcgccgggcgttaaaccg

SEQ ID NO: 62879 - DNA, 75 bp, synthetic construct
  source 1..75: mol_type = other DNA
tatctcgcggaatataaggacatgaatgaaagccttcagagctgcatggttcttattttcagcgccaatagcagg

SEQ ID NO: 62880 - DNA, 75 bp, synthetic construct
  source 1..75: mol_type = other DNA
acatttgacctgccggacgagccaacaggcaatgcagcgccttcatggctgactgagccgacgccacagattaac

SEQ ID NO: 62881 - DNA, 75 bp, synthetic construct
  source 1..75: mol_type = other DNA
ctggaagtggcaggacacatatctgacacagaccgaaactgagggaacctgcggtgagtatatgaagaaccctgc

SEQ ID NO: 62882 - DNA, 75 bp, synthetic construct
  source 1..75: mol_type = other DNA
gatgcgtgatgcgcagttgtggcgtcacatcgaatttcaccctgaatgcaacgcgatttacgcggcactggactg

SEQ ID NO: 62883 - DNA, 75 bp, synthetic construct
  source 1..75: mol_type = other DNA
cgcatgaccatgaacggcggacgctgggtgaattttaactgggagagctggcgttcgaatgttggcttgcgatga

SEQ ID NO: 62884 - DNA, 75 bp, synthetic construct
  source 1..75: mol_type = other DNA
aaggcttattacttcttgttgcgatgctgacccgctacggacaggcatgtcatccccggcgtcctgccgcccgga

SEQ ID NO: 62885 - DNA, 75 bp, synthetic construct
  source 1..75: mol_type = other DNA
caatatgaaatactggaagctatcatcgaattcttacgtgaagagtgctgtgtaaacagtaaaacagatgttgcg

SEQ ID NO: 62886 - DNA, 75 bp, synthetic construct
  source 1..75: mol_type = other DNA
tgagactgcgtactgccctgcagttaatggcggggccggcatggcaactggaagtggatgatgtgcagagggtgg

SEQ ID NO: 62887 - DNA, 75 bp, synthetic construct
  source 1..75: mol_type = other DNA
gttttctaatggcattttgcgtcgtatagagagagccggacctgatgatgacttttctttagtaagtataatggt

SEQ ID NO: 62888 - DNA, 75 bp, synthetic construct
  source 1..75: mol_type = other DNA
caccggcgattacctctggcgcagcagcgccaagatcggcgcgggcaagttcaggccgctacgaccgctgcaacc

SEQ ID NO: 62889 - DNA, 75 bp, synthetic construct
  source 1..75: mol_type = other DNA
ttgcctgtggagggacggtgcagtcagaccgcccgttgaagcaggaaccagacgctgagcaatcagccgtcaccc

SEQ ID NO: 62890 - DNA, 75 bp, synthetic construct
  source 1..75: mol_type = other DNA
gtggcgctggttttgatggaggctacaggtgggcttgaagctgctgtagcctgttcacttcaggctgaaggtttt

SEQ ID NO: 62891 - DNA, 75 bp, synthetic construct
  source 1..75: mol_type = other DNA
gtatgtgattgagggactaaatcagactaaaacggagtttttccgcgatggtatgccgcgccggattgagttcac

SEQ ID NO: 62892 - DNA, 75 bp, synthetic construct
  source 1..75: mol_type = other DNA
gacctcccttgtgattaaccgccagttgtggctgtaccacgacagcggggatgcaggactgacccagctttaccg

SEQ ID NO: 62893 - DNA, 75 bp, synthetic construct
  source 1..75: mol_type = other DNA
cccaactgaaaataatatctataatagaccgcttacgtgtcttgtcgaggttaatagaaattggggcgatattcc

SEQ ID NO: 62894 - DNA, 75 bp, synthetic construct
  source 1..75: mol_type = other DNA
gccttaatgacaaacagcgcgaagcggtggccgcgccacgcagcaaccttctggtgctggcgggcgcgggcagtg

SEQ ID NO: 62895 - DNA, 75 bp, synthetic construct
  source 1..75: mol_type = other DNA
catcgcggcagagctgcataccggctgcacgaatttcgtgttcagcggtaaacctggcaccgggaaaaatcacct

SEQ ID NO: 62896 - DNA, 75 bp, synthetic construct
  source 1..75: mol_type = other DNA
ggtctataccgctgacggcacagaagcaaatcgctggcaggtccgtaacggcgctgcctgggtgtacccggacta

SEQ ID NO: 62897 - DNA, 75 bp, synthetic construct
  source 1..75: mol_type = other DNA
atctggttaacggtgaaaactggtttgaccgtacggtcagtgccgatgtcgcaggcatcattctgacttcccttg

SEQ ID NO: 62898 - DNA, 75 bp, synthetic construct
  source 1..75: mol_type = other DNA
ttcttgaacgtatccgcagactggccccgccacatgtaaccgccccattcaaaacggtagcggagtggcgcgagt

SEQ ID NO: 62899 - DNA, 75 bp, synthetic construct
  source 1..75: mol_type = other DNA
ccattattttttccgcttctctctgtgccgcacagattcaggggcacgtcatccgcgttcttgatggtgatacgc

SEQ ID NO: 62900 - DNA, 75 bp, synthetic construct
  source 1..75: mol_type = other DNA
aagacggtagcggagtggcgcgagtggcaactttccgaaggccagaaacgttgtgaggagatcaaccgtcagaat

SEQ ID NO: 62901 - DNA, 75 bp, synthetic construct
  source 1..75: mol_type = other DNA
gtggcgttcatcattgatgtgtttgccggatacatcgtgggggggcgggtatcatcgtccatggaaacgacattc

SEQ ID NO: 62902 - DNA, 75 bp, synthetic construct
  source 1..75: mol_type = other DNA
aggggttacggtatgcagggtatggtgttgccgtaaatcacgatgcagacagccacatatcacctgcgccggaac

SEQ ID NO: 62903 - DNA, 75 bp, synthetic construct
  source 1..75: mol_type = other DNA
ttctggcaagagtcagcagatttgtgccgcaggatgcaatccctccgtaccgtacggtgacggagtggcgggaat

SEQ ID NO: 62904 - DNA, 75 bp, synthetic construct
  source 1..75: mol_type = other DNA
atggatggttgcgactcgtgcggtcaggattgtggcgcagatatgactgaagatcctgatggtgattatgtcctg

SEQ ID NO: 62905 - DNA, 75 bp, synthetic construct
  source 1..75: mol_type = other DNA
ttcttcgatccaggctgaactggataatgcgtatggtcagagtaaggctgcagctgaaaaacaaattgagcgtta

SEQ ID NO: 62906 - DNA, 75 bp, synthetic construct
  source 1..75: mol_type = other DNA
cagacagctccttcctggtattgctgggcattttcattgccatgctgtacccggcaggcgttgttcgccttttca

SEQ ID NO: 62907 - DNA, 75 bp, synthetic construct
  source 1..75: mol_type = other DNA
ctaccccgaaatgcatggcacggtaacaggatttaaaagcgagattgataatcaggactggattattgcaaaagc

SEQ ID NO: 62908 - DNA, 75 bp, synthetic construct
  source 1..75: mol_type = other DNA
tgagcttatcgacgtggtctaccaggatgatgacgatctgatggtgatttgcggtcgtgaactgctgtctgacaa

SEQ ID NO: 62909 - DNA, 75 bp, synthetic construct
  source 1..75: mol_type = other DNA
gcacgcccaccagcaaggcaggataatttcgggggagatgcgcgaaaccatcagccgggcacatgccgggatggg

SEQ ID NO: 62910 - DNA, 75 bp, synthetic construct
  source 1..75: mol_type = other DNA
atatcaatctgagtggagattacgtctggcgtaataatcttaagctgggatccggaaaataccgctcattacgta

SEQ ID NO: 62911 - DNA, 75 bp, synthetic construct
  source 1..75: mol_type = other DNA
gtgattgaaccgcaggcgcaggtgatttatcagggcgtgcagcaggatgattttaccgccgctaaccatgcgcgc

SEQ ID NO: 62912 - DNA, 75 bp, synthetic construct
  source 1..75: mol_type = other DNA
atggttgccgtttcgcaaccaactgttgataaaattatttttggtgctgaggcgacacttattaataaaattggg

SEQ ID NO: 62913 - DNA, 75 bp, synthetic construct
  source 1..75: mol_type = other DNA
cgggatacgcgtaatgagcaggtcacgctgaatcagattgttgaccgcagaacggcatcgttactcagtgtgggg

SEQ ID NO: 62914 - DNA, 75 bp, synthetic construct
  source 1..75: mol_type = other DNA
agatttcccgtaccgaactcagaaacagcgggctgacagagcctgcccgccgtgtggctgaccttctgaatatcg

SEQ ID NO: 62915 - DNA, 75 bp, synthetic construct
  source 1..75: mol_type = other DNA
caatgcgcctctcatacattgagaaaaagaaaggccgccagacgactcatatcgtattttccttccgcgatatca

SEQ ID NO: 62916 - DNA, 75 bp, synthetic construct
  source 1..75: mol_type = other DNA
tcaccggaagtgtacgttcggtaactaccgggtgcagaacgatggtcagcgccatgccctgagtcaggcgaaatc

SEQ ID NO: 62917 - DNA, 75 bp, synthetic construct
  source 1..75: mol_type = other DNA
gcactatcccgatttttttattgatatcccccgtgagcaggcattactgcgcgagcacgaggtgattgtctttca

SEQ ID NO: 62918 - DNA, 75 bp, synthetic construct
  source 1..75: mol_type = other DNA
caaaaaacataaaaattatgtcgtggcggagctggtgatccccccggagaccggcggtttctggctgcgtgaaat

SEQ ID NO: 62919 - DNA, 75 bp, synthetic construct
  source 1..75: mol_type = other DNA
aaatgcgaacaaggttaacctgaaatttgaagaggcgaagcctgttctcgaagaccagctggccaaatcaatcgc

SEQ ID NO: 62920 - DNA, 75 bp, synthetic construct
  source 1..75: mol_type = other DNA
cggaagataaaaataaaacccttaccttcaggtggacgaaaaaacactttgagttttgtatggataataaaatct

SEQ ID NO: 62921 - DNA, 75 bp, synthetic construct
  source 1..75: mol_type = other DNA
tggaagcagcaccatggcccttgtgaaatacctaatggcctggcattgtgcgcaatccatcataaagtgtttgat

SEQ ID NO: 62922 - DNA, 75 bp, synthetic construct
  source 1..75: mol_type = other DNA
gtgaaatcgagttgcgccagaaacaatacgaatactaccgtgatttactgttcagtttcccgaaacctgaaactg

SEQ ID NO: 62923 - DNA, 75 bp, synthetic construct
  source 1..75: mol_type = other DNA
agaatgcgcatatccaagctgaatgatgatggcgcagggaatacttttatagcagatgcgcttctggatttgagc

SEQ ID NO: 62924 - DNA, 75 bp, synthetic construct
  source 1..75: mol_type = other DNA
aaataccagacccgggttgtatccagtgccaaccaggctaatctgaagtttgaagaagctaaacctcatctggaa

SEQ ID NO: 62925 - DNA, 75 bp, synthetic construct
  source 1..75: mol_type = other DNA
actattccatggaaaacaggagcagcatccgcaatctatagctcatgtcagactccagaattcgtgagcggtgtt

SEQ ID NO: 62926 - DNA, 75 bp, synthetic construct
  source 1..75: mol_type = other DNA
cacaaaagcgcgggaggccgcagcagacgcaacaaaggccgggcagaaaaaggatgaggctctgtcggcagcgac

SEQ ID NO: 62927 - DNA, 75 bp, synthetic construct
  source 1..75: mol_type = other DNA
gtgccaaccaggctaatctgaagtttgaagaagctaaacctcatctggaagaccagctggcaaaatcaatcgcca

SEQ ID NO: 62928 - DNA, 75 bp, synthetic construct
  source 1..75: mol_type = other DNA
cgtgttattcgtgcgctggctgcgggaatgggtgttgcccgtaaggatctgaaggccatggcggataacggaaag

SEQ ID NO: 62929 - DNA, 75 bp, synthetic construct
  source 1..75: mol_type = other DNA
agtggctgagcgaggtggtcccggattcaccccctttattaccttcagcagtaacggacagccttttactgtgac

SEQ ID NO: 62930 - DNA, 75 bp, synthetic construct
  source 1..75: mol_type = other DNA
gccggataaccgcatcgcgaaggatgcgcactatgtttaccactacgatgaatacggcagactgacggagaagac

SEQ ID NO: 62931 - DNA, 75 bp, synthetic construct
  source 1..75: mol_type = other DNA
cgagtttaatcgtcttctcgggcttggtaatgagttacttcagcagcgtcaggggctggtgaatgtaccattacg

SEQ ID NO: 62932 - DNA, 75 bp, synthetic construct
  source 1..75: mol_type = other DNA
gcttactactggatccaggctaacgttctcaaagcagacaaaatggatctgcgtgaatctcagggatggctgagt

SEQ ID NO: 62933 - DNA, 75 bp, synthetic construct
  source 1..75: mol_type = other DNA
cgaaaaccggtagcaacgctgtcgccggaatcgcgctggatgcggcaacgcaggcgggagataccgtgcgcattc

SEQ ID NO: 62934 - DNA, 75 bp, synthetic construct
  source 1..75: mol_type = other DNA
acatgcattaccgactgcatgattaaagttttcatcgggcgcgatggcttacccgtaaaagcagagtcgttgtga

SEQ ID NO: 62935 - DNA, 75 bp, synthetic construct
  source 1..75: mol_type = other DNA
cgacgatatcaatggtgccattggtcagaatcttggcaacgatactctccgtaaatatcagcaggccaatgccgt

SEQ ID NO: 62936 - DNA, 75 bp, synthetic construct
  source 1..75: mol_type = other DNA
gcctttatcgaagaaattttgctcgacagaagccgtgaagagagccgccgtgagcgttctctgcgtcgtctggag

SEQ ID NO: 62937 - DNA, 75 bp, synthetic construct
  source 1..75: mol_type = other DNA
acgaaatcgcgttttcaaaaagtaataaagcctatgacgaagactggtccggcgataaaagcggtataagcctgt

SEQ ID NO: 62938 - DNA, 75 bp, synthetic construct
  source 1..75: mol_type = other DNA
tggcgacatgcggcaaacagccgggttaaccgacgcccgtcaacgcagtttctgggaccggataacgacatgctg

SEQ ID NO: 62939 - DNA, 75 bp, synthetic construct
  source 1..75: mol_type = other DNA
ctgatgaagaggtgaagaaactgcgggcggaagtgaccgcgttagcggttgaggcggaatctgccatcgccgttc

SEQ ID NO: 62940 - DNA, 75 bp, synthetic construct
  source 1..75: mol_type = other DNA
gagcgaacgccttaaggaccaggcagccttttatgccgaatcggatgcgcagcgtgcggactggcagaaaggctt

SEQ ID NO: 62941 - DNA, 75 bp, synthetic construct
  source 1..75: mol_type = other DNA
atgaaacaaaacattaagttaatggcaatgactgccatattgtcttccactctggtgttatctggttgtggcgcg

SEQ ID NO: 62942 - DNA, 75 bp, synthetic construct
  source 1..75: mol_type = other DNA
gatacgcgttgagtcaggcaaaatctatcgctgacgaactggttaccggatgcacaaatttcgcgtttagcggaa

SEQ ID NO: 62943 - DNA, 75 bp, synthetic construct
  source 1..75: mol_type = other DNA
gtgcgcaagaatgatgagcagtggcgtaaacacagcaaaaccatcagccgtgagctacgcaatctggtaaacagt

SEQ ID NO: 62944 - DNA, 75 bp, synthetic construct
  source 1..75: mol_type = other DNA
ggtcctggatgaaataggcgttcagcgggagacgaaaaacgagcaggtggtattacaccagataattgatcgccg

SEQ ID NO: 62945 - DNA, 75 bp, synthetic construct
  source 1..75: mol_type = other DNA
cttacactggcgcaatcgggctggattagccctgccgatctgatgcatatgcgtattggtgatgtctctgcgttt

SEQ ID NO: 62946 - DNA, 75 bp, synthetic construct
  source 1..75: mol_type = other DNA
cggtaccccatactcagccacgggatctctggaatgttgttggcctggaggaacatagcggcatagcgctgatgg

SEQ ID NO: 62947 - DNA, 75 bp, synthetic construct
  source 1..75: mol_type = other DNA
agaagggcaacgcactaataatttcattaacagtaatgcaccagaagcatggaactttaataataaacgtcttga

SEQ ID NO: 62948 - DNA, 75 bp, synthetic construct
  source 1..75: mol_type = other DNA
ggaagaaagaagctgaagctggtctttctgatgatcctcggcaaacggaaatcacgacacccaattttgtgctgt

SEQ ID NO: 62949 - DNA, 75 bp, synthetic construct
  source 1..75: mol_type = other DNA
cgcctcaggttgaaaaaggaactgctgcatcatcattcatcataacagggggaacaccggcaacgcgagccagtg

SEQ ID NO: 62950 - DNA, 75 bp, synthetic construct
  source 1..75: mol_type = other DNA
gtactgacagagtgcagtgtctcatgggacgttatgccaaataccacgggcgcagcaaggatattaaatatttcc

SEQ ID NO: 62951 - DNA, 75 bp, synthetic construct
  source 1..75: mol_type = other DNA
acagaaatagctgttaatcgtccaggtgaactctggacaaagatagatggtgtctgggggcaacataccgttgat

SEQ ID NO: 62952 - DNA, 75 bp, synthetic construct
  source 1..75: mol_type = other DNA
tggcgacatgcggctaacagtcgggtaaatcgtcgtccatccacgcagtttctgggaccggataacgacatgctg

SEQ ID NO: 62953 - DNA, 75 bp, synthetic construct
  source 1..75: mol_type = other DNA
acaacatctgaagtcagaactgataatgttgcagctctccgtcagggaacctccggtgcaaaagtgcagaccagc

SEQ ID NO: 62954 - DNA, 75 bp, synthetic construct
  source 1..75: mol_type = other DNA
ggcgctgatctgctggtgatccccaccggtgtagaaaaagtggcgattcactttggtacaccacaacaacaatgg

SEQ ID NO: 62955 - DNA, 75 bp, synthetic construct
  source 1..75: mol_type = other DNA
atgaaaacaaaaaaattgatgatggttgcactggtcagttccactctggccctttcagggtgtggtgcgatgagc

SEQ ID NO: 62956 - DNA, 75 bp, synthetic construct
  source 1..75: mol_type = other DNA
ccgccgcgtatatctgcagcggacctctgtcgccggcgtccctcgttatgggctggatggtcatcccgatgggca

SEQ ID NO: 62957 - DNA, 75 bp, synthetic construct
  source 1..75: mol_type = other DNA
agcgggctggcggcgggcgcggcgctgacggtggtgatcaataacgtcacctatggcgcgacagtattagccgat

SEQ ID NO: 62958 - DNA, 75 bp, synthetic construct
  source 1..75: mol_type = other DNA
gattacattgacgcggtgacggcaacagataccagcaccgcgcctgatattatttggcctgctttccctgagact

SEQ ID NO: 62959 - DNA, 75 bp, synthetic construct
  source 1..75: mol_type = other DNA
gtccggcagcggataagccggttcgcgatatttatcaggaagtgactgaccgtattgtggccgcgctggaaaaag

SEQ ID NO: 62960 - DNA, 75 bp, synthetic construct
  source 1..75: mol_type = other DNA
gcaacgtggcttgcgcaacgaatttgtgggccattaacaccacctgcggaagaaaatcgcgaaatagcgcaacga

SEQ ID NO: 62961 - DNA, 75 bp, synthetic construct
  source 1..75: mol_type = other DNA
agatgcacagccgtgaagataaaagcctttatttcgatatgcgcgctttcgcgaatattcaggcggcagaagctg

SEQ ID NO: 62962 - DNA, 75 bp, synthetic construct
  source 1..75: mol_type = other DNA
ggcgaactatgttccccaagatgaagtgcttagcgtcgaagacgaagcgcaggttgatgaagctctggcatggct

SEQ ID NO: 62963 - DNA, 75 bp, synthetic construct
  source 1..75: mol_type = other DNA
tgagtctgtgcaggaacagggtagcaagacatctgtttcgtctggtcacggtaccgggaaatcagacatgacttc

SEQ ID NO: 62964 - DNA, 75 bp, synthetic construct
  source 1..75: mol_type = other DNA
cgctggaacgcattcgcgccacccgtgatgatgccgccgtaaccgccgcgttgaacgccctgactcacgccgcac

SEQ ID NO: 62965 - DNA, 75 bp, synthetic construct
  source 1..75: mol_type = other DNA
aagcaccgactttttgtcccgcaatccggaaatcgccaatcttttccaggattatgtgcagaactgcgtgatggg

SEQ ID NO: 62966 - DNA, 75 bp, synthetic construct
  source 1..75: mol_type = other DNA
tgttggtgtctgccgctgatggtgaaatcgaaaaagaagaaacagcgaaacttgatcagcttgtccgctctaatc

SEQ ID NO: 62967 - DNA, 75 bp, synthetic construct
  source 1..75: mol_type = other DNA
aaccacccgacttaacgctgtgctggattacattgacgcggtgacggcaacagataccagcaccgcgccggatgt

SEQ ID NO: 62968 - DNA, 75 bp, synthetic construct
  source 1..75: mol_type = other DNA
caagcctcgggaatgtgccatttcgcctgctgcctgaggtccgttaccgggcttttggtcgccacatcatcgtgt

SEQ ID NO: 62969 - DNA, 75 bp, synthetic construct
  source 1..75: mol_type = other DNA
cgcagtatcactggcataccgtaaggttgagtgggagcacatcaaatccggtacttctggtgccgatgactggcg

SEQ ID NO: 62970 - DNA, 75 bp, synthetic construct
  source 1..75: mol_type = other DNA
tatcttttcctgaaaaatccgggagcaattcgcttaaaccggaagcggtcagctgtaatttgttgtccctgtgtg

SEQ ID NO: 62971 - DNA, 75 bp, synthetic construct
  source 1..75: mol_type = other DNA
gagaaccccatggccgctggccggactgacactctgcatgttcatcatcagcatgttatgtggctggcgatcgtt

SEQ ID NO: 62972 - DNA, 75 bp, synthetic construct
  source 1..75: mol_type = other DNA
ccgacagatccggtgctgtaccggagtggagacacgacgcctcttcccgaccgcctgaccatccgtaatgcagaa

SEQ ID NO: 62973 - DNA, 75 bp, synthetic construct
  source 1..75: mol_type = other DNA
taacgccatatgataaatgggatggtgagaaatgggtgaccgatactgaggcacagcatagcgccgcagtagacg

SEQ ID NO: 62974 - DNA, 75 bp, synthetic construct
  source 1..75: mol_type = other DNA
ttatcggtttccttaaaaggattattttttcctcagattcactaccggggaagtgggaacacagaaaatttcggt

SEQ ID NO: 62975 - DNA, 75 bp, synthetic construct
  source 1..75: mol_type = other DNA
ttgaacgccctgactcacgccgcacagcataacgaaaacctgctggctgccgctgttaatgccgctcgcgttcgc

SEQ ID NO: 62976 - DNA, 75 bp, synthetic construct
  source 1..75: mol_type = other DNA
ggcggcgaagggatcaaccagtggtacaacgttactctgaccgaaggccgtaaccgtgaagttcgtcgtctttgg

SEQ ID NO: 62977 - DNA, 75 bp, synthetic construct
  source 1..75: mol_type = other DNA
tttgaggagaagcacggctcacagctggagctgctgtttcgatttctggatcgttcgctggcaattggcgtgctg

SEQ ID NO: 62978 - DNA, 75 bp, synthetic construct
  source 1..75: mol_type = other DNA
tcgacggtgcgatgccgagccgtgccgaaacggtaaaaggttacgtgcaggccatgcaccagagctggctacagg

SEQ ID NO: 62979 - DNA, 75 bp, synthetic construct
  source 1..75: mol_type = other DNA
gctttctggtgtacagataacttccgggcttacgacatattgccgaatgaaaaacacatcacaggtaagctttat

SEQ ID NO: 62980 - DNA, 75 bp, synthetic construct
  source 1..75: mol_type = other DNA
cgtcagttacccatcacgttgatgctgtgggtagtgttctttatgagcctgctgattatttacctgctctcaagc

SEQ ID NO: 62981 - DNA, 75 bp, synthetic construct
  source 1..75: mol_type = other DNA
gaaagagtcggcccgcgccgggttctcacattgtctggttattgaagaggcgcactcgctaccggtgccgacgct

SEQ ID NO: 62982 - DNA, 75 bp, synthetic construct
  source 1..75: mol_type = other DNA
cttaccaaatacagtaataataatggctcacagtccccgtggatggaagaacaaattcgggatgcctggggaagc

SEQ ID NO: 62983 - DNA, 75 bp, synthetic construct
  source 1..75: mol_type = other DNA
attattgcggttgttgcggtaggtaaacgagaacgtagtaacgtttataatctcgccagtgagagaatgagatag

SEQ ID NO: 62984 - DNA, 75 bp, synthetic construct
  source 1..75: mol_type = other DNA
tacaaaatcaaacttcgcgcatcaggttttcgtctggtctatcaggtgattgatggcatgttaattattgcggtt

SEQ ID NO: 62985 - DNA, 75 bp, synthetic construct
  source 1..75: mol_type = other DNA
gtagaagttaacgtacgccgcgatggtcaggtttataacatcgcctttgaaaatggcgaaaaggtgcaggattta

SEQ ID NO: 62986 - DNA, 75 bp, synthetic construct
  source 1..75: mol_type = other DNA
attccgcaggtcaatggaaggtgatgtcaaaggaagatatgaagaaaaaactcaacctgcactcaccggaccatt

SEQ ID NO: 62987 - DNA, 75 bp, synthetic construct
  source 1..75: mol_type = other DNA
ccgtgtaatcaactatcgaatgctggaatacacagacgttacagaaacgcagcttgccgccaaaattttcgcaga

SEQ ID NO: 62988 - DNA, 75 bp, synthetic construct
  source 1..75: mol_type = other DNA
ttaaccgtaccgaactgttccttgtggaaggtgactccgcaggcggatctgccaagcaggcgcgcgatcgcgaat

SEQ ID NO: 62989 - DNA, 75 bp, synthetic construct
  source 1..75: mol_type = other DNA
aaatgactgctacagccgcgaagtcagccaatccgttgacgacactattgaactggttcgtgcctatcttaaata

SEQ ID NO: 62990 - DNA, 75 bp, synthetic construct
  source 1..75: mol_type = other DNA
tgccccagcagatttgtttgacagggtgcaacctgaaagtcgctataacccggagctggctgtcagtgacaggta

SEQ ID NO: 62991 - DNA, 75 bp, synthetic construct
  source 1..75: mol_type = other DNA
agcgcgggaaataaaaccggccaagggcgaagttcttgtcgttgtatctggttttactggttgcggaaaaagcgc

SEQ ID NO: 62992 - DNA, 75 bp, synthetic construct
  source 1..75: mol_type = other DNA
aaaaggtccttactcgagttcgtcgtattcgggggcagattgatgctctggaacggtcgctggagggtgatgccg

SEQ ID NO: 62993 - DNA, 75 bp, synthetic construct
  source 1..75: mol_type = other DNA
tattgccgggataaccgatgcaatggggtattcctctcttgttgcgtcaaaagcatctgatgacctaaaaattat

SEQ ID NO: 62994 - DNA, 75 bp, synthetic construct
  source 1..75: mol_type = other DNA
ttcctgacgctgattaatgtcaccccggtgactgaacagtccggtcaactgctggggctgggtgttggtagtacc

SEQ ID NO: 62995 - DNA, 75 bp, synthetic construct
  source 1..75: mol_type = other DNA
atgcgcactttgacgaggcctgcagaaaattcgcagctactcataacgtgaaagaactagcgaataaagccggaa

SEQ ID NO: 62996 - DNA, 75 bp, synthetic construct
  source 1..75: mol_type = other DNA
cggagggtgcgtctggtatgtcgccggagcgaagaaaaagtcgtttccccggcgtgttgatactgtctgtcactg

SEQ ID NO: 62997 - DNA, 75 bp, synthetic construct
  source 1..75: mol_type = other DNA
actactcaaagatatccaatcaggagtaccgcatcacccaagacgacctggatgacctcactgacacaatcgaat

SEQ ID NO: 62998 - DNA, 75 bp, synthetic construct
  source 1..75: mol_type = other DNA
gatggcaaaaacgcggttacagatactgtcggtaaaggtctgaaggtcaccggtaaggctgtcagtgacggcgct

SEQ ID NO: 62999 - DNA, 75 bp, synthetic construct
  source 1..75: mol_type = other DNA
acgaacattatgaaaaatcacgcgtaacagtgttggatgtcggggatcctgaagtattggcgctacttgattggc

SEQ ID NO: 63000 - DNA, 75 bp, synthetic construct
  source 1..75: mol_type = other DNA
agctgtgggagcgggttatctgcttggctcgcttaaccgcagtgtggcgggtgaggatgatgacggggttaactg

SEQ ID NO: 63001 - DNA, 75 bp, synthetic construct
  source 1..75: mol_type = other DNA
ctgtcagtgcgcaagggcggagtgcaatggcagcggcagatgctgttcttaacgcggattattctgagctggcga

SEQ ID NO: 63002 - DNA, 75 bp, synthetic construct
  source 1..75: mol_type = other DNA
ctgaagagtatggaaatgaccgggttaacgttgtaccggagagaaaaattaagccgcgataaccttctgcacaga

SEQ ID NO: 63003 - DNA, 75 bp, synthetic construct
  source 1..75: mol_type = other DNA
ccgtgcgcagcgcgatgactggctaaagaaagagatactgcgcgtatacgatgagaatcatcaggtatacggtga

SEQ ID NO: 63004 - DNA, 75 bp, synthetic construct
  source 1..75: mol_type = other DNA
ctgatttcgaaaaactggtagccagctatcaggccggaagaggtcaccatgcgctactcattcaggcgttaccgg

SEQ ID NO: 63005 - DNA, 75 bp, synthetic construct
  source 1..75: mol_type = other DNA
tggatgaatcgctaccgccgtgtcctgactcgttgggagaagaaggtcgagaattatgaggcgatgctgcatttt

SEQ ID NO: 63006 - DNA, 75 bp, synthetic construct
  source 1..75: mol_type = other DNA
gacagttacgcaattagtgaaaagagtcacggcagagaagaaatccgtcttcatattgtttgcgatgtccctgat

SEQ ID NO: 63007 - DNA, 75 bp, synthetic construct
  source 1..75: mol_type = other DNA
cgcaagacttatcagaacgagcaggcagcaagacgtgcagcggcggcaaagtggcagcagctacaacgcggagcc

SEQ ID NO: 63008 - DNA, 75 bp, synthetic construct
  source 1..75: mol_type = other DNA
gaccatgaggtggcccatattctctttactgaaccgaaagtcgcaatgcagatgcgcgaaagaggaaaggctccg

SEQ ID NO: 63009 - DNA, 75 bp, synthetic construct
  source 1..75: mol_type = other DNA
taccggaactgaaagatattcagaaagtctcccgcgcaattgcgtttgcggttggcaaaatggcgcagcagcaag

SEQ ID NO: 63010 - DNA, 75 bp, synthetic construct
  source 1..75: mol_type = other DNA
gccgtgaaggtgactatatggaaggtgcggaaggcaacgtgtttgtgttacgcaagacttatcagaacgagcagg

SEQ ID NO: 63011 - DNA, 75 bp, synthetic construct
  source 1..75: mol_type = other DNA
ctttgcctacgcctgtcatcaggcaagccccagagcgagcaaaccttacctggcgctgaactgtgcgtctatacc

SEQ ID NO: 63012 - DNA, 75 bp, synthetic construct
  source 1..75: mol_type = other DNA
cctcctttaaaggatacctccatgaatgagcaattacgccagttgctgacggcgctcggtctgaccgtggctgac

SEQ ID NO: 63013 - DNA, 75 bp, synthetic construct
  source 1..75: mol_type = other DNA
cttgtcaacccagataaagaagttttttcagggtgttacgtcatcgccagaaaaaaatctaccaatgaagcaaca

SEQ ID NO: 63014 - DNA, 75 bp, synthetic construct
  source 1..75: mol_type = other DNA
atcaccgttaccagaacaaccaccaacggcaagcgcggagccaacacctattacctgccagaccaggatttggga

SEQ ID NO: 63015 - DNA, 75 bp, synthetic construct
  source 1..75: mol_type = other DNA
gcggcagggatgcagccggaaagagccacggcactggcagcagaagctgtcgataaaaaaatgccggatttattc

SEQ ID NO: 63016 - DNA, 75 bp, synthetic construct
  source 1..75: mol_type = other DNA
aactggaactgtggtgccacacaacctgtaccggatgcgcctgtgccgaaagatttaccccccggaatgccggat

SEQ ID NO: 63017 - DNA, 75 bp, synthetic construct
  source 1..75: mol_type = other DNA
ggatgcagacagtaacctgcagagtctgtgctggccctgccataaagcaaaaactgcgcgcgaacgtatcaactg

SEQ ID NO: 63018 - DNA, 75 bp, synthetic construct
  source 1..75: mol_type = other DNA
taagccctttacaggagcgtattaaagatattaatgagtgggtaggcgatgaaatcataaaatttacaaaatatg

SEQ ID NO: 63019 - DNA, 75 bp, synthetic construct
  source 1..75: mol_type = other DNA
gaccatcgcggtgaaatcgtctatagcaccgaaacaggagaatcaaaagaaatcacagctccgggtgattaccct

SEQ ID NO: 63020 - DNA, 75 bp, synthetic construct
  source 1..75: mol_type = other DNA
atgccgccacgaaccccgaaagcctgccgtgttcgcggctgccgccataccactactgacccttcaggctactgc

SEQ ID NO: 63021 - DNA, 75 bp, synthetic construct
  source 1..75: mol_type = other DNA
attaccattcgagatgataaccgaggcaagaaatggtgataggtactttgcattttcaagcatggatattcgtca

SEQ ID NO: 63022 - DNA, 75 bp, synthetic construct
  source 1..75: mol_type = other DNA
attgcagtgaaatgcaacattctaaccagcacctacatccctcacccgctgcttagccagcaggctttttcacgt

SEQ ID NO: 63023 - DNA, 75 bp, synthetic construct
  source 1..75: mol_type = other DNA
cagagcaggttattgcatggctctttgaccacctgccaacggtgtatgcagtaggcgcggcggtcagcatttccg

SEQ ID NO: 63024 - DNA, 75 bp, synthetic construct
  source 1..75: mol_type = other DNA
aatacacccgccgcgggatcgacttagacacctactggtttgtgcaatacggtctaaccacgcagccctacgagt

SEQ ID NO: 63025 - DNA, 75 bp, synthetic construct
  source 1..75: mol_type = other DNA
atgccaccacgaaccccaaaagcctgccgtgttcgcggctgccgcaataccacgactgacccgtcaggctactgc

SEQ ID NO: 63026 - DNA, 75 bp, synthetic construct
  source 1..75: mol_type = other DNA
tgagaaatgggtgacggatactgaggcacagcatagcgccgcagtagaagcggcagaagcacagcgccagtcact

SEQ ID NO: 63027 - DNA, 75 bp, synthetic construct
  source 1..75: mol_type = other DNA
cgccgggctggagaaaaaatacatcgcggcagggatgcagccggaaagagccacggcactggcagcagaagctgt

SEQ ID NO: 63028 - DNA, 75 bp, synthetic construct
  source 1..75: mol_type = other DNA
cccgtggcgtgatgagcggcattaaggacagtgacctgaaggtccgtgtggtgaagtcacagaaagaggctgaag

SEQ ID NO: 63029 - DNA, 75 bp, synthetic construct
  source 1..75: mol_type = other DNA
cggcagaaacacagcgccagtcgctgattgatgccgcaatggcttccattagtctgattcaactgaaattacagg

SEQ ID NO: 63030 - DNA, 75 bp, synthetic construct
  source 1..75: mol_type = other DNA
attccccggagaaggcagatgtccccggggcaatgtatctgaagtcagaagacggcagggactggtatgaaagcc

SEQ ID NO: 63031 - DNA, 75 bp, synthetic construct
  source 1..75: mol_type = other DNA
atgcacataaagaatttcagacaatacacgccggaaaatccggatgtgccgggtgcgatgtacctgaaatcagag

SEQ ID NO: 63032 - DNA, 75 bp, synthetic construct
  source 1..75: mol_type = other DNA
gccgaaacgggcaaacgcgccaccaccggatacaccattcaggtcgcggtcgacgagcaaagccgcgaactgtgc

SEQ ID NO: 63033 - DNA, 75 bp, synthetic construct
  source 1..75: mol_type = other DNA
aatccacattcgccagcgcaccatgaagaaggacctggaatcgctgagcagtgcggatgagatcctggcatacag

SEQ ID NO: 63034 - DNA, 75 bp, synthetic construct
  source 1..75: mol_type = other DNA
atgaatggttcagcgcgtatgcgatggcgggtgtggcttacagccgtgtgtcgactttctccggggattatctcc

SEQ ID NO: 63035 - DNA, 75 bp, synthetic construct
  source 1..75: mol_type = other DNA
accgtttccaatatcatcggcaccactgacgaaaacggtcagtacaccggactgaaagccctgctggcggcagag

SEQ ID NO: 63036 - DNA, 75 bp, synthetic construct
  source 1..75: mol_type = other DNA
atgccgggaagtgacccgaaaaccaatggcgacctgagcgcggatatccgccgtcttgagggcgcgctgaccgcc

SEQ ID NO: 63037 - DNA, 75 bp, synthetic construct
  source 1..75: mol_type = other DNA
ggcgcgaaaaatccacctgtaccactgcgaccatcgcggcctgccgctggcccttatcagcaaggaagggacaac

SEQ ID NO: 63038 - DNA, 75 bp, synthetic construct
  source 1..75: mol_type = other DNA
cacggaaggggcaacagcgtggtgcgcagaatatgatgaatggggcaacctgctgaatgaagagaacccgcatca

SEQ ID NO: 63039 - DNA, 75 bp, synthetic construct
  source 1..75: mol_type = other DNA
acatcacaaaaagcaaaacgctgcatcaacattcaggatcttgcggaatatattgacaaaagacgggaagaaggg

SEQ ID NO: 63040 - DNA, 75 bp, synthetic construct
  source 1..75: mol_type = other DNA
ctccgcgtaactgacaacaaggggaaaacgcacgacgtgctgaccggaagtgatgacggtcgccacagcaacacg

SEQ ID NO: 63041 - DNA, 75 bp, synthetic construct
  source 1..75: mol_type = other DNA
agaactatgatcgactcccccatatctaccgttcgcaatggcgatatcagcgacgcttcattctcaaaagaatct

SEQ ID NO: 63042 - DNA, 75 bp, synthetic construct
  source 1..75: mol_type = other DNA
gttatggcattttgacagcgggatctctcattctcttagtgagaaatgcctatataggttggacctggttcttca

SEQ ID NO: 63043 - DNA, 75 bp, synthetic construct
  source 1..75: mol_type = other DNA
gcgatggcgggtgtggcttacagccgtgtgtcgactttctccggggattatctccgcgtaactgacaacaagggg

SEQ ID NO: 63044 - DNA, 75 bp, synthetic construct
  source 1..75: mol_type = other DNA
tgatgatgcggctgatgcgctttcgtcaatgccagaacttattagagcggcttttttcttactttccacgagaga

SEQ ID NO: 63045 - DNA, 75 bp, synthetic construct
  source 1..75: mol_type = other DNA
gcggggaaactgccggaggcgtttttctggacggatgcggaaaacaatgatgtgccggtgacagcagaagagctt

SEQ ID NO: 63046 - DNA, 75 bp, synthetic construct
  source 1..75: mol_type = other DNA
agtgaggcggcggtcaggatgaaagcccaggttaagggaataagcctgattctgcggggtgattttcaccagtca

SEQ ID NO: 63047 - DNA, 75 bp, synthetic construct
  source 1..75: mol_type = other DNA
aactggatatgcatttttccgggctgatgtacgctgtactcagcctgtttttttgcgatccggatatgcatccct

SEQ ID NO: 63048 - DNA, 75 bp, synthetic construct
  source 1..75: mol_type = other DNA
tatggccagccttaaccttgacggctgcaccttgtccttgttccgcgaagacaagcctttcggccccggcaagtt

SEQ ID NO: 63049 - DNA, 75 bp, synthetic construct
  source 1..75: mol_type = other DNA
gaggcggtaaaaatgcctggtgaaagtacagggcagtttgtaacagcagcattaaagcgagaagttgaataccgc

SEQ ID NO: 63050 - DNA, 75 bp, synthetic construct
  source 1..75: mol_type = other DNA
atgaaccaacaattatttcaaaaggcggctggtattagcgccgaactggctgcgcgctggtttccgcatattgat

SEQ ID NO: 63051 - DNA, 75 bp, synthetic construct
  source 1..75: mol_type = other DNA
ggatcggttatgacccggccaaaggtacgcagaacggcgacagcgccggatgcgtggtggtggcaccgccagccg

SEQ ID NO: 63052 - DNA, 75 bp, synthetic construct
  source 1..75: mol_type = other DNA
gcttcaactactcggtagacgggctgaagaaaacctttagtaaacgcctgacgccttatcagtgtgaaatgctgg

SEQ ID NO: 63053 - DNA, 75 bp, synthetic construct
  source 1..75: mol_type = other DNA
tattatgggactgataactggtctgtctggacaagcaaaagtatctcatatcttatttgaacaggctaagataca

SEQ ID NO: 63054 - DNA, 75 bp, synthetic construct
  source 1..75: mol_type = other DNA
taacctgatggtgtttatccgcccgaccattctgcgtgacggtatggcggcagacggcgtgtcgcagcgcaaata

SEQ ID NO: 63055 - DNA, 75 bp, synthetic construct
  source 1..75: mol_type = other DNA
aggcccacgccgtcagcctgaaaagaatgttttcaccgatgaccagattgagaagctggaaaaaattttccattc

SEQ ID NO: 63056 - DNA, 75 bp, synthetic construct
  source 1..75: mol_type = other DNA
cgcgtgaatgaatggttcagcgcgtatgcgatggcgggtgtggcttacagccgtgtgtcgactttctccggggat

SEQ ID NO: 63057 - DNA, 75 bp, synthetic construct
  source 1..75: mol_type = other DNA
ccgcgtcatttccaccgtatccacggccattgtcggcatggtctgcacggccagcgatgcggatgcggaaacctt

SEQ ID NO: 63058 - DNA, 75 bp, synthetic construct
  source 1..75: mol_type = other DNA
gctggcgcttatcagcccggaaggggaaacggcgtggcagggggagtatgacgagtggggaaacctgctgggcga

SEQ ID NO: 63059 - DNA, 75 bp, synthetic construct
  source 1..75: mol_type = other DNA
tgacgaccgcaacgggtctgttgctgtgcgcggctcaggccggcgcggagctcagggtgattgctgaccttggtg

SEQ ID NO: 63060 - DNA, 75 bp, synthetic construct
  source 1..75: mol_type = other DNA
atcggagcagtgaccgctgaaggtaaaaaaacaggcatgaaagccttgttatctgcccagtcacagcttggcgtt

SEQ ID NO: 63061 - DNA, 75 bp, synthetic construct
  source 1..75: mol_type = other DNA
agccagcgcgaaggaatgctgatttggcctgactttactggctgggacacggtgctgaatgccgacgcaacggca

SEQ ID NO: 63062 - DNA, 75 bp, synthetic construct
  source 1..75: mol_type = other DNA
agccagaccggcaacgaagccgaccttaaccccaacgtcgccaaccgcaacaaaggggagcgcaaaaagccgaaa

SEQ ID NO: 63063 - DNA, 75 bp, synthetic construct
  source 1..75: mol_type = other DNA
cgcatcagctgcagcagcttatccggctgccggggcagcagtatgatgaggagtccggcctgtattacaaccgcc

SEQ ID NO: 63064 - DNA, 75 bp, synthetic construct
  source 1..75: mol_type = other DNA
gcgccaggcgctgacggtagagaactacacaaccgcccgttctgcggacagctacccggcgttttccccgatgct

SEQ ID NO: 63065 - DNA, 75 bp, synthetic construct
  source 1..75: mol_type = other DNA
ttgccagtgacttgttgggggttggaggtcttccttcatctctggctgggcttcataaacgagcaaaaaatgaag

SEQ ID NO: 63066 - DNA, 75 bp, synthetic construct
  source 1..75: mol_type = other DNA
cctgaaccgtccggatgaacagcggggaaaatacatgacggtcagtgagctgaaaacggaggtgtctggcatcat

SEQ ID NO: 63067 - DNA, 75 bp, synthetic construct
  source 1..75: mol_type = other DNA
tgaaggtgcgcgtaatctcggtgaagtacgtaccggggttgaggcgaaagtaaataacaaccttagcctgtgggg

SEQ ID NO: 63068 - DNA, 75 bp, synthetic construct
  source 1..75: mol_type = other DNA
gcgacgttactcgttaaccgccacgatggcgtgctgccgccgcacctggcctccgccattcagaaactgaccgga

SEQ ID NO: 63069 - DNA, 75 bp, synthetic construct
  source 1..75: mol_type = other DNA
gccaaaaaaggtgtggtagcagatttgattggcgcaggcgcaatcatcagaaccgcgttctgcggcccatgcttt

SEQ ID NO: 63070 - DNA, 75 bp, synthetic construct
  source 1..75: mol_type = other DNA
cgagatatgccattcaaaggaactcgccacaacgcgcttgatgatgccatccaccaagccaaatacgtttcagcg

SEQ ID NO: 63071 - DNA, 75 bp, synthetic construct
  source 1..75: mol_type = other DNA
tcccggtagtgatgatctgaacgggattaacgtgaaataccgttatgagtttacggacatgctgggtgttgtgac

SEQ ID NO: 63072 - DNA, 75 bp, synthetic construct
  source 1..75: mol_type = other DNA
gaactgatgaacgatattatcccgctgattagcaagcgttttaatgtccgtaaagatgccgatggtcgcgcactg

SEQ ID NO: 63073 - DNA, 75 bp, synthetic construct
  source 1..75: mol_type = other DNA
acgcgcagacacggcaatggcgcctcatgtgttaccggctgacagattttgtgaacagtggcggaacgcgcacgc

SEQ ID NO: 63074 - DNA, 75 bp, synthetic construct
  source 1..75: mol_type = other DNA
cggctggggacaggatatcgggctggccaaatgcagcagtgatgaaaaagccctggctaaagcaaaatcaaacaa

SEQ ID NO: 63075 - DNA, 75 bp, synthetic construct
  source 1..75: mol_type = other DNA
tatagctcaaatatgaggtaccgtttcacaataacgctgacgatacaggttccatcccgaaaatgggtacctgac

SEQ ID NO: 63076 - DNA, 75 bp, synthetic construct
  source 1..75: mol_type = other DNA
tgttctgctggatgcgccccggctggcgacgttacttatcaaccgtcacggcggcgtactgccgccgctcctggc

SEQ ID NO: 63077 - DNA, 75 bp, synthetic construct
  source 1..75: mol_type = other DNA
gagcatggtcagaaagcggcatgtccccggtgtggcacaacgttaaccgtggcgtgggatgcccctcggcagcgt

SEQ ID NO: 63078 - DNA, 75 bp, synthetic construct
  source 1..75: mol_type = other DNA
actttgcctatcagtgagttctatacgaaagagtgtcaaaaaaatgaactcaacattcagcgtaaaattgagaat

SEQ ID NO: 63079 - DNA, 75 bp, synthetic construct
  source 1..75: mol_type = other DNA
agctacctatctcaactaatgagtgggagagcctcgtttggagaaaaggctgccagaagaatagagcaaacatac

SEQ ID NO: 63080 - DNA, 75 bp, synthetic construct
  source 1..75: mol_type = other DNA
aactggcacgggtgctttttcaactcaaaacctggggaatggcggagattttcctcgcgggtgtgctggtcagtt

SEQ ID NO: 63081 - DNA, 75 bp, synthetic construct
  source 1..75: mol_type = other DNA
atgtcagtacctctcattctgaccatactggcgggggcagccacgtttattggcgcgtttctcggcgttctcggg

SEQ ID NO: 63082 - DNA, 75 bp, synthetic construct
  source 1..75: mol_type = other DNA
gatcatgttgctcatctcattaatggaaatgcttcctgccgcactagcagctgaaggaatgtcgcctgtgttggg

SEQ ID NO: 63083 - DNA, 75 bp, synthetic construct
  source 1..75: mol_type = other DNA
gtgataccggacgttccgctattgatcaggggcgtatcccgcaaatcatggataacctgctggctgaagggaaaa

SEQ ID NO: 63084 - DNA, 75 bp, synthetic construct
  source 1..75: mol_type = other DNA
gcaatctggggcgttccctctacagcagccgcgcagaatcgccgttgggcgagccggaatggggcatctcgcaaa

SEQ ID NO: 63085 - DNA, 75 bp, synthetic construct
  source 1..75: mol_type = other DNA
ttacggacacactggggatggtgacgtcattcagctatgcaggagacaagaatcgccagctgacccattacagcg

SEQ ID NO: 63086 - DNA, 75 bp, synthetic construct
  source 1..75: mol_type = other DNA
gcgtaaccgctggttcagcgtgatggcggggccgtctgtacgcgtgaatgaatggttcagcgcgtattcgatggc

SEQ ID NO: 63087 - DNA, 75 bp, synthetic construct
  source 1..75: mol_type = other DNA
attcctctcgtcactggcgctgatctgctggcgcagtacgcctgtatgggacttggttttaagctggtggtggtc

SEQ ID NO: 63088 - DNA, 75 bp, synthetic construct
  source 1..75: mol_type = other DNA
tttggcgacctgacgctgcagttcaccacctatgccgttcgtctggccagaggatatatgtttccgcccggtgcc

SEQ ID NO: 63089 - DNA, 75 bp, synthetic construct
  source 1..75: mol_type = other DNA
actgagaacacaaactaaaggtacaggctgctcaatgattcaggtcttgagcgataaagtttgcaagctagccga

SEQ ID NO: 63090 - DNA, 75 bp, synthetic construct
  source 1..75: mol_type = other DNA
atgaaagccgtagaaatcccactggttgctgacaatcagacttttgccaccacaattaacggttcggtttatcac

SEQ ID NO: 63091 - DNA, 75 bp, synthetic construct
  source 1..75: mol_type = other DNA
ctgccgttccacccgagcaacgtgtatgaaatcgacacgctgaaccagaacctgaccgacattctgcgtgagatt

SEQ ID NO: 63092 - DNA, 75 bp, synthetic construct
  source 1..75: mol_type = other DNA
acagcaggaagggagcgaagacggtcacggtgtggtgttcccggctgaactggtggggctgctggacaggctgga

SEQ ID NO: 63093 - DNA, 75 bp, synthetic construct
  source 1..75: mol_type = other DNA
atattgtccggttacttcgcaacaaggatgagtgcagtgttagcgatttagctaactatttttctgttaccaaag

SEQ ID NO: 63094 - DNA, 75 bp, synthetic construct
  source 1..75: mol_type = other DNA
ccggatgaggaaaaaatgctgatgcagaaagcggcaggacttgccggaggcgtacggtttggtggggacggaggg

SEQ ID NO: 63095 - DNA, 75 bp, synthetic construct
  source 1..75: mol_type = other DNA
agtcctcattgcatcaacagggctaaagcctggcaccatcgagcgggccagaagaaagtcatggatgcagggaaa

SEQ ID NO: 63096 - DNA, 75 bp, synthetic construct
  source 1..75: mol_type = other DNA
aaggcgcaggaaaacagcgaaacgctggccgctgacatcatcatcagccagaagcgtatcggcaacctgcctgct

SEQ ID NO: 63097 - DNA, 75 bp, synthetic construct
  source 1..75: mol_type = other DNA
ctgttagcggaaacacagttaccggggcagggactgaattcaacgccgcattatctctgatcagagtgggttgca

SEQ ID NO: 63098 - DNA, 75 bp, synthetic construct
  source 1..75: mol_type = other DNA
ggcgcgttaacgaaaacgcatcactgcaaaaaatgattatcggcatgagggttaaaagcacctatgatacatgtt

SEQ ID NO: 63099 - DNA, 75 bp, synthetic construct
  source 1..75: mol_type = other DNA
actgatgctgagttactggcccgtttactcgatgttattcgccgaccgcctgcaggcggcaataaatatgactat

SEQ ID NO: 63100 - DNA, 75 bp, synthetic construct
  source 1..75: mol_type = other DNA
tgatccagattgatggctcacctcatgactggtttgaaaatcgaggccccagatgtacactgatcgttttcattg

SEQ ID NO: 63101 - DNA, 75 bp, synthetic construct
  source 1..75: mol_type = other DNA
tctccggggattatctccgcgtaactgacaacaaggggaaaacgcacgatgtgctgaccggaagtgatgacggtc

SEQ ID NO: 63102 - DNA, 75 bp, synthetic construct
  source 1..75: mol_type = other DNA
gatatttacagcgcgtggaagcgtcagggaagcaatgctgaaaagttatcagtggcgctacattcagcgccatcg

SEQ ID NO: 63103 - DNA, 75 bp, synthetic construct
  source 1..75: mol_type = other DNA
actctctccaagttcaaagataaaattgaactattcgttggtattgctaatggtgtaacctcaaagcaagcggta

SEQ ID NO: 63104 - DNA, 75 bp, synthetic construct
  source 1..75: mol_type = other DNA
taccacgattgtttctgcggaatccatcgtccgtaatctgatgtacggaatgcgtgactgcctcgcgtttggcga

SEQ ID NO: 63105 - DNA, 75 bp, synthetic construct
  source 1..75: mol_type = other DNA
ataaatgaagttaaaggcaccattgatacagcaactttcaggttacagactggtactggtgcttttgccttagca

SEQ ID NO: 63106 - DNA, 75 bp, synthetic construct
  source 1..75: mol_type = other DNA
tgaaattaggtaaagagctatcagatctaatgcaggcgcagaaaactgcgccagtattgcaacgcgtcaccattg

SEQ ID NO: 63107 - DNA, 75 bp, synthetic construct
  source 1..75: mol_type = other DNA
gcggtattcgctctctgaacgttgccctgcgccaggaactggatctctacatctgcctgcgtccggtacgttact

SEQ ID NO: 63108 - DNA, 75 bp, synthetic construct
  source 1..75: mol_type = other DNA
aaatcacaaagaaccagtacaacagcttgagaaggttcaccctacctggcgaagcgagtttccaataccgttaga

SEQ ID NO: 63109 - DNA, 75 bp, synthetic construct
  source 1..75: mol_type = other DNA
tcagatattatatcagttctgctgatttaaccgcagagaagttcgccacagcaatccgaaaccactggcacgtgg

SEQ ID NO: 63110 - DNA, 75 bp, synthetic construct
  source 1..75: mol_type = other DNA
aattgctaacgatcgtgactctgtgaccctggtgcacaaaggcaacatcatgaagttcaccgaaggcgcgtttaa

SEQ ID NO: 63111 - DNA, 75 bp, synthetic construct
  source 1..75: mol_type = other DNA
gccagttgacggaaatccgcggttctgctgtcggaatggctggcgcatttgccggtgcctttgccaccggacacc

SEQ ID NO: 63112 - DNA, 75 bp, synthetic construct
  source 1..75: mol_type = other DNA
ggaaaccctgcgtttcagcgccgatgccagccttgccttcccgtgcagtgatatcagtgcgctgaaacgggatac

SEQ ID NO: 63113 - DNA, 75 bp, synthetic construct
  source 1..75: mol_type = other DNA
taaggcgatggcggacgacggcaaactgacggcggataaagtcgttcctgcgttaatcagccagctgggggtatt

SEQ ID NO: 63114 - DNA, 75 bp, synthetic construct
  source 1..75: mol_type = other DNA
gtatggattagtggagaaactattacacataaggaaactttaaaagaaatcgggtgtaaatgggcggcaaagaaa

SEQ ID NO: 63115 - DNA, 75 bp, synthetic construct
  source 1..75: mol_type = other DNA
atgaacaggttgaacaattgctcgcagagctgctcaacgtactggaaaaacataaggctccgaccgacctttccc

SEQ ID NO: 63116 - DNA, 75 bp, synthetic construct
  source 1..75: mol_type = other DNA
cttccagcggtggcggaatcactaatgctcaattcacttatattaatcatggtgatgcttacgctcctggctggc

SEQ ID NO: 63117 - DNA, 75 bp, synthetic construct
  source 1..75: mol_type = other DNA
cgatatataacaacatgggcgaacttgctgccagtaatattgttctaccggggaatacgacttctgatttgaaca

SEQ ID NO: 63118 - DNA, 75 bp, synthetic construct
  source 1..75: mol_type = other DNA
gggtcatccgcctgaccagtgaaaacggcagccacaccaccttccgttacgatgtactcgaccggctgatacagg

SEQ ID NO: 63119 - DNA, 75 bp, synthetic construct
  source 1..75: mol_type = other DNA
tacgccgcaaccggtgtggattccgtaccgattcgttttgcaggctcttaccagcgcgacgataccggcgaaacg

SEQ ID NO: 63120 - DNA, 75 bp, synthetic construct
  source 1..75: mol_type = other DNA
cctgcagcacgatgctcatttgatgcaacaagatttgctctcctttaatgtcagtgaagaaaatagcgagaatgg

SEQ ID NO: 63121 - DNA, 75 bp, synthetic construct
  source 1..75: mol_type = other DNA
cgtcgtcaggaacatcatgggacgcaaccagtagggcagacaaggtaatcctttatcgcaaggacctttcaccaa

SEQ ID NO: 63122 - DNA, 75 bp, synthetic construct
  source 1..75: mol_type = other DNA
tttgatgcatccagggttgtaccaacagcatcagagaatcgccctcgaaacattgcatttaactatatcgtgaga

SEQ ID NO: 63123 - DNA, 75 bp, synthetic construct
  source 1..75: mol_type = other DNA
ggcaaaaggtgaagcctggtttcaaattagcaggcaagctggtacttcttaccgcactgcgctatggcccggcgg

SEQ ID NO: 63124 - DNA, 75 bp, synthetic construct
  source 1..75: mol_type = other DNA
ggtgaaagaattgaccgtgctggaaaatatcttcctgggtaacgaaataacccacaatggcattatggattatga

SEQ ID NO: 63125 - DNA, 75 bp, synthetic construct
  source 1..75: mol_type = other DNA
atcagggcactccaagcccggttaaacaccctgaactgaccgatatggttatcttccgtgaaaactcggaagaca

SEQ ID NO: 63126 - DNA, 75 bp, synthetic construct
  source 1..75: mol_type = other DNA
cggatattacttcgacctgttctggtaccggaactcgggctggtggtccttaggccgggccgtgaatccatgcaa

SEQ ID NO: 63127 - DNA, 75 bp, synthetic construct
  source 1..75: mol_type = other DNA
ttgcgtgaggcgattcaacgtctcgaagcgaagggcttgttgcttcgtcgccagggtggcggcacttttgtccag

SEQ ID NO: 63128 - DNA, 75 bp, synthetic construct
  source 1..75: mol_type = other DNA
ggaactgattacggcgttgtatttggcgcatttgcaggggctgtattctacatagcaacagcagcagatctgagt

SEQ ID NO: 63129 - DNA, 75 bp, synthetic construct
  source 1..75: mol_type = other DNA
gcaacgctgttaagaacagcaatgctggattattataaccaggacactacgggaacctcggggatagtcggcatg

SEQ ID NO: 63130 - DNA, 75 bp, synthetic construct
  source 1..75: mol_type = other DNA
attgctcacacctatatggctgcggaatatctggaaaaagccggacgcaaactcggcgtaaatgtttacgttgaa

SEQ ID NO: 63131 - DNA, 75 bp, synthetic construct
  source 1..75: mol_type = other DNA
ctgcattacaggacgactatgtatcgaaaacagccactgcaacacaatcgctggcatctcccctcaatgtaacaa

SEQ ID NO: 63132 - DNA, 75 bp, synthetic construct
  source 1..75: mol_type = other DNA
agtcaccgccattgccaaagatccgagcggtaatgaaagcgatccttcaaccgtgacgtcaaaaaccgatggtgt

SEQ ID NO: 63133 - DNA, 75 bp, synthetic construct
  source 1..75: mol_type = other DNA
gaataaatcgaattgcggaatactggcctgagctgtttgggacagagaatataaaacccctgaaggctggcataa

SEQ ID NO: 63134 - DNA, 75 bp, synthetic construct
  source 1..75: mol_type = other DNA
ggggctgcggcctggtacacgatgtatcagaatcaggagcaggccagagaatctgcacgccagtatgccgcaaca

SEQ ID NO: 63135 - DNA, 75 bp, synthetic construct
  source 1..75: mol_type = other DNA
aaagcccagtcaatccaggatgtgcttgccgggctggaagaacgacgagtggtgctgatccgccaacaggcagcg

SEQ ID NO: 63136 - DNA, 75 bp, synthetic construct
  source 1..75: mol_type = other DNA
cacgttcggcttcttccatgcgggaatatggttacaggtctgaggaagtactgaaagttaccgaggccatttcta

SEQ ID NO: 63137 - DNA, 75 bp, synthetic construct
  source 1..75: mol_type = other DNA
aatgacacaatcaaaataggtactatttcaaatggtaatataaccattgatgcgggtgccggtgatgatatcgtt

SEQ ID NO: 63138 - DNA, 75 bp, synthetic construct
  source 1..75: mol_type = other DNA
cttatgaatgccgcgattgtcaacggaattaagacggcggcaaacggtatgtccggtgcgggaggatttctcggc

SEQ ID NO: 63139 - DNA, 75 bp, synthetic construct
  source 1..75: mol_type = other DNA
ctgccagtggccacacggcgattatcatcacagcgaaacagtcattcaccgttatggtaccggcgcgatggtgtt

SEQ ID NO: 63140 - DNA, 75 bp, synthetic construct
  source 1..75: mol_type = other DNA
cgcaaccggcgaactggttattggaaccaaactgtccgcaagtctgaacggtaatgcattaacagcaacaaagct

SEQ ID NO: 63141 - DNA, 75 bp, synthetic construct
  source 1..75: mol_type = other DNA
tggacggatcgtgtgcagtggcagagcaatcccgcacatttacaggcctggcaggaaggcaaaacgggatacccg

SEQ ID NO: 63142 - DNA, 75 bp, synthetic construct
  source 1..75: mol_type = other DNA
taaaattgttgcccaccttgataacaaaagtaccggaagccacctgacaaaaacggaactatttgcagtgaagcg

SEQ ID NO: 63143 - DNA, 75 bp, synthetic construct
  source 1..75: mol_type = other DNA
atgagtaaacaacgcatttttatcgctggccatcgcgggatggtcggttccgccatcaggcggcagctcgaacag

SEQ ID NO: 63144 - DNA, 75 bp, synthetic construct
  source 1..75: mol_type = other DNA
ctgtaacctgttcgaccttgaccagttgcgcatggagtacagcccggatgaataccagaacctgctgatgtgcga

SEQ ID NO: 63145 - DNA, 75 bp, synthetic construct
  source 1..75: mol_type = other DNA
gaaattaaacctgtccggaaggctggcgataaagattattgcagagccaccggataagcgccgtcgtgacctgga

SEQ ID NO: 63146 - DNA, 75 bp, synthetic construct
  source 1..75: mol_type = other DNA
gaaagccacaaaagcgaaggctggaagcaatacaaacctggacaatcccgtcatcagcgcggctacggttcgaag

SEQ ID NO: 63147 - DNA, 75 bp, synthetic construct
  source 1..75: mol_type = other DNA
gacttccgcgcccaggctgacgcaatcaaaaaactgaccgagcagtacaacgtgacctacatcggcatcgactca

SEQ ID NO: 63148 - DNA, 75 bp, synthetic construct
  source 1..75: mol_type = other DNA
tccaggaactgcgcaaagttgcctccgggatggccattcacaagaaatggcgacaaacctacttttccacgccgt

SEQ ID NO: 63149 - DNA, 75 bp, synthetic construct
  source 1..75: mol_type = other DNA
acgatgaattcgttaattgtccgcatgggcccacaacacttttctgttctctggcatcagacaggagaaagtgag

SEQ ID NO: 63150 - DNA, 75 bp, synthetic construct
  source 1..75: mol_type = other DNA
cttccgcgaaggcgatccgaatgattttgccgatatccccacgttgcttagcggtctggtagcaaaagtgcctga

SEQ ID NO: 63151 - DNA, 75 bp, synthetic construct
  source 1..75: mol_type = other DNA
cggacgcagcgccacctatgaggccagccgcagcgaggaagccagccacgccgacctcgcctgggcgaccatgca

SEQ ID NO: 63152 - DNA, 75 bp, synthetic construct
  source 1..75: mol_type = other DNA
ccccctcaataaaccggtgctgattaccaatgtgcagagcgcgattgcaaaggccggtaaaaaaggcacgctggc

SEQ ID NO: 63153 - DNA, 75 bp, synthetic construct
  source 1..75: mol_type = other DNA
ttcgacacgccgtggtgtcagccggaaagcgacgttgttgcagcattaagccgccgtttcggctgcacgctggag

SEQ ID NO: 63154 - DNA, 75 bp, synthetic construct
  source 1..75: mol_type = other DNA
attgagcagctcaaacgtgaaaacagcgccgacgattttaaaaacctgttcatgtgtgaatttgttgacgacaag

SEQ ID NO: 63155 - DNA, 75 bp, synthetic construct
  source 1..75: mol_type = other DNA
gcaggacccggcaaccgatgcgggactgcttaaccagaacgacgtcaccacgcttgtgcgcaaggatggtttccg

SEQ ID NO: 63156 - DNA, 75 bp, synthetic construct
  source 1..75: mol_type = other DNA
acaaccatgaaattaacgaactgcttctggcaacaggcttcataaatattaacgaatatgaacgccgtaaaaaaa

SEQ ID NO: 63157 - DNA, 75 bp, synthetic construct
  source 1..75: mol_type = other DNA
ggatcggttatgacccggcgaaaggtacgcagaacggcgacagtgccggatgcgtggtggtggctccgccagccg

SEQ ID NO: 63158 - DNA, 75 bp, synthetic construct
  source 1..75: mol_type = other DNA
tatgggatgcatgcgcttcgtcaggcatgaagttatccagcgttgccatcatggcgcgtctggcagacttcagca

SEQ ID NO: 63159 - DNA, 75 bp, synthetic construct
  source 1..75: mol_type = other DNA
catctgaacctggttagtggctcacgataccaaaaatcaaaaacttctctggaaaacatccgtgctcgtctgcgt

SEQ ID NO: 63160 - DNA, 75 bp, synthetic construct
  source 1..75: mol_type = other DNA
tcggcaccaacgcccgtacggcgcagagctaccacggcaacctgtaccttgatgaatatttctggataccgaaat

SEQ ID NO: 63161 - DNA, 75 bp, synthetic construct
  source 1..75: mol_type = other DNA
tctttaccggccacgaatttcttgatgaccacgcggttgttatcgctgatggcctgattaaaagcgtctgtccgg

SEQ ID NO: 63162 - DNA, 75 bp, synthetic construct
  source 1..75: mol_type = other DNA
agaaacgggtaatcactgtctgtgaccgggaagcggatatctggcattacctgcattataaagtcagccacgggc

SEQ ID NO: 63163 - DNA, 75 bp, synthetic construct
  source 1..75: mol_type = other DNA
cgtgggcgcaacaaagccgataaggtggacatcgacctgtcccacagcaatctggcccccggcctgctgtgcgca

SEQ ID NO: 63164 - DNA, 75 bp, synthetic construct
  source 1..75: mol_type = other DNA
agaaagccaatgagaaatcgggctgcaccaactatctgccgacgcttatcactaccagcgatgaactgatgaaac

SEQ ID NO: 63165 - DNA, 75 bp, synthetic construct
  source 1..75: mol_type = other DNA
atgatgtattacgtcacatggattttgggtacgccggaagtgtttgtcgcttttctcaccacttattgcgtgggt

SEQ ID NO: 63166 - DNA, 75 bp, synthetic construct
  source 1..75: mol_type = other DNA
gaaaaaaacagttaaacgtttttacgatacgctggtggtgcagtttgatattgaagaggcgtgggcagagcaaca

SEQ ID NO: 63167 - DNA, 75 bp, synthetic construct
  source 1..75: mol_type = other DNA
aatgccgggtgcagtggatgtggatctgggactggatgacagtgctctggacacagaattttccattggtggtac

SEQ ID NO: 63168 - DNA, 75 bp, synthetic construct
  source 1..75: mol_type = other DNA
gtgctgttgatgtggagcgccgtgcgcctgccacgaatggaagcctttttgatcttccttaccacggtgatgatg

SEQ ID NO: 63169 - DNA, 75 bp, synthetic construct
  source 1..75: mol_type = other DNA
cttgagcttataaaaaacgccatacgagtaaacgacgatccttatagatttaatattaataattcctcagttact

SEQ ID NO: 63170 - DNA, 75 bp, synthetic construct
  source 1..75: mol_type = other DNA
gcgtgacgataccggggaagtgcaggccgtggagcttgtggtgcgtggacgtcacaaagaagtggattccggtga

SEQ ID NO: 63171 - DNA, 75 bp, synthetic construct
  source 1..75: mol_type = other DNA
atgaaacgctttccgctatttcttttattcaccctgctcacgctgtccaccgttccggcccaggccgatattatc

SEQ ID NO: 63172 - DNA, 75 bp, synthetic construct
  source 1..75: mol_type = other DNA
atgacccatttttcacagcaagataatttttctgttgcggcgcgcgtgttgggcgcgctgttttattacgctcca

SEQ ID NO: 63173 - DNA, 75 bp, synthetic construct
  source 1..75: mol_type = other DNA
gtatttgctcatcgatacgaaatatcttgagccaacgaagtgggatctgaaagtcacattgactaacggtaactg

SEQ ID NO: 63174 - DNA, 75 bp, synthetic construct
  source 1..75: mol_type = other DNA
caaggaatgtcgctttcaccggtccattcggcccgacagtgtccagttcaacccactgattctgctgaaacggag

SEQ ID NO: 63175 - DNA, 75 bp, synthetic construct
  source 1..75: mol_type = other DNA
actgctggatgagcaaaactgcctgatgctgcatgaactctggctgcagagtggtactggccagcgtcgctggga

SEQ ID NO: 63176 - DNA, 75 bp, synthetic construct
  source 1..75: mol_type = other DNA
cggatattgcatgggcaaccatgcacgccctgttaaacgagccgctttccgccggtagcggtatgcattcaacgt

SEQ ID NO: 63177 - DNA, 75 bp, synthetic construct
  source 1..75: mol_type = other DNA
atggacgaaatgaatttaggtcctgaagcacaggaactgcatgacagcattgtggcagaaattcagtccggcgtg

SEQ ID NO: 63178 - DNA, 75 bp, synthetic construct
  source 1..75: mol_type = other DNA
ctgtggcgtgccggtctgcgccagaacttccgtatcttccagaacgaggacatcaaaagcatcctcggcacgatg

SEQ ID NO: 63179 - DNA, 75 bp, synthetic construct
  source 1..75: mol_type = other DNA
atggctatcgtcgcctgcatgcgatgctcaggcatgagggggttcggctatcagaaaaggttgtacgcagactta

SEQ ID NO: 63180 - DNA, 75 bp, synthetic construct
  source 1..75: mol_type = other DNA
gccgcggcgtcctgacctaaaaatcattatcacttccgcgactatcgacccggaacgcttttcgcgccactttaa

SEQ ID NO: 63181 - DNA, 75 bp, synthetic construct
  source 1..75: mol_type = other DNA
gatggctgggccgggctgcgcgatcttaacggcaacatcatgcaggaaagtctgtttgccctgcgtgaaaatctg

SEQ ID NO: 63182 - DNA, 75 bp, synthetic construct
  source 1..75: mol_type = other DNA
ccataatgaatttaccgtgaagcggctactgctgaggcccagaccctgcctgatgccgatgaacaaagattttcc

SEQ ID NO: 63183 - DNA, 75 bp, synthetic construct
  source 1..75: mol_type = other DNA
ccaccaggtggtgatcgtcgccggggaaacgggttccggtaaaacgactcagctaccgaaaatctgtatggagct

SEQ ID NO: 63184 - DNA, 75 bp, synthetic construct
  source 1..75: mol_type = other DNA
tcactacttttcattcttattagaattacagcgcttgtgggactctgaatacgacgaagacctttacgaagaatt

SEQ ID NO: 63185 - DNA, 75 bp, synthetic construct
  source 1..75: mol_type = other DNA
gggcactggggccgggtttgcctgtcatggatatgaagaacatgccagcaaaaccgcttgtcttccagtcgggaa

SEQ ID NO: 63186 - DNA, 75 bp, synthetic construct
  source 1..75: mol_type = other DNA
cgctggactggcaggaagtcagtaacagcgtcaccgatgaaaacggaaacatcatccagcccccgtggaaagagt

SEQ ID NO: 63187 - DNA, 75 bp, synthetic construct
  source 1..75: mol_type = other DNA
acctgtctcaactatgttctggaaagtccgtactggaacgtaaaaggtaactttttctgttatctgaacgatcat

SEQ ID NO: 63188 - DNA, 75 bp, synthetic construct
  source 1..75: mol_type = other DNA
gcgaccttgctgccaacaccatgccgggttctaacgacatcatggaagtgaaagacgcctttatgaacggcaccg

SEQ ID NO: 63189 - DNA, 75 bp, synthetic construct
  source 1..75: mol_type = other DNA
accgtgtatgaagattcccgacccggtacgctgaatgattttctcggtgccatgacggaggatgatgcccgtccg

SEQ ID NO: 63190 - DNA, 75 bp, synthetic construct
  source 1..75: mol_type = other DNA
gacttcgatacaaataccaggaagaaactccaggaagaagcagcatattgcgtaccaatttctgcaatatctgta

SEQ ID NO: 63191 - DNA, 75 bp, synthetic construct
  source 1..75: mol_type = other DNA
tttttttataacatctttttttataccaatagttattccttatgatataaaaaatcttcctgcttacaataagat

SEQ ID NO: 63192 - DNA, 75 bp, synthetic construct
  source 1..75: mol_type = other DNA
ctctgcgaaactttccaccagcgcgtgctggaaagccacgcccatacgcaacaggcaattgatgcccgtcatgac

SEQ ID NO: 63193 - DNA, 75 bp, synthetic construct
  source 1..75: mol_type = other DNA
gccggctttcccagcccggccgcaggctatgaggccaatgaacttaacctgcatgattactgcgtgcggcgtccg

SEQ ID NO: 63194 - DNA, 75 bp, synthetic construct
  source 1..75: mol_type = other DNA
cccgactttccgggtaatgcaggaggatggctgggccgggctgcgcgatcttaacggcaacatcatgcaggaaag

SEQ ID NO: 63195 - DNA, 75 bp, synthetic construct
  source 1..75: mol_type = other DNA
actgaaaaacaaggctgcactggaaaatacccccggcattgaggatttgacaaccaccgcacttaccggtgatgg

SEQ ID NO: 63196 - DNA, 75 bp, synthetic construct
  source 1..75: mol_type = other DNA
gaagaatgccggtcgtttaactcggaagtgattaagcgattgctggacagcctgaagagagaggggataacggta

SEQ ID NO: 63197 - DNA, 75 bp, synthetic construct
  source 1..75: mol_type = other DNA
gtatgacgttgctttttacgctgatgatctggatgcacttaacgaactttccgagctgatctgtgccgcagaatg

SEQ ID NO: 63198 - DNA, 75 bp, synthetic construct
  source 1..75: mol_type = other DNA
aagttaaggcaacttctattgcttcgcttcttcctgacgcaccaggaaaacaaacaaaagaacgaaatacagacc

SEQ ID NO: 63199 - DNA, 75 bp, synthetic construct
  source 1..75: mol_type = other DNA
gaacacctgctgtttactccgttgttcaaagcggataacgccagagttttcgaccttgaagttgaatcgtcaact

SEQ ID NO: 63200 - DNA, 75 bp, synthetic construct
  source 1..75: mol_type = other DNA
tcgctgatggcgaagcggctgattgaaatgaaacgttatcgcggcgcgtttgtggcaccgcgtaaccagtggaat

SEQ ID NO: 63201 - DNA, 75 bp, synthetic construct
  source 1..75: mol_type = other DNA
tcaggtaatgtcgccaaaccctatatgcgccacactgccagtaatgccgtggtgcaactggcaaccgaagcatgg

SEQ ID NO: 63202 - DNA, 75 bp, synthetic construct
  source 1..75: mol_type = other DNA
gttattcgcgcgtcaggattttgacgatcgtgtctttaccaatccatatgagcccgttgatttggaacgcgtcat

SEQ ID NO: 63203 - DNA, 75 bp, synthetic construct
  source 1..75: mol_type = other DNA
tgttgccggttcgctgttctctgcggctgcgccaaacgttgaagtactgattctttcccgcgttctgctggggct

SEQ ID NO: 63204 - DNA, 75 bp, synthetic construct
  source 1..75: mol_type = other DNA
taaatccggataccgtctcatggggatatcgtgggggcacactggatgttaatggtaacagtctgacgtttcatc

SEQ ID NO: 63205 - DNA, 75 bp, synthetic construct
  source 1..75: mol_type = other DNA
gatcaccctgccgatggtcggggtcacctcgctggcggtggcgacaggtgcgctggtgtacgcctggtaccaggg

SEQ ID NO: 63206 - DNA, 75 bp, synthetic construct
  source 1..75: mol_type = other DNA
gaatgcgggcacgacggtgaatggcagtacgctgtttaagggctcggataacacatctcttctgaagaaagcgcg

SEQ ID NO: 63207 - DNA, 75 bp, synthetic construct
  source 1..75: mol_type = other DNA
tggctggtcggaatcaggtaaaggaactgccggaaatttatataaatacaataacccgtacacaaatacgacgga

SEQ ID NO: 63208 - DNA, 75 bp, synthetic construct
  source 1..75: mol_type = other DNA
tcttcgctcattcccgggcattgccaaacgttctgatgtgaacggtgtatctcgcggcgtcgagtacaacatggc

SEQ ID NO: 63209 - DNA, 75 bp, synthetic construct
  source 1..75: mol_type = other DNA
cgacaccgttcacacccacattgcctggcttgccgagcagggactggtgcgcaaacgcgttctgattaacggtta

SEQ ID NO: 63210 - DNA, 75 bp, synthetic construct
  source 1..75: mol_type = other DNA
atgaacagaatttattctcttcgctacagcgctgtggcccggggctttattgccgtatctgagtttgccaggaaa

SEQ ID NO: 63211 - DNA, 75 bp, synthetic construct
  source 1..75: mol_type = other DNA
tgagattaatatcccaggcgttttcacaatcgggggcatggtacccccacatctattgaatccgcaacgcgcagt

SEQ ID NO: 63212 - DNA, 75 bp, synthetic construct
  source 1..75: mol_type = other DNA
atgactctcaataaaaccgatcgcattgtcattacgctgggtaaacagatcgttcacggcaaatacgtaccaggc

SEQ ID NO: 63213 - DNA, 75 bp, synthetic construct
  source 1..75: mol_type = other DNA
atggtatgcatatcatcgttgaagcattaaaacagaataatattgacactatttatggtgttgtaggtattcctg

SEQ ID NO: 63214 - DNA, 75 bp, synthetic construct
  source 1..75: mol_type = other DNA
catcaattacgggcgtgagcagatgattgagcagaatgaaccgttcgtttacgacaaacgcgttttgtggaagcg

SEQ ID NO: 63215 - DNA, 75 bp, synthetic construct
  source 1..75: mol_type = other DNA
agataagcggtacaaagtccgagagcctagggctgacagtgctgttcttgatgcaaattaaaggatttaatagtg

SEQ ID NO: 63216 - DNA, 75 bp, synthetic construct
  source 1..75: mol_type = other DNA
cgtgctgctcagcgccccgctgtcgttctcgttctggcaaggcgcgctaatggtctgcggcggttccctgctctg

SEQ ID NO: 63217 - DNA, 75 bp, synthetic construct
  source 1..75: mol_type = other DNA
ccctcgttgttgcatctgttctggttttctctcttgctggctgcggtgacaaagaagaatcgaagaaattcagcg

SEQ ID NO: 63218 - DNA, 75 bp, synthetic construct
  source 1..75: mol_type = other DNA
caaacaacctgaaactgggaacctttggcgcatttgataacgaatggcatatgctggctttccgctttgccggga

SEQ ID NO: 63219 - DNA, 75 bp, synthetic construct
  source 1..75: mol_type = other DNA
gaaaaaaggcgacaagcatttgcgtacactttttattcatggtgcccgcgctgtcgtcagagttgccatgaataa

SEQ ID NO: 63220 - DNA, 75 bp, synthetic construct
  source 1..75: mol_type = other DNA
gatgctttcgggagcctgtccgggcgaaattttcacctcaccgacgcccgataaaatctttgaatgcgccatgca

SEQ ID NO: 63221 - DNA, 75 bp, synthetic construct
  source 1..75: mol_type = other DNA
gtaacttcttccagctgcttaacccgttcggcctgctggcaggtgtggtgagcgtagggatgatcattactcagg

SEQ ID NO: 63222 - DNA, 75 bp, synthetic construct
  source 1..75: mol_type = other DNA
tgaaggtgcggcagaaaaagcccgcacgcaaatcgaatctcaattacccgcaggttacaagccggtttatcttaa

SEQ ID NO: 63223 - DNA, 75 bp, synthetic construct
  source 1..75: mol_type = other DNA
atgccatcacaaatccctcgtgcatgccgtaagcgaggctgcgcaggcacaacgacggacagttctggctactgc

SEQ ID NO: 63224 - DNA, 75 bp, synthetic construct
  source 1..75: mol_type = other DNA
gtcacggtatcgaaactggcgagcacggcgcaccgttaaaacatggtcgcgtgggcatctatttcggtatgaaag

SEQ ID NO: 63225 - DNA, 75 bp, synthetic construct
  source 1..75: mol_type = other DNA
ggttcgatggttcggctgacattacgttgactcctaaagatctggacgtttacagcaaaagcgaaatagacaata

SEQ ID NO: 63226 - DNA, 75 bp, synthetic construct
  source 1..75: mol_type = other DNA
cccgtattcgccaggcccggcgccgcgcgcgactcaaagaggaaggcgctagcgtgacagtcacgctaacaaaac

SEQ ID NO: 63227 - DNA, 75 bp, synthetic construct
  source 1..75: mol_type = other DNA
tgccaactaccccatcttctggaagtttgtcggcctgggtggttcaagctacggtatcctcaaaaatctggatga

SEQ ID NO: 63228 - DNA, 75 bp, synthetic construct
  source 1..75: mol_type = other DNA
cagcctgctggttaatgtccgtacatcggtgcagattattgataacagtgacctggtcaaagttcaccgggtgga

SEQ ID NO: 63229 - DNA, 75 bp, synthetic construct
  source 1..75: mol_type = other DNA
acagccataaacattaatggcgtcagattcgatggttctacgaacatttcgataccaacaattacgtctagagga

SEQ ID NO: 63230 - DNA, 75 bp, synthetic construct
  source 1..75: mol_type = other DNA
gcgagtaaaagcgcagccatgatggggtcgggcgatcaacagcaggccagtcgtggatcgtccgtactggttgat

SEQ ID NO: 63231 - DNA, 75 bp, synthetic construct
  source 1..75: mol_type = other DNA
gcaaccgccacgcagacccgtgacggcagtatggtgatggacgccagtggggcaatgtcccgtttgccggttggt

SEQ ID NO: 63232 - DNA, 75 bp, synthetic construct
  source 1..75: mol_type = other DNA
tcttggacactttgcggcgcttccacattgaggaggagaacgctagcgggccgatggcgcaggttgttgggcaca

SEQ ID NO: 63233 - DNA, 75 bp, synthetic construct
  source 1..75: mol_type = other DNA
agaaggaaaaataaggcgtacgcctcttcgtcgtggtgcccgtactttatgggaggtagcaagggaaacggaaaa

SEQ ID NO: 63234 - DNA, 75 bp, synthetic construct
  source 1..75: mol_type = other DNA
atggggaggcgcggcgttgctttccgttgaaagtgcaccgaaaaataaaaagccttttacagtagcggtgtacaa

SEQ ID NO: 63235 - DNA, 75 bp, synthetic construct
  source 1..75: mol_type = other DNA
cttcccgctgatgaccttcagcgcggagcaacgccagggtaaacagggcgaaaatgacacccgttttgccgtcga

SEQ ID NO: 63236 - DNA, 75 bp, synthetic construct
  source 1..75: mol_type = other DNA
aacgcttcttccgcagtctgaaaacagaatgggtgccgacggatggttacgtaggcaaggacgaggcccggcaac

SEQ ID NO: 63237 - DNA, 75 bp, synthetic construct
  source 1..75: mol_type = other DNA
cgcaacataacactaaaaatatcaagctgatggatattgttcaccgtctacagcagattatggtcaacgaaaatc

SEQ ID NO: 63238 - DNA, 75 bp, synthetic construct
  source 1..75: mol_type = other DNA
ggaagtgtccaaatattttctcgccaggttggagcaacttgattaatgagatttcaaaaagtagacggttaataa

SEQ ID NO: 63239 - DNA, 75 bp, synthetic construct
  source 1..75: mol_type = other DNA
ctgccggatatcggcgagcaggtggaggtgctgctggatgataacggcgaggatggcgtggtgctgggggcggtc

SEQ ID NO: 63240 - DNA, 75 bp, synthetic construct
  source 1..75: mol_type = other DNA
atggactccacgctcatctccactcgtcccgatgaagggacgctttcgttaagtcgcgcccgacgagctgcgtta

SEQ ID NO: 63241 - DNA, 75 bp, synthetic construct
  source 1..75: mol_type = other DNA
cccggtggagtttgctgctaaaggacagttccgttttcgtgcgcagccggtgtttccggcgaacgtgaaggcggg

SEQ ID NO: 63242 - DNA, 75 bp, synthetic construct
  source 1..75: mol_type = other DNA
gtgggagcaggagcagacagaaggcgcctcagatccatttgccgggctggaaaacgcgcttttaaccgtgtctca

SEQ ID NO: 63243 - DNA, 75 bp, synthetic construct
  source 1..75: mol_type = other DNA
ggaagggttttatagcgtccagcgtaatcagttaaaaccagacagccgttactacaaagcgattaatattggttt

SEQ ID NO: 63244 - DNA, 75 bp, synthetic construct
  source 1..75: mol_type = other DNA
tgttcctgctactgctactgctactgctactgctactgctactgctactgctactgctactgctactgctactgc

SEQ ID NO: 63245 - DNA, 75 bp, synthetic construct
  source 1..75: mol_type = other DNA
gcccgctgggtgacgagcgggctgatatccgggctgcccagatagtttctgcagtttacggggcgcagggtgtca

SEQ ID NO: 63246 - DNA, 75 bp, synthetic construct
  source 1..75: mol_type = other DNA
cgtgcaacggctcaggtggcggcactggtgacactggtctgtttcgcactggctggcgtatgggtgatgtacggt

SEQ ID NO: 63247 - DNA, 75 bp, synthetic construct
  source 1..75: mol_type = other DNA
gcgcccggcgaagcccccggtctgatggcgctcgaaatcgcgatcgacgaactggcggaaaaagcgggcatcgat

SEQ ID NO: 63248 - DNA, 75 bp, synthetic construct
  source 1..75: mol_type = other DNA
gcctgtttgtttttgcaccaatgacctgggcgcaggactacaatattaaaaacggtttgccgtcagaaacctata

SEQ ID NO: 63249 - DNA, 75 bp, synthetic construct
  source 1..75: mol_type = other DNA
caaaaatacttgatctcactgccgcggcatttttacttgtcgcctttctgacgggtattgcgggcgctcttcaga

SEQ ID NO: 63250 - DNA, 75 bp, synthetic construct
  source 1..75: mol_type = other DNA
atgactcagtatggcggtcctattgtccagggttcggcaggtgtaagaattggcgcgccaactggcgtggcgtgc

SEQ ID NO: 63251 - DNA, 75 bp, synthetic construct
  source 1..75: mol_type = other DNA
tgtaccggagagcagctgaacgatgggcaaaagtgatggtacagctaagtgatgaccagaaaagaaaagtggcgg

SEQ ID NO: 63252 - DNA, 75 bp, synthetic construct
  source 1..75: mol_type = other DNA
tatgattgataccgagcgttttgaacgccggatcaacggcgtgaatgtacttgccggcctgtcggcaaaagtgcg

SEQ ID NO: 63253 - DNA, 75 bp, synthetic construct
  source 1..75: mol_type = other DNA
ggaatactttttcacaagttttcaaaatactaactcagctaataagcattgtttatttagcaagaataataccgc

SEQ ID NO: 63254 - DNA, 75 bp, synthetic construct
  source 1..75: mol_type = other DNA
gcttcggtcgcatcgggcgtaatgtggttcgtgctttgtatgaatccggacgccgggcggaaattaccgtggtgg

SEQ ID NO: 63255 - DNA, 75 bp, synthetic construct
  source 1..75: mol_type = other DNA
ggaacgacaacggcgaactcatccgcatcagcagcccgcgccagacccggagttacagctacagcaccaccggca

SEQ ID NO: 63256 - DNA, 75 bp, synthetic construct
  source 1..75: mol_type = other DNA
atgaacccttatatttatcttggtggtgcaatacttgcagaggtcattggtacaaccttaatgaagttttcagaa

SEQ ID NO: 63257 - DNA, 75 bp, synthetic construct
  source 1..75: mol_type = other DNA
aaaaccgtcagcgaagaagaggtgctgcaactggtgcagttaagcaaaccggaaatcgcgcaggcgatatttggt

SEQ ID NO: 63258 - DNA, 75 bp, synthetic construct
  source 1..75: mol_type = other DNA
ggatgccattctggatgaactgctgggcgcaccggcagttccggagccggaaggtatcgcgggtgaggggagtgc

SEQ ID NO: 63259 - DNA, 75 bp, synthetic construct
  source 1..75: mol_type = other DNA
cctgccggataccgttcatgaaggcatcgtcattaacagtgcagagatgcgtctgtattactatccgaaagggac

SEQ ID NO: 63260 - DNA, 75 bp, synthetic construct
  source 1..75: mol_type = other DNA
gacctgcgaagccgacaccctcggctcctgtggttacgtttatctggcggtttatccgacaccggcagcgcccgc

SEQ ID NO: 63261 - DNA, 75 bp, synthetic construct
  source 1..75: mol_type = other DNA
gccctggaagcttcggcatgtatttgcggcctgttcttaacagaccacaaatataatctggatgtgtacagttat

SEQ ID NO: 63262 - DNA, 75 bp, synthetic construct
  source 1..75: mol_type = other DNA
ggaaggcggaaagtcagtatgcggtcctgaaagaggctgccacgaaacgacagttatccgggcaggaaaaatccc

SEQ ID NO: 63263 - DNA, 75 bp, synthetic construct
  source 1..75: mol_type = other DNA
gtatgcaaaagggcttacctgcaaagccgataccctcggcagtcgaggttacgtttatatggctgtttatccgac

SEQ ID NO: 63264 - DNA, 75 bp, synthetic construct
  source 1..75: mol_type = other DNA
ctggaacgctgtgagggtaaacaactggcggtatggatgcggcgggtctgcctgggtgagccggttgcccgttcc

SEQ ID NO: 63265 - DNA, 75 bp, synthetic construct
  source 1..75: mol_type = other DNA
ctggcagctataaaccagcttcgtgaagtgctgtcttatcgacaggaaacaatagactccttaaaaaaactggat

SEQ ID NO: 63266 - DNA, 75 bp, synthetic construct
  source 1..75: mol_type = other DNA
ggccgcactgatggccatcgagagagagttgcgcagcttacggcaggtcgtcagggaacagggagcgcgggatga

SEQ ID NO: 63267 - DNA, 75 bp, synthetic construct
  source 1..75: mol_type = other DNA
tttaacacatcttcgccttacgccaacgctaatggaagattaagaaagtgggcaaaaaataataatatcagttta

SEQ ID NO: 63268 - DNA, 75 bp, synthetic construct
  source 1..75: mol_type = other DNA
atgactcaggctgagcatcgccatgaccggcttgccgtcagactgtcgataattattagccgtctggtggcaggc

SEQ ID NO: 63269 - DNA, 75 bp, synthetic construct
  source 1..75: mol_type = other DNA
ccaacccaatcaagcaccgcgattaagactgcagagaaattaatccagcgttgcgctaatatgaccaagtctaaa

SEQ ID NO: 63270 - DNA, 75 bp, synthetic construct
  source 1..75: mol_type = other DNA
tgacaaccgatgcggaagccgctgtcagcgaagccctgcgcgacctggccttctggctgtaccgccagctggaaa

SEQ ID NO: 63271 - DNA, 75 bp, synthetic construct
  source 1..75: mol_type = other DNA
agccagcaccgcgatgaatgaaacaggatttaattctgacgtcattgagtctgctttagctcacattgagaaaaa

SEQ ID NO: 63272 - DNA, 75 bp, synthetic construct
  source 1..75: mol_type = other DNA
acggtggaacagctgaaaatgacggctgaaattgtctgttcggtgttccgtgtcccggcctacaagattggcgtt

SEQ ID NO: 63273 - DNA, 75 bp, synthetic construct
  source 1..75: mol_type = other DNA
attatcaccccggttctgcaatcatggctcaatgatgaagaacagcaggtggcgctgcgtttgctggagaaagat

SEQ ID NO: 63274 - DNA, 75 bp, synthetic construct
  source 1..75: mol_type = other DNA
gtatgccttatgctggcgttattgcgcaagaggcacttaatgcaatccctgaatcagttggtagcacaataaagt

SEQ ID NO: 63275 - DNA, 75 bp, synthetic construct
  source 1..75: mol_type = other DNA
ggaagctacgcaacaaaattatatgtagacagcaaagatgaaatcgttggtgactggtctgcttcatggtatcag

SEQ ID NO: 63276 - DNA, 75 bp, synthetic construct
  source 1..75: mol_type = other DNA
tgacctcagtggcgctgaccattgacaccacaacggtgatggcgacgcaggattacgttgatgacaaaattgcag

SEQ ID NO: 63277 - DNA, 75 bp, synthetic construct
  source 1..75: mol_type = other DNA
cgtatggtgtgcggggaagtaacgcgcttattaagtttgactgcacagacacattacaaatcaaatatgccaatc

SEQ ID NO: 63278 - DNA, 75 bp, synthetic construct
  source 1..75: mol_type = other DNA
tccgcgccttttcgattatggctcggaaatctacgaacctctgcacagtttactggaacgttttgggccacagcg

SEQ ID NO: 63279 - DNA, 75 bp, synthetic construct
  source 1..75: mol_type = other DNA
tccagcaaatccgtaaacagcgcgacccgttatttcgcaaaaatgtattacgcgcttataactaccgtcgcgttg

SEQ ID NO: 63280 - DNA, 75 bp, synthetic construct
  source 1..75: mol_type = other DNA
aagagttacaacaacgcttcgaaaagcaattactacctgaccttgatatgtcatttgaactaaatggcgaagtat

SEQ ID NO: 63281 - DNA, 75 bp, synthetic construct
  source 1..75: mol_type = other DNA
aggcattacctcatttccggttcattggtgaagtgctgtccggctttgtccctgaaccacatcaacccgcaacag

SEQ ID NO: 63282 - DNA, 75 bp, synthetic construct
  source 1..75: mol_type = other DNA
aaagcctttgataaaggatcgattggcctggatgaaaatatgcgggtactggtctcggatgcggtaaacggcgga

SEQ ID NO: 63283 - DNA, 75 bp, synthetic construct
  source 1..75: mol_type = other DNA
gaaaccagctttatgacctttagcagtaatatctacgaccaatacgcagaagctacgctattaagttcatcattc

SEQ ID NO: 63284 - DNA, 75 bp, synthetic construct
  source 1..75: mol_type = other DNA
atgctcaccagcagtgaactgaatccccaccgtcagaataccgtcacgctgtatgttaaagggctgacctgccat

SEQ ID NO: 63285 - DNA, 75 bp, synthetic construct
  source 1..75: mol_type = other DNA
agagggcagttcagcgacgcggatgcataccatctggaccaggcctttccgctgctgatgaaacaactggaactc

SEQ ID NO: 63286 - DNA, 75 bp, synthetic construct
  source 1..75: mol_type = other DNA
aaactgcttggtgaaaacgagtccatttatattccgctgggggcgacgcactgcctggaaaacccggggaaaatt

SEQ ID NO: 63287 - DNA, 75 bp, synthetic construct
  source 1..75: mol_type = other DNA
attggttgcggcaaagaacgtgagctggatgagcgtcagtacaaacaagtcattcagaaaaccattaatacgctg

SEQ ID NO: 63288 - DNA, 75 bp, synthetic construct
  source 1..75: mol_type = other DNA
ctggatatatcggatctcatacggctattgaattactaaatgcaggtcatgagattatcgttctggacaatttca

SEQ ID NO: 63289 - DNA, 75 bp, synthetic construct
  source 1..75: mol_type = other DNA
aaatctggatcatcgctggcatcacagatatgcgttgtggcttcaacggcctggcttcgaaggtgcagaacacgc

SEQ ID NO: 63290 - DNA, 75 bp, synthetic construct
  source 1..75: mol_type = other DNA
cacttttaaacggagccagtcagtgcatcgcgtttttatcaaatatcattgataattgctcagtttcgtcgcatc

SEQ ID NO: 63291 - DNA, 75 bp, synthetic construct
  source 1..75: mol_type = other DNA
acagggcgattcgtcagggctggccagcattctcacagtggcttgatgccgtgattcagcgtgtcgaaatgtaca

SEQ ID NO: 63292 - DNA, 75 bp, synthetic construct
  source 1..75: mol_type = other DNA
tggagaatggatattctcagaaagctatcgcggcgatgttggaggtttccactcgaactattcggaattggaaaa

SEQ ID NO: 63293 - DNA, 75 bp, synthetic construct
  source 1..75: mol_type = other DNA
catctaccaaaaaatgctcgacggacggatgaaatattcctccatctttaattatccgacattgagttgggctga

SEQ ID NO: 63294 - DNA, 75 bp, synthetic construct
  source 1..75: mol_type = other DNA
aaatggctatttttcagaggttggcgagataccgcatctttcaactattcaggacagtggctgtactttatcctt

SEQ ID NO: 63295 - DNA, 75 bp, synthetic construct
  source 1..75: mol_type = other DNA
gattgcgccaatgctggcgatgagtgatgcccgtcgcgcggcgattatccgccgctggctggcagggcagaatgc

SEQ ID NO: 63296 - DNA, 75 bp, synthetic construct
  source 1..75: mol_type = other DNA
catctgcccgtatccgcaccagtcgttcggaaaatgattcagataccgtgcggaaaaaatattaccagtgtaaca

SEQ ID NO: 63297 - DNA, 75 bp, synthetic construct
  source 1..75: mol_type = other DNA
tggtgcgtggcgtttacgcgacaataccacctggagttataacagtagcgacagatcatcaggtagcaaaaataa

SEQ ID NO: 63298 - DNA, 75 bp, synthetic construct
  source 1..75: mol_type = other DNA
gagtactataaatggaaatcctctgacaaggttgataactggggcgcagttggcgctgactggcctttagaagaa

SEQ ID NO: 63299 - DNA, 75 bp, synthetic construct
  source 1..75: mol_type = other DNA
aaaaattgtctacgccagcaatggcaccttgagtgacgatgaccgggcctcgctggctacggatattcaggggct

SEQ ID NO: 63300 - DNA, 75 bp, synthetic construct
  source 1..75: mol_type = other DNA
atgaaacaactggaactcatgctcaccagcggtgaactgaatccccgccatcagcataccgtcacgctgtatgca

SEQ ID NO: 63301 - DNA, 75 bp, synthetic construct
  source 1..75: mol_type = other DNA
ttcgtgcattaattgcgcaaaatgccatagcgcgaaatcttggtgtgacgccgcaagcggtgaatcagtggtttt

SEQ ID NO: 63302 - DNA, 75 bp, synthetic construct
  source 1..75: mol_type = other DNA
aatattttgcttaacacatctgcaattccggataattataaagatacaaaaaacaataaaataaccaacccattt

SEQ ID NO: 63303 - DNA, 75 bp, synthetic construct
  source 1..75: mol_type = other DNA
ccattgatgcctatgcccgtggcgtcaatgactggctcgctttctgtcactctgttgccctgacggctgctgtcg

SEQ ID NO: 63304 - DNA, 75 bp, synthetic construct
  source 1..75: mol_type = other DNA
atcaccgactacctgaacattcagacaatcagaaagattaaatctgggtttagcaagtatttgttgaacaattca

SEQ ID NO: 63305 - DNA, 75 bp, synthetic construct
  source 1..75: mol_type = other DNA
tgcttttggagtgtcattcgatcaaaccaaatctccgaggggatcagttcagcctgattgtgaccacagtagatg

SEQ ID NO: 63306 - DNA, 75 bp, synthetic construct
  source 1..75: mol_type = other DNA
aggttttagtcccgacccggttaaatttatatccagagccagtactcctggcctcggcgcttcatttttagcgtt

SEQ ID NO: 63307 - DNA, 75 bp, synthetic construct
  source 1..75: mol_type = other DNA
tcgaacagggtgtctggatccggccttttggcaaactgatttacctgatgccgccctatattattctcccgcaac

SEQ ID NO: 63308 - DNA, 75 bp, synthetic construct
  source 1..75: mol_type = other DNA
gatacatcttatcatggccaatatatttttaatgggagtgatgtgtcggatataagctataaaaaacaactctat

SEQ ID NO: 63309 - DNA, 75 bp, synthetic construct
  source 1..75: mol_type = other DNA
cggctgcgctggcgaaggccacatctgcactgaagaacacctggtctgcggaggagcagcttcgtggaagctgga

SEQ ID NO: 63310 - DNA, 75 bp, synthetic construct
  source 1..75: mol_type = other DNA
atggctaccccagtttcgctgatggatgaccagatggtcgacatggcgtttatcactcaactgaccggcctaacc

SEQ ID NO: 63311 - DNA, 75 bp, synthetic construct
  source 1..75: mol_type = other DNA
tctgggcagaaaatcgtggctgttcgccggttcgcagatggcgggagaacgcgccgcgcaaataatgagcttgct

SEQ ID NO: 63312 - DNA, 75 bp, synthetic construct
  source 1..75: mol_type = other DNA
ggaagggcattacacaaagccattgtctatgcgctgtctcatcgcgtggaactgagctgcttcctggaagatggt

SEQ ID NO: 63313 - DNA, 75 bp, synthetic construct
  source 1..75: mol_type = other DNA
cagaatatgagtctgaccgaaaagtgccattgccggtaaccccatctttgcgggcgtttatcaacgggcaagaag

SEQ ID NO: 63314 - DNA, 75 bp, synthetic construct
  source 1..75: mol_type = other DNA
gccgtaatacttgatcttatgctgcctaatgttaatgggctggagatttgccgttatatccgtcagatgacccgt

SEQ ID NO: 63315 - DNA, 75 bp, synthetic construct
  source 1..75: mol_type = other DNA
tgcgttacaaaacgagccaaaaacgaaacagcctgaaccagaagagcaacaagaaccggaaaaagtctgtaccgc

SEQ ID NO: 63316 - DNA, 75 bp, synthetic construct
  source 1..75: mol_type = other DNA
atgtgatgatcgttaactgtggcagtatcccgcgttcagaaggcaaggcgtgtcgggtgtttgatctgcgcaata

SEQ ID NO: 63317 - DNA, 75 bp, synthetic construct
  source 1..75: mol_type = other DNA
aactggatcactcgcgcaccaaccttgcggcgtaaagccattctgttggccaaagtgcaggatgaagccggtcat

SEQ ID NO: 63318 - DNA, 75 bp, synthetic construct
  source 1..75: mol_type = other DNA
ccggtctgcgcgccggctgacccgtcatcgttaaactatcattcaccgattttctgtgaggattttatcgtgtca

SEQ ID NO: 63319 - DNA, 75 bp, synthetic construct
  source 1..75: mol_type = other DNA
gccgacaccctcggctcctgtggttacgtttatctggctgtttatccgacaccagcacccgcaaccacctcataa

SEQ ID NO: 63320 - DNA, 75 bp, synthetic construct
  source 1..75: mol_type = other DNA
tttgacctgacaacgtttgatgatgaacgcgactttttcgccgcctgccgtgcccttcaccaggatgaaaccgac

SEQ ID NO: 63321 - DNA, 75 bp, synthetic construct
  source 1..75: mol_type = other DNA
acggcaccgcccggtgtcgcagaacatgtgactatggaggattcgggaatgtctgttgttgcacctgctgtatac

SEQ ID NO: 63322 - DNA, 75 bp, synthetic construct
  source 1..75: mol_type = other DNA
ccaatagtgcatcaacactctggcaggcaggcgcgaaattactgaaagtgaagctggataaccatcttatcagtg

SEQ ID NO: 63323 - DNA, 75 bp, synthetic construct
  source 1..75: mol_type = other DNA
ctggatggcaggccgtcggtggcgcttccgtgggtggttttcagcctgatttcatcggtgtcggcggacgtgatg

SEQ ID NO: 63324 - DNA, 75 bp, synthetic construct
  source 1..75: mol_type = other DNA
acgaaacatgcactgcaaattgggtgatttttaatgaccaggggcgagcaaatcttactatcgactttatgtata

SEQ ID NO: 63325 - DNA, 75 bp, synthetic construct
  source 1..75: mol_type = other DNA
cctataaggaattctgttgctgatgctgctgattctcgtgccagtgatattcccggacttcctacaaatccactg

SEQ ID NO: 63326 - DNA, 75 bp, synthetic construct
  source 1..75: mol_type = other DNA
atttgtatttccaaatcgacgcttgaaggattgcgcaccgaaactggataccgtaacgcgaccttatcaggaaca

SEQ ID NO: 63327 - DNA, 75 bp, synthetic construct
  source 1..75: mol_type = other DNA
ggctaagctctctgctgaatcatggacaattcgccaggtcattgacccagtgaaaatctatgccctgccagagtc

SEQ ID NO: 63328 - DNA, 75 bp, synthetic construct
  source 1..75: mol_type = other DNA
cgcatgggcaatccagtttcctatcaaattattccttatgcaggtggtactcacccggtagcaaaaggtgcccag

SEQ ID NO: 63329 - DNA, 75 bp, synthetic construct
  source 1..75: mol_type = other DNA
agatgtgctgcgtgagagcgtcggtaagtcggttgttaaccttattcacggcgtgcgtgatatggcggcgatccg

SEQ ID NO: 63330 - DNA, 75 bp, synthetic construct
  source 1..75: mol_type = other DNA
gcctccttaaccactattactaccagcgtcattggcgctaatgaggactcagagggcaccgttaatgttttgggt

SEQ ID NO: 63331 - DNA, 75 bp, synthetic construct
  source 1..75: mol_type = other DNA
atactggagggcgaaccggttcgtcgtggtctgccgtcaccggatgagcagaacgccacagcaccagtgcgtgaa

SEQ ID NO: 63332 - DNA, 75 bp, synthetic construct
  source 1..75: mol_type = other DNA
cctgggactggaaatgggggctgatgactatctaccgaaacccttttccattccggagctgattgcccgcatcaa

SEQ ID NO: 63333 - DNA, 75 bp, synthetic construct
  source 1..75: mol_type = other DNA
aaccgggggaatattactctgtgcaggctgtttctatgtttacgacaaaccagtttattctcctttgtcccaagg

SEQ ID NO: 63334 - DNA, 75 bp, synthetic construct
  source 1..75: mol_type = other DNA
ggttgttgtcaaatataaataacatatatttaattgaaccactgcagtatttaccttttgtttatttaatggata

SEQ ID NO: 63335 - DNA, 75 bp, synthetic construct
  source 1..75: mol_type = other DNA
tcgggcgtacgccgccggtattgcgtcaccttggcgcaccagatttgccgctggttatctcccgcgacactgtgc

SEQ ID NO: 63336 - DNA, 75 bp, synthetic construct
  source 1..75: mol_type = other DNA
tcgccgccgtttacgcagcattgctgttcccgctttacggccaagcacagctgtacaactattcgtatactgata

SEQ ID NO: 63337 - DNA, 75 bp, synthetic construct
  source 1..75: mol_type = other DNA
aatcgagtaatctcacagctcgttccaacaataaccggagtacatgacatgaccgaaacagcgaaatatattaaa

SEQ ID NO: 63338 - DNA, 75 bp, synthetic construct
  source 1..75: mol_type = other DNA
ctggcaggggctttcgctggatgacggtaaggacaacgccggttatgtgaagttcgggcatggcagtgcacaaca

SEQ ID NO: 63339 - DNA, 75 bp, synthetic construct
  source 1..75: mol_type = other DNA
aatcaccttcgctctctggttcattggcctccaacggcgttcatccactggggtggcgggtaagtattttcaccc

SEQ ID NO: 63340 - DNA, 75 bp, synthetic construct
  source 1..75: mol_type = other DNA
ctcagcggaatttcaggcatctgcacagtcttttggagcggatgccatcattaaacgccaccgcgtgcataaagc

SEQ ID NO: 63341 - DNA, 75 bp, synthetic construct
  source 1..75: mol_type = other DNA
cggcattagcgttggcaattgggtttttatcgggttgtaccattattccgggtcagggattaaacagtctgcgta

SEQ ID NO: 63342 - DNA, 75 bp, synthetic construct
  source 1..75: mol_type = other DNA
aatggcagcagcagactctgttcttaacgcggattactctgagctggcgaagtccccgaaatttcagcagacgtt

SEQ ID NO: 63343 - DNA, 75 bp, synthetic construct
  source 1..75: mol_type = other DNA
tgctatttccttgatgacgcatttgaaaataatgttgctaaaacaaatctttgcgccattctggaacaacatggc

SEQ ID NO: 63344 - DNA, 75 bp, synthetic construct
  source 1..75: mol_type = other DNA
ccatcaatgaagtttgcggcagcgtttctggtcggtgcgatgctggcgttcgatatgggcggccccatcaataaa

SEQ ID NO: 63345 - DNA, 75 bp, synthetic construct
  source 1..75: mol_type = other DNA
cacctaaaccaaccaagcttatagtaagactaataagcatgatcacaaataaggactcgcttgtgatggacttct

SEQ ID NO: 63346 - DNA, 75 bp, synthetic construct
  source 1..75: mol_type = other DNA
attcctttctgaaactaaatcaggtgtggtaaaccaaacttggtggccttatgactttgcaggtagcactagaaa

SEQ ID NO: 63347 - DNA, 75 bp, synthetic construct
  source 1..75: mol_type = other DNA
gaagggcgctttgttgaggcggacggcggcacgctgtttctcgatgaaattggcgatatctcgccgatgatgcag

SEQ ID NO: 63348 - DNA, 75 bp, synthetic construct
  source 1..75: mol_type = other DNA
tgcgctgaatacgccgatgaccgaaggctatgatgattctgcggtctgggtggcgaagggtgtaaacctgattgg

SEQ ID NO: 63349 - DNA, 75 bp, synthetic construct
  source 1..75: mol_type = other DNA
tggcgcagcatcgtgaatccatgcaggggatgaatcgcgagcagcttctggagcagtatgctgatgcggatatgg

SEQ ID NO: 63350 - DNA, 75 bp, synthetic construct
  source 1..75: mol_type = other DNA
gtgccgaaagttccggtcgttgagcctttgactttaaaaagcggcatcgccgcgcctcggagtcctgtcaataac

SEQ ID NO: 63351 - DNA, 75 bp, synthetic construct
  source 1..75: mol_type = other DNA
atgaacggacaaatatcaattattcgccctggcgcttgtgacgaagagataaggctgattatccgccttgcgatg

SEQ ID NO: 63352 - DNA, 75 bp, synthetic construct
  source 1..75: mol_type = other DNA
caaaaacctcatgatcgaaggtgataaccttgaagtgttaaagcttcttcaaaaaagttatgccggaaaagtgaa

SEQ ID NO: 63353 - DNA, 75 bp, synthetic construct
  source 1..75: mol_type = other DNA
atacaccactcaaagcgacaatgatacagaatgaaaatggtagcttggtcttcaccattgttgattccaaaaagt

SEQ ID NO: 63354 - DNA, 75 bp, synthetic construct
  source 1..75: mol_type = other DNA
atctctcttgttcgggcaatgagatggtcgccaagattgccgcgaccaccgatcgtgatgtttccgcaggcagca

SEQ ID NO: 63355 - DNA, 75 bp, synthetic construct
  source 1..75: mol_type = other DNA
cttgttgtgctggagaagcaaacacatgataccagtatccagcctgttagctgtttgcgcgggaagggcactacc

SEQ ID NO: 63356 - DNA, 75 bp, synthetic construct
  source 1..75: mol_type = other DNA
cagaacagattgatgcctatgtaagcccaatccttgaaggccgtagtgaagaagatttgctcacagagttaatgc

SEQ ID NO: 63357 - DNA, 75 bp, synthetic construct
  source 1..75: mol_type = other DNA
agattacatgctttagcaacaagcttatatttcttgaacgagggattaatatatcagtaagaatgcaaaaatata

SEQ ID NO: 63358 - DNA, 75 bp, synthetic construct
  source 1..75: mol_type = other DNA
tatccacgtttgaaacttgctaagaatcttttaagaaaagatggcgttatcgcagttaatgtcgatgatatcgaa

SEQ ID NO: 63359 - DNA, 75 bp, synthetic construct
  source 1..75: mol_type = other DNA
tggcgatgggtgccgataaagtggtgaatagccgcgatccgcaggcactgaaagcactggcggggcagtttgatc

SEQ ID NO: 63360 - DNA, 75 bp, synthetic construct
  source 1..75: mol_type = other DNA
gaatggggattttcacaatatccgctgattgccgggcatgaggtgattggtcgcgtggtggcgctcgggagcgcc

SEQ ID NO: 63361 - DNA, 75 bp, synthetic construct
  source 1..75: mol_type = other DNA
agcagggtagcgcactggtcaccagtactgctgcaactgtcaccggcacaaaccgtctggggagtttctccgtgg

SEQ ID NO: 63362 - DNA, 75 bp, synthetic construct
  source 1..75: mol_type = other DNA
gactggatggagcaggagcaggaacgtggtattaccatcacttccgctgcgactactgcattctggtctggtatg

SEQ ID NO: 63363 - DNA, 75 bp, synthetic construct
  source 1..75: mol_type = other DNA
cagcgcggaagcgaaacgcgaactggatgaaatccgtgaaagtttgcaggttaaacagagtggctgggcgctgtt

SEQ ID NO: 63364 - DNA, 75 bp, synthetic construct
  source 1..75: mol_type = other DNA
cgctgagccagcctttaggggataccaatgttttgattaaagcgcctggcgcaggcggtgtacgcattgaaaatc

SEQ ID NO: 63365 - DNA, 75 bp, synthetic construct
  source 1..75: mol_type = other DNA
gcacatatgacagaacctcatttttatgtggctctgatgctctggaccgttacataaaagagcatgtcacacagg

SEQ ID NO: 63366 - DNA, 75 bp, synthetic construct
  source 1..75: mol_type = other DNA
tttgctggctgtattgtgttgttgcccatagtgaaatgctaaatgtcgaacaatccgggctgtttcgcgcgtggt

SEQ ID NO: 63367 - DNA, 75 bp, synthetic construct
  source 1..75: mol_type = other DNA
gccggaaagcagcggcagctatggcttcgtccgtctggagggtgacctgatgagaacagaggttgccggtatgtc

SEQ ID NO: 63368 - DNA, 75 bp, synthetic construct
  source 1..75: mol_type = other DNA
cattttacaaacattatggctttatggcgttcccggagtccggaagaactttattcatgccattggcatcattat

SEQ ID NO: 63369 - DNA, 75 bp, synthetic construct
  source 1..75: mol_type = other DNA
acttccgcatgcctttggaagtaagagaaaaattaaaatacagagcagagtcaaatggtagatcaatgaactcag

SEQ ID NO: 63370 - DNA, 75 bp, synthetic construct
  source 1..75: mol_type = other DNA
tcgatttgagattaaccgatgacgataaaagcatcatcgaggaagctgccgcaatgtctaaccagagcattaccc

SEQ ID NO: 63371 - DNA, 75 bp, synthetic construct
  source 1..75: mol_type = other DNA
tgccggaaaaaataaggaaatgccctgtttatttccctgatgacagagcaatcagaaataacggagataaaaatg

SEQ ID NO: 63372 - DNA, 75 bp, synthetic construct
  source 1..75: mol_type = other DNA
tctggtttaccagtgaaggagtgatgttgaaacggataatctggattctgttcttactgggattaacggggggct

SEQ ID NO: 63373 - DNA, 75 bp, synthetic construct
  source 1..75: mol_type = other DNA
taagcggacatctcggggtggggtatagccatggtgccggtgtggaatccccgtggaacgcggtggctggtgcga

SEQ ID NO: 63374 - DNA, 75 bp, synthetic construct
  source 1..75: mol_type = other DNA
cggcatgttattccagtggatcaggttgaaactatttctttgttcgatacaagtatatatccttcttttgatgag

SEQ ID NO: 63375 - DNA, 75 bp, synthetic construct
  source 1..75: mol_type = other DNA
ctcaattgctacctgagggagatagtgattttgaatgcgaacactgcgactacacttcggataggtataaactgc

SEQ ID NO: 63376 - DNA, 75 bp, synthetic construct
  source 1..75: mol_type = other DNA
tcggcagacagttaaatacccaggcgtcaattgcggaaatgacggacaccggtagaagccaggtatttaccttaa

SEQ ID NO: 63377 - DNA, 75 bp, synthetic construct
  source 1..75: mol_type = other DNA
tgggtattgacgaaaatacccttatggcgatgcgtcggggtgtgggtggtttctccgggcagtacagcgcaatgg

SEQ ID NO: 63378 - DNA, 75 bp, synthetic construct
  source 1..75: mol_type = other DNA
tttaacacctctgaatgatatctcgtataagcctgaaatgttaaatggttctttcgttcatattgatgaatggag

SEQ ID NO: 63379 - DNA, 75 bp, synthetic construct
  source 1..75: mol_type = other DNA
attgccgaacgcagcccaacaatgcgggcggatatttttacccgtatggaattactgattgaagatgatgaacgg

SEQ ID NO: 63380 - DNA, 75 bp, synthetic construct
  source 1..75: mol_type = other DNA
tatgttgtaaaaacaacaaagggtgactaccttaactttattattgaaacaaaaaatgtcgaaggtaaagaaagt

SEQ ID NO: 63381 - DNA, 75 bp, synthetic construct
  source 1..75: mol_type = other DNA
cagaattaaaccccacacataacgcgcgcgagagtattccgaccagtgagtcgaatggtgcgccgttgcagacag

SEQ ID NO: 63382 - DNA, 75 bp, synthetic construct
  source 1..75: mol_type = other DNA
tcccatttcgacataccagtatcctctttagtattcttttcggaatcattaggcacgcaaggccgtttgtctaag

SEQ ID NO: 63383 - DNA, 75 bp, synthetic construct
  source 1..75: mol_type = other DNA
aaagcctgccactgcttagagaactaactgaacgaattcggcaacagccggatgaagaaacttaccaatatgttg

SEQ ID NO: 63384 - DNA, 75 bp, synthetic construct
  source 1..75: mol_type = other DNA
gaaaaccaaaaacgggaagcacaggacaatccccctttcgcttgacctaataaagcgaatcaagaagaaaaactc

SEQ ID NO: 63385 - DNA, 75 bp, synthetic construct
  source 1..75: mol_type = other DNA
cgcgtccgatcgtgatgccgctgtctaacccgacttcacgcgtggaagccacaccgcaggacattatcgcctgga

SEQ ID NO: 63386 - DNA, 75 bp, synthetic construct
  source 1..75: mol_type = other DNA
ctagaagatgtcagagtcaatggtagggaattaaatgattctatccaacacataaatccattaggagttaaaggt

SEQ ID NO: 63387 - DNA, 75 bp, synthetic construct
  source 1..75: mol_type = other DNA
attactgcgacaaccagagctggatgctgtgatttgcagccacgaagagattgcgctgggtatcatgtttgagtg

SEQ ID NO: 63388 - DNA, 75 bp, synthetic construct
  source 1..75: mol_type = other DNA
tatgtttgttgatatgggagttctttctgtagaggcacgccacggtcaaacatcactctataaagcattaccctt

SEQ ID NO: 63389 - DNA, 75 bp, synthetic construct
  source 1..75: mol_type = other DNA
agacgcttccctgccgggaaaaatcaggaaatgccctgtttatcttcctgatgacagaacaaacagaaacaacgg

SEQ ID NO: 63390 - DNA, 75 bp, synthetic construct
  source 1..75: mol_type = other DNA
ttatggccttcatgttgacgacgccagctgcgtttgctgcccctgaagcagcaaacgggaccgaggcaacgacgg

SEQ ID NO: 63391 - DNA, 75 bp, synthetic construct
  source 1..75: mol_type = other DNA
acacgccttcacgcatcctgcgtatggctgaacttacccgactgctgggtatatcaagatctactatttacgtga

SEQ ID NO: 63392 - DNA, 75 bp, synthetic construct
  source 1..75: mol_type = other DNA
tgtttgttatgttgaaaattgtcagacaggggttgcctatccagcaatcaatgacaaacaatttttttctggaat

SEQ ID NO: 63393 - DNA, 75 bp, synthetic construct
  source 1..75: mol_type = other DNA
ggtgataccgggcagtttgttcgcggaaatgccgtacgtaccaccatcaatgaaaatggtcgtcagattgtggct

SEQ ID NO: 63394 - DNA, 75 bp, synthetic construct
  source 1..75: mol_type = other DNA
atatcaccctgggcgttcaggccggttatgcccacagcgtcagcggcagcagcgctgaagggtataacggtcagg

SEQ ID NO: 63395 - DNA, 75 bp, synthetic construct
  source 1..75: mol_type = other DNA
cccggaggcgctgccggggtgtcgttccatttctgatgatgacctgtgcacctggtgtacccgcctgctttaccg

SEQ ID NO: 63396 - DNA, 75 bp, synthetic construct
  source 1..75: mol_type = other DNA
gggcaatgggtacaggatggcggaacagccaacaaaacgactgtcaccagtggtggtcttcagagagtgaacccc

SEQ ID NO: 63397 - DNA, 75 bp, synthetic construct
  source 1..75: mol_type = other DNA
aatgaagttcagtacatcaaggcgacagtattccgtatcgataatccatcgacgcctcaggaaaatgaagttgag

SEQ ID NO: 63398 - DNA, 75 bp, synthetic construct
  source 1..75: mol_type = other DNA
tcactgaaaggggactttaccgatagtgctgagctacatcttgttctgcacgatatatcaggcaatccgatcaaa

SEQ ID NO: 63399 - DNA, 75 bp, synthetic construct
  source 1..75: mol_type = other DNA
gagaaaaactctgtttgtccctgctttctgtatttcaggagcgtacaaaagtgatttctttcttactgacgtata

SEQ ID NO: 63400 - DNA, 75 bp, synthetic construct
  source 1..75: mol_type = other DNA
cgctggcgatactgaagctgtggactgggcgctactgtggctgccggaaggcggtgaactgctgaccgaaagcta

SEQ ID NO: 63401 - DNA, 75 bp, synthetic construct
  source 1..75: mol_type = other DNA
cttgggctattaaatgctaatcatagtgaacttcaaaaaaaacgattagaggaccttattatttttttgaaaaat

SEQ ID NO: 63402 - DNA, 75 bp, synthetic construct
  source 1..75: mol_type = other DNA
aaactcaagcgaacaatacgtagtttccctggcaacaggtgatcaaagcgtatttgaaaagcttgggtttgctta

SEQ ID NO: 63403 - DNA, 75 bp, synthetic construct
  source 1..75: mol_type = other DNA
cgataaagatgccctcacccgtgaaggggtcgccaaagttcttgatgatctgaaagcgatggattttgaatttat

SEQ ID NO: 63404 - DNA, 75 bp, synthetic construct
  source 1..75: mol_type = other DNA
atacagcataactttaatgcctgggtgaaggagttcggcacgggtaacagggaatttaaacagatggttgaacag

SEQ ID NO: 63405 - DNA, 75 bp, synthetic construct
  source 1..75: mol_type = other DNA
ggcactgaagaacacctggtctgcggaggagcagcttcgtggaagctggatggccgggatgaagtccggctgggg

SEQ ID NO: 63406 - DNA, 75 bp, synthetic construct
  source 1..75: mol_type = other DNA
acaaaaaaaaggcgctgggcaagattgggggtaagcagcatgttttttacgtgctgatgttccagcctgatgatg

SEQ ID NO: 63407 - DNA, 75 bp, synthetic construct
  source 1..75: mol_type = other DNA
cttgctacagaaggccaaacaacgctggataatggtgctgtagttaagtatgtcacgtcaggcagtgatagcttt

SEQ ID NO: 63408 - DNA, 75 bp, synthetic construct
  source 1..75: mol_type = other DNA
atattgtgctgacagcagacagggtcagcaacagtggcaccatccgtacgccgggcggcaagaccgtcctggcgg

SEQ ID NO: 63409 - DNA, 75 bp, synthetic construct
  source 1..75: mol_type = other DNA
gaatgaagacgactgcaaaataagaagaggaaacgccgcagaattattttcagggatacggcacatcgctattaa

SEQ ID NO: 63410 - DNA, 75 bp, synthetic construct
  source 1..75: mol_type = other DNA
ttattaactggatgcgtgattgccattcttcagatgataaagacgtcattgcaattgatggaaaaacgctccggc

SEQ ID NO: 63411 - DNA, 75 bp, synthetic construct
  source 1..75: mol_type = other DNA
ggcagcttttgattatggccttcgcaatatttatcttaggaaaaatgctaccttatatgaggtgtatcatgaagt

SEQ ID NO: 63412 - DNA, 75 bp, synthetic construct
  source 1..75: mol_type = other DNA
taacatctctgctgtaaatcgaattgaacaatttgatcatgtagtgagttctactccttgtgataaccttgatgt

SEQ ID NO: 63413 - DNA, 75 bp, synthetic construct
  source 1..75: mol_type = other DNA
gcttccatttccatcagatgtccttcctgctccgctactgaaggcgtggtgcgtaacggcaaaagcactgccgga

SEQ ID NO: 63414 - DNA, 75 bp, synthetic construct
  source 1..75: mol_type = other DNA
catcacaactgatgcgatgggttgccagaaagatattgcagagaagatacaaaaacagggaggtgattatttatt

SEQ ID NO: 63415 - DNA, 75 bp, synthetic construct
  source 1..75: mol_type = other DNA
cttagcgttagtgctaataactcttataaaaaaaatttaaagatagatgttatatttgatgggagtaaagaaaac

SEQ ID NO: 63416 - DNA, 75 bp, synthetic construct
  source 1..75: mol_type = other DNA
gtcgccgctcagtactttccttattgatatctgccttgatatatgccccgcccggtatggcggccttcactcctg

SEQ ID NO: 63417 - DNA, 75 bp, synthetic construct
  source 1..75: mol_type = other DNA
gctaccgggaaaacgggaacggaatttgttcagcgagcgacgacgttttttggaccggaccggaattttgaaaac

SEQ ID NO: 63418 - DNA, 75 bp, synthetic construct
  source 1..75: mol_type = other DNA
gtgaagtggtgaaaggcgcaaaagtctatggctatcgcgagaaaccacgtgaagcgacgctggactgcaaatttc

SEQ ID NO: 63419 - DNA, 75 bp, synthetic construct
  source 1..75: mol_type = other DNA
aataatgaactgagcgatgggacaaacttctgggataaaaatcgtcaattaaccacagatgaaatagcttgctat

SEQ ID NO: 63420 - DNA, 75 bp, synthetic construct
  source 1..75: mol_type = other DNA
cgtcgtagggtgatatttaatttctctgaggtcgtaccggagaacgaacgcgatcccatgctggcggaaaagata

SEQ ID NO: 63421 - DNA, 75 bp, synthetic construct
  source 1..75: mol_type = other DNA
ggcacgttccacccgcacagtccgtcacactggatgcgcaccctgtgcgatgtggatttcaccccgccggtggaa

SEQ ID NO: 63422 - DNA, 75 bp, synthetic construct
  source 1..75: mol_type = other DNA
aacgggcactggctgccatattctttatggcaaaaattccagctgaacgtcatagcatcagcattaatgagctga

SEQ ID NO: 63423 - DNA, 75 bp, synthetic construct
  source 1..75: mol_type = other DNA
cgaccgtcaggcgcagcgggagtcggaagagcagcgccttcgtgacgtgtacggtgataatccggatgcgctggc

SEQ ID NO: 63424 - DNA, 75 bp, synthetic construct
  source 1..75: mol_type = other DNA
ccgatggtgcagaccattctggtgggcattaccattggtatcttcccgctcctggtactggcggctgtcttcaac

SEQ ID NO: 63425 - DNA, 75 bp, synthetic construct
  source 1..75: mol_type = other DNA
tgaatattgagtcagagcttgaacggtttattaaagatatgcgtgatccacgcgatattaatagcgaacaaaata

SEQ ID NO: 63426 - DNA, 75 bp, synthetic construct
  source 1..75: mol_type = other DNA
gcaacacagaatgaactgggagtatataaattccgactttcgacattacaaaaaagcatcacagaaaataaatat

SEQ ID NO: 63427 - DNA, 75 bp, synthetic construct
  source 1..75: mol_type = other DNA
tccaagtgtcagatatttgtaagttacaaaatggtaatagtttcaagccacatgagtgggatacacaaggtctcc

SEQ ID NO: 63428 - DNA, 75 bp, synthetic construct
  source 1..75: mol_type = other DNA
cagcaccggagaaatggacgttgaaacattcctcaaaacggaggggataaaagtcaaggcggggcagcttgtccg

SEQ ID NO: 63429 - DNA, 75 bp, synthetic construct
  source 1..75: mol_type = other DNA
agcgcgactacattcagttccacgcagtgatgattaacgccttcggctatgccgttcagcggctgatggctgacc

SEQ ID NO: 63430 - DNA, 75 bp, synthetic construct
  source 1..75: mol_type = other DNA
atggacgtcgagtatggtcagtacagcgtcagtctgttggtggagggattcccgccatcacatgccgggaccatt

SEQ ID NO: 63431 - DNA, 75 bp, synthetic construct
  source 1..75: mol_type = other DNA
cccgttgtcagtcagctcgggtttaccgccatggtcagaaccttaaaggccgtgacagatttcgctgccgtgact

SEQ ID NO: 63432 - DNA, 75 bp, synthetic construct
  source 1..75: mol_type = other DNA
ccgtcacgataatgtctccggtgtggcaggaaagtcaacagtataccaactggctgcatgggcgcttaaagaaaa

SEQ ID NO: 63433 - DNA, 75 bp, synthetic construct
  source 1..75: mol_type = other DNA
gatggcgggatcaaagattcgcccgttcattcacctgtggcatccaattacgcccgttctatttggaatggaaca

SEQ ID NO: 63434 - DNA, 75 bp, synthetic construct
  source 1..75: mol_type = other DNA
accagccagccgacaaaatgacggaggttatcatttttgcgggtagtgatgcgtggagccatgcgaaagagtggc

SEQ ID NO: 63435 - DNA, 75 bp, synthetic construct
  source 1..75: mol_type = other DNA
accgccacctttgggtttgttgcggtttctcatgcgctgaagaagatgatggcgaaagcggcgcgtcaggggtaa

SEQ ID NO: 63436 - DNA, 75 bp, synthetic construct
  source 1..75: mol_type = other DNA
ggggcaaatccacaggtgaactacgctcctctgtttgttacgcaataaaaactggtgttttcgactatgcaaaac

SEQ ID NO: 63437 - DNA, 75 bp, synthetic construct
  source 1..75: mol_type = other DNA
tagctgggacgagcagggtaatttgcaatttatcaatgcccaggcggcgcgggtcttgcgccttgacgcgacggc

SEQ ID NO: 63438 - DNA, 75 bp, synthetic construct
  source 1..75: mol_type = other DNA
ggtggtttgttcgctctattcattgacttatatgcgcgaatacgagggcaaaggcgcggcggcgatgggcttctt

SEQ ID NO: 63439 - DNA, 75 bp, synthetic construct
  source 1..75: mol_type = other DNA
gaaacgctggagtacaaacgccagctggctgagctgggcgacaagattgaacaccagaaacggctgaatgagctg

SEQ ID NO: 63440 - DNA, 75 bp, synthetic construct
  source 1..75: mol_type = other DNA
cgccgcttaattttgcctggattgtggtgccgtgcgtactggtgattgcggtactgattgcgttgatcggcacct

SEQ ID NO: 63441 - DNA, 75 bp, synthetic construct
  source 1..75: mol_type = other DNA
gtcagattgcgtacaagttccttaagcgcaacgggttcaaggtttgctttcatgaccgctttgttgctgtaacca

SEQ ID NO: 63442 - DNA, 75 bp, synthetic construct
  source 1..75: mol_type = other DNA
tctgaaacagactgctgccgcacatagcgatccggctgactggctggaagaactgacggtatattgtgcgatgga

SEQ ID NO: 63443 - DNA, 75 bp, synthetic construct
  source 1..75: mol_type = other DNA
gtactgattgcgttgatcggcacctggttcccggcccggcggattgcccggctgtatcctgtggaggtgctgtat

SEQ ID NO: 63444 - DNA, 75 bp, synthetic construct
  source 1..75: mol_type = other DNA
gctgttgagaataattatcttagcgtgtctgaaaagacagagcttgagatagcaaaacagacgcttaaaaacagt

SEQ ID NO: 63445 - DNA, 75 bp, synthetic construct
  source 1..75: mol_type = other DNA
atgtttcttgattacagcgtcacctttaccgctgaagattttcaggactatcaggccgttaacaagccactgtgg

SEQ ID NO: 63446 - DNA, 75 bp, synthetic construct
  source 1..75: mol_type = other DNA
agatagatctcgaggcaaaactctggacaattccagccgaaagaatgaaagccaaacgtgaacacatagtacctc

SEQ ID NO: 63447 - DNA, 75 bp, synthetic construct
  source 1..75: mol_type = other DNA
aattacggttgatagctggcaattagaaattaagccgccttgtgttgatggagaattgccgacaataattcatgc

SEQ ID NO: 63448 - DNA, 75 bp, synthetic construct
  source 1..75: mol_type = other DNA
gtcaggatgaaattggtctgcgttacaacagtcaccgcacatggcgggaagaatacttggtgatgagtggcgatg

SEQ ID NO: 63449 - DNA, 75 bp, synthetic construct
  source 1..75: mol_type = other DNA
ccagtaatcacaccaagcgtcactgtggctagcctctttgaacaatacgaagcggagaacgctcagaactggaag

SEQ ID NO: 63450 - DNA, 75 bp, synthetic construct
  source 1..75: mol_type = other DNA
ccgacggacccacaatctggccagccagccggacagcgcgctcacaagccatttatcttcactgtggcgctgaac

SEQ ID NO: 63451 - DNA, 75 bp, synthetic construct
  source 1..75: mol_type = other DNA
caacgttgaccagaaaatatgaaggctcaacttgtcttccaaatgtagctctttacgcggcaggctaccgtaaat

SEQ ID NO: 63452 - DNA, 75 bp, synthetic construct
  source 1..75: mol_type = other DNA
ctcctcatacacgaacaagctgtatgacattgcgtttgagaccatctacatggtgacgaagaacagagacgcgct

SEQ ID NO: 63453 - DNA, 75 bp, synthetic construct
  source 1..75: mol_type = other DNA
attgcagcagaagcgaacagccgtcttgccaggcaacaaatggaacaaatggaacaaatgctcactctgcaggag

SEQ ID NO: 63454 - DNA, 75 bp, synthetic construct
  source 1..75: mol_type = other DNA
ggtagagattacaaaatcgatcccgatttactgagagcgatttcatggcatgaatcccgtaacagggttaatgct

SEQ ID NO: 63455 - DNA, 75 bp, synthetic construct
  source 1..75: mol_type = other DNA
tttcgtatttaacccccaggtggttagaaaaagcaaacaggtaggttttatctacaaggtagattccattggcga

SEQ ID NO: 63456 - DNA, 75 bp, synthetic construct
  source 1..75: mol_type = other DNA
tgagcttaaacggatggagatctgcgctaatgccataaacaggtatgaatcggtggtgagaagcatgctgccgag

SEQ ID NO: 63457 - DNA, 75 bp, synthetic construct
  source 1..75: mol_type = other DNA
gggaagatattgcgtatgcaaaagcaggggtcatgctggcagattttagcgggaaggaggcccagcttgatttat

SEQ ID NO: 63458 - DNA, 75 bp, synthetic construct
  source 1..75: mol_type = other DNA
atgttagcaatctgcctgatgtttataaatgggatctgcgaagccgccgattgctttgatcttgcaggtcgggat

SEQ ID NO: 63459 - DNA, 75 bp, synthetic construct
  source 1..75: mol_type = other DNA
ctgatttactgagagcaatatcatggaaagaatcccgttaccgggttaatgccatcggtattaatccggtaacgg

SEQ ID NO: 63460 - DNA, 75 bp, synthetic construct
  source 1..75: mol_type = other DNA
gcgcggcagttagggatggggctgcggctggtggaattttccgccgactcgcttaacccgtggcggctgccgctg

SEQ ID NO: 63461 - DNA, 75 bp, synthetic construct
  source 1..75: mol_type = other DNA
ccggtgaacccgctgctgggagcaaaggtgctgccgggcgagacggaccttgcgctgcccggcccgctgccgttt

SEQ ID NO: 63462 - DNA, 75 bp, synthetic construct
  source 1..75: mol_type = other DNA
tactgggataaaaagcagtaaaggtatccggcttccggccacgaagaaatcacttccggaaattaacagcgtgca

SEQ ID NO: 63463 - DNA, 75 bp, synthetic construct
  source 1..75: mol_type = other DNA
gctttgaccgcgagggggagctgatgctgatactgcgttttaatggtgaggttatcacccgtatttccttcacac

SEQ ID NO: 63464 - DNA, 75 bp, synthetic construct
  source 1..75: mol_type = other DNA
atgagtcttttgaatgacgttcagaaattcattgaagcccatccggggtgtacttccggagacattgcggagcag

SEQ ID NO: 63465 - DNA, 75 bp, synthetic construct
  source 1..75: mol_type = other DNA
ggaatgggcgactggcgattctttattagtgagccgggaattatttcaattgaggatttaccacctggctgggga

SEQ ID NO: 63466 - DNA, 75 bp, synthetic construct
  source 1..75: mol_type = other DNA
gcgtttccgtaaaaatccctcacttggcatgggcgactggcgattctttattagtgagccgggaattatttcagt

SEQ ID NO: 63467 - DNA, 75 bp, synthetic construct
  source 1..75: mol_type = other DNA
agcgctgtgtggtcagccggtatcgatacgaatatcgctggatgacgagttgcggatctacagtaatgagaaact

SEQ ID NO: 63468 - DNA, 75 bp, synthetic construct
  source 1..75: mol_type = other DNA
catcttctcctggttcgccgttccggatcgttatcgccaccgtgttctctactgggggatcattggtgccatcgt

SEQ ID NO: 63469 - DNA, 75 bp, synthetic construct
  source 1..75: mol_type = other DNA
cattggcgaaaccgtggctctcagcaatgtcgataatctgaccatctataccgagatcaacgggcgtcctgccga

SEQ ID NO: 63470 - DNA, 75 bp, synthetic construct
  source 1..75: mol_type = other DNA
taattctcttcctgttactgcttcttgtgggtgtgcttatagcctcaaactatctcggtggatacacagcattaa

SEQ ID NO: 63471 - DNA, 75 bp, synthetic construct
  source 1..75: mol_type = other DNA
tacgccagcaaggcaccaccgccgatctgatcttcagcgtgcccttcctgatcgcctacttaagcgaatttatga

SEQ ID NO: 63472 - DNA, 75 bp, synthetic construct
  source 1..75: mol_type = other DNA
tgaatacaatgacaagcggctatgttcaggtaataacgaaccgttcttcgagatcaaaaatggtgtcccgactgt

SEQ ID NO: 63473 - DNA, 75 bp, synthetic construct
  source 1..75: mol_type = other DNA
tggagagtgttttatctgtgaactcaggctgccagatcatcgtttccgatggaagcataataagctttttctgct

SEQ ID NO: 63474 - DNA, 75 bp, synthetic construct
  source 1..75: mol_type = other DNA
aatgaagttcaatatataaaagcgacggtatttcgtattgataatccttcaacgcctcaagagcaggaagttgaa

SEQ ID NO: 63475 - DNA, 75 bp, synthetic construct
  source 1..75: mol_type = other DNA
gccagtaagagcgccgccatgattggtgcgggtgaccagcaacaagccagccgtgggtcgtctgttctggtcgat

SEQ ID NO: 63476 - DNA, 75 bp, synthetic construct
  source 1..75: mol_type = other DNA
tgctgatgacggcagtcgtcggtattacttcagcaaatgcagcagattacaaaaagaacccgtttactctcgtct

SEQ ID NO: 63477 - DNA, 75 bp, synthetic construct
  source 1..75: mol_type = other DNA
attttctgactctgctgggctgggtggtgaataacggtctgtggaatgtgttgatcagcacaggactgtttgccc

SEQ ID NO: 63478 - DNA, 75 bp, synthetic construct
  source 1..75: mol_type = other DNA
tgaaaaatcgcggcagggatggcgaactggtactggtgaaagccctgaactgtacgcagggtgagcgttatctgg

SEQ ID NO: 63479 - DNA, 75 bp, synthetic construct
  source 1..75: mol_type = other DNA
gcggggaatttaatgctaagttcctttttactgatgatgatggtctaccttatgccaacacaaaatatattgcat

SEQ ID NO: 63480 - DNA, 75 bp, synthetic construct
  source 1..75: mol_type = other DNA
acttcaggaactaattgattgtggtgatattagtgctaaagatgcaaaaagcacacagaaagcctggaattgtcg

SEQ ID NO: 63481 - DNA, 75 bp, synthetic construct
  source 1..75: mol_type = other DNA
atgaaaaacaatgccgcacaagcaacaaaagtcattacagcgcatgtgccattacctctggctgataaagtcgac

SEQ ID NO: 63482 - DNA, 75 bp, synthetic construct
  source 1..75: mol_type = other DNA
atgccgggttacacagagtatgtcctggctgaaggatctttctcatacgggcaggcggttgctgtcataaccgct

SEQ ID NO: 63483 - DNA, 75 bp, synthetic construct
  source 1..75: mol_type = other DNA
ccggccttcctgcatgggtcgataatcattttggtcagcgttttggtggtgcattgctgctgtcattacttggtg

SEQ ID NO: 63484 - DNA, 75 bp, synthetic construct
  source 1..75: mol_type = other DNA
ggtgtcgaggagaaggacatccagatcaccctcgacaacgacgtgctgatggtgcgtggcgagaagcgccaggaa

SEQ ID NO: 63485 - DNA, 75 bp, synthetic construct
  source 1..75: mol_type = other DNA
ggtcgagcagcagggagcagtaagtgaagacataaaccgcagtattatcaatatacgcgatgctgctgataccaa

SEQ ID NO: 63486 - DNA, 75 bp, synthetic construct
  source 1..75: mol_type = other DNA
ccagcgcaccggaaaaattatccggacaggctgctgacaagatgcaggctggtgtgattctgctggactttatgc

SEQ ID NO: 63487 - DNA, 75 bp, synthetic construct
  source 1..75: mol_type = other DNA
cagcattggagctgtcaaaagaccgacgtattgaggatcttgaaaggcaagttcgatttcttgaaacgcggctta

SEQ ID NO: 63488 - DNA, 75 bp, synthetic construct
  source 1..75: mol_type = other DNA
ggtgtgagcttgtgggatcttgcggttgcgtatccggtcacctctcacctgacagttcgtggtaaaatagccaac

SEQ ID NO: 63489 - DNA, 75 bp, synthetic construct
  source 1..75: mol_type = other DNA
attgccaataaaggcgcagtatcggtacaggcgcagcacgatctgatggagttactggcgaagaagtcgatagag

SEQ ID NO: 63490 - DNA, 75 bp, synthetic construct
  source 1..75: mol_type = other DNA
ttgcgtcctgatggtcgtcatcgcaccaaaaaattcgctaacaccactaaagggcacgatgagctggtgagctgg

SEQ ID NO: 63491 - DNA, 75 bp, synthetic construct
  source 1..75: mol_type = other DNA
ttgtgcataagctttccaaaggggtgacacaggcggccgtggcgtccattccctgcaggcctgatctgcggcaac

SEQ ID NO: 63492 - DNA, 75 bp, synthetic construct
  source 1..75: mol_type = other DNA
ggatatccgcttacagctgcgcgataacacactgatactcagtgataacggcggcagaagcctgtattttgagca

SEQ ID NO: 63493 - DNA, 75 bp, synthetic construct
  source 1..75: mol_type = other DNA
acaccctgaactgaccgatatggttatcttccgtgaaaactcggaagacatttatgcgggtatcgaatggaaagc

SEQ ID NO: 63494 - DNA, 75 bp, synthetic construct
  source 1..75: mol_type = other DNA
gtgggtgaacggcgtgctggagcagggcaaaggtgcacaggatgacattctgatgacggtcatgctgtggcgtct

SEQ ID NO: 63495 - DNA, 75 bp, synthetic construct
  source 1..75: mol_type = other DNA
gtggttgccccgctgaatcagctggttaccgccagtcagcgtattgaacacgggcagttcgactcgccgccgctg

SEQ ID NO: 63496 - DNA, 75 bp, synthetic construct
  source 1..75: mol_type = other DNA
gcgagcgtaaaatctcctggatggaaatttacaccggtgaaaaatccacacaggtttatggtcaggatgtctggc

SEQ ID NO: 63497 - DNA, 75 bp, synthetic construct
  source 1..75: mol_type = other DNA
gcctttgaggaaggcaacccggacaggccgtatatcgccggggtaaagcacgactcggcgcacaccgaccatgtg

SEQ ID NO: 63498 - DNA, 75 bp, synthetic construct
  source 1..75: mol_type = other DNA
gccgaccggtgaaaccacggcactgattctggagatgtcccgtgccctgatgtaccgccgtctgcgtgccgccac

SEQ ID NO: 63499 - DNA, 75 bp, synthetic construct
  source 1..75: mol_type = other DNA
gtcacccgcgccccgcgtaagacccggagcgtgacaccggcaaaacgtggacgcccgaaaaagaaagccagttaa

SEQ ID NO: 63500 - DNA, 75 bp, synthetic construct
  source 1..75: mol_type = other DNA
caaacttccccgctatgtcgtgacgcttcacgacgatgacttctttgacgaagaagacgcagaagttctgcgctt

SEQ ID NO: 63501 - DNA, 75 bp, synthetic construct
  source 1..75: mol_type = other DNA
aaccgcagagcggtggcagtatgacgaacgcggctggctgacagacatcagccatatcagcgaagggcaccgggt

SEQ ID NO: 63502 - DNA, 75 bp, synthetic construct
  source 1..75: mol_type = other DNA
acgagcgaagtaacaggaatatcaaccgaacaactggttaatgacttcaatgaaattgcaaaggatcctgtcagt

SEQ ID NO: 63503 - DNA, 75 bp, synthetic construct
  source 1..75: mol_type = other DNA
atgaaaaacaataccgcacaggcaacaaaagtcattaccgcgcatgtgccattacctatggctgataaagtcgac

SEQ ID NO: 63504 - DNA, 75 bp, synthetic construct
  source 1..75: mol_type = other DNA
ctcaacgtgccgggaatgcggctgattcgacaactggcgctgcggcggcagtattaaaccagcttgtgcgttcgg

SEQ ID NO: 63505 - DNA, 75 bp, synthetic construct
  source 1..75: mol_type = other DNA
ggttggcagggtgcatttatgtttacaggtgcacttgcaattctttgggttttcctttggtgggcgtgttataac

SEQ ID NO: 63506 - DNA, 75 bp, synthetic construct
  source 1..75: mol_type = other DNA
taaccagattaaggcgctacaggatgaagggaaccagcaggaggccgcccgcattgcgacagaagcatactcatc

SEQ ID NO: 63507 - DNA, 75 bp, synthetic construct
  source 1..75: mol_type = other DNA
ccggatggcagggcatcggcgttttactataaccaccacagccagttaacgtcagccaccgggcctgacgggctg

SEQ ID NO: 63508 - DNA, 75 bp, synthetic construct
  source 1..75: mol_type = other DNA
cctctggcaaatatacttgactgcgatccgatgtggttacttacaagtttccattctgacacgacaaaggaatcg

SEQ ID NO: 63509 - DNA, 75 bp, synthetic construct
  source 1..75: mol_type = other DNA
ggctgaagcgggtggtgaaaaaggaacacgcggacggcagcgtcacgcagagtcagtttgacgcggtgggcaggc

SEQ ID NO: 63510 - DNA, 75 bp, synthetic construct
  source 1..75: mol_type = other DNA
ctgatgcgcttcctgggtataaaggaaaaggcgttgccagtagtcaatgtgatacagcataacctgagcagttat

SEQ ID NO: 63511 - DNA, 75 bp, synthetic construct
  source 1..75: mol_type = other DNA
gcgcggctctggcactggcgggatgtggtgagaaaggtgattttgagaaagcgatcaatgccaagattgggcaga

SEQ ID NO: 63512 - DNA, 75 bp, synthetic construct
  source 1..75: mol_type = other DNA
ctatgagatgttgcaaaaaggctttcaggccagtaccgagcagcaaaataatccccccgcgaaagggaaagaggt

SEQ ID NO: 63513 - DNA, 75 bp, synthetic construct
  source 1..75: mol_type = other DNA
ggggcggtgatggtgggctcaccaccgctgaacgtcagcggctgaaagagctggaacgtgaaaatcgtgaactgc

SEQ ID NO: 63514 - DNA, 75 bp, synthetic construct
  source 1..75: mol_type = other DNA
atatcactcaggatccgattgggctgaaggggggatggaatttttatcagtatccgctgaatccggttcagtata

SEQ ID NO: 63515 - DNA, 75 bp, synthetic construct
  source 1..75: mol_type = other DNA
aggcggacaaaaaatggcagtggtatcagagccggagccaccggcgcggtaaaacctcagcatttcttgccaatc

SEQ ID NO: 63516 - DNA, 75 bp, synthetic construct
  source 1..75: mol_type = other DNA
gacttcacctgaacaactggaacaggaactacaggctgcgcgctcagctgcatggttctacacctctaaaggttg

SEQ ID NO: 63517 - DNA, 75 bp, synthetic construct
  source 1..75: mol_type = other DNA
actgagcagggattgcctgtggacgcatccagtatcagccggatggagaacgcactgaaatatctgtatccgtgg

SEQ ID NO: 63518 - DNA, 75 bp, synthetic construct
  source 1..75: mol_type = other DNA
cacgcctgcatttgatacgaggcaacccctcaaagcgccccgttaaagaccccaaaaaaaccgctaaaaaggatg

SEQ ID NO: 63519 - DNA, 75 bp, synthetic construct
  source 1..75: mol_type = other DNA
gcagttgtatgacttcgactggggtattacttatcagtatttaggcactcgctatgataaggattactcatctta

SEQ ID NO: 63520 - DNA, 75 bp, synthetic construct
  source 1..75: mol_type = other DNA
ccaaatatcccgatcgcggcgttttgctctcctatggtgggcagtaaagtttcacgagatgagggatacgaatca

SEQ ID NO: 63521 - DNA, 75 bp, synthetic construct
  source 1..75: mol_type = other DNA
gccggagtcggtgctgatgcaggacggcgcattcagcctgacggcaccgcccgtgcagggaatgccggtgcaggc

SEQ ID NO: 63522 - DNA, 75 bp, synthetic construct
  source 1..75: mol_type = other DNA
cacaaaggaagtcgccgccggctccgctttacccggccatgcggggcatggccttgtgggggttcagttatgtgg

SEQ ID NO: 63523 - DNA, 75 bp, synthetic construct
  source 1..75: mol_type = other DNA
gaatgcgagaggatgggcaaatatccagaacgctcaactagacagggctcagcgggcacaaatgcataatgataa

SEQ ID NO: 63524 - DNA, 75 bp, synthetic construct
  source 1..75: mol_type = other DNA
tgtttcagaaaagtctatcgcgattgcatgagcaacggcaccggtgtagtagaaacgaacaatacagcagccaaa

SEQ ID NO: 63525 - DNA, 75 bp, synthetic construct
  source 1..75: mol_type = other DNA
gggaacaaatgtggacgtgtcggcgatgaagaagataacactgacggcgggagattcagtgggagtgtttgcccg

SEQ ID NO: 63526 - DNA, 75 bp, synthetic construct
  source 1..75: mol_type = other DNA
tctctgcgcgggtgaatttttttaccaagaaagtaacatcacgccgtaacaacagtgcgacctgtcctgattttt

SEQ ID NO: 63527 - DNA, 75 bp, synthetic construct
  source 1..75: mol_type = other DNA
ccaggtgttatttcaagggcaaaaatcgcatcaaaagattctgagaatgacaatccgtgggcagatatgtttttg

SEQ ID NO: 63528 - DNA, 75 bp, synthetic construct
  source 1..75: mol_type = other DNA
ctttgtttctcagtggtatgctctttgccgcctcttcattacctcttacgactctggtacgcgccatcagcactc

SEQ ID NO: 63529 - DNA, 75 bp, synthetic construct
  source 1..75: mol_type = other DNA
tgataatgtcatatttagatgtcgacgtttacacaatgtgatttttatcaaagcgagtggtgaatgtgtcgattt

SEQ ID NO: 63530 - DNA, 75 bp, synthetic construct
  source 1..75: mol_type = other DNA
tattttttcttttagtgataacaatgggcgttttattatccccgtcctcggcgaaggctggtgacggtgactggt

SEQ ID NO: 63531 - DNA, 75 bp, synthetic construct
  source 1..75: mol_type = other DNA
tgttcagtcgtctgcaaaaaacgctccgggccatgccaccggatgagcgtgacaatctgcccctgctgtatcaga

SEQ ID NO: 63532 - DNA, 75 bp, synthetic construct
  source 1..75: mol_type = other DNA
tatgactcacaatgggcggcaatttgttccattgctccaaagactggctgtacgccggagactctgcgtgtctgg

SEQ ID NO: 63533 - DNA, 75 bp, synthetic construct
  source 1..75: mol_type = other DNA
cggttccggcggtcttaacccgccctgaattactggctgaactgaacctgctgatgacccggattgccagtgggt

SEQ ID NO: 63534 - DNA, 75 bp, synthetic construct
  source 1..75: mol_type = other DNA
acgacaccggatttaggcaagatggagatggtattattagcttctattcaaatggttcgcgcatcggacatattg

SEQ ID NO: 63535 - DNA, 75 bp, synthetic construct
  source 1..75: mol_type = other DNA
ctgacagccggtgactttacgaaataccgcgaagcacggttaaaaggtgacgttcgtaacgaagacggcacacta

SEQ ID NO: 63536 - DNA, 75 bp, synthetic construct
  source 1..75: mol_type = other DNA
tcggcggatccatcatgctggcggttccccccgccgtgctgaaaacgctggagctgtcgacggacagcgaagtgg

SEQ ID NO: 63537 - DNA, 75 bp, synthetic construct
  source 1..75: mol_type = other DNA
atgaaaataaaagtatccgctggcattatcggtgctgttcttatgttatccgcaagccagtcctgggcagtgaca

SEQ ID NO: 63538 - DNA, 75 bp, synthetic construct
  source 1..75: mol_type = other DNA
ctgagcgataaaatccagaaactgtctgacgatgcggccacggcgaacgccgatccggcggatatggccgcgcag

SEQ ID NO: 63539 - DNA, 75 bp, synthetic construct
  source 1..75: mol_type = other DNA
caacaaaaaagcaggctggaaaaatttcgtcaggtaaataataaaaaggcgcaactctgcctctcgtgggaagaa

SEQ ID NO: 63540 - DNA, 75 bp, synthetic construct
  source 1..75: mol_type = other DNA
gagtcaatatgttggcacatacatcgacctggaccaggttaaacagcacacggcggcatggatagccgccaacat

SEQ ID NO: 63541 - DNA, 75 bp, synthetic construct
  source 1..75: mol_type = other DNA
ggagtgtggacaccgtgggctaaccagtctggtggacgaacttggtcgctgccatgaggaatgtccggtcgagga

SEQ ID NO: 63542 - DNA, 75 bp, synthetic construct
  source 1..75: mol_type = other DNA
tgacgggcaaagtttctctccactatccggtattgattacatggaggacggccttcctgatcctgtgaaagccat

SEQ ID NO: 63543 - DNA, 75 bp, synthetic construct
  source 1..75: mol_type = other DNA
tagacgacgagcagtttgatgaaatcaatattgtgcgcggccagctcgtttctggtgggcggctgggcgtgaaga

SEQ ID NO: 63544 - DNA, 75 bp, synthetic construct
  source 1..75: mol_type = other DNA
agcgtattgcagataacaccagggcatatgatcccgacaacaattaccgctcttatcctgaaaactggcagcagg

SEQ ID NO: 63545 - DNA, 75 bp, synthetic construct
  source 1..75: mol_type = other DNA
atcagacgtacgctccacgcgttttatcttatccgtgcccagactggagaaaatgatcccggaaacccaatgctg

SEQ ID NO: 63546 - DNA, 75 bp, synthetic construct
  source 1..75: mol_type = other DNA
tagatgagctggtggactgtgtggcagagctggaaaccagagtcggaaagtttgaaaaactggtgcaggaggtgc

SEQ ID NO: 63547 - DNA, 75 bp, synthetic construct
  source 1..75: mol_type = other DNA
ttcacctttggcgagccggtgccggtactcgaccgccgtgacattctggattacgtcgagtgcatcagtaacggc

SEQ ID NO: 63548 - DNA, 75 bp, synthetic construct
  source 1..75: mol_type = other DNA
gcctgatggcagggacgtgtctgatattctcacatagtctgatggcccaggtcagcgtatttaacccggcgctac

SEQ ID NO: 63549 - DNA, 75 bp, synthetic construct
  source 1..75: mol_type = other DNA
catttaccttccctgatggtacgagcacggaagatattggatctgccattgatgagtattttgctggacagtctg

SEQ ID NO: 63550 - DNA, 75 bp, synthetic construct
  source 1..75: mol_type = other DNA
ccctcatattcttttgcgtcacagatggatatttcaaatttttacatccgtgattatatggactttgcgcagaac

SEQ ID NO: 63551 - DNA, 75 bp, synthetic construct
  source 1..75: mol_type = other DNA
acggtgaaaaaagcggaaatcaaggtggagctgctgccgaaatatgccgcctgggcggagggcgtcctggctgcc

SEQ ID NO: 63552 - DNA, 75 bp, synthetic construct
  source 1..75: mol_type = other DNA
ggacggtgaaatcgagccagcagaacacaaagtactggaagaagtaggccgtcgtttaggtcttcgtgtggaaga

SEQ ID NO: 63553 - DNA, 75 bp, synthetic construct
  source 1..75: mol_type = other DNA
tttaacacctctggatgatatctcgtataagcctgaaatgttaaatggctctttcgttcatattgataactggag

SEQ ID NO: 63554 - DNA, 75 bp, synthetic construct
  source 1..75: mol_type = other DNA
atgttcggtaaatttttcggtaagaaagtcgcttcagcaaaagtagagctgaaaagggttgagaatcgcgatctg

SEQ ID NO: 63555 - DNA, 75 bp, synthetic construct
  source 1..75: mol_type = other DNA
tttttaagttccgtcccaaatacaaagctcacaaaaaaaatggaaccacggtcatcattacggatgacaacggcg

SEQ ID NO: 63556 - DNA, 75 bp, synthetic construct
  source 1..75: mol_type = other DNA
cacccaaaaaactaagggatctaaaaaagaagggcgatgtaacaaaaagtgaagaggtaatggctgcagtgcagt

SEQ ID NO: 63557 - DNA, 75 bp, synthetic construct
  source 1..75: mol_type = other DNA
gagttgtgggatcccggtattaatgccggcttgctcaattataatttcagcggaaatagtgtacagaatcggatt

SEQ ID NO: 63558 - DNA, 75 bp, synthetic construct
  source 1..75: mol_type = other DNA
atggacagatggtatgaaccgccggtcagttttgatgggctggctcgcacctatcgcgccgccgtacatcacagc

SEQ ID NO: 63559 - DNA, 75 bp, synthetic construct
  source 1..75: mol_type = other DNA
ctagaaccaagcttgttaatcgcttcaccgaaaaatacggcgactacgatccatctgtagtcgttgatagtctaa

SEQ ID NO: 63560 - DNA, 75 bp, synthetic construct
  source 1..75: mol_type = other DNA
tcccggccggtggtcacggagaccacgcgacagtggatcaacccctcccctgtcagcgtcagccccgcacaccag

SEQ ID NO: 63561 - DNA, 75 bp, synthetic construct
  source 1..75: mol_type = other DNA
agttattagttgatggaaaaatcacagaaagaaccgccacacatatagtgacgggcgctcacgggtatgaaacgc

SEQ ID NO: 63562 - DNA, 75 bp, synthetic construct
  source 1..75: mol_type = other DNA
ctgacctcactgtgtttaacgcgcagtgtcatggtggcagtgctgtaaatgtgccgtggatttgtggtgacacga

SEQ ID NO: 63563 - DNA, 75 bp, synthetic construct
  source 1..75: mol_type = other DNA
taaaacaaatatctggaggtgacgggaatgacgggcaggcagaattaattgctattggttcacttgcaggtacgt

SEQ ID NO: 63564 - DNA, 75 bp, synthetic construct
  source 1..75: mol_type = other DNA
agcgtccgcctgctgctgtgttatacgccgatgaactggcaaaattaaaacaaaatgataacgcaccttgcccgc

SEQ ID NO: 63565 - DNA, 75 bp, synthetic construct
  source 1..75: mol_type = other DNA
tgatggagcatcatctggatcagggcagggagagcctggaaagtgatgtggtgattttcgccacaggttaccgtt

SEQ ID NO: 63566 - DNA, 75 bp, synthetic construct
  source 1..75: mol_type = other DNA
acaccgcgtcgtacacgcttcttgttgccgggaggaaaaaaaacaccggggaagagtgggacgtcctggaattca

SEQ ID NO: 63567 - DNA, 75 bp, synthetic construct
  source 1..75: mol_type = other DNA
cgttcccgctaaaccagggcaataacagtctcaattttaatgcctggctacaggcgaagggcgggcgggatgtga

SEQ ID NO: 63568 - DNA, 75 bp, synthetic construct
  source 1..75: mol_type = other DNA
cgatgccgcagcgtgtaacagaagaaggaaaacaggatgatgaagaaaaaccgcaaccatcttgcgcaatggcag

SEQ ID NO: 63569 - DNA, 75 bp, synthetic construct
  source 1..75: mol_type = other DNA
aaattccggtcagccgtcagcggctgtttctgggacgcggcttccgctggacacagaagcacacccagcgccttc

SEQ ID NO: 63570 - DNA, 75 bp, synthetic construct
  source 1..75: mol_type = other DNA
cgtctgatgcacctgctgtttgttaaatctgagtccacctttagctattttgaagcgacccgtggctatatcgag

SEQ ID NO: 63571 - DNA, 75 bp, synthetic construct
  source 1..75: mol_type = other DNA
gcgttctcgaagcccgtctgcagaaagatggcagtgtgcgttttcgtgatcggaggaatggcgagttagtctgtg

SEQ ID NO: 63572 - DNA, 75 bp, synthetic construct
  source 1..75: mol_type = other DNA
caggcgctgatcaggctgaaggagagtgtgaaggaagagcggttgtcactgattgcggagggtaagtggtatcct

SEQ ID NO: 63573 - DNA, 75 bp, synthetic construct
  source 1..75: mol_type = other DNA
gattgaagacagcgaatacagtagaagggctatcggcaagtatattgatgtctggcactatcctgacggacataa

SEQ ID NO: 63574 - DNA, 75 bp, synthetic construct
  source 1..75: mol_type = other DNA
ttacttccaccacgaagcatccatcgaaggtggtcagcacctgaacgttaacgtgatgaaccgtgaaatgctgct

SEQ ID NO: 63575 - DNA, 75 bp, synthetic construct
  source 1..75: mol_type = other DNA
acttcaacaacgatgactacgctattgcttgctgcgtaagcccgatgatcgttggtaaacaaatgcagttcttcg

SEQ ID NO: 63576 - DNA, 75 bp, synthetic construct
  source 1..75: mol_type = other DNA
cgcattgctcagatgctgtcttctggtgatcaatccactcaaaaccaatcgcagccagaagaacaatctctggtg

SEQ ID NO: 63577 - DNA, 75 bp, synthetic construct
  source 1..75: mol_type = other DNA
ccagagctgaggcccgtgctgacctgcgtgcccgctatctggcatggcgtgaacaatggcgtaaaccagatctgc

SEQ ID NO: 63578 - DNA, 75 bp, synthetic construct
  source 1..75: mol_type = other DNA
tcttaatgaacagacgtccattcactggcacggcattattcttccggccaatatggatggtgttccggggctgag

SEQ ID NO: 63579 - DNA, 75 bp, synthetic construct
  source 1..75: mol_type = other DNA
attggtgaaacggccgtcaatatcacgggcagtgagcgtcaggccaaaacaatcaatggaggcctgccggggccc

SEQ ID NO: 63580 - DNA, 75 bp, synthetic construct
  source 1..75: mol_type = other DNA
tcaaaaaaatcttcactgaataccgtaaaactcacaaccagggcgtgttcgacgtttacactccggacatcctgc

SEQ ID NO: 63581 - DNA, 75 bp, synthetic construct
  source 1..75: mol_type = other DNA
ctgatccgctgctgctggctcatatgacttctgatgcggttgctgttccgaagttcgctaaaggctctaacgtct

SEQ ID NO: 63582 - DNA, 75 bp, synthetic construct
  source 1..75: mol_type = other DNA
gccgggtgttcacccggtcagtcatcacctgcccggacgcatcaccaccctgtatccgtcagagcccctgaccgt

SEQ ID NO: 63583 - DNA, 75 bp, synthetic construct
  source 1..75: mol_type = other DNA
ggtggtccctgacgagctacgcatcggcttctggccgcagcactttggctccatcccacaatggataacccttga

SEQ ID NO: 63584 - DNA, 75 bp, synthetic construct
  source 1..75: mol_type = other DNA
tggtgaaggtcttccgctgccggagacatatgaccgtccggagccgcgtattaagcagctggcgcgccgcagtac

SEQ ID NO: 63585 - DNA, 75 bp, synthetic construct
  source 1..75: mol_type = other DNA
atgcagcccgttttacagaagtggtggatcaataccgtgcggaccttgcagatatggcggggcagtgtgtgggtg

SEQ ID NO: 63586 - DNA, 75 bp, synthetic construct
  source 1..75: mol_type = other DNA
tggtaagcatgccttcgcaactcttcactatggcgcgttcttttaaagccgtagccaatggcaaaatttatatcg

SEQ ID NO: 63587 - DNA, 75 bp, synthetic construct
  source 1..75: mol_type = other DNA
atgcgtatttaacgacatcattcctgctgaccattgtctgcatgatgttcaggatatgagtacgattaaccatcc

SEQ ID NO: 63588 - DNA, 75 bp, synthetic construct
  source 1..75: mol_type = other DNA
cacgtggatatgagtacaaggaacgtttcccacagatgatccggtatcgggttaaagagtgggaaaaagttgccg

SEQ ID NO: 63589 - DNA, 75 bp, synthetic construct
  source 1..75: mol_type = other DNA
gtgcagcgcctgcacgctgcggaactgggcttgcaccgcctttctgaccttgtagatacgctgctggttctgcag

SEQ ID NO: 63590 - DNA, 75 bp, synthetic construct
  source 1..75: mol_type = other DNA
tgaccggtaatgagggtaaggcggtggctgtcagtgccaccagcgacccggagtattactttgttgtggttctgg

SEQ ID NO: 63591 - DNA, 75 bp, synthetic construct
  source 1..75: mol_type = other DNA
gaagggagatgatgaacctgaaaacatcctgaaaattgtcaaagaatggcggcgttcacaggggctacccttgtt

SEQ ID NO: 63592 - DNA, 75 bp, synthetic construct
  source 1..75: mol_type = other DNA
gcgtattggtgtcagtcgcgcggtattgtataaatggaaagatgaaattatcggcaacagtgcttaccagactat

SEQ ID NO: 63593 - DNA, 75 bp, synthetic construct
  source 1..75: mol_type = other DNA
atgattacgattgaaactctttacggtgaatgccatgaggctcacgggttaaaaataagaaaccaggtggataac

SEQ ID NO: 63594 - DNA, 75 bp, synthetic construct
  source 1..75: mol_type = other DNA
atgggtattcagaatttcgaccactcgcaccacaagctcaaaattcgcggccagcaaagtccggtggatgtgctg

SEQ ID NO: 63595 - DNA, 75 bp, synthetic construct
  source 1..75: mol_type = other DNA
ggtgatgtggtggtcagtggtgcaactgagccggattggtactacgtcatcgtactggccgggcagtccaatgca

SEQ ID NO: 63596 - DNA, 75 bp, synthetic construct
  source 1..75: mol_type = other DNA
agacggtgtacggcagctataaaaacaaaacggaaaagaatatccatttcgtaccgttcatgacggatgagaacg

SEQ ID NO: 63597 - DNA, 75 bp, synthetic construct
  source 1..75: mol_type = other DNA
atggcatttaaacactatgatgttgtcagggcggcatcgccgtcagaccttgcgaaacgactgacacaaaaactg

SEQ ID NO: 63598 - DNA, 75 bp, synthetic construct
  source 1..75: mol_type = other DNA
atatgatgcgtatggttcgcagcagttctattttcagaatgtgctgaagtacgatcctgatcagttaaagcagtt

SEQ ID NO: 63599 - DNA, 75 bp, synthetic construct
  source 1..75: mol_type = other DNA
tccacagtgggtcaccctggaaccccgtgtcttcggctggatggaccgtctttgcgaaaactactgcggtggtat

SEQ ID NO: 63600 - DNA, 75 bp, synthetic construct
  source 1..75: mol_type = other DNA
atttaaaaccgcttttagaggcgttaaatccccgttcccgattcagcttcggggaagactttgcccgcaccggag

SEQ ID NO: 63601 - DNA, 75 bp, synthetic construct
  source 1..75: mol_type = other DNA
atcgggtattacggttcgaaatggcgtgacagctcagccacctggacgtcacaggacagggcgagccatttcagc

SEQ ID NO: 63602 - DNA, 75 bp, synthetic construct
  source 1..75: mol_type = other DNA
attacccgggacattcccggctacctgttcgtcggtggtgtggcttatgacggcgatgtaattacggtttacccc

SEQ ID NO: 63603 - DNA, 75 bp, synthetic construct
  source 1..75: mol_type = other DNA
gctcgtcgccgctggaggttgccgccgctgccgcgctctctgagattcagcgtgtgccggtaccgctgcgcactc

SEQ ID NO: 63604 - DNA, 75 bp, synthetic construct
  source 1..75: mol_type = other DNA
tcagggcggcatcgccgtcagaccttgctgaacgaataactcaaaaactgaaggaagggtggcagccttatggta

SEQ ID NO: 63605 - DNA, 75 bp, synthetic construct
  source 1..75: mol_type = other DNA
aaagaaaatatttaaaatttattactgcaataatttgcttagggtttttatggttataccaggcaaatgctgcat

SEQ ID NO: 63606 - DNA, 75 bp, synthetic construct
  source 1..75: mol_type = other DNA
acacaatcccccaatctggctatatccgacgcttccgccttgctgaattgctgggcgttagcgtttccaccattg

SEQ ID NO: 63607 - DNA, 75 bp, synthetic construct
  source 1..75: mol_type = other DNA
ggcatcattccaatcacatctgacgtggccggaacgctcacgccctccgactggaatgcaccggataacgccggg

SEQ ID NO: 63608 - DNA, 75 bp, synthetic construct
  source 1..75: mol_type = other DNA
ttgaatccattggttattacggctcaacgtggcgtaacagtgccgccacctggacatctgcgggccgggccagcc

SEQ ID NO: 63609 - DNA, 75 bp, synthetic construct
  source 1..75: mol_type = other DNA
gccgcgcccggtaaagctgggcgagaagattaccgcctttgatgcggtagagattaacaactggctggcagagcg

SEQ ID NO: 63610 - DNA, 75 bp, synthetic construct
  source 1..75: mol_type = other DNA
tgatgatccggtcagtcgatgggccctgcagttaaaagaaaggcgaggatatggacgagcgcttgttgcgatagc

SEQ ID NO: 63611 - DNA, 75 bp, synthetic construct
  source 1..75: mol_type = other DNA
gataaccccaaacgtgaccgggtagagaacttcgagtcctccaacgatgcatttgtggtggaagacttcggctgc

SEQ ID NO: 63612 - DNA, 75 bp, synthetic construct
  source 1..75: mol_type = other DNA
ctacatgatccgctttccgaacagtggattcaaaattcaggcactgtcttcccgtccgtcaaacctgcgcggcct

SEQ ID NO: 63613 - DNA, 75 bp, synthetic construct
  source 1..75: mol_type = other DNA
taaacctctgtatcaggacctggtaagccgtaccagagcggcgctggcgaagaacccgaaaaacaaacttctggc

SEQ ID NO: 63614 - DNA, 75 bp, synthetic construct
  source 1..75: mol_type = other DNA
cagggggataggcccgatgactgcaacagcaatcgttgccagcataggtaatggtcatgatttcaagaacggacg

SEQ ID NO: 63615 - DNA, 75 bp, synthetic construct
  source 1..75: mol_type = other DNA
acggttgtcgatctcagcgggcagatcctctgcccaggttttattgatcaacacgtccatttgattggtggtggc

SEQ ID NO: 63616 - DNA, 75 bp, synthetic construct
  source 1..75: mol_type = other DNA
tctggatctgcgtgacagcgggcaacagtgcggagtaaacagagtctggagactgatgaaacgtgtcggaataaa

SEQ ID NO: 63617 - DNA, 75 bp, synthetic construct
  source 1..75: mol_type = other DNA
tgaacaagggcgaggcgcgcaatgcgctggccagggcagtgtttttcaaccgcctgggtgaaatccgcgaccgca

SEQ ID NO: 63618 - DNA, 75 bp, synthetic construct
  source 1..75: mol_type = other DNA
ggaattgaagcatgtacaggtgcacatttctgggcaagagagttccagaaaatggggcatacagttcgaattatg

SEQ ID NO: 63619 - DNA, 75 bp, synthetic construct
  source 1..75: mol_type = other DNA
atgagcagcatatttttaaccgaaaatgaattgcaaacgttaacgggctgcaaatatgcaagccaccagcgcaac

SEQ ID NO: 63620 - DNA, 75 bp, synthetic construct
  source 1..75: mol_type = other DNA
ggggaaactcatctcgattttttgaagcaatatggtgattttgaaaatggtattcctgttcacgatactattgcc

SEQ ID NO: 63621 - DNA, 75 bp, synthetic construct
  source 1..75: mol_type = other DNA
ggcccacccgcgcatcaaaagagcgcaggctggcatcgaaagcacaaaaatcaagcgtgaaggcgatgcgcggca

SEQ ID NO: 63622 - DNA, 75 bp, synthetic construct
  source 1..75: mol_type = other DNA
ttatcccctgcgcactgctcctcagtgcctgcaccacagtcactccagcttataaagataacggcacacgcagtg

SEQ ID NO: 63623 - DNA, 75 bp, synthetic construct
  source 1..75: mol_type = other DNA
aagtggcttcaacgctggctatggcaatcagcaaaggacgcctgattcgcgtaaatcagaacggtaaatttcgtt

SEQ ID NO: 63624 - DNA, 75 bp, synthetic construct
  source 1..75: mol_type = other DNA
tgcggcgtctgtactggcgtacacgccctggcttcggtttacgccatcgaagatgccatcggtattaaagtgccg

SEQ ID NO: 63625 - DNA, 75 bp, synthetic construct
  source 1..75: mol_type = other DNA
atggcggaagtcaaacgcaaatggggcgaccgctttgttgccgtcacgcaaaaaataccggtaaaggtggtgcgc

SEQ ID NO: 63626 - DNA, 75 bp, synthetic construct
  source 1..75: mol_type = other DNA
aatttttatgaaatgggggatattgaaagagaaaaaatatttaaacatgtcgaagatggtatggtttcgcttgat

SEQ ID NO: 63627 - DNA, 75 bp, synthetic construct
  source 1..75: mol_type = other DNA
acatcattctgatgctttacagggatgaggtatacaacccggaaactcaggccagaggcatagcagaaatcaaca

SEQ ID NO: 63628 - DNA, 75 bp, synthetic construct
  source 1..75: mol_type = other DNA
tattaattaccgcctcttgctccacatttgctgccccccaaaaaatcaacgatattgtgcatcgcacaattaccc

SEQ ID NO: 63629 - DNA, 75 bp, synthetic construct
  source 1..75: mol_type = other DNA
gtaaaaaaaatcgcagaacttcttgattatcctgaaaattatttctatacagaagacgatgattttgcaaaggct

SEQ ID NO: 63630 - DNA, 75 bp, synthetic construct
  source 1..75: mol_type = other DNA
taaccgatggacaaacgacaagcataattttccattctccaaccgcagacggcacaagaattaaaggggatgacg

SEQ ID NO: 63631 - DNA, 75 bp, synthetic construct
  source 1..75: mol_type = other DNA
tattccgcttattaccgccaaaaacgtaaccaacaatacccgggtatttaaaacggtgacccaacaaacaggctt

SEQ ID NO: 63632 - DNA, 75 bp, synthetic construct
  source 1..75: mol_type = other DNA
ttatagataaaagactcaatgatatatccagtggtagtggtaggtttgatttatggaactccgcgttcaaatatt

SEQ ID NO: 63633 - DNA, 75 bp, synthetic construct
  source 1..75: mol_type = other DNA
ggctggggctgctggtaaaagatgccgtactggatgaagagacgataaagaccattgaccgcctttatcaccagt

SEQ ID NO: 63634 - DNA, 75 bp, synthetic construct
  source 1..75: mol_type = other DNA
accgcatggccggtaaatcagggaaaaatgatgcagctgatgctcaggctatctgcgaagcggttcgtcgcccac

SEQ ID NO: 63635 - DNA, 75 bp, synthetic construct
  source 1..75: mol_type = other DNA
agccaggtggcactgaaatatatcccgttgctggcggggatcccgcgttcatcggcggcgcagatggcaaaactg

SEQ ID NO: 63636 - DNA, 75 bp, synthetic construct
  source 1..75: mol_type = other DNA
tgataatgctgcaaaagcattgacaaaatggtggaacgatacagcatcacaaagaatatttgactctctaatatt

SEQ ID NO: 63637 - DNA, 75 bp, synthetic construct
  source 1..75: mol_type = other DNA
atgacaaacccaacaaatccggtgtggcgtaatgatgacctggaaggtgcggtgattggcgcgttttttctgcgt

SEQ ID NO: 63638 - DNA, 75 bp, synthetic construct
  source 1..75: mol_type = other DNA
tttacgacccgctgggccgcagggtggcaaaacgggtatggcggcgtgaacgggacctgacgggctggatgtcgc

SEQ ID NO: 63639 - DNA, 75 bp, synthetic construct
  source 1..75: mol_type = other DNA
agaaacgggagaactggcgcgaatatctggaacgtgaacgggcagagctggcggaaaagaaaaaggtagttgaac

SEQ ID NO: 63640 - DNA, 75 bp, synthetic construct
  source 1..75: mol_type = other DNA
aatgtggatgagcaatgataaagagatttactggggatgcaataaaaaagcatgcgataatttctttttattacc

SEQ ID NO: 63641 - DNA, 75 bp, synthetic construct
  source 1..75: mol_type = other DNA
acatcattctgatgctttacagggatgaggtgtacaacccggatacacaggcgagaggcatagcagaaatcaaca

SEQ ID NO: 63642 - DNA, 75 bp, synthetic construct
  source 1..75: mol_type = other DNA
tggcggcgtttcccggaatgactgtggaggctgcccgagacatgctggcctcatcgtcggataaagcagaaccgg

SEQ ID NO: 63643 - DNA, 75 bp, synthetic construct
  source 1..75: mol_type = other DNA
tgtgttacaggcactggcaaaagccggaaaactcacctcttctatcggcgttgtcacttatcaggaaaccattcc

SEQ ID NO: 63644 - DNA, 75 bp, synthetic construct
  source 1..75: mol_type = other DNA
gtgtttacgcttaatgtgctggatgacaaaaactacaccctgagcagtgatggcggctttagcgcccgtgggcaa

SEQ ID NO: 63645 - DNA, 75 bp, synthetic construct
  source 1..75: mol_type = other DNA
attgccggaaccactgacaccaccgcgaaagagcgtgaacctgtcgatccgacgctgatggtcgatgtggaatat

SEQ ID NO: 63646 - DNA, 75 bp, synthetic construct
  source 1..75: mol_type = other DNA
accgttcaccactacaacggcgttgtatgggagccggtacaggataaagagttacagcgggctatggcgcagatt

SEQ ID NO: 63647 - DNA, 75 bp, synthetic construct
  source 1..75: mol_type = other DNA
taaccgcgacgattgaacaacgaggaccacaaacggctgatgagctggctacattgtttggtaccacatcacgca

SEQ ID NO: 63648 - DNA, 75 bp, synthetic construct
  source 1..75: mol_type = other DNA
atgacttctcctgtctggcgtaacgatgacctggaaggcgctgtcattggcgcgttttttctgcgaggggcagat

SEQ ID NO: 63649 - DNA, 75 bp, synthetic construct
  source 1..75: mol_type = other DNA
caaatgggctgacacttaccagaaagaaaccggtaataaagttaactaccagggtatcggttcttccggtggcgt

SEQ ID NO: 63650 - DNA, 75 bp, synthetic construct
  source 1..75: mol_type = other DNA
cctaagcgttgggcatctgacgcacctgtaattgaatatcgcaaatcgctttatatctggctgaattcgcaattg

SEQ ID NO: 63651 - DNA, 75 bp, synthetic construct
  source 1..75: mol_type = other DNA
tggaatatcaccggacatgttctgcgttacctgattgttgaccggacagcggcaccggccgcgatttctgcggag

SEQ ID NO: 63652 - DNA, 75 bp, synthetic construct
  source 1..75: mol_type = other DNA
aagagtcggacggctactgaaccaatttattactgagccacaacccatttctacgcaatatgttactgacataaa

SEQ ID NO: 63653 - DNA, 75 bp, synthetic construct
  source 1..75: mol_type = other DNA
accgcgaaaataccacaaaccttttctgaggcattgcgccttgcggccgaccttgaagaccagaaggctgaactg

SEQ ID NO: 63654 - DNA, 75 bp, synthetic construct
  source 1..75: mol_type = other DNA
gcggattgttagctggtatcggcggcgtcaactcaaacgctccgagcgtaaatgacatcggcaatacgcttcagc

SEQ ID NO: 63655 - DNA, 75 bp, synthetic construct
  source 1..75: mol_type = other DNA
cccggaaggggtgatacggatgcacgacgagcggacccaccactaccactacgacagccagcaccgtctggtgtt

SEQ ID NO: 63656 - DNA, 75 bp, synthetic construct
  source 1..75: mol_type = other DNA
gtgtcagactcgcgccatgagacaaattatcccgacgaccataacaaccgcatctggtggggactgccctgtacc

SEQ ID NO: 63657 - DNA, 75 bp, synthetic construct
  source 1..75: mol_type = other DNA
cgatgcaggaacacgatcagcgagaatgccgaataacacaactactatagacaaaaccgatgaccttggattcga

SEQ ID NO: 63658 - DNA, 75 bp, synthetic construct
  source 1..75: mol_type = other DNA
gtgtcagacacactgcccgggacaacgtatcccgacaacaacaaccgcccctggtgggggctaccctgcaccgtg

SEQ ID NO: 63659 - DNA, 75 bp, synthetic construct
  source 1..75: mol_type = other DNA
gcatggtgatgttgtcccttggcgttatccggccagacgggaactgcaatttggagaatggcagcgcaatgacat

SEQ ID NO: 63660 - DNA, 75 bp, synthetic construct
  source 1..75: mol_type = other DNA
ggaaaaacagcgtcagcaggagaaagagcggcagcgcattgccgaacagaaacgacagaagcccgataaaggctg

SEQ ID NO: 63661 - DNA, 75 bp, synthetic construct
  source 1..75: mol_type = other DNA
aacattatctcccgcagacaccggttgaagccctggaaaaaacgccagtgctccctgcgggaaccgtattcaaag

SEQ ID NO: 63662 - DNA, 75 bp, synthetic construct
  source 1..75: mol_type = other DNA
atggactatatcgacatgcgtctggctgagaatgtctggaacggcgaggtcatcctggcggaaatcaaagcgatg

SEQ ID NO: 63663 - DNA, 75 bp, synthetic construct
  source 1..75: mol_type = other DNA
actcagctcatgggagtacacgagaaatttaatcctgaaactggtatatcagagcttgggacaggaaagtcttct

SEQ ID NO: 63664 - DNA, 75 bp, synthetic construct
  source 1..75: mol_type = other DNA
atggcagaatacagattcacacttccgtacccaccgtcgctgaatacctactggcgaagacggggaagccaatat

SEQ ID NO: 63665 - DNA, 75 bp, synthetic construct
  source 1..75: mol_type = other DNA
ggctttcctttgctgagcaggtagtttctgaagcacattccgcaatagtgattctcgacagccgggggaatatcc

SEQ ID NO: 63666 - DNA, 75 bp, synthetic construct
  source 1..75: mol_type = other DNA
ccaggcaagacgcattcgcctcgcccgtaaatatctgaacggtaaaaaggttatggaagaaaccggggaaaatac

SEQ ID NO: 63667 - DNA, 75 bp, synthetic construct
  source 1..75: mol_type = other DNA
cccgtccggttgtatatgaagttggtgctgatggtggcgcgtatatgttctatgcgcagaaaaataccgataaca

SEQ ID NO: 63668 - DNA, 75 bp, synthetic construct
  source 1..75: mol_type = other DNA
gtgctttgattactttcgctgctggtgctcttaaagtagcatcaagagttcaaagtgcttatgtcacaaacactt

SEQ ID NO: 63669 - DNA, 75 bp, synthetic construct
  source 1..75: mol_type = other DNA
tgaggatttacctcctggctggggattacttcacgttgttaacggaagagtacggaaagtacatggatggcccaa

SEQ ID NO: 63670 - DNA, 75 bp, synthetic construct
  source 1..75: mol_type = other DNA
ctgacttgttggcagatagaaaaaagcgtttccgtaaaaatccctcacttggcatgggcgactggcgattcttta

SEQ ID NO: 63671 - DNA, 75 bp, synthetic construct
  source 1..75: mol_type = other DNA
cagaagagatctcgcgcaacggtaacattacgcgctggttttatgattcttcccgcagtggcctgccctgtgcgg

SEQ ID NO: 63672 - DNA, 75 bp, synthetic construct
  source 1..75: mol_type = other DNA
atgacagaatatcaggtctgggaagatgactggataattgatgagtgtttatgcgcgatgtatgacgcatcatcc

SEQ ID NO: 63673 - DNA, 75 bp, synthetic construct
  source 1..75: mol_type = other DNA
tggaatgcattttaaaccggtataaaccggcctggcagacgtttttatacatttacgaaaagtcgcatgaggaga

SEQ ID NO: 63674 - DNA, 75 bp, synthetic construct
  source 1..75: mol_type = other DNA
gctccactatatacaatctggccctgaaaacctttggccctgaagcacaggcgctgaagctgatggaagaagccg

SEQ ID NO: 63675 - DNA, 75 bp, synthetic construct
  source 1..75: mol_type = other DNA
accacgatatcactgaaccctggtgggggcttaaacgcagtatcacgccctgttttggcgcacggctggtacagg

SEQ ID NO: 63676 - DNA, 75 bp, synthetic construct
  source 1..75: mol_type = other DNA
aattagacgcacaaaaagcccttaacgcggaattgcaggctaagcgcgataatttattgtcagctaagagccaag

SEQ ID NO: 63677 - DNA, 75 bp, synthetic construct
  source 1..75: mol_type = other DNA
tcatgttcatctgcataacgttgttacgcagaatccccgcgaactggcgaaactggtcggtgaaatggtcagggc

SEQ ID NO: 63678 - DNA, 75 bp, synthetic construct
  source 1..75: mol_type = other DNA
gttcacactaccggaggatattatgaagggggaattgaggccgttaaatctcaatttaaacaatgaattacctcc

SEQ ID NO: 63679 - DNA, 75 bp, synthetic construct
  source 1..75: mol_type = other DNA
ataaccagaaggctgcggtgctgaagaataacaacgggaaagtcgtgttcaactccggattcctgttgctggccg

SEQ ID NO: 63680 - DNA, 75 bp, synthetic construct
  source 1..75: mol_type = other DNA
cagcttcaggcctttacggactgctcggggtacgcgacgcggtatgaatatgaccggtacggtcaacaaatcgcc

SEQ ID NO: 63681 - DNA, 75 bp, synthetic construct
  source 1..75: mol_type = other DNA
cgagaccataaccgtcgccgtgacgctgaaagacgcgcacggtaacctggttgaagggggcgagtccttactgtc

SEQ ID NO: 63682 - DNA, 75 bp, synthetic construct
  source 1..75: mol_type = other DNA
taccgggataaagagcagtaaaggcatccgggttccgaccacgaagaaatcacttccccaaattaacagtgtgca

SEQ ID NO: 63683 - DNA, 75 bp, synthetic construct
  source 1..75: mol_type = other DNA
attttacgacagaatgattcgtattgctgacgaagaattttccactcacttagccgaactggagggcaaaaaatg

SEQ ID NO: 63684 - DNA, 75 bp, synthetic construct
  source 1..75: mol_type = other DNA
tatgtgttgcgatggcgttaagtagccagacatgggctgcggataccactacaaccgagtcagcaggcgaaacac

SEQ ID NO: 63685 - DNA, 75 bp, synthetic construct
  source 1..75: mol_type = other DNA
tttaccggatttatacctggataaagagcagtaaaggcatccgggttccgaccacgaagaaatcactttcccaaa

SEQ ID NO: 63686 - DNA, 75 bp, synthetic construct
  source 1..75: mol_type = other DNA
gatcagcttattcatcgctattcgacgaccgggcaaaataatacccgtgttgttccggatgatgtacgcaaggtc

SEQ ID NO: 63687 - DNA, 75 bp, synthetic construct
  source 1..75: mol_type = other DNA
ccctggccgattatctggccggcgtcgccacggtggagaaaacaaaacgacctcgccctgttcgccgtcgtcagc

SEQ ID NO: 63688 - DNA, 75 bp, synthetic construct
  source 1..75: mol_type = other DNA
aagggctgaaatggatcgggccattgtgcttacccttaaaaaattggttaacaatgggagggtgtttgtccaatg

SEQ ID NO: 63689 - DNA, 75 bp, synthetic construct
  source 1..75: mol_type = other DNA
gcgtggttattctgaatattacgacctcccgtaccccttccggtcacccggaggaaaccctgaaagagggggcta

SEQ ID NO: 63690 - DNA, 75 bp, synthetic construct
  source 1..75: mol_type = other DNA
ccaaaccagacgggttaacggcagcaaagaaccttgcagaggcgttcgagcattataacgaatggcatccgcata

SEQ ID NO: 63691 - DNA, 75 bp, synthetic construct
  source 1..75: mol_type = other DNA
tcgcgcccgtatgcgggagacacctacggcctgcacctgccgctgctggcgggaacggaagtcagtatcgccttt

SEQ ID NO: 63692 - DNA, 75 bp, synthetic construct
  source 1..75: mol_type = other DNA
gtggggatcgcaatccagcaccaaccagtacatacaccggaacacactaagatttaccagattgacaatgccacg

SEQ ID NO: 63693 - DNA, 75 bp, synthetic construct
  source 1..75: mol_type = other DNA
cctgcttgctgacgggcagcgttgtgagcgactggccccgtgccggttacttatccaccagcagacctggtatct

SEQ ID NO: 63694 - DNA, 75 bp, synthetic construct
  source 1..75: mol_type = other DNA
ctgctggtttgttcagccacaggcaacacaggatcgtcgttcggagctgccggagtatgacatgaccggggcatg

SEQ ID NO: 63695 - DNA, 75 bp, synthetic construct
  source 1..75: mol_type = other DNA
ccgccaatactgcattgtctaaagccgatcttttttccgccaccagcaccaccagcagcaccaccgcgttcagtg

SEQ ID NO: 63696 - DNA, 75 bp, synthetic construct
  source 1..75: mol_type = other DNA
ggcggcgtttgccagttcactttcatcaacgggttttcaaaaactcccttcaggtctgattattcagtggggtat

SEQ ID NO: 63697 - DNA, 75 bp, synthetic construct
  source 1..75: mol_type = other DNA
ctgcattcgaaatgcatatcctgaaacgtccaggcgcggaagcggattacaccgaagaagaaattgctcaggcag

SEQ ID NO: 63698 - DNA, 75 bp, synthetic construct
  source 1..75: mol_type = other DNA
cggcacacccgcccaaaaaacagcctttcttaatgacggtggaaacctgagcgtcaggcattcaaccagtggcct

SEQ ID NO: 63699 - DNA, 75 bp, synthetic construct
  source 1..75: mol_type = other DNA
ggagtggctgtatgggcgcgatcctgaacggctccagcgtggtgaacgctccggtggattaggtggctcaaatct

SEQ ID NO: 63700 - DNA, 75 bp, synthetic construct
  source 1..75: mol_type = other DNA
caggcgctggttaatgtcggcgcacaaatagctgccatgacaccgggcgaactggcgacctggcttgcggagaat

SEQ ID NO: 63701 - DNA, 75 bp, synthetic construct
  source 1..75: mol_type = other DNA
cggaacgcattaagctgggaaattatcctgatctgagcctgaaatcagccagggaaaaagccgcccagtgtcgcg

SEQ ID NO: 63702 - DNA, 75 bp, synthetic construct
  source 1..75: mol_type = other DNA
ccggaaatcagcaaggcgaatatcctgagtacattcgaacaactgcaccggagtaaggatgaggtgtttgagcgc

SEQ ID NO: 63703 - DNA, 75 bp, synthetic construct
  source 1..75: mol_type = other DNA
gatggtcaggctgaatccagaattaccgtgcagatcgatgtctgggcaacggtgcctgatgacgcagatgatatc

SEQ ID NO: 63704 - DNA, 75 bp, synthetic construct
  source 1..75: mol_type = other DNA
cagtcagcaccggctggtgcactacacgcggacacaatatgcagagccgctggtcgaaagtcgctatctttacga

SEQ ID NO: 63705 - DNA, 75 bp, synthetic construct
  source 1..75: mol_type = other DNA
gcgctgtttcactggatgccacccgtgcgaatgcccggttaccggatgaaagccggcatgacggtcagtcatatc

SEQ ID NO: 63706 - DNA, 75 bp, synthetic construct
  source 1..75: mol_type = other DNA
agttgatccggagctatctgacggatattgcgggtaagaaggcagacctgattatcagctcagcactgttacggc

SEQ ID NO: 63707 - DNA, 75 bp, synthetic construct
  source 1..75: mol_type = other DNA
gcgtaaagtctggcgccagttgttacgcgaaggtatcagggtggccagatgcactgtggcacgtctcatggcggt

SEQ ID NO: 63708 - DNA, 75 bp, synthetic construct
  source 1..75: mol_type = other DNA
ccgaagtccgtcaacgggcagttcgtatggttctggaaagtcaggccgaatatgactcacaatgggcggcaagtt

SEQ ID NO: 63709 - DNA, 75 bp, synthetic construct
  source 1..75: mol_type = other DNA
ctgccgttcagtcaggaggaagccaagctgttcttccaggtcatcgccaaacgttacgagaagagcgcgatgatc

SEQ ID NO: 63710 - DNA, 75 bp, synthetic construct
  source 1..75: mol_type = other DNA
tcactgtacagtgaatggggagatatggggcattacacgactgaagctggttttcaatcaaatatgtattggtca

SEQ ID NO: 63711 - DNA, 75 bp, synthetic construct
  source 1..75: mol_type = other DNA
gtttcggtatacaacattcaggacgaaaccgggcaatttaaaccctacccggcaagtaacttctccactgctgtt

SEQ ID NO: 63712 - DNA, 75 bp, synthetic construct
  source 1..75: mol_type = other DNA
gtcgtaagcgtggatgtgcaggcacaacaacagacagttcgggttactgcgataagcatcgcggtgaaggctggg

SEQ ID NO: 63713 - DNA, 75 bp, synthetic construct
  source 1..75: mol_type = other DNA
ggatgcgcaccgatgccaacggtaaaggcgttatcaatatcctcagcgccgagaagctttatcagatgccgaaac

SEQ ID NO: 63714 - DNA, 75 bp, synthetic construct
  source 1..75: mol_type = other DNA
aaagaatcagtgctttataatgcaaacaatattacaaccgatttgttagtaaaggctataaagcgtaggcaagaa

SEQ ID NO: 63715 - DNA, 75 bp, synthetic construct
  source 1..75: mol_type = other DNA
atacccggtcacgcaggcttgctggaagtacaaagacacgtatatgacccaggctgctgacaatggcacctgcaa

SEQ ID NO: 63716 - DNA, 75 bp, synthetic construct
  source 1..75: mol_type = other DNA
atgtcatctgttaacaccacacaaccagagacacagcagcgcattctgcgcatgagagaactgacgaagatagtt

SEQ ID NO: 63717 - DNA, 75 bp, synthetic construct
  source 1..75: mol_type = other DNA
ggagcagaaaccgctcaggctacggtcagagtctggatgagattccggcgcgatgtgacagcgacttcacgtctg

SEQ ID NO: 63718 - DNA, 75 bp, synthetic construct
  source 1..75: mol_type = other DNA
tcgagggcatcacttattcgccagatcaaaggttcagttaatgaatgtcgaataacccaggaagaatatcattat

SEQ ID NO: 63719 - DNA, 75 bp, synthetic construct
  source 1..75: mol_type = other DNA
ttacgacgaaacgtttccaaaacccgtgagacttggtgctgcttccgttggatggcgttccacttccgttgatga

SEQ ID NO: 63720 - DNA, 75 bp, synthetic construct
  source 1..75: mol_type = other DNA
cggtaaaggtcgcgtatgaccttgctaacgggaaatacactgcacaggacgccaccacagcgagaaaaggccttg

SEQ ID NO: 63721 - DNA, 75 bp, synthetic construct
  source 1..75: mol_type = other DNA
ggaaggcaatgccattccggcactggcaaaagaatttgcgacaggcgtactgacctgcgagtcggtttacatcgt

SEQ ID NO: 63722 - DNA, 75 bp, synthetic construct
  source 1..75: mol_type = other DNA
tggaatatcaccgaccacgtcatgcgctatctcattcttgattattcaccggttccggcggcaacacaggaagcc

SEQ ID NO: 63723 - DNA, 75 bp, synthetic construct
  source 1..75: mol_type = other DNA
gcggctgatgatgttcagtggtgcagcttcagaaaatccctgccgtggattgaggggcatgatattccgtcgatg

SEQ ID NO: 63724 - DNA, 75 bp, synthetic construct
  source 1..75: mol_type = other DNA
caacaaccgcgctatatcccgctcagccagcccatgcctttactggcaaatacaccgtttattgtcaccggctcg

SEQ ID NO: 63725 - DNA, 75 bp, synthetic construct
  source 1..75: mol_type = other DNA
ggattttcgctgcggctgctggctgatggagaaacccgaaacagcaatgaaagccattacccggaatcttgatcg

SEQ ID NO: 63726 - DNA, 75 bp, synthetic construct
  source 1..75: mol_type = other DNA
agcgccctcctcttttatatgcccgatcagcgtcatcacatgctgtttgcgaccatgtggaataccggcatccgg

SEQ ID NO: 63727 - DNA, 75 bp, synthetic construct
  source 1..75: mol_type = other DNA
cacattctggctgtacgaaagagtacactgttgcaaatcgacacacttatccgacaactggctgaaatctcggtg

SEQ ID NO: 63728 - DNA, 75 bp, synthetic construct
  source 1..75: mol_type = other DNA
gatatgccaggagctatggcggaatacggaaaggagtataagcgggctaaatgcactaaaggcccggataaaggg

SEQ ID NO: 63729 - DNA, 75 bp, synthetic construct
  source 1..75: mol_type = other DNA
gcattattcatggtactggcgaaccggtacgactggcagttattccttgaggtaacggggccgggcggaagcggt

SEQ ID NO: 63730 - DNA, 75 bp, synthetic construct
  source 1..75: mol_type = other DNA
tgttaattttcgagcgcctgtttaagttgggcgagcactggcagcttgatcatcgtcttgaagcgttctttcggc

SEQ ID NO: 63731 - DNA, 75 bp, synthetic construct
  source 1..75: mol_type = other DNA
acgttacagcccgtcgacgcagccactggtggtggacggtgccgggatgcctggcaatggtgttactgaacgcag

SEQ ID NO: 63732 - DNA, 75 bp, synthetic construct
  source 1..75: mol_type = other DNA
gggtgacgctgaacacggaagggtacgcgccgtcatatgtgggtgacattctggtgaaggcggactctgcaccgg

SEQ ID NO: 63733 - DNA, 75 bp, synthetic construct
  source 1..75: mol_type = other DNA
gcggtgtatgacatggcccgcaagggggcgcaggatgagctccggctgcagttgcgtgatggcggtatgttatcg

SEQ ID NO: 63734 - DNA, 75 bp, synthetic construct
  source 1..75: mol_type = other DNA
aacaaatccgccgaagatattctcaagttagggaagaaaaaaggcggcacgttcttcacgcgagacgacctgaaa

SEQ ID NO: 63735 - DNA, 75 bp, synthetic construct
  source 1..75: mol_type = other DNA
cagaaccttataccggcgaaactcagtctgaggttccgtgccgaatcattacgacctatgaaggcgacttaacac

SEQ ID NO: 63736 - DNA, 75 bp, synthetic construct
  source 1..75: mol_type = other DNA
gtaatattgccaagagcttaggtgttgatattgctgatctctttacctctgccctcaaaagtaatactgtatata

SEQ ID NO: 63737 - DNA, 75 bp, synthetic construct
  source 1..75: mol_type = other DNA
cactgcctccccgtccgctccttcaggccacacagctgcccgcactggttatgaccggtaaacccggtcagtcat

SEQ ID NO: 63738 - DNA, 75 bp, synthetic construct
  source 1..75: mol_type = other DNA
gggaacaaggctgtcggtattgaccgtgtgacaaaagccagctggggtgaacaactggatgagaatatcagcggt

SEQ ID NO: 63739 - DNA, 75 bp, synthetic construct
  source 1..75: mol_type = other DNA
gcgtcgggcgattcgttataaccgcgaagaagatatcgatgttacggcgaaaagcgtgcagttcggtctttcctc

SEQ ID NO: 63740 - DNA, 75 bp, synthetic construct
  source 1..75: mol_type = other DNA
caaaatcgttcctcggtgccagcggcttaaaaccgcagcaggtagcgctgtttgaggatctggtctgcgcaatga

SEQ ID NO: 63741 - DNA, 75 bp, synthetic construct
  source 1..75: mol_type = other DNA
gccgaactggtgaactgggcgagtaaaaactacgacctggtgttgattgatacgccgccgattctggcagtgacc

SEQ ID NO: 63742 - DNA, 75 bp, synthetic construct
  source 1..75: mol_type = other DNA
cgagtgataacaaatgttctgttagatgatgatgctgatggctggttgccagcagctacagggattaacgacaga

SEQ ID NO: 63743 - DNA, 75 bp, synthetic construct
  source 1..75: mol_type = other DNA
taatctgctatgctggtggagtcagccaccagcatgacgaacaggccacgcagccgggcagtgtcaccgctgaaa

SEQ ID NO: 63744 - DNA, 75 bp, synthetic construct
  source 1..75: mol_type = other DNA
gaatgccggatgatggtcagcacgtaattattttatgtgatggcgcattcgttctttatgcgcaatatcgagacg

SEQ ID NO: 63745 - DNA, 75 bp, synthetic construct
  source 1..75: mol_type = other DNA
aagccatcacacgcaatctcgatcgcgaaatctggcgtgacctgatgcaacgttccgggatgctgagtctgatgg

SEQ ID NO: 63746 - DNA, 75 bp, synthetic construct
  source 1..75: mol_type = other DNA
atacaaaccgtattccgctttttcaggcggaattcaataactccatggcggtaaccggtactccgccgcagcgtc

SEQ ID NO: 63747 - DNA, 75 bp, synthetic construct
  source 1..75: mol_type = other DNA
actctccctgtaaatttggaagtaaaatcattatcaacaatctggtgagatgggaccggtggggatgtcatctta

SEQ ID NO: 63748 - DNA, 75 bp, synthetic construct
  source 1..75: mol_type = other DNA
acatcgcagagaacgccttacggggagtggccgtaggccggaaaaactggatgttcgcgggttccgacagcggtg

SEQ ID NO: 63749 - DNA, 75 bp, synthetic construct
  source 1..75: mol_type = other DNA
tcaaaatggaatcagctggtggtattcttctcgtgattgccgcggcaattgcgatgaccattgctaactcaccgc

SEQ ID NO: 63750 - DNA, 75 bp, synthetic construct
  source 1..75: mol_type = other DNA
gcgctatctcaggcagaaaataccactaacaatagcgactatctgtatacgatgggggttagcgccagattttaa

SEQ ID NO: 63751 - DNA, 75 bp, synthetic construct
  source 1..75: mol_type = other DNA
gccgcgctaagcctgaagataaaccctatacacttggggatgggcaaggcttgtcattgcttatagaacctaatg

SEQ ID NO: 63752 - DNA, 75 bp, synthetic construct
  source 1..75: mol_type = other DNA
acttcttctttcaattcaggatgaactcacacttgataaaataagcgtaaccgcccagaaatttttagattatcg

SEQ ID NO: 63753 - DNA, 75 bp, synthetic construct
  source 1..75: mol_type = other DNA
gatccagaaagctaccttcgccatgtgcttggcgtcatagcagactggccggtcaaccgggtcagcgaactgctt

SEQ ID NO: 63754 - DNA, 75 bp, synthetic construct
  source 1..75: mol_type = other DNA
atgccatttgctcgttatttctgcattttcataaacgttggtttgggagaagcggcaaagaggaatgtggggaca

SEQ ID NO: 63755 - DNA, 75 bp, synthetic construct
  source 1..75: mol_type = other DNA
atatacagggccggatatcttgcgcctgtaatgataaaggcgattggtcagaagctggcggcagcaggcgtacag

SEQ ID NO: 63756 - DNA, 75 bp, synthetic construct
  source 1..75: mol_type = other DNA
gccgtctcagaagacttagcgttcgtctcggacgtttttgccgccttcgcggaatttcctgccgctgttgccgag

SEQ ID NO: 63757 - DNA, 75 bp, synthetic construct
  source 1..75: mol_type = other DNA
gtcttgagaagaagatcagtagccgccccgtggaaaaaatccgccagtggcgacagcgttatgcccgtccgatac

SEQ ID NO: 63758 - DNA, 75 bp, synthetic construct
  source 1..75: mol_type = other DNA
taccgcttcgacaaggacctggctgaacgggccgccaaatttattcagctgttgccgcacaccaagggtgagtgg

SEQ ID NO: 63759 - DNA, 75 bp, synthetic construct
  source 1..75: mol_type = other DNA
gcggcgaaagtttacggacatgaatatattacgcgaaaagttaagggagtaacgcagaccaacgcaattacaacg

SEQ ID NO: 63760 - DNA, 75 bp, synthetic construct
  source 1..75: mol_type = other DNA
gtgggtaaaaacatgggctggctgggcgctgtttcactggatgccacccgtgcgaatgcccggttaccggatgaa

SEQ ID NO: 63761 - DNA, 75 bp, synthetic construct
  source 1..75: mol_type = other DNA
atgtgccgcgtgctccgggtggcccgcagcggctggtatacgtggtgtcagcggcggacaaggataagcacgcgt

SEQ ID NO: 63762 - DNA, 75 bp, synthetic construct
  source 1..75: mol_type = other DNA
aaggggaatgacggcggaacagcgccttgccgaacgtcagttgaaaacgaaaccgctgctgaaatccctggaaag

SEQ ID NO: 63763 - DNA, 75 bp, synthetic construct
  source 1..75: mol_type = other DNA
ctcagaagcgcagtgaaaaaggccgatcgctatgagcctgtcatcaacgacagttatcaggcgctagccgagcac

SEQ ID NO: 63764 - DNA, 75 bp, synthetic construct
  source 1..75: mol_type = other DNA
atgatgcgaataaaggcgatactgttgaaatcacctttgtaaatgaaaatggtgatggacagaaagtcacactgg

SEQ ID NO: 63765 - DNA, 75 bp, synthetic construct
  source 1..75: mol_type = other DNA
cctgcagtggtatattcatcaggcgctgttgcagaccggaaaagaaaattatgctgccattattcagtatgacct

SEQ ID NO: 63766 - DNA, 75 bp, synthetic construct
  source 1..75: mol_type = other DNA
atcagttttgccctgacggcatcggtcttctggctcagcaccggcgatcgcgatgctgccctgcagacagctgct

SEQ ID NO: 63767 - DNA, 75 bp, synthetic construct
  source 1..75: mol_type = other DNA
actgcatttttcactaacggatattgtcagcgaactgtcggtcccgcgcctgtcagggttaacggtggagattga

SEQ ID NO: 63768 - DNA, 75 bp, synthetic construct
  source 1..75: mol_type = other DNA
tcgaaaaggtactgaatgacagcgggatgcccgcgacagaggccgaaattacggcggcatttaaagccaccgtgc

SEQ ID NO: 63769 - DNA, 75 bp, synthetic construct
  source 1..75: mol_type = other DNA
gcaatggatcaattctggaaattacccttgatcgtccaaaagcgaatgctattgatgcaaaaaccagctttgaaa

SEQ ID NO: 63770 - DNA, 75 bp, synthetic construct
  source 1..75: mol_type = other DNA
cgctttgccgataagctgccgtcagaacctcgggaaaatatcgtttatcagtgctgggagcgtttttgccaggag

SEQ ID NO: 63771 - DNA, 75 bp, synthetic construct
  source 1..75: mol_type = other DNA
cagtagcggcttctgctgtggtatccggttctgcgatggcatggactgcaaacggtacgggtaattctgttgagc

SEQ ID NO: 63772 - DNA, 75 bp, synthetic construct
  source 1..75: mol_type = other DNA
cagtgctttgacaagtttgttagctgtatgaattgtggcgaacttgccatcctcaaggatatgaacgatagtttt

SEQ ID NO: 63773 - DNA, 75 bp, synthetic construct
  source 1..75: mol_type = other DNA
tatcttccccgcgccagcatggagcaacgaaaaagtgaactgcttgagcagcgggcagagccagttccttcccgc

SEQ ID NO: 63774 - DNA, 75 bp, synthetic construct
  source 1..75: mol_type = other DNA
atgactgacggcaaactccatgccgatgataccccggtccaggtactgctgccgggtaataagaagacgaagacc

SEQ ID NO: 63775 - DNA, 75 bp, synthetic construct
  source 1..75: mol_type = other DNA
gatgaacatgaccacgaaaccctccgatggcagtaaagccggtaagcagaaggataacgccaatgcagacgaaac

SEQ ID NO: 63776 - DNA, 75 bp, synthetic construct
  source 1..75: mol_type = other DNA
gtaccggtacagaattcgtgccaataatatattctattcaattcagccttcggttaattatcttacgagtcgtgg

SEQ ID NO: 63777 - DNA, 75 bp, synthetic construct
  source 1..75: mol_type = other DNA
tggtgcgctcagtttggcctggtgctcacaatccctcaaagcagcgaatttcaggtgctgcgcgataagcaggag

SEQ ID NO: 63778 - DNA, 75 bp, synthetic construct
  source 1..75: mol_type = other DNA
ctttgttagtcggtctctccgcagcggcttccagctatgcggcgctaccggagacggtacgtatcggaaccgata

SEQ ID NO: 63779 - DNA, 75 bp, synthetic construct
  source 1..75: mol_type = other DNA
ggcgaatcttgtcaccggtgatgtatcgtggcgggtccgtccaccatcagtaagtattcgtggtatggatgcagt

SEQ ID NO: 63780 - DNA, 75 bp, synthetic construct
  source 1..75: mol_type = other DNA
gcaaaacgattacagccttcctgactcactgacggagcgcatctggctgacgctcatttctcaacggatttcccg

SEQ ID NO: 63781 - DNA, 75 bp, synthetic construct
  source 1..75: mol_type = other DNA
tgttgctgtcggtaaaacgctggtttcatctgcgatgatcgaccgtgtggtcaatgatttgggccgtaagctggt

SEQ ID NO: 63782 - DNA, 75 bp, synthetic construct
  source 1..75: mol_type = other DNA
cggagcttgccacgctgagaggaaagtcactgattactgaagatggtgaagcgatcgagggcgaagccctggacg

SEQ ID NO: 63783 - DNA, 75 bp, synthetic construct
  source 1..75: mol_type = other DNA
tggccgcagtgaaaaacctccagataaatgcgggaaacaacgccgatatcggcgtggtgaagaatatgtttatcg

SEQ ID NO: 63784 - DNA, 75 bp, synthetic construct
  source 1..75: mol_type = other DNA
ctttaaatcagtggcttagtatgggttcgctcgctgcggtaatcgctggtgtcccgccagaagtggcgttggggt

SEQ ID NO: 63785 - DNA, 75 bp, synthetic construct
  source 1..75: mol_type = other DNA
ccgccgaaagatccacgatgtgcacgtccgcatcccgtcagcactgacggaagaagccctggagcagatcggtca

SEQ ID NO: 63786 - DNA, 75 bp, synthetic construct
  source 1..75: mol_type = other DNA
tgggccgcgcctggcttgagccaagcagaaggatgcaaagctatctcggatctgtcacatcactattttcgtgca

SEQ ID NO: 63787 - DNA, 75 bp, synthetic construct
  source 1..75: mol_type = other DNA
gtattggtatctggctctatcaccgttccgacaatccacgcgatttaatcccggggagaaaagacgatgacaact

SEQ ID NO: 63788 - DNA, 75 bp, synthetic construct
  source 1..75: mol_type = other DNA
ttatcccgccggtcaacgcgcggcttatcgggcgttatcgcgattatcgtcgtcacggcgcgtcggctttcagcg

SEQ ID NO: 63789 - DNA, 75 bp, synthetic construct
  source 1..75: mol_type = other DNA
tattatgcgatggttaatcttgataccgtaacctttcttgattcatcaagtttatacagcaaacttgaattgagc

SEQ ID NO: 63790 - DNA, 75 bp, synthetic construct
  source 1..75: mol_type = other DNA
tggacagcggcgaggcctctgcccctttcattgaagcagtcaaccgctacatcaacgaagaggggcaccacggac

SEQ ID NO: 63791 - DNA, 75 bp, synthetic construct
  source 1..75: mol_type = other DNA
tatggttcagcgctcaccattaagacggggcatggcaacatactggtttctgaaaggagaaaagcaggtgggaca

SEQ ID NO: 63792 - DNA, 75 bp, synthetic construct
  source 1..75: mol_type = other DNA
gttgtcagtctggcggccggagggatcagttttgccctgacggcatcggtcttctggctcagcaccggcgatcgc

SEQ ID NO: 63793 - DNA, 75 bp, synthetic construct
  source 1..75: mol_type = other DNA
ctggcgttatggaatatgtggaaaaggatattcccacaccagcagataatgaagtgctgttaaaaatcaaagctg

SEQ ID NO: 63794 - DNA, 75 bp, synthetic construct
  source 1..75: mol_type = other DNA
acgtccgcatcccgtcagcactgacggaagaagccctggagcagatcggtcagttgtacgccatagaggcggata

SEQ ID NO: 63795 - DNA, 75 bp, synthetic construct
  source 1..75: mol_type = other DNA
ctgagtggggacgggcgttccgcgaccgtctggcggctaatggcaagaaaggaaaggtgattctcggcgcgatga

SEQ ID NO: 63796 - DNA, 75 bp, synthetic construct
  source 1..75: mol_type = other DNA
aaaggaatatcaacaaccgatcagcgggcaactgttactgaaaaaagatagccatttgcccatttccggctccat

SEQ ID NO: 63797 - DNA, 75 bp, synthetic construct
  source 1..75: mol_type = other DNA
aagctggttgcgtgaaaagatgaagaccctgttcttcggctctggccatggtggtgagcggggagcgctactgta

SEQ ID NO: 63798 - DNA, 75 bp, synthetic construct
  source 1..75: mol_type = other DNA
tggcttgaatgtactgaagaaaatgccgtattcattttatctcgtgacgggtacatgaaatgggccttttccagc

SEQ ID NO: 63799 - DNA, 75 bp, synthetic construct
  source 1..75: mol_type = other DNA
gacagcaatattcggtgttcagcctcagctgactgcccggatagaacttccggggggaagcatctccgatgtgaa

SEQ ID NO: 63800 - DNA, 75 bp, synthetic construct
  source 1..75: mol_type = other DNA
atttaaatacagcgggtgggtcaggggatctgataatgatgagcattatgtaagacaaactacattccgaagcaa

SEQ ID NO: 63801 - DNA, 75 bp, synthetic construct
  source 1..75: mol_type = other DNA
cgatccttgcccctctggcgattggggtattttctgcaacagctgctgataataattcagccatttatttcaata

SEQ ID NO: 63802 - DNA, 75 bp, synthetic construct
  source 1..75: mol_type = other DNA
taaggattgaacagatacaggaagagacagccctgtatgaagctatgctggcgagagagaagatccgccatgaac

SEQ ID NO: 63803 - DNA, 75 bp, synthetic construct
  source 1..75: mol_type = other DNA
aatggaccattacgactctgacgcataccgtcagcccggataacggttttacgaccagtctggagcttgaagtga

SEQ ID NO: 63804 - DNA, 75 bp, synthetic construct
  source 1..75: mol_type = other DNA
caactataaaaaaacagtcatcagtcggctgcttttcaatgtttactttatcattttctattacctttattcctg

SEQ ID NO: 63805 - DNA, 75 bp, synthetic construct
  source 1..75: mol_type = other DNA
tccccggctggatgctgacgcaaattggctatgtgccgaacgtcgcacaggctgaccacaccattgaagggttac

SEQ ID NO: 63806 - DNA, 75 bp, synthetic construct
  source 1..75: mol_type = other DNA
actcaggatccgattggactgaaggggggatggaacctgtatggatatcaattgaatccgatatcagacatcgac

SEQ ID NO: 63807 - DNA, 75 bp, synthetic construct
  source 1..75: mol_type = other DNA
ctcaaagccgataaaatggatctgcgtacggctcagggattcctgagccagggctatcagggtgctgcaatgggg

SEQ ID NO: 63808 - DNA, 75 bp, synthetic construct
  source 1..75: mol_type = other DNA
aggacgactcagtggcagacggtgcaatggcgaacacgctgcgggcgagggtgaccgatgcattcggtaatacgt

SEQ ID NO: 63809 - DNA, 75 bp, synthetic construct
  source 1..75: mol_type = other DNA
atgaaattattccattgggtcgcttaatccatatggttaatcagaagaaagatcgcctgcttaacgagtatctgt

SEQ ID NO: 63810 - DNA, 75 bp, synthetic construct
  source 1..75: mol_type = other DNA
gtacccgttctgaaaaactgcagcgtgaggttgaacaggctgaggcccaactgaaacaacgcgaacaggaaagcg

SEQ ID NO: 63811 - DNA, 75 bp, synthetic construct
  source 1..75: mol_type = other DNA
aacaccgttcctcgcattatttccctttcttcttcgacggtttatccccgctggcgcggggaacactccgcatcg

SEQ ID NO: 63812 - DNA, 75 bp, synthetic construct
  source 1..75: mol_type = other DNA
ccttaataatgcggctgcgcagcaacaagtctctgttaatacctatattattgaaacactgaatgagcgtttgaa

SEQ ID NO: 63813 - DNA, 75 bp, synthetic construct
  source 1..75: mol_type = other DNA
agaagccccgtgaacaacattcgcctgaatttcgtaacgaagccctgaaactcgctgaacgcatcggtgtggccg

SEQ ID NO: 63814 - DNA, 75 bp, synthetic construct
  source 1..75: mol_type = other DNA
gaaaaaacgaatgccactgtccagaccgataatgtagctgcactgaaacaaggaacatccggatataaggttcag

SEQ ID NO: 63815 - DNA, 75 bp, synthetic construct
  source 1..75: mol_type = other DNA
tggaacgtgaaaatcgtgaactgcgccgcagtaacgatatccttcgccaggcttccgcttattttgcgaaggcgg

SEQ ID NO: 63816 - DNA, 75 bp, synthetic construct
  source 1..75: mol_type = other DNA
ccagtcacaatctaccaactttacagtatcacacaaacaacacatccattatgttaaagagcacttaattcattg

SEQ ID NO: 63817 - DNA, 75 bp, synthetic construct
  source 1..75: mol_type = other DNA
ggcaccggcgcgaccgatacatcctcaggcggacgtcaggggcggggccgcaggaaacgcggaccggggcgcgga

SEQ ID NO: 63818 - DNA, 75 bp, synthetic construct
  source 1..75: mol_type = other DNA
aactggagattataagggatattattcgagagacgctgttgggtaatgctgctcttattgttctggcagccatgg

SEQ ID NO: 63819 - DNA, 75 bp, synthetic construct
  source 1..75: mol_type = other DNA
aaagatcattgaagaatgcggacgcaaagccgttctgctgccaggcgatttaagcgatgagaaattcgcccgttc

SEQ ID NO: 63820 - DNA, 75 bp, synthetic construct
  source 1..75: mol_type = other DNA
ggcattgggtgaagacctgtcggataaacctgtggagcatatagaccagaccaatgagagtgacggcagttttct

SEQ ID NO: 63821 - DNA, 75 bp, synthetic construct
  source 1..75: mol_type = other DNA
catgcgactgacggcggttttttcctgcgtcagggtgctggcagagtcggtcgggatgttgccctgcaacctgta

SEQ ID NO: 63822 - DNA, 75 bp, synthetic construct
  source 1..75: mol_type = other DNA
tcgggatgttgccctgcaatctgtatcacctgaacggcagcctgaagcagagagccaccggcgaacgtctgcata

SEQ ID NO: 63823 - DNA, 75 bp, synthetic construct
  source 1..75: mol_type = other DNA
ttcctgctcggattctctggcccaaaatcagaagctgaggaaatcaaaaaggaaataaccctgtttcttcagaat

SEQ ID NO: 63824 - DNA, 75 bp, synthetic construct
  source 1..75: mol_type = other DNA
gcagcggatcaacaccggactggtacgaaaaagtaagcagggcgtttattacgccaaatttaacgccggggcgtt

SEQ ID NO: 63825 - DNA, 75 bp, synthetic construct
  source 1..75: mol_type = other DNA
atgtcgctgtcacggaaaccggaagtgacctggtacggctgggacggcgaccggctgaccacaatacagaacgac

SEQ ID NO: 63826 - DNA, 75 bp, synthetic construct
  source 1..75: mol_type = other DNA
ctgggagccggtctatcaggtcacattcccggacggctccacggatgtactgagccaggaggatatctggcatgt

SEQ ID NO: 63827 - DNA, 75 bp, synthetic construct
  source 1..75: mol_type = other DNA
ctgatgcaggccgtgatggatatcgggcgacgtgccggtggcattattccgatggggatgacgctggattttcag

SEQ ID NO: 63828 - DNA, 75 bp, synthetic construct
  source 1..75: mol_type = other DNA
tatttcaggtgatggccgaacaggcaaaaggtgcccagaaaaacgccatgaactcatggacagggatgacatcca

SEQ ID NO: 63829 - DNA, 75 bp, synthetic construct
  source 1..75: mol_type = other DNA
acctcgccttttcgtaaaccgcagaccaccgttccgggcacgcagccaggacgcggccagcgttttatgaacttt

SEQ ID NO: 63830 - DNA, 75 bp, synthetic construct
  source 1..75: mol_type = other DNA
cactctcagctcctgtagcgtttgctgcactggcttctgatactgggctttcttttacaccggagaaaatcagta

SEQ ID NO: 63831 - DNA, 75 bp, synthetic construct
  source 1..75: mol_type = other DNA
tctagctttgctggatgagttgaagaagcttagtggagataatcctagactgtttcccggtgatcatgatcccaa

SEQ ID NO: 63832 - DNA, 75 bp, synthetic construct
  source 1..75: mol_type = other DNA
catccagaacagaagacgtccgtaagtgggctgtccagaatgcaaaagaaaccacgtgggggctggctggcgtta

SEQ ID NO: 63833 - DNA, 75 bp, synthetic construct
  source 1..75: mol_type = other DNA
aaggatggcagcaaggcgacgtaagacactggttgtatgtcaccaatgccatgtcgcgattcatcagggaaaact

SEQ ID NO: 63834 - DNA, 75 bp, synthetic construct
  source 1..75: mol_type = other DNA
cggtggcgcgctgggggcggctgccggtccggtcggggttgccattggttccacggtgggcagctatctcggtga

SEQ ID NO: 63835 - DNA, 75 bp, synthetic construct
  source 1..75: mol_type = other DNA
gccagccggtgccatggcggggggcgtttctgatgtgatcagcggaggtgaaggaaaacgtcagcgtggacgcac

SEQ ID NO: 63836 - DNA, 75 bp, synthetic construct
  source 1..75: mol_type = other DNA
tggcaacgaatccagtaacaacaacccgtgcagcaaagtcagaagtaaggcgctcaaggctgacagctaatgagt

SEQ ID NO: 63837 - DNA, 75 bp, synthetic construct
  source 1..75: mol_type = other DNA
ggttatcgatcctgaaacgttcggcagagcgcaaccaaccgcattacgccaggccattcagagctacatcaacga

SEQ ID NO: 63838 - DNA, 75 bp, synthetic construct
  source 1..75: mol_type = other DNA
tggcatctggtcatggcagaaggtggtgaaattatgtgggaaatggacgatggctcccgcatggtgctgaaggct

SEQ ID NO: 63839 - DNA, 75 bp, synthetic construct
  source 1..75: mol_type = other DNA
aacatggccgggcgctgtgcattccccctgtttgcgctggtcagcggctgcaacatggcgggtaaaaccttacgt

SEQ ID NO: 63840 - DNA, 75 bp, synthetic construct
  source 1..75: mol_type = other DNA
accctcattcgaatgcttaccggtagcgaacgtccggatagcggtgatatctggattggcgagacgcgactggaa

SEQ ID NO: 63841 - DNA, 75 bp, synthetic construct
  source 1..75: mol_type = other DNA
agagcatcaaagctaagattttcgtataaaatagataaagaaagcgaaggacttgataccagaataccgtatggt

SEQ ID NO: 63842 - DNA, 75 bp, synthetic construct
  source 1..75: mol_type = other DNA
ctctgacaatgccgcttatgatcgatggtacatagaagaaggtgaagaagagcaacttcacattctagccaaagt

SEQ ID NO: 63843 - DNA, 75 bp, synthetic construct
  source 1..75: mol_type = other DNA
ttagctgtcaggcttaaggtcacaccaaaagccattagtaaatggttcaacggggagtcaataccaagaaaagac

SEQ ID NO: 63844 - DNA, 75 bp, synthetic construct
  source 1..75: mol_type = other DNA
aaacgggtaaacctgtacgcatgattattctggatacgctggcgcgttgctttggtgggaatgatgaaaatgatt

SEQ ID NO: 63845 - DNA, 75 bp, synthetic construct
  source 1..75: mol_type = other DNA
gtgaaaccgttgggcaagaactggcgggtaacccaaaggtcgcaatggtcagtatgacaggcagcgtctctgcag

SEQ ID NO: 63846 - DNA, 75 bp, synthetic construct
  source 1..75: mol_type = other DNA
cccccgtcctgcgccccgaagctggaagttacgtcgccaacctggcagccgctaacactctttttgttatgcgtc

SEQ ID NO: 63847 - DNA, 75 bp, synthetic construct
  source 1..75: mol_type = other DNA
cgcgttaagaatggacgaatcagatggcttacagaggaggaatcgaagcgcctgtttgcagaaattgctcctcat

SEQ ID NO: 63848 - DNA, 75 bp, synthetic construct
  source 1..75: mol_type = other DNA
ataacatcaagtcatttagaagctgtagctatgaaaatttcactcgtgctaaattaccctcccaacagacacgta

SEQ ID NO: 63849 - DNA, 75 bp, synthetic construct
  source 1..75: mol_type = other DNA
ttttacccgttttaaaggcgtaaaactctacgaaatcatcgacatcatcagtaaagaacagggcgtgacgatggt

SEQ ID NO: 63850 - DNA, 75 bp, synthetic construct
  source 1..75: mol_type = other DNA
gttgccgtgccggatgccatccgttgtgtgaactgccagaacatcatggaggccggtcatgtgggtcagcatcgt

SEQ ID NO: 63851 - DNA, 75 bp, synthetic construct
  source 1..75: mol_type = other DNA
aagttgaactggtgatcagcgcggtgaaaaagatgtcggcactgggcgtggcggtgatttatgtcagccaccgga

SEQ ID NO: 63852 - DNA, 75 bp, synthetic construct
  source 1..75: mol_type = other DNA
atgaagtctacaggctgatggatgcagcccagagcatgtcctttcctgaaagaaatcgctgtctgattatgatgg

SEQ ID NO: 63853 - DNA, 75 bp, synthetic construct
  source 1..75: mol_type = other DNA
acccgcatggctgatatgctgggagccatcactaccgtcaaaaatggctgtctgctgttcattctgccgggtggc

SEQ ID NO: 63854 - DNA, 75 bp, synthetic construct
  source 1..75: mol_type = other DNA
ctgtctcaccggaagcggataacagcggagatatttataaccccgtgctcagaaccatcgcacagtcagaacaac

SEQ ID NO: 63855 - DNA, 75 bp, synthetic construct
  source 1..75: mol_type = other DNA
attatattgtttgcgactcaattagaagcaataaacaaaacaataggtggctcaaaaaatgaaaaatacatgaaa

SEQ ID NO: 63856 - DNA, 75 bp, synthetic construct
  source 1..75: mol_type = other DNA
aaacaggaaattgattttggtcagatctctaaatccttcctgcaagaggggggagagactcaaccgaaagatttg

SEQ ID NO: 63857 - DNA, 75 bp, synthetic construct
  source 1..75: mol_type = other DNA
gctgatttgcaaaaatctcttgcagcgcaggaggcagtggcgaaagagcagaaaaccctgcgtattgcgcagatg

SEQ ID NO: 63858 - DNA, 75 bp, synthetic construct
  source 1..75: mol_type = other DNA
cctgtctactcaaaacatgaagatggcaggtttcttgatagcaacagcactatcctcaatgttgctgtctcacgc

SEQ ID NO: 63859 - DNA, 75 bp, synthetic construct
  source 1..75: mol_type = other DNA
tcacatctcagaaaattacaaatcttggtgctgatggcattaagattgatatggggcttatgcctgccaaagacg

SEQ ID NO: 63860 - DNA, 75 bp, synthetic construct
  source 1..75: mol_type = other DNA
tgccctggctatagggtatctggccgttgccaaagaaaagtggacttcaacagctatcgttactcaacctgatgt

SEQ ID NO: 63861 - DNA, 75 bp, synthetic construct
  source 1..75: mol_type = other DNA
atcgccttaatgtggagccggccgtgttccggggcttcaccacgccggagctggggctggccgcactgagcggtg

SEQ ID NO: 63862 - DNA, 75 bp, synthetic construct
  source 1..75: mol_type = other DNA
aattgcatcgcggtaacttcaccgctatcggtcggcagatccagccttatctggaggacggcaaatgctttcgca

SEQ ID NO: 63863 - DNA, 75 bp, synthetic construct
  source 1..75: mol_type = other DNA
tgatcttccccggcgaccataacccgtataagccaatgtgtgaaaacacggtcaataaggcactgcgggtgatgg

SEQ ID NO: 63864 - DNA, 75 bp, synthetic construct
  source 1..75: mol_type = other DNA
ctgagcaggtccgtacttacgtaccggctgacgactaccgcgtactgggtactgatggcttcggtcgttccgaca

SEQ ID NO: 63865 - DNA, 75 bp, synthetic construct
  source 1..75: mol_type = other DNA
attgaccactgtaaaacgccagcatcgccccgctcttgatctttcacgtcttcctgaacttctgtcccgtattgg

SEQ ID NO: 63866 - DNA, 75 bp, synthetic construct
  source 1..75: mol_type = other DNA
tttcttataccggcaaaacctctgaagaggcacaaaaaacgctggctcagtatattcaacaagttgatgaaggtg

SEQ ID NO: 63867 - DNA, 75 bp, synthetic construct
  source 1..75: mol_type = other DNA
ccgtgttcgcggtgcttatatcagcacccgcttttgcggatcagcaatgtggtgattttaaaatccattgggcag

SEQ ID NO: 63868 - DNA, 75 bp, synthetic construct
  source 1..75: mol_type = other DNA
tctgcattctgaccttaagcgcccgctggtccgcaatgtatggtcactcttctctgccactgatggtgttaggcc

SEQ ID NO: 63869 - DNA, 75 bp, synthetic construct
  source 1..75: mol_type = other DNA
cctgatgccttctcgcgatggcaacaattacggctttgagtttgtgaagcgtaacggaaaagctttcctgaacgt

SEQ ID NO: 63870 - DNA, 75 bp, synthetic construct
  source 1..75: mol_type = other DNA
ccaatccggggtgtagcggtggagaaatcgccgcagcactgaatacaccaaccacaaccattaatgcggagctac

SEQ ID NO: 63871 - DNA, 75 bp, synthetic construct
  source 1..75: mol_type = other DNA
gtaacggaaaagctttcctgaacgtccagcttctgcagaacagcatggatgcgcctaaaatcatcggatcattcc

SEQ ID NO: 63872 - DNA, 75 bp, synthetic construct
  source 1..75: mol_type = other DNA
atgcaggacatacgacaggaaacactgaatgaatgcatccgtgtggagcagacggccagcgtggtgctctgggaa

SEQ ID NO: 63873 - DNA, 75 bp, synthetic construct
  source 1..75: mol_type = other DNA
gctggtactgaaaccggacagcgacggtcagccttatgtggaaggtcaggactactcgcttgatgcgcagaccgg

SEQ ID NO: 63874 - DNA, 75 bp, synthetic construct
  source 1..75: mol_type = other DNA
tcgaaaccattgaggtggaaaacggtgcccgcccggtaaaaacggtgaagtctgccgtcattggcctgattggta

SEQ ID NO: 63875 - DNA, 75 bp, synthetic construct
  source 1..75: mol_type = other DNA
cgtaaactacttggtttttcacataatgatattgactttatagaatcaacgatcattaattgtcttctggaaaaa

SEQ ID NO: 63876 - DNA, 75 bp, synthetic construct
  source 1..75: mol_type = other DNA
ctcatccggtcacggtcaatctcgctgccgtggcgattaccatcaatacactctccactgacgatgtaataaacg

SEQ ID NO: 63877 - DNA, 75 bp, synthetic construct
  source 1..75: mol_type = other DNA
tgtgctcacgaacctgggcaaggctattgaggccggtggcagcgtgaaggtgagctatgagtacgcggacccgtc

SEQ ID NO: 63878 - DNA, 75 bp, synthetic construct
  source 1..75: mol_type = other DNA
aacctacaccaccagcgtaggcgctaacggcgcgtggagcgtgcaggtgccgaccgccgacgcgcaagcgttagg

SEQ ID NO: 63879 - DNA, 75 bp, synthetic construct
  source 1..75: mol_type = other DNA
tcatccggcgaaaaaaacgatcgccccggacaccgccccccgtctcatgcagagaaaaaattcctgtttcaggcc

SEQ ID NO: 63880 - DNA, 75 bp, synthetic construct
  source 1..75: mol_type = other DNA
ttaacgaacaggggatcaccacggtattcagcagttacggcagcggccttcgtctgtggggtaaccggacggcag

SEQ ID NO: 63881 - DNA, 75 bp, synthetic construct
  source 1..75: mol_type = other DNA
cagtttggttatatatctggaactttaatcgctgaatacgatgaacgacgttgtagtggtagtaagaacgagcac

SEQ ID NO: 63882 - DNA, 75 bp, synthetic construct
  source 1..75: mol_type = other DNA
tttaccgcacgggctgcaggtggaactgccggacattacggcgtcaaccacggggcagaccgtccagctatggga

SEQ ID NO: 63883 - DNA, 75 bp, synthetic construct
  source 1..75: mol_type = other DNA
agaaagaagaacaaatacgcaaagcgaaagaaagagaggagtatgaacgacctttaaaggcttttatttcttcaa

SEQ ID NO: 63884 - DNA, 75 bp, synthetic construct
  source 1..75: mol_type = other DNA
ataccggaatcagattggcgataagtttgctcaacgtcttctcgggcataaatcagattcaatggcggcgcggta

SEQ ID NO: 63885 - DNA, 75 bp, synthetic construct
  source 1..75: mol_type = other DNA
agacgtctcaaaaccggtaaaaccgatgcggtcggcctggtcttccctgaacatgctgtactgttcagcagtagt

SEQ ID NO: 63886 - DNA, 75 bp, synthetic construct
  source 1..75: mol_type = other DNA
cgaaaaagtctcccgccgtatcgcacaaatggaagccgatctgaaccggcttcataaagagagcgatacgctgac

SEQ ID NO: 63887 - DNA, 75 bp, synthetic construct
  source 1..75: mol_type = other DNA
cgaattgcgcgagtacatcaattagggcttaaggataagccggggcgtaatagtgctgtggtggaatatcctgtt

SEQ ID NO: 63888 - DNA, 75 bp, synthetic construct
  source 1..75: mol_type = other DNA
gcagggaatgtctgtaatcagatgaaaaaagaagcgctgtttcgccctaagccttctcctgagttagtgcaggaa

SEQ ID NO: 63889 - DNA, 75 bp, synthetic construct
  source 1..75: mol_type = other DNA
gacgccgctgaatgatgccctgtaccgttatgtgatgaatacccgcaagcttcacactgacgacacaccggtaaa

SEQ ID NO: 63890 - DNA, 75 bp, synthetic construct
  source 1..75: mol_type = other DNA
acgtcagcaactggcctgcgggtacggtggatattacggtaagcggcaccaacagcgccggaacaacctccacca

SEQ ID NO: 63891 - DNA, 75 bp, synthetic construct
  source 1..75: mol_type = other DNA
ataaaacctttaaaaattttgaagtatatgattgtacatatggctttgaacatggccgcgttggcttattattaa

SEQ ID NO: 63892 - DNA, 75 bp, synthetic construct
  source 1..75: mol_type = other DNA
ggtggtatgccggacccgacgctgccggaggtgtccggaggtagtggcagagcggacgacatcatcggactgtaa

SEQ ID NO: 63893 - DNA, 75 bp, synthetic construct
  source 1..75: mol_type = other DNA
atggaaacagccttcttctggtatgtgaccttgatggccgtggtggcgtttctggtttcactaacattgcaccgt

SEQ ID NO: 63894 - DNA, 75 bp, synthetic construct
  source 1..75: mol_type = other DNA
atgccgcaaaccaagagcattgcggtcaaatgtacgaatgttgctgcgcaggcttatttaacaatgcgtctggaa

SEQ ID NO: 63895 - DNA, 75 bp, synthetic construct
  source 1..75: mol_type = other DNA
tgtcggtaacaatgttcacccgggcacggcgaaaggagtgatggtaaatgcgctgtcgctggcggcacgtattca

SEQ ID NO: 63896 - DNA, 75 bp, synthetic construct
  source 1..75: mol_type = other DNA
gcctacgttgattaacggcttccctgaaatcagctggctggggatttatccctacgtggaaacgttgttaccgca

SEQ ID NO: 63897 - DNA, 75 bp, synthetic construct
  source 1..75: mol_type = other DNA
acagttttctcgatgcaggcacttatcccagtttgatggaagcttttccacgctcacctgggacagccaatattt

SEQ ID NO: 63898 - DNA, 75 bp, synthetic construct
  source 1..75: mol_type = other DNA
gttttacctccgcaggcggtgttgtacaaattggcctgacgttaatggcggaacgttttccctacgctaaaggaa

SEQ ID NO: 63899 - DNA, 75 bp, synthetic construct
  source 1..75: mol_type = other DNA
atttgcggatgctcatcaactggtggagcagggagagacgctgcagagtgtggatgagcattcactgcccgatct

SEQ ID NO: 63900 - DNA, 75 bp, synthetic construct
  source 1..75: mol_type = other DNA
tttggtccgaccggcgccgggaaatccgccacgctgtgctcctcgctgtcgcagatcatggccgtacatcgcccc

SEQ ID NO: 63901 - DNA, 75 bp, synthetic construct
  source 1..75: mol_type = other DNA
ggcagcacgttaaccattcagtcaaatggtgcggcgtttactgccacaaccatcaaaatcattgcggagcagtga

SEQ ID NO: 63902 - DNA, 75 bp, synthetic construct
  source 1..75: mol_type = other DNA
taactggaactgtgcagcctcgaaatccccaccgaagacccctgatgaaaagcaggatacgccggatatgagaga

SEQ ID NO: 63903 - DNA, 75 bp, synthetic construct
  source 1..75: mol_type = other DNA
agcccccgagatgaactggacgacatgggggatgcggtgcctgcccgccggttacaggaggccatcgacccggta

SEQ ID NO: 63904 - DNA, 75 bp, synthetic construct
  source 1..75: mol_type = other DNA
ggacagtccgtgaaaagcatgcctgccgtcggtgcgatcgcatcgttcaggccccggctccttcgcgccccatcg

SEQ ID NO: 63905 - DNA, 75 bp, synthetic construct
  source 1..75: mol_type = other DNA
gccgcgagagctctattccggcgcaattctgctgctggacgatatgcgcttcgatgcggcgctagttctgcgttc

SEQ ID NO: 63906 - DNA, 75 bp, synthetic construct
  source 1..75: mol_type = other DNA
aaggaaggtctcaagagaatatacaaacataaagtggtggtgaatggggttagcgatttttatgctggtgagata

SEQ ID NO: 63907 - DNA, 75 bp, synthetic construct
  source 1..75: mol_type = other DNA
ggaccagtcagaacagaaattaccaacttaacgccggagcaggctgcagaggcgtatagaaaaatgatgggctaa

SEQ ID NO: 63908 - DNA, 75 bp, synthetic construct
  source 1..75: mol_type = other DNA
taatccactctgaaaacgcattaattaaagcacgcgaaatgaatgcgttgttaattaaattaattgaagtgccgg

SEQ ID NO: 63909 - DNA, 75 bp, synthetic construct
  source 1..75: mol_type = other DNA
gccgcgagagctttattccggcgcaatcctgctgctggacgatacgcgctttgatgcggcgctagttctgcgttc

SEQ ID NO: 63910 - DNA, 75 bp, synthetic construct
  source 1..75: mol_type = other DNA
cgcgtggtgaactcacgtactcagcaagaagcgtatgtgtttgcaccggctacgctgtccaacatttactacggt

SEQ ID NO: 63911 - DNA, 75 bp, synthetic construct
  source 1..75: mol_type = other DNA
gcatcgcgcaattctgcgtggcgtggcgcaacagcgggcgcgtgaggcgcgtttacgtgctgcgcaacagcagga

SEQ ID NO: 63912 - DNA, 75 bp, synthetic construct
  source 1..75: mol_type = other DNA
ggaaaagcttactgaagccaggcttgaagaagtattaacggcttataaagcagatatccctctgggcatgattag

SEQ ID NO: 63913 - DNA, 75 bp, synthetic construct
  source 1..75: mol_type = other DNA
ggaaaatgaacaacgtctctttgccgccgccatgctgcgccgtgcggtgattgtcgcggcggtgtgtctggccgt

SEQ ID NO: 63914 - DNA, 75 bp, synthetic construct
  source 1..75: mol_type = other DNA
gggtgagtgaggaaagccgccgctggctggcatcgtgcggcctgaccgtggagcagatgcaaaaccagatggacc

SEQ ID NO: 63915 - DNA, 75 bp, synthetic construct
  source 1..75: mol_type = other DNA
taaattaaataatgtcctttataatggcattattgattttaatcgttcagttggtcgcctcggccctgctggtgt

SEQ ID NO: 63916 - DNA, 75 bp, synthetic construct
  source 1..75: mol_type = other DNA
tcagaagataacgatgattccgcttttgaactgctctgtaaaattcgcacaggagaaacactgacgacaaaagaa

SEQ ID NO: 63917 - DNA, 75 bp, synthetic construct
  source 1..75: mol_type = other DNA
cctgtgatgccggaatgacggacagtggggagtggcttacagcagagcagtttgccggaatggaaggaatgccgg

SEQ ID NO: 63918 - DNA, 75 bp, synthetic construct
  source 1..75: mol_type = other DNA
gccccgattctggtgaccaacggcacgatgctggaatatatgatggttcgccaggtcgacgccccgattatccag

SEQ ID NO: 63919 - DNA, 75 bp, synthetic construct
  source 1..75: mol_type = other DNA
atgacgactgaaaataaagttaagcaatatacaaaaaataaagtgcaggaaggctactgggttgatgcccgtggt

SEQ ID NO: 63920 - DNA, 75 bp, synthetic construct
  source 1..75: mol_type = other DNA
gcgttaaaagcgcaattgcaggtgatgtgtgaagctgagggcgttactcaggctgagatgattgccgaactgata

SEQ ID NO: 63921 - DNA, 75 bp, synthetic construct
  source 1..75: mol_type = other DNA
ctcacgagcagaccactgccgctgagcgtcagaccaccttcaacgacatgatcaaaatcgcactggaatccgttc

SEQ ID NO: 63922 - DNA, 75 bp, synthetic construct
  source 1..75: mol_type = other DNA
gttcgacgtgatggaaaaatacggcatcctcggcgtggaaatggaagcggctggtatctacggcgtcgctgcaga

SEQ ID NO: 63923 - DNA, 75 bp, synthetic construct
  source 1..75: mol_type = other DNA
ggtgttttctgctgcgttaatccgccgtgcactgattgttgcagcggtctgcctggctgttgcgatggggcttta

SEQ ID NO: 63924 - DNA, 75 bp, synthetic construct
  source 1..75: mol_type = other DNA
cgctcaatattctggaagctgcacgagagcgtattacctggacactcaacaccctaccccgcgtttgtgtctcat

SEQ ID NO: 63925 - DNA, 75 bp, synthetic construct
  source 1..75: mol_type = other DNA
gtgtttcggtgcgcccatcgtgtgtgaagccacacactggatgccgctaccagaaccgccgaaggaggtgcgcca

SEQ ID NO: 63926 - DNA, 75 bp, synthetic construct
  source 1..75: mol_type = other DNA
ggcgcgatgatgcgcaagctggcacaggtggcgtatggagtgctgaagtcaggcgtgccgttcgatgcgtcacgg

SEQ ID NO: 63927 - DNA, 75 bp, synthetic construct
  source 1..75: mol_type = other DNA
agcgtattgctatggcggttaaagcaaatgaattagcgccggaaccggacgacaccgagctcaaattccgtaaag

SEQ ID NO: 63928 - DNA, 75 bp, synthetic construct
  source 1..75: mol_type = other DNA
cgcatgcggggctgctcatagacgacgagcagtttgatgaaattaatattgtgcgcggtcagcttgttcctggtg

SEQ ID NO: 63929 - DNA, 75 bp, synthetic construct
  source 1..75: mol_type = other DNA
tccggaaggctggtaatcaggattatggcagagccaccggataagcgccgtcgcgacctggacaatatcctgaaa

SEQ ID NO: 63930 - DNA, 75 bp, synthetic construct
  source 1..75: mol_type = other DNA
tcgacgaaaactccggtgaattttttgttcaggtctggggaaatggagccaacttcgacaacacgattttgcgcc

SEQ ID NO: 63931 - DNA, 75 bp, synthetic construct
  source 1..75: mol_type = other DNA
gaatgccggatgacggtcagcacgtaattattttatgtgatggcgcattcgttctttatgcgcaatatcgagacg

SEQ ID NO: 63932 - DNA, 75 bp, synthetic construct
  source 1..75: mol_type = other DNA
gatttagcaaacgccgccagttattgctacctgatgatgagttccgggcttttcaggaactactcattcaagatc

SEQ ID NO: 63933 - DNA, 75 bp, synthetic construct
  source 1..75: mol_type = other DNA
gagaactgttagatcttctgactccttcattaactaagggtgaaaaccttctgagtgagtttgaaatccatcgaa

SEQ ID NO: 63934 - DNA, 75 bp, synthetic construct
  source 1..75: mol_type = other DNA
tagcagttagtccgggtaatgatcttaggcaagcaacccactggatgccgctaccagaaccgccgcaggaggtga

SEQ ID NO: 63935 - DNA, 75 bp, synthetic construct
  source 1..75: mol_type = other DNA
acccgccaacggtgaacacctactggcggcgtcgtggcagcacatattttgtatcaaaagtcggtgagcgttatc

SEQ ID NO: 63936 - DNA, 75 bp, synthetic construct
  source 1..75: mol_type = other DNA
tgccgatgctaactgcaatggaagtaccgcgccctgaagatatgggcaaatggtatgacacgctcaattatctgc

SEQ ID NO: 63937 - DNA, 75 bp, synthetic construct
  source 1..75: mol_type = other DNA
atgaacgttgcagaaaagtaccgcgctcgtcttgctggcgctcatgctttttatgtaatgtcagaacttgatacg

SEQ ID NO: 63938 - DNA, 75 bp, synthetic construct
  source 1..75: mol_type = other DNA
ttcccggtggagtacggatgtgctgtcagccgtcacaacttaccgatgtcttcagggcactcaaatatgctcagt

SEQ ID NO: 63939 - DNA, 75 bp, synthetic construct
  source 1..75: mol_type = other DNA
atgctcaggtgtctgcagtgggagacccccacgccattaagatgtataccctgtcgaatccgtcattagtgtctg

SEQ ID NO: 63940 - DNA, 75 bp, synthetic construct
  source 1..75: mol_type = other DNA
gtctcgaaaaaaatcagtacagcatcctgtgggtggagcaccaggacaagggacggcttgagctgaattttgtca

SEQ ID NO: 63941 - DNA, 75 bp, synthetic construct
  source 1..75: mol_type = other DNA
atgagcaatgaggatctgcttgctgctgccaataccgcccaggcggcaggaaatggtgcggctcgcgatcgctgg

SEQ ID NO: 63942 - DNA, 75 bp, synthetic construct
  source 1..75: mol_type = other DNA
tgaatttcaggaccgcagaacggttcgggctgattcaggtggtgaacaaaccagtcgtgttctggtttgagcaat

SEQ ID NO: 63943 - DNA, 75 bp, synthetic construct
  source 1..75: mol_type = other DNA
tgccacgcaaacggaaattaccgccgtgggcgatttacaactggtgaaaacggtcgcctggtacgataacgaata

SEQ ID NO: 63944 - DNA, 75 bp, synthetic construct
  source 1..75: mol_type = other DNA
caaggattccgatatccggattggcgatctgccgattatccgggattctgaaatccagaacttctgtctgcacgg

SEQ ID NO: 63945 - DNA, 75 bp, synthetic construct
  source 1..75: mol_type = other DNA
acaaggagagcgcggtattcaggggcctgccggtcctgcgggcccgcgaggtgaaaccggagccagaggtgaaaa

SEQ ID NO: 63946 - DNA, 75 bp, synthetic construct
  source 1..75: mol_type = other DNA
gggggatcgagcaggagctgaaaatgaaaccggaagaagagatggaacagcaactgccacccgggatcagtgaat

SEQ ID NO: 63947 - DNA, 75 bp, synthetic construct
  source 1..75: mol_type = other DNA
aataggccgtttatctatcgcagcaattggaccacaggtgctggttcttactagggccaaaagagacaatgagct

SEQ ID NO: 63948 - DNA, 75 bp, synthetic construct
  source 1..75: mol_type = other DNA
aattacgatccctccaacgtgattatgcttaccggacgcgcctcagttgtggagcgcctgacggaagtgatccag

SEQ ID NO: 63949 - DNA, 75 bp, synthetic construct
  source 1..75: mol_type = other DNA
aactgctggttgccggtgatttcagtaacggacaggaagagcgcccgctgtcagagcgcataaaaatggatgtta

SEQ ID NO: 63950 - DNA, 75 bp, synthetic construct
  source 1..75: mol_type = other DNA
ttccagccgaacgcgaacctctgcctggcgtaaaattctcacaccggggctccaagatgcggacaccacatcttg

SEQ ID NO: 63951 - DNA, 75 bp, synthetic construct
  source 1..75: mol_type = other DNA
atgagtgaagattatttgaaaatgtttacaggtgttgttctgttaatatttgtcattattgccggttatttcttt

SEQ ID NO: 63952 - DNA, 75 bp, synthetic construct
  source 1..75: mol_type = other DNA
tgctgataaccctctgtttgtctatctgccgtgtggtgttggcggtggtcctggtggcgtcgcattcgggcttaa

SEQ ID NO: 63953 - DNA, 75 bp, synthetic construct
  source 1..75: mol_type = other DNA
atgaataacaccaactacaacatggcggtctgtggaacatccggggccggtaagaccgggctgatacagccactt

SEQ ID NO: 63954 - DNA, 75 bp, synthetic construct
  source 1..75: mol_type = other DNA
taacgccaaagctgctgctgccgctaaaggcatgccgctgtacgagcacatcgctgaactgaacggtactccggg

SEQ ID NO: 63955 - DNA, 75 bp, synthetic construct
  source 1..75: mol_type = other DNA
agacacagaggtaattattttcgcgggtagtgatgcgtggtcacatgcaaaacagtggcaggagcaggacggccc

SEQ ID NO: 63956 - DNA, 75 bp, synthetic construct
  source 1..75: mol_type = other DNA
gcgcctggcggcatattcatatgtctccccaggatgctcgtctgttgaatgtcagcaatgggcagaaggtgagtg

SEQ ID NO: 63957 - DNA, 75 bp, synthetic construct
  source 1..75: mol_type = other DNA
ttacaggtgccagcctgtttatcgtggggggtgttggttatttctttacaggaccaaataataaaggagtttatc

SEQ ID NO: 63958 - DNA, 75 bp, synthetic construct
  source 1..75: mol_type = other DNA
ctggcggttatgctgaatttactggtttttattcgttccagtgaactcagataagcccgttggtctgaaattgat

SEQ ID NO: 63959 - DNA, 75 bp, synthetic construct
  source 1..75: mol_type = other DNA
gggtatggatggctggcagatcttacaaacgttaagaacagcaaagcaaacccctgttatttgccttactgcaag

SEQ ID NO: 63960 - DNA, 75 bp, synthetic construct
  source 1..75: mol_type = other DNA
gcgactgatgttgcaatggtgggccgattttctggatgcgaaccgggagaagggtatcagtccgtttgaatatgc

SEQ ID NO: 63961 - DNA, 75 bp, synthetic construct
  source 1..75: mol_type = other DNA
aaggtgaaattgtcagtttcaacactgatggttggatcaacgtcacaggtgttgctgagagatttggaaaacgca

SEQ ID NO: 63962 - DNA, 75 bp, synthetic construct
  source 1..75: mol_type = other DNA
gggcgataaccagtatcggatgtgggatttccacgtcgaagattttatgccagagcgcatggcgctgaatctgac

SEQ ID NO: 63963 - DNA, 75 bp, synthetic construct
  source 1..75: mol_type = other DNA
ggcaaaggcttacccgaccaataaattgcctgatttacgtggtgagtttattcgtggctgggatgatgaacgtgg

SEQ ID NO: 63964 - DNA, 75 bp, synthetic construct
  source 1..75: mol_type = other DNA
gttgcaatggtgggccgattttctggatgcgaaccgggagaagggtatcagtccgtttgaatatgcaaagattaa

SEQ ID NO: 63965 - DNA, 75 bp, synthetic construct
  source 1..75: mol_type = other DNA
ccgttgaaattaacccgaaatatgagaagcgattcacgacgataataagggcggtggtactggcaaccaataacg

SEQ ID NO: 63966 - DNA, 75 bp, synthetic construct
  source 1..75: mol_type = other DNA
ctgcaggcatcacgctgctgcgctgtagcgtaaatgctgcccacagtcgtgagcaaatcgatgccatcattcagg

SEQ ID NO: 63967 - DNA, 75 bp, synthetic construct
  source 1..75: mol_type = other DNA
tagggatgccgctgccgcgttatacagaaaagtaaacgggcatgctccagaccgtattgtactagagcaattgac

SEQ ID NO: 63968 - DNA, 75 bp, synthetic construct
  source 1..75: mol_type = other DNA
cgatggcgctatatcgccagcatcctgagtccaggctgtttcgcttctgttccggaaaatacgcctggtccggca

SEQ ID NO: 63969 - DNA, 75 bp, synthetic construct
  source 1..75: mol_type = other DNA
caccagtgttgatgagtactttaaaatcggctcgactatcaaaacagaccgtgagattgagctggatggcgtaac

SEQ ID NO: 63970 - DNA, 75 bp, synthetic construct
  source 1..75: mol_type = other DNA
caacagaacataatctgtggcgagtgccggaagagtgaagttatgctgcgtgtactggcgttctatcagggcaat

SEQ ID NO: 63971 - DNA, 75 bp, synthetic construct
  source 1..75: mol_type = other DNA
ttcatgatgtatttgccgcgcctgtgcgaacactgtctgaacccggcatgtgtggcgacctgcccgagcggtgcg

SEQ ID NO: 63972 - DNA, 75 bp, synthetic construct
  source 1..75: mol_type = other DNA
atgacaaacctgacactggatgtaaacattatcgatttcccatcaatccctgtggcgatgttgccgcaccgctgt

SEQ ID NO: 63973 - DNA, 75 bp, synthetic construct
  source 1..75: mol_type = other DNA
ttgagctgaataagaaatggtcgatattggtgccttctggcgatgaaaagcagtttgctgcgtttgacgattatt

SEQ ID NO: 63974 - DNA, 75 bp, synthetic construct
  source 1..75: mol_type = other DNA
tgctgaaaccgttgacggtaaagtcgatacccgtgcgctggaagaggtcggtctgaccgaagcccaggcacagga

SEQ ID NO: 63975 - DNA, 75 bp, synthetic construct
  source 1..75: mol_type = other DNA
tgagttccgcgcctgatgtacatgtcgaagaaaacggccggcggggggaatacggcgcgctacctgggtcgttat

SEQ ID NO: 63976 - DNA, 75 bp, synthetic construct
  source 1..75: mol_type = other DNA
tatccggaaaaaatcagcaaattcgattttaccactcttgacgttatcgcagccctgaacagcaataatacggaa

SEQ ID NO: 63977 - DNA, 75 bp, synthetic construct
  source 1..75: mol_type = other DNA
acctggtttaatcctggcactacctcattggcagaaggtttaccttatgttggcctgaccgaacaggatgttcag

SEQ ID NO: 63978 - DNA, 75 bp, synthetic construct
  source 1..75: mol_type = other DNA
ggcatcccgtctttttcctttctgtaccggcaaataccgctggcacggcagcactgaagcgtataccggtcgtga

SEQ ID NO: 63979 - DNA, 75 bp, synthetic construct
  source 1..75: mol_type = other DNA
ctgctattatttttttgtattcttttccgggttatgctgaagaaacttttgatacgcacttcatgattggcggca

SEQ ID NO: 63980 - DNA, 75 bp, synthetic construct
  source 1..75: mol_type = other DNA
tacagggtccggtaagtcaacgactctgagaacggcttcagaagcctatctgagcacgtttggtttcaaccataa

SEQ ID NO: 63981 - DNA, 75 bp, synthetic construct
  source 1..75: mol_type = other DNA
ctacccgacgttgcgcccgctgatcggcggcaccctgaaccacggcagcctggcggctgcaaatcgtggtgtggc

SEQ ID NO: 63982 - DNA, 75 bp, synthetic construct
  source 1..75: mol_type = other DNA
atactgactgtgaccgtttcctggaagctcgtcttatggtgctgcaagagcaactggcaagagtcgagcgactgg

SEQ ID NO: 63983 - DNA, 75 bp, synthetic construct
  source 1..75: mol_type = other DNA
agcacatcaatcttaccggtgactacatctggcaccagaacaagcaggttgagcaaggcaagttccgaccattac

SEQ ID NO: 63984 - DNA, 75 bp, synthetic construct
  source 1..75: mol_type = other DNA
cgctggcgcgttcagttgctgatgccgtctatggcttctctatgacgcgtgcttacaccattccggcacaggcca

SEQ ID NO: 63985 - DNA, 75 bp, synthetic construct
  source 1..75: mol_type = other DNA
caactgacccgcacgggttacggctggggaaacagcgtgcaggtcggcggcagctatctgggaatgatgtgcggc

SEQ ID NO: 63986 - DNA, 75 bp, synthetic construct
  source 1..75: mol_type = other DNA
tgcaaacccagcatcaggtgttggcatggccttcgaaaagccaaaaaaacaaaacatgccgacgcttcgacctga

SEQ ID NO: 63987 - DNA, 75 bp, synthetic construct
  source 1..75: mol_type = other DNA
agctggttgcgtgaaaagatgaagaccctgttcttcggctctggccatggtggtgagcggggagcgctactgtac

SEQ ID NO: 63988 - DNA, 75 bp, synthetic construct
  source 1..75: mol_type = other DNA
gagatctggcaacaagtttgtaaaacggtgaaagaggcgacagctttggcaggcatccccatttccgcaattcgc

SEQ ID NO: 63989 - DNA, 75 bp, synthetic construct
  source 1..75: mol_type = other DNA
cgcgacactcagaactggcgaaagcgttcgcatacgccctgaaccagtggccggcgctgacgtactatgcagatg

SEQ ID NO: 63990 - DNA, 75 bp, synthetic construct
  source 1..75: mol_type = other DNA
agaagacgaggaccgggcggttgtgggcgtatgttcgtgatgaccgcaatgccgggtcagcgttggcacctgcag

SEQ ID NO: 63991 - DNA, 75 bp, synthetic construct
  source 1..75: mol_type = other DNA
cagtcagaaatatacggccggcaaggtgtggagctgagccgttcactgctgtcgggctgggtggatgcatgctgc

SEQ ID NO: 63992 - DNA, 75 bp, synthetic construct
  source 1..75: mol_type = other DNA
attttaagacacgcatccgtcagcaaattgaagatccgatcatgcgcaaagcggtggcaaacgcgcagcagcgta

SEQ ID NO: 63993 - DNA, 75 bp, synthetic construct
  source 1..75: mol_type = other DNA
atcaccactgtgctggataaccgtctgatgagtctgacgctgacggacaatcggggctttgaagcggaccagctt

SEQ ID NO: 63994 - DNA, 75 bp, synthetic construct
  source 1..75: mol_type = other DNA
cgatcgggatcatttactcgcttttacgcttaatgttccctttagtcattggatgcgtacagacagtcagtcggc

SEQ ID NO: 63995 - DNA, 75 bp, synthetic construct
  source 1..75: mol_type = other DNA
caaggactccgatatccggattggcgacctgccgattatccgggattctgaaatccagaacttctgtctgcacgg

SEQ ID NO: 63996 - DNA, 75 bp, synthetic construct
  source 1..75: mol_type = other DNA
ctggattcaggcgaatgtgctgaaggccgataagatggatctgcgggagtctcagggatggctgaaccgtggtta

SEQ ID NO: 63997 - DNA, 75 bp, synthetic construct
  source 1..75: mol_type = other DNA
ccctgtgagggttgcagccctggttgtgctgtggctggtattcagtggcctgatttactggctgttcacagcctt

SEQ ID NO: 63998 - DNA, 75 bp, synthetic construct
  source 1..75: mol_type = other DNA
atccgttacctgcaggggattgagcataacggtgagtcttttaccatccgtgactggatgcgtggtgtccgggaa

SEQ ID NO: 63999 - DNA, 75 bp, synthetic construct
  source 1..75: mol_type = other DNA
agcgttagaaaaggatctaacgttgcatgatggcgatggtctttttctgctcgttaaaacgaacggtaagaagtt

SEQ ID NO: 64000 - DNA, 75 bp, synthetic construct
  source 1..75: mol_type = other DNA
tggaaaaagacgtatttccagctatcggtgagacccctgtccagcaaatcaaagcccgaacactggttgaagccc

SEQ ID NO: 64001 - DNA, 75 bp, synthetic construct
  source 1..75: mol_type = other DNA
atgttctatcaaaaaaagccgcgctggcagaaaaaaacatggatttagtttctgcctttgaactttggaaacaag

SEQ ID NO: 64002 - DNA, 75 bp, synthetic construct
  source 1..75: mol_type = other DNA
tcaggaattaatttctgaggtgttcgctaacttacgtgaattcatcccagcatcagaggataaaatctttgatgc

SEQ ID NO: 64003 - DNA, 75 bp, synthetic construct
  source 1..75: mol_type = other DNA
aaatacaacacgcagttgttaggccaaatgccacttcatatctctcttcgtgaagatctggataacggaacacca

SEQ ID NO: 64004 - DNA, 75 bp, synthetic construct
  source 1..75: mol_type = other DNA
aatccacattcgccagcgcaccatgaagaaggacctggaatcgctgagcagtgcggatgagatcctggtatacag

SEQ ID NO: 64005 - DNA, 75 bp, synthetic construct
  source 1..75: mol_type = other DNA
cgtcaggcggaaatccggtatcgaaccagcctacgcaggatagcgagggcggtcggagacatcgtaaatggtcgc

SEQ ID NO: 64006 - DNA, 75 bp, synthetic construct
  source 1..75: mol_type = other DNA
ccccgtcagccctgacggaggaagcgctgaaacggatcggcgaactgtacgccatcgaggcagagataaggggaa

SEQ ID NO: 64007 - DNA, 75 bp, synthetic construct
  source 1..75: mol_type = other DNA
caggaaccgtcaggcggaaatccgctatcgaaccagcctacgcaggatagcgcgggcggtcggagacatcgtaaa

SEQ ID NO: 64008 - DNA, 75 bp, synthetic construct
  source 1..75: mol_type = other DNA
atgtcatgactgacggcaaactccatgccgatgataccccggtccaggtactgctgccgggtaataagaagacga

SEQ ID NO: 64009 - DNA, 75 bp, synthetic construct
  source 1..75: mol_type = other DNA
acggttttgtgcgtattgaagtagtgttaccggagcggcaggctttcattgttaaaaagtgggctgacgaggcaa

SEQ ID NO: 64010 - DNA, 75 bp, synthetic construct
  source 1..75: mol_type = other DNA
agtcgggatgatggcgggcgcgcatgcggcgagctggtttatcaatggcggcaaaaccccgctcaaggttggcgc

SEQ ID NO: 64011 - DNA, 75 bp, synthetic construct
  source 1..75: mol_type = other DNA
tgctcgaaagcgagtaaaacgtcttatatcttctacagtttgtggtagaaataaagatttaggtcttacagattt

SEQ ID NO: 64012 - DNA, 75 bp, synthetic construct
  source 1..75: mol_type = other DNA
gataaaagaatggactgaagccagagacctgccatcgcctgatggagaaagcttccgtagttggttcaagagata

SEQ ID NO: 64013 - DNA, 75 bp, synthetic construct
  source 1..75: mol_type = other DNA
ttaacgaatctaacctgcaacaggttcttgaacagtcgatgaccactccggtgctgttctatttttggtctgaac

SEQ ID NO: 64014 - DNA, 75 bp, synthetic construct
  source 1..75: mol_type = other DNA
tccagcaagctgcgcgtcgggattttactggaacagcgtagcgaagcggcgctggatttcacccacaccatgacc

SEQ ID NO: 64015 - DNA, 75 bp, synthetic construct
  source 1..75: mol_type = other DNA
atggtggtgagcggggagcgctactgtacagcctgatcgggacgtgcaaactgaatgacgtggatccagaaagct

SEQ ID NO: 64016 - DNA, 75 bp, synthetic construct
  source 1..75: mol_type = other DNA
gaacgggcaggaagtttatttacgttaaatgtatttctgaagtgtcttttattcggcatcacaagattgagtgtg

SEQ ID NO: 64017 - DNA, 75 bp, synthetic construct
  source 1..75: mol_type = other DNA
ggtcaggaagaagacttatttcagtcaaatgtttttcggaagtgtcttttattcgccatcaccgaattgagttta

SEQ ID NO: 64018 - DNA, 75 bp, synthetic construct
  source 1..75: mol_type = other DNA
ggaatgtagtggtgagcgactcgggaaaaggcagagatctactgtcacgtggggttcgggaagctgaacgaaagt

SEQ ID NO: 64019 - DNA, 75 bp, synthetic construct
  source 1..75: mol_type = other DNA
cccatcgagcggggtatcgccggaccggggctgctggcccgcgtgctgacctcgaagtatgcagagcacaccccg

SEQ ID NO: 64020 - DNA, 75 bp, synthetic construct
  source 1..75: mol_type = other DNA
aacgcggcaccatggaggcgttactctccacagagattacccgcacggaactgctgctgtgtaagctgatccctt

SEQ ID NO: 64021 - DNA, 75 bp, synthetic construct
  source 1..75: mol_type = other DNA
acagagcgccccttgtcacagccagtaccaaccgcacagataaccagtcagatggctgggaatatccgggcgttg

SEQ ID NO: 64022 - DNA, 75 bp, synthetic construct
  source 1..75: mol_type = other DNA
aacctgtccggaaggctggcgataaaggtgattgcagagccaccggataagcgtcgtcgcgacctggacaatatc

SEQ ID NO: 64023 - DNA, 75 bp, synthetic construct
  source 1..75: mol_type = other DNA
accgatggtaactggaacctgacgccgtatgcatcgttaacggggttcaccgctgataaccccgaatatcattta

SEQ ID NO: 64024 - DNA, 75 bp, synthetic construct
  source 1..75: mol_type = other DNA
gaggaacaggaaaggcggaaaaatatagaaaagttaattcagattgagcgtaacgcgaaagcgcggatacgcagg

SEQ ID NO: 64025 - DNA, 75 bp, synthetic construct
  source 1..75: mol_type = other DNA
atgtcgcaaaaatcgcttacggccatcacgttctgcgtgacggcaatcctcatcatctggatgttgcacggttcg

SEQ ID NO: 64026 - DNA, 75 bp, synthetic construct
  source 1..75: mol_type = other DNA
aacacccaaaagcaaagccggtcagcaaaaagacaaaggtcaaaaaagaacaggaagcacgtgagggtgagtaca

SEQ ID NO: 64027 - DNA, 75 bp, synthetic construct
  source 1..75: mol_type = other DNA
atttaaaaaaaactccggctatactccattacagtatagaaaatataaattatggatgtttaaacatcaaactgg

SEQ ID NO: 64028 - DNA, 75 bp, synthetic construct
  source 1..75: mol_type = other DNA
agaaactaacggcatcaatggttgtaagtgctgataaatgtttttatgaccatggtaagggtagcttcgttataa

SEQ ID NO: 64029 - DNA, 75 bp, synthetic construct
  source 1..75: mol_type = other DNA
atatcacatgatataatgcaaggaaagaatgaaaaaaatgagttcatcataaactccataatatggacaaaagaa

SEQ ID NO: 64030 - DNA, 75 bp, synthetic construct
  source 1..75: mol_type = other DNA
aatgggcgcggagatattacagtcggtggtgaaactgtcagtattgtgtatgattctactaatgggcgcttttca

SEQ ID NO: 64031 - DNA, 75 bp, synthetic construct
  source 1..75: mol_type = other DNA
gcctggagcgcgatcacgcctctgtcggaacaatcgattgctgagggcaatcgcacgttagattttcccgacttc

SEQ ID NO: 64032 - DNA, 75 bp, synthetic construct
  source 1..75: mol_type = other DNA
acaacgcagaaagcacgctggcttctgctatcagcgcaaccgacacgtcgctgatcgttagcgctggaactggtg

SEQ ID NO: 64033 - DNA, 75 bp, synthetic construct
  source 1..75: mol_type = other DNA
gggcagatagctccggctctcgcacactatgggcaagagccaacggacttacccccatccgaaaggaaaattggt

SEQ ID NO: 64034 - DNA, 75 bp, synthetic construct
  source 1..75: mol_type = other DNA
cgctatattgcgaagctaaaaatgacaaggtcagaaagcgtctcggtattaaaggtggctttttctggatcgaag

SEQ ID NO: 64035 - DNA, 75 bp, synthetic construct
  source 1..75: mol_type = other DNA
ctgactaccttgatcaggggctgttgacaaaagagtgggcaaagggaaattgcgtatctgaaatcaatcgcaccc

SEQ ID NO: 64036 - DNA, 75 bp, synthetic construct
  source 1..75: mol_type = other DNA
tctgagcgtaatgacaggaaaatgtttctcctgagttcactggttttccttgttattaatatcgcgtgtttatat

SEQ ID NO: 64037 - DNA, 75 bp, synthetic construct
  source 1..75: mol_type = other DNA
ggccgccgacggtgaacacttactggcgacgtcgtggcagcacatattttatatcaaaagccggtgagcgttatc

SEQ ID NO: 64038 - DNA, 75 bp, synthetic construct
  source 1..75: mol_type = other DNA
attggtaaatatatccaaagacggagagtaactcgggcagccatctatttacggttaacaaatcttccgatagct

SEQ ID NO: 64039 - DNA, 75 bp, synthetic construct
  source 1..75: mol_type = other DNA
catagccgaccgcgaggcatactccggcgtaaccgctaaatggctgcacaccagagacccgaaaccgcaaaagca

SEQ ID NO: 64040 - DNA, 75 bp, synthetic construct
  source 1..75: mol_type = other DNA
atgcgtatagagtttgttttgccttatccgccgacggtgaacacctactggcggcgtcgtggcagcgcatatttt

SEQ ID NO: 64041 - DNA, 75 bp, synthetic construct
  source 1..75: mol_type = other DNA
ttgatgctcaaagaattaaacttcgtaatgaattacgtgttcactcttgagacttggtattcatttttcgtcttg

SEQ ID NO: 64042 - DNA, 75 bp, synthetic construct
  source 1..75: mol_type = other DNA
caaggactccgatatacggattggcgacctgccgattatccgggattccgaaatccagaacttctgtctgcacgg

SEQ ID NO: 64043 - DNA, 75 bp, synthetic construct
  source 1..75: mol_type = other DNA
tcggggctttgaagcagaccagcttgatctggagctggacgacgccgacggaaaaatcgtgctgccgcgccgtgg

SEQ ID NO: 64044 - DNA, 75 bp, synthetic construct
  source 1..75: mol_type = other DNA
atgagtggactacagggaaaaattgccgatgcagtcaaagccagaggttatcagatcatgacttccccggataaa

SEQ ID NO: 64045 - DNA, 75 bp, synthetic construct
  source 1..75: mol_type = other DNA
ttaccagtatgacctgaccggaaaactcacgcagagtgaagatgaggggcttatcaccctctggcattacgatgc

SEQ ID NO: 64046 - DNA, 75 bp, synthetic construct
  source 1..75: mol_type = other DNA
gattcaatgggactggcatcaaaatatggacacttaaataatggcggatatggagcgagacccaacaaaccgcct

SEQ ID NO: 64047 - DNA, 75 bp, synthetic construct
  source 1..75: mol_type = other DNA
acggcaaaaccttccggatgaacgctgctcaggtactgcatgataaatatatgatctggtgcggagagcagctat

SEQ ID NO: 64048 - DNA, 75 bp, synthetic construct
  source 1..75: mol_type = other DNA
agcctcttcgaaccggatgtgccggaagttgtttccggagaagacgtgactcaggctgaacagccgcaacagccg

SEQ ID NO: 64049 - DNA, 75 bp, synthetic construct
  source 1..75: mol_type = other DNA
caacgtgaaacgccacgacgcgcaccggttttatctgcgcgaaggctacgagcagagccatttccgcttcactaa

SEQ ID NO: 64050 - DNA, 75 bp, synthetic construct
  source 1..75: mol_type = other DNA
gcgctggcaaaactggtgagcgaaggcgtgctgctcagtcgacgcggcggcgggacgtttattcgctggcgtcat

SEQ ID NO: 64051 - DNA, 75 bp, synthetic construct
  source 1..75: mol_type = other DNA
gtttgatgaaatcaatattgtgcgcggtcagctcgttcctggtgggcgactgggcgtgaagatttgcgaaatcag

SEQ ID NO: 64052 - DNA, 75 bp, synthetic construct
  source 1..75: mol_type = other DNA
cataaagcagaacatctggaagaacggcgactgatgctacagtggtgggccgattttctggatgcaaacagagaa

SEQ ID NO: 64053 - DNA, 75 bp, synthetic construct
  source 1..75: mol_type = other DNA
tgccttacccgccgacggtgaatacctactggcgccgccgcggcagtacctattttgtgtcaaaagtcggtgagc

SEQ ID NO: 64054 - DNA, 75 bp, synthetic construct
  source 1..75: mol_type = other DNA
gagtcggtatattccgtcatgaggggaacgatgccaaaggttcctttacaaaaatcgggccgttctttctgaagg

SEQ ID NO: 64055 - DNA, 75 bp, synthetic construct
  source 1..75: mol_type = other DNA
ccgggaaggctcctggcatgacaccacgctcggtgcgattgttgaggcgatagcctcccgtaacaggctggaagc

SEQ ID NO: 64056 - DNA, 75 bp, synthetic construct
  source 1..75: mol_type = other DNA
atgaaccgttatgtaacaggactggcgctgatgttgttatgcctgaccgggacggccagggccgcttcggctgaa

SEQ ID NO: 64057 - DNA, 75 bp, synthetic construct
  source 1..75: mol_type = other DNA
cagcagacgatgacttatgcccattttgcaccggattatctgcaggatgctgtgcgctttaatcctgtggctgag

SEQ ID NO: 64058 - DNA, 75 bp, synthetic construct
  source 1..75: mol_type = other DNA
cagtatgatgaggagtccggcctgtattacaaccgccaccgctattatgacccgctgcaggggcgatatatcact

SEQ ID NO: 64059 - DNA, 75 bp, synthetic construct
  source 1..75: mol_type = other DNA
gtcagtcatatcgatttactgccgacaatgatggcgctggcagatattgaaaaaccagagattctgccgggggaa

SEQ ID NO: 64060 - DNA, 75 bp, synthetic construct
  source 1..75: mol_type = other DNA
gtgacgcaaatgatgcgcatgtacgaatacatcaaacagagcggcgccacgccggtgttacaggagcaacacgcc

SEQ ID NO: 64061 - DNA, 75 bp, synthetic construct
  source 1..75: mol_type = other DNA
attgaagctgaactggcaaagcttgctgaacaaccgattgagaaagactggcgtagcgccccgctggcagaaatc

SEQ ID NO: 64062 - DNA, 75 bp, synthetic construct
  source 1..75: mol_type = other DNA
cattgcagtcctatgcgcactttacttcgccgattcgtcgttatcctgacctgacgctgcaccgcgccattaaat

SEQ ID NO: 64063 - DNA, 75 bp, synthetic construct
  source 1..75: mol_type = other DNA
atgcgggcgaaacttctgggaatagtcctgacaacccctattgcgatcagctcttttgcttctaccgagacttta

SEQ ID NO: 64064 - DNA, 75 bp, synthetic construct
  source 1..75: mol_type = other DNA
ataatacaatttcctttactgatggaggggattatagaaatgcaaaaccaaacgtagagctaattttaaaaatga

SEQ ID NO: 64065 - DNA, 75 bp, synthetic construct
  source 1..75: mol_type = other DNA
aaatcgtcgaagtgctgggcgataatatgggcaccggcatggcggttgatatcgctctgcgtacccatgaaattc

SEQ ID NO: 64066 - DNA, 75 bp, synthetic construct
  source 1..75: mol_type = other DNA
gacctcccttgtgattaaccgccagttgtggctgtaccacgacagcggtagcgcagggctgactcacctgtacag

SEQ ID NO: 64067 - DNA, 75 bp, synthetic construct
  source 1..75: mol_type = other DNA
tctacaggaggcatctggcggggagcttcagtatgatcccaaagtttatgatgaatatcgtaagacgaagcgggc

SEQ ID NO: 64068 - DNA, 75 bp, synthetic construct
  source 1..75: mol_type = other DNA
tgaaagtgaaatcgttcacgtatggcgcggcggggtatggtgtccggtcagcacaatggaacttagccgcgaaat

SEQ ID NO: 64069 - DNA, 75 bp, synthetic construct
  source 1..75: mol_type = other DNA
cccaggcatatatgctgagggaagaggatccttcgctctgggattatggtgtaaatggcgggcgtttaaagtatt

SEQ ID NO: 64070 - DNA, 75 bp, synthetic construct
  source 1..75: mol_type = other DNA
aaatggaagaaaatgacgcttttcttgatgccgaagttaagtatcagaaaatgaagaataaagaatgttatggtg

SEQ ID NO: 64071 - DNA, 75 bp, synthetic construct
  source 1..75: mol_type = other DNA
tgtgagaaagtgttcagcggaaaaatgccggcacatatccttccgaaaagtgctgttgagccatcggtcatcgca

SEQ ID NO: 64072 - DNA, 75 bp, synthetic construct
  source 1..75: mol_type = other DNA
cgttacaaagcctttgacagcaaccacaccagcaccggtcatggatgctatccccaacaccggagacacaatcga

SEQ ID NO: 64073 - DNA, 75 bp, synthetic construct
  source 1..75: mol_type = other DNA
agggcattacacaaagccattgcctatgcgctgtctcatcgcgtggaactgagccgcttcctggaagatggtgcg

SEQ ID NO: 64074 - DNA, 75 bp, synthetic construct
  source 1..75: mol_type = other DNA
gactttgatccggaagagctggcgacgaagccggtaaagttgccggagaaagtgcggaaagttgaagccgcgtaa

SEQ ID NO: 64075 - DNA, 75 bp, synthetic construct
  source 1..75: mol_type = other DNA
agtaacagtgtgggatataaccggagcaatggttcaacgttcaatacaagcatttcagcttcagtgaatgatcgc

SEQ ID NO: 64076 - DNA, 75 bp, synthetic construct
  source 1..75: mol_type = other DNA
gaactaatggaataccagagacttcaacgtgaaaatctcatgttgaaactaagaattgagaacagaacgttagaa

SEQ ID NO: 64077 - DNA, 75 bp, synthetic construct
  source 1..75: mol_type = other DNA
atgcagtatgcgaaacctgtcactctgaatgttgaagagtgcgaccgtctgttttttctgccttacctgtttggc

SEQ ID NO: 64078 - DNA, 75 bp, synthetic construct
  source 1..75: mol_type = other DNA
tcaaccgtcagaagcagagcgcagcactgacggatctgatggatcagtacgtgctcctggcataccgcacaacgg

SEQ ID NO: 64079 - DNA, 75 bp, synthetic construct
  source 1..75: mol_type = other DNA
gaaatccgggcagaccgcgtgagcagtgaaagccgggcgtggcttgcgcagtgcgggctgacggtggagcaactg

SEQ ID NO: 64080 - DNA, 75 bp, synthetic construct
  source 1..75: mol_type = other DNA
agattccattacagaccttcgtgagggcagctttaaaatgccggacgggacaacattcagcgatcctgtcgtggc

SEQ ID NO: 64081 - DNA, 75 bp, synthetic construct
  source 1..75: mol_type = other DNA
ccgcaatctttatcagctttatggtgcagagtacgggcaaacgctggccaacgggcgtaatgctgatggtggtcg

SEQ ID NO: 64082 - DNA, 75 bp, synthetic construct
  source 1..75: mol_type = other DNA
ttgcaacggatcgaaatgccaatgttatatcgcaggaggaatgggaagcgttgcccgcgcttttatctggattta

SEQ ID NO: 64083 - DNA, 75 bp, synthetic construct
  source 1..75: mol_type = other DNA
ccgcaagaatccgtttggcgatatcaaatcggatggcactgtgcgaacggctctcgaaaaccttggtttgggaga

SEQ ID NO: 64084 - DNA, 75 bp, synthetic construct
  source 1..75: mol_type = other DNA
ttgccgctcaggtctatagtctggtggttccggtctggggctggcgtgcgctgttctttatcggcattttgccaa

SEQ ID NO: 64085 - DNA, 75 bp, synthetic construct
  source 1..75: mol_type = other DNA
gtagcgcaactcgcagaaaaattgcatcagaaagcgcaggccggtgaacgaatgccgtcatgtattaacatcatc

SEQ ID NO: 64086 - DNA, 75 bp, synthetic construct
  source 1..75: mol_type = other DNA
ctggatcctgatttacaaacttaccgataaacttttacgatttgagagaactggaactcacgcggcgctctttgg

SEQ ID NO: 64087 - DNA, 75 bp, synthetic construct
  source 1..75: mol_type = other DNA
ggccgggattatttgacggtgacacaccccgacttctggcctgcggtatccgggacgtgttactggaagacgtgg

SEQ ID NO: 64088 - DNA, 75 bp, synthetic construct
  source 1..75: mol_type = other DNA
attgttaacgcaggggagattcgctttgataatcagacgacaccgaatgccgcgctgagccgtgctgttgcaaaa

SEQ ID NO: 64089 - DNA, 75 bp, synthetic construct
  source 1..75: mol_type = other DNA
gtctgccggtactgaaggtccctgctttacggtgtcacgcattgttgtcagtggggccacccgactgacgtctgc

SEQ ID NO: 64090 - DNA, 75 bp, synthetic construct
  source 1..75: mol_type = other DNA
tcttcatccacttattatcggatacatacagcgctgagaaacaactaacaaaggcactgtctaaacttagtcgct

SEQ ID NO: 64091 - DNA, 75 bp, synthetic construct
  source 1..75: mol_type = other DNA
gtgcctttaactactccctcaaccgggacagtgatgagagctggtatctgcgcagtgaaaatgcttatcgtgcag

SEQ ID NO: 64092 - DNA, 75 bp, synthetic construct
  source 1..75: mol_type = other DNA
atgaaatttattattttaaaaaaggataaagatagcacaattgccagaaacgactctgttttccctgttaacaat

SEQ ID NO: 64093 - DNA, 75 bp, synthetic construct
  source 1..75: mol_type = other DNA
ttaccggctctgcaacgggaagcacagacacagaagcgcggcctgtgggctgataatcaacctgttcccccgtgg

SEQ ID NO: 64094 - DNA, 75 bp, synthetic construct
  source 1..75: mol_type = other DNA
tttttcgtcgttcggaagagtgcctgcaccttatccctaccagtgaaggtcagggcgagaatggcgatattggtc

SEQ ID NO: 64095 - DNA, 75 bp, synthetic construct
  source 1..75: mol_type = other DNA
cggctctgcaacgggaagcgcaggaacaaaaacgaggtttatgggctgacagtaatccggttccaccgtgggaat

SEQ ID NO: 64096 - DNA, 75 bp, synthetic construct
  source 1..75: mol_type = other DNA
tagaagcacgccttcatcgtgaacttcatggaaagctgaaaagcatcactatcacccgttcagcaacggggaaat

SEQ ID NO: 64097 - DNA, 75 bp, synthetic construct
  source 1..75: mol_type = other DNA
ccggagctgcaaggtgtctatagcgaaaccgatgcggatggcatgaaacggttgtacggttatgtgttgaagtaa

SEQ ID NO: 64098 - DNA, 75 bp, synthetic construct
  source 1..75: mol_type = other DNA
aagaagagggagaggaaataatgctatcttcgcctccccctataccagaggcggttcctgccacagattctccct

SEQ ID NO: 64099 - DNA, 75 bp, synthetic construct
  source 1..75: mol_type = other DNA
atgaagaagaatacccgttttgcttttaacgcttacctgcagcaactggcgcgtctgaacggtgtggcagttgag

SEQ ID NO: 64100 - DNA, 75 bp, synthetic construct
  source 1..75: mol_type = other DNA
ctggccattatcctcataccgtttaactttgcccctatgcgtaaatcgatgatttctgcgccagtgtttcgtgga

SEQ ID NO: 64101 - DNA, 75 bp, synthetic construct
  source 1..75: mol_type = other DNA
gttcgccagcagtgggaagagggtcagcggctggacacgcgtccacgcattctgataactggctgcccgattggc

SEQ ID NO: 64102 - DNA, 75 bp, synthetic construct
  source 1..75: mol_type = other DNA
gttgaggactaccgctgcgctgcactggtggaaaacatccagattggcgacttcagcgcagccgcagcagaagcc

SEQ ID NO: 64103 - DNA, 75 bp, synthetic construct
  source 1..75: mol_type = other DNA
ctaccccgaaatgcatggcacggtaacaggatttaaaagcgagattgataatcaggactggattattgcgaaagc

SEQ ID NO: 64104 - DNA, 75 bp, synthetic construct
  source 1..75: mol_type = other DNA
aaaagaacgcggcacggcgctggggatttttaactcatctaccgttatcggtcaggctatcgcgcctcctgctct

SEQ ID NO: 64105 - DNA, 75 bp, synthetic construct
  source 1..75: mol_type = other DNA
gcggcgtcatgtccgctttctacccgcacgaatctgaattatcacgccgagttaaacaattaattagagcagcaa

SEQ ID NO: 64106 - DNA, 75 bp, synthetic construct
  source 1..75: mol_type = other DNA
cgatttagcgcatcactgggaaacctctactgacgggttacgctgggatttttatcttcgctcaaccttacactg

SEQ ID NO: 64107 - DNA, 75 bp, synthetic construct
  source 1..75: mol_type = other DNA
atgcgtgaagctgtaccggcgcatttgcccgtcagcgtgaaagtgcgtctgggctgggacagcggtgagaagaaa

SEQ ID NO: 64108 - DNA, 75 bp, synthetic construct
  source 1..75: mol_type = other DNA
cgtcgcattactctgcggaagaactggcgaaagtgaaaaaagaaagaccggcaacctgtcaaaacgaagccggtt

SEQ ID NO: 64109 - DNA, 75 bp, synthetic construct
  source 1..75: mol_type = other DNA
cttctcgaagctggcgtcaaacaagtacgaatgcgaccagattaacttcgatttttatatccgctacaaaacgct

SEQ ID NO: 64110 - DNA, 75 bp, synthetic construct
  source 1..75: mol_type = other DNA
gtgggattatgccaaccgctcacaggcattgttccgtgagttgtatcccgcattaaaactgattcagtctggcta

SEQ ID NO: 64111 - DNA, 75 bp, synthetic construct
  source 1..75: mol_type = other DNA
tacaaatggcagcagaacgggcaattccggcaatggaacgcctgttaatattgccagttgatgatgatttgttaa

SEQ ID NO: 64112 - DNA, 75 bp, synthetic construct
  source 1..75: mol_type = other DNA
actcagccagcacgcgcagcaggcgggcgcggacggcatcgtggtgatcaacccctactactggaaagtgtcgga

SEQ ID NO: 64113 - DNA, 75 bp, synthetic construct
  source 1..75: mol_type = other DNA
taaacatgctcgacacaaatatgaaaactcaactcaaggcttaccttgagaaattgaccaagcctgttgagttaa

SEQ ID NO: 64114 - DNA, 75 bp, synthetic construct
  source 1..75: mol_type = other DNA
ctttgccccgcaggtgtcggtgaatcttctgaaagcctggcgcgacggggacgtggcgaaagcggccgggtatca

SEQ ID NO: 64115 - DNA, 75 bp, synthetic construct
  source 1..75: mol_type = other DNA
aactgtataccgacagtgccggttacccggtaaaaattattcgctgcataaataacaccgtgttgtacagaagaa

SEQ ID NO: 64116 - DNA, 75 bp, synthetic construct
  source 1..75: mol_type = other DNA
agactacagccgggttacgtcatttatttggtcatgtcaggaatttcagaatatggcacaaggcattgactgatg

SEQ ID NO: 64117 - DNA, 75 bp, synthetic construct
  source 1..75: mol_type = other DNA
gttgaggactaccgctgtgctgcactggtggaaaacatccagattggcgattttagcgccgctgcagccgaagcc

SEQ ID NO: 64118 - DNA, 75 bp, synthetic construct
  source 1..75: mol_type = other DNA
gatttgttggtattcgtgataaaaacacctcatcctattcattttgccatgacgggcgaactccagataaaggtt

SEQ ID NO: 64119 - DNA, 75 bp, synthetic construct
  source 1..75: mol_type = other DNA
gaggatgcaccggatcacgtcatgggcagcaccaccacgggtggtgaaaccacaccgggcgcggtgaaagtcggg

SEQ ID NO: 64120 - DNA, 75 bp, synthetic construct
  source 1..75: mol_type = other DNA
tccactaaacctaaatgcgaaaacccgtcctggtatcgtcctgcgcgctataaggcgctgagtgggcagctcgga

SEQ ID NO: 64121 - DNA, 75 bp, synthetic construct
  source 1..75: mol_type = other DNA
cctatgacggcactgtctataacgcccgtcaggtgatcgataccgttgggcatctgtgtgattacattctgtttg

SEQ ID NO: 64122 - DNA, 75 bp, synthetic construct
  source 1..75: mol_type = other DNA
cggggagatgacagtgtctgtcatttttcagtgaaaggtattgtacccaattccggaaaagttcaggaggtttat

SEQ ID NO: 64123 - DNA, 75 bp, synthetic construct
  source 1..75: mol_type = other DNA
atgaagcctactggtgtacgccggaacgcttacagcaactggccatcagggagttgtaccagcttgaactgacgc

SEQ ID NO: 64124 - DNA, 75 bp, synthetic construct
  source 1..75: mol_type = other DNA
aactaacagaagctttagaaggtcgtaacctgcaggcaaattggtgggcaactgaaagcttcgcaagcgatttca

SEQ ID NO: 64125 - DNA, 75 bp, synthetic construct
  source 1..75: mol_type = other DNA
atgttcgctctgattcaacgtggtcagatatacacggacagagccggataccctgtggtgattactcgcagtact

SEQ ID NO: 64126 - DNA, 75 bp, synthetic construct
  source 1..75: mol_type = other DNA
aaagcggtaatctgttattcatcatgcccggcggtggcgtgaacgcacagggccagccgttgccatcgttcgcca

SEQ ID NO: 64127 - DNA, 75 bp, synthetic construct
  source 1..75: mol_type = other DNA
ttaacactgatagcgatgcgctggccgtattgctgaccgatgcaaaaaaagaagagcgtaaagaccgcgcgctcg

SEQ ID NO: 64128 - DNA, 75 bp, synthetic construct
  source 1..75: mol_type = other DNA
ctaaaaccggaccagatgatgctggtctcaacctgttgctgactgaggcacgcaaagaagaacgccggggacgcg

SEQ ID NO: 64129 - DNA, 75 bp, synthetic construct
  source 1..75: mol_type = other DNA
acaaaaccgaaagtttcagccagccgcgacgcacgaaagccagcggcggtggtggcgatgagctgctgaccgact

SEQ ID NO: 64130 - DNA, 75 bp, synthetic construct
  source 1..75: mol_type = other DNA
ccgcaacgcgaagcacaacccgctgcagcgctttaagaccaaccctgaaaacgtcttttccgctgccactctggc

SEQ ID NO: 64131 - DNA, 75 bp, synthetic construct
  source 1..75: mol_type = other DNA
cgaaacactgaccagtgttacagagaaaatccgcaccgctcagaaagctaacgcagccctggaaccgtgggtgct

SEQ ID NO: 64132 - DNA, 75 bp, synthetic construct
  source 1..75: mol_type = other DNA
acgccgtggtgatggatgcggtcaatgagcttatcgacgtggtctaccaggacgatgacgatctggtggtgattt

SEQ ID NO: 64133 - DNA, 75 bp, synthetic construct
  source 1..75: mol_type = other DNA
gaatatgcagccaagtcaatttccatggccagacttgaagatctctggaaagagtatcagaagatctttccttca

SEQ ID NO: 64134 - DNA, 75 bp, synthetic construct
  source 1..75: mol_type = other DNA
cgcgaatttcacggtagacacctcagcacccgtggtcagtgttaataccgtggcgggcgacgatattcttaataa

SEQ ID NO: 64135 - DNA, 75 bp, synthetic construct
  source 1..75: mol_type = other DNA
atgaaaaacattgcggcagttggggttcttgaacgtattcgcagacttgcaccacagggggcggttccaccgttc

SEQ ID NO: 64136 - DNA, 75 bp, synthetic construct
  source 1..75: mol_type = other DNA
ccgtaatgatattcctgaggggattgcgacgctgggcgcttttatgggttattcccattcacatattggttttga

SEQ ID NO: 64137 - DNA, 75 bp, synthetic construct
  source 1..75: mol_type = other DNA
ttgcgcttcttcgtgggccgctgaactggcgaagctcttacacttgaccagcttcaacaacaaaatggcaaagcg

SEQ ID NO: 64138 - DNA, 75 bp, synthetic construct
  source 1..75: mol_type = other DNA
atgaaaaacattgcggcagttggggttcttgaacgtattcgcagacttgcaccacaggggtcggttccaccgtac

SEQ ID NO: 64139 - DNA, 75 bp, synthetic construct
  source 1..75: mol_type = other DNA
tcttgaacaagataatcaggcgcatggttataaactggtagcggtgggaaatacgtttgtcttccctatggcggg

SEQ ID NO: 64140 - DNA, 75 bp, synthetic construct
  source 1..75: mol_type = other DNA
ttagtttaggacttattgctctggcggtgggtaatgcatatgctggaccgtttattcagcatgaagataaggaac

SEQ ID NO: 64141 - DNA, 75 bp, synthetic construct
  source 1..75: mol_type = other DNA
agcagctttctgatgcaatcaccgcgatgcataaccaggacagcgatctggcgaagcgcgtgatcgaaggcgaca

SEQ ID NO: 64142 - DNA, 75 bp, synthetic construct
  source 1..75: mol_type = other DNA
tgatagagggattatttggaatgatcccaatataggtattgtttggcctgaaagagaaaatatagttttatcgaa

SEQ ID NO: 64143 - DNA, 75 bp, synthetic construct
  source 1..75: mol_type = other DNA
acctacttttggcaagtgggttggggtgaatttatctgctgagaataagcgccagttgtggatccctgaaggatt

SEQ ID NO: 64144 - DNA, 75 bp, synthetic construct
  source 1..75: mol_type = other DNA
atgtatgcggcagaaagtgaagtggtttatcagtttcgttacagaggggatagttattcagtacctgaagatgat

SEQ ID NO: 64145 - DNA, 75 bp, synthetic construct
  source 1..75: mol_type = other DNA
ttctggctatgaaggactatctggtaggtgggcactcccgtaaggaggtctgcgagaaataccagatgaataatg

SEQ ID NO: 64146 - DNA, 75 bp, synthetic construct
  source 1..75: mol_type = other DNA
gcgcgagaacaagcagcatccggacgccacgctgccgcactatgacgctggcggtaagctgatgctgcccaccac

SEQ ID NO: 64147 - DNA, 75 bp, synthetic construct
  source 1..75: mol_type = other DNA
atgtcagaatcagataacatcacgcgtaacttactcggtaaactattacgtaccgagatttcgattattcgtagt

SEQ ID NO: 64148 - DNA, 75 bp, synthetic construct
  source 1..75: mol_type = other DNA
ggcaacgctgttaagaacagcaatgctggattattataaccaggacactacgggaacctcggggatagtcggcat

SEQ ID NO: 64149 - DNA, 75 bp, synthetic construct
  source 1..75: mol_type = other DNA
gacctacccgcgcatcaaaagagcgcaggctggtatcgaaagcacaaaaatcaagcgtgaaggcgttgcgcggca

SEQ ID NO: 64150 - DNA, 75 bp, synthetic construct
  source 1..75: mol_type = other DNA
cctctatcagaagcgggtatgcgaagggtatcactgtcagaccccgtagcattgcacttaattacattgtgaggg

SEQ ID NO: 64151 - DNA, 75 bp, synthetic construct
  source 1..75: mol_type = other DNA
cgcgcagcagcgcgtttaaatatgtctcagcctccgctcagtattcatattaaagagctggaaaatcaactcggc

SEQ ID NO: 64152 - DNA, 75 bp, synthetic construct
  source 1..75: mol_type = other DNA
agaaagcaaaagtattaaaataccacttcatttcatgcgtggagttatcccaacgacggaaatgaaaaaatattg

SEQ ID NO: 64153 - DNA, 75 bp, synthetic construct
  source 1..75: mol_type = other DNA
tcgtgccgtattgtctcaggaacaggacggcattaaatcgcacacccacagcgccagcgcatccagtacggattt

SEQ ID NO: 64154 - DNA, 75 bp, synthetic construct
  source 1..75: mol_type = other DNA
ttttcataaacgttggtttgggagaaggtgctccagctattggcgttccgttcttctggccgtccgctgcaatgc

SEQ ID NO: 64155 - DNA, 75 bp, synthetic construct
  source 1..75: mol_type = other DNA
attgttgtagccaatgatggttacgacacaaaagatgaatgggagctggcgacaattttcaaaaaaacatacaca

SEQ ID NO: 64156 - DNA, 75 bp, synthetic construct
  source 1..75: mol_type = other DNA
cgggcactggcaaaactcgcaagagcaacatcaaacgaaaaattaagtcaggcttttcatgcgcacctcgaggaa

SEQ ID NO: 64157 - DNA, 75 bp, synthetic construct
  source 1..75: mol_type = other DNA
cccgcaacaagctgggttgctatatggcgcagcaggcgtcgcttaataatattccggtttccgcactggtatcgc

SEQ ID NO: 64158 - DNA, 75 bp, synthetic construct
  source 1..75: mol_type = other DNA
ctcacatggccgtgggcgacggtggcggcacgttgcccacaccagacagtaagcagacccgtctggtgcatgagg

SEQ ID NO: 64159 - DNA, 75 bp, synthetic construct
  source 1..75: mol_type = other DNA
gaagcagagcgacagagagcagcttctgcgcgcaaacgatctgtatgtaaagagatcaaggttttcgtcagacca

SEQ ID NO: 64160 - DNA, 75 bp, synthetic construct
  source 1..75: mol_type = other DNA
ttttcaaaacattcttcagagcattaagcccttacgactacacactgtattgcaggaagtgggtaaaaccaaatc

SEQ ID NO: 64161 - DNA, 75 bp, synthetic construct
  source 1..75: mol_type = other DNA
ctgacaaaattaacgacagaactcgtcagttattgcgctgatgtgtccaggaaacttaacgataaaaggagctgg

SEQ ID NO: 64162 - DNA, 75 bp, synthetic construct
  source 1..75: mol_type = other DNA
taccgcgcttcgtgcgctgctgttaagccgcaagaatccgtttggtgatatcaaatcggatggcacggtgaaaac

SEQ ID NO: 64163 - DNA, 75 bp, synthetic construct
  source 1..75: mol_type = other DNA
ccctggggaggaaaaggtgaaagcacaccagaaaatggttaactacattgaagcgttctgcaacaaaatgacgga

SEQ ID NO: 64164 - DNA, 75 bp, synthetic construct
  source 1..75: mol_type = other DNA
tggggatcaagtttacgaaagaagcgaaaagatttttatgtaaacttattggtgaagaaaaacgttatacaacgc

SEQ ID NO: 64165 - DNA, 75 bp, synthetic construct
  source 1..75: mol_type = other DNA
tgtaatggaccgcatggtcatgaacggtggtcgctgggtgaattttaactgggagagctggcgttcgaatgtcag

SEQ ID NO: 64166 - DNA, 75 bp, synthetic construct
  source 1..75: mol_type = other DNA
ctcgttttttcccactgccgcaggggcaaattgccgtcactctgcgtgacgcacaggcctgctttaacctgaatg

SEQ ID NO: 64167 - DNA, 75 bp, synthetic construct
  source 1..75: mol_type = other DNA
atcagcatcagggccattaggctcacctgtaaatatcaccctgccgatatctttcagcaataccaattattgtgt

SEQ ID NO: 64168 - DNA, 75 bp, synthetic construct
  source 1..75: mol_type = other DNA
gatttccctctattgcgcttttaacgaactcgacgaagcgcgttttgtggttaaccgtatcaagacctggcagga

SEQ ID NO: 64169 - DNA, 75 bp, synthetic construct
  source 1..75: mol_type = other DNA
atttacggcgggatgcgcttcttcgaacgccaggaaatcaaagatgcgctctcgtatctgcgcctgattgccaac

SEQ ID NO: 64170 - DNA, 75 bp, synthetic construct
  source 1..75: mol_type = other DNA
ttaaattttgaatctatcttaactgaattacgtaatggtctttcatcaaagccaaatgaaagtggtgttggtcat

SEQ ID NO: 64171 - DNA, 75 bp, synthetic construct
  source 1..75: mol_type = other DNA
gaaagaaatcgtgatcagcgcgccggatggcgcggtgttccgctacgacgcggacgcaggcgcactgagcgccag

SEQ ID NO: 64172 - DNA, 75 bp, synthetic construct
  source 1..75: mol_type = other DNA
gaacaccacgcgcgcgggagccttcaatgtgtggctgccgccatcacccggcgaacaggtggtaattgcctgcat

SEQ ID NO: 64173 - DNA, 75 bp, synthetic construct
  source 1..75: mol_type = other DNA
ctggcgctgcgtggacacactggcctggccacaacacgggtcgaagcagactataaacggcttaaaacgctcatt

SEQ ID NO: 64174 - DNA, 75 bp, synthetic construct
  source 1..75: mol_type = other DNA
tttgcttatgtgctggtcaacctggtggtggatttgctctatttgtggattgatccgcgtatcggacgtggaggt

SEQ ID NO: 64175 - DNA, 75 bp, synthetic construct
  source 1..75: mol_type = other DNA
gtatctggctcgtggccggcatcaccgacatgagaaacggcttcaacggtctggccgcaaaggtccagaacaccc

SEQ ID NO: 64176 - DNA, 75 bp, synthetic construct
  source 1..75: mol_type = other DNA
tattaagtgccgacgctcaaccaaatgctgatggtgtaatgcttgatatgcataaagctatacagcagttggaac

SEQ ID NO: 64177 - DNA, 75 bp, synthetic construct
  source 1..75: mol_type = other DNA
gcgggattcctcgtggtgacgctgttttgtttcaactttatcggcgatggcttgcgtgatgccctcgacccgaaa

SEQ ID NO: 64178 - DNA, 75 bp, synthetic construct
  source 1..75: mol_type = other DNA
tgctgaaatattcggattgacctctgcggaagccagtaaggatatacggcaggcattgaagagtttcgcggggaa

SEQ ID NO: 64179 - DNA, 75 bp, synthetic construct
  source 1..75: mol_type = other DNA
agttgctcgccgaccgctgaaaatgttgctggctgtggcgctggaaccgctgttaagtcgggctgccaataaact

SEQ ID NO: 64180 - DNA, 75 bp, synthetic construct
  source 1..75: mol_type = other DNA
tgcatcacgtgttgccagaacatcaacggaaacacgtgcgcgaaatattgcatttaactttatcgtgagggctgc

SEQ ID NO: 64181 - DNA, 75 bp, synthetic construct
  source 1..75: mol_type = other DNA
atctgttgccagcctcgagcgtgaagaaaagaacaccaaagcacggttgcgggcagcaagaactgcaatactgta

SEQ ID NO: 64182 - DNA, 75 bp, synthetic construct
  source 1..75: mol_type = other DNA
gaattgaatatacggcggcttctctggatgagcttaaccgggcgatcaatgatgcggagtcggtactggggacaa

SEQ ID NO: 64183 - DNA, 75 bp, synthetic construct
  source 1..75: mol_type = other DNA
taactcttcctgatgtggcatggctgaggaacaagatccgtgattacgcgagcgcggaaccggagatagaaaatg

SEQ ID NO: 64184 - DNA, 75 bp, synthetic construct
  source 1..75: mol_type = other DNA
actgcgccatctcacctgtctggtggacagtaacggcatgttgagcgaaaccggctgggaaaaattgctcccggt

SEQ ID NO: 64185 - DNA, 75 bp, synthetic construct
  source 1..75: mol_type = other DNA
tatacatataggtcgattttgtagtattgcatcaaatgtaaaaataatgggtggaaatcatcctttgaatcgttt

SEQ ID NO: 64186 - DNA, 75 bp, synthetic construct
  source 1..75: mol_type = other DNA
aacgcggtgaggagcatatcaagctcagtaccgagtatggcggtaagacacaacttaatcttggccataacgttg

SEQ ID NO: 64187 - DNA, 75 bp, synthetic construct
  source 1..75: mol_type = other DNA
gcgctcgttccgtcgattccgcgaactaatggacacgcgtcgcggttcaaactcgtcacttgaacttgcgctaaa

SEQ ID NO: 64188 - DNA, 75 bp, synthetic construct
  source 1..75: mol_type = other DNA
tgcaaactggtagtactggaccagaacatccagtcgatgaccaaattcaagcagattatcggtcgtggtacacgc

SEQ ID NO: 64189 - DNA, 75 bp, synthetic construct
  source 1..75: mol_type = other DNA
caaggaccgcagttatttattctggaagatgtgactggcgcaggtaaaacagaagcggcgcttatcctggcgcac

SEQ ID NO: 64190 - DNA, 75 bp, synthetic construct
  source 1..75: mol_type = other DNA
tgccttggcatacgaattatctgccgacattcgtttgggtaaagttagtgacgacttaatggaactattgcgtta

SEQ ID NO: 64191 - DNA, 75 bp, synthetic construct
  source 1..75: mol_type = other DNA
gcgtaacccgcgagacattcaaaataacccgcaaatcccccccaaataacccgcaaccccatcaggaaaatgggg

SEQ ID NO: 64192 - DNA, 75 bp, synthetic construct
  source 1..75: mol_type = other DNA
atgagtgattcgcgactgctgccgaccggctcatcaccgcttgaggtcgccgccgcaaaagcctgtgcggaaatt

SEQ ID NO: 64193 - DNA, 75 bp, synthetic construct
  source 1..75: mol_type = other DNA
gcctgctgttccggcaggaaagacgaagtaaggaaaaaggtatggatgattcagatcgtgctcaggctgtgatgg

SEQ ID NO: 64194 - DNA, 75 bp, synthetic construct
  source 1..75: mol_type = other DNA
aggtgctccagctattggcgttccgttcttctggccgtccgctgcaatgccaaatactgtaatcgacagctggtc

SEQ ID NO: 64195 - DNA, 75 bp, synthetic construct
  source 1..75: mol_type = other DNA
cgggtgttgctgggtgagaataaagtatgtggcctgacgcgtgggcaagatgctaaagcagcttatgacgcgggc

SEQ ID NO: 64196 - DNA, 75 bp, synthetic construct
  source 1..75: mol_type = other DNA
atgccatttgctcgttatttctgcattttcataaacgttggtttgggagaaggagctccagctattggcgttccg

SEQ ID NO: 64197 - DNA, 75 bp, synthetic construct
  source 1..75: mol_type = other DNA
atgatactgtccggtttatcactttgggagaaaggcagtccgctgcataaatctacgcaacaggttagaacccaa

SEQ ID NO: 64198 - DNA, 75 bp, synthetic construct
  source 1..75: mol_type = other DNA
cgttctattcccacgaataattgcctttacaccggggttgggggatgatagtgcaacattaaaatctaaggtgtt

SEQ ID NO: 64199 - DNA, 75 bp, synthetic construct
  source 1..75: mol_type = other DNA
gttcccggtggtcatggtgcactcatcggtttgccagaaagtgaagacgtagccgccgctctgcagtgggctatt

SEQ ID NO: 64200 - DNA, 75 bp, synthetic construct
  source 1..75: mol_type = other DNA
aacgttcaatcaaataccaaacaagagtatttaacgaacatataaatgaactagtgatcaccagaagaaatggta

SEQ ID NO: 64201 - DNA, 75 bp, synthetic construct
  source 1..75: mol_type = other DNA
atgcctgtcgactttctaacctctgaccaaaaacagaattacggttgttatgctgcagaacctaatgacgtgcaa

SEQ ID NO: 64202 - DNA, 75 bp, synthetic construct
  source 1..75: mol_type = other DNA
acaaacttttctcagtttgccgggaatataggcgaaggtgcgggacacgcaattaactttcatgatggcatcgcc

SEQ ID NO: 64203 - DNA, 75 bp, synthetic construct
  source 1..75: mol_type = other DNA
tgaaatatggcccggcactcgccagccacgccccgcaaggcaaactcctgctggtgaccccgcgtcctggcacca

SEQ ID NO: 64204 - DNA, 75 bp, synthetic construct
  source 1..75: mol_type = other DNA
cgcccggcaccttccggcttgatattggtgtactggaaagcggcatcacagaggcaatgtatcaggaaatggaac

SEQ ID NO: 64205 - DNA, 75 bp, synthetic construct
  source 1..75: mol_type = other DNA
atggtaatgaagatcagctgtatatcgacactctgcgtgaggctctgccagcacacgtcgccatctggaaggctt

SEQ ID NO: 64206 - DNA, 75 bp, synthetic construct
  source 1..75: mol_type = other DNA
gaaacagtggcatctggaatactacgttgatgaaccgaccttcttcgacaaagtgatggacaacatgtctggttc

SEQ ID NO: 64207 - DNA, 75 bp, synthetic construct
  source 1..75: mol_type = other DNA
ttaaacaacaaaaattagctcagggattagagctagctataaacgctttgaataaccaactcacttcacaacacc

SEQ ID NO: 64208 - DNA, 75 bp, synthetic construct
  source 1..75: mol_type = other DNA
gtggttctggaactagattgtggccactttctcgaacactatatccgaagcaattcctatcgttaactagtcgtt

SEQ ID NO: 64209 - DNA, 75 bp, synthetic construct
  source 1..75: mol_type = other DNA
ccgattgctgaagcactggcaggcggtcgctctcttgatgagtttatcatcaaaaaagatgcttccagctctgct

SEQ ID NO: 64210 - DNA, 75 bp, synthetic construct
  source 1..75: mol_type = other DNA
aatggcggaactcttgacctgaacggatataatcagtctttcaataaaattgctgcaactgattcaggagcagta

SEQ ID NO: 64211 - DNA, 75 bp, synthetic construct
  source 1..75: mol_type = other DNA
tcttgtctttaatgataaaaagacctatcgagtaaacggggatgatttcacctttaaaggtgccggtgttgatac

SEQ ID NO: 64212 - DNA, 75 bp, synthetic construct
  source 1..75: mol_type = other DNA
ttttatcatgctctttgttattaagcccactaactacctatgctaaaaattatccttgttctgggaaaaagggag

SEQ ID NO: 64213 - DNA, 75 bp, synthetic construct
  source 1..75: mol_type = other DNA
taattgtgacaaaatgggtaagcgtaaactgaccgccgtatgtagccatcagacgaaaattggtaacttagacgc

SEQ ID NO: 64214 - DNA, 75 bp, synthetic construct
  source 1..75: mol_type = other DNA
tatgcgctaaggaggaagcaggcgcgcctgggcttactgctggtattgatgctgaattcaggcatgcggtttgtg

SEQ ID NO: 64215 - DNA, 75 bp, synthetic construct
  source 1..75: mol_type = other DNA
ccgacgttcggggagtcctgtgcacagtgggtgtttgacctggtggcggccctgtttggctcctacgatgcgcag

SEQ ID NO: 64216 - DNA, 75 bp, synthetic construct
  source 1..75: mol_type = other DNA
ctggtgaacgagttgcgggatattgcggttcagtaccacggaacgcagcaattgcgggagaaaattgccagagca

SEQ ID NO: 64217 - DNA, 75 bp, synthetic construct
  source 1..75: mol_type = other DNA
tcccctgatcgacatgaactacatcaccagcttcaccggtatgactgacaaatggttttacaagctgatcagtga

SEQ ID NO: 64218 - DNA, 75 bp, synthetic construct
  source 1..75: mol_type = other DNA
aatgttgcggagtttgtagaaaaaccagatgttaaaacagcacaggaatatatttcgagtgggaattattactgg

SEQ ID NO: 64219 - DNA, 75 bp, synthetic construct
  source 1..75: mol_type = other DNA
taaagtccaaaatgttaaaaacatagttgacgatctaaaaaagagaaaacgtgctgaatactacatgcatcgtgc

SEQ ID NO: 64220 - DNA, 75 bp, synthetic construct
  source 1..75: mol_type = other DNA
gccgtctaccaaaaacaacacttctggctgcatgttgtgcttttttttatagcagtaacggcgcggcaacagaaa

SEQ ID NO: 64221 - DNA, 75 bp, synthetic construct
  source 1..75: mol_type = other DNA
tgttcggtctggtcaccggaatggcggaggacctgcagagcctggtgggggccacggtggtccgccgccgggtgt

SEQ ID NO: 64222 - DNA, 75 bp, synthetic construct
  source 1..75: mol_type = other DNA
ttttgggccttacccgattaaagattttaatcctacttatgattattctggtgctatatcgacaggtattttttc

SEQ ID NO: 64223 - DNA, 75 bp, synthetic construct
  source 1..75: mol_type = other DNA
agaaattattgaggtgcggtctggggcatatttaggtgaagatgatgtcaccaggatatctaatgatgttggcta

SEQ ID NO: 64224 - DNA, 75 bp, synthetic construct
  source 1..75: mol_type = other DNA
gcttgctgctcttaaagcgatttcatcaggtgaggatccaatactgcttgtactagcagccgatcatgaaataca

SEQ ID NO: 64225 - DNA, 75 bp, synthetic construct
  source 1..75: mol_type = other DNA
ttgtcaggctggggagagcataacgcgcgataccgcgctggtacgttcctgtgggctctattttgcgccgcagcg

SEQ ID NO: 64226 - DNA, 75 bp, synthetic construct
  source 1..75: mol_type = other DNA
gtttctcgacggtgtgtatgtcgagcaatcccacggctcagcgcgtttccgctgggtcaaggcgccgaccagccc

SEQ ID NO: 64227 - DNA, 75 bp, synthetic construct
  source 1..75: mol_type = other DNA
tttgctggctgtgttgtgttgttgcccatagcgaaatgctgaatgtcgaacaatccgggctgtttcgcgcctggt

SEQ ID NO: 64228 - DNA, 75 bp, synthetic construct
  source 1..75: mol_type = other DNA
aagatgctgcggtaatggataagtttaatatcccccgtcatatgctgtttgatgtgcaaatgcctggcaccgtcc

SEQ ID NO: 64229 - DNA, 75 bp, synthetic construct
  source 1..75: mol_type = other DNA
ggaggatttgcagagcctggtgggtgccacggtggtccgccgccgggtgtatgcccgttttctggatgcggtgaa

SEQ ID NO: 64230 - DNA, 75 bp, synthetic construct
  source 1..75: mol_type = other DNA
gatggcttcagcgttccgcccgtacggcggcaactggcagcaccagaacgcccgtcgggaccaacaccaattgag

SEQ ID NO: 64231 - DNA, 75 bp, synthetic construct
  source 1..75: mol_type = other DNA
tgattattcctgtccggacagaaaagggtaatggctggatccatgccacgccgatcagcaaagaggtgtttaaag

SEQ ID NO: 64232 - DNA, 75 bp, synthetic construct
  source 1..75: mol_type = other DNA
catggcctccggacctggctgagtttgtggcgctgatttcagaaagcggggccaatccatttggcctgacggtgg

SEQ ID NO: 64233 - DNA, 75 bp, synthetic construct
  source 1..75: mol_type = other DNA
aaggagtcggggctgtactacaaccggaaccggtactacgatccgttgcaggggcggtatatcactcaggacccg

SEQ ID NO: 64234 - DNA, 75 bp, synthetic construct
  source 1..75: mol_type = other DNA
ctggcgcaatgagtcctggcgatacgacggaagcgataaatacccgtggtctcagcctgtgctgtatcacatttg

SEQ ID NO: 64235 - DNA, 75 bp, synthetic construct
  source 1..75: mol_type = other DNA
acgatgccagctcaaacactgctatcgattatcgtcaggaaatgaacgttatccacgaaattgtggccgagtgcg

SEQ ID NO: 64236 - DNA, 75 bp, synthetic construct
  source 1..75: mol_type = other DNA
ctggaggtagtggtacaagactttggccattatcgagaacgatgtatcctaaacaatttctgaaaatatttggtc

SEQ ID NO: 64237 - DNA, 75 bp, synthetic construct
  source 1..75: mol_type = other DNA
agcaaagctgttggcaggctacttgctgctggtggcgtatacaatgggaacattgaaggattcagagatactgcg

SEQ ID NO: 64238 - DNA, 75 bp, synthetic construct
  source 1..75: mol_type = other DNA
atgatacctgtatggagcacagcctgcccggactgggcagagcgcctgaaaaaggggctgtcgattattccggat

SEQ ID NO: 64239 - DNA, 75 bp, synthetic construct
  source 1..75: mol_type = other DNA
atgtttgtcatggattacgccggagagctggacgacctcacgctgccgctgctggcgtggttatccgaaaatcag

SEQ ID NO: 64240 - DNA, 75 bp, synthetic construct
  source 1..75: mol_type = other DNA
atgctgttaagtatgctgcatgatattcatcaggaaaacgccatctatttgatggtgaggagactgcgtgactga

SEQ ID NO: 64241 - DNA, 75 bp, synthetic construct
  source 1..75: mol_type = other DNA
cctgttcattgacgaaatggcgcatccgttacagccggttcgtctgtccggtgatgaacttcacggagaagatcc

SEQ ID NO: 64242 - DNA, 75 bp, synthetic construct
  source 1..75: mol_type = other DNA
atatctgcaatgggcatagcgaactgttctgatatcagcaaatcacagttctatataattgttggcggtatatct

SEQ ID NO: 64243 - DNA, 75 bp, synthetic construct
  source 1..75: mol_type = other DNA
tttcacggctgccaaccgcaaccgctcaatggtgaatatactcactgaacagcaggatgcaccaaaagcagtttc

SEQ ID NO: 64244 - DNA, 75 bp, synthetic construct
  source 1..75: mol_type = other DNA
gtggcgcaggcaggttttatcttaacccgacactggcgggacaccccgcaagggacagaagtctccttctggctg

SEQ ID NO: 64245 - DNA, 75 bp, synthetic construct
  source 1..75: mol_type = other DNA
cttgttttcgttatctggcgcgtagacagtgcgccatcaactaatgacgcttacgcgtcagcagataccattgat

SEQ ID NO: 64246 - DNA, 75 bp, synthetic construct
  source 1..75: mol_type = other DNA
gacccggagcaggagctgacggaccggtgggtggtggagcagatgtcagcgctgacggccatgacggcctcgttt

SEQ ID NO: 64247 - DNA, 75 bp, synthetic construct
  source 1..75: mol_type = other DNA
ccagtgatgcggcacggatagccatgtctgcactggcagaggaaaccggtcggcgtactgcggatattgataata

SEQ ID NO: 64248 - DNA, 75 bp, synthetic construct
  source 1..75: mol_type = other DNA
acccgattgacggcagcggctttgagatgaacgggaagggcagcagtgccagaccgtcgctgacggtgtccaatc

SEQ ID NO: 64249 - DNA, 75 bp, synthetic construct
  source 1..75: mol_type = other DNA
ccctcagcatgtggccggataaccgtatcgcccgtgacgcgcactatctttaccggtatgaccgtcacggcaggc

SEQ ID NO: 64250 - DNA, 75 bp, synthetic construct
  source 1..75: mol_type = other DNA
taaataaatacatcagcgaaagcggaatttgctcacgccgcgaagcggatcgctatatcgagcaaggcaatgtgt

SEQ ID NO: 64251 - DNA, 75 bp, synthetic construct
  source 1..75: mol_type = other DNA
gccagggctcttacaccccggcacaacatctgcgttttcagcaacgcctgaatgacattaacgatatacaggagt

SEQ ID NO: 64252 - DNA, 75 bp, synthetic construct
  source 1..75: mol_type = other DNA
ctgataaacagcaatacaacgacatcgtgattaacagcggctggctggacaccaatcagcaaaccgtgtttatta

SEQ ID NO: 64253 - DNA, 75 bp, synthetic construct
  source 1..75: mol_type = other DNA
aagccacgcattcgctgggtctgaaaagtgcagcggcccgccaggagataggcgttctgataggtgaactggccc

SEQ ID NO: 64254 - DNA, 75 bp, synthetic construct
  source 1..75: mol_type = other DNA
cagccagtgaaatcgccaggcgtattggtgtcagtcgtgcggtattgtataaatggaaagataaaattatcggca

SEQ ID NO: 64255 - DNA, 75 bp, synthetic construct
  source 1..75: mol_type = other DNA
taaaatcactggatataggggactcaagacttgataaaagagtaaaacatatcctcaatagcctcagtcgttcac

SEQ ID NO: 64256 - DNA, 75 bp, synthetic construct
  source 1..75: mol_type = other DNA
gcgaagctgaaaaatacgcgaatcccatccctagtcgggaatttatcctcgaacatttaaccaaacgtgaaaaac

SEQ ID NO: 64257 - DNA, 75 bp, synthetic construct
  source 1..75: mol_type = other DNA
gatgaaacaggcgatttacgatccagaaaaccgtggtcacttcggtctggcattgcagtcctatgcgcactttac

SEQ ID NO: 64258 - DNA, 75 bp, synthetic construct
  source 1..75: mol_type = other DNA
tatcagtcacctgaacaacagagaaaaaacaaagatcgctgatgccctgagacaaacatatcccctgacagaatt

SEQ ID NO: 64259 - DNA, 75 bp, synthetic construct
  source 1..75: mol_type = other DNA
tggtgatggtaatgcaacggtaaccgcatattatcgacctgttcagtttctgatagatggttcgtggaaaacagc

SEQ ID NO: 64260 - DNA, 75 bp, synthetic construct
  source 1..75: mol_type = other DNA
caatgtatacggagcatggatgactgacagcaatgcagaacagatcgcaatgctgaatcagaagctgacagatta

SEQ ID NO: 64261 - DNA, 75 bp, synthetic construct
  source 1..75: mol_type = other DNA
atgacgtacgctcatttttcgccggactttttactggacgcgatcaactttaatccgctggctgaaagtgtccat

SEQ ID NO: 64262 - DNA, 75 bp, synthetic construct
  source 1..75: mol_type = other DNA
catgctggcgaacacctgtatgtgggattaccggggagaggagtgcggtttcaccggcggggcggtggcggatga

SEQ ID NO: 64263 - DNA, 75 bp, synthetic construct
  source 1..75: mol_type = other DNA
ttgatgctcttaaaagccaggcggaaatgaccatgcttggaaagcaacattctgtagaggtgaagcagagggaat

SEQ ID NO: 64264 - DNA, 75 bp, synthetic construct
  source 1..75: mol_type = other DNA
atgaaaaatcaagcaacccgcctcatacgcttaccagaagttctcgaacgaactggctacggaaaggcctggatc

SEQ ID NO: 64265 - DNA, 75 bp, synthetic construct
  source 1..75: mol_type = other DNA
atgaatcagcacaatactcgccttattcgtttaccagaggttctaaatcgaaccggttatggtaaagcgtggatc

SEQ ID NO: 64266 - DNA, 75 bp, synthetic construct
  source 1..75: mol_type = other DNA
gtgcagatttcaccggttactcttcgtgttgcgaaggcgtttatatccagacatcaccgacacaataaacccccg

SEQ ID NO: 64267 - DNA, 75 bp, synthetic construct
  source 1..75: mol_type = other DNA
atggtcatttcacctataacgctgaaagcggcgcaggaatttatcgcacagcaccaccgacacaataaaccacca

SEQ ID NO: 64268 - DNA, 75 bp, synthetic construct
  source 1..75: mol_type = other DNA
atgaactggctttcacaaggccgtatggcgagcaggagaagcaaattcttactgccgaagcggtagaatttctga

SEQ ID NO: 64269 - DNA, 75 bp, synthetic construct
  source 1..75: mol_type = other DNA
tgtaagccggaaacgtcagggaataataccaacaaatggtattacggaaacgctgatacaacttttgagccatta

SEQ ID NO: 64270 - DNA, 75 bp, synthetic construct
  source 1..75: mol_type = other DNA
aacggtacaaaacgcgcgttcatgaattttactgccgacgcggataatgctgccgggactgcagaacagatgttt

SEQ ID NO: 64271 - DNA, 75 bp, synthetic construct
  source 1..75: mol_type = other DNA
atgcagcgccggcagaacaacattctgacgaaaacgtcccttttatcccgtgcgttgtctgtcccctgttgtgat

SEQ ID NO: 64272 - DNA, 75 bp, synthetic construct
  source 1..75: mol_type = other DNA
atgcgcgttttctggatgcggtgaattttgtggcaggcaatccggaggctgacccggagcaggagctgacggacc

SEQ ID NO: 64273 - DNA, 75 bp, synthetic construct
  source 1..75: mol_type = other DNA
gtcattgagactggactgggaatcacagagtctgttcatgggcgttattcggccggaggtaaggaagttattgcc

SEQ ID NO: 64274 - DNA, 75 bp, synthetic construct
  source 1..75: mol_type = other DNA
ggtggcagccgtctcgttgcaatgcgtcgggccggggcattacgtcgcacaaccacaatcagaatacgcattcat

SEQ ID NO: 64275 - DNA, 75 bp, synthetic construct
  source 1..75: mol_type = other DNA
gtggagtgtgaaagcccggtggttatctgcaatgagcagcaccgctttatcgtggccgagcaattgcgccagatg

SEQ ID NO: 64276 - DNA, 75 bp, synthetic construct
  source 1..75: mol_type = other DNA
gattttctcgaaatacatttaccagaaccactgcgcaagctttgcaacctgcaaaccttacgcctggaacccact

SEQ ID NO: 64277 - DNA, 75 bp, synthetic construct
  source 1..75: mol_type = other DNA
gggctgtagtggtaagcgtcgatgaccctaaaggtctgatgcgtacacaaatacgcgttgtcggcatgatggatg

SEQ ID NO: 64278 - DNA, 75 bp, synthetic construct
  source 1..75: mol_type = other DNA
tgcgctatggttataagctgatttcgctgctctgggcggtcgtgttgatgatcagcatccacagctatcaaaatt

SEQ ID NO: 64279 - DNA, 75 bp, synthetic construct
  source 1..75: mol_type = other DNA
cgggtaagaacggttttacccgtggtaacccccagaccggcacgcctgccaccgatctggatgatgactactttg

SEQ ID NO: 64280 - DNA, 75 bp, synthetic construct
  source 1..75: mol_type = other DNA
atgatctggcaggagaaaatcgacgcggcgcttgatgcgcggcgtgttgctgatgccttgcgtcgccgttatccg

SEQ ID NO: 64281 - DNA, 75 bp, synthetic construct
  source 1..75: mol_type = other DNA
gctgccaccagtacagatacgtcctggcgctttaaggaaacgaagaaatccggtctgatgggtaccggcggtatt

SEQ ID NO: 64282 - DNA, 75 bp, synthetic construct
  source 1..75: mol_type = other DNA
tgacctgaatgagttcggtacggtatctgctgacgtgacccagtccgtggcccgcattccgggagaagagacgaa

SEQ ID NO: 64283 - DNA, 75 bp, synthetic construct
  source 1..75: mol_type = other DNA
accatggcattcagccagtcatcacacctgttgtacagataaatgcgaatgaatgggtaacactggagcttttaa

SEQ ID NO: 64284 - DNA, 75 bp, synthetic construct
  source 1..75: mol_type = other DNA
ggcgcacaccgaccatgtgaccattcagaactacaagcgcaacgtactgcgtaccccggcgaacaacaaaatccg

SEQ ID NO: 64285 - DNA, 75 bp, synthetic construct
  source 1..75: mol_type = other DNA
aagaacagttggctgaagagaaaaatatcccacaatatttgcgttcacactggcagaaagagacggggtttgcct

SEQ ID NO: 64286 - DNA, 75 bp, synthetic construct
  source 1..75: mol_type = other DNA
cgatagcgaaggaagtatggtctggcgagcctggagctttgagcctgacgccggtgcagggattaacccgtatct

SEQ ID NO: 64287 - DNA, 75 bp, synthetic construct
  source 1..75: mol_type = other DNA
gtgtgaaacgcgagattgcaaccctttcccgcgccctgaaaaaagccgattccgcagccgcaccagaagatgcca

SEQ ID NO: 64288 - DNA, 75 bp, synthetic construct
  source 1..75: mol_type = other DNA
tgacgccattctggccgccgctgacgtggggtgttttgccacctacatcaaccgtcagggcggcgtgctcattcc

SEQ ID NO: 64289 - DNA, 75 bp, synthetic construct
  source 1..75: mol_type = other DNA
tgtttaattactttatcagaaaaggagccgtgcagcaggaaacagaagacgaaatttggtttgtaatgagtgtaa

SEQ ID NO: 64290 - DNA, 75 bp, synthetic construct
  source 1..75: mol_type = other DNA
ggttcaatctgtagttaatgattatgttacagataaaaatttcctcagcgccttgattgacgaaggattattgac

SEQ ID NO: 64291 - DNA, 75 bp, synthetic construct
  source 1..75: mol_type = other DNA
aaaggaaaaacaggcagaaaattaatgactgcttccgttgctttatctgtgagtctttcagccttacccgcagag

SEQ ID NO: 64292 - DNA, 75 bp, synthetic construct
  source 1..75: mol_type = other DNA
ggaacgtcgtcgcctgtcacggcgctgctgccgcagggggagagtgcgatgctgcctgtttccacgccggaaatg

SEQ ID NO: 64293 - DNA, 75 bp, synthetic construct
  source 1..75: mol_type = other DNA
atgagtaaaaagtttacaatgacactcctgtcatcttctctggccgggcttctggtgatgagtggtggggtgagt

SEQ ID NO: 64294 - DNA, 75 bp, synthetic construct
  source 1..75: mol_type = other DNA
caaacacagacgaaggcaagcgaattaattcgcatcttcaccacgacgaagagcgtcggatcaggctggaaaaac

SEQ ID NO: 64295 - DNA, 75 bp, synthetic construct
  source 1..75: mol_type = other DNA
atcattatggtcgtattctcgggcaggtttatgcaccagacggaatgaatgttaatcagtttatggtccgtgcag

SEQ ID NO: 64296 - DNA, 75 bp, synthetic construct
  source 1..75: mol_type = other DNA
aaggaacgttcacccgtaaacaggccactgcggtggctgccgcatacaccaatgtcgccatcgaagacgaccaga

SEQ ID NO: 64297 - DNA, 75 bp, synthetic construct
  source 1..75: mol_type = other DNA
gcaagacagagaaggcgatatcattgccaccccacgttgggaaaaccaaacgccaccggctgtatctttagtttg

SEQ ID NO: 64298 - DNA, 75 bp, synthetic construct
  source 1..75: mol_type = other DNA
gggtttcctggagagtattttatctgtgaactcaggctgccagatcatcgtttccgatggaagcataataagctt

SEQ ID NO: 64299 - DNA, 75 bp, synthetic construct
  source 1..75: mol_type = other DNA
cccgtcagcgtggtgatatggtggtgatttatgaccgttcgggggaatttgttaaaagttactatgatccctcca

SEQ ID NO: 64300 - DNA, 75 bp, synthetic construct
  source 1..75: mol_type = other DNA
aaaccgatggcagtaaacagagtgcagtcaattattgacgatttgcgtaatcagattatcagccggatggtaaaa

SEQ ID NO: 64301 - DNA, 75 bp, synthetic construct
  source 1..75: mol_type = other DNA
cacaaaccagtgaggcggcggtgatctttaccgtgctcaccagcccggacgtggcgcaggccacgatgtggggcc

SEQ ID NO: 64302 - DNA, 75 bp, synthetic construct
  source 1..75: mol_type = other DNA
gatagcagactcgaccattttggatgctaacaaggctcttgagcatggcataattaattccataaaaactgcaag

SEQ ID NO: 64303 - DNA, 75 bp, synthetic construct
  source 1..75: mol_type = other DNA
acgtacaatctggttacagcagttaggacgtgggttgcgcaaaacgccaaataaagagtttgttcatgtcttaga

SEQ ID NO: 64304 - DNA, 75 bp, synthetic construct
  source 1..75: mol_type = other DNA
taatcagaattttgctgatggacgctcggtaaaccacgacagcgaatttgcgcgaacttatctgtttcgccctat

SEQ ID NO: 64305 - DNA, 75 bp, synthetic construct
  source 1..75: mol_type = other DNA
acctcccttgcgtgggctgcaggtgcacagtttaacctgaatgagagtgttacactggatgtggcttacgaaggt

SEQ ID NO: 64306 - DNA, 75 bp, synthetic construct
  source 1..75: mol_type = other DNA
acgatgtggcgatggggaccgattatcaggttgctgacattctggcatcgcagcatgactgtaagcagcgtcgtg

SEQ ID NO: 64307 - DNA, 75 bp, synthetic construct
  source 1..75: mol_type = other DNA
ttgccatttatatatgtaaaaagcggtttcaggaacgctgaatatatcggcataagaaactggcttgctggcatt

SEQ ID NO: 64308 - DNA, 75 bp, synthetic construct
  source 1..75: mol_type = other DNA
atggagatgtattttaaaagaatgaaagatgagtggaccggacttgtcgaacaggcagatccgcccattcgtgct

SEQ ID NO: 64309 - DNA, 75 bp, synthetic construct
  source 1..75: mol_type = other DNA
ggggcggtgatggtgggctcaccagtgctgaacgtcagcgtctgaaagagctggaacgtgaaaatcgtgaactgc

SEQ ID NO: 64310 - DNA, 75 bp, synthetic construct
  source 1..75: mol_type = other DNA
atctgtgcacgttattgcggcgaaagcatatcccgcgccattgcatttggcggtgcgttcaacgtggatttatgg

SEQ ID NO: 64311 - DNA, 75 bp, synthetic construct
  source 1..75: mol_type = other DNA
cgagcaggacaaactgtggtgtggcatcagcgatggtgcgattgacgtggtggcgaccgatcactgcaccttctc

SEQ ID NO: 64312 - DNA, 75 bp, synthetic construct
  source 1..75: mol_type = other DNA
cgcccggttccgatggcgacgtggtgattatcgacccacgtcagagccaacaaattcagcatcgccatctccacg

SEQ ID NO: 64313 - DNA, 75 bp, synthetic construct
  source 1..75: mol_type = other DNA
aataataatactgatgcgggttctgttattgaaattaaagaatcttccagtataaagcgaacgttcacaggcaat

SEQ ID NO: 64314 - DNA, 75 bp, synthetic construct
  source 1..75: mol_type = other DNA
gatgattattgggcaagggataatgatatccgcaatctaaggagaaatttctcaggcaatattacgattgcaacc

SEQ ID NO: 64315 - DNA, 75 bp, synthetic construct
  source 1..75: mol_type = other DNA
aagagaggctggcctcattaatctcggaacgagtaaaagaagttgcggctgaaattctaaggaaagaaaaaaccc

SEQ ID NO: 64316 - DNA, 75 bp, synthetic construct
  source 1..75: mol_type = other DNA
tcaagtacaaccgagacagcaaaggcgagcgtcacgtaatagttaacggcgtcctgatggtaacgccaggaaaaa

SEQ ID NO: 64317 - DNA, 75 bp, synthetic construct
  source 1..75: mol_type = other DNA
ggtttcggctcccgtaaagaggaatacgtcgacagcaccggtgacccgaaagcattgttctggaaggcgcgcaag

SEQ ID NO: 64318 - DNA, 75 bp, synthetic construct
  source 1..75: mol_type = other DNA
ttattaactgtggttcgtcttcgattaagttttccgtgctcgatgccagcgactgtgaagtattaatgtcaggta

SEQ ID NO: 64319 - DNA, 75 bp, synthetic construct
  source 1..75: mol_type = other DNA
aggcagacatctgcgaatcacttcacgaccacgccgacgaactctaccgtagttgcctcgcacgcttcggcgatg

SEQ ID NO: 64320 - DNA, 75 bp, synthetic construct
  source 1..75: mol_type = other DNA
agaagcgagtgacaggcaccagtgagcgacgagagcagatcattcaacgcctgcgccagcaaggaagtgtgcaag

SEQ ID NO: 64321 - DNA, 75 bp, synthetic construct
  source 1..75: mol_type = other DNA
tgaaaggtgaaacgaatgcgcaaagggaaaaaattcagaaattgatccctgcggttctggcaattcttcctcgcg

SEQ ID NO: 64322 - DNA, 75 bp, synthetic construct
  source 1..75: mol_type = other DNA
ggcccggcctggtatctgcttgactgctcccgcgcggtaaaaccgctgatttatcaggatcgccgcaaggccgaa

SEQ ID NO: 64323 - DNA, 75 bp, synthetic construct
  source 1..75: mol_type = other DNA
tcatcgtaaagaagatcttaataatgatgtcgtcagggttggtgcactacctactgcggcactggggatattacc

SEQ ID NO: 64324 - DNA, 75 bp, synthetic construct
  source 1..75: mol_type = other DNA
gggacatgagcaccgaagattatctggtcaagcgtgcaaaagagggcctggaagagcgtctggcctttttattcc

SEQ ID NO: 64325 - DNA, 75 bp, synthetic construct
  source 1..75: mol_type = other DNA
gcgcagtcgttcaggtacgctgattgcttacgggcgctatccggatacgtatctgcctgcccagacggattccat

SEQ ID NO: 64326 - DNA, 75 bp, synthetic construct
  source 1..75: mol_type = other DNA
gcagcaacgcaacgatatgggcgatttagccatgagggctaacgtcgctctttctcagggaccggaagcctacag

SEQ ID NO: 64327 - DNA, 75 bp, synthetic construct
  source 1..75: mol_type = other DNA
gtcagcaaactcgatgccaggcgtaaacagaccagcaaaatttccccttattttgttccctaccctgcaactgtc

SEQ ID NO: 64328 - DNA, 75 bp, synthetic construct
  source 1..75: mol_type = other DNA
ataggtaaagttctttcagatgttcgtgatcagcttgatattccttatcttgatgattatgggcagcggcgcttg

SEQ ID NO: 64329 - DNA, 75 bp, synthetic construct
  source 1..75: mol_type = other DNA
cgtctggattaattttacagtgcggtcagttgaatggctcccctaatgtatcttcaacatacgggatgaggttcc

SEQ ID NO: 64330 - DNA, 75 bp, synthetic construct
  source 1..75: mol_type = other DNA
ttaaatacctggcgtgttggaatgaatgattttgcccgtattgccggggggcaggatagcagaaggaatattctt

SEQ ID NO: 64331 - DNA, 75 bp, synthetic construct
  source 1..75: mol_type = other DNA
gaaaaacgctgggcgaactggtgcgcgaccggatggcggcgtttccggcaagcggtgagatcaacagcaaactgg

SEQ ID NO: 64332 - DNA, 75 bp, synthetic construct
  source 1..75: mol_type = other DNA
acttttggccgctatggtgttggagggatcacgcttgcagaagcgcgtgaacggctcaatgaagccaaaaaaatg

SEQ ID NO: 64333 - DNA, 75 bp, synthetic construct
  source 1..75: mol_type = other DNA
gcgcttattaatccgaacatccgggttaacggacttattcagctggatcaggcttccgtgtatcgtaccgccttg

SEQ ID NO: 64334 - DNA, 75 bp, synthetic construct
  source 1..75: mol_type = other DNA
tgccgacgcggatttgtccgcctttatcgaaccactggacaccctccgggagattgtcaccgaccaggacatgcc

SEQ ID NO: 64335 - DNA, 75 bp, synthetic construct
  source 1..75: mol_type = other DNA
taatcaccgcgttgattgacggcaagccacaatacttacgcattgaaatgagtggtcagcatgctcgtttgattc

SEQ ID NO: 64336 - DNA, 75 bp, synthetic construct
  source 1..75: mol_type = other DNA
gacagaggccaaattattaactgattttacacaggctccacagaaaggtaacccgtcgtggcttgccagccaagc

SEQ ID NO: 64337 - DNA, 75 bp, synthetic construct
  source 1..75: mol_type = other DNA
atgaccccgtttggcgacagcgattatgctgttgcaaacaaaacccagaactttgaagtcactgcacagtaccag

SEQ ID NO: 64338 - DNA, 75 bp, synthetic construct
  source 1..75: mol_type = other DNA
gcaatgcacctgaacccgaacgcaggtgtgaaacgcgagattgcaaccctttcccgcgccctgaaaaaagccgat

SEQ ID NO: 64339 - DNA, 75 bp, synthetic construct
  source 1..75: mol_type = other DNA
accaccagtgaacgtcagggccgcgtaattgaccgcgaccaggcggggtctatggagctgaaaaaacgtcagggg

SEQ ID NO: 64340 - DNA, 75 bp, synthetic construct
  source 1..75: mol_type = other DNA
aaggcgcttatgcgatggggcatgaggatgggaaggacaaaacggtaattgcagtgatgaaagccatcatagccg

SEQ ID NO: 64341 - DNA, 75 bp, synthetic construct
  source 1..75: mol_type = other DNA
caaagttgtagacttttatcgtctccagtttcgtgtggcaagaaaaacactgattgaattacttaatgcagaaaa

SEQ ID NO: 64342 - DNA, 75 bp, synthetic construct
  source 1..75: mol_type = other DNA
agacaaattggccaacaactcaattaccaccaggatatacttgtgcagaaccctatttattcccagacattaata

SEQ ID NO: 64343 - DNA, 75 bp, synthetic construct
  source 1..75: mol_type = other DNA
aaactgatatttctgatgtgtctctcgaactgatcgccgctatcaaacagggctatctcaccgttaaatcagctg

SEQ ID NO: 64344 - DNA, 75 bp, synthetic construct
  source 1..75: mol_type = other DNA
agactgatatttctgatgtgtcactcgaactgatagccgctatcaaacagggttatctcaccgttaaagctgctg

SEQ ID NO: 64345 - DNA, 75 bp, synthetic construct
  source 1..75: mol_type = other DNA
gctctccggtaccgtagattctcaggcacagagcgaccgtgctgaaagtatcgccaaagcggtagatggtgtgaa

SEQ ID NO: 64346 - DNA, 75 bp, synthetic construct
  source 1..75: mol_type = other DNA
gatatcgtgaccctgccgaaaggacaggcctttgctctgctggaagggggacagttgtggaaaatccgtatgccc

SEQ ID NO: 64347 - DNA, 75 bp, synthetic construct
  source 1..75: mol_type = other DNA
catacagcgtaaaaatgaagtggttaattttttacgtaataagaattttcataatcttgcggatatgcccaatat

SEQ ID NO: 64348 - DNA, 75 bp, synthetic construct
  source 1..75: mol_type = other DNA
tgagtacagatgaccaatccatcactaaccagcaaatgcaaattgaagaggcagggtacaacattgctaaatggt

SEQ ID NO: 64349 - DNA, 75 bp, synthetic construct
  source 1..75: mol_type = other DNA
tgattcgtcatctcggaacgaatgctgaattcatgttctacggcatcaaaaacaacccgacgaagattaaatcgc

SEQ ID NO: 64350 - DNA, 75 bp, synthetic construct
  source 1..75: mol_type = other DNA
acgcagaaatccgacactgtatcgtcacatctggcttggtgagccagtaagcgcaagtgatatggcaatcatcaa

SEQ ID NO: 64351 - DNA, 75 bp, synthetic construct
  source 1..75: mol_type = other DNA
gcgccaccaacagcacgtctgaagcactggccgcaacgccgaaagcggtcaaggcagcctatgaccttgctaacg

SEQ ID NO: 64352 - DNA, 75 bp, synthetic construct
  source 1..75: mol_type = other DNA
tgagcatcttgaactctgctgtggtaaggcaaggctggtgctgacgaaggacggaagcatatttctcaacggtac

SEQ ID NO: 64353 - DNA, 75 bp, synthetic construct
  source 1..75: mol_type = other DNA
gacttccgcgcccaggcggacgccatcaaaaaactgaccgaacagtacaacgtgacctatatcggcatcgactcg

SEQ ID NO: 64354 - DNA, 75 bp, synthetic construct
  source 1..75: mol_type = other DNA
ccaggacggcagggagcggggacggcgctggagaaccattttgcggtgatcccggcagacagaacatggcgacca

SEQ ID NO: 64355 - DNA, 75 bp, synthetic construct
  source 1..75: mol_type = other DNA
acagagcgtttttttgtatctagcaaacatgaaattaaagtgaagttgctatttgcgaatgatgattttctctca

SEQ ID NO: 64356 - DNA, 75 bp, synthetic construct
  source 1..75: mol_type = other DNA
tttactagtatgaatattacacatgtttatgaaaaagatgaagggatatatgatgcgatgaataagggccgaatg

SEQ ID NO: 64357 - DNA, 75 bp, synthetic construct
  source 1..75: mol_type = other DNA
atgtcagacatcacaatctcccgtccggaagtggtcaccgggcatacggacgttatctgctccaccagtatccaa

SEQ ID NO: 64358 - DNA, 75 bp, synthetic construct
  source 1..75: mol_type = other DNA
gttggggtgaaagatgcgctgaaagggcaggtggcggtggcgtttgtcattccgaaagagagcgacagtctggaa

SEQ ID NO: 64359 - DNA, 75 bp, synthetic construct
  source 1..75: mol_type = other DNA
gggtcgagacagagaacggcgagcgggaaaaagcgcagcggcgcagcctggcagagacgctccagcaggaaggga

SEQ ID NO: 64360 - DNA, 75 bp, synthetic construct
  source 1..75: mol_type = other DNA
cacgctgcctgagtctctgtatggtgaaaatattgtattggcgaactgtgtggcggatgacccagcgttacccag

SEQ ID NO: 64361 - DNA, 75 bp, synthetic construct
  source 1..75: mol_type = other DNA
taggtggcgaaggtatcgactttccggcagatcacagccgtgcccggcagaagctgttccgcttcctggataacc

SEQ ID NO: 64362 - DNA, 75 bp, synthetic construct
  source 1..75: mol_type = other DNA
ggtgcgatcgcatcgttcaggccccggctccttcgcgccccatcgaacgggggatcgccggaccggggctgctgg

SEQ ID NO: 64363 - DNA, 75 bp, synthetic construct
  source 1..75: mol_type = other DNA
atgtcaggtataatttcaagtgcaacagaattcttcaataatacactccattcaaatcaatacgaaattaaagat

SEQ ID NO: 64364 - DNA, 75 bp, synthetic construct
  source 1..75: mol_type = other DNA
ccactcctttctctgttgatattctgcttgccattgagcaaaccgccagcgagttcggctggaatagttttttaa

SEQ ID NO: 64365 - DNA, 75 bp, synthetic construct
  source 1..75: mol_type = other DNA
ggcggcacgattgacggcacgctgctgcgttttgcgggtgaatactacaccgatgcagaaagcgatctgtatgaa

SEQ ID NO: 64366 - DNA, 75 bp, synthetic construct
  source 1..75: mol_type = other DNA
tttcgaaaggggcttattactggtatcgccgtgaacaagagaaaaccgcaattattccgggaaatgtgaaggacg

SEQ ID NO: 64367 - DNA, 75 bp, synthetic construct
  source 1..75: mol_type = other DNA
cggggcgggtaaaaaattcatgttctgtggtgactttgatcgcttcattatccgtcgtgtgcgatacatgattct

SEQ ID NO: 64368 - DNA, 75 bp, synthetic construct
  source 1..75: mol_type = other DNA
ccgccgaacagctggagttgatgcgtagtgccttccgggttatccggacggtacgggaaaaacatgcctgtactc

SEQ ID NO: 64369 - DNA, 75 bp, synthetic construct
  source 1..75: mol_type = other DNA
tccaggtactgctgccgggtaataagaagacgaagaccgggcggttgtgggcgtatgttcgtgatgaccgcaatg

SEQ ID NO: 64370 - DNA, 75 bp, synthetic construct
  source 1..75: mol_type = other DNA
gacagaacatggcggccacagccgttgctgaaaccgctggtggacggcccgcagagcgccgtcgtgacgggaccg

SEQ ID NO: 64371 - DNA, 75 bp, synthetic construct
  source 1..75: mol_type = other DNA
cgccatcctgaatgaaaaggacgccgtgaaaaatattcccggtattaccataaaaagtgatattgaggatttttc

SEQ ID NO: 64372 - DNA, 75 bp, synthetic construct
  source 1..75: mol_type = other DNA
ggtgggggtaaataaatcgctgcttgtggggaaaggatatgacgttaaagtcggaaataacgtcaccttcaccgt

SEQ ID NO: 64373 - DNA, 75 bp, synthetic construct
  source 1..75: mol_type = other DNA
gcactggccgaacgaatggggttacgcccgtcagccatcagtcgcctggaaagtaaccctttaggggccagcatg

SEQ ID NO: 64374 - DNA, 75 bp, synthetic construct
  source 1..75: mol_type = other DNA
ttaaccgggacattaacgacagaagaacaaagtgctttaaatcaacaattacagactctcgagcagcaaaaccac

SEQ ID NO: 64375 - DNA, 75 bp, synthetic construct
  source 1..75: mol_type = other DNA
ttaaaccgctggccttgcgcctgatgctgcaactggtgattgtcgttgcactggtggtttacgtgatttatggat

SEQ ID NO: 64376 - DNA, 75 bp, synthetic construct
  source 1..75: mol_type = other DNA
ttctggcttttttcatttctgacaggatattacaaaccacagtttaagaaagaatatgaaatgattaattataat

SEQ ID NO: 64377 - DNA, 75 bp, synthetic construct
  source 1..75: mol_type = other DNA
aagcaatcctttaggggcaagtatgaaaactttggctaaatatgctcatgcctgcggcgcaaccatcgatattcg

SEQ ID NO: 64378 - DNA, 75 bp, synthetic construct
  source 1..75: mol_type = other DNA
atgttatcatcttgtattggggtggttatgaaggatggtgcgctgctcaggagttcttcactttttattgcctac

SEQ ID NO: 64379 - DNA, 75 bp, synthetic construct
  source 1..75: mol_type = other DNA
atgcgcaggcccgggacacatggtaccgatcactggaatatgataattttccggaaatcagtgaagcgaatatcc

SEQ ID NO: 64380 - DNA, 75 bp, synthetic construct
  source 1..75: mol_type = other DNA
tggccgtcgatttaaccccagtgtttttaaagatacttatcaatatggttatacaagctcaggtcaaaatacctg

SEQ ID NO: 64381 - DNA, 75 bp, synthetic construct
  source 1..75: mol_type = other DNA
tccggctgcgggaacgttcggcactcaccggaggtgcagcttatcgtcagtggttgtccgcgagtgacaccgtgt

SEQ ID NO: 64382 - DNA, 75 bp, synthetic construct
  source 1..75: mol_type = other DNA
cttatcagcctgtccattctgacagaaaccaacaaccgggagcaggcgcgactctatgccgacgcagaacagacc

SEQ ID NO: 64383 - DNA, 75 bp, synthetic construct
  source 1..75: mol_type = other DNA
atggagaaacctgatacagcaatgaaagctatcacccgcaatctcgatcgcgaaatctggcgtgacctgatgcaa

SEQ ID NO: 64384 - DNA, 75 bp, synthetic construct
  source 1..75: mol_type = other DNA
ccaattttatgtgagaggacaaaggcatgtgtacgaacgggaaatggactctgaaaaattatcagccatttttgg

SEQ ID NO: 64385 - DNA, 75 bp, synthetic construct
  source 1..75: mol_type = other DNA
agcggggtatcgccggaccggggctgctggcccgcgtgctgacctcgaagtatgcagagcacaccccgctgtatc

SEQ ID NO: 64386 - DNA, 75 bp, synthetic construct
  source 1..75: mol_type = other DNA
ccttccgcacgcctccaggagtcggtagcgctgcggggggatcgccagccacaattggaacaggccatcgttatt

SEQ ID NO: 64387 - DNA, 75 bp, synthetic construct
  source 1..75: mol_type = other DNA
cttttcttgaaaagtacaaaccgtttaggaagttttggacaattttatcacctcattatgtatctttaatgcatg

SEQ ID NO: 64388 - DNA, 75 bp, synthetic construct
  source 1..75: mol_type = other DNA
ctgatggaaacggcaacccagtagaaggtataaaagttaatttccgtggaacctccgtcacgctaagcagcacca

SEQ ID NO: 64389 - DNA, 75 bp, synthetic construct
  source 1..75: mol_type = other DNA
cgctgcgccaggtgtgcaagctgtcggcgcgtaaacaaaagcaggtgcaggagtttattggggtgattgcgggta

SEQ ID NO: 64390 - DNA, 75 bp, synthetic construct
  source 1..75: mol_type = other DNA
cgctgcgccaggtgtgcaagctgtcggcgcgtaaacaaaagcaggtgcgggaatttattggggtgattgcgggta

SEQ ID NO: 64391 - DNA, 75 bp, synthetic construct
  source 1..75: mol_type = other DNA
cttgccggttttgccgcagcccagcttctgtgggggccactctccgaccgttatggtcgtaaaccggtgttatta

SEQ ID NO: 64392 - DNA, 75 bp, synthetic construct
  source 1..75: mol_type = other DNA
tatatatcttatcgtcttcactatatgccaatactgcggatatacagggaaaagttactcgtgtacttgacggcg

SEQ ID NO: 64393 - DNA, 75 bp, synthetic construct
  source 1..75: mol_type = other DNA
cagcagagcaaggagttgtgatcaagcctgcacaaaattccaccgttgctgttgcgtcgcaaccgacaattacgt

SEQ ID NO: 64394 - DNA, 75 bp, synthetic construct
  source 1..75: mol_type = other DNA
caaagactcaccagatgtaaagcaggagctgcttaaccgccttttttccggaaaaagaatgaccgggcgggatga

SEQ ID NO: 64395 - DNA, 75 bp, synthetic construct
  source 1..75: mol_type = other DNA
acatcaggaattttattgataaacagcagttaacgaatagtgatactccgaagaaaagcacggtcccaaatgaag

SEQ ID NO: 64396 - DNA, 75 bp, synthetic construct
  source 1..75: mol_type = other DNA
gccaggcgcaaagaggatgatgagcgtctaaatgctgaatcaggtttattaaaaaaactgtcaaaagtagctgaa

SEQ ID NO: 64397 - DNA, 75 bp, synthetic construct
  source 1..75: mol_type = other DNA
tgaacgagtcggttaaatcagagcagtcaccgcgggtggtgctctgggaaatcgacctgacggtacagggcggtg

SEQ ID NO: 64398 - DNA, 75 bp, synthetic construct
  source 1..75: mol_type = other DNA
tgatgaaataacgatgcctggcgacaaggttgttaagtttaaacgcgcatcaactgccacatatatcaataaatc

SEQ ID NO: 64399 - DNA, 75 bp, synthetic construct
  source 1..75: mol_type = other DNA
cgcacagtcgctggttaatcaacgccaggcagaactggactccgtagcaaaacgtcatacgcgttcccgctcact

SEQ ID NO: 64400 - DNA, 75 bp, synthetic construct
  source 1..75: mol_type = other DNA
gccgaagagagcgaactgatgcagtcactgcgccaggtgtgcaagctgtcggcgcgtaaacaaaagcaggtgcag

SEQ ID NO: 64401 - DNA, 75 bp, synthetic construct
  source 1..75: mol_type = other DNA
cttccacttcctgatgatgcaccggaatcacatccaaaagttatggagttgcgtgaactggttcgctggtctgaa

SEQ ID NO: 64402 - DNA, 75 bp, synthetic construct
  source 1..75: mol_type = other DNA
gtgatttaccgctgcccgctcaggacttcagcctgtcgccgcgcgatcccacgctgccaccgtgcggcattatcg

SEQ ID NO: 64403 - DNA, 75 bp, synthetic construct
  source 1..75: mol_type = other DNA
ctgttgatggcgtcgcctggaaggtgcgcatagatgcaggtgtcgcggccctcgactatcgcggattactgaaat

SEQ ID NO: 64404 - DNA, 75 bp, synthetic construct
  source 1..75: mol_type = other DNA
cttgcggagcttaaaggtgctgcctttggtaatcccccgtacagccgcgccagtcagcatgaggggcaatacatc

SEQ ID NO: 64405 - DNA, 75 bp, synthetic construct
  source 1..75: mol_type = other DNA
gcgacactcagaactggcgaaagcgttcgcatacgccctgaaccagtggccggcgctgacgtactatgcagatga

SEQ ID NO: 64406 - DNA, 75 bp, synthetic construct
  source 1..75: mol_type = other DNA
ggttaccactcaaaatatgcaatcagggcagactgtaacagataatgtaatgcgttcaccaagaactatttcaat

SEQ ID NO: 64407 - DNA, 75 bp, synthetic construct
  source 1..75: mol_type = other DNA
gtatcaattgtggtaaaagtgtcaaagttgagaatggaaaaagcaccttctcagatgccgctaatgagcaagctt

SEQ ID NO: 64408 - DNA, 75 bp, synthetic construct
  source 1..75: mol_type = other DNA
tctctgttcaaccatcctacaagccgttttagctctgagcataacgttactaagcgtgagaacggggaagaatgg

SEQ ID NO: 64409 - DNA, 75 bp, synthetic construct
  source 1..75: mol_type = other DNA
gaaggaggaatttcatggcaaccgtctcctgtggctggctgccgtggataaactgattgaaagttttggggaagt

SEQ ID NO: 64410 - DNA, 75 bp, synthetic construct
  source 1..75: mol_type = other DNA
ggttaaaaactgtagcaggaaatcagtcgaacaggcgcgaaaagagcaacgagagctggtggacatggcgaataa

SEQ ID NO: 64411 - DNA, 75 bp, synthetic construct
  source 1..75: mol_type = other DNA
tcggagatctatgcccgccagggtgtagtgttgagtcgttctgtactgtcgggctgggtggatgcgtgttgtcgt

SEQ ID NO: 64412 - DNA, 75 bp, synthetic construct
  source 1..75: mol_type = other DNA
tctaaagatgttactatctctaacggactaagaatccagctaacttttcaggaaattaactttaaagctattgta

SEQ ID NO: 64413 - DNA, 75 bp, synthetic construct
  source 1..75: mol_type = other DNA
gtggccggcgctgatccgctatgcagaagatggctgggtggaggtggataataacattgccgaaaacgccctacg

SEQ ID NO: 64414 - DNA, 75 bp, synthetic construct
  source 1..75: mol_type = other DNA
aatgatttctcctcagagtattgctatcgctgtttcagccacccgtatggatggtcagggcagcgtaatcatgtc

SEQ ID NO: 64415 - DNA, 75 bp, synthetic construct
  source 1..75: mol_type = other DNA
gcatcaacggtcagcgctgaaataccatatcagactttccgtgattttgctgaaaataaaggcgtatttacacct

SEQ ID NO: 64416 - DNA, 75 bp, synthetic construct
  source 1..75: mol_type = other DNA
atgttccatgttgataataattccggcgtggcgaatatgcctgaactggctccggcgcagagtaataccaccacc

SEQ ID NO: 64417 - DNA, 75 bp, synthetic construct
  source 1..75: mol_type = other DNA
gtggtcatcggtccttttatcaacgcaagtgcagtattactgggtggcgttctcggtgcactccttagccaacgc

SEQ ID NO: 64418 - DNA, 75 bp, synthetic construct
  source 1..75: mol_type = other DNA
ccacgccgtctcatccgtgcccgtatccgtttaagtcgggcacgggctgacaaggtcaacgcaaaggtttacatc

SEQ ID NO: 64419 - DNA, 75 bp, synthetic construct
  source 1..75: mol_type = other DNA
ctggaagaaacgcgacaagtggggtgactatgggccactggatcagatgcagctcaccaccgccgcccgctactg

SEQ ID NO: 64420 - DNA, 75 bp, synthetic construct
  source 1..75: mol_type = other DNA
actgaatcggggaaaggagattttgctgatacaaatctcacagaaatcatgattggaaaaatgtcagacacataa

SEQ ID NO: 64421 - DNA, 75 bp, synthetic construct
  source 1..75: mol_type = other DNA
tgttacggtaaaaaatggtgaaagtaccttcacagactccgctaatgctggagctacaaaggcgcttagtagcac

SEQ ID NO: 64422 - DNA, 75 bp, synthetic construct
  source 1..75: mol_type = other DNA
cagaagcccccacacctcaccgactagaaaaagcgcgggaagaggggcaaatcccgcgttcccgtgaactgacct

SEQ ID NO: 64423 - DNA, 75 bp, synthetic construct
  source 1..75: mol_type = other DNA
agaaagctaccttcgccatgtgcttggcgtcatagcagactggccggtcaaccgggtcagcgaactgcttccgtg

SEQ ID NO: 64424 - DNA, 75 bp, synthetic construct
  source 1..75: mol_type = other DNA
ggtcacgttcagttatcccgacagtcacgagccagctctgaacaaacttaccctgacgatcccagagggaatggt

SEQ ID NO: 64425 - DNA, 75 bp, synthetic construct
  source 1..75: mol_type = other DNA
tcagcgttggcacctgcagtgtggttcgcttacagcccggacagaaaaggcatccatccgcagactcatcttgcc

SEQ ID NO: 64426 - DNA, 75 bp, synthetic construct
  source 1..75: mol_type = other DNA
tctggcaggtgctgccggaagatgttcgcctgagtccgcatgtgtacctggcgacaaacagccttcaggggccgt

SEQ ID NO: 64427 - DNA, 75 bp, synthetic construct
  source 1..75: mol_type = other DNA
ggtgtgatatgtactgcaccctcgcggatttgcttgaacaggttcctgagcggacgctaatccagctcaccaatg

SEQ ID NO: 64428 - DNA, 75 bp, synthetic construct
  source 1..75: mol_type = other DNA
tttgaagatgcttttctgtttgccggtacggtggcggaaaatatcgcctatggccaccctcaggcaacggcggac

SEQ ID NO: 64429 - DNA, 75 bp, synthetic construct
  source 1..75: mol_type = other DNA
cgttgcgtcagacccgcacccgtaagccgttccctgaatcactaccccgtgacgaaaagcggctgttgcctgcgg

SEQ ID NO: 64430 - DNA, 75 bp, synthetic construct
  source 1..75: mol_type = other DNA
gttggtaagcttaatggtgctgcaggttctgtactgaacatcaatggcgggaatttgaccctgactgatgatggc

SEQ ID NO: 64431 - DNA, 75 bp, synthetic construct
  source 1..75: mol_type = other DNA
atgccaccattaaacttgtagatgcaagttccgcagttgtaaaggggaatggtggaaaccttcaactgcaggatg

SEQ ID NO: 64432 - DNA, 75 bp, synthetic construct
  source 1..75: mol_type = other DNA
ggcccatgcccggagaaaaatccacgatgtgcatgcaagagcgccaaccgatatcaccacggaagccctgcagcg

SEQ ID NO: 64433 - DNA, 75 bp, synthetic construct
  source 1..75: mol_type = other DNA
gcatggcatcacgccggaacggtgggagctggatgtactagcacgaggtgcgagggtggcatatggcgagaaaaa

SEQ ID NO: 64434 - DNA, 75 bp, synthetic construct
  source 1..75: mol_type = other DNA
gctggaacgagcttatggatgaatattttttctgccgttcagtgagagtggctacggagtggagttacctaaagg

SEQ ID NO: 64435 - DNA, 75 bp, synthetic construct
  source 1..75: mol_type = other DNA
ttatgtcaggcaccagccttgatggtgttgatgttgtgttggcgacaattgatgaacaccgggtcgcacagctgg

SEQ ID NO: 64436 - DNA, 75 bp, synthetic construct
  source 1..75: mol_type = other DNA
aatccgtcctatacgcgttttgatgttacggttgttggtaaagatgcaaccaccctgatctctcgctgccagaaa

SEQ ID NO: 64437 - DNA, 75 bp, synthetic construct
  source 1..75: mol_type = other DNA
aaagcagcgctcaaatcactggagcgtggactggagcgcggtcacgcttctgcccgggtcttccgtttcatccgc

SEQ ID NO: 64438 - DNA, 75 bp, synthetic construct
  source 1..75: mol_type = other DNA
aactgaacaggattaatgtcattcagtcggttgtcgaaaagcgcatgcgccgtcgtgatgctgcacaccaacttg

SEQ ID NO: 64439 - DNA, 75 bp, synthetic construct
  source 1..75: mol_type = other DNA
tcagaatagaactacgtcgtgcgctgtttgacttctctggggggacaaaagggcagcttgaggctttcactgaac

SEQ ID NO: 64440 - DNA, 75 bp, synthetic construct
  source 1..75: mol_type = other DNA
cgaccgtaaattattacgggaaatctttcaattatcaggtcgctgatgagtggcctggatttttgttacccattt

SEQ ID NO: 64441 - DNA, 75 bp, synthetic construct
  source 1..75: mol_type = other DNA
tctcgatggccgtggggcttaatgccgtttcgatggcggcaaaagcgaaagcgtccgaggagcaggaaactgatg

SEQ ID NO: 64442 - DNA, 75 bp, synthetic construct
  source 1..75: mol_type = other DNA
ttgcggttctgctggtggctgtcgtaatcattattgcagtgcttagcgtattactggttcgtagccgctcagctc

SEQ ID NO: 64443 - DNA, 75 bp, synthetic construct
  source 1..75: mol_type = other DNA
gacggacaaatttttctcaacggcacaaaaattcatttgcagggtaaggagcaggttaatggtgactcactgttg

SEQ ID NO: 64444 - DNA, 75 bp, synthetic construct
  source 1..75: mol_type = other DNA
ctgctgtctccgctggaagaggcgcttcatggctatgtgctgactgacggtaagctccatgttgatgacacgcct

SEQ ID NO: 64445 - DNA, 75 bp, synthetic construct
  source 1..75: mol_type = other DNA
gccggtggggttgccggtcgtttgggcggtggagccctttgggccggggcgatggccgcccctgtcctgctggac

SEQ ID NO: 64446 - DNA, 75 bp, synthetic construct
  source 1..75: mol_type = other DNA
gagcttgaggcgttagtacgcggtgcgatcgtcaattacaatgaaaagcaattttcatatcctagtgtagatgag

SEQ ID NO: 64447 - DNA, 75 bp, synthetic construct
  source 1..75: mol_type = other DNA
atgataaaacggacgttattagcggcggccatttttagcgcattgcccgcttatgccgggttaacttccattacc

SEQ ID NO: 64448 - DNA, 75 bp, synthetic construct
  source 1..75: mol_type = other DNA
cgcgggtagtcttgtcagtctgatagtaatagtctttatggcgaaaaaccgtaaagaaaaaaccgcccctgaatt

SEQ ID NO: 64449 - DNA, 75 bp, synthetic construct
  source 1..75: mol_type = other DNA
ttctcattgcgctgggattcaacccgttgaaggcggcgattgcctctctcgtggcaaatacagttcctaccgcat

SEQ ID NO: 64450 - DNA, 75 bp, synthetic construct
  source 1..75: mol_type = other DNA
cgcaacatgctctcgcctgctgactttggtccaaaactgctggaagtgatcaaagagcatttcccgcaggacgtg

SEQ ID NO: 64451 - DNA, 75 bp, synthetic construct
  source 1..75: mol_type = other DNA
ctcattggctggaaaggagaaccgctgacagaaaaaggcacttacattgttgatgaaatcgctcacgaaggaccg

SEQ ID NO: 64452 - DNA, 75 bp, synthetic construct
  source 1..75: mol_type = other DNA
aagaatatgatgaacttgtcgatttattgctgtctcggggtatggatgtgccagatcgcgaacatgctatcaaga

SEQ ID NO: 64453 - DNA, 75 bp, synthetic construct
  source 1..75: mol_type = other DNA
gacgaccgtaacgccgggtcaacgctggcgccggcggtgttgttcgcttacagcccggacagaaaaggcatccat

SEQ ID NO: 64454 - DNA, 75 bp, synthetic construct
  source 1..75: mol_type = other DNA
cgacaaccgtctgtgtcagggggggctgctgacgccgtcctaccgtaatcagctggcgttccttgatatctacgg

SEQ ID NO: 64455 - DNA, 75 bp, synthetic construct
  source 1..75: mol_type = other DNA
attctcaaaacacatttatctggcgctttgtcatctttaatccgactgattcccgtattgttcacgtcgaggcat

SEQ ID NO: 64456 - DNA, 75 bp, synthetic construct
  source 1..75: mol_type = other DNA
aaatcgttgagggtcgggctgggttatgacgtcaaagtcggaaataacgttaccttcaccgttggtaaaacgaaa

SEQ ID NO: 64457 - DNA, 75 bp, synthetic construct
  source 1..75: mol_type = other DNA
gaacggtatcaggccgcagcgatgggagcttgaggcgctggcgcgtggggcaaccgtaaattatgacgggaaaaa

SEQ ID NO: 64458 - DNA, 75 bp, synthetic construct
  source 1..75: mol_type = other DNA
accacaggaatttactgcctacggcgggacgcaattatctgccaattacaccgcctttttattaggactggggcg

SEQ ID NO: 64459 - DNA, 75 bp, synthetic construct
  source 1..75: mol_type = other DNA
gtcgcaacagcaccgcgcgcatcatgaacttccagctgaccaaaaatccggagctggccttcctctggaatatgg

SEQ ID NO: 64460 - DNA, 75 bp, synthetic construct
  source 1..75: mol_type = other DNA
ttccttccacctggtgtccagtaagctgattggcgagcagctggatcgtggcctgtctgaattccgctggcaggg

SEQ ID NO: 64461 - DNA, 75 bp, synthetic construct
  source 1..75: mol_type = other DNA
atgaggagtcgggactgtattacaaccgtcaccggtactacgatccgttgcaggggcggtatatcacccaggatc

SEQ ID NO: 64462 - DNA, 75 bp, synthetic construct
  source 1..75: mol_type = other DNA
aagttcatccacatatgttacgccatgcatgtggttattcactagcagataatggtgtggatacccgtcttattc

SEQ ID NO: 64463 - DNA, 75 bp, synthetic construct
  source 1..75: mol_type = other DNA
ctttcttctgttcatctgtgtttgccacacaaattccagtacctgaatcacccaggtatgtgaatgacttaaccg

SEQ ID NO: 64464 - DNA, 75 bp, synthetic construct
  source 1..75: mol_type = other DNA
cccgtattgccagggaacacgatatcaatgataacctcctgttcaaatggctcaggctctggcagaacgaagggc

SEQ ID NO: 64465 - DNA, 75 bp, synthetic construct
  source 1..75: mol_type = other DNA
caacagagattactacagagaataaaaacacttttcgtccggaagcttcgcaaccggacccgcagacggctgaac

SEQ ID NO: 64466 - DNA, 75 bp, synthetic construct
  source 1..75: mol_type = other DNA
agcaagaaacggaacagaacgaccagaaagcggaacaaaacagcccaaatgcgttacaaaacgagccagaaacga

SEQ ID NO: 64467 - DNA, 75 bp, synthetic construct
  source 1..75: mol_type = other DNA
tcacggtaacatgacgctggaaaatccttcaccagagctgctcacagtgttgatccgtgaactgaccgggagggg

SEQ ID NO: 64468 - DNA, 75 bp, synthetic construct
  source 1..75: mol_type = other DNA
gaaaaatacctggcgccacaactctgagcgcactgacgatgaagtgattaatcattttgcatcgctggatctgct

SEQ ID NO: 64469 - DNA, 75 bp, synthetic construct
  source 1..75: mol_type = other DNA
ggcgatctggccaaggacaagaacctgttgttgaccacgatcctggccgacgcgatcaacctgggcctgaccaag

SEQ ID NO: 64470 - DNA, 75 bp, synthetic construct
  source 1..75: mol_type = other DNA
tcaagaatagccgcgaaacgttgtcattacaacacaggcggctatatgacgctcgcagaactgggcatggccttc

SEQ ID NO: 64471 - DNA, 75 bp, synthetic construct
  source 1..75: mol_type = other DNA
catcactcgaagatattcaggcatggtacatccgtgacgaaacctattcagccgctcttgcagagctggtaaatg

SEQ ID NO: 64472 - DNA, 75 bp, synthetic construct
  source 1..75: mol_type = other DNA
acatggacaccggaacgcctgatcgagcagggaaaacgtacgggcccgtccacaggccgggtggttgaatccatg

SEQ ID NO: 64473 - DNA, 75 bp, synthetic construct
  source 1..75: mol_type = other DNA
gccagatggactattgatataaaaggaaatcctcagttaggagagcttgctaataaatataaaactggtattgaa

SEQ ID NO: 64474 - DNA, 75 bp, synthetic construct
  source 1..75: mol_type = other DNA
gaagcgcagtgaaaaaggccgatcgctatgagcctgtcatcaacgacagttatcaggcactggctgagcactatg

SEQ ID NO: 64475 - DNA, 75 bp, synthetic construct
  source 1..75: mol_type = other DNA
gcgcaggtgctggacaaaatggcctacctgacgatatggcagggcgatgacgtacagcgccgggtgaaaggtgtg

SEQ ID NO: 64476 - DNA, 75 bp, synthetic construct
  source 1..75: mol_type = other DNA
cctctcttgattctatccgcgaaaacccaaacaacggacgctccatttcacaggttcgcgccgcgattcgatccg

SEQ ID NO: 64477 - DNA, 75 bp, synthetic construct
  source 1..75: mol_type = other DNA
ctgtgcctgtgctggtcgtggctggttgcgcgttatctcgatcgtggtcaccgggtcgcctccggaggtgagtaa

SEQ ID NO: 64478 - DNA, 75 bp, synthetic construct
  source 1..75: mol_type = other DNA
atgtttctgataattctcacgccactggtgggcgtgctgggggcgcttttgctgtcgtatggcacatggctgatt

SEQ ID NO: 64479 - DNA, 75 bp, synthetic construct
  source 1..75: mol_type = other DNA
ttactggtggtactggctctttcgggaatgctgtattaaatagatttcttgatacagatattgcagaaatccgta

SEQ ID NO: 64480 - DNA, 75 bp, synthetic construct
  source 1..75: mol_type = other DNA
tccagggcgatacagacgccgcacgcgtctttttttgtatcggcgcacacgcacaccttaacaatggtgggctgt

SEQ ID NO: 64481 - DNA, 75 bp, synthetic construct
  source 1..75: mol_type = other DNA
agctgaaaaagtttgccgcccgtatctcatcgcagcttttcatgatgtatgaggaactctgcgatgcctgggtgg

SEQ ID NO: 64482 - DNA, 75 bp, synthetic construct
  source 1..75: mol_type = other DNA
catgcccaacgtgcgcgtgtatcagcaatcctttgccgcagctattgggctggcggaacaggtgatgtcgacgct

SEQ ID NO: 64483 - DNA, 75 bp, synthetic construct
  source 1..75: mol_type = other DNA
acaccacgacggaacgccgcactggcatatgatgcttttttgtaatccacgccagcgtaaccagattatcgaaat

SEQ ID NO: 64484 - DNA, 75 bp, synthetic construct
  source 1..75: mol_type = other DNA
ctggcgctttcatttgagattgcagagctgcacccgacgttgaatttcaaacagaacaacgtacacgcgttgttt

SEQ ID NO: 64485 - DNA, 75 bp, synthetic construct
  source 1..75: mol_type = other DNA
tgctcaggtttgcggcgtccagcggttatgtaactactattcggcgcgacttacgccgctccccgggcctgattc

SEQ ID NO: 64486 - DNA, 75 bp, synthetic construct
  source 1..75: mol_type = other DNA
cgcaggacattattgatctgctggcgcctcagtatccgcagatacagttttccacgccggataagccgcgcacgg

SEQ ID NO: 64487 - DNA, 75 bp, synthetic construct
  source 1..75: mol_type = other DNA
ctggcgctttcatttgagattgcagagctgcacccgacgctgaattttaaacaaaacaacgtgcacgcgttgttt

SEQ ID NO: 64488 - DNA, 75 bp, synthetic construct
  source 1..75: mol_type = other DNA
ttgaagagtttttaagattattgggaaatgatttttatttatttgataaccgtgttgaaattgattttaatgggt

SEQ ID NO: 64489 - DNA, 75 bp, synthetic construct
  source 1..75: mol_type = other DNA
acccgctgcaggggcgatatatcactcaggatccgattggactgaaggggggatggaacctgtatggatatcaat

SEQ ID NO: 64490 - DNA, 75 bp, synthetic construct
  source 1..75: mol_type = other DNA
cgcggttgtgtttagtgcgaaaaaacgccagtggggtagcagggaggatttggcgtgtgcgcagtggatttgggg

SEQ ID NO: 64491 - DNA, 75 bp, synthetic construct
  source 1..75: mol_type = other DNA
agctggctaaatcatcaagtggattaacgtactactacgctgatgaggtcaatgccgcactgactgctgctggta

SEQ ID NO: 64492 - DNA, 75 bp, synthetic construct
  source 1..75: mol_type = other DNA
ggtggtggcaagtgaactgcacggcgagcagccgcaggcggtgccgggacgcagtggttcaggtaccacgctgaa

SEQ ID NO: 64493 - DNA, 75 bp, synthetic construct
  source 1..75: mol_type = other DNA
tagtatgggggctattaggttttccattgcacagtgcagcaactgaaacaaaaatagatgccacatcgaaaactt

SEQ ID NO: 64494 - DNA, 75 bp, synthetic construct
  source 1..75: mol_type = other DNA
gcaggacaagccgcgcgctgatgcgattatggcgcttcatgagcataaagactatcagccgctgttacgtgcaat

SEQ ID NO: 64495 - DNA, 75 bp, synthetic construct
  source 1..75: mol_type = other DNA
cagagccctgtgcgaatatagtgccgccgctgcctgatgtgtggataccgtttaacgattcactggatatgatta

SEQ ID NO: 64496 - DNA, 75 bp, synthetic construct
  source 1..75: mol_type = other DNA
ttggttactgggagccgatggcactgacggatgtcacccgctcaccgggatgcatggttaatctggggttcagtc

SEQ ID NO: 64497 - DNA, 75 bp, synthetic construct
  source 1..75: mol_type = other DNA
gtactggctgaacatcatcacgtcgttggggtgcctggaaggcggagacctggatattgcctatctgtcagaaat

SEQ ID NO: 64498 - DNA, 75 bp, synthetic construct
  source 1..75: mol_type = other DNA
tggggttggggacgctattttcccgctcagtgattgcgtttgaagtgttgaagtgggcaggcgcagcttacttga

SEQ ID NO: 64499 - DNA, 75 bp, synthetic construct
  source 1..75: mol_type = other DNA
ggcattttaccgccagacagctcgggattcgtgatatcaccgttcttgcagaatacggtcagagggaaaataccc

SEQ ID NO: 64500 - DNA, 75 bp, synthetic construct
  source 1..75: mol_type = other DNA
cgttatccagatttttataatgaagaaatattcagggaggtgaccgaagagagcgagtcaacatttaaagaactt

SEQ ID NO: 64501 - DNA, 75 bp, synthetic construct
  source 1..75: mol_type = other DNA
gcctggccctggacatttcgccttacccgtcttttatatacccggagctggataagcaacgaacgtcctggcctg

SEQ ID NO: 64502 - DNA, 75 bp, synthetic construct
  source 1..75: mol_type = other DNA
ataatctgcttccttattatgtttctggtttggcaatgaaccatgaagaggagggtgatcggtcagtaaagcgtg

SEQ ID NO: 64503 - DNA, 75 bp, synthetic construct
  source 1..75: mol_type = other DNA
ctacctcagccgggagttcagctcacggcggcagttttttgacgacgcaccaacggaaattatcagtcggtcatg

SEQ ID NO: 64504 - DNA, 75 bp, synthetic construct
  source 1..75: mol_type = other DNA
aacgtttcctgggatgcgctgaacacggcatacaaggacctctgtttttccttccccctccataaaccacaactc

SEQ ID NO: 64505 - DNA, 75 bp, synthetic construct
  source 1..75: mol_type = other DNA
acgacgagcaacttgccgcagggaacagaactcagcgtcacgctaaacggcaaaacctacacgaccagcgtaggt

SEQ ID NO: 64506 - DNA, 75 bp, synthetic construct
  source 1..75: mol_type = other DNA
tgatgccgactgtaatctgcagagtctgtgctggccgtgtcataaggcgaagacggcccgtgaacggcttaagtg

SEQ ID NO: 64507 - DNA, 75 bp, synthetic construct
  source 1..75: mol_type = other DNA
ttttatctcaaagggctcaaaagcaatcatcacgaatggaaagggaactatggcagagataaaaagtgacattgc

SEQ ID NO: 64508 - DNA, 75 bp, synthetic construct
  source 1..75: mol_type = other DNA
tgctgttgatatccaggagtttatcgatgcgatgaagctaaaccaatgtgccaccataaaaaaatacattcctta

SEQ ID NO: 64509 - DNA, 75 bp, synthetic construct
  source 1..75: mol_type = other DNA
cagaatgctgtatttctgaaaaaacgtgatgctctcatcgtccacaccaatctacgactgaacataccacttata

SEQ ID NO: 64510 - DNA, 75 bp, synthetic construct
  source 1..75: mol_type = other DNA
tgcgcagtgcgggctgacggtggagcggctggcggcacagatagagccggtttatttgcctgagcgaaaaataca

SEQ ID NO: 64511 - DNA, 75 bp, synthetic construct
  source 1..75: mol_type = other DNA
tctgagctggcaaaaacctgctgacgttctggcgtcagaaactggagcactggaagtgatgcgtctcatcacccg

SEQ ID NO: 64512 - DNA, 75 bp, synthetic construct
  source 1..75: mol_type = other DNA
acaacacgaaggctgatgccgttagtgcctggacggaagaaagtgagggaatttataaagcaagctatacggccc

SEQ ID NO: 64513 - DNA, 75 bp, synthetic construct
  source 1..75: mol_type = other DNA
gcttgtatcgctgcttgatgactttcttccacaatttccgggcttctatctgtatttcccacagcgtcgcaatat

SEQ ID NO: 64514 - DNA, 75 bp, synthetic construct
  source 1..75: mol_type = other DNA
atagaatagcagctactgcaactaaagatccggttacagggtggattttctatgaggcaactatagaagctgttg

SEQ ID NO: 64515 - DNA, 75 bp, synthetic construct
  source 1..75: mol_type = other DNA
gaccatcagtggtccggcgtttaatgaagcaattgaacgctggaaaactctgaacgattttggcctgcatgctga

SEQ ID NO: 64516 - DNA, 75 bp, synthetic construct
  source 1..75: mol_type = other DNA
tcaaaatttcggcaaattcgcagtcattccagtcggagatccagcgggcgtcccgtatgggcagtgaatattacc

SEQ ID NO: 64517 - DNA, 75 bp, synthetic construct
  source 1..75: mol_type = other DNA
gagtggaacgacaacttggtatgaatatgcatccttagtttttgaagaagcacgtaaattcggtatcgaattggc

SEQ ID NO: 64518 - DNA, 75 bp, synthetic construct
  source 1..75: mol_type = other DNA
agacaaagcggaatcagaaccggaatttgcacaattacttaacgcgacaagtgtcgaagcgattgcaaaagcagc

SEQ ID NO: 64519 - DNA, 75 bp, synthetic construct
  source 1..75: mol_type = other DNA
atgcgaaagatttttcttccgttgttactggtggcgctttcgcctgtcgctcacagtgaaggtgtgcaggaagtc

SEQ ID NO: 64520 - DNA, 75 bp, synthetic construct
  source 1..75: mol_type = other DNA
gagcacggaagatattgggtccgccattgatgagtattttgctggtcagtcagcgccaacacaacaaggtgttca

SEQ ID NO: 64521 - DNA, 75 bp, synthetic construct
  source 1..75: mol_type = other DNA
ctggggaaaaagcgttacaagaacattgcgcaaagcatcttattttccgtaccagctgggtatacgctggtaaag

SEQ ID NO: 64522 - DNA, 75 bp, synthetic construct
  source 1..75: mol_type = other DNA
gtgggcctgcagaatgaatacaacggcatcatcgatgccgcctctcatccgcaactgtcactgatagctgacagt

SEQ ID NO: 64523 - DNA, 75 bp, synthetic construct
  source 1..75: mol_type = other DNA
gaggccgagcaagaacttatcgttaccattaacaaatacgccagtcagatcgcagtagaagcgatacagggggcg

SEQ ID NO: 64524 - DNA, 75 bp, synthetic construct
  source 1..75: mol_type = other DNA
atatggacagcgaacaggctgcgagtatggcgcgtggctgggtggcttcttctgtgtctgcgcaggcgacagact

SEQ ID NO: 64525 - DNA, 75 bp, synthetic construct
  source 1..75: mol_type = other DNA
ggcgtggcctggaaagtccgtattgatgcaggtgtggcagctctggattatcgcggtatggtcaaatcaggcggg

SEQ ID NO: 64526 - DNA, 75 bp, synthetic construct
  source 1..75: mol_type = other DNA
taaccagcaaatgcaaattgaagaggcagggtacaacattgctaaatggttcactgatgaagctgtcagtggttc

SEQ ID NO: 64527 - DNA, 75 bp, synthetic construct
  source 1..75: mol_type = other DNA
ttttgctcagcaaaaaattttgaagatccgttcgaaggtgaatttgcttggggacatactggctataaaaaattc

SEQ ID NO: 64528 - DNA, 75 bp, synthetic construct
  source 1..75: mol_type = other DNA
gcgctgacaggagatgccgggttcgatgacatttttgtttatgcggcggtgcctgctgttgttgaaatggcggat

SEQ ID NO: 64529 - DNA, 75 bp, synthetic construct
  source 1..75: mol_type = other DNA
accacgccggaagcggtggcgcacgcgctgcttaatcacagcaatttgcgcattgtgaccaacaatctcaacgtc

SEQ ID NO: 64530 - DNA, 75 bp, synthetic construct
  source 1..75: mol_type = other DNA
ccttatcccacggagtcacagaattataatcttggggcgcgtattgactggaagactacggaacaagatatgctc

SEQ ID NO: 64531 - DNA, 75 bp, synthetic construct
  source 1..75: mol_type = other DNA
ttgccgccgggcatgagatggcttcggaactgaaagcagaatgtggtgccgttgatatgcgtagtgtggcaaaac

SEQ ID NO: 64532 - DNA, 75 bp, synthetic construct
  source 1..75: mol_type = other DNA
cggaaggacaaatgcagcaagtgtatgcgcgggtgtgagttgcgcaacaataccggtaatttcggcggtttcctt

SEQ ID NO: 64533 - DNA, 75 bp, synthetic construct
  source 1..75: mol_type = other DNA
tagtgctgctgttgctgattgtacttactggtgttttttatatgaaaaagtcaaaagaaattgcagttgttaata

SEQ ID NO: 64534 - DNA, 75 bp, synthetic construct
  source 1..75: mol_type = other DNA
cagctgatatcaccaaagaagtcatgactctggttgaaaaagaaaatctggtttttaataaattacccaaagtgg

SEQ ID NO: 64535 - DNA, 75 bp, synthetic construct
  source 1..75: mol_type = other DNA
agtctttcgtcgatgccaacaactatccggttgaagtctgcaaaatcactctgacgcaggtaatcttccgcaggc

SEQ ID NO: 64536 - DNA, 75 bp, synthetic construct
  source 1..75: mol_type = other DNA
ctgtgatgccgtcgtggatcgggtgaatgaacatctgccggggaatatcgacccctggaaagactataacctctg

SEQ ID NO: 64537 - DNA, 75 bp, synthetic construct
  source 1..75: mol_type = other DNA
tggatccattaggattatatgaatttaaatcaaaaaatatagatgatattggaatatttgcattggcaatgtgta

SEQ ID NO: 64538 - DNA, 75 bp, synthetic construct
  source 1..75: mol_type = other DNA
caggagtatttcgatggccctgaactggaccggttgatactggatgcctggagtaacgtactgggcttcgcgtca

SEQ ID NO: 64539 - DNA, 75 bp, synthetic construct
  source 1..75: mol_type = other DNA
acgcaactggaagctcctgtgcagaatgcagaagggcgtgaacgtctgatggcggtaaagcctgaatggaaataa

SEQ ID NO: 64540 - DNA, 75 bp, synthetic construct
  source 1..75: mol_type = other DNA
ggatgacgccaccggtaaactggtggcatgggatggtcagaaagccggaacggcagtgggcgtgctggctctggc

SEQ ID NO: 64541 - DNA, 75 bp, synthetic construct
  source 1..75: mol_type = other DNA
gatctttttcccatgtctcatattaaggaggctaaacaagccattgtagattttgtgacgaaaactgatgataaa

SEQ ID NO: 64542 - DNA, 75 bp, synthetic construct
  source 1..75: mol_type = other DNA
atggtgacgaaaaccatcactgaacaacgtgcggaagtacgtatttttgccggtaatgatccggctcataccgtc

SEQ ID NO: 64543 - DNA, 75 bp, synthetic construct
  source 1..75: mol_type = other DNA
ggaacccgggtttaaacgggatcctgaattgcgccgccgtcgtcgtgaaacccgtgcagctgcgcgggaagattt

SEQ ID NO: 64544 - DNA, 75 bp, synthetic construct
  source 1..75: mol_type = other DNA
tgcccgatgccatcctcaccgagtcagggctgaaaatcaccccgctggatgcggcggtgccggatcgggcgcagg

SEQ ID NO: 64545 - DNA, 75 bp, synthetic construct
  source 1..75: mol_type = other DNA
catatgctggacagcgccattcagaccgccgtgcgcctgtcgcgccgctatctgaccggacgccagttgccggac

SEQ ID NO: 64546 - DNA, 75 bp, synthetic construct
  source 1..75: mol_type = other DNA
tgagctggctcgctggttcggtattccgctggagaaggtagggttagctcccaccagctgctgtggtggtaatac

SEQ ID NO: 64547 - DNA, 75 bp, synthetic construct
  source 1..75: mol_type = other DNA
ctgataatgccgtaaaaataggtttggggtcgttgttgactattttaggggggtggctgactcttaagctaacac

SEQ ID NO: 64548 - DNA, 75 bp, synthetic construct
  source 1..75: mol_type = other DNA
gggtggctgactcttaagctaacacaaaagcacgaattaaaaaaagaagcggcagtacagggattaaaagataaa

SEQ ID NO: 64549 - DNA, 75 bp, synthetic construct
  source 1..75: mol_type = other DNA
ggtatcaccaatcgccagcgcgagcattgagaaaatcctccgctcctacactgctgatgaactggctgatggtgt

SEQ ID NO: 64550 - DNA, 75 bp, synthetic construct
  source 1..75: mol_type = other DNA
atctcaagcccagggacaaactctacaaagtgaatgaccgggaaggtctctatgtggcagtgactccagccggct

SEQ ID NO: 64551 - DNA, 75 bp, synthetic construct
  source 1..75: mol_type = other DNA
tcaccagtcagaccgccggaaccagtacagtcactgccagcatcaacaacagcagcctgagccagaacgtgacgt

SEQ ID NO: 64552 - DNA, 75 bp, synthetic construct
  source 1..75: mol_type = other DNA
atgacgatgtgtaccgcgctatcgacttcatttacgaaggcaatcagataacgtgcggcgataagctggagtccg

SEQ ID NO: 64553 - DNA, 75 bp, synthetic construct
  source 1..75: mol_type = other DNA
ttgagaaggtcttcggcttttgcgaacaggacaacctcgaagagtttcgcttcgacgaggacggcctgggtgctg

SEQ ID NO: 64554 - DNA, 75 bp, synthetic construct
  source 1..75: mol_type = other DNA
tagccatcccttgtctcggattttcagtcagcagcatggctgcggaagatgtgatgatagtcaccgcatccggct

SEQ ID NO: 64555 - DNA, 75 bp, synthetic construct
  source 1..75: mol_type = other DNA
cccgcgtaccggcttacatcgacaccgaagtggactctgacaatgcggtctcccgcgtggtggcctccgtacctg

SEQ ID NO: 64556 - DNA, 75 bp, synthetic construct
  source 1..75: mol_type = other DNA
atcatgagcaattcgggggacacttcagtccgcgtgcatatctggtctgggatgtggcagatgcctggacgctga

SEQ ID NO: 64557 - DNA, 75 bp, synthetic construct
  source 1..75: mol_type = other DNA
atcaggtgatcaaacgtgtggcgaagcagctctcgcaggaaggcggctcgctgaagatgtacaacatcgccgatc

SEQ ID NO: 64558 - DNA, 75 bp, synthetic construct
  source 1..75: mol_type = other DNA
ccgaaccaatccggctcagttcatcatcgactggggcatgacaacggacccgcgtaatattgattatggcctgcc

SEQ ID NO: 64559 - DNA, 75 bp, synthetic construct
  source 1..75: mol_type = other DNA
aagcgcaacccagcatttgcctactggatggccgaatggccagaggacaacctccccttcaataccgttagcatc

SEQ ID NO: 64560 - DNA, 75 bp, synthetic construct
  source 1..75: mol_type = other DNA
gtttctatctgaagccagcagccgtcaagagtgaacgagaagcgtgtaattatctcgacagcctgccagcctccg

SEQ ID NO: 64561 - DNA, 75 bp, synthetic construct
  source 1..75: mol_type = other DNA
ttccgttgtaccggagcattctgaaacagtcatgggcgaaagatgtttatcttcgcaccctgtgggaaaaccttc

SEQ ID NO: 64562 - DNA, 75 bp, synthetic construct
  source 1..75: mol_type = other DNA
atgaatgctatcccttatttcgactatagcatggcacccttctggccatcttatcagaacaaaatcgtcggcgtt

SEQ ID NO: 64563 - DNA, 75 bp, synthetic construct
  source 1..75: mol_type = other DNA
actgcgcgataccaatctacaccgcaaatctcagggacgccctctaatcaaaattggtcaactccactacggtaa

SEQ ID NO: 64564 - DNA, 75 bp, synthetic construct
  source 1..75: mol_type = other DNA
aatttctccatccctggtacgaaacgccggataacctggtcttcagccagcacacacttcaccgtacggatgatc

SEQ ID NO: 64565 - DNA, 75 bp, synthetic construct
  source 1..75: mol_type = other DNA
attatccgggcatggtgtactgggattataactggcgcaagcagggcggctcgtcccgcatgattgaaatcagca

SEQ ID NO: 64566 - DNA, 75 bp, synthetic construct
  source 1..75: mol_type = other DNA
accagatcattgccgttctgaagtccgtcgaagccggacgtaccgtcaaggatgtctgccgcgaagccgggatct

SEQ ID NO: 64567 - DNA, 75 bp, synthetic construct
  source 1..75: mol_type = other DNA
ttaagccgattgattgatgaagcgcgggattgcgggaagcatgtcatggtcgccgggatcgaatcgcaaaatcag

SEQ ID NO: 64568 - DNA, 75 bp, synthetic construct
  source 1..75: mol_type = other DNA
acattcatcctcagaaagagtatttaattcgtaaggatgagaatattcgctttgctgaacaacacggcgtgccat

SEQ ID NO: 64569 - DNA, 75 bp, synthetic construct
  source 1..75: mol_type = other DNA
cagcagccagtacgacaagcaacaggaacacctgctgtttactccactgttcaaagcggataacgccagagtttt

SEQ ID NO: 64570 - DNA, 75 bp, synthetic construct
  source 1..75: mol_type = other DNA
taatgtctctaactcaaccgtaaccaccggttcaaataccgtgttggaaagttctggttatggtcatttcggtaa

SEQ ID NO: 64571 - DNA, 75 bp, synthetic construct
  source 1..75: mol_type = other DNA
ggcctacctgctggccccggaagtgagtgcccttcttttctatatgccggatcagcgtcaccatatgctgttcgc

SEQ ID NO: 64572 - DNA, 75 bp, synthetic construct
  source 1..75: mol_type = other DNA
cgtccgacactgacggtttctaacctgcacggcatggtcacggggatggcggaagacctgcagagtctggtcggc

SEQ ID NO: 64573 - DNA, 75 bp, synthetic construct
  source 1..75: mol_type = other DNA
tcatctttcaggatattctttccggcctgtcggcagccggaattcagcgcacggcaatgagcgtgggtaaggtcg

SEQ ID NO: 64574 - DNA, 75 bp, synthetic construct
  source 1..75: mol_type = other DNA
ctctggcgagtatgggtatctacgtctttgacgccgactatctgtatgaactgctggaagaagacgatcgcgatg

SEQ ID NO: 64575 - DNA, 75 bp, synthetic construct
  source 1..75: mol_type = other DNA
tgttgtatcttgctatccctaaaaaattcagagatgagtcgaaagttatatcttttatgtatgataagaacaaaa

SEQ ID NO: 64576 - DNA, 75 bp, synthetic construct
  source 1..75: mol_type = other DNA
gtcacgcgcactttaagcacgaaatagaaaatcatcctgaatattttattaaggttgacaatgtaacagtggcgt

SEQ ID NO: 64577 - DNA, 75 bp, synthetic construct
  source 1..75: mol_type = other DNA
tgggactgaaacaggtgattaacgcctgcggcaagatgacgattctcggcgtctccagcgtcgcgccggaggtga

SEQ ID NO: 64578 - DNA, 75 bp, synthetic construct
  source 1..75: mol_type = other DNA
agcaagcggattttgagcgtttggcggcgttctacccataccgcgatgagcatggattaccggtactcgaagaaa

SEQ ID NO: 64579 - DNA, 75 bp, synthetic construct
  source 1..75: mol_type = other DNA
aacggagaggcaataaaaacaacgatcaatgaaggcggaacgctgacagtcaacgataatggcaaagcgacagat

SEQ ID NO: 64580 - DNA, 75 bp, synthetic construct
  source 1..75: mol_type = other DNA
gatattgaattggttaattgtgatatcacttcatttaaggggggggggaggagtctcggcagcaaaaaaagggac

SEQ ID NO: 64581 - DNA, 75 bp, synthetic construct
  source 1..75: mol_type = other DNA
gatacgggtaacgttaaagctgccttgtctcaggaagtagctaagacacgtgctcttaaagaagaaatcgcgcgc

SEQ ID NO: 64582 - DNA, 75 bp, synthetic construct
  source 1..75: mol_type = other DNA
tttgcagaaaaaggtattgaactgaaggaggcgcagacggcggccaccgcctgcaccggtacatcatccagtgag

SEQ ID NO: 64583 - DNA, 75 bp, synthetic construct
  source 1..75: mol_type = other DNA
agaaaaagcaaaggaagagtgtcgctcattcagcgcagaagtaattaaacgggtgctggacagcctgaggagaga

SEQ ID NO: 64584 - DNA, 75 bp, synthetic construct
  source 1..75: mol_type = other DNA
gtgctctccacaccgacggaaacggatggtgctgtttttccggggcgcatcatgctggccaacacctgcacctgg

SEQ ID NO: 64585 - DNA, 75 bp, synthetic construct
  source 1..75: mol_type = other DNA
agcctatgctgtcggttacgaaagctatcccatttcagtcgggaatattcgcggatgtttggagagtcacccaag

SEQ ID NO: 64586 - DNA, 75 bp, synthetic construct
  source 1..75: mol_type = other DNA
gttaagccgtccgatatcccgaccctgaaagactacaccgcccgcctggtggatcagaaatggctgcgtctcgca

SEQ ID NO: 64587 - DNA, 75 bp, synthetic construct
  source 1..75: mol_type = other DNA
agcaactggaagcatggatctccggagaactggtaagactcttcaatcaggggcaggaggttgctgtgcacccgc

SEQ ID NO: 64588 - DNA, 75 bp, synthetic construct
  source 1..75: mol_type = other DNA
gggaacacagaccgggcgcacgtatgtgggcctgcagaatgaatacaacggcatcatcgatgccgcctctcatcc

SEQ ID NO: 64589 - DNA, 75 bp, synthetic construct
  source 1..75: mol_type = other DNA
cagtacgaccccaaagtttatgacgaatatcgtaaggcaaaacgacctgggaaggtgattcatgaaaatcaggca

SEQ ID NO: 64590 - DNA, 75 bp, synthetic construct
  source 1..75: mol_type = other DNA
aacagtatccgtgcgcaggtactggcagagcaaaaagcgcgtgtaaacggtattaatgatctgtttgccatgttt

SEQ ID NO: 64591 - DNA, 75 bp, synthetic construct
  source 1..75: mol_type = other DNA
atgacggtaatcgtgtacgggaaatcaacatttgcaggaaatgccaaaactcgccgtcatgagcggcgcagaaag

SEQ ID NO: 64592 - DNA, 75 bp, synthetic construct
  source 1..75: mol_type = other DNA
gtagaacaattttccagtgccatttacaaagggcaaatacggaataacttcccctggacaaatcagttcatcgtg

SEQ ID NO: 64593 - DNA, 75 bp, synthetic construct
  source 1..75: mol_type = other DNA
ctgataaagacagtttactggcgttaataaaacaaagaccaatgccagaaaactattcccatcgaataatggaaa

SEQ ID NO: 64594 - DNA, 75 bp, synthetic construct
  source 1..75: mol_type = other DNA
cgtcgtcgttcccggcacgaatgccgctgccgtagtactgccacgtctggcactccagctcatcacgctgcgtaa

SEQ ID NO: 64595 - DNA, 75 bp, synthetic construct
  source 1..75: mol_type = other DNA
gatattcctctggatggcattgtttcgatgtacggtacgccagttggcaaggccacgcgtcccatcgttaaggga

SEQ ID NO: 64596 - DNA, 75 bp, synthetic construct
  source 1..75: mol_type = other DNA
gtttattgattgaaggacagcgcactaactattttgttaaatccaatactcccgctgaatggacgagtaccagca

SEQ ID NO: 64597 - DNA, 75 bp, synthetic construct
  source 1..75: mol_type = other DNA
ttgcgcaggagatggcagagaaaaccgaagaactggtcagaacgggcggtctgtcaggcggtgcggctgacacca

SEQ ID NO: 64598 - DNA, 75 bp, synthetic construct
  source 1..75: mol_type = other DNA
gaagtgcgccttgaaccccgtatggcgctgcttacccgcagccgccagaacgccatctaccagaaccagacggtg

SEQ ID NO: 64599 - DNA, 75 bp, synthetic construct
  source 1..75: mol_type = other DNA
cgattattcatccctgtcttgcggtggtatcgcggcgtcatatggacggatgggtgccggtatttacccagggcg

SEQ ID NO: 64600 - DNA, 75 bp, synthetic construct
  source 1..75: mol_type = other DNA
atgcccgataaagccaaaacccttctgctttcagccctgctgttaccggcaacggcaatggccacaaccggaaat

SEQ ID NO: 64601 - DNA, 75 bp, synthetic construct
  source 1..75: mol_type = other DNA
cccacattaatctccatatcaattcaccgggtggcgatgtctttgaaggcatcgccatttttaatgccctgaaaa

SEQ ID NO: 64602 - DNA, 75 bp, synthetic construct
  source 1..75: mol_type = other DNA
cagaagagatcaacggcgagtatgaataccagaccggcgaagtgatcattaaaaccttcgaagagcgtgggttga

SEQ ID NO: 64603 - DNA, 75 bp, synthetic construct
  source 1..75: mol_type = other DNA
acgcagctgcgtaatctggaaacgcgtctgggatacctgcgcgaactggaagagagacgtcaggcgatcctcaaa

SEQ ID NO: 64604 - DNA, 75 bp, synthetic construct
  source 1..75: mol_type = other DNA
acaggttgcccgggagacaaaggtacgccggaaactggttaaggaacggtccagactgaaacgggcgacggtcag

SEQ ID NO: 64605 - DNA, 75 bp, synthetic construct
  source 1..75: mol_type = other DNA
tgtcgacaaccattgcggcggtcggggcgttgttgattgccctgctggtgattgtggcgctgtggccagggccga

SEQ ID NO: 64606 - DNA, 75 bp, synthetic construct
  source 1..75: mol_type = other DNA
tcgcccgaacagcatactcaaagccggtcagcatcgttatcagcgggcattcatccagcgattaaataatggacg

SEQ ID NO: 64607 - DNA, 75 bp, synthetic construct
  source 1..75: mol_type = other DNA
ggcaggctgaagaattagcaactaacggcggtacgggcacagctattgtagttcaggctgcaggcaaaaacgttt

SEQ ID NO: 64608 - DNA, 75 bp, synthetic construct
  source 1..75: mol_type = other DNA
cgatcggtaacggtacagcttcccgcgaaactgagcgtttctatctcgacgtgcagaagcagttcccgaaagtga

SEQ ID NO: 64609 - DNA, 75 bp, synthetic construct
  source 1..75: mol_type = other DNA
gcctgataggtaattatgcgtttattcgtcctggcacaataatcagcaatggcgtaaaaattggttttgccaccg

SEQ ID NO: 64610 - DNA, 75 bp, synthetic construct
  source 1..75: mol_type = other DNA
aaacaccttcatgatgattcataaaccatttggctttacgggcggtgatgcggaggacatgcgcacctatgccga

SEQ ID NO: 64611 - DNA, 75 bp, synthetic construct
  source 1..75: mol_type = other DNA
atgccagttagtcgtaatcgctgcattttcttatacgttggtttgggagaaggttcggcattacccgttggtgtg

SEQ ID NO: 64612 - DNA, 75 bp, synthetic construct
  source 1..75: mol_type = other DNA
ctctcgaaaaccttggtttgggagaaggctctgcattacctgttggtgtccctgttccgtggccttcagccactc

SEQ ID NO: 64613 - DNA, 75 bp, synthetic construct
  source 1..75: mol_type = other DNA
gtgccgtttgcttattgttcgctctaaacagttccgctgttgccctggcctcatctccttcaccgcttaaccctg

SEQ ID NO: 64614 - DNA, 75 bp, synthetic construct
  source 1..75: mol_type = other DNA
ggtcgcgatccgcgtccggaatttaaaaccgctcagtttgccgatggcgtcgagacaatgaacgacctgcaaccg

SEQ ID NO: 64615 - DNA, 75 bp, synthetic construct
  source 1..75: mol_type = other DNA
ttggctacagctaaaactccccttgctctactcaatggcagacatacaagaagtcactcatttattattgcaggg

SEQ ID NO: 64616 - DNA, 75 bp, synthetic construct
  source 1..75: mol_type = other DNA
gcaacacaggcagcagcgcgcttgatatcaccatcagtgccgggctgccggggctgcgcattgacaccatcgcgg

SEQ ID NO: 64617 - DNA, 75 bp, synthetic construct
  source 1..75: mol_type = other DNA
gtaccggaacggaacgccacgctaaccgtttcgctaccagtgcatcacgtagtaactcccgctacagcctgagcg

SEQ ID NO: 64618 - DNA, 75 bp, synthetic construct
  source 1..75: mol_type = other DNA
aaatgaagttggagcttgggttatacactactccaccgattatgttttccctggcagtggtgacaggccatggct

SEQ ID NO: 64619 - DNA, 75 bp, synthetic construct
  source 1..75: mol_type = other DNA
gaacagggaatgccccgttttgtgatggcttatatcgatatccggctggggcgttttatttgcagttcaagcgcc

SEQ ID NO: 64620 - DNA, 75 bp, synthetic construct
  source 1..75: mol_type = other DNA
tgtcattatctgcggtttaagcggctggaatatcaccgaacatgttctgcgttacctgattgttgaccggacggc

SEQ ID NO: 64621 - DNA, 75 bp, synthetic construct
  source 1..75: mol_type = other DNA
gctgacagccatgacggcctcgtttgtgctggctacaccgaccgagacggatggggcgctgtttcccggtcgcat

SEQ ID NO: 64622 - DNA, 75 bp, synthetic construct
  source 1..75: mol_type = other DNA
atgcaggatattcacgaagaaagcctgaacgagtcggttaaatcagagcagtcaccgcgggtggtgctctgggaa

SEQ ID NO: 64623 - DNA, 75 bp, synthetic construct
  source 1..75: mol_type = other DNA
agatgccgacagcaatctgcagagcctgtgctggccgtgccataaggcgaagacggcccgtgaacggctaaagtg

SEQ ID NO: 64624 - DNA, 75 bp, synthetic construct
  source 1..75: mol_type = other DNA
atgaagactcttgatatccgggtcgctttcagcgccgttgacaggctgacccggcctgccgaaaacgcccgccgc

SEQ ID NO: 64625 - DNA, 75 bp, synthetic construct
  source 1..75: mol_type = other DNA
cacattcctacgattaatacaatacagtaagtatacagcatttggtttgctgctttacatgttgtgtccaatgcc

SEQ ID NO: 64626 - DNA, 75 bp, synthetic construct
  source 1..75: mol_type = other DNA
gaatgaaaaaggggaggcggtcacctggcaggggcggcaatatcaggcatacccgattgacggcagtggctttga

SEQ ID NO: 64627 - DNA, 75 bp, synthetic construct
  source 1..75: mol_type = other DNA
caaaccaatggacttagatattgaattggttaattgtgatattactgcctttaaaggtggtaatggcgcccaaaa

SEQ ID NO: 64628 - DNA, 75 bp, synthetic construct
  source 1..75: mol_type = other DNA
tgaacgagtcggttaaatcagagcagtcaccgcgggtggtactctgggaaatcgacctgacggtgcagggcggtg

SEQ ID NO: 64629 - DNA, 75 bp, synthetic construct
  source 1..75: mol_type = other DNA
gacggtggtgcacttctgcccggaaaacggggcgttgcgatgacagtctccggctcactggtaaccggtcccgga

SEQ ID NO: 64630 - DNA, 75 bp, synthetic construct
  source 1..75: mol_type = other DNA
atcccgatggcggccccactgaaacaggcatttgatgagaatgttgaccgtatccggcgtgaacgcctgcctaaa

SEQ ID NO: 64631 - DNA, 75 bp, synthetic construct
  source 1..75: mol_type = other DNA
gcatctgtgattgcgatggccggtgatacggtcattatgccggaaaatgccttcatgatgatccataagccatgg

SEQ ID NO: 64632 - DNA, 75 bp, synthetic construct
  source 1..75: mol_type = other DNA
aaggcaaagcgtaacagcaccacggtactggtgaacacggtggcctctgaaaatcctgatgaagccgggcgttac

SEQ ID NO: 64633 - DNA, 75 bp, synthetic construct
  source 1..75: mol_type = other DNA
tggtacgtctttgggtgacgggactgaattaggcactgctggtaatactggcactgctattaagatgtcagccgc

SEQ ID NO: 64634 - DNA, 75 bp, synthetic construct
  source 1..75: mol_type = other DNA
cgggtgcggcctgtactgagcagtttaatattttagggagttttttcactacggatattttgagtgattatagcc

SEQ ID NO: 64635 - DNA, 75 bp, synthetic construct
  source 1..75: mol_type = other DNA
ggttctgactggaaagggcgctcagatcgacaccacgactgcgtccggtcgcatggtgttcggaatcttcgccac

SEQ ID NO: 64636 - DNA, 75 bp, synthetic construct
  source 1..75: mol_type = other DNA
aaagtgcgcgtgaatatgacactaacgtgctgaagccgttccgggaagtgctgaatgaccctgcaccaaagaaac

SEQ ID NO: 64637 - DNA, 75 bp, synthetic construct
  source 1..75: mol_type = other DNA
cgctggtggtggtggataagccgcgtcctcccgttgaactggagcgcatcgaagaggctggcaacaagacggaga

SEQ ID NO: 64638 - DNA, 75 bp, synthetic construct
  source 1..75: mol_type = other DNA
ccgggcgtagcgtgggtgcgggtgaatgaagaacttccgtggcctgacgacctggtggtgaggttgccgcaatga

SEQ ID NO: 64639 - DNA, 75 bp, synthetic construct
  source 1..75: mol_type = other DNA
tcgtcattacgctgggtaaacagatcgttcacggcaaatacgtgccaggctcgccgcttccggctgaggcggagc

SEQ ID NO: 64640 - DNA, 75 bp, synthetic construct
  source 1..75: mol_type = other DNA
actcttcagaaggtatcccgtggcatgatctgccagcttcacacaggggaaacaatcagatgagtttgcctttat

SEQ ID NO: 64641 - DNA, 75 bp, synthetic construct
  source 1..75: mol_type = other DNA
gatattcttggtttcacgctgcaaagcgaagtctatcgcgaagcgcgcgactcgtggaaaggggatttggcgctt

SEQ ID NO: 64642 - DNA, 75 bp, synthetic construct
  source 1..75: mol_type = other DNA
tcctggctactgcaatcacgatccggaaacgtctgtgctggcgcattaccgactggcgggaacgtgcggaatagc

SEQ ID NO: 64643 - DNA, 75 bp, synthetic construct
  source 1..75: mol_type = other DNA
gataccagctctcagttgactgccactggagcgcagaatcttgggattgcttccgtgagtaaccgtggaatcttg

SEQ ID NO: 64644 - DNA, 75 bp, synthetic construct
  source 1..75: mol_type = other DNA
accggtacgcatgattattctggatacgctggcgcgttgctttggcggtaatgatgaaaatgacgcgcgggatat

SEQ ID NO: 64645 - DNA, 75 bp, synthetic construct
  source 1..75: mol_type = other DNA
gcctgagtcgcgtatacggatggggatatgagcgtgggtatgtgaaaaataatccatgcaaaggcgtcagaaaat

SEQ ID NO: 64646 - DNA, 75 bp, synthetic construct
  source 1..75: mol_type = other DNA
cagggcacgctggagccgactaacgagccttatgctattgccaaaatcgccgggatcaaactgtgcgaatcatac

SEQ ID NO: 64647 - DNA, 75 bp, synthetic construct
  source 1..75: mol_type = other DNA
acgaggacaatgaatgttaacgctggccatgaaagaacctcaaaagcccgcattatacatcagattcaactaatt

SEQ ID NO: 64648 - DNA, 75 bp, synthetic construct
  source 1..75: mol_type = other DNA
ttcattctctggggcacgtcgctggcagcactttgttattattttctctatggtcatgaattctctcaaagtgtt

SEQ ID NO: 64649 - DNA, 75 bp, synthetic construct
  source 1..75: mol_type = other DNA
caattgctagtgtggtcggttataaaggcaagattactttcgatagtactaaaccggatggcacacctaggaaat

SEQ ID NO: 64650 - DNA, 75 bp, synthetic construct
  source 1..75: mol_type = other DNA
cggtaatgtccgtaaaaccggttccggttcactgactgtccgaagcaatgctgcctggagcggacagacagatat

SEQ ID NO: 64651 - DNA, 75 bp, synthetic construct
  source 1..75: mol_type = other DNA
gagttttacgaagctgaggcgaaaaagcaggcgaagcagtttttcatggatgttgctgccgggttatgtgaatgg

SEQ ID NO: 64652 - DNA, 75 bp, synthetic construct
  source 1..75: mol_type = other DNA
agcataagcaatgaattgcggagaatattatctgcgattactgcattgaatgtctataaaggtgatgtttcttct

SEQ ID NO: 64653 - DNA, 75 bp, synthetic construct
  source 1..75: mol_type = other DNA
cgcacgcgatccttcgctgtatggccggatggattttgcctggtgtggcaatgcgccggtgaagctgctggagta

SEQ ID NO: 64654 - DNA, 75 bp, synthetic construct
  source 1..75: mol_type = other DNA
cctgaaaaaaaacgccgcgatgagcagtttgctgcgttttacgattattgccggaaagtgatgagcagaaatctc

SEQ ID NO: 64655 - DNA, 75 bp, synthetic construct
  source 1..75: mol_type = other DNA
agtgtaaccggccatcctttgttgtatccggtgatgctgggaaaataaccatctcagaaaatgggaaagtaacac

SEQ ID NO: 64656 - DNA, 75 bp, synthetic construct
  source 1..75: mol_type = other DNA
caggtgaaagggcatgacctggcaaaatgggtataccgggaaccgcctccggatgcgcagcatatcacagtaacc

SEQ ID NO: 64657 - DNA, 75 bp, synthetic construct
  source 1..75: mol_type = other DNA
gctaccgggctagcggcctcaatctggtaacggctgccgtcgtgttgtggaacacggtctatctggaacgggctg

SEQ ID NO: 64658 - DNA, 75 bp, synthetic construct
  source 1..75: mol_type = other DNA
actaccccggacgtttcaagggtgcccacgggcagaactttgcccgctggcagatggatggctggcgcaacaacg

SEQ ID NO: 64659 - DNA, 75 bp, synthetic construct
  source 1..75: mol_type = other DNA
aaagttattccactgtcgccaggccatgcctacgggatgtttatggaacgctttaacgagttatcggagttacgc

SEQ ID NO: 64660 - DNA, 75 bp, synthetic construct
  source 1..75: mol_type = other DNA
aatggtaaaatcatgtcggaaattgctcaatgtagataccagtggtcaataattagtcgcatgtatgaagatacc

SEQ ID NO: 64661 - DNA, 75 bp, synthetic construct
  source 1..75: mol_type = other DNA
tacgtattgcaatggagatatcctatctctgtgcggcaaggctcggtgatgtgctcgagctgaaatggcaggata

SEQ ID NO: 64662 - DNA, 75 bp, synthetic construct
  source 1..75: mol_type = other DNA
ggactggtacgtacggcaagcctgattaacgatgcccgcaatgaagtgaaaaacagcgtactggtcgataacggc

SEQ ID NO: 64663 - DNA, 75 bp, synthetic construct
  source 1..75: mol_type = other DNA
atagcctgaacaaaagatatttacccccgtatggcgatttattgacaaaagcagagaacttccaacgcctggcgg

SEQ ID NO: 64664 - DNA, 75 bp, synthetic construct
  source 1..75: mol_type = other DNA
ttccttttcgtgaaggtgagcgtcgtcgtcagaaaaccacgctgacagagcagaaatacagccgccagcgggaac

SEQ ID NO: 64665 - DNA, 75 bp, synthetic construct
  source 1..75: mol_type = other DNA
ggtaatccttatgtgatgaattttgacgataataagttatatgcacttacaggtttggctcgaataaaaggtaaa

SEQ ID NO: 64666 - DNA, 75 bp, synthetic construct
  source 1..75: mol_type = other DNA
gacgcaaacagcttggtctaacccaacaacagcttgctgatatggttggaagatcgagtgtgagcgtttttaaat

SEQ ID NO: 64667 - DNA, 75 bp, synthetic construct
  source 1..75: mol_type = other DNA
gcagggagctggaagcctggttctgtctttgcgctgaaagggggatttgaagagctggattatggtcatgacttt

SEQ ID NO: 64668 - DNA, 75 bp, synthetic construct
  source 1..75: mol_type = other DNA
tcaaaaatgagatagatggattgctcgaatggatcgctttccaccgggtgctcggcgttagtggatttattattg

SEQ ID NO: 64669 - DNA, 75 bp, synthetic construct
  source 1..75: mol_type = other DNA
ggaactgttgttttgtttgtatggtatatagcatggcaaaaagaacgttctaaagaagaagagtttaaatcaagt

SEQ ID NO: 64670 - DNA, 75 bp, synthetic construct
  source 1..75: mol_type = other DNA
cattagactaaaagatcatctcaatcgttttccagacttttataatgcatctttaataaaggaggaagctgaaag

SEQ ID NO: 64671 - DNA, 75 bp, synthetic construct
  source 1..75: mol_type = other DNA
ggagccaaccgcgcgattactcagttcttcttcgatgtcgaaagctacctgcgttttcgtgaccgctgtgtatcg

SEQ ID NO: 64672 - DNA, 75 bp, synthetic construct
  source 1..75: mol_type = other DNA
gtaacaggatcaatgaatctgactatgtggtgcttcctgcagacagttccccaaccgaaatcggctcaggtcttc

SEQ ID NO: 64673 - DNA, 75 bp, synthetic construct
  source 1..75: mol_type = other DNA
actggatgagacaactaatcagaaacttttagcagccagggatcgtagcggaagaacaaaaactaatgaggtgtt

SEQ ID NO: 64674 - DNA, 75 bp, synthetic construct
  source 1..75: mol_type = other DNA
cgatggtggctgaagtgtgttcaagccagcagatttttcgcttcaaagcgcggtatgattatcctaataaaaagt

SEQ ID NO: 64675 - DNA, 75 bp, synthetic construct
  source 1..75: mol_type = other DNA
acgtgacgttgatgagcttaagacagatgtcaaatctatcgacagaaacatgatcgctgttctggagcgactcga

SEQ ID NO: 64676 - DNA, 75 bp, synthetic construct
  source 1..75: mol_type = other DNA
agaatctgttggaggtgcaggcattagaagtggcacctgacagcgtgcacgcctaccgttatgtaatgaaaccaa

SEQ ID NO: 64677 - DNA, 75 bp, synthetic construct
  source 1..75: mol_type = other DNA
agacgttgatgaacttaaaacagacgttaaagctatcgacaaaaatatgataactattcttgcacgtctggactc

SEQ ID NO: 64678 - DNA, 75 bp, synthetic construct
  source 1..75: mol_type = other DNA
aaaaaaattcgccccgatgttattgttaatgctgctgctcacactgcagtagacaaagcggaatcagaaccgaat

SEQ ID NO: 64679 - DNA, 75 bp, synthetic construct
  source 1..75: mol_type = other DNA
ttacgccgagatggacaattctgcggcaaatacagcagtgaccagcgcgcctgcattattgatcgggcatgccag

SEQ ID NO: 64680 - DNA, 75 bp, synthetic construct
  source 1..75: mol_type = other DNA
acgccagtcggttcattactcgtcggtaatcgtgattacattaaacgtgccattcgctggcggaaaatgacaggt

SEQ ID NO: 64681 - DNA, 75 bp, synthetic construct
  source 1..75: mol_type = other DNA
ttaacaacctgttcgatcgtgaatacgtcgccagctgctttaacacttatggctgcttctggggcgcagaacgtc

SEQ ID NO: 64682 - DNA, 75 bp, synthetic construct
  source 1..75: mol_type = other DNA
cctgccgttatcaaaggggagcttctggcgacatatcgtcagatggagcgtgccggtattgtggaaaattacgat

SEQ ID NO: 64683 - DNA, 75 bp, synthetic construct
  source 1..75: mol_type = other DNA
tcatgtggagtcaacattacgggatgttccctgtctgaaaattctttccccctggctggggcgtaagcaccggga

SEQ ID NO: 64684 - DNA, 75 bp, synthetic construct
  source 1..75: mol_type = other DNA
ctggtgggcgcgaatattgccatggatatggtgaagattttaagccgtgaaggagtgaaagatttccacttctat

SEQ ID NO: 64685 - DNA, 75 bp, synthetic construct
  source 1..75: mol_type = other DNA
agattgttcgctggctggagagtgagcatccactgaaagccaaaattctccccaccgaatggctgggcgaacata

SEQ ID NO: 64686 - DNA, 75 bp, synthetic construct
  source 1..75: mol_type = other DNA
ccggatgccccctgggatccttatgcgtcgttgcttgccgctgtggatgctgaattttcaacgaacggacaaggg

SEQ ID NO: 64687 - DNA, 75 bp, synthetic construct
  source 1..75: mol_type = other DNA
gttgcaaaagaaaaatggacctcgtccgccatcatttcccagccggatgcggcgcagattgccacatacgcgaat

SEQ ID NO: 64688 - DNA, 75 bp, synthetic construct
  source 1..75: mol_type = other DNA
ggaaaaaatgttgctaagggggtatacgattatcgtctgacatcagggccccataatgatggactgtatataggt

SEQ ID NO: 64689 - DNA, 75 bp, synthetic construct
  source 1..75: mol_type = other DNA
gtgaaagcttccgtctgcgccaacatgaactcccggctatggatttcgtggtggtggcgaaaaaaggggttgccg

SEQ ID NO: 64690 - DNA, 75 bp, synthetic construct
  source 1..75: mol_type = other DNA
ggcagccaggcggctcaacaagtagaacaaacggataagggtaaatcgttaaaagagcgtggagccgattacgtc

SEQ ID NO: 64691 - DNA, 75 bp, synthetic construct
  source 1..75: mol_type = other DNA
gcagatgctggggtatgtgtcgctggctgaggttccggcggaacagctggacggcaaaagtgagcgcattcagca

SEQ ID NO: 64692 - DNA, 75 bp, synthetic construct
  source 1..75: mol_type = other DNA
gccaccaaagcgatgctggagcggcgtgatgtggttgtggtggcgtctgtttccgcgatttatggtctgggcgat

SEQ ID NO: 64693 - DNA, 75 bp, synthetic construct
  source 1..75: mol_type = other DNA
tcagtggacacaaaacagaaaatcaggtgttgatttacgatcgtaaaaccaaaatcacaccaacactggatttgc

SEQ ID NO: 64694 - DNA, 75 bp, synthetic construct
  source 1..75: mol_type = other DNA
ctggcttttggcccctacccgcaaataacgctggcggaagcccgcgaaaaacgcgatgcggcgcgtaagctactg

SEQ ID NO: 64695 - DNA, 75 bp, synthetic construct
  source 1..75: mol_type = other DNA
acacaggagttacagctatccgcggtggtaatgtcctcatgaacagcaacagtgttctgggacagaccagcgaga

SEQ ID NO: 64696 - DNA, 75 bp, synthetic construct
  source 1..75: mol_type = other DNA
gtttcttcgcaggctaaaaaacaaagctgctgatgatgtgctggtgtttcctggtgtgaagggcgttattcagga

SEQ ID NO: 64697 - DNA, 75 bp, synthetic construct
  source 1..75: mol_type = other DNA
gaaacccgccacagaaaaacagtaccgcagcatattacagaattattccggtgactggatggcccataccctcgc

SEQ ID NO: 64698 - DNA, 75 bp, synthetic construct
  source 1..75: mol_type = other DNA
cttccaggtcttcagccttggtgatattcgtaaaatcaccgaacagggcgtgcacttccgtaacccgatcaacgg

SEQ ID NO: 64699 - DNA, 75 bp, synthetic construct
  source 1..75: mol_type = other DNA
atgaaactgaaaaaactccctgggttcagtttaggatttattgctctggcggtgggtaatgtatatgcaacacaa

SEQ ID NO: 64700 - DNA, 75 bp, synthetic construct
  source 1..75: mol_type = other DNA
attcacctctgaagaattcactcacttcctggaagaactgaccaaacagtatccgatcgtttccatcgaagacgg

SEQ ID NO: 64701 - DNA, 75 bp, synthetic construct
  source 1..75: mol_type = other DNA
gagggtaaattagagagcttcgtaactgatttttaccagcgtcaggggcgagaagtaccacctttgaacgttgat

SEQ ID NO: 64702 - DNA, 75 bp, synthetic construct
  source 1..75: mol_type = other DNA
gacttgtcggagtttcgcagtgtcatgcgcactgacggcacggtgacgcagctgcgtttaaagcaggttgcgctg

SEQ ID NO: 64703 - DNA, 75 bp, synthetic construct
  source 1..75: mol_type = other DNA
tgtccgtggtgcagcgcagttttctttaagcaggtaaaaggcgcgaaggtaaaagccagcgcagttattcagaat

SEQ ID NO: 64704 - DNA, 75 bp, synthetic construct
  source 1..75: mol_type = other DNA
atgaaatactttagcgattctaaatcttcttttagaaaaaaacaggttagtcgactaaactcgcaacactccact

SEQ ID NO: 64705 - DNA, 75 bp, synthetic construct
  source 1..75: mol_type = other DNA
tgtccatgcagagacagtttccggcactgacgcccgccatgcttgatttcctgaaaaccgatatagcaaaggcgg

SEQ ID NO: 64706 - DNA, 75 bp, synthetic construct
  source 1..75: mol_type = other DNA
ccgtaccgcccgccgtcataccggtgcctatatcaccatcacacagaacatcgtcgactttgactctgacaaggc

SEQ ID NO: 64707 - DNA, 75 bp, synthetic construct
  source 1..75: mol_type = other DNA
tcactcaggcggttaattcactgctgactgcgcttaaattaccagatgaatcctctcaggctaatcagatcctcg

SEQ ID NO: 64708 - DNA, 75 bp, synthetic construct
  source 1..75: mol_type = other DNA
gcagatgctgggatatgcctcgctggcagaggttccggcggaacaactggacggcaaaagtgagcgcattcagca

SEQ ID NO: 64709 - DNA, 75 bp, synthetic construct
  source 1..75: mol_type = other DNA
agctgtatgagtttcgcagacgccagcagatgctggggtatgcctcgctggcagaagtcccggcggaacaactgg

SEQ ID NO: 64710 - DNA, 75 bp, synthetic construct
  source 1..75: mol_type = other DNA
gcggaagccagcggtgatttatggcgtgacgcccgctgggccatcagccgggtacaggacgcgccgcactgcaca

SEQ ID NO: 64711 - DNA, 75 bp, synthetic construct
  source 1..75: mol_type = other DNA
aaatacgccgttctggcctgatgtggacttgtcggagtttcgcagtgtcatgcgcactgacggcacggtgacgca

SEQ ID NO: 64712 - DNA, 75 bp, synthetic construct
  source 1..75: mol_type = other DNA
gtcggtgaacgacaaagacacgttgaaagccggaaaactcaccatcgactatgactacacgccagtgccgccact

SEQ ID NO: 64713 - DNA, 75 bp, synthetic construct
  source 1..75: mol_type = other DNA
aaaagaaaaccggagaatacttgaccaaagggttaaccgaagccggttttgtggtcgatttggccgacaacgggc

SEQ ID NO: 64714 - DNA, 75 bp, synthetic construct
  source 1..75: mol_type = other DNA
tgtatctggtaaaccgtcccatctttccggctgccccgcttgatattgatgaaatggttatcgctgccagccagg

SEQ ID NO: 64715 - DNA, 75 bp, synthetic construct
  source 1..75: mol_type = other DNA
cctcttacccgccatccggcaaggagaaaggctatgaagcacaaccctctggtggtgtgtctgctcattatctgc

SEQ ID NO: 64716 - DNA, 75 bp, synthetic construct
  source 1..75: mol_type = other DNA
agccggatcagtccagacagcagcgaaagaaaaaatatcactgcttgcaccctatgatgaatggtatttcaattt

SEQ ID NO: 64717 - DNA, 75 bp, synthetic construct
  source 1..75: mol_type = other DNA
cgccattcgcaaccgtatgaccgtgcaggaactggccgaccaattgttcccctacctgaccatggtcgaagggct

SEQ ID NO: 64718 - DNA, 75 bp, synthetic construct
  source 1..75: mol_type = other DNA
cttcgcgtaaccgggatgatcacctttgacaatgagcgggcccttcagcgcattttccagctggcctctgccacc

SEQ ID NO: 64719 - DNA, 75 bp, synthetic construct
  source 1..75: mol_type = other DNA
ccaccgaggccctggtcagcgacaccattcccgagcgcctggccgtgatcggctcgtctgtggtggcgctggaac

SEQ ID NO: 64720 - DNA, 75 bp, synthetic construct
  source 1..75: mol_type = other DNA
cactggctgactggttttatctcagtccggaatggctgaacggcagggtgcattatccactgtatcgtccgggag

SEQ ID NO: 64721 - DNA, 75 bp, synthetic construct
  source 1..75: mol_type = other DNA
tagatgcaaaatttgatgctattgccggttttgctgatataggaacccatctcgaccagccggtaaaaacatact

SEQ ID NO: 64722 - DNA, 75 bp, synthetic construct
  source 1..75: mol_type = other DNA
atctgcccagtcacagctcggcgttaaaccgcgcattctcggcgtgccaggtcacgacacgaaggcggtagctac

SEQ ID NO: 64723 - DNA, 75 bp, synthetic construct
  source 1..75: mol_type = other DNA
gttaccgttgaaaggtgccgaactggatcttttaatcgtgatgaagcgcacgacggcgcgtccgcgtccgccaat

SEQ ID NO: 64724 - DNA, 75 bp, synthetic construct
  source 1..75: mol_type = other DNA
ctaaaatgctttttacatcaaaactaagaatgcgtatttatgaaaagttagccaggtatctagcaaacggtgttc

SEQ ID NO: 64725 - DNA, 75 bp, synthetic construct
  source 1..75: mol_type = other DNA
acggcgatttaagtgctgatatccggcagcttgagaacgcgctggcacgctgtgccagccaggtaaaaatgatta

SEQ ID NO: 64726 - DNA, 75 bp, synthetic construct
  source 1..75: mol_type = other DNA
gtcaccgtaatgatattttactggttgagcagatagaccgcctgacccgtcttagcaacagcgactggataacgc

SEQ ID NO: 64727 - DNA, 75 bp, synthetic construct
  source 1..75: mol_type = other DNA
cggcgaagaggcacaggcgcaaaccatttctaacatcatcggcaccacggatgagaatggcaaatataccgggat

SEQ ID NO: 64728 - DNA, 75 bp, synthetic construct
  source 1..75: mol_type = other DNA
taccgtcagaatttcagccagcgtgagctgatggtcatctggccggatttcctcgcatgggatacggtcaccagt

SEQ ID NO: 64729 - DNA, 75 bp, synthetic construct
  source 1..75: mol_type = other DNA
atgaacaatgaactccccgacgatattgaactgcttaaagccatgttgcgtacgcaacagagtcggcttcgccag

SEQ ID NO: 64730 - DNA, 75 bp, synthetic construct
  source 1..75: mol_type = other DNA
ttaccggaacccccaaagcgccgacgccagcggcggggaataataccacgcaacttgcgaccaccgcgtttgttc

SEQ ID NO: 64731 - DNA, 75 bp, synthetic construct
  source 1..75: mol_type = other DNA
tgaaggtgtacgtggatgatctgatggcaaaacatcttgccgcactggacccgcattcacagtacgcgccaaaag

SEQ ID NO: 64732 - DNA, 75 bp, synthetic construct
  source 1..75: mol_type = other DNA
ctcgcaaacgttatggcaaggcgccggggcgctttctggcatgatgctgattgcacttacgcttttaatgccctc

SEQ ID NO: 64733 - DNA, 75 bp, synthetic construct
  source 1..75: mol_type = other DNA
aacagcactgatttcatcaatgactcagcaataccctatccctttgctattgtttgtttccattgacaacaaaag

SEQ ID NO: 64734 - DNA, 75 bp, synthetic construct
  source 1..75: mol_type = other DNA
acggcgacctgagtgccgatattcgcaggcttgagcacgcgctcaccgcctgcgcgataaaggtcgaaaccatca

SEQ ID NO: 64735 - DNA, 75 bp, synthetic construct
  source 1..75: mol_type = other DNA
gatgcatctatgttttttaactcctttcaaccaaggaaatttgaaaacaaacccctttatgagaaagaggatgat

SEQ ID NO: 64736 - DNA, 75 bp, synthetic construct
  source 1..75: mol_type = other DNA
tggcactgaatgaggctaaaaccatcctgattactgattgtgaaaatgggggggggttatgcgtgatgatcgttt

SEQ ID NO: 64737 - DNA, 75 bp, synthetic construct
  source 1..75: mol_type = other DNA
gtcacgacaccaaggcggtagctactgagttgctgagcgtggcgcaaagcctgcgtgggtttgcttacctgtcag

SEQ ID NO: 64738 - DNA, 75 bp, synthetic construct
  source 1..75: mol_type = other DNA
ggaatgaactacgtgagttcaagcacagactatctttaagcgagtctgttagccgcgaggtaacagaaagttact

SEQ ID NO: 64739 - DNA, 75 bp, synthetic construct
  source 1..75: mol_type = other DNA
tattacgtgcaatgctggtctgaaggtcaaggatggcttggtgatgatatcagcatccctgaatgcgatgtaatc

SEQ ID NO: 64740 - DNA, 75 bp, synthetic construct
  source 1..75: mol_type = other DNA
caaaagttgatgatccttttcctgaaaagctcattgccacaatccgtgggatgggatattcattcgtagcggtaa

SEQ ID NO: 64741 - DNA, 75 bp, synthetic construct
  source 1..75: mol_type = other DNA
ggcgaagaaacaccatccgcgctggtatcgtgaaatcgagaaggcagaagcgaaaaaagagagtgaagaagggat

SEQ ID NO: 64742 - DNA, 75 bp, synthetic construct
  source 1..75: mol_type = other DNA
tcagaaaatgaggaatatgacgaaaaggccatgcgcattgatatgggtaatatcggtttgttactggcaatgctt

SEQ ID NO: 64743 - DNA, 75 bp, synthetic construct
  source 1..75: mol_type = other DNA
cgttcctgctcaacggtctggcggccagcgatttgctgcttacccctaccccaccagcccaggttgacttccact

SEQ ID NO: 64744 - DNA, 75 bp, synthetic construct
  source 1..75: mol_type = other DNA
ctccatggagcagatggtggaggacgcggtggccgccatccccgatgacagcagcatcgaactcaaagccgcgga

SEQ ID NO: 64745 - DNA, 75 bp, synthetic construct
  source 1..75: mol_type = other DNA
ccgatgagttcgtggcgttcaccgaacccaaaaaatcactgaccgcgcagattgcctcgcgcagtcgcgccatcg

SEQ ID NO: 64746 - DNA, 75 bp, synthetic construct
  source 1..75: mol_type = other DNA
accctggccgatcaggttcaccataaactgaatcatcttgaagaaaaactccaccgtgttgaccaggttcagcgg

SEQ ID NO: 64747 - DNA, 75 bp, synthetic construct
  source 1..75: mol_type = other DNA
gaacgcagcgttatttccaaattcggggatgccaaagaccagtggttctcttcctttatgctgcgcatcaacgat

SEQ ID NO: 64748 - DNA, 75 bp, synthetic construct
  source 1..75: mol_type = other DNA
aggtatcccggcaacagagatgttcaacgtgattccactggctccgggccatgcctacgggatgtttatggaacg

SEQ ID NO: 64749 - DNA, 75 bp, synthetic construct
  source 1..75: mol_type = other DNA
catttcttctcaatggcctggcggcgagtgatttacttctcacccctactcccccggcgcaagttgatttccatt

SEQ ID NO: 64750 - DNA, 75 bp, synthetic construct
  source 1..75: mol_type = other DNA
caatgaatgttttgcttcaaggacagaagttaaccctactggaccctgaaatgtggttcttacggggaaatgaaa

SEQ ID NO: 64751 - DNA, 75 bp, synthetic construct
  source 1..75: mol_type = other DNA
atgactcaaaaatatgaactgattgtgaaagggatccgcaattttgagaataaagttacggtaactttagcgtta

SEQ ID NO: 64752 - DNA, 75 bp, synthetic construct
  source 1..75: mol_type = other DNA
gatggaagaaaaaatagacgccgtaatccgtgagaaatacgggttacctcctgttatgagcacgccagtgaaata

SEQ ID NO: 64753 - DNA, 75 bp, synthetic construct
  source 1..75: mol_type = other DNA
aaagttattccactggctccgggccatgcctacgggatgtttatggaacgttttaaagagctgcataagatacat

SEQ ID NO: 64754 - DNA, 75 bp, synthetic construct
  source 1..75: mol_type = other DNA
atttgtgaacttttgagtctgacaaataaaaaattaggtgaactggtttgtggttgtataaacgactggccggca

SEQ ID NO: 64755 - DNA, 75 bp, synthetic construct
  source 1..75: mol_type = other DNA
atccgtgagaaatacgggttacccccggttatgagtacgcccgtgaaatatgccgatctcatcatgctggcaacc

SEQ ID NO: 64756 - DNA, 75 bp, synthetic construct
  source 1..75: mol_type = other DNA
ctgtcgtttaacaataaaggcgataaaattcatgtggttgccggctttgtcttcattcctgtgccgggggttttt

SEQ ID NO: 64757 - DNA, 75 bp, synthetic construct
  source 1..75: mol_type = other DNA
gccagacttgaaagtggaataagaatatccattggtagtggccaatattctgttcactatgtccaactactggat

SEQ ID NO: 64758 - DNA, 75 bp, synthetic construct
  source 1..75: mol_type = other DNA
aacgtgattccactggcaccgggccatgcctacgggatgtttatggaacgttttaacgagttattagaattacac

SEQ ID NO: 64759 - DNA, 75 bp, synthetic construct
  source 1..75: mol_type = other DNA
tggtataaccggtactgtcgtcactcgttatgtgctgatttcaggacactgatatcgttactgaaatcgttatct

SEQ ID NO: 64760 - DNA, 75 bp, synthetic construct
  source 1..75: mol_type = other DNA
attctggaaatggaaaatctggtgaaaatcatccgtgcctcttttcacggcgcaaaaatcaccacacagacagtg

SEQ ID NO: 64761 - DNA, 75 bp, synthetic construct
  source 1..75: mol_type = other DNA
aatgggcagccctataccatcaccggtggcacggtctgtttcgtacgcgatcatgatcggcatctgtatgaacat

SEQ ID NO: 64762 - DNA, 75 bp, synthetic construct
  source 1..75: mol_type = other DNA
ttgccgaagctgaggccagattacagcgcctgaaggcgaagagccggagcctggacacggcgcaaaaagtcattg

SEQ ID NO: 64763 - DNA, 75 bp, synthetic construct
  source 1..75: mol_type = other DNA
ccccctcaataaaccggtgctgattaccaatgtgcagagcgcaattgcaaaggctggtaaaaaaggcacgctggc

SEQ ID NO: 64764 - DNA, 75 bp, synthetic construct
  source 1..75: mol_type = other DNA
gccctgccatcttgcccgtgaaatggggataaacacgaagacggtgaacacctttctgtatatgggacttggtaa

SEQ ID NO: 64765 - DNA, 75 bp, synthetic construct
  source 1..75: mol_type = other DNA
tggcgcaggcgttcgcccgactcggagcgaaggtgacgatcctggctcgcagcacgctgttcttccgcgaagacc

SEQ ID NO: 64766 - DNA, 75 bp, synthetic construct
  source 1..75: mol_type = other DNA
gatgcggaaaccctcaaggccggaaaactgtatatcgactacgactataccccggtgcctcctcttgaaaacctg

SEQ ID NO: 64767 - DNA, 75 bp, synthetic construct
  source 1..75: mol_type = other DNA
ataaaaaagcctataacagcggtatgggcgtacatgaatacgatgataaacggggaaacaaagcccgtggagaga

SEQ ID NO: 64768 - DNA, 75 bp, synthetic construct
  source 1..75: mol_type = other DNA
ccggcgatcactgtgctgcacggctccgcccgctttaaggacaatcgcaacctgatcgtgcaactcaacgacggc

SEQ ID NO: 64769 - DNA, 75 bp, synthetic construct
  source 1..75: mol_type = other DNA
atgtcatttattaaaactttttccgggaagcatttttattatgacaagataaataaagacgacatcgttattaac

SEQ ID NO: 64770 - DNA, 75 bp, synthetic construct
  source 1..75: mol_type = other DNA
ctgatttggtttggtgaaactggcgttcacgaattcgcgtacctggtcagggactacgtaaacaaaacaaattaa

SEQ ID NO: 64771 - DNA, 75 bp, synthetic construct
  source 1..75: mol_type = other DNA
cccgcacggtcaactcgctgctgacggccctgaagatgcccgatgcgtcctctgaggcgaacgatgtcctcgggc

SEQ ID NO: 64772 - DNA, 75 bp, synthetic construct
  source 1..75: mol_type = other DNA
cgcgagtccggcgtgctgcagcgcgccgaaagctttaatgtcgccaatctgatgccggtggtggcggacagcccg

SEQ ID NO: 64773 - DNA, 75 bp, synthetic construct
  source 1..75: mol_type = other DNA
atgttgcaacgtacgctgggcagtggctggggagtgttgctgccgggattgctgattgcagggctgatgtatgcg

SEQ ID NO: 64774 - DNA, 75 bp, synthetic construct
  source 1..75: mol_type = other DNA
gaacgggattatttcaccctcagagagcgaatcgtcacagtgacgaaacaggttggatatttgcaggaatacatc

SEQ ID NO: 64775 - DNA, 75 bp, synthetic construct
  source 1..75: mol_type = other DNA
ccataagctgacggctatccgtgagcatgataaatatcagaattcgccgggcatcaccaaccgactggatgaaat

SEQ ID NO: 64776 - DNA, 75 bp, synthetic construct
  source 1..75: mol_type = other DNA
tggataacggttttgtcgatattgttgacggtcgttttgatgccgggatccggctgggtgaaagtgtggataagg

SEQ ID NO: 64777 - DNA, 75 bp, synthetic construct
  source 1..75: mol_type = other DNA
atctgcccagtcacagctcggcgttaaaccgcgcattctgggtgtacctggtcacgacaccaaggcggtagctac

SEQ ID NO: 64778 - DNA, 75 bp, synthetic construct
  source 1..75: mol_type = other DNA
aaaaacgcccgtgataacgaccagtatgtcgagtcaccgaccatccgcagccgtctggacgaaatgattgtgctg

SEQ ID NO: 64779 - DNA, 75 bp, synthetic construct
  source 1..75: mol_type = other DNA
gtggatgcacaggctttcatcgagattgtcggggagatgattaaccataacccggactccctgtacccgaaaaga

SEQ ID NO: 64780 - DNA, 75 bp, synthetic construct
  source 1..75: mol_type = other DNA
tctgagccggttgttaagctgctgcaggaaaacgcctaccgtgaggttatctggcgtcagcgagtgaacgaagcc

SEQ ID NO: 64781 - DNA, 75 bp, synthetic construct
  source 1..75: mol_type = other DNA
tttatagtgattagtgccggtgtcagcctgataagacaaaaggtgccagaccataaaatccagcagatgatgggg

SEQ ID NO: 64782 - DNA, 75 bp, synthetic construct
  source 1..75: mol_type = other DNA
gcagcgttatgtcccgctggtgcgtcacgaagcattgcgcctgcaggttcgactgcccgcgagcgtggaacttga

SEQ ID NO: 64783 - DNA, 75 bp, synthetic construct
  source 1..75: mol_type = other DNA
cgaccatcccgccgacaccggcagtgatggaatctgacaccgattatcgtctgcgtattcagcaggcgtttgaag

SEQ ID NO: 64784 - DNA, 75 bp, synthetic construct
  source 1..75: mol_type = other DNA
aatatagccgctaaattttgtcaccaaaagaaatatggctgttatgagaatgtgaaggctgtacatcgttcaagt

SEQ ID NO: 64785 - DNA, 75 bp, synthetic construct
  source 1..75: mol_type = other DNA
atacgttacactgatccactggggttagaacgagttataagtgtatatgggcctcccgctccagaccgggcaggt

SEQ ID NO: 64786 - DNA, 75 bp, synthetic construct
  source 1..75: mol_type = other DNA
cctgcgactcgtgcgcgacacatgtcaaggacgccctggagaaagtgccgggcgtgctgtcggcgctcgtgtcct

SEQ ID NO: 64787 - DNA, 75 bp, synthetic construct
  source 1..75: mol_type = other DNA
atggaatttcacgaaaacaaagccaacgcgccgtttatcggcttcgtgcaactctggcaggcggtgaggcgttgg

SEQ ID NO: 64788 - DNA, 75 bp, synthetic construct
  source 1..75: mol_type = other DNA
tgtcgagttttatgacgaccagagcggctatgagcgcgggctgacgctgccgcttcgccatccttcagggctgtt

SEQ ID NO: 64789 - DNA, 75 bp, synthetic construct
  source 1..75: mol_type = other DNA
ccggacgcgataatcagcagattaagcgcagcatctgtttgctggcagagcgcggcaagctggcggaactgcgtt

SEQ ID NO: 64790 - DNA, 75 bp, synthetic construct
  source 1..75: mol_type = other DNA
acccgacgggtgttacagcagatgagtgatgagcggttgagggatattgggttacgcagggaggatgtggagtga

SEQ ID NO: 64791 - DNA, 75 bp, synthetic construct
  source 1..75: mol_type = other DNA
agcagcagagcaggcggatcgggctgatagtccccagtgttgttatttcggaaaagcacgatgactcgcttgaaa

SEQ ID NO: 64792 - DNA, 75 bp, synthetic construct
  source 1..75: mol_type = other DNA
ctgcaaccagtggtcggctactggaccgataaatatccgatgccgtggtcgttgccaattggcatgtgctttacc

SEQ ID NO: 64793 - DNA, 75 bp, synthetic construct
  source 1..75: mol_type = other DNA
tgcgcgctgcaggttaaaaccgtcaaacactgtcaggatgaactcgatgcagaagcacaaaagcctgcgcaaagc

SEQ ID NO: 64794 - DNA, 75 bp, synthetic construct
  source 1..75: mol_type = other DNA
gtggaaagagtaaatgattccgccatgaaccgcctgctgacaccgctgatgcgtcgtgtgcgtctgatgcttgcg

SEQ ID NO: 64795 - DNA, 75 bp, synthetic construct
  source 1..75: mol_type = other DNA
acccgcgagcgcaggctggaaaaagtgctgccgggctttcgctataacgtcgtaggcatcacgctggatcgccag

SEQ ID NO: 64796 - DNA, 75 bp, synthetic construct
  source 1..75: mol_type = other DNA
tttccattcttgctggttgttcatcaccgccagagccaacacccgtgcagtttgaaaaggcaaatgaagtgatca

SEQ ID NO: 64797 - DNA, 75 bp, synthetic construct
  source 1..75: mol_type = other DNA
aaagtggcgcatatcgcggattcctggacggcagacctgccggctggtacagggattatcgcagcgcggatgatt

SEQ ID NO: 64798 - DNA, 75 bp, synthetic construct
  source 1..75: mol_type = other DNA
cctgcccttcctgtggtaagcagattgctatcaggccaaaaggttatttctgtacaggatgtgaatttaaaatct

SEQ ID NO: 64799 - DNA, 75 bp, synthetic construct
  source 1..75: mol_type = other DNA
ccgcagtagcaaatgatattgttaaggcgcttgggggcaattttacccgtcatgatggctggtttgaaagtgata

SEQ ID NO: 64800 - DNA, 75 bp, synthetic construct
  source 1..75: mol_type = other DNA
ggcctgattgtgaatcgtacccgcgctaaccagaaccacaaatccagtttctactacaccatgaccggagtcttt

SEQ ID NO: 64801 - DNA, 75 bp, synthetic construct
  source 1..75: mol_type = other DNA
aatggtgtgattgaacgggcacgcgccggtatcgatgaggccatcagccgtgagcagcttatccccctcgaccgt

SEQ ID NO: 64802 - DNA, 75 bp, synthetic construct
  source 1..75: mol_type = other DNA
gataaagcgtgggcagacggaacggcagcatcccttgcaggaaaaccggctacagttgaagcggcagcaactgat

SEQ ID NO: 64803 - DNA, 75 bp, synthetic construct
  source 1..75: mol_type = other DNA
atgaacatcctgaggcaggggttatttctgatgaggcggtcacttttttcagaagctatctgaaaaattatccgg

SEQ ID NO: 64804 - DNA, 75 bp, synthetic construct
  source 1..75: mol_type = other DNA
cgccggtcaactggaccttctccggcggagagcagacagatccccgcgcaaggcttcacctgaaagcgcattcgc

SEQ ID NO: 64805 - DNA, 75 bp, synthetic construct
  source 1..75: mol_type = other DNA
gtacatgaacaaaaagttcaaactgacggcacaaaagacgctggatattacgcagcaactacgcgaaaaatataa

SEQ ID NO: 64806 - DNA, 75 bp, synthetic construct
  source 1..75: mol_type = other DNA
tatcagccggggagcttcacgccactcatcagagttgaaaccgccaccggtgagctggcgaaaacgcagcgccgc

SEQ ID NO: 64807 - DNA, 75 bp, synthetic construct
  source 1..75: mol_type = other DNA
cgcctacgctcgaaattcgtccgggttatcgcttcaatatcatggtcactaaagacctggcattcacaaagcctt

SEQ ID NO: 64808 - DNA, 75 bp, synthetic construct
  source 1..75: mol_type = other DNA
tggatgacggcagcagtggcgaagtgagtctggtgggacaaccgctacataatatggacgaagaagcgcgggcaa

SEQ ID NO: 64809 - DNA, 75 bp, synthetic construct
  source 1..75: mol_type = other DNA
tgacagacgctttatcgacaatctgctgcgtcaccatcgggagaacctggagcttccattatcccgccagggcga

SEQ ID NO: 64810 - DNA, 75 bp, synthetic construct
  source 1..75: mol_type = other DNA
atgaccgacgtgcagcatatttatgatcgggtcgccaaaatcgccgaaggtgcggcattgatgaccgaaaccacg

SEQ ID NO: 64811 - DNA, 75 bp, synthetic construct
  source 1..75: mol_type = other DNA
accccatcggccgacaacagtcagttggttatcaatgcgctgaccgacaaaggtttacgctttgcaggttatggt

SEQ ID NO: 64812 - DNA, 75 bp, synthetic construct
  source 1..75: mol_type = other DNA
tggttctgaaagaactgccggtcatggacgggaaaatccaccgtgtcccgaccgccgatgacaaaaaaggacaaa

SEQ ID NO: 64813 - DNA, 75 bp, synthetic construct
  source 1..75: mol_type = other DNA
ccggatatgcgcttattgatgccctgcctggtatagcggttaatcctgatatgacagcattatggtctgaaaagc

SEQ ID NO: 64814 - DNA, 75 bp, synthetic construct
  source 1..75: mol_type = other DNA
cagaacgcgtctttccaggacgtttcgccacagtccggaggtcagtaagcgcctcagcccttcccgtaatgacaa

SEQ ID NO: 64815 - DNA, 75 bp, synthetic construct
  source 1..75: mol_type = other DNA
caggctaatggcaatgaaccctatatcgaaattatttgcatggattcagaagctgaaatccagaaagcagattaa

SEQ ID NO: 64816 - DNA, 75 bp, synthetic construct
  source 1..75: mol_type = other DNA
atgttgttgttcctgctactgctactgctactgctactgctactgctactgttcttctttttcctgctgctctga

SEQ ID NO: 64817 - DNA, 75 bp, synthetic construct
  source 1..75: mol_type = other DNA
caggggaaaatcagataccggacatggcctcttttgccagtggtgatggatggatgaaattacccaacgggaaaa

SEQ ID NO: 64818 - DNA, 75 bp, synthetic construct
  source 1..75: mol_type = other DNA
tgatcggcacctgccgtctgaacggtatcgatccggaagcgtatctgcgccatatactgagcttactgccggaat

SEQ ID NO: 64819 - DNA, 75 bp, synthetic construct
  source 1..75: mol_type = other DNA
taaaacaacgaaatcagaaatcattaccgcattaggtgagcccgaaaccaaaactacacttgatagtggcaatga

SEQ ID NO: 64820 - DNA, 75 bp, synthetic construct
  source 1..75: mol_type = other DNA
gattttccgagaacgtgctcgcgaaccggattgcgttcgggaaaatatatcagagtgagttacgtcagcgcgttg

SEQ ID NO: 64821 - DNA, 75 bp, synthetic construct
  source 1..75: mol_type = other DNA
caggaaggcaattacaccgacgccctgccattgctgaaagacgcctggcagttgtcgaatcagaacggggagatc

SEQ ID NO: 64822 - DNA, 75 bp, synthetic construct
  source 1..75: mol_type = other DNA
gacgaaaagcggctgttgcctgcggcgccgtgctgcccgaactgcggcggttcactgagctatctgggcgaggat

SEQ ID NO: 64823 - DNA, 75 bp, synthetic construct
  source 1..75: mol_type = other DNA
ctctggccgcagcaggtaaggatgttgccgccctgaatggtgtggacgtccgggcttttaccggtgaggcgaaat

SEQ ID NO: 64824 - DNA, 75 bp, synthetic construct
  source 1..75: mol_type = other DNA
cgctttctgtaccgggtagttatgaggtgataacccttgcaaatggagagtttattgtaatgccgttaccacccg

SEQ ID NO: 64825 - DNA, 75 bp, synthetic construct
  source 1..75: mol_type = other DNA
cgcccgcaaacccgaacagaacgatggatttgattgcatcacggcctcgctgaaagagcaaaaccgtcttttcga

SEQ ID NO: 64826 - DNA, 75 bp, synthetic construct
  source 1..75: mol_type = other DNA
cagtgcgatgccatcgtgcaggcacctgcaccttcgcggcccatcgagcggggtatcgccggaccggggctgctg

SEQ ID NO: 64827 - DNA, 75 bp, synthetic construct
  source 1..75: mol_type = other DNA
gtggtctgtatcagattgcgacctactacggcaagctgggtgcagtcgagccagtgtacaaagaaaccatttcgt

SEQ ID NO: 64828 - DNA, 75 bp, synthetic construct
  source 1..75: mol_type = other DNA
gaaatacaccaaccgtggcttgcagttccttgacctgattcaggaaggtaacatcggcctgatgaaagcggttga

SEQ ID NO: 64829 - DNA, 75 bp, synthetic construct
  source 1..75: mol_type = other DNA
gtggaggcctccggtgccagcctggagaaggcgcggcacgaccagttgcttaccgcgcttcgtacgctgctgtta

SEQ ID NO: 64830 - DNA, 75 bp, synthetic construct
  source 1..75: mol_type = other DNA
gcgttgatagaaaaaggaaataataatttttcgagtattcgtgaaattgatgagttgcgttacagaccatctgag

SEQ ID NO: 64831 - DNA, 75 bp, synthetic construct
  source 1..75: mol_type = other DNA
actggcgtttctgtatgtagatgagattgaacgccttctgattgcgtgtgatgagtcacggaataaagatttggg

SEQ ID NO: 64832 - DNA, 75 bp, synthetic construct
  source 1..75: mol_type = other DNA
tgtttgaactgaaaacgctgccgcatcaacagattcaacaaaacaaaacgtggcggcatgtgaaaaatgagcgaa

SEQ ID NO: 64833 - DNA, 75 bp, synthetic construct
  source 1..75: mol_type = other DNA
gtcacacaggggcaggttctgaccggtagtggctgtactgcaaacggtaattgcctcccgcacgggaatggtgac

SEQ ID NO: 64834 - DNA, 75 bp, synthetic construct
  source 1..75: mol_type = other DNA
ttaaagtcgaagcggcaaaactggtcctggatcagaactacactcacggcgaagcggctaaggcgatgaacgtca

SEQ ID NO: 64835 - DNA, 75 bp, synthetic construct
  source 1..75: mol_type = other DNA
tcttaagtccacgcagatgatgagcgtgattgatgcgattggtgaagggccgattgaaggtccggtgaaggggct

SEQ ID NO: 64836 - DNA, 75 bp, synthetic construct
  source 1..75: mol_type = other DNA
tactggggttgattccgacgctgtttatcgtctcggtgctggtgtttttatttgtccatatgctgcccggcgatc

SEQ ID NO: 64837 - DNA, 75 bp, synthetic construct
  source 1..75: mol_type = other DNA
ctgacgggcgcctgagtgccaaggagttcattggcaaccggacgaagatgagccaggaccagaccagctacgccg

SEQ ID NO: 64838 - DNA, 75 bp, synthetic construct
  source 1..75: mol_type = other DNA
tgcttatttctctcgactagaccgtgacggttgggggtatgaccctgtagagattggtaaagtgattgcagattt

SEQ ID NO: 64839 - DNA, 75 bp, synthetic construct
  source 1..75: mol_type = other DNA
ccttcttcggtaaggggatcggtgcgctgggttgggctgtaatggctgatactgcgccaaaagagatcagcggtc

SEQ ID NO: 64840 - DNA, 75 bp, synthetic construct
  source 1..75: mol_type = other DNA
gtgcaagcggtggccccggaagcgggtgaactgatccagacggcggtgctcgccattcgcaaccgtatgaccgtg

SEQ ID NO: 64841 - DNA, 75 bp, synthetic construct
  source 1..75: mol_type = other DNA
cgcaaggcgctatcgtcatcgaccccggcatgcgtacaagcgtggaacacatctacgccgcaggcgactgcaccg

SEQ ID NO: 64842 - DNA, 75 bp, synthetic construct
  source 1..75: mol_type = other DNA
ttgccgcaacattgctgactattttttcgacctcagttatggcgcaggatgtcacgattatttataccaatgatc

SEQ ID NO: 64843 - DNA, 75 bp, synthetic construct
  source 1..75: mol_type = other DNA
tatcggttcatgcagggctatatttccttaactcccgttacgactttatgaacacaacctttaatgtgcaactgg

SEQ ID NO: 64844 - DNA, 75 bp, synthetic construct
  source 1..75: mol_type = other DNA
atgaaaataacagctaaaataatttatagattaaccattgcgttaatgatagccggatcagtccagacagcagcg

SEQ ID NO: 64845 - DNA, 75 bp, synthetic construct
  source 1..75: mol_type = other DNA
gtgcctggcgtcatagcagactggccggtcaaccgggtcagcgaactgcttccgtggcgcatagcactgccagct

SEQ ID NO: 64846 - DNA, 75 bp, synthetic construct
  source 1..75: mol_type = other DNA
attttttaccctcctgaatacacactgtaaatcatcagaagctgcacttgccatgctgagtacactctgctacga

SEQ ID NO: 64847 - DNA, 75 bp, synthetic construct
  source 1..75: mol_type = other DNA
ccacctaccgtaaccagctggcgtttatcgatattttcttccgggggatgaataacaccaactacaacatggcgg

SEQ ID NO: 64848 - DNA, 75 bp, synthetic construct
  source 1..75: mol_type = other DNA
aaaaagcctcgtacaccccgtatgttgtctggtctgaaagctgcccgttcagcaaggagctggggaaactgacaa

SEQ ID NO: 64849 - DNA, 75 bp, synthetic construct
  source 1..75: mol_type = other DNA
cagtcatacagcatgtaccagagctgctgggcataccgggacacgtatgtcacacagtcagcagacaagggaacc

SEQ ID NO: 64850 - DNA, 75 bp, synthetic construct
  source 1..75: mol_type = other DNA
atgttgcatttaaaaaatattactgcgggcaatccgaaaaccgcagaacaatatcagatgacaaaacaatatggt

SEQ ID NO: 64851 - DNA, 75 bp, synthetic construct
  source 1..75: mol_type = other DNA
ctgatgtccgcgatgtcgcataaggactggctgagtcgtcgccaacgccaaaaacagggaattgaacgagctcat

SEQ ID NO: 64852 - DNA, 75 bp, synthetic construct
  source 1..75: mol_type = other DNA
cctacctgacgatatggcagggcgatgaagtacagcgccgggtgaaaggcgtggtgacctggtttgaactcgggg

SEQ ID NO: 64853 - DNA, 75 bp, synthetic construct
  source 1..75: mol_type = other DNA
gctgacctggcaatggacttcgcctctattctgtcaaaagaatatgctgatgcgatgatgaaagccggtacaccg

SEQ ID NO: 64854 - DNA, 75 bp, synthetic construct
  source 1..75: mol_type = other DNA
atgttcgctctgattcaacgtggtcagatatacaccgatagcgccggctacccgataaaaattcttcgctgcata

SEQ ID NO: 64855 - DNA, 75 bp, synthetic construct
  source 1..75: mol_type = other DNA
aacgcgaagcgcgtagccgttgcccgtccggttgtattgcggtattcgccgcccgtattcgtcagggggtgtgcc

SEQ ID NO: 64856 - DNA, 75 bp, synthetic construct
  source 1..75: mol_type = other DNA
atgtctatgccattaagcaatgcccttcagagtcaaattattacagataatcacttccttcatcatccaaaagtc

SEQ ID NO: 64857 - DNA, 75 bp, synthetic construct
  source 1..75: mol_type = other DNA
gcgttgagatggaaaaagaaatactaaagcaggctgccgtgctgatgagcgaaatccccgggaagctgtcgcgct

SEQ ID NO: 64858 - DNA, 75 bp, synthetic construct
  source 1..75: mol_type = other DNA
ttgtctggagattcagggggccagtctactggtaaaggtgtatggactgtagtaccgaagggctttcgtctggga

SEQ ID NO: 64859 - DNA, 75 bp, synthetic construct
  source 1..75: mol_type = other DNA
atgatcaaaactcgtcggactaaacgtaccttttccccggagttcaaacttgaagctttcgagcaggtggtggtt

SEQ ID NO: 64860 - DNA, 75 bp, synthetic construct
  source 1..75: mol_type = other DNA
aaagcgcagataaagcgccttgagatggaaaaagaaatactaaagcaggctgccgtgctgatgagcgaaatcccc

SEQ ID NO: 64861 - DNA, 75 bp, synthetic construct
  source 1..75: mol_type = other DNA
gtgctgccggtaaaaggcgcatctgtctatggcaagccggtgatcaccatgccaaaaacccgcaatcagcggggc

SEQ ID NO: 64862 - DNA, 75 bp, synthetic construct
  source 1..75: mol_type = other DNA
ctggagcacctgaaaggcatcctgccggacggcccgttccagcgctacggcgacgtggcgatggtgaagaaagaa

SEQ ID NO: 64863 - DNA, 75 bp, synthetic construct
  source 1..75: mol_type = other DNA
gaccttggattcgacgcctctcgtgtcgtgccaacagctaatgaaaaccgtccacgtaacatcgcctttaattat

SEQ ID NO: 64864 - DNA, 75 bp, synthetic construct
  source 1..75: mol_type = other DNA
gcgtgaaagatgactacacggtgatgacagtaggcggtcctatcattggcaatacctgtgtcccatcaataatcc

SEQ ID NO: 64865 - DNA, 75 bp, synthetic construct
  source 1..75: mol_type = other DNA
atgaccctgtgcgtgtttgtgctgattgcttctgaatttatgcccgtcagcctgctcacgccgattacccgcgat

SEQ ID NO: 64866 - DNA, 75 bp, synthetic construct
  source 1..75: mol_type = other DNA
atgcctaaaaaaatgagaacaacccgtaatctattattaatggctacgctattaggtagcgcactatttgccagg

SEQ ID NO: 64867 - DNA, 75 bp, synthetic construct
  source 1..75: mol_type = other DNA
gaataacaggcaatggccaggtaaagcagctattggtcgtctgaaaggtgaggaactggcgcaatataatttatg

SEQ ID NO: 64868 - DNA, 75 bp, synthetic construct
  source 1..75: mol_type = other DNA
ctcccctcgtcagcagcctgatattacacctgatcttctcgcagagtcggaagccgtaaatatccaggaacaggt

SEQ ID NO: 64869 - DNA, 75 bp, synthetic construct
  source 1..75: mol_type = other DNA
tcatcgggtgtgggcttctggtgcctgggcggcgctgccgccaaaaactaccgtgaaaaatccgtggacgtggtc

SEQ ID NO: 64870 - DNA, 75 bp, synthetic construct
  source 1..75: mol_type = other DNA
atggaactgaagtggaccagtaaggcgctttctgatttgtcgcggttatatgattttctggtgctggccagtaaa

SEQ ID NO: 64871 - DNA, 75 bp, synthetic construct
  source 1..75: mol_type = other DNA
cataatggctgcgtgatccgtcagtcggaacttgaccagaccgacgggcggtggatttgtgacaataccgggatg

SEQ ID NO: 64872 - DNA, 75 bp, synthetic construct
  source 1..75: mol_type = other DNA
gctgtaatgcaacttagtgctgatatggcgctgaatgaggctaaagccatcctgattactgattgtgaaaatggg

SEQ ID NO: 64873 - DNA, 75 bp, synthetic construct
  source 1..75: mol_type = other DNA
gggaagtcagctggcgcgtatggtcgaggcttatcgccagaccgacccgtttggtgagctgtatgtgattgccgt

SEQ ID NO: 64874 - DNA, 75 bp, synthetic construct
  source 1..75: mol_type = other DNA
accggaagccaaaggggcggcggcaacggtcagggtgacggttaccggagaagcagaggaaagcggcaccctgag

SEQ ID NO: 64875 - DNA, 75 bp, synthetic construct
  source 1..75: mol_type = other DNA
tggacaaaacgtaggaattgcgatgggcagtgcattttttactgatggaccgaatgcaggatctattggaggtgc

SEQ ID NO: 64876 - DNA, 75 bp, synthetic construct
  source 1..75: mol_type = other DNA
gagcttgtggagaagtgggaaaaaggaaagatgcgtctgctgtgggataacaaaaagcggcgtaacgaagcgctg

SEQ ID NO: 64877 - DNA, 75 bp, synthetic construct
  source 1..75: mol_type = other DNA
gattacctgaacctcatcgagcaactggatgaagaaggttttgatgactttacccgcgtgcgtgagctgttgggt

SEQ ID NO: 64878 - DNA, 75 bp, synthetic construct
  source 1..75: mol_type = other DNA
acattcttaattccacgggggcagcaacagataaaagttatttatcgttaaatccagataagtatcctaattatc

SEQ ID NO: 64879 - DNA, 75 bp, synthetic construct
  source 1..75: mol_type = other DNA
taagaaagtcttcaagattctttatcttgctatcagagataataaggatactgatactattttaatgtcatatga

SEQ ID NO: 64880 - DNA, 75 bp, synthetic construct
  source 1..75: mol_type = other DNA
gtgaaaattgaattaacggtgaatgggctgaagatacaggcacagtaccagaacgaagagattgaaaatgtacat

SEQ ID NO: 64881 - DNA, 75 bp, synthetic construct
  source 1..75: mol_type = other DNA
tttggcgatgagtccacgccttttgggcttaaatgggagaaggacagccctgaaagtgttttctacctctgtgaa

SEQ ID NO: 64882 - DNA, 75 bp, synthetic construct
  source 1..75: mol_type = other DNA
gcttatattcgcggtgaagtggagttggtgcggattcgtgatgccgaagggcgaattgcggcagaaggggcgttg

SEQ ID NO: 64883 - DNA, 75 bp, synthetic construct
  source 1..75: mol_type = other DNA
gtgaaaattgaattaacggtgaatgggctgaacgtgcaagcgcagtaccatgatgaagagatagaacgcgtgcat

SEQ ID NO: 64884 - DNA, 75 bp, synthetic construct
  source 1..75: mol_type = other DNA
ggaatggttgagcggaaggtgattgaagagtcgcttcaggcattgcaggaacgtaagccgcgattattccatgga

SEQ ID NO: 64885 - DNA, 75 bp, synthetic construct
  source 1..75: mol_type = other DNA
cccgtcgtctgggatcggtttatcctggcattgctcccgatgtcgtcgaaatattgcgtaagcatcgttggcccg

SEQ ID NO: 64886 - DNA, 75 bp, synthetic construct
  source 1..75: mol_type = other DNA
ccctggcgggatacgaaaaagagacccagacgcctgccgacgagctggcggcaagccgtaccgcccgcgcagcgg

SEQ ID NO: 64887 - DNA, 75 bp, synthetic construct
  source 1..75: mol_type = other DNA
agtgaaatcctggctgaccgggtgagtgaggaaagccgccgctggctggcatcgtgcggcctgaccgtggagcag

SEQ ID NO: 64888 - DNA, 75 bp, synthetic construct
  source 1..75: mol_type = other DNA
tgtcgctggtcttctcgcataccttggtttgggagaagcggcgaaaagggatgtgggcacaggagataatcagat

SEQ ID NO: 64889 - DNA, 75 bp, synthetic construct
  source 1..75: mol_type = other DNA
ttcgctaacaccactaaagggcacgatgagctggtgagctggctgaaaggtcacaagattgaccatgcgcatatc

SEQ ID NO: 64890 - DNA, 75 bp, synthetic construct
  source 1..75: mol_type = other DNA
aaacggatgaatccggggaggcccgggggcgggcctctgtttttccggagtcagtccggtctgtggtttatgcaa

SEQ ID NO: 64891 - DNA, 75 bp, synthetic construct
  source 1..75: mol_type = other DNA
cgctcatgacggtatgccatgggataacagtccatgcttttacaacctggaagaaattgatcgctggattgagcg

SEQ ID NO: 64892 - DNA, 75 bp, synthetic construct
  source 1..75: mol_type = other DNA
cgtctctccacctgggagaataacccggatgcccttgccctggtggatagtgtgtatcaccggattgccggtatc

SEQ ID NO: 64893 - DNA, 75 bp, synthetic construct
  source 1..75: mol_type = other DNA
gccccggtcaggagcgggcagagcaacatattgacctggcctatgccatcaccgcccacggtgcgcagggggcga

SEQ ID NO: 64894 - DNA, 75 bp, synthetic construct
  source 1..75: mol_type = other DNA
ccccgttcaggaaaaagaagccacacaatccccggcgtcccctgctgcccctgaagcatcaaccgtcagcaccgc

SEQ ID NO: 64895 - DNA, 75 bp, synthetic construct
  source 1..75: mol_type = other DNA
acggtttatccccgctggcgcggggaacaccgttcctcgcattatttccctttcttcttcgacggtttatccccg

SEQ ID NO: 64896 - DNA, 75 bp, synthetic construct
  source 1..75: mol_type = other DNA
actgtatgtggatgtggcaaaaggctatggcacaggcctgctggtttcccgtgcgtcgtatgaggcagaaaaaag

SEQ ID NO: 64897 - DNA, 75 bp, synthetic construct
  source 1..75: mol_type = other DNA
agataaatgcatgtttaacgcagaacacgaaataacaaaaaggtttgatgaaatctgcgcattgcaacaaaaact

SEQ ID NO: 64898 - DNA, 75 bp, synthetic construct
  source 1..75: mol_type = other DNA
tcaaatgtatgggctgctttgaactcagtcacaacagttaagcgacttattgaagtttggcctgaaagcaaagaa

SEQ ID NO: 64899 - DNA, 75 bp, synthetic construct
  source 1..75: mol_type = other DNA
tggctcgcctggcaaaacaggatatagaagagcggtttgatattaataaaactgtgttaaaaatactcacattag

SEQ ID NO: 64900 - DNA, 75 bp, synthetic construct
  source 1..75: mol_type = other DNA
gacgttaaccctgctggacggtgccgcacgtcataacgtacaggtcctgataaccgacagcgggcagcgaaccgg

SEQ ID NO: 64901 - DNA, 75 bp, synthetic construct
  source 1..75: mol_type = other DNA
cgggaactgcgggacgtggcggcaggccgtgccgttctccgtcaggcagggctggccgggggagacagccctgca

SEQ ID NO: 64902 - DNA, 75 bp, synthetic construct
  source 1..75: mol_type = other DNA
atgtttgcagtattgggtgatattgagtttgaactgattacctactgggacggcttcgaggtcacgttcggcgtc

SEQ ID NO: 64903 - DNA, 75 bp, synthetic construct
  source 1..75: mol_type = other DNA
acagagcagcacaaccctctccgccacgtcagcacggactgctctggaatctgttgtggggctggccgtggatgc

SEQ ID NO: 64904 - DNA, 75 bp, synthetic construct
  source 1..75: mol_type = other DNA
atgtcatcaatccgcttaactacgagaatgaaagagaaaatcgctcgtaacgctttaattaaatctggggttttc

SEQ ID NO: 64905 - DNA, 75 bp, synthetic construct
  source 1..75: mol_type = other DNA
cagcggcaaaagccagcctgcagaaatacatcgccagtcagacgcggcttggtagggatattcgccgtagcgcca

SEQ ID NO: 64906 - DNA, 75 bp, synthetic construct
  source 1..75: mol_type = other DNA
tgaaggtgtacgtggatgaccagctggcaaaacaccttgccgcaccggacccgcattcacaatatgcacagaaag

SEQ ID NO: 64907 - DNA, 75 bp, synthetic construct
  source 1..75: mol_type = other DNA
ccgccggcagcgcgggcaattattacaccgacaaggacaactactacgttatcggtagtatgggcgagcgctggg

SEQ ID NO: 64908 - DNA, 75 bp, synthetic construct
  source 1..75: mol_type = other DNA
tgctggatgagctgtcggtgtcggcgatgacccgcgatttacagcggacggggcaggccgacatttttccggata

SEQ ID NO: 64909 - DNA, 75 bp, synthetic construct
  source 1..75: mol_type = other DNA
caggggaatattcccgcaacgacgcctgaagccattgatattaacagcagcgtcgggcaggccatcgcgatgctg

SEQ ID NO: 64910 - DNA, 75 bp, synthetic construct
  source 1..75: mol_type = other DNA
tgatcttcagcgcattaaccgtgacttaagcgaagcgctcgaacggcaggtgatgacactgtccgggcaggggta

SEQ ID NO: 64911 - DNA, 75 bp, synthetic construct
  source 1..75: mol_type = other DNA
aagggcgggactcgcacaacctgaataaagcgggtatgaaaaacctgttgatcgccactgccagccagggctatg

SEQ ID NO: 64912 - DNA, 75 bp, synthetic construct
  source 1..75: mol_type = other DNA
cgcctgtggatgaagccacgtcgtatgccatccgttttcctgatgatccggagattttttcgcagacagaggcgc

SEQ ID NO: 64913 - DNA, 75 bp, synthetic construct
  source 1..75: mol_type = other DNA
tgcattcgcattgcgccacaacctggtgcaactggcagaacgtgctggcatgaatgtgcagattctgcggaacaa

SEQ ID NO: 64914 - DNA, 75 bp, synthetic construct
  source 1..75: mol_type = other DNA
accgatcaaaacggaatcgcgacaacaagcgtgaaaggagcgataacggggagcgtcactgtaagcacagtcaca

SEQ ID NO: 64915 - DNA, 75 bp, synthetic construct
  source 1..75: mol_type = other DNA
cgcggggaacacaattgagacgttccacgcaattaaacaagccgcggtttatccccgctggcgcggggaacactg

SEQ ID NO: 64916 - DNA, 75 bp, synthetic construct
  source 1..75: mol_type = other DNA
cggggaacaccggcactggcagccacacacacccgcatacaccggtttatccccgctggcgcggggaacacatcc

SEQ ID NO: 64917 - DNA, 75 bp, synthetic construct
  source 1..75: mol_type = other DNA
cctaacccccatgcatggatgtcgccagataatgctctgatttacgtcgataatattcgtgatgcgttgataaaa

SEQ ID NO: 64918 - DNA, 75 bp, synthetic construct
  source 1..75: mol_type = other DNA
ttttcgcgtggcaaactacatcaagccacatttcgagattggtttagctctcgacaaaaaagagttcaaaactgg

SEQ ID NO: 64919 - DNA, 75 bp, synthetic construct
  source 1..75: mol_type = other DNA
ttcttcgtgagtttgacaacccgccctttaaaaaagtgccggcttactggtttcatcccggactgacttatctga

SEQ ID NO: 64920 - DNA, 75 bp, synthetic construct
  source 1..75: mol_type = other DNA
cggctttttctgttgaagaatacccggaactggcaaaggcttacccgaccaataaattgcctgatttacgcggtg

SEQ ID NO: 64921 - DNA, 75 bp, synthetic construct
  source 1..75: mol_type = other DNA
gcgacagcccgtttaccgccgcgaaggtggttcaaggctgggtggagtcgccgggccgctcggtgagcgacagcg

SEQ ID NO: 64922 - DNA, 75 bp, synthetic construct
  source 1..75: mol_type = other DNA
cggatcatgatgccgacctcttacgtgcgcctttctgccggacgcgagcagatgaacgaacagactcaggcgatg

SEQ ID NO: 64923 - DNA, 75 bp, synthetic construct
  source 1..75: mol_type = other DNA
ttttattcgcaccattgccgtagcgcggatcatgatgccgacctcttacgtgcgcctttctgccggacgcgagca

SEQ ID NO: 64924 - DNA, 75 bp, synthetic construct
  source 1..75: mol_type = other DNA
aacactggaacttacccggcgtgctgctggcgaatccccgggaaccgaactggcgaaaccattaattgacaccgg

SEQ ID NO: 64925 - DNA, 75 bp, synthetic construct
  source 1..75: mol_type = other DNA
gtgaaacaacgcgcctggcaaacgctgaaatggcagattgccaacggcattcagcatgtgcgtacccatgtcgat

SEQ ID NO: 64926 - DNA, 75 bp, synthetic construct
  source 1..75: mol_type = other DNA
tgccaaaaatacacgagaatacaacaaaaatctcgctgttcttaataaactaactaaacaacatggtgtatataa

SEQ ID NO: 64927 - DNA, 75 bp, synthetic construct
  source 1..75: mol_type = other DNA
tataggtcaatgactattcagcaactaatcgaatgtgatgatgtgctgccagaggatttagttggtgctgaggct

SEQ ID NO: 64928 - DNA, 75 bp, synthetic construct
  source 1..75: mol_type = other DNA
agacgcagacagcaacctgcagagtctgtgctggccctgccacaaagcgaaaacagcgcgcgaacgaatcaggtg

SEQ ID NO: 64929 - DNA, 75 bp, synthetic construct
  source 1..75: mol_type = other DNA
cattcttgcacgtgtttcgatataggtaaaaagtacgatctgcacagtatgagtgctaatggtgttattaatgga

SEQ ID NO: 64930 - DNA, 75 bp, synthetic construct
  source 1..75: mol_type = other DNA
cctcaatgtctgatattgtcagggacctgtcacgcctgggctggacggatgaacgcattggtacagagcatgggg

SEQ ID NO: 64931 - DNA, 75 bp, synthetic construct
  source 1..75: mol_type = other DNA
acagccggttctgcggatgcaccggcagaaaaacccgcagcgactgtaaaacccgtggcatctgacaaggaggct

SEQ ID NO: 64932 - DNA, 75 bp, synthetic construct
  source 1..75: mol_type = other DNA
tggagcatctacttttttaccattaattcagtatttcaatgacaactgtgtaatggatatgtttaacgaagttga

SEQ ID NO: 64933 - DNA, 75 bp, synthetic construct
  source 1..75: mol_type = other DNA
atcgctactttttctgtaatgagcagaacgaaaaaggtgagtctgtcacctggcagagtcggcagtatcaggcct

SEQ ID NO: 64934 - DNA, 75 bp, synthetic construct
  source 1..75: mol_type = other DNA
aatcggaccacgcgacaacttagcctgacggaagaaggcgagcgttattttcgtcgcgtacagtcaattttgcag

SEQ ID NO: 64935 - DNA, 75 bp, synthetic construct
  source 1..75: mol_type = other DNA
gctgggtggtggagcagttgtcagcgctgacctgcgaaaaggcgacctttatcctggcgacaccggcagagacgg

SEQ ID NO: 64936 - DNA, 75 bp, synthetic construct
  source 1..75: mol_type = other DNA
atcagaattttttggattaatggctaaatctcgtctcaagcgagtttttaacgatatatatgtgcaacttgattc

SEQ ID NO: 64937 - DNA, 75 bp, synthetic construct
  source 1..75: mol_type = other DNA
cctgattctggtgggctttaccctgattctggaaagtttcgacatccacgtaccgaaaggttacatctacttcgc

SEQ ID NO: 64938 - DNA, 75 bp, synthetic construct
  source 1..75: mol_type = other DNA
tgggacggtatccgcgagcgcgtcctgaagcgtgacaaaggtttatgtcagtcatgtctgcatgctggtgtggtg

SEQ ID NO: 64939 - DNA, 75 bp, synthetic construct
  source 1..75: mol_type = other DNA
gtaccctgaccaacgccagccgccggggagggctggatatcaagctgccgctgaccatctacaacacctcatgct

SEQ ID NO: 64940 - DNA, 75 bp, synthetic construct
  source 1..75: mol_type = other DNA
tgagttcccgcaaccgctgcacgatgcgctggataaattccaggccgacaccggtatcgacatcgacatgcacat

SEQ ID NO: 64941 - DNA, 75 bp, synthetic construct
  source 1..75: mol_type = other DNA
cagagaatatgttttatcccctgtccctgcggccggtttatgaggcagcagggcgctggccggaagacggtattg

SEQ ID NO: 64942 - DNA, 75 bp, synthetic construct
  source 1..75: mol_type = other DNA
ttctgaacaccattcttacccgggtcggcggaccgggaaatatcgccagttgtggtaactgtatgacgcgcctgc

SEQ ID NO: 64943 - DNA, 75 bp, synthetic construct
  source 1..75: mol_type = other DNA
atgcgcgggtgtgaactgcgcaggaatgtcggcaattttggcggtttcctttccattaataaactttcgcagtaa

SEQ ID NO: 64944 - DNA, 75 bp, synthetic construct
  source 1..75: mol_type = other DNA
gcaggattggagggcgaagaccaaaactgacgccagagcaatgggcacaggctggcaggttacttgctgcaggtg

SEQ ID NO: 64945 - DNA, 75 bp, synthetic construct
  source 1..75: mol_type = other DNA
cgaaagaggccagcaatgtacagcagactgttaaccacttgcctgataacgatgttgatcgcgagctgcgggaca

SEQ ID NO: 64946 - DNA, 75 bp, synthetic construct
  source 1..75: mol_type = other DNA
gcagagtaggtggacgccgtcctaagttgaccaccgaacagtgggcacagattggacgtttactcgaggccggag

SEQ ID NO: 64947 - DNA, 75 bp, synthetic construct
  source 1..75: mol_type = other DNA
gccaccggtccaaaggcatcgccacgccacgtgcagctggttgacgcgttctgcgcccgtctcgatgccatcctg

SEQ ID NO: 64948 - DNA, 75 bp, synthetic construct
  source 1..75: mol_type = other DNA
ggactggaagcggccagagccaaaggtcgtattggtggcagacgaccgaaactcaccgcgagtgagtgggagcag

SEQ ID NO: 64949 - DNA, 75 bp, synthetic construct
  source 1..75: mol_type = other DNA
ccaataagcaaattcgcgaactccagcgccttctgggcaaaaagacgatggaagccgagatactcaaagaggccg

SEQ ID NO: 64950 - DNA, 75 bp, synthetic construct
  source 1..75: mol_type = other DNA
aaacggaaattgaggatactttaaagccacttagacagccaagacagccacgaattagcggcaacagagcaatca

SEQ ID NO: 64951 - DNA, 75 bp, synthetic construct
  source 1..75: mol_type = other DNA
aattttatgtattctaagagtaagacatatattttgttgtttttgattgttttttctatggtttcgtttatgcat

SEQ ID NO: 64952 - DNA, 75 bp, synthetic construct
  source 1..75: mol_type = other DNA
tgatgtcgacagtaatctgcagagtttgtgctggccgtgtcataaggcgaagacggcccgtgaacggttgaagtg

SEQ ID NO: 64953 - DNA, 75 bp, synthetic construct
  source 1..75: mol_type = other DNA
acgacctggatgccgaacgcatcgatattctgctggagcaacccgcctatgctggtttgccaatcgccgacgcgt

SEQ ID NO: 64954 - DNA, 75 bp, synthetic construct
  source 1..75: mol_type = other DNA
taagctaaaaggctttgaccctattttgcagaaatacatcaaatctcagttttacgggctatctgctaaagctgg

SEQ ID NO: 64955 - DNA, 75 bp, synthetic construct
  source 1..75: mol_type = other DNA
agaccatcgctgacggtgtccaatctgtttggtctggtcaccgggatggcggaagacctgcagagtctggtgggg

SEQ ID NO: 64956 - DNA, 75 bp, synthetic construct
  source 1..75: mol_type = other DNA
tgccgggtgagaaaaaactgttgaaacattcgctggagcaggatgggttcacgcagcctgtggttgtctcggaag

SEQ ID NO: 64957 - DNA, 75 bp, synthetic construct
  source 1..75: mol_type = other DNA
tggagcaggatggattcacgcagcctgtggtggtttcggaagagaaggagcattatctggtagtggatggttttc

SEQ ID NO: 64958 - DNA, 75 bp, synthetic construct
  source 1..75: mol_type = other DNA
gcgcattaaaacccagagaaaaagcatatcgcataagcgacgcaggcggattatacgttgaagttgctcccaatg

SEQ ID NO: 64959 - DNA, 75 bp, synthetic construct
  source 1..75: mol_type = other DNA
ctcgcttttggcgtctaccccgatgtttctcttgctgacgcccgtgaaaaacgtgatgcggctaagaagattctg

SEQ ID NO: 64960 - DNA, 75 bp, synthetic construct
  source 1..75: mol_type = other DNA
gccgctttggctttttgatgcactggatattgagtttggattctggctggattcagctgcgagcgacaaaaatgc

SEQ ID NO: 64961 - DNA, 75 bp, synthetic construct
  source 1..75: mol_type = other DNA
tccctaacctgcccgtggccacgccaaccacctttctcgtcaacgtaaacacccttgaagccctgcccctgctgc

SEQ ID NO: 64962 - DNA, 75 bp, synthetic construct
  source 1..75: mol_type = other DNA
agcggtattttttctgtaatgagctgaatgaaaaaggggagccggtcacctggcaggggcggcaatatcaggcat

SEQ ID NO: 64963 - DNA, 75 bp, synthetic construct
  source 1..75: mol_type = other DNA
catcgcggccaactgaattgatccagttccgtcagccaaatattgctgatgcgatgcgtttcaactcgataacac

SEQ ID NO: 64964 - DNA, 75 bp, synthetic construct
  source 1..75: mol_type = other DNA
gtgaagtcacaaaaaccataagcatatcctgtccgtataagagtggctctctctggataaaagttacgggaaata

SEQ ID NO: 64965 - DNA, 75 bp, synthetic construct
  source 1..75: mol_type = other DNA
gaaaatctctgccaccaatacgttccatgcccttgctacggaatggcaccagcataaatctttgtcatggtctga

SEQ ID NO: 64966 - DNA, 75 bp, synthetic construct
  source 1..75: mol_type = other DNA
gtgccggaaaccatactcatagtgtcacaggcgcatcagcagtcagccagtggtcacaaaatgggtcagtacata

SEQ ID NO: 64967 - DNA, 75 bp, synthetic construct
  source 1..75: mol_type = other DNA
tcggcaccaatgcccgcacggcccagagttaccacggcaacctgtatctggatgaatatttctggataccgaaat

SEQ ID NO: 64968 - DNA, 75 bp, synthetic construct
  source 1..75: mol_type = other DNA
gatgcagagaaacaaagattatcagtggcccgtaaaagagcttcgttcaaggaagtaaaagtatttctcgaacca

SEQ ID NO: 64969 - DNA, 75 bp, synthetic construct
  source 1..75: mol_type = other DNA
ggtgggtggtggagcagatgtcagcgctgacagccatgacggcctcgtttgtgctggccacaccgaccgagacgg

SEQ ID NO: 64970 - DNA, 75 bp, synthetic construct
  source 1..75: mol_type = other DNA
gctgatgaaggtgatggggcttgccggtgtgcgccggggtaaaaaggtccgcaccacagtcagccggaaagaagc

SEQ ID NO: 64971 - DNA, 75 bp, synthetic construct
  source 1..75: mol_type = other DNA
tgttgggcaacacccgcaaagtgctggttaacgataaaggtggcaacctgatggttctgccgttagaccagatgc

SEQ ID NO: 64972 - DNA, 75 bp, synthetic construct
  source 1..75: mol_type = other DNA
agtagctatcccttcccgaccaccagcgaaacgccgcgcattgtttataattcgagaacggataagccttggccg

SEQ ID NO: 64973 - DNA, 75 bp, synthetic construct
  source 1..75: mol_type = other DNA
atttgattttgaccagagtgttaaagataactctggctggttatctattttaagtataggagtactaatagttgt

SEQ ID NO: 64974 - DNA, 75 bp, synthetic construct
  source 1..75: mol_type = other DNA
gtcccttcaaaagactccctgactgaacgtattggtttgatgcattttgatggagtactggacgaaatcagctct

SEQ ID NO: 64975 - DNA, 75 bp, synthetic construct
  source 1..75: mol_type = other DNA
atgctggatcctgcagacctgccaccggatgacattctggattatgtggccatcgacaccgataacaccggtcag

SEQ ID NO: 64976 - DNA, 75 bp, synthetic construct
  source 1..75: mol_type = other DNA
aggtggtggccaacgattataaccccaatgtcatggcgccgggtgagaagaaactgctgaaacagtccctggaga

SEQ ID NO: 64977 - DNA, 75 bp, synthetic construct
  source 1..75: mol_type = other DNA
caataggtgtagcaggttttgtcggcacaatgatcgtctcaacattcctgaacaccatattttataagaccttaa

SEQ ID NO: 64978 - DNA, 75 bp, synthetic construct
  source 1..75: mol_type = other DNA
gacagtcagcaaatcccgaccttcagtatgctgggctatcaccctgaccaggagcgcactcttcgccgcattctg

SEQ ID NO: 64979 - DNA, 75 bp, synthetic construct
  source 1..75: mol_type = other DNA
ccggaaaagatatttctgatgttgtatacgtcagtatatctgaaaaagacgataaacctgttcaggtttatatcg

SEQ ID NO: 64980 - DNA, 75 bp, synthetic construct
  source 1..75: mol_type = other DNA
acccgattgacggcagcggttttgagatgagcgggaagggcagcagtgccagaccgtcgctgacggtgtccaatc

SEQ ID NO: 64981 - DNA, 75 bp, synthetic construct
  source 1..75: mol_type = other DNA
aaactgctgaagcagtcactggagaaagatggtttcacacaaccggtggtggtgtctgaggaaaagaaccattac

SEQ ID NO: 64982 - DNA, 75 bp, synthetic construct
  source 1..75: mol_type = other DNA
atgaaaaaaagtgtcgattttattggtgtcgggacagggccatttaatctcagtattgctgcattgtcacatcag

SEQ ID NO: 64983 - DNA, 75 bp, synthetic construct
  source 1..75: mol_type = other DNA
aaaaagataacgtgatgatcaccggcgatgcgctgctggattttggcgacgggcataaaattaaacgtagcgcca

SEQ ID NO: 64984 - DNA, 75 bp, synthetic construct
  source 1..75: mol_type = other DNA
gcaaggatattcaggtcaccattcctccctaccgattcacggcaatgcctgaaaccgacaacacttacccgatag

SEQ ID NO: 64985 - DNA, 75 bp, synthetic construct
  source 1..75: mol_type = other DNA
aaagtacattttccctttcttactgctaatgaacttccccacttcctcaacgatctggcgggttataccggaagt

SEQ ID NO: 64986 - DNA, 75 bp, synthetic construct
  source 1..75: mol_type = other DNA
tgaattcatgttctacggcatcaaaaacaacccgacgaagattaaatcgctcgaaggcattgatatctgctgggt

SEQ ID NO: 64987 - DNA, 75 bp, synthetic construct
  source 1..75: mol_type = other DNA
gctgagtttgaaattcagcgttccatgattcgtcatctcggaacgaatgctgaattcatgttctacggcataaaa

SEQ ID NO: 64988 - DNA, 75 bp, synthetic construct
  source 1..75: mol_type = other DNA
accggatggtggacatggattgcgcgtacgttgcctgacaacgccgaagccggaggcgggctcatggtcgcggtg

SEQ ID NO: 64989 - DNA, 75 bp, synthetic construct
  source 1..75: mol_type = other DNA
gttcgacaaccccaccacggatatccggaaggacagatgcagcaagtgcatgcgcgggtgtgagatgcgcggcat

SEQ ID NO: 64990 - DNA, 75 bp, synthetic construct
  source 1..75: mol_type = other DNA
caagagcgtattcttcatgtctcaggcagcggcgaaacactttatcgcgcaaggcaatggcggcaagattatcaa

SEQ ID NO: 64991 - DNA, 75 bp, synthetic construct
  source 1..75: mol_type = other DNA
cgatctggcgggttataccggaagtatcatcactaagacagcgactcagatcattatgttaaccggtgtacgaac

SEQ ID NO: 64992 - DNA, 75 bp, synthetic construct
  source 1..75: mol_type = other DNA
cctcatacccagtatgcacagaaacataatccgacatttaccggagaaccaaaagcgccgacgcctgatgcagga

SEQ ID NO: 64993 - DNA, 75 bp, synthetic construct
  source 1..75: mol_type = other DNA
tggtatttccggctgaactggtgcggctgctggacaggctggaggaagaaatccgggcagaccgcgtgagcagtg

SEQ ID NO: 64994 - DNA, 75 bp, synthetic construct
  source 1..75: mol_type = other DNA
gggagtttgattccatcaccaacgcttcattcacgaggaagtattggtaacacaggtggtagtgaaacccgcccc

SEQ ID NO: 64995 - DNA, 75 bp, synthetic construct
  source 1..75: mol_type = other DNA
gacaagagcgattatttagaagaacagcgtaaagcttaccaggcgtggtgggagagggttgaatcgatagttact

SEQ ID NO: 64996 - DNA, 75 bp, synthetic construct
  source 1..75: mol_type = other DNA
caacggatgcgacgggcagcacccggcagatgacgtggagccgctacgggcagttgctggcgttcactgactgct

SEQ ID NO: 64997 - DNA, 75 bp, synthetic construct
  source 1..75: mol_type = other DNA
aaatgttcacaaatcatctctcgcgccagtatgctgatggttgcagtggtgatgttctttgcctttagctgcctg

SEQ ID NO: 64998 - DNA, 75 bp, synthetic construct
  source 1..75: mol_type = other DNA
cattatgtggattgttggcggcgtctatttctgggtctatcgtgaacgccactggccgtggggagaaaacgcacc

SEQ ID NO: 64999 - DNA, 75 bp, synthetic construct
  source 1..75: mol_type = other DNA
aaaatgaagcacttactaccggcgctcgcctgcgtaatgctcgcgaacaactaggacttagtcagcaggccgttg

SEQ ID NO: 65000 - DNA, 75 bp, synthetic construct
  source 1..75: mol_type = other DNA
gggggaagcgttaagtgaggagcaacaacgttatattgtgacggtaatctaccactggctggttatacagatgaa

SEQ ID NO: 65001 - DNA, 75 bp, synthetic construct
  source 1..75: mol_type = other DNA
gcgatgccatcgtgcaggcacctgcaccttcgcggcccatcgagcggggtatcgccggaccggggctgctggccc

SEQ ID NO: 65002 - DNA, 75 bp, synthetic construct
  source 1..75: mol_type = other DNA
caacaaatgaacaaaacactgctttgcaacgaaatgcccttgaaagcgcaggatgtgagctaatttttgaggata

SEQ ID NO: 65003 - DNA, 75 bp, synthetic construct
  source 1..75: mol_type = other DNA
atgcttattggctatgtacgcgtatcaacaaatgaccagaacaccgatctacaacgtaatgcgttgagctgtgca

SEQ ID NO: 65004 - DNA, 75 bp, synthetic construct
  source 1..75: mol_type = other DNA
agcggccccagttcaacggcggatattgagcttatcaaagtcgtcggagttcatggcccggtgaaagcggtgtat

SEQ ID NO: 65005 - DNA, 75 bp, synthetic construct
  source 1..75: mol_type = other DNA
gaagatatcaaaatatccttaaagaacatggtattaaacaaagcatgtccagaaaaggcaattgtctggataatg

SEQ ID NO: 65006 - DNA, 75 bp, synthetic construct
  source 1..75: mol_type = other DNA
gccgaagcagccgccgcacgctgggaagaaatagatctcgatgccgaaacatggacgattccagccggacgcatg

SEQ ID NO: 65007 - DNA, 75 bp, synthetic construct
  source 1..75: mol_type = other DNA
cattcgtgcgtgaccaggaagtccatgccgtggtgcaagactggaaagcacgtggtcgtccacagtatgttgatg

SEQ ID NO: 65008 - DNA, 75 bp, synthetic construct
  source 1..75: mol_type = other DNA
ccggggcgctgtgcctgttctggtcgtggctggttgcacgatatctcgaccgtacacggcagtctgtcggcggag

SEQ ID NO: 65009 - DNA, 75 bp, synthetic construct
  source 1..75: mol_type = other DNA
ggaacagctaccgcagctaatgcacgatttatcggtcgccagcatagaacggcaaaccagattgctgattgagtg

SEQ ID NO: 65010 - DNA, 75 bp, synthetic construct
  source 1..75: mol_type = other DNA
gtttcgatggcgctgaagaactggatccgttgttcgatcaggcggtgcagtttgtcactgaaaaacgcaaagcat

SEQ ID NO: 65011 - DNA, 75 bp, synthetic construct
  source 1..75: mol_type = other DNA
aggacgatgggctgaatgatttgctggtatcggtaaaaaactgctggcggagaattatccggatggtgtgttacg

SEQ ID NO: 65012 - DNA, 75 bp, synthetic construct
  source 1..75: mol_type = other DNA
agtcgcaggacgatgagaaactgtcgacgctaagccactcgtggtcacaggtggtagatgtctcggaagtgttac

SEQ ID NO: 65013 - DNA, 75 bp, synthetic construct
  source 1..75: mol_type = other DNA
taacccactgacttctctggggattacctcgaccccgaactcatctctcgttgccttgccgaatcaggtactgta

SEQ ID NO: 65014 - DNA, 75 bp, synthetic construct
  source 1..75: mol_type = other DNA
aaaatctctgaacatctgctgccgcgtacccgcgcgtatgcggagatctggctcgatcaggaaaaagtcgccacc

SEQ ID NO: 65015 - DNA, 75 bp, synthetic construct
  source 1..75: mol_type = other DNA
aaacggcaagctggtgggctttaacctgctggtgggcggtgggctttccatcgaacacggcaacaagaaaaccta

SEQ ID NO: 65016 - DNA, 75 bp, synthetic construct
  source 1..75: mol_type = other DNA
ggtttgctgtggccgcgtcggcgaacgttaaccattgctatcttgctggtctgggcaacgggagtcatgggaagc

SEQ ID NO: 65017 - DNA, 75 bp, synthetic construct
  source 1..75: mol_type = other DNA
atgaagtctacaggctgatggatgcagcccagagtatgtcctttcctgaaagaaatcgctgtctaattatgatgg

SEQ ID NO: 65018 - DNA, 75 bp, synthetic construct
  source 1..75: mol_type = other DNA
ggcgtattggtggacgtcgtccgaaactgacaaaagagcaacatgaacaaatagcaaggctgatcaaaaatggct

SEQ ID NO: 65019 - DNA, 75 bp, synthetic construct
  source 1..75: mol_type = other DNA
gtccgcagccggcatatcaccctgaaccatgatgcggggcgctggctgcgttttggtgagggacagatgccggtg

SEQ ID NO: 65020 - DNA, 75 bp, synthetic construct
  source 1..75: mol_type = other DNA
aaaaggcatccatccgcagacccatcttgcggggttcagtggtgtactgcaggcggatgctgtcacgaacggtgc

SEQ ID NO: 65021 - DNA, 75 bp, synthetic construct
  source 1..75: mol_type = other DNA
ttactattttatgccatttctatttataagtgatctccatgataaaggacagtatattgaaaggataaggtacgt

SEQ ID NO: 65022 - DNA, 75 bp, synthetic construct
  source 1..75: mol_type = other DNA
agacaccgttggtactcgtctgaccaactctcgtcatggtctggctgataacggcggcgcatgggtaagctactt

SEQ ID NO: 65023 - DNA, 75 bp, synthetic construct
  source 1..75: mol_type = other DNA
cgcatcgaggtgcgctggcggatcgccgacggctattacctgtaccggcaccgcacctcggtcaaggccgatgcc

SEQ ID NO: 65024 - DNA, 75 bp, synthetic construct
  source 1..75: mol_type = other DNA
tttatggtgacttcgccggagttcgtcaaaattgacggtgttccggttctcagcgccaccgatgttcgggacatc

SEQ ID NO: 65025 - DNA, 75 bp, synthetic construct
  source 1..75: mol_type = other DNA
cggatgacattctggattatgtggccatcgacaccgataacaccggtcagttgcgggtcagggtcgtgaagggaa

SEQ ID NO: 65026 - DNA, 75 bp, synthetic construct
  source 1..75: mol_type = other DNA
atcgcgccggaggtatcggccagcgacgtcgggaccgtgcgggaagtcgacgcggcggatgtgggccagagtgat

SEQ ID NO: 65027 - DNA, 75 bp, synthetic construct
  source 1..75: mol_type = other DNA
ttggcgtcatagcagactggccggtcaaccgggtcagcgaactgcttccgtggcgcatagcactgccagctgaat

SEQ ID NO: 65028 - DNA, 75 bp, synthetic construct
  source 1..75: mol_type = other DNA
tggaccgacgacgccagggtgaaaaccaaagtcgccgcagatcagtatccgttccgaatcatcggggtaacggtt

SEQ ID NO: 65029 - DNA, 75 bp, synthetic construct
  source 1..75: mol_type = other DNA
actccagtcgcatttcttcaacaccctgcaggccggtgagctgctgtacgagcggatgaagcaggtgctacagga

SEQ ID NO: 65030 - DNA, 75 bp, synthetic construct
  source 1..75: mol_type = other DNA
acgcgtgacgtgctgcgtgagcatatccacattgacggaatgccgctgcatatcatcgataccgccgggctacgt

SEQ ID NO: 65031 - DNA, 75 bp, synthetic construct
  source 1..75: mol_type = other DNA
cccaggccacgcctccgggacgtggcggcgttggcatcctgcgcatctccggcctcaaagcccgtgaagttgccg

SEQ ID NO: 65032 - DNA, 75 bp, synthetic construct
  source 1..75: mol_type = other DNA
tgtgacaggcaacgagccggtgacggatacccgaaaggttgccgtagcatttggcaaagaacacaaagatgtatt

SEQ ID NO: 65033 - DNA, 75 bp, synthetic construct
  source 1..75: mol_type = other DNA
cgttattacgacggtgatttgaatgatgtaacctcaccaggtatttacagcgttacaggtaaagcgaccaatggt

SEQ ID NO: 65034 - DNA, 75 bp, synthetic construct
  source 1..75: mol_type = other DNA
acgcaggcgcagctggcgatgctgctggaaggtatcgactggcgacagcctaagcggctgctgacctccctgacc

SEQ ID NO: 65035 - DNA, 75 bp, synthetic construct
  source 1..75: mol_type = other DNA
aacagcgtggtgcgcagaatatgatgaatggggcaacctgctgaatgaagagaacccgcatcagctgcagcagct

SEQ ID NO: 65036 - DNA, 75 bp, synthetic construct
  source 1..75: mol_type = other DNA
tgaatatctggttcctggtcgttacaatttccggaagccattatctaatgccgcgctgaactctctgatcgacag

SEQ ID NO: 65037 - DNA, 75 bp, synthetic construct
  source 1..75: mol_type = other DNA
gcaccgttcgtcgccccggatatcgtctgggacttccgcctgccgcgtgtgaaatcgatcagtgcttcaggccat

SEQ ID NO: 65038 - DNA, 75 bp, synthetic construct
  source 1..75: mol_type = other DNA
gggagtttgaattcgcgaatctgggctttattccgctctcttactacaagaaccgggattatgcctgcttcttct

SEQ ID NO: 65039 - DNA, 75 bp, synthetic construct
  source 1..75: mol_type = other DNA
gggacgcctgccatatggtcctgataccgtacctgtccgcagctttaactatgttgaagaggtgaaaggtccgga

SEQ ID NO: 65040 - DNA, 75 bp, synthetic construct
  source 1..75: mol_type = other DNA
ccgcaaaatacgttcgcgtgaaagaggaagctttacagcctggggaagttcaaggccaggcgatatttgccgtat

SEQ ID NO: 65041 - DNA, 75 bp, synthetic construct
  source 1..75: mol_type = other DNA
ggagaggccagacgtgaacagctacgcaacgatattgcaaaagatgaatgcgcccacgctttgcctgacgctcgt

SEQ ID NO: 65042 - DNA, 75 bp, synthetic construct
  source 1..75: mol_type = other DNA
ggtacagaccgacaccacgcgtatccagacggtatatcagccggggagcttcgcgccgctcatccgcatcgaaac

SEQ ID NO: 65043 - DNA, 75 bp, synthetic construct
  source 1..75: mol_type = other DNA
ggaggatttgcagagcctggtgggggccacggtggtccgccgccgggtgtatgcccgttttctggatgcggtgaa

SEQ ID NO: 65044 - DNA, 75 bp, synthetic construct
  source 1..75: mol_type = other DNA
gcgttaattttcgcagcctgacggatgctattgataccagcacaccgatggggcgttttttctttcatgtgatgg

SEQ ID NO: 65045 - DNA, 75 bp, synthetic construct
  source 1..75: mol_type = other DNA
ttaacatggcccgcttcatcagaggccagacattaacgctgctggagaagctcaacgaactggacgcggatgaac

SEQ ID NO: 65046 - DNA, 75 bp, synthetic construct
  source 1..75: mol_type = other DNA
acgcatgattgaagcctgcgacgaaaacaccatcggcgtggtgccgactttcggcgtgacctacaccggtaacta

SEQ ID NO: 65047 - DNA, 75 bp, synthetic construct
  source 1..75: mol_type = other DNA
ccaacggataaaccaaacctggtgtgcggtccggtgcaaatctgctggcataaattcgcccgctactgggatgtg

SEQ ID NO: 65048 - DNA, 75 bp, synthetic construct
  source 1..75: mol_type = other DNA
ctggcatggtggttaccgtgcctttttgtggcgaccgccgaaacataaccggacggtgagggttgtgtgccggga

SEQ ID NO: 65049 - DNA, 75 bp, synthetic construct
  source 1..75: mol_type = other DNA
gtaacggtgacgtggtgcagccagaaaacgatcttattgctatcggctccggcggcccttacgcccaggctgcgg

SEQ ID NO: 65050 - DNA, 75 bp, synthetic construct
  source 1..75: mol_type = other DNA
tgaacaaatgcaaaagctacttgatgcagcggagccggagatcagaaatattattttaatgggcttgttttcagg

SEQ ID NO: 65051 - DNA, 75 bp, synthetic construct
  source 1..75: mol_type = other DNA
agagcgtcgttcatactcaacactacagaaatcagcaagggccgttgagctatttttacaaagcattcagaaaga

SEQ ID NO: 65052 - DNA, 75 bp, synthetic construct
  source 1..75: mol_type = other DNA
ggcgctggacaggtgctgttgctgaactgctggagccgttgtatgacgtcctgcgccagtatgtgctggtgcccg

SEQ ID NO: 65053 - DNA, 75 bp, synthetic construct
  source 1..75: mol_type = other DNA
ttgtctggaagctggacaggttggggcgcagtatgcggcatcttgttacgttgatagaagagttgcgccagcgag

SEQ ID NO: 65054 - DNA, 75 bp, synthetic construct
  source 1..75: mol_type = other DNA
tgaactgcggcaatacattgaagagctggagagtgcgctgggtgtgtccggacggcgtcgcggtccggtgggagt

SEQ ID NO: 65055 - DNA, 75 bp, synthetic construct
  source 1..75: mol_type = other DNA
gtgccgcgctggacagttttttatcccgtcatgccgggattcgtgcttttttgtggcgtccgccaaaacacaaca

SEQ ID NO: 65056 - DNA, 75 bp, synthetic construct
  source 1..75: mol_type = other DNA
ggaagtactggcagaagaagtcggtaaagatctcgacccgttcgacatgctttgccacgtagtgtatggtcagcc

SEQ ID NO: 65057 - DNA, 75 bp, synthetic construct
  source 1..75: mol_type = other DNA
cccgtaaaacaaccctggcgttggcagtcgccttaagtttcgcctggcaagcgccggtatttgcccacggtggtg

SEQ ID NO: 65058 - DNA, 75 bp, synthetic construct
  source 1..75: mol_type = other DNA
ggggagatcgtgacaaaaaaagcgttcctcactgtatcgttcatgcctgcatgaacgggttattcttcctgacta

SEQ ID NO: 65059 - DNA, 75 bp, synthetic construct
  source 1..75: mol_type = other DNA
ttcggcgtggcttttatataagaatcaggttaaggctgttgatgtaacaaccgaccctgagcatgttaactggcc

SEQ ID NO: 65060 - DNA, 75 bp, synthetic construct
  source 1..75: mol_type = other DNA
gtgcaggcccccgcgccttcacggcccatcgagcggggtatcgcaggaccggggctgctggcccgcgtgctgatc

SEQ ID NO: 65061 - DNA, 75 bp, synthetic construct
  source 1..75: mol_type = other DNA
caaaaaacatgagctggacggactggatttgtttaccggtttcactgtcacacacactgacagcagtgcctccgc

SEQ ID NO: 65062 - DNA, 75 bp, synthetic construct
  source 1..75: mol_type = other DNA
tatccggctggctggtggcatcggtggtgttgttcgcgctgattgcgctgatttccccgcagcagcttccggtcg

SEQ ID NO: 65063 - DNA, 75 bp, synthetic construct
  source 1..75: mol_type = other DNA
tgaagaacaagtattcttacaacgtggatatgtcaggagctcaggttgcaaccattgaaaatggaaaactgacag

SEQ ID NO: 65064 - DNA, 75 bp, synthetic construct
  source 1..75: mol_type = other DNA
caacaacaataatctttccggtccttttggagatgccataattcaagcaagagattattgtagaaaactgagcat

SEQ ID NO: 65065 - DNA, 75 bp, synthetic construct
  source 1..75: mol_type = other DNA
agcgaagatggcgagactacttttgctgattatgtcattaaaacagcaagtactgcgtttataattgaagcaaaa

SEQ ID NO: 65066 - DNA, 75 bp, synthetic construct
  source 1..75: mol_type = other DNA
catgttgtgggtaacgttccgttcggtggtcgtgataacacacgcaacatcgataagccttacgcagaagaaacg

SEQ ID NO: 65067 - DNA, 75 bp, synthetic construct
  source 1..75: mol_type = other DNA
gacaagatgttcacttctcggcggcaaatgttgttccaacagcaaatgaaaatcgtccacgtaacatcgccttta

SEQ ID NO: 65068 - DNA, 75 bp, synthetic construct
  source 1..75: mol_type = other DNA
atccggaatccagctttcgcaatattgactttaaccgcatcatgagcgtgctgcataatcttggttatttcgtat

SEQ ID NO: 65069 - DNA, 75 bp, synthetic construct
  source 1..75: mol_type = other DNA
agtgacaaatgatgctcattgtccacgttgcagattatcttcaactgcttcagccatagagaggtattctcaaga

SEQ ID NO: 65070 - DNA, 75 bp, synthetic construct
  source 1..75: mol_type = other DNA
tgtcggtcagcgacagtgccaatcctgttcatcattatggtcatgtgcagggaggctacagtgtgccactgatta

SEQ ID NO: 65071 - DNA, 75 bp, synthetic construct
  source 1..75: mol_type = other DNA
atataccaacgatactcattgccctcggtgtagattgtcgtcaacggcatctgcaatagtacggtattcccagga

SEQ ID NO: 65072 - DNA, 75 bp, synthetic construct
  source 1..75: mol_type = other DNA
ctaatgctctattgcgagcagcaagaactatgtcgcttggggcaaataaaaatacaatacgaattttgtacggta

SEQ ID NO: 65073 - DNA, 75 bp, synthetic construct
  source 1..75: mol_type = other DNA
tccgacaaataaacttctgtacacagtttgctgtgccggtgacggatttgtttatattgctgattttgacggtgc

SEQ ID NO: 65074 - DNA, 75 bp, synthetic construct
  source 1..75: mol_type = other DNA
tatggaaacgacattcgtgctggatgcactggagcaggcgttgtgggcccgtcggccgtccggcacagtccatca

SEQ ID NO: 65075 - DNA, 75 bp, synthetic construct
  source 1..75: mol_type = other DNA
gattgaattattcgatgctctaccatcctccgagcaggaagcattgctgtctgaaatgcgcgctagagttgagaa

SEQ ID NO: 65076 - DNA, 75 bp, synthetic construct
  source 1..75: mol_type = other DNA
atgagcgcgctcaatcagatggatgcgctggtgttcagttctcgcgtcgataactacccgctgattttgtgtgag

SEQ ID NO: 65077 - DNA, 75 bp, synthetic construct
  source 1..75: mol_type = other DNA
atgaataacatattacttccgccaattaatattccctgtacacttttcgaaactattagtttattcgatgatttt

SEQ ID NO: 65078 - DNA, 75 bp, synthetic construct
  source 1..75: mol_type = other DNA
aaaaagcatccatccgcagactcatcttgcttgcttcagcggtgtgctgcaagcggatgcgtacgccgggttcaa

SEQ ID NO: 65079 - DNA, 75 bp, synthetic construct
  source 1..75: mol_type = other DNA
atgacagtcagaatatcgggcgtgctgaaggacggcaccgggaagccggtgccgggatgcaccatagagctgaaa

SEQ ID NO: 65080 - DNA, 75 bp, synthetic construct
  source 1..75: mol_type = other DNA
ttattgcggaatatgatgaacgtcgttgtagtggtagtaagaacgagcactgttatagtaatttcagaaggttat

SEQ ID NO: 65081 - DNA, 75 bp, synthetic construct
  source 1..75: mol_type = other DNA
cgctttcaacaacaggtctggcgaagtttggtagtcgtatcgcgacgaatggacttaatccaaacgatctgcctg

SEQ ID NO: 65082 - DNA, 75 bp, synthetic construct
  source 1..75: mol_type = other DNA
gctcagcgcgaagctgatattgaaaatgaaaaactccgtaaagaggtcgaggatttgagggctgccagcgaatca

SEQ ID NO: 65083 - DNA, 75 bp, synthetic construct
  source 1..75: mol_type = other DNA
cgcctggtggaagcgcgtctggctgatttccgtattaaagccgatgtcgtcaattactctccggggccggttatc

SEQ ID NO: 65084 - DNA, 75 bp, synthetic construct
  source 1..75: mol_type = other DNA
ttcctgttaaggatgtattaagtgaatcccagagagcgctttgtggttctgatctgaaatacgccctttctgatt

SEQ ID NO: 65085 - DNA, 75 bp, synthetic construct
  source 1..75: mol_type = other DNA
gctgcaaaccctgcgcctgaaacgcctcatgagctacaaaatcatcgctgcatcaacatgcgtttgccaactgcc

SEQ ID NO: 65086 - DNA, 75 bp, synthetic construct
  source 1..75: mol_type = other DNA
gctgggcgacacaatggttctggttaaggctcctggtgctgataatgtcaaaatagagaaccagaccggaattca

SEQ ID NO: 65087 - DNA, 75 bp, synthetic construct
  source 1..75: mol_type = other DNA
cctcgtctccagaagcaatgcaatcatggctgcaaaacaacgccaaggaactggcgcgcgtcggtgttgacccta

SEQ ID NO: 65088 - DNA, 75 bp, synthetic construct
  source 1..75: mol_type = other DNA
tcggtgccgatatgctcgacatggttctgccgaggctggatggcttcgagcgctgcggagaaacttttgacacag

SEQ ID NO: 65089 - DNA, 75 bp, synthetic construct
  source 1..75: mol_type = other DNA
gtaaactaacaattgatgcaacaggagcatcaaaacctggtgagtatatagtttcaaaaaatatgtatggtgacg

SEQ ID NO: 65090 - DNA, 75 bp, synthetic construct
  source 1..75: mol_type = other DNA
tcctgtggtctggcggcaatcaacgctgacgatatctggtattttgcctccggtggcgtcattggcagcttacta

SEQ ID NO: 65091 - DNA, 75 bp, synthetic construct
  source 1..75: mol_type = other DNA
tcatggttttgttcgttgcgcgctatccggtgaaatgctggcagtaaatcctgaacagacagatgcattgataga

SEQ ID NO: 65092 - DNA, 75 bp, synthetic construct
  source 1..75: mol_type = other DNA
aaatcacaaagaaccagtacaacagcttgataaggttcaccctacctggcgaagcgagtttccaataccgttaga

SEQ ID NO: 65093 - DNA, 75 bp, synthetic construct
  source 1..75: mol_type = other DNA
tggcaggggcgtaagtatgaggcatacccgattgacggcagcggctttgagatgaacggtcggggcagcagtgcc

SEQ ID NO: 65094 - DNA, 75 bp, synthetic construct
  source 1..75: mol_type = other DNA
caccgcctgcggtcatagcggtggcggcaactgccctgattgtggtgcggtgatgggtgacgcaacataccagga

SEQ ID NO: 65095 - DNA, 75 bp, synthetic construct
  source 1..75: mol_type = other DNA
actgcctcacagcacaaaagcacacctaacacggtaaaaaccagctcacctctttctcccagcaacagtcctgcc

SEQ ID NO: 65096 - DNA, 75 bp, synthetic construct
  source 1..75: mol_type = other DNA
atgaaaatcatcaggtgtacggtgtgcgtaaagtctggcgtcagttgttacgggaaggtatcagagtggccagat

SEQ ID NO: 65097 - DNA, 75 bp, synthetic construct
  source 1..75: mol_type = other DNA
aacgcgaaaaagtgcttgaggcggagcgcgttaaacagtggaaccaacagcagttaaacgcgccaactgctgacc

SEQ ID NO: 65098 - DNA, 75 bp, synthetic construct
  source 1..75: mol_type = other DNA
tgtgcaaacaacaggtcatcaataaagctatccagcttgagcagaccgacgagatccagaatcaggtaagccagg

SEQ ID NO: 65099 - DNA, 75 bp, synthetic construct
  source 1..75: mol_type = other DNA
gtttcgttttcaatcgtgctctggcacgtcagaatgagaatcatgaggtcggtaataaatacatcccttacggga

SEQ ID NO: 65100 - DNA, 75 bp, synthetic construct
  source 1..75: mol_type = other DNA
tgccgaaactgggctggatgcgctaccggaatagccgtcaggtcacgggtgttgtgaaaaatgtcactgtcagcc

SEQ ID NO: 65101 - DNA, 75 bp, synthetic construct
  source 1..75: mol_type = other DNA
acattacagatcaaatatgccaatcatgggtcaaccatgacattaaacacacagggaaccgcttatgctggtgtt

SEQ ID NO: 65102 - DNA, 75 bp, synthetic construct
  source 1..75: mol_type = other DNA
atgaaataccacgtcagtgtgtgactcctggtgactatattcttcatgaaggccggacatatattgcctcggcaa

SEQ ID NO: 65103 - DNA, 75 bp, synthetic construct
  source 1..75: mol_type = other DNA
gcgtgaaaagtgccgctcaatggtggcccatggcatcaatcccgcgcagaaaaaacaggaagaaaagcttaaaca

SEQ ID NO: 65104 - DNA, 75 bp, synthetic construct
  source 1..75: mol_type = other DNA
gttgtggctgtaccacgacagcggtgatgcgggactgacacacctgtaccggatgcgtgatgcgcagtcgtggag

SEQ ID NO: 65105 - DNA, 75 bp, synthetic construct
  source 1..75: mol_type = other DNA
actcttgtttgtaatggtgcttacatcaagatcagtggcggaaatatcgaacttggatgtccaggtaatattctg

SEQ ID NO: 65106 - DNA, 75 bp, synthetic construct
  source 1..75: mol_type = other DNA
cagacagccagtggatacgcgcagtcggtggtaaaggaattataaccacaggggaaatcaaaggaggaaaagtca

SEQ ID NO: 65107 - DNA, 75 bp, synthetic construct
  source 1..75: mol_type = other DNA
attgcagaatgtcacgttaactgcctggttgaaacagatgctcaggcttatgcaaacgcagaattcatagcagag

SEQ ID NO: 65108 - DNA, 75 bp, synthetic construct
  source 1..75: mol_type = other DNA
cttggaacaaaggacaaaaggcaggcgacagaactccatgacaagctaaaggctgaagcatggcgggtcagcaaa

SEQ ID NO: 65109 - DNA, 75 bp, synthetic construct
  source 1..75: mol_type = other DNA
agccatatcagcgaagggcaccgggtggcggtgcactatggttatgacagtaaaggccgcctcgccagtgaacac

SEQ ID NO: 65110 - DNA, 75 bp, synthetic construct
  source 1..75: mol_type = other DNA
cagaagcagaacaaaaatttactgctctggaaaatacgctgaatgctgcccggccacatctgggtgaattatatg

SEQ ID NO: 65111 - DNA, 75 bp, synthetic construct
  source 1..75: mol_type = other DNA
gcttatagtgagatgtacaccagaaaaaatattgacggtacaaaagatacaatgacaaggattgtcacacacaat

SEQ ID NO: 65112 - DNA, 75 bp, synthetic construct
  source 1..75: mol_type = other DNA
ccttcccgcagacgacatgctccaggcatcaacaaatcccagcgctcgctgaacgaagatgacctgcttgaagcc

SEQ ID NO: 65113 - DNA, 75 bp, synthetic construct
  source 1..75: mol_type = other DNA
tctggaaaatacgctgaatgctgcacgaccacatctgggagaattatatgaggcgtataaaacgacactgacaga

SEQ ID NO: 65114 - DNA, 75 bp, synthetic construct
  source 1..75: mol_type = other DNA
atgaaagatgactccgttgttacccatctgactaattcagacagtattatcaatctttcgtatgatgatggtcaa

SEQ ID NO: 65115 - DNA, 75 bp, synthetic construct
  source 1..75: mol_type = other DNA
tatcgccagtccgggccgcttggtatgaacaaccagagtcgcggtcgcactggcaaccgcctgttgcccacatca

SEQ ID NO: 65116 - DNA, 75 bp, synthetic construct
  source 1..75: mol_type = other DNA
ctatgccagtcgcctggaagcctggcaggcacttcaggtttttctgacacggtatccggcccggcggattgacgt

SEQ ID NO: 65117 - DNA, 75 bp, synthetic construct
  source 1..75: mol_type = other DNA
gctgatttagaagctaaacagccatcgccagtagtgccggaaggactggttaaagcagtgcgcttctatgagcag

SEQ ID NO: 65118 - DNA, 75 bp, synthetic construct
  source 1..75: mol_type = other DNA
ggggaggaaggaaactaccggatggaaagagtccccctaaagcagactgacagacatcacaaatccccgggtggg

SEQ ID NO: 65119 - DNA, 75 bp, synthetic construct
  source 1..75: mol_type = other DNA
gcgtgacgataccggggaagtgcaggccgtggagcttgtggtgcgtggacgtcacaaagaagtggattccggcga

SEQ ID NO: 65120 - DNA, 75 bp, synthetic construct
  source 1..75: mol_type = other DNA
aaaatccagactgggcgaagcgttcagctatgtactgaatcagtgggatgccctctgttattacagtgatgacgg

SEQ ID NO: 65121 - DNA, 75 bp, synthetic construct
  source 1..75: mol_type = other DNA
atatagcatggcaaaaagaacgttctaaagaagaagagtttaaatcaagtgtaaaaccagaagattttgtgaagt

SEQ ID NO: 65122 - DNA, 75 bp, synthetic construct
  source 1..75: mol_type = other DNA
tgtatggtatatagcatggcagaaagaacgttctaaagaagaagagtttaaatcaagcatcaagccggaagattt

SEQ ID NO: 65123 - DNA, 75 bp, synthetic construct
  source 1..75: mol_type = other DNA
ccgatatgatcatcagtcagaagcgcatggggggcctgcaggccgtgcgtgcgccgtttttcccgccgaatgcgc

SEQ ID NO: 65124 - DNA, 75 bp, synthetic construct
  source 1..75: mol_type = other DNA
tcgggcaacagttaaacttaacggggcaaaccaggtagatgcagataatatcagttggggatatcggggtgggaa

SEQ ID NO: 65125 - DNA, 75 bp, synthetic construct
  source 1..75: mol_type = other DNA
gctgctcgcatcagggaaatgacggtcatcacctccagcctgatgatgagtctgaccgtcgatgaaagcgatctt

SEQ ID NO: 65126 - DNA, 75 bp, synthetic construct
  source 1..75: mol_type = other DNA
agccagcgcagccgcgccgcctacagtggacaacagatgctggaggagtatgtcaacttctatcagaatctgtag

SEQ ID NO: 65127 - DNA, 75 bp, synthetic construct
  source 1..75: mol_type = other DNA
cgcagtcggtaacctcgcgcatacaaccgggcagtgatgtgattgtctgcgctgaaatggacgaacagtggggct

SEQ ID NO: 65128 - DNA, 75 bp, synthetic construct
  source 1..75: mol_type = other DNA
cgcctacccggttatgcgtctggtggcgttgatgaatctgggaagccacattttgctgaatgccgtgaccgcgcc

SEQ ID NO: 65129 - DNA, 75 bp, synthetic construct
  source 1..75: mol_type = other DNA
atgagatcgtcactgtgattaagtcagttgaagccggacgaaccgttaaagatatctgccgggaggccggtatct

SEQ ID NO: 65130 - DNA, 75 bp, synthetic construct
  source 1..75: mol_type = other DNA
ttatcgtcggtcgtgacagactggcacgtcttcgtaaggagctgaggctgcactgtaagcagaaacgcaagttca

SEQ ID NO: 65131 - DNA, 75 bp, synthetic construct
  source 1..75: mol_type = other DNA
tcgtggggtggcgagtctcatcgtctatggaaacgacattcgtgctggatgcactggagcaggcgttgtgggccc

SEQ ID NO: 65132 - DNA, 75 bp, synthetic construct
  source 1..75: mol_type = other DNA
ggacttaatccaaacgatctgcctgctggctgggctggcggtgttcgcacctatgatttgtatgcgtcagggact

SEQ ID NO: 65133 - DNA, 75 bp, synthetic construct
  source 1..75: mol_type = other DNA
gatgcgtgatgcgcagttgtggagccacatcgaatttcaccccgaatgcaacgcgatttacgcggcacttgactg

SEQ ID NO: 65134 - DNA, 75 bp, synthetic construct
  source 1..75: mol_type = other DNA
gtttccttgatgaaatcctcgccccgtggctgcccaccaccagcaccaacaattaccgcatcgcgttacggaagt

SEQ ID NO: 65135 - DNA, 75 bp, synthetic construct
  source 1..75: mol_type = other DNA
ggaggatttgcagagcctggtgggtgccacggtggtccgtcgccgggtgtatgcgcgttttctggatgcggtgaa

SEQ ID NO: 65136 - DNA, 75 bp, synthetic construct
  source 1..75: mol_type = other DNA
cgggcattgcctgggggcgaaaggaattaatctgctgatgagtacattgcagaaccgtctggtcgatcatggtta

SEQ ID NO: 65137 - DNA, 75 bp, synthetic construct
  source 1..75: mol_type = other DNA
atgaaaggcatcaacttagtaaaaattaaactggattttactgatacgtaccaggtgaaattttctcgtgtacgt

SEQ ID NO: 65138 - DNA, 75 bp, synthetic construct
  source 1..75: mol_type = other DNA
atccgcacatcagcatctaccatttgaatgtagtttcggcgcattttgcggtgtattacgtcctgaaaaacttat

SEQ ID NO: 65139 - DNA, 75 bp, synthetic construct
  source 1..75: mol_type = other DNA
gagcaggggctggagaatatgcaacgactgccgggtgtgcaggctgatatggaaattgtgcccggtgagcagcca

SEQ ID NO: 65140 - DNA, 75 bp, synthetic construct
  source 1..75: mol_type = other DNA
aaaacaatcaatcctcagaaaacaacaatacagggttaaatctgagttactggagatactggggaatgtgttgtt

SEQ ID NO: 65141 - DNA, 75 bp, synthetic construct
  source 1..75: mol_type = other DNA
gatttcagcctgtggggcgtgcatgttctggcgggcaaatcctttgccggtggtctgtttgtggatggtatgacc

SEQ ID NO: 65142 - DNA, 75 bp, synthetic construct
  source 1..75: mol_type = other DNA
ggggccgatgccccatatgtgatgagaggattacatctgattcccagtggcaggttcatcacatcatacggcgag

SEQ ID NO: 65143 - DNA, 75 bp, synthetic construct
  source 1..75: mol_type = other DNA
aattatgcacgtaccggagggcaggtgactgcagggaatgtgcaatcgattattggcgtgacttttgtttatcaa

SEQ ID NO: 65144 - DNA, 75 bp, synthetic construct
  source 1..75: mol_type = other DNA
cggggcctttcacccggagacaagcgcaagcggttactaccgcatacagcaatatcacactcgaagacgatcagg

SEQ ID NO: 65145 - DNA, 75 bp, synthetic construct
  source 1..75: mol_type = other DNA
tatggaaacgacattcgtgctggatgcactggagcaggcgttgtgggcccgccggccgtccggcacaatccacca

SEQ ID NO: 65146 - DNA, 75 bp, synthetic construct
  source 1..75: mol_type = other DNA
cgcattctgcatctggaccagtcgtggatgtttctggtcgggcgtggggcctttccgctgtttgccctggtgtgg

SEQ ID NO: 65147 - DNA, 75 bp, synthetic construct
  source 1..75: mol_type = other DNA
atgcaaaagctaaaacagcaggtatttgaagccaacatggatctgccgcgctacgggctggtgacctttacctgg

SEQ ID NO: 65148 - DNA, 75 bp, synthetic construct
  source 1..75: mol_type = other DNA
tatcgctttctaacaaagacaacgactataccggtgttaccgatctgcgcagtgggacgcttttgttgaataacg

SEQ ID NO: 65149 - DNA, 75 bp, synthetic construct
  source 1..75: mol_type = other DNA
tacaacatcaaaatttgctatatcctgataaacttattcgagctcgattaaccaaagatgctttaccagaatata

SEQ ID NO: 65150 - DNA, 75 bp, synthetic construct
  source 1..75: mol_type = other DNA
aatatgagcaaggggctatctcgcttgcacgtatgaatagccagatgaaacgcctacaacagcaacaacgtaaga

SEQ ID NO: 65151 - DNA, 75 bp, synthetic construct
  source 1..75: mol_type = other DNA
tcactggaccgtggtgatttgcttcttcctggtggcgctgtccgggatttcgttcttcttcccgacgctgcaatg

SEQ ID NO: 65152 - DNA, 75 bp, synthetic construct
  source 1..75: mol_type = other DNA
tttgccagtagctgcggaggtgcgccaatatccgtcatccgccaatacattgaacaacagcaaacacctggttag

SEQ ID NO: 65153 - DNA, 75 bp, synthetic construct
  source 1..75: mol_type = other DNA
tcttgaaacactggttcttcatatcgaaaacaatcgtctcattcttgacggaaaactgactcacgataaagcgta

SEQ ID NO: 65154 - DNA, 75 bp, synthetic construct
  source 1..75: mol_type = other DNA
cctttgtcaaagcaagtagttgatatatttaaacaactacagcctattaccggtcattatccttacatttttata

SEQ ID NO: 65155 - DNA, 75 bp, synthetic construct
  source 1..75: mol_type = other DNA
gatgaatatttctggataccgaaatttcaggagctgcgcaaagtggcttccggtatggctattcacaagaaatgg

SEQ ID NO: 65156 - DNA, 75 bp, synthetic construct
  source 1..75: mol_type = other DNA
ttgcgcatggagtacagccctgacgaataccagaacttgctgatgtgcgagttcgtggacgatctcgcgtccgtg

SEQ ID NO: 65157 - DNA, 75 bp, synthetic construct
  source 1..75: mol_type = other DNA
tcatgctcaatatcttgataatcggagaaatatgatgcagtggtatgcgcagcatatatatggaaaagttataca

SEQ ID NO: 65158 - DNA, 75 bp, synthetic construct
  source 1..75: mol_type = other DNA
ttcctgccgaagcctggcggtggtatgaacctgttaatcacctcagtggatggtgataaaactgctggcgctgcg

SEQ ID NO: 65159 - DNA, 75 bp, synthetic construct
  source 1..75: mol_type = other DNA
ccattataacggtgggttgacaccggaagagtccgggaacaggtaccatttttactgtaaaaccgtggccagtat

SEQ ID NO: 65160 - DNA, 75 bp, synthetic construct
  source 1..75: mol_type = other DNA
ggcaacgttcaactatcaggtgggtacgctgaaatacacctgggacagcgtcagccgggatgccatcccgacaac

SEQ ID NO: 65161 - DNA, 75 bp, synthetic construct
  source 1..75: mol_type = other DNA
acttcgccaaagaagtcgaggtggagctgaaaggcgatccgatggtgcttcctaacggggccacgctttacttcc

SEQ ID NO: 65162 - DNA, 75 bp, synthetic construct
  source 1..75: mol_type = other DNA
gctgaaaggcgatccgatggtgcttcctaacggggccacactgtatttcctcggcaccaatgcccgcacggccca

SEQ ID NO: 65163 - DNA, 75 bp, synthetic construct
  source 1..75: mol_type = other DNA
atgcggggctttgttttttgttacactgccgccagtctgattaaggtagtaataattatgctgatcttcgaaggt

SEQ ID NO: 65164 - DNA, 75 bp, synthetic construct
  source 1..75: mol_type = other DNA
atgcgcgggtgtgagatgcgcggcatggtggctaattttggcggtttcctttccattaacaaactttcgcagtaa

SEQ ID NO: 65165 - DNA, 75 bp, synthetic construct
  source 1..75: mol_type = other DNA
cgtcacggtgaacgatgtgacagaagcaaaaatgcatgtctctcaagcaataaaggaattaccgtcaatggtgcc

SEQ ID NO: 65166 - DNA, 75 bp, synthetic construct
  source 1..75: mol_type = other DNA
gcgggtcgctgtcatctaatggcaaggtgctccacacccataaacaccccggcgacagcggcgggacaacgggtg

SEQ ID NO: 65167 - DNA, 75 bp, synthetic construct
  source 1..75: mol_type = other DNA
ccagctcatcatgaaggagcagaaagaagggaaagacttcaaggaaattgacctgctggcgcgccagtcagagcg

SEQ ID NO: 65168 - DNA, 75 bp, synthetic construct
  source 1..75: mol_type = other DNA
tctggcccccggcctgctgtgtgcagacgggcagtaccgccagatagtcaccgtggaagatgcggtgcggggcgg

SEQ ID NO: 65169 - DNA, 75 bp, synthetic construct
  source 1..75: mol_type = other DNA
ctctccttcgaccaccgcgtgatcgacggtgctgatggtgcccgtttcattaccatcattaacaacacgctgtct

SEQ ID NO: 65170 - DNA, 75 bp, synthetic construct
  source 1..75: mol_type = other DNA
ctgtcattgcttatcaatcccgatggctcgaaaggctggcgtttccgtttccggtttgcagggaaagcgcggtta

SEQ ID NO: 65171 - DNA, 75 bp, synthetic construct
  source 1..75: mol_type = other DNA
tgactggtgtttggctgtccttttttatcgacagcgcaccagctccgacgattgtcgtcttattcgcggttgtgt

SEQ ID NO: 65172 - DNA, 75 bp, synthetic construct
  source 1..75: mol_type = other DNA
tgcaaacctaccgacagcttcattcccttcgcagggatttaccggggcgtattatcagttgaataatgacaactt

SEQ ID NO: 65173 - DNA, 75 bp, synthetic construct
  source 1..75: mol_type = other DNA
gttgttttgctttttgccctgatatttatagttatttttatatactcaagctttaaatataatgagaaatatctc

SEQ ID NO: 65174 - DNA, 75 bp, synthetic construct
  source 1..75: mol_type = other DNA
ggattctggggttacctctggctacaggggcattcgtcgccggagtattctgcgcggtggcgacgggatacctga

SEQ ID NO: 65175 - DNA, 75 bp, synthetic construct
  source 1..75: mol_type = other DNA
agcaggggatagaggacgtaaaagggatcatcttttgccggaatatccagcatatgaatcatcttattgcgttct

SEQ ID NO: 65176 - DNA, 75 bp, synthetic construct
  source 1..75: mol_type = other DNA
ttttaccttgcacagcttgctgccctgggcagaccagacgccaccatcacgcgatacgataaaagcacgttcacc

SEQ ID NO: 65177 - DNA, 75 bp, synthetic construct
  source 1..75: mol_type = other DNA
gctctgctggaagagatgaaaatgcagcttaatagccgcgatgtactgctggataagttgcgccgatatcgcgaa

SEQ ID NO: 65178 - DNA, 75 bp, synthetic construct
  source 1..75: mol_type = other DNA
tggctgcactcctgactccttttgaccaacaacaagcactggataaagcgagtctgcgtcgcctggttcagttca

SEQ ID NO: 65179 - DNA, 75 bp, synthetic construct
  source 1..75: mol_type = other DNA
cggacggataatcgcgatgtagtgagtttctttggtggcgccgatgggcatatcggtaaattcgatctggtttgg

SEQ ID NO: 65180 - DNA, 75 bp, synthetic construct
  source 1..75: mol_type = other DNA
atacgtaatttctctggcaacaggtgagcaaagtgtatatgaaaagcttgggtttgctcatgcgacatgttataa

SEQ ID NO: 65181 - DNA, 75 bp, synthetic construct
  source 1..75: mol_type = other DNA
tttctgtccacactgaataaaatggcagagaaaaagaaaaacacagggaaggagatgtttgtgggggttacacgg

SEQ ID NO: 65182 - DNA, 75 bp, synthetic construct
  source 1..75: mol_type = other DNA
cgatctccacaaactggttcgtgacactgacaaagttttccctaatcctggtaattcagacctgggactgatgac

SEQ ID NO: 65183 - DNA, 75 bp, synthetic construct
  source 1..75: mol_type = other DNA
agcatgaatcggaacggaactaccaaaaagcggaacaaaacagcccaaatgcgttacaaaacgagccagaaacga

SEQ ID NO: 65184 - DNA, 75 bp, synthetic construct
  source 1..75: mol_type = other DNA
tggcaggggcggcaatatcaggcgtacccgattgagggcagcggctttgagatgaacgggaagggcagcagtgcc

SEQ ID NO: 65185 - DNA, 75 bp, synthetic construct
  source 1..75: mol_type = other DNA
gcgatacgacaaaagcacgttcacctgctcatcggcctgtactgacgcggtgaatgcgccggaatggcggtatta

SEQ ID NO: 65186 - DNA, 75 bp, synthetic construct
  source 1..75: mol_type = other DNA
gacatcatcctgataaacgcagtgcccgtgctcagcgcgatgactggctgaagaaagagatacagcgcgtatacg

SEQ ID NO: 65187 - DNA, 75 bp, synthetic construct
  source 1..75: mol_type = other DNA
ccgtcttcatattgtttgcgatgtccctgatgaacttattgatttcacgtttgaatggaaagggctgaagaaatt

SEQ ID NO: 65188 - DNA, 75 bp, synthetic construct
  source 1..75: mol_type = other DNA
tagttattttagaaaatgatacgaacaaaaaacagatgtattctaaaaaccgagggattgaaatagccaaaggga

SEQ ID NO: 65189 - DNA, 75 bp, synthetic construct
  source 1..75: mol_type = other DNA
atgggggctttacccaaccgaaaatatgccgttgtaactcgttcaagcttcacttccagtgatgagaatgtattg

SEQ ID NO: 65190 - DNA, 75 bp, synthetic construct
  source 1..75: mol_type = other DNA
gcctcaatcattctgtcggggcgttgctgctgagctatgcaggatcgcgtttcgacaggccggatgataccggtg

SEQ ID NO: 65191 - DNA, 75 bp, synthetic construct
  source 1..75: mol_type = other DNA
atcagaagctggtggagatcacccacgaagacttgcgggcgctggctgatgccattgttgagcgaggcgcaccgg

SEQ ID NO: 65192 - DNA, 75 bp, synthetic construct
  source 1..75: mol_type = other DNA
aggcgaagctttccgctatatctatatcggtgatgctggtgacggtgaacttaatgtctcgcgtgaaggtaaagt

SEQ ID NO: 65193 - DNA, 75 bp, synthetic construct
  source 1..75: mol_type = other DNA
atgattactcactatgatataaaagcggagacacagagactaaaggatgtactctctgtagagggtgttaatatt

SEQ ID NO: 65194 - DNA, 75 bp, synthetic construct
  source 1..75: mol_type = other DNA
tatggttgcctttgtccggcaccagttacggcgttgccgggctgctgatgctggcggtcagttaccggttgtacc

SEQ ID NO: 65195 - DNA, 75 bp, synthetic construct
  source 1..75: mol_type = other DNA
taccttgctccatgaagccggttacaacactgactggatagagaaatgcctggcacatgagcaaaagggtgtgag

SEQ ID NO: 65196 - DNA, 75 bp, synthetic construct
  source 1..75: mol_type = other DNA
acgggtaggaacgacgccatcaatcagagcagcggttaaacttttgctgttaacgatggtacgtaaaagtgagct

SEQ ID NO: 65197 - DNA, 75 bp, synthetic construct
  source 1..75: mol_type = other DNA
ccaccattaatgccattgttggtacggaggttctgcctaatcgtaatcgcccaatgactgcgctgccgacgctta

SEQ ID NO: 65198 - DNA, 75 bp, synthetic construct
  source 1..75: mol_type = other DNA
atttgcccaacttctcggcacgcttcgcgtgggtgatatgtacacatcaagcgatatttttgattctgttcgctt

SEQ ID NO: 65199 - DNA, 75 bp, synthetic construct
  source 1..75: mol_type = other DNA
aagaaagagatacagcgcgtatacgatgaaaatcaccaggtatacggtgtgcgtaaagtctggcgtcagttgtta

SEQ ID NO: 65200 - DNA, 75 bp, synthetic construct
  source 1..75: mol_type = other DNA
atgagcgcattttcttttaacaccacttatcagccaaccggtgatcagcaaaaagacgcaatcgcacaaatcgac

SEQ ID NO: 65201 - DNA, 75 bp, synthetic construct
  source 1..75: mol_type = other DNA
tcattttgcaggaagtattcactgtaatagaattaccccctgataaagtttattcactaaggaattattcaacag

SEQ ID NO: 65202 - DNA, 75 bp, synthetic construct
  source 1..75: mol_type = other DNA
tacatgatatgcgccgtacagccagtacgttgttgcatgaggctggttatccttcagactggattgaaaaggctc

SEQ ID NO: 65203 - DNA, 75 bp, synthetic construct
  source 1..75: mol_type = other DNA
atcagaagctgaccgaaatcacccacgaggacttgcgagcacttaccgacgccatcgtagagcgcggtgcgcctg

SEQ ID NO: 65204 - DNA, 75 bp, synthetic construct
  source 1..75: mol_type = other DNA
catgcctgctggccgtgattccggcgcttaaccttgccaccagtaatgcggcggctgtagccggccttgtgatga

SEQ ID NO: 65205 - DNA, 75 bp, synthetic construct
  source 1..75: mol_type = other DNA
gcctgtgtgcgctcaccatgacaataatgaccgctcacgccgccgaaccacctaccaatttagataaaccggaag

SEQ ID NO: 65206 - DNA, 75 bp, synthetic construct
  source 1..75: mol_type = other DNA
atgaaaacgggatcggtgttcgtgtccaggcaacactacgcggcgaaagtaaaccacgcgtactggaattacttc

SEQ ID NO: 65207 - DNA, 75 bp, synthetic construct
  source 1..75: mol_type = other DNA
tctgcctggctggtgaatggatggtacccgacagcgagtatcagcgatctgctggttgtcgtgatgaagaagtcc

SEQ ID NO: 65208 - DNA, 75 bp, synthetic construct
  source 1..75: mol_type = other DNA
ggtgcagtcactggtggagaccacctcaaagggtgaccgtaatccctcttctgtccggctgctgattcagcttga

SEQ ID NO: 65209 - DNA, 75 bp, synthetic construct
  source 1..75: mol_type = other DNA
accttcagactgagagtgaatcagactatcgtaattggcttggcgataatccagacggatatgttgtcaatgcat

SEQ ID NO: 65210 - DNA, 75 bp, synthetic construct
  source 1..75: mol_type = other DNA
ggtgacatcattgaaatctgtgataacgactatgccgggaccctgaccggcggacgtgtcctgtccattgatgct

SEQ ID NO: 65211 - DNA, 75 bp, synthetic construct
  source 1..75: mol_type = other DNA
cgctctgattaacggtgcgcctgccacgctggatacactgaaagaaattgccgcagccattaacaatgacccgaa

SEQ ID NO: 65212 - DNA, 75 bp, synthetic construct
  source 1..75: mol_type = other DNA
gtgagcgcagatggcacaacaaagtggcgatataatcacaacggtgagcttgttataacgggtgataatgccaca

SEQ ID NO: 65213 - DNA, 75 bp, synthetic construct
  source 1..75: mol_type = other DNA
ggactgcgccatgcttactcattctggtgatggcggtgcgcctttaggcgctgggcgagggttcgtgatgactgc

SEQ ID NO: 65214 - DNA, 75 bp, synthetic construct
  source 1..75: mol_type = other DNA
ctggcgaaaatgaaataccaggtcagccagggtgagctgaccaccctttcgtctgcacagaagcaacttttgcta

SEQ ID NO: 65215 - DNA, 75 bp, synthetic construct
  source 1..75: mol_type = other DNA
ggtactttggcaatatggcctccggagcggtgtctgccacggcaggacttgtgacggcagcacgtaatgaagtgg

SEQ ID NO: 65216 - DNA, 75 bp, synthetic construct
  source 1..75: mol_type = other DNA
gccagttgacggaaatccgcgcttcggctgtcggaatgaccagtgcgtttgccggtgcctttgccaccggacacc

SEQ ID NO: 65217 - DNA, 75 bp, synthetic construct
  source 1..75: mol_type = other DNA
ttacccgtaatattgcggccagaacagcagcacagacaacgctgaatactgtcacgtcagtggggagtcgtctgt

SEQ ID NO: 65218 - DNA, 75 bp, synthetic construct
  source 1..75: mol_type = other DNA
atgaacgacgtgttcctgaaacgactgtttgcggtgagcatcacctcgtccggcaatcccccagcattttccctg

SEQ ID NO: 65219 - DNA, 75 bp, synthetic construct
  source 1..75: mol_type = other DNA
ccctttctcgcttaacaaaagtgagacatcgaaatgaattgaattcaacgctgtcaacattgcctatggctgcta

SEQ ID NO: 65220 - DNA, 75 bp, synthetic construct
  source 1..75: mol_type = other DNA
aacaacgcgctggaagcatggcgtaacaaccaggcgaataagccaaaggtacgtggtggaaaatcggaagcagaa

SEQ ID NO: 65221 - DNA, 75 bp, synthetic construct
  source 1..75: mol_type = other DNA
gacacagatagcaaccgccagggcgcgtgcggcggtttatcgtgcgcaacaggcggttgttgctgctcgcggtac

SEQ ID NO: 65222 - DNA, 75 bp, synthetic construct
  source 1..75: mol_type = other DNA
cgtcacggtgcgtcggctttcagcgcgacgctcggctgtttctggatgatcctggcctggatttttattccgctg

SEQ ID NO: 65223 - DNA, 75 bp, synthetic construct
  source 1..75: mol_type = other DNA
cggcgagcactggcagaagtgaccgagcagataaatacggcgaagtcttcggcaatgaatatggctggcgcattt

SEQ ID NO: 65224 - DNA, 75 bp, synthetic construct
  source 1..75: mol_type = other DNA
accagaatcaggagcaggccagggagtctgcgcgccagtatgcactgacgatagatgaaatcgcgcataaaacgc

SEQ ID NO: 65225 - DNA, 75 bp, synthetic construct
  source 1..75: mol_type = other DNA
ccgaaaccattgaggtggaaaacggagcccgcccggttaaaacggtgaaatctgccgttattggcctgattggta

SEQ ID NO: 65226 - DNA, 75 bp, synthetic construct
  source 1..75: mol_type = other DNA
attatggacagtgatgatggtgagcaggcctttctgcatggcctggagagcctgatccgggggtttgaggtgcag

SEQ ID NO: 65227 - DNA, 75 bp, synthetic construct
  source 1..75: mol_type = other DNA
gcagcagagcagttgttcccgtcagtgcggttccgtgtcagggaacgcagtcgccataaatccgcactggtcatg

SEQ ID NO: 65228 - DNA, 75 bp, synthetic construct
  source 1..75: mol_type = other DNA
gagctccttgaagagcaccggcgtagcgatgtattgcatagctatgggatgaaagcagccagtaagatcatgttt

SEQ ID NO: 65229 - DNA, 75 bp, synthetic construct
  source 1..75: mol_type = other DNA
cgcacgctgaccgcctggcgcgccgatgaacgctttcccatgatgagcacctttaaagtagtgctctgcggcgca

SEQ ID NO: 65230 - DNA, 75 bp, synthetic construct
  source 1..75: mol_type = other DNA
aacggcctctaccatcgcacgtcgggttgatgataatcatcagatcaggctggactatggcgcggtcagtaatgt

SEQ ID NO: 65231 - DNA, 75 bp, synthetic construct
  source 1..75: mol_type = other DNA
tgctggccaccgtcggcggccccgcaggattgactgcctttttgcgccagatcggcgacaacgtcacccgccttg

SEQ ID NO: 65232 - DNA, 75 bp, synthetic construct
  source 1..75: mol_type = other DNA
gccgcaggccagcgtatcgggatgaagctgctggaggatacctatagtctctatggttttaaaccgaaaatcctg

SEQ ID NO: 65233 - DNA, 75 bp, synthetic construct
  source 1..75: mol_type = other DNA
cagcagccgccgcgctcactacgctgatgcacgcgcttatcgatattgaatgcactgcagagcttgcgcagggag

SEQ ID NO: 65234 - DNA, 75 bp, synthetic construct
  source 1..75: mol_type = other DNA
accgttatctggagtacggcctgcaacagatgcttgaggggtacagtgtcatactggcccgggaattttttatgc

SEQ ID NO: 65235 - DNA, 75 bp, synthetic construct
  source 1..75: mol_type = other DNA
ggcgcagcccgtcacgcaaaaatgctcgaaactgatcaggcgtgggaagtgttcgaaaaactggaagactgctat

SEQ ID NO: 65236 - DNA, 75 bp, synthetic construct
  source 1..75: mol_type = other DNA
agcaagagaaaaaacacattaagataaatgaaaaaataaacacattggttgagatttttaataagactattgcaa

SEQ ID NO: 65237 - DNA, 75 bp, synthetic construct
  source 1..75: mol_type = other DNA
tgtgatgcgctgcttggcaggctgatgcgctgtatgtttcagggacgccgttatcttcagctggatgcggaggag

SEQ ID NO: 65238 - DNA, 75 bp, synthetic construct
  source 1..75: mol_type = other DNA
ggtcctgatatgcctactgttcaggctggcaactatccggtaactccggatggttggataagctgtagtgagcga

SEQ ID NO: 65239 - DNA, 75 bp, synthetic construct
  source 1..75: mol_type = other DNA
actactcgcttgatgcacagaccggggcgattaccaacctcggtaagagcatcgcggcagatgcaacggtgaagg

SEQ ID NO: 65240 - DNA, 75 bp, synthetic construct
  source 1..75: mol_type = other DNA
tgagccagcgtgctgcaggtctgcgtgccaaagtcgacctggacaagggctactggtggtcgtcctccaaccagg

SEQ ID NO: 65241 - DNA, 75 bp, synthetic construct
  source 1..75: mol_type = other DNA
atgcaaaagatgacactgatcctgtttttcactacatcctttcctggcagtcacatgaaagcccgcgtccggaac

SEQ ID NO: 65242 - DNA, 75 bp, synthetic construct
  source 1..75: mol_type = other DNA
tctcaaatccacgcagatgatgagcgtgattgatgcgattggtgagggaccgatagaaggcccggtgaagggact

SEQ ID NO: 65243 - DNA, 75 bp, synthetic construct
  source 1..75: mol_type = other DNA
cggctactggaaggtgatgtaccgcacgccggaaggctggaagatgaaagcgcttgcgctggcactgcgccgctg

SEQ ID NO: 65244 - DNA, 75 bp, synthetic construct
  source 1..75: mol_type = other DNA
atgaagacactaaaagcaactccagaaacaactaattttatcaactgtggctgtattacgcttaataacttagaa

SEQ ID NO: 65245 - DNA, 75 bp, synthetic construct
  source 1..75: mol_type = other DNA
gtgtggcttggggagcagcagttatcagaactggataagctgcaaattgtgccggaaggcagaaaatccgtgcgc

SEQ ID NO: 65246 - DNA, 75 bp, synthetic construct
  source 1..75: mol_type = other DNA
ggataagctgacaaaccatcatcttggaagactggcgcattcggtggaaaaggcattcactcacgcaacaacacg

SEQ ID NO: 65247 - DNA, 75 bp, synthetic construct
  source 1..75: mol_type = other DNA
agcagtgctgggcagtattcagccgcaacccatcgacgcagctgccgacggcacgctaccgctggataaagtggc

SEQ ID NO: 65248 - DNA, 75 bp, synthetic construct
  source 1..75: mol_type = other DNA
tatggccggagataatgagcctcctgtgtggcttggggagcagcagctatccgaactggataatctgcaaattgt

SEQ ID NO: 65249 - DNA, 75 bp, synthetic construct
  source 1..75: mol_type = other DNA
ccgaacttgatgcgctgaaaattgttccggatgggaaaaagcgcgtaaggctgtaccaggccggagaactggatt

SEQ ID NO: 65250 - DNA, 75 bp, synthetic construct
  source 1..75: mol_type = other DNA
cgcttaccaatttgagtggaaaggatgtagctggtcttctcacataccttggttttggagaaggtgctaactggg

SEQ ID NO: 65251 - DNA, 75 bp, synthetic construct
  source 1..75: mol_type = other DNA
tgaaccgtcgatatgaaaaagcgagcatcgtgctgacgtcaaataaagggttcgccgactggggagagatgttcg

SEQ ID NO: 65252 - DNA, 75 bp, synthetic construct
  source 1..75: mol_type = other DNA
cagggtgctggccgaaaaatgggttaaagctgagtatgaacgcactgagaaggaactggctttccagcgtgaagt

SEQ ID NO: 65253 - DNA, 75 bp, synthetic construct
  source 1..75: mol_type = other DNA
atgagtaacatatctaatctagccgaagccagagaggccagaaggctacaacaaccgcatcaaagcagcggtaag

SEQ ID NO: 65254 - DNA, 75 bp, synthetic construct
  source 1..75: mol_type = other DNA
acggctcgcgcgtgtcagccgctacggccagaccggaaacgaggcagatttaaatcccaacattgccagccgcaa

SEQ ID NO: 65255 - DNA, 75 bp, synthetic construct
  source 1..75: mol_type = other DNA
agctgttctgcaatatcagttcgactttggtctgcgtccatccatcggttactcctattctaaagcactggacgt

SEQ ID NO: 65256 - DNA, 75 bp, synthetic construct
  source 1..75: mol_type = other DNA
tgcacatatatcagtgcccggtgtgacaacggtttccatgacaacggacagcagttataccactctgcaacgtgt

SEQ ID NO: 65257 - DNA, 75 bp, synthetic construct
  source 1..75: mol_type = other DNA
ccgaccgcatcgaaatcgacatcagtcacagcgcgctcgccggtggccagctctgcgacgatggccagtggcggc

SEQ ID NO: 65258 - DNA, 75 bp, synthetic construct
  source 1..75: mol_type = other DNA
cctgatgccgcgctggtcgatttcctgtgtgagaacgccgacgtcattaccaaagtgaccctggcaccggaaatg

SEQ ID NO: 65259 - DNA, 75 bp, synthetic construct
  source 1..75: mol_type = other DNA
aagaatggcagaaaggaaattatgttacaggcatcactcgtacgccttccggtgctaacgctggcggcggaaatc

SEQ ID NO: 65260 - DNA, 75 bp, synthetic construct
  source 1..75: mol_type = other DNA
agcagcttcatcattagaaaaactcgactggaaaagacaagtggtgattgcggcggtttacggtttatgtgcgaa

SEQ ID NO: 65261 - DNA, 75 bp, synthetic construct
  source 1..75: mol_type = other DNA
gctgaggttccggcggaacagctggacggcaaaagtgagcgcattcatcactatttcaacgcggtttactgctgg

SEQ ID NO: 65262 - DNA, 75 bp, synthetic construct
  source 1..75: mol_type = other DNA
tgtagtcgtcggggacttcacgctcaaatttattgcatcctccagattgcttattttaaggccaaacatctgttt

SEQ ID NO: 65263 - DNA, 75 bp, synthetic construct
  source 1..75: mol_type = other DNA
tgcgcactgacggcacggtgacgcagctgcgtttaaaacaggttgccctgtcggcaatttcggaggtcaacgcag

SEQ ID NO: 65264 - DNA, 75 bp, synthetic construct
  source 1..75: mol_type = other DNA
ctatttcaacgcggtttattgctgggcacgcgccatgctcaacgaacgttaccaggactatgacgccacggcatc

SEQ ID NO: 65265 - DNA, 75 bp, synthetic construct
  source 1..75: mol_type = other DNA
gaccagacggtcacgatccaggaaggtaaccgccttcttacggtggaaaaaggccacaagatcaccggagtactg

SEQ ID NO: 65266 - DNA, 75 bp, synthetic construct
  source 1..75: mol_type = other DNA
tgttgaatggtgttgcagacaatattgataccgtggctgctgcagctggcgcactggttgccgtcggggtagccc

SEQ ID NO: 65267 - DNA, 75 bp, synthetic construct
  source 1..75: mol_type = other DNA
aacagctatgtccagaatctgctgttggccatacgcggcatggcagaaccgacaactctggataatgccgccctg

SEQ ID NO: 65268 - DNA, 75 bp, synthetic construct
  source 1..75: mol_type = other DNA
gcggatttcaccaccgttaaccagaaaggcaaactgcaggtgaacgccggtggtacagccacgaatgtcaccctg

SEQ ID NO: 65269 - DNA, 75 bp, synthetic construct
  source 1..75: mol_type = other DNA
acacaccgcgtgaggcgaaggacaatctcaaatccacgcagatgatgagcgtgattgatgccattggtgagggac

SEQ ID NO: 65270 - DNA, 75 bp, synthetic construct
  source 1..75: mol_type = other DNA
gaaactgcgggcagaactccatgaagccaggaaaaacatttcgcctaaaaatcctgtcgacgcaaacaaattact

SEQ ID NO: 65271 - DNA, 75 bp, synthetic construct
  source 1..75: mol_type = other DNA
taaacaggcgaagaaatttgccgatatgaccaacgtgcgtattccggcgtggatggcgcaaatgttcgacggtct

SEQ ID NO: 65272 - DNA, 75 bp, synthetic construct
  source 1..75: mol_type = other DNA
tgatgggcgacgcaacataccaggagacattcaacgaagaaagccaggatgaagcccgggaaaaagatccggagg

SEQ ID NO: 65273 - DNA, 75 bp, synthetic construct
  source 1..75: mol_type = other DNA
gaatgcgaactccgggacgctcaacaacgtcacgattaacgagaactgtcgggttctgggaaaactgtccgccaa

SEQ ID NO: 65274 - DNA, 75 bp, synthetic construct
  source 1..75: mol_type = other DNA
gcttgccaaagatccggcgttaccgtcttacgacgaactgaaaaaaatgggtatctataagcgtaaagatcccaa

SEQ ID NO: 65275 - DNA, 75 bp, synthetic construct
  source 1..75: mol_type = other DNA
cgtctgaaagccacttatcttccggtaaaggccggtaatgttgatgcggtggttaattttgtacttgactatcag

SEQ ID NO: 65276 - DNA, 75 bp, synthetic construct
  source 1..75: mol_type = other DNA
acaccattaaatggtggcttaagcaatcacgcgaagcgcaatctgccattatgaccgatgaaatcccgttagatg

SEQ ID NO: 65277 - DNA, 75 bp, synthetic construct
  source 1..75: mol_type = other DNA
tgctggtaagttacgcaacggtggttagctcatctccagatataacgtttcatggcaatttgatagcgccgccaa

SEQ ID NO: 65278 - DNA, 75 bp, synthetic construct
  source 1..75: mol_type = other DNA
gctatcttggcacggcgctgtactggatagctgccagtatcaatatcaggccgggccatgattattatttttacg

SEQ ID NO: 65279 - DNA, 75 bp, synthetic construct
  source 1..75: mol_type = other DNA
attatcaggctgcctttgaatggtttacgaaagccgctgaatgcaatgacgccactgcctggtataacctggcca

SEQ ID NO: 65280 - DNA, 75 bp, synthetic construct
  source 1..75: mol_type = other DNA
atcttatctgctatcagatttaggaatcaataacattattattgaaaaatatcaggctcagacaattcaagagta

SEQ ID NO: 65281 - DNA, 75 bp, synthetic construct
  source 1..75: mol_type = other DNA
catggcctcctgacctggcagagtttgtggcgttgatttcggaaagtggggcaaatccgtttggtttgactgtgg

SEQ ID NO: 65282 - DNA, 75 bp, synthetic construct
  source 1..75: mol_type = other DNA
gtgcaactcgatatcctcggcctgtggattgggcgtagtcgtatagtcagccagccaattagcggcgtttatttc

SEQ ID NO: 65283 - DNA, 75 bp, synthetic construct
  source 1..75: mol_type = other DNA
cgcgcctcatccagcttactgaaaaacagaataaaacaggcggtgactttaaggaaatagacctgctgacccggc

SEQ ID NO: 65284 - DNA, 75 bp, synthetic construct
  source 1..75: mol_type = other DNA
ggataactccagtggaattgccggatggcatttgaatggcgatatcgccacatgggaagagattcttcctgaaat

SEQ ID NO: 65285 - DNA, 75 bp, synthetic construct
  source 1..75: mol_type = other DNA
gctaaccatgctgcagctggtggcgcgggtggtcgccgattcgctgggaaattttttgcccgtgagccctaccag

SEQ ID NO: 65286 - DNA, 75 bp, synthetic construct
  source 1..75: mol_type = other DNA
atgtttgattataagatttccaaacatccgcattttgatgaagcctgccgggctttctcgctgcgtcacaacatg

SEQ ID NO: 65287 - DNA, 75 bp, synthetic construct
  source 1..75: mol_type = other DNA
gtacgccatcgtcggcgttgtcgcgctgatgccgcccgtcgcggcgggtcttgcgacgttcattgcgcccaaact

SEQ ID NO: 65288 - DNA, 75 bp, synthetic construct
  source 1..75: mol_type = other DNA
taaaacggcttgcagaacggcaactgacgaaatgggcaaagcatgttagtaacggcctgagcgttccgccagtcc

SEQ ID NO: 65289 - DNA, 75 bp, synthetic construct
  source 1..75: mol_type = other DNA
ctggcgcaacgagtcctggcgatacgacggaagcgataaatacccgtggtctcagcctgtgctgtatcacatttg

SEQ ID NO: 65290 - DNA, 75 bp, synthetic construct
  source 1..75: mol_type = other DNA
cgctggcgtatgcctggtaccagggggattccacgctttcagcgtttaataaaaccctggttctttccggtaatc

SEQ ID NO: 65291 - DNA, 75 bp, synthetic construct
  source 1..75: mol_type = other DNA
aacgagttgtttaccgcaatttgtagcgggatggcgtccattgctggttcgatgatgattggttatgccggaatg

SEQ ID NO: 65292 - DNA, 75 bp, synthetic construct
  source 1..75: mol_type = other DNA
acaggcctgatgacccgcgacaattacagaacggtaaataacattacccggggtaaacatccgggggcgaaacaa

SEQ ID NO: 65293 - DNA, 75 bp, synthetic construct
  source 1..75: mol_type = other DNA
gcagcattttccagaaagctcttaacatcagcaaaatcgaatcttttgtcgcagtcacaactattttcctcgggc

SEQ ID NO: 65294 - DNA, 75 bp, synthetic construct
  source 1..75: mol_type = other DNA
atcctggcggtacgacgggagtgataaatacccgtggccacagccggtgctgtaccacatttgcctcgagatgcg

SEQ ID NO: 65295 - DNA, 75 bp, synthetic construct
  source 1..75: mol_type = other DNA
cccgtagagacggtggttattgaccttgcttatgaaggttccgccagtggcgactggcgcactgacggcttcatc

SEQ ID NO: 65296 - DNA, 75 bp, synthetic construct
  source 1..75: mol_type = other DNA
ggaagtgcaactggtgcgtgctaatgcgctggccgaagaccaccagagagcgattgagtcaattaagcaggctga

SEQ ID NO: 65297 - DNA, 75 bp, synthetic construct
  source 1..75: mol_type = other DNA
taaagaaggactggatattcatgtcattgcccgaaagatggaattaagcaatcgagctgtatccagcattgtata

SEQ ID NO: 65298 - DNA, 75 bp, synthetic construct
  source 1..75: mol_type = other DNA
tgtatgcaccctggttcagacctggtagggaaggttgaaatgactgagtggttagttgactttgctgcccagctt

SEQ ID NO: 65299 - DNA, 75 bp, synthetic construct
  source 1..75: mol_type = other DNA
acacttgatccatcgccagacaatatgcggcgcgttggtcgtggccgccgtcgccgtggtgtttgttattgcatg

SEQ ID NO: 65300 - DNA, 75 bp, synthetic construct
  source 1..75: mol_type = other DNA
atgagtcgggagtatatttcagcttcaactgaatatcttgctgttggtgtcggcattccggcatattcctgttta

SEQ ID NO: 65301 - DNA, 75 bp, synthetic construct
  source 1..75: mol_type = other DNA
agccgttcggagtgttgcggataactccagtggaattgccggatggcatttgaatggcgatatcgctacatggga

SEQ ID NO: 65302 - DNA, 75 bp, synthetic construct
  source 1..75: mol_type = other DNA
agatttcgctcagttctgcaccgctttcaacttatacaaagcctgcaaattttgtagaaaaggaggctgattcac

SEQ ID NO: 65303 - DNA, 75 bp, synthetic construct
  source 1..75: mol_type = other DNA
tgacgtggcatatgtcacctctttttcgggttatctgacgcatcgcttaaccggcgagtttaaagacaatatcgc

SEQ ID NO: 65304 - DNA, 75 bp, synthetic construct
  source 1..75: mol_type = other DNA
gatgctcctggcacatataaggcgggttatgctatctgccgttctatggatttaaaatcatgggaatatgtgtca

SEQ ID NO: 65305 - DNA, 75 bp, synthetic construct
  source 1..75: mol_type = other DNA
gatttgttaaaccgatggtatttggtaatacacagattgactgggaagaagcctactcctgtttcagacaaacag

SEQ ID NO: 65306 - DNA, 75 bp, synthetic construct
  source 1..75: mol_type = other DNA
cctgtacacaaattgcgttttcaacgatttgttaaaccgatggtatttggtaatacacagattgactgggaagaa

SEQ ID NO: 65307 - DNA, 75 bp, synthetic construct
  source 1..75: mol_type = other DNA
agtatccaggcgagcaatatcttaatgagctgatcaccaacatagagtttgctgcaagggcaccagttgaagtcg

SEQ ID NO: 65308 - DNA, 75 bp, synthetic construct
  source 1..75: mol_type = other DNA
catttacgacaactactgcattgtcagggaaaaaggtgtgaatgttcctgtattgaaaaattttgttcagatatg

SEQ ID NO: 65309 - DNA, 75 bp, synthetic construct
  source 1..75: mol_type = other DNA
ctccgggattatcctgtacacaaattgcgctttcaacgatttgttaaaccgatggtatttggtaatacacagatt

SEQ ID NO: 65310 - DNA, 75 bp, synthetic construct
  source 1..75: mol_type = other DNA
ttctgatgaacaaaccagccttaaattcaaactggcattattgcaggcgctgcctgcggtaattgagaaatccgt

SEQ ID NO: 65311 - DNA, 75 bp, synthetic construct
  source 1..75: mol_type = other DNA
tgctgagtgcgcatacacacttgaacatcatgatcacgcagtagccttcgccgctgagcttcgcaaaggaggcaa

SEQ ID NO: 65312 - DNA, 75 bp, synthetic construct
  source 1..75: mol_type = other DNA
cactggacagccctgcgttcaccgtcacgccagaacttatcgccgtgggaaaggatgccagaaagcgggaaatcg

SEQ ID NO: 65313 - DNA, 75 bp, synthetic construct
  source 1..75: mol_type = other DNA
cattaaaaacaaggatgaactgcttaaaaagccctgcctgaatattcataccggtgcctggatactggcccgcca

SEQ ID NO: 65314 - DNA, 75 bp, synthetic construct
  source 1..75: mol_type = other DNA
tatctacaggccagcgccgattgccaaagttccgccccagcaagcggcattgtttatgaactgtttgtcgccggc

SEQ ID NO: 65315 - DNA, 75 bp, synthetic construct
  source 1..75: mol_type = other DNA
caccaacgctactgaaaaatatcgggcgcgaagatgtgccggaatttaaatttaatccactctttactacgttgt

SEQ ID NO: 65316 - DNA, 75 bp, synthetic construct
  source 1..75: mol_type = other DNA
ccgtttcgatgagcagatgagccgggtaaggcgtcatttttcaggtctggatactgacgccagaaaaaccgcaac

SEQ ID NO: 65317 - DNA, 75 bp, synthetic construct
  source 1..75: mol_type = other DNA
ttcttcctaaagtatccgctgaaatgggaaggatgattgataaagctggtggatgggaaaagattattaactcta

SEQ ID NO: 65318 - DNA, 75 bp, synthetic construct
  source 1..75: mol_type = other DNA
ttatcgcttaaatcttctcttgaagatatcctgcttgagataacctcgctggtagataacgcattggatctggct

SEQ ID NO: 65319 - DNA, 75 bp, synthetic construct
  source 1..75: mol_type = other DNA
cggtgcgtcaggctgttgctcataaagcatggaaacagttacagggcgggaagattaaaggaaaaacgtgccggg

SEQ ID NO: 65320 - DNA, 75 bp, synthetic construct
  source 1..75: mol_type = other DNA
tggggatcatattcatgtggattgtctcaggtatgttcgcattgcaacagcagatcagtgatgcagcacaatttt

SEQ ID NO: 65321 - DNA, 75 bp, synthetic construct
  source 1..75: mol_type = other DNA
gcagcaatcctgataatgggtggagtttttatgtggattgtttctggtatgttctctctacagcagcaaataagc

SEQ ID NO: 65322 - DNA, 75 bp, synthetic construct
  source 1..75: mol_type = other DNA
attttttttgtccccaatgtacgaattaatattcgggaatatcatgatattcctgctgaaacgccgtatgcgccg

SEQ ID NO: 65323 - DNA, 75 bp, synthetic construct
  source 1..75: mol_type = other DNA
caccgtttcagcggcctgccactgggggaatacaccctgacggtgcgggccattaacagctacggccagcagggc

SEQ ID NO: 65324 - DNA, 75 bp, synthetic construct
  source 1..75: mol_type = other DNA
aaaaccctggttctttccggtaatcagtccggactgactgccgatcgcatgctgacgctctccagagccggacag

SEQ ID NO: 65325 - DNA, 75 bp, synthetic construct
  source 1..75: mol_type = other DNA
cgaccgggggatttacggggacggggggtaaatatgaacctgcggggattgttcatcgcggggagtttgtcttca

SEQ ID NO: 65326 - DNA, 75 bp, synthetic construct
  source 1..75: mol_type = other DNA
gctgagggatgccgggcagtgctgtctctgtggtcgtgtggttgacctctgtgacagtgaactcgatcaccgaat

SEQ ID NO: 65327 - DNA, 75 bp, synthetic construct
  source 1..75: mol_type = other DNA
cccgtgaactggcggcgcagattggcgaaaacgtccgtgattacagcaaatacctgaacattcgttcgctggtgg

SEQ ID NO: 65328 - DNA, 75 bp, synthetic construct
  source 1..75: mol_type = other DNA
cgcgtgttgaatggctggcggtcaatgccatcacaacaggccgtaacgttattgagggcgaaggcattgagcgtt

SEQ ID NO: 65329 - DNA, 75 bp, synthetic construct
  source 1..75: mol_type = other DNA
agcaaatcgctccgctcattgaaggaacgctggatatgggattgctgcgtaacacagcgttaccggagacgcttg

SEQ ID NO: 65330 - DNA, 75 bp, synthetic construct
  source 1..75: mol_type = other DNA
cgtggggtaacacggaaacaccaaacgggacggttacagtcaccatcagcgatgatcataactttgaccgtcaaa

SEQ ID NO: 65331 - DNA, 75 bp, synthetic construct
  source 1..75: mol_type = other DNA
tacccgtagtgcggtgaaagttttccgtgagttcctggacgaaaaagaatccagcaagcgtgatccagacaccat

SEQ ID NO: 65332 - DNA, 75 bp, synthetic construct
  source 1..75: mol_type = other DNA
agacttcagggaggtctgtggcattttcggaattgacctccgccagcgcgttttccggctcagcaacggcaggtt

SEQ ID NO: 65333 - DNA, 75 bp, synthetic construct
  source 1..75: mol_type = other DNA
actggcacaggcggctcagcggggtgaacgcgttccaacgccaggcgagctacccgcaaacattgatgcacgggt

SEQ ID NO: 65334 - DNA, 75 bp, synthetic construct
  source 1..75: mol_type = other DNA
ctgataacgcagaccggcacagttggttcaatcggtgtcctgatggctcaccgctgcgtcgaaaaggcgctggag

SEQ ID NO: 65335 - DNA, 75 bp, synthetic construct
  source 1..75: mol_type = other DNA
caatgatggttactgctccggcgatggctgcaattcagtgcggcaattacacaatgaccggtgacggaatgactg

SEQ ID NO: 65336 - DNA, 75 bp, synthetic construct
  source 1..75: mol_type = other DNA
catctgtcattatgcccctccgctcagggggattcatcatgcaggatttttttaacaaatgctcagccagacagg

SEQ ID NO: 65337 - DNA, 75 bp, synthetic construct
  source 1..75: mol_type = other DNA
aactgaatgcgcaaatgaatcaggagttttatacctcaaatttgtatcttcagctcagccagaggtgcagcgaga

SEQ ID NO: 65338 - DNA, 75 bp, synthetic construct
  source 1..75: mol_type = other DNA
tcaaaaacaagcctttgcaaaggatcaggttcttttggattcaagggctcttgatgactttttaaaaagctatga

SEQ ID NO: 65339 - DNA, 75 bp, synthetic construct
  source 1..75: mol_type = other DNA
atgacacaggcacctccggggtgcctgttgttttctggcataaacagattcagacatcagacaggagagggggac

SEQ ID NO: 65340 - DNA, 75 bp, synthetic construct
  source 1..75: mol_type = other DNA
ttttatgttaatgaccagccaggttgaacgccgcaaattactgatctgcctgtttgtggtgtttattgccagcca

SEQ ID NO: 65341 - DNA, 75 bp, synthetic construct
  source 1..75: mol_type = other DNA
gctggatggccgggctgaagtccggctggggcgagtgggcggaaagtgcgacggacagtttttcgcaggttaaaa

SEQ ID NO: 65342 - DNA, 75 bp, synthetic construct
  source 1..75: mol_type = other DNA
aagcgaagaacgcgctggcccgagccgtgtttctgaaccggctcggtgaaatccgtgactgtagttttgaaaatc

SEQ ID NO: 65343 - DNA, 75 bp, synthetic construct
  source 1..75: mol_type = other DNA
agctacggcttacgtccggtattctttattaccgccagtgtgctcatactctgctttttcgtcaccctgttttgc

SEQ ID NO: 65344 - DNA, 75 bp, synthetic construct
  source 1..75: mol_type = other DNA
gcaactggtcgatgccgcctggtttgtccgtgccacactggaagcgcatgggatgggcgtcggaaatgagagtcc

SEQ ID NO: 65345 - DNA, 75 bp, synthetic construct
  source 1..75: mol_type = other DNA
aaccagtacgaaataagaaaggccggataaagcgggaaatgtttgtgaaattacgcactaaccggtttatgaaag

SEQ ID NO: 65346 - DNA, 75 bp, synthetic construct
  source 1..75: mol_type = other DNA
tttttgctggacattcattccggcaatcgtggcatttattgagttttttatctatctatgcacctctgatgaaga

SEQ ID NO: 65347 - DNA, 75 bp, synthetic construct
  source 1..75: mol_type = other DNA
gcgcgtcctctgctcggctttaccggtgaggatgtgcagatgattgaagagattattctggctcacctcgaccgt

SEQ ID NO: 65348 - DNA, 75 bp, synthetic construct
  source 1..75: mol_type = other DNA
gtggtttcacccgttccgtgctctccatgctgacagagatttttctgaagcaggccatggtggggattgtcggga

SEQ ID NO: 65349 - DNA, 75 bp, synthetic construct
  source 1..75: mol_type = other DNA
accgtcgtctggtcatcctgcgttccctgatggactgcaataacgaagcaaacgaatccatccttcaggactgtc

SEQ ID NO: 65350 - DNA, 75 bp, synthetic construct
  source 1..75: mol_type = other DNA
attacttagcagataaacttgctttacaaacaacgatacatagtattgatgaaatagcaaaagaactatctaaaa

SEQ ID NO: 65351 - DNA, 75 bp, synthetic construct
  source 1..75: mol_type = other DNA
tcagtcagagcacagaccccgtgaaaatgccggattttgatattctcgcggagggggaaacactgtccggcgtgg

SEQ ID NO: 65352 - DNA, 75 bp, synthetic construct
  source 1..75: mol_type = other DNA
atgcagcatgtccctgaaggcgtgattcaggcaccagaatcacccgacgccccggaggcgctgccggggtgtcgt

SEQ ID NO: 65353 - DNA, 75 bp, synthetic construct
  source 1..75: mol_type = other DNA
tcgttgtaataattttagttatgccattatttgtatatttagcagttaagcagcataaaatatcgaaagaagttt

SEQ ID NO: 65354 - DNA, 75 bp, synthetic construct
  source 1..75: mol_type = other DNA
gctggggctgggtgttggtagtaccattgccggaaccactgatacctccgcgaaagagcgtgaacccgtcgatcc

SEQ ID NO: 65355 - DNA, 75 bp, synthetic construct
  source 1..75: mol_type = other DNA
gggcaacggaaggcattaaatagattagttgctgctattgtagatgccagcaataccgaggcgtttattatttgg

SEQ ID NO: 65356 - DNA, 75 bp, synthetic construct
  source 1..75: mol_type = other DNA
tgtctgaaaacaataatgcacaggtagctttgttaaatacacagttaagcgagtttgccccaaccatgccccata

SEQ ID NO: 65357 - DNA, 75 bp, synthetic construct
  source 1..75: mol_type = other DNA
tatgacaaccaaatagataaggtttcacctgtaactaaaaactctcagcaagttaaaggccactatggagataaa

SEQ ID NO: 65358 - DNA, 75 bp, synthetic construct
  source 1..75: mol_type = other DNA
gcaggacaatgatgtggtgatcatcgatcaacccgaagacgacctggacaatcagacgatttatgacgacgtgat

SEQ ID NO: 65359 - DNA, 75 bp, synthetic construct
  source 1..75: mol_type = other DNA
tccgtttcacaagtcaggttaatgacgctattaatcctccaaaacaaccaagacagccacgaattagcggaaaca

SEQ ID NO: 65360 - DNA, 75 bp, synthetic construct
  source 1..75: mol_type = other DNA
ctggaaatgggcacagctgcgcgccggttaccgtcagaatctggccggtaacgacggcagtgcattcacggccgg

SEQ ID NO: 65361 - DNA, 75 bp, synthetic construct
  source 1..75: mol_type = other DNA
ctcatccgggtcgagacagagaacggcgagcgggagaaagcgcagcgccgcagcctggcggagaagttacagcag

SEQ ID NO: 65362 - DNA, 75 bp, synthetic construct
  source 1..75: mol_type = other DNA
ccagcgccttgaccggtatgaaagggattacttcattgtatttgctcacgtggaggcccaaaacgggttatgggg

SEQ ID NO: 65363 - DNA, 75 bp, synthetic construct
  source 1..75: mol_type = other DNA
tcgttgataacgacaccgctatgatggtgcaaagcttcattgatgcaggtgtggaaattgattttgacaggctgt

SEQ ID NO: 65364 - DNA, 75 bp, synthetic construct
  source 1..75: mol_type = other DNA
gcgcgtcaaaaaccaaccaggcattaatggcgttaagaacattatcgccgtcagctcaggcaagggcggcgtggg

SEQ ID NO: 65365 - DNA, 75 bp, synthetic construct
  source 1..75: mol_type = other DNA
gcttccggtgcaaatgccggtggcggaaataaaaccgatcgtaatcctgacttagtacacaccctcgatactctg

SEQ ID NO: 65366 - DNA, 75 bp, synthetic construct
  source 1..75: mol_type = other DNA
gtggagctgagtcgttcactgctgtcgggctgggtggatgcatgctgccggctactgtcaccgctggaagaagcg

SEQ ID NO: 65367 - DNA, 75 bp, synthetic construct
  source 1..75: mol_type = other DNA
tatgtttctgccatccataattttccacattacgggggtagctggtattgctgggggcgtgggagcatggatctt

SEQ ID NO: 65368 - DNA, 75 bp, synthetic construct
  source 1..75: mol_type = other DNA
gcacgctgacgctgaacgacagtaccgtcaccacggatgtcattgctcagcgcggtacagccctgaagctgaccg

SEQ ID NO: 65369 - DNA, 75 bp, synthetic construct
  source 1..75: mol_type = other DNA
aaaacctacggtggccaggtctggattgacaacaccaaccaaagcgatggggtttatatggtgccgcaaccgcca

SEQ ID NO: 65370 - DNA, 75 bp, synthetic construct
  source 1..75: mol_type = other DNA
aacgggtgcgtatgcgcacattcgtcgtcagttcaaaatctctattggtaagatggaagggattgaagagccgct

SEQ ID NO: 65371 - DNA, 75 bp, synthetic construct
  source 1..75: mol_type = other DNA
cccaaaataaatcacagctaagcagttggttcactcgagtccacgaaagcggttcagcagaatttcggcgcgtgg

SEQ ID NO: 65372 - DNA, 75 bp, synthetic construct
  source 1..75: mol_type = other DNA
ttcgtattgaaaggttgtggcgatagtggcgatgtcgataacgacggcgacggaacgttttactcgactgtgcag

SEQ ID NO: 65373 - DNA, 75 bp, synthetic construct
  source 1..75: mol_type = other DNA
ccagttggaaagctttgctggaaaagaaacattcagtggtggtaaccagtggtacgggttcaggtaaaacggaat

SEQ ID NO: 65374 - DNA, 75 bp, synthetic construct
  source 1..75: mol_type = other DNA
tggtggatgatgccgcattaatgatggcttcagcggggattccgggaggtgtgagatatgtcccagccggttggt

SEQ ID NO: 65375 - DNA, 75 bp, synthetic construct
  source 1..75: mol_type = other DNA
atatcaccctgggcgttcaggccggttatgcccacagtgtcagcggcaacagcgctgaaggctataacggtcagg

SEQ ID NO: 65376 - DNA, 75 bp, synthetic construct
  source 1..75: mol_type = other DNA
tgaacgttgaagagtgcgaccgtctctcctttctgccgtatctgtttggcaacgattttctgtatgccgaggcgt

SEQ ID NO: 65377 - DNA, 75 bp, synthetic construct
  source 1..75: mol_type = other DNA
agtgtattgctgacacaaacgctacaaacccgacaaccgaccttgacgcaccgtgcagatgatctgtttctctgg

SEQ ID NO: 65378 - DNA, 75 bp, synthetic construct
  source 1..75: mol_type = other DNA
ccgccagggcgtggagctgagtcgttcactgctgtcgggctgggtggatgcatgctgccggctactgtcaccgct

SEQ ID NO: 65379 - DNA, 75 bp, synthetic construct
  source 1..75: mol_type = other DNA
tatatccgggatgttcagggcgggactgtatccccgtcatcaacagctgaagtgaccggattagcaacgcagtaa

SEQ ID NO: 65380 - DNA, 75 bp, synthetic construct
  source 1..75: mol_type = other DNA
gataaagtcattcctgagttaaaacagtggcagcagcgcccgctggaaaaggtttatcccttcgtctggctggac

SEQ ID NO: 65381 - DNA, 75 bp, synthetic construct
  source 1..75: mol_type = other DNA
aaaatgccctgcgggcggtcagtctgggtcgtaaaaacttcctgttcttcggctctgaccatggtggtgagcggg

SEQ ID NO: 65382 - DNA, 75 bp, synthetic construct
  source 1..75: mol_type = other DNA
tgaaaaacagaaactgaccgatctgattaagagcctggaacatgaagtgacgctggtggacgatacgctggcacg

SEQ ID NO: 65383 - DNA, 75 bp, synthetic construct
  source 1..75: mol_type = other DNA
tgatcggcacctgccgtctgaacggtatcgatccggaagcgtatctgcgccatatcctgagcatactgccggaat

SEQ ID NO: 65384 - DNA, 75 bp, synthetic construct
  source 1..75: mol_type = other DNA
gaaaatgccctgcgggcggtcagtctgggtcgtaaaaacttcctgttcttcggctctgaccatggtggtgagcgg

SEQ ID NO: 65385 - DNA, 75 bp, synthetic construct
  source 1..75: mol_type = other DNA
ttgggggtgaaagtcccctgtccagcctgatggtggcgaaggcgttcgcgtacgcacttaaccagtggccggcac

SEQ ID NO: 65386 - DNA, 75 bp, synthetic construct
  source 1..75: mol_type = other DNA
aaaccggtaacgcacgtttcacgcgacggactccaggcattacacattgctcgggctgaagaactaccggctgtt

SEQ ID NO: 65387 - DNA, 75 bp, synthetic construct
  source 1..75: mol_type = other DNA
ggtggtgagcggggagcgctactgtacagcctgatcgggacgtgcaaactgaatgacgtggatccagaaagctac

SEQ ID NO: 65388 - DNA, 75 bp, synthetic construct
  source 1..75: mol_type = other DNA
ctctcgatttccagcgtgaaattgtcaaaatccacgcggtctttggcggtaaaaacccgcatccaaactggattg

SEQ ID NO: 65389 - DNA, 75 bp, synthetic construct
  source 1..75: mol_type = other DNA
gccaacagcactggttcagcgccttgttccttctgtgttcaaggagccgaaaaacattctgtacactctggatgc

SEQ ID NO: 65390 - DNA, 75 bp, synthetic construct
  source 1..75: mol_type = other DNA
atgagccatattcaacgggaaacgtcttgctcgaggccgcgattaaattccaacatggatgctgatttatatggg

SEQ ID NO: 65391 - DNA, 75 bp, synthetic construct
  source 1..75: mol_type = other DNA
gtggaacctcgacccttaatggtcctgtaaatatcaacaacaacctgaaggtaaaatccgatacctatctgaaca

SEQ ID NO: 65392 - DNA, 75 bp, synthetic construct
  source 1..75: mol_type = other DNA
cacctcaaacggtgtgacgctgcacacgcacaaacacagtggcgtgaagagcggcggtgacagcacaggaggccc

SEQ ID NO: 65393 - DNA, 75 bp, synthetic construct
  source 1..75: mol_type = other DNA
gtagcgttgccaatgatgttacagatgagatggtcagactaaactggctgacggaatttatgcctcttccgacca

SEQ ID NO: 65394 - DNA, 75 bp, synthetic construct
  source 1..75: mol_type = other DNA
tgatgcatggttactcaccactgcgctccccgggaaaacagcattccaggtattagaagaatatcctgattcagg

SEQ ID NO: 65395 - DNA, 75 bp, synthetic construct
  source 1..75: mol_type = other DNA
atttccggatacctggtttggcccattactgggggagtttgaagaagcgcttgatgcatacgacacagatgaaat

SEQ ID NO: 65396 - DNA, 75 bp, synthetic construct
  source 1..75: mol_type = other DNA
ctggggacgcgttggcgttatggattgaccagccgatatgtctggcaacgtctgttctggcttggtttggtgacg

SEQ ID NO: 65397 - DNA, 75 bp, synthetic construct
  source 1..75: mol_type = other DNA
aagccacgcgtactggagttacttctggcgcaggccagaacacgtaactcaacgttatgggccgatgatcctcgc

SEQ ID NO: 65398 - DNA, 75 bp, synthetic construct
  source 1..75: mol_type = other DNA
cgtgcgataacttctgtgcgtattcaacaggcgcttaccctgaacgacaatcttacgctgccgggtaatattggc

SEQ ID NO: 65399 - DNA, 75 bp, synthetic construct
  source 1..75: mol_type = other DNA
cctgggggcgcaatttacgccgcaaagtgctggcgataatcaccgtttttctggcctccagcctgatctcggcgc

SEQ ID NO: 65400 - DNA, 75 bp, synthetic construct
  source 1..75: mol_type = other DNA
tgcaggtgatgcgttcccgtgctgccctgcaagagaaagctctcggcggggaatatccattcaggatggcaacct

SEQ ID NO: 65401 - DNA, 75 bp, synthetic construct
  source 1..75: mol_type = other DNA
ttgcaaaccgcattgtaaatggggaacctgtaaaaacacccgcgatagaagcatggattattagcgaaatcattt

SEQ ID NO: 65402 - DNA, 75 bp, synthetic construct
  source 1..75: mol_type = other DNA
gtgctgattggctatgtaagggtatcaacaaatgaccagaatacagacctgcaacgaaacgctcttgtttgtgca

SEQ ID NO: 65403 - DNA, 75 bp, synthetic construct
  source 1..75: mol_type = other DNA
cgaagaccgggcggttatggacctacgttcgtgacgaccgtaacgccgggtcaacgctggcgccggcggtgtggt

SEQ ID NO: 65404 - DNA, 75 bp, synthetic construct
  source 1..75: mol_type = other DNA
ctgccgctacctgctggttccatccgcatcagcacggcaaaaccgggcgacaggtggcgatggggctggctgggc

SEQ ID NO: 65405 - DNA, 75 bp, synthetic construct
  source 1..75: mol_type = other DNA
tggatgtattagctacaagtgcaatcaaagcaggtacagccatttatagttttcagacagccttagaagcttaca

SEQ ID NO: 65406 - DNA, 75 bp, synthetic construct
  source 1..75: mol_type = other DNA
caataaatcgcgtgactttattgtcactgttcctccaatggtgcgtttaaatcccagtgagcaaattcaaataag

SEQ ID NO: 65407 - DNA, 75 bp, synthetic construct
  source 1..75: mol_type = other DNA
ccatccggcgctaatgctggcggaggaattcttaccgatcgcggtgaaggttttgtccacgatgatgcgtcagta

SEQ ID NO: 65408 - DNA, 75 bp, synthetic construct
  source 1..75: mol_type = other DNA
atgatccgaaatgggttaaggggctccagacccgcgattctgtgaaccagaaccagcatgaatcggaacggaact

SEQ ID NO: 65409 - DNA, 75 bp, synthetic construct
  source 1..75: mol_type = other DNA
ccaccggggcctgccgctggcgcttatcagtgaagacggcaatacggcgtggagcgcggaatatgatgaatgggg

SEQ ID NO: 65410 - DNA, 75 bp, synthetic construct
  source 1..75: mol_type = other DNA
ggagtgcctctcggtaggccgcggcatcaccctgccttccaactcaaccggcggcgtgaaatcggtagcgctggc

SEQ ID NO: 65411 - DNA, 75 bp, synthetic construct
  source 1..75: mol_type = other DNA
tgtttaccactgctcttgacattgatctgactcctgccagtggcttcacttctgacagcaaacgtcagtttgcaa

SEQ ID NO: 65412 - DNA, 75 bp, synthetic construct
  source 1..75: mol_type = other DNA
tattgccgggctgatgattggtcgtacaccggaatatctgggtaaaaaaatcgacgtacgcgagatgaaactgac

SEQ ID NO: 65413 - DNA, 75 bp, synthetic construct
  source 1..75: mol_type = other DNA
aactgagtaccccgttccgctacgacattcagtttaccagtaccgataaagccatcgcgccggagtcggtgctga

SEQ ID NO: 65414 - DNA, 75 bp, synthetic construct
  source 1..75: mol_type = other DNA
agcacttaagacaacgggtaatgcgtctgttgcatcagatctgagtgtgggtggaacctcgacccttaatggtcc

SEQ ID NO: 65415 - DNA, 75 bp, synthetic construct
  source 1..75: mol_type = other DNA
cagtggagtgagaactctaacagctacaataacatcacgggtggtggattgctggcttaccgcgtggggtataac

SEQ ID NO: 65416 - DNA, 75 bp, synthetic construct
  source 1..75: mol_type = other DNA
gtacgggaaaaacatgcctgtactcagtgcgatgccatcgtgcaggcacctgcaccttcgcggcccatcgagcgg

SEQ ID NO: 65417 - DNA, 75 bp, synthetic construct
  source 1..75: mol_type = other DNA
cccccaccgtcacctgcacaaaccatctgaagacgacaacgattgaggtgacagaaggcggaaccatgagtggca

SEQ ID NO: 65418 - DNA, 75 bp, synthetic construct
  source 1..75: mol_type = other DNA
gacgttaattaatgaaggtttgttgcctgtaggctatacaggaactaacgcgcaaaaagcatcttacaaaattgt

SEQ ID NO: 65419 - DNA, 75 bp, synthetic construct
  source 1..75: mol_type = other DNA
atgataaggagacttgtttttttcgcaattatcgttcctgtgtggggggttggttttatatttgcggttacagga

SEQ ID NO: 65420 - DNA, 75 bp, synthetic construct
  source 1..75: mol_type = other DNA
gctggcggtaatgatgagcaggcaatgtataatgttacgcaagaagccgctcgaattctgcacgaagctgaaacc

SEQ ID NO: 65421 - DNA, 75 bp, synthetic construct
  source 1..75: mol_type = other DNA
agctggaaaaaacgtctctcgcgcctgatgaattatccgggcacgcgttacactaaacagatgatggagacggtc

SEQ ID NO: 65422 - DNA, 75 bp, synthetic construct
  source 1..75: mol_type = other DNA
gaactgtccagcaagttcactgtagagccgtctgtgcagcagacgctggaagatcagatccagcagtccgccgca

SEQ ID NO: 65423 - DNA, 75 bp, synthetic construct
  source 1..75: mol_type = other DNA
acaacgtaatgcgctgaactgtgcaggatgcgagctgatttttgaagacaagataagcggtacaaagtccgagac

SEQ ID NO: 65424 - DNA, 75 bp, synthetic construct
  source 1..75: mol_type = other DNA
ggaagtgaccttagtaacgcttatcttgcacacatagatttcacaaaagtgattttctttccgtcattaattatt

SEQ ID NO: 65425 - DNA, 75 bp, synthetic construct
  source 1..75: mol_type = other DNA
gtcggcaactttgggacgacatcattcgtgccggaaagcgtgacgatatatcagcgcattttatcggttcggttg

SEQ ID NO: 65426 - DNA, 75 bp, synthetic construct
  source 1..75: mol_type = other DNA
agcaaacgtgtcaccgtaaaagatatcggctggttttctccggggatgacagcacagaacctgcgggggaaaaag

SEQ ID NO: 65427 - DNA, 75 bp, synthetic construct
  source 1..75: mol_type = other DNA
gaagcccgtgtccgggaaaatatcaccctgggcgttcaggccggttatgcccacagcgtcagcggcagcagcgct

SEQ ID NO: 65428 - DNA, 75 bp, synthetic construct
  source 1..75: mol_type = other DNA
atattttcccaacactcggcatgtattcgggactaaaagcttgccatgaaaaaaacaaccaaccatttgatatta

SEQ ID NO: 65429 - DNA, 75 bp, synthetic construct
  source 1..75: mol_type = other DNA
gcgtgtaaggtgccggatgacgcgcctacgtccttcgtgcgtaagcgctgggaaaacctggtgtgcacggaagat

SEQ ID NO: 65430 - DNA, 75 bp, synthetic construct
  source 1..75: mol_type = other DNA
tccctggatgacggccaggataacgccggttatgtgaagttcgggcatggcagtgcacaacatgtgcgtgccggt

SEQ ID NO: 65431 - DNA, 75 bp, synthetic construct
  source 1..75: mol_type = other DNA
tggtcctgaagggttaatgccttcggacgataccctgaaaaactggaaagtcagtaaaattatctggcggcgtta

SEQ ID NO: 65432 - DNA, 75 bp, synthetic construct
  source 1..75: mol_type = other DNA
aggggaactgaaagagctgagtctgtcagagctggaagagcgggcactgatgtatgcggcagacagtttccgtta

SEQ ID NO: 65433 - DNA, 75 bp, synthetic construct
  source 1..75: mol_type = other DNA
cgagcagtcatcgtgaactggcgcgggaagccttcccggagaaaaatggctgcggctttacctttggtgatggct

SEQ ID NO: 65434 - DNA, 75 bp, synthetic construct
  source 1..75: mol_type = other DNA
tgcgtggtggtggcaccgccaaccgtgccgggcggcaagttccgcattctggagcgacaccagtggcgcgggatg

SEQ ID NO: 65435 - DNA, 75 bp, synthetic construct
  source 1..75: mol_type = other DNA
gacctctgcgaggtacgactccgaaccggccagacggaggtcgctgtcttcacagcttacgaacctgaggagtaa

SEQ ID NO: 65436 - DNA, 75 bp, synthetic construct
  source 1..75: mol_type = other DNA
tgagccaggaagatatctggcatgtgcgcacgctgacgctggacggtctggtgggactgaatcccatcgcctatg

SEQ ID NO: 65437 - DNA, 75 bp, synthetic construct
  source 1..75: mol_type = other DNA
ctacccgttctggtcaggtgaactgttcaaccggggacgcgccagcgccgccgaacgcgtggaaatcgacgtcag

SEQ ID NO: 65438 - DNA, 75 bp, synthetic construct
  source 1..75: mol_type = other DNA
gaaaaagtgacgcaccggtgaccacgccagcagagctggcggatgctatcgggttgtcctacgacacctataccg

SEQ ID NO: 65439 - DNA, 75 bp, synthetic construct
  source 1..75: mol_type = other DNA
ctgttcagcaatggtgcggtgacgtccggtgtgttgcgtacagaacagacgctgtcggatcaggcttatgagcgc

SEQ ID NO: 65440 - DNA, 75 bp, synthetic construct
  source 1..75: mol_type = other DNA
gtcagccggtgagcgtcaggaagaccaggcgcatgcggcgctgctggcgcttgaaaccgagctccggacgctgga

SEQ ID NO: 65441 - DNA, 75 bp, synthetic construct
  source 1..75: mol_type = other DNA
caaggcgtcggtgttcccgttcgaggagctgcaacgctgcatggtcgacacgctggaagaatgggaagactatgc

SEQ ID NO: 65442 - DNA, 75 bp, synthetic construct
  source 1..75: mol_type = other DNA
ggaattggcgttcatgcatggcagtatgcgcagtcgtgcatgttgattagcgtccagtgcgagaacgatcccggc

SEQ ID NO: 65443 - DNA, 75 bp, synthetic construct
  source 1..75: mol_type = other DNA
gacacaacaaatgatataagcctgcgtaatacacaactgtccatgcagggacatgccactgaacatgccatttat

SEQ ID NO: 65444 - DNA, 75 bp, synthetic construct
  source 1..75: mol_type = other DNA
ggcatcaggtatggcctcacagagtcacctgcgctcgacctatttctccaccccgtccacgctggcgcacgacgc

SEQ ID NO: 65445 - DNA, 75 bp, synthetic construct
  source 1..75: mol_type = other DNA
tggaaccagacaaccattgacaacctgaagaacaagtattcttacaacgtggatatgtcaggagctcaggttgca

SEQ ID NO: 65446 - DNA, 75 bp, synthetic construct
  source 1..75: mol_type = other DNA
aaattcgcaggtgcggcagatggcgggaattggcgttcatgcctggcagtatgcgcagtcgtgtatgttgattag

SEQ ID NO: 65447 - DNA, 75 bp, synthetic construct
  source 1..75: mol_type = other DNA
ttgctgaactgctggagccgctgtatgacgtgctgcgccagtatgtgctgatgcccggtaaagtccatgcggatg

SEQ ID NO: 65448 - DNA, 75 bp, synthetic construct
  source 1..75: mol_type = other DNA
ccaacaccgccacactgatgcagaacgccggcaccaaattcgccggacgcattgtcagtgacgacaaaacggcaa

SEQ ID NO: 65449 - DNA, 75 bp, synthetic construct
  source 1..75: mol_type = other DNA
cggatctcggcgatcagcgcggcttcggtatcattgcttaaaggtttaggcgtctgggacgcggtacaggccatg

SEQ ID NO: 65450 - DNA, 75 bp, synthetic construct
  source 1..75: mol_type = other DNA
caaaagcccgcggtctcactgaccgtcaggcgcagcgggagtctgaagcgcagcgtcttcgggacgtgtacggtg

SEQ ID NO: 65451 - DNA, 75 bp, synthetic construct
  source 1..75: mol_type = other DNA
cgagcatgaactggtttcagaagtggtggaggcggggcagcctgcaccggcatccgttatgtcacgctgggttgc

SEQ ID NO: 65452 - DNA, 75 bp, synthetic construct
  source 1..75: mol_type = other DNA
gtttgcaaaggtgatatcctgacctataatacaaaaaataattatattcattcggagtcagccttagtagccgct

SEQ ID NO: 65453 - DNA, 75 bp, synthetic construct
  source 1..75: mol_type = other DNA
gccaaaacccaggcatatgctggcacacctggaacggctaaagaccatccatgacctggcgttacccgacgacct

SEQ ID NO: 65454 - DNA, 75 bp, synthetic construct
  source 1..75: mol_type = other DNA
gtacgcgcagcggtcagaaacccgccgagagcacctgttagaattacaaacgtggttgaaactgacgccgtttgt

SEQ ID NO: 65455 - DNA, 75 bp, synthetic construct
  source 1..75: mol_type = other DNA
ccagacggagatgatcgacatcctgatgcgtctgcaacaagtcagtgacgagaatgatccgactgatcgggcgaa

SEQ ID NO: 65456 - DNA, 75 bp, synthetic construct
  source 1..75: mol_type = other DNA
accgacatcaccagctcgttcatggctatccgcaagaccatgaccagcagcggacgcagcgccacctatgaggcc

SEQ ID NO: 65457 - DNA, 75 bp, synthetic construct
  source 1..75: mol_type = other DNA
acatatcagtaattcagcgtggcgtgtggcaaccagtgatatctcacagcaatacagattcagttatatttcgat

SEQ ID NO: 65458 - DNA, 75 bp, synthetic construct
  source 1..75: mol_type = other DNA
cggcgctgggaaatgacccgaactttgccacgacaatgttgaatgctctgtcaggtaaacaaccgctggacaata

SEQ ID NO: 65459 - DNA, 75 bp, synthetic construct
  source 1..75: mol_type = other DNA
aactgactaccactgcgatttggttaagagataaaggggtagacattcgatgtgttcgtctgacgccttatagat

SEQ ID NO: 65460 - DNA, 75 bp, synthetic construct
  source 1..75: mol_type = other DNA
atcagccggcatgctgaaaggtgttgccggtctcagccagactggtgcaggacggaccaatgggcagacctttaa

SEQ ID NO: 65461 - DNA, 75 bp, synthetic construct
  source 1..75: mol_type = other DNA
cgcgatatttcaccttctgcggatgtggtggatgtcagcgaggatgatgttgcattaatgatggcttcagcgggg

SEQ ID NO: 65462 - DNA, 75 bp, synthetic construct
  source 1..75: mol_type = other DNA
tacctcccttgtgattaaccgccagttgtggctgtaccacgacagcggggatgcagggttgacacacctgtacag

SEQ ID NO: 65463 - DNA, 75 bp, synthetic construct
  source 1..75: mol_type = other DNA
ctggcggtgtggtttttttgcatgggggcgtcaataaaattaagcgcgacgggaacggtattgcgtaaatccggt

SEQ ID NO: 65464 - DNA, 75 bp, synthetic construct
  source 1..75: mol_type = other DNA
actctggataatgccttcaacaagcttgccatgaatggcaaaggtgtgccgctttcaggcagaactgtcagtctt

SEQ ID NO: 65465 - DNA, 75 bp, synthetic construct
  source 1..75: mol_type = other DNA
aattatacataccgtagttatgtcaccaactttattgttcaggaaactatcgataattataaatatatgcaatta

SEQ ID NO: 65466 - DNA, 75 bp, synthetic construct
  source 1..75: mol_type = other DNA
gtgctttagcagaaatggaacgtgaattaattgttgagagaacactggccggactggcagctgcacgcgaacagg

SEQ ID NO: 65467 - DNA, 75 bp, synthetic construct
  source 1..75: mol_type = other DNA
aagctctactggcgcaaaccctggacaaactttttccagtaagcgatgaaattaactggcaaaaagttgcggcgg

SEQ ID NO: 65468 - DNA, 75 bp, synthetic construct
  source 1..75: mol_type = other DNA
ctatacgatgaactcacaggcatgatttctgatgttgacctgggcgagatgaaaattgaacccgtagcgccagca

SEQ ID NO: 65469 - DNA, 75 bp, synthetic construct
  source 1..75: mol_type = other DNA
tggaggatgtcccggtggatgatgccgcattaatgatggcttcagcggggatttacggaggtgtgagatatgtcc

SEQ ID NO: 65470 - DNA, 75 bp, synthetic construct
  source 1..75: mol_type = other DNA
ctgaaccagaactatctaccgcaccacttttcaccgaacgttgcccagcaggttttccgtcaccggccgcagact

SEQ ID NO: 65471 - DNA, 75 bp, synthetic construct
  source 1..75: mol_type = other DNA
gacttcccttgtgattaaccgccagttgtggctgtaccacgacagcggtgatgcgggactgacacacctgtaccg

SEQ ID NO: 65472 - DNA, 75 bp, synthetic construct
  source 1..75: mol_type = other DNA
tgctggagccacaactgcagtatacctggcagggactttccctggatgacggccaggataacgccggttatgtga

SEQ ID NO: 65473 - DNA, 75 bp, synthetic construct
  source 1..75: mol_type = other DNA
tctcgacggccagttatacgccaccttctgccaggcacaggatttgctgaagcagacgccactacaggccaacga

SEQ ID NO: 65474 - DNA, 75 bp, synthetic construct
  source 1..75: mol_type = other DNA
gacctgaaccatgaagagctggaaacgctatccgatcaggtcgatgaactggtagaagacgaagagacgggtcag

SEQ ID NO: 65475 - DNA, 75 bp, synthetic construct
  source 1..75: mol_type = other DNA
gtataaaaacacttatggtggcaggttcgctgtaggggtcagtttggatatgggaaaattttgtacgttaagcgc

SEQ ID NO: 65476 - DNA, 75 bp, synthetic construct
  source 1..75: mol_type = other DNA
gccgtcaaatccggtgcaatggcaaccgacacggttgtgaataccggcgcggaaggaggaccggatgcggaaaat

SEQ ID NO: 65477 - DNA, 75 bp, synthetic construct
  source 1..75: mol_type = other DNA
gaagggactggcactgaacaccacgctgaatggtggcgagcagtggatgcatgaaggtgcgatagccacaggaac

SEQ ID NO: 65478 - DNA, 75 bp, synthetic construct
  source 1..75: mol_type = other DNA
taatcaaagaagccaaattaaaaatagcggttgcgaaatgttaccctaattcagagatggccagggtagagggag

SEQ ID NO: 65479 - DNA, 75 bp, synthetic construct
  source 1..75: mol_type = other DNA
tgaaacactgacgacaaaagaagtggttgttaatgagaagaaaacgacaccgccgccattatttactgaggcatc

SEQ ID NO: 65480 - DNA, 75 bp, synthetic construct
  source 1..75: mol_type = other DNA
atggataagaagcaagtaacggatttaaggtcggaactactcgattcacgttttggcgctaagtctatttcaact

SEQ ID NO: 65481 - DNA, 75 bp, synthetic construct
  source 1..75: mol_type = other DNA
gggtacagccttctgttatccgcaccttcagctcccggggggacatgagcatgggtacagccgcagccggcagta

SEQ ID NO: 65482 - DNA, 75 bp, synthetic construct
  source 1..75: mol_type = other DNA
tacagcatcaacgcacaaacccggcacgaagaaaatggcggtgatgatagtaacgagatcagcggcaacgggacg

SEQ ID NO: 65483 - DNA, 75 bp, synthetic construct
  source 1..75: mol_type = other DNA
tcagagtcattcgttgggagccggaaacacaacgggttatctacctccgtgaaggctatgagcatgagtgcttca

SEQ ID NO: 65484 - DNA, 75 bp, synthetic construct
  source 1..75: mol_type = other DNA
gcaggtaaacaaccgctggacaatacgctgactaatttgagtggaaaggatgtaactggtcttctcacatacctt

SEQ ID NO: 65485 - DNA, 75 bp, synthetic construct
  source 1..75: mol_type = other DNA
ggcaggctggtaaaactcctgtgggcagacagcggagggctctgcatctatatgaaaagacttgaacggggaacg

SEQ ID NO: 65486 - DNA, 75 bp, synthetic construct
  source 1..75: mol_type = other DNA
ctggcgtggcgctggcgctgtctcttgccaccgccacttcagtcccggccctggctgctgacagtgttgtacagg

SEQ ID NO: 65487 - DNA, 75 bp, synthetic construct
  source 1..75: mol_type = other DNA
tgttacgggaaatgttgttcatggaaataatgtgacggtgacggcagaaagagtcggtgaatggtggttgtttac

SEQ ID NO: 65488 - DNA, 75 bp, synthetic construct
  source 1..75: mol_type = other DNA
aaaacacaggtgaaaggtttgcaggatttcgccttaagcgaatggaaagacaacggtaacggaacctatacccaa

SEQ ID NO: 65489 - DNA, 75 bp, synthetic construct
  source 1..75: mol_type = other DNA
ggtacagccttctgttatccgcaccttcagctcccggggagacatgagcatgggtacagccgccgccggcagtaa

SEQ ID NO: 65490 - DNA, 75 bp, synthetic construct
  source 1..75: mol_type = other DNA
cgaacccaattaccgcctgggactcatggccggatatcaggaaagccgttatagctttacagccagaggtggttc

SEQ ID NO: 65491 - DNA, 75 bp, synthetic construct
  source 1..75: mol_type = other DNA
caggctgtcgcagaaaaatatggcgcaggggaattatggacgcttggtaaggagttggtaaaaaaacgaaaatcc

SEQ ID NO: 65492 - DNA, 75 bp, synthetic construct
  source 1..75: mol_type = other DNA
actggcacgctttggtaaagaagatagctcacagcgtgccggaaaagtccttatttgtactcaggtattagagca

SEQ ID NO: 65493 - DNA, 75 bp, synthetic construct
  source 1..75: mol_type = other DNA
atgtggcatcatcctgaaatgcagcgggcttcctgaaaaaagtaatcgggggcgaccgcgactgggcagcaccct

SEQ ID NO: 65494 - DNA, 75 bp, synthetic construct
  source 1..75: mol_type = other DNA
gttaaatcagggaaaaccgatttgattaagggatttaaaaagaaaagtggtggaacgtatgatacagttcttgtc

SEQ ID NO: 65495 - DNA, 75 bp, synthetic construct
  source 1..75: mol_type = other DNA
gacctgcaggccggactggaagcccgtgtccgggaaaatatcaccctgggcgttcaggccggttatgcccacagc

SEQ ID NO: 65496 - DNA, 75 bp, synthetic construct
  source 1..75: mol_type = other DNA
ctggcatcaaaagttcagaacgtcctgaaggatgacccgttctccggacacctgttcatcttccgcggacgccgg

SEQ ID NO: 65497 - DNA, 75 bp, synthetic construct
  source 1..75: mol_type = other DNA
tctagcaaacatgaaattaaagtgaagttgctatttgcgaatgatgattttctctcaatggaaggacactatgga

SEQ ID NO: 65498 - DNA, 75 bp, synthetic construct
  source 1..75: mol_type = other DNA
ggccacgtacgtaactacaccatcggtgacgtgatcgcccgctaccagcgtatgctgggcaaaaacgtcctgcag

SEQ ID NO: 65499 - DNA, 75 bp, synthetic construct
  source 1..75: mol_type = other DNA
aggttggcctcttgcgtatagtgattatgctgaaggatggaacgattgccgcgaagccatgcttcaggggaaagg

SEQ ID NO: 65500 - DNA, 75 bp, synthetic construct
  source 1..75: mol_type = other DNA
gtatctggctggttgccggtatcaccgatatgcgaaatggttttaacggcctggcatcaaaaattcagaacgtcc

SEQ ID NO: 65501 - DNA, 75 bp, synthetic construct
  source 1..75: mol_type = other DNA
cgctggaggttgacggccaggagccggacacctttgcagtggtgaatttcaggttaatccagaaccagtcatatc

SEQ ID NO: 65502 - DNA, 75 bp, synthetic construct
  source 1..75: mol_type = other DNA
tcgatacctccagcggcgtcgaaagcgcgccgggcgtcaaggataccgacaagattaccaatttcgcctttgcgg

SEQ ID NO: 65503 - DNA, 75 bp, synthetic construct
  source 1..75: mol_type = other DNA
actacgggcgcagctaaaacgtaccgaagaagaacgggatatcctgaaaaaggccgcgcggtactttgcaaggga

SEQ ID NO: 65504 - DNA, 75 bp, synthetic construct
  source 1..75: mol_type = other DNA
gccggggtttggtaacctggcgataccgcgcgtgggccaggaggtgattgttgacttcctgaacggggacccgga

SEQ ID NO: 65505 - DNA, 75 bp, synthetic construct
  source 1..75: mol_type = other DNA
gtttcactgggacaggtataacccggcaacggaggcgagttcgtgctgggtgagagtgtctcaggcgtgggcggg

SEQ ID NO: 65506 - DNA, 75 bp, synthetic construct
  source 1..75: mol_type = other DNA
gcgcggatagaggaagtggtgaaacaggaattcgggggcagcgtcattgtcgatgctgcagacgtagatgatgag

SEQ ID NO: 65507 - DNA, 75 bp, synthetic construct
  source 1..75: mol_type = other DNA
gtttcactgggacaggtataacccggcaacggaggcgagttcgtgctgggtgtgcgtgtcccaggcgtgggcggg

SEQ ID NO: 65508 - DNA, 75 bp, synthetic construct
  source 1..75: mol_type = other DNA
gtttcactgggacaggtataacccggcaacggaggcgagttcgtgctgggtgtgagtgtcacaggcgtgggcggg

SEQ ID NO: 65509 - DNA, 75 bp, synthetic construct
  source 1..75: mol_type = other DNA
ctggcaggatgtgaagagcgaaatgcgcagggcatgtgttcgttggcaggttttacgcaaatcgtgaatgaagca

SEQ ID NO: 65510 - DNA, 75 bp, synthetic construct
  source 1..75: mol_type = other DNA
gacgcagccctattcgcgctattccttttcgaatctgggccgcgagatccacaaggcttttccggttgtcgattc

SEQ ID NO: 65511 - DNA, 75 bp, synthetic construct
  source 1..75: mol_type = other DNA
tgccgacattaatcgtccttttcccggcggcaactctggctgcccaatcgtcatttgaagcgaaagtggtaaaaa

SEQ ID NO: 65512 - DNA, 75 bp, synthetic construct
  source 1..75: mol_type = other DNA
atggaaaccctcaacgacaatttaaaagtggtcgaaaaagccgataacgcggcgcaagtcaaagacgcgttaacg

SEQ ID NO: 65513 - DNA, 75 bp, synthetic construct
  source 1..75: mol_type = other DNA
tccgtctgcacctggtgttggggatgacgttattcctgctgttcccgttctcgcgtctggtacacatctggagcg

SEQ ID NO: 65514 - DNA, 75 bp, synthetic construct
  source 1..75: mol_type = other DNA
attcctgagaatgatgtgcggtttggcgagcgtaaatttagcacccggttaaacacaattaagcatagaggttaa

SEQ ID NO: 65515 - DNA, 75 bp, synthetic construct
  source 1..75: mol_type = other DNA
cggtagaggtagttaaaaacgcaatcgaaaccgcagatggagcattagacctttataataaatatctcgatcagg

SEQ ID NO: 65516 - DNA, 75 bp, synthetic construct
  source 1..75: mol_type = other DNA
gaaaactggcaccctccgttatttctaaagcgcagggttatgatcctgactcccgtctgagcagagccacgcttg

SEQ ID NO: 65517 - DNA, 75 bp, synthetic construct
  source 1..75: mol_type = other DNA
gataaagaagtacggtccggattcttccactaataaagaacagtcagatgctccggccgagatccgccgtctcca

SEQ ID NO: 65518 - DNA, 75 bp, synthetic construct
  source 1..75: mol_type = other DNA
cagttatgtgaaaacatggggttgcagaggttttttgaatgagacgaacatttacagcagaggaaaaagcctctg

SEQ ID NO: 65519 - DNA, 75 bp, synthetic construct
  source 1..75: mol_type = other DNA
cacgactgaaacgttctaaacgttacgtattcactcgtgacgactttaaagatattgcaggctacgatcaggttg

SEQ ID NO: 65520 - DNA, 75 bp, synthetic construct
  source 1..75: mol_type = other DNA
cggtttaccgctggataaccatccgcagtccaggaaaatccgtgcgctatggattgaaatggctgctgccggcat

SEQ ID NO: 65521 - DNA, 75 bp, synthetic construct
  source 1..75: mol_type = other DNA
tggtggataagccgcgccctcccgttgaactggagcgcatcgaggaggcagggaacaagacggagaatcacgccg

SEQ ID NO: 65522 - DNA, 75 bp, synthetic construct
  source 1..75: mol_type = other DNA
cgcttcacggcagccaggggagaggaaccacgctgggcaatcagttagaggtgataccggcggaccggacgtggc

SEQ ID NO: 65523 - DNA, 75 bp, synthetic construct
  source 1..75: mol_type = other DNA
cgaacgacgttgactacaacacacctctcggcatgccgtgtttatgatatggcactcaaggaatacaaccagtgt

SEQ ID NO: 65524 - DNA, 75 bp, synthetic construct
  source 1..75: mol_type = other DNA
ccttggtcgcgcacttttactgttgcaaaaagagaagctaattactctgaaagagggaaaagggttattacctac

SEQ ID NO: 65525 - DNA, 75 bp, synthetic construct
  source 1..75: mol_type = other DNA
tccgcgcatggataaaagccggagaacatttcgaaggtcgtgctgatggtggtgggctatatctccggtatagag

SEQ ID NO: 65526 - DNA, 75 bp, synthetic construct
  source 1..75: mol_type = other DNA
ggcgctggcgaaatggaccaatctgttagtgtcgctggaacgcggggaacgctacaacgtgacaccaatcagaag

SEQ ID NO: 65527 - DNA, 75 bp, synthetic construct
  source 1..75: mol_type = other DNA
cattatccctagctgcctagctttacatcgtatagaaacagatctcatgcaatatcatgctcagggtaaattgcc

SEQ ID NO: 65528 - DNA, 75 bp, synthetic construct
  source 1..75: mol_type = other DNA
cgacatacaccggaaaaagatatcctggaagaagttaaccgcgaactgtctgctaagcaggaaacagaagaagaa

SEQ ID NO: 65529 - DNA, 75 bp, synthetic construct
  source 1..75: mol_type = other DNA
agaacggctattccattcgaaggtgagcgccataatgcacttgatgacgctcgttaccaggcaaaatacgtttca

SEQ ID NO: 65530 - DNA, 75 bp, synthetic construct
  source 1..75: mol_type = other DNA
attttgcgccgttcatacgaacggcaggggatcccctgcccgtggcgttactacaacgatcgcgatgtacgcaca

SEQ ID NO: 65531 - DNA, 75 bp, synthetic construct
  source 1..75: mol_type = other DNA
tactcggagatgtcatatcttggtagcggtaaaacggaggcagggggaagagcatctgctacaggagttgattcg

SEQ ID NO: 65532 - DNA, 75 bp, synthetic construct
  source 1..75: mol_type = other DNA
ggagaatccgacgggttgttactcgctcacatttaatgttgatgaaagctggctacaggaaggccagacgcgaat

SEQ ID NO: 65533 - DNA, 75 bp, synthetic construct
  source 1..75: mol_type = other DNA
atgatttatatttccgccgtcggcatgatcaacgccctgggaaataaccttgacgaaatcgcagccaacctggct

SEQ ID NO: 65534 - DNA, 75 bp, synthetic construct
  source 1..75: mol_type = other DNA
catctttatatcgactggcctgtagaccgggccattccgcatgtggtgcgcgaatccgtcgatgccatccggcgc

SEQ ID NO: 65535 - DNA, 75 bp, synthetic construct
  source 1..75: mol_type = other DNA
ttttcgcgaggcgattctttccagaggtaacagcgaagatctggaacgcctgtatcgacaatggcgcggtaaggc

SEQ ID NO: 65536 - DNA, 75 bp, synthetic construct
  source 1..75: mol_type = other DNA
gctaaccgtttcacctctaacattaaaggcctgactcaggcggcccgtaacgccaacgacggtatctccgttgcg

SEQ ID NO: 65537 - DNA, 75 bp, synthetic construct
  source 1..75: mol_type = other DNA
aagaatgcgtaggaatgtcatgctttcctaaacatgaggtgagtattcgccgcaatcttgaaaagcttgcagcca

SEQ ID NO: 65538 - DNA, 75 bp, synthetic construct
  source 1..75: mol_type = other DNA
atcatccagcaggccggtaactccgtgctggcaaaagccaaccaggtaccgcagcaggttctgtctctgctgcag

SEQ ID NO: 65539 - DNA, 75 bp, synthetic construct
  source 1..75: mol_type = other DNA
gctggtacagcagggcggctttgacgggcggacgcaacgttatcattatgacctgaccggaaaactcacgcagag

SEQ ID NO: 65540 - DNA, 75 bp, synthetic construct
  source 1..75: mol_type = other DNA
tttttgcagggcagggcaaagtggatgtgcaggctcagggagatgcgctgaatctccaggcactaaaggacgtca

SEQ ID NO: 65541 - DNA, 75 bp, synthetic construct
  source 1..75: mol_type = other DNA
gccggtggggcgctaaaattaagcgatacagtgacgcaggtcggcgatggttcagccgcgccagttaaagtggat

SEQ ID NO: 65542 - DNA, 75 bp, synthetic construct
  source 1..75: mol_type = other DNA
tgtttcgtaactatctggtcccggttggttcgcagagggggcagactcaaaactgtcaactcaacgctctggcgg

SEQ ID NO: 65543 - DNA, 75 bp, synthetic construct
  source 1..75: mol_type = other DNA
cgtgaaatgatgcaatggtacgctgattacattgattcgctttccagccacgagagtcagtgtcaaggccccttg

SEQ ID NO: 65544 - DNA, 75 bp, synthetic construct
  source 1..75: mol_type = other DNA
ctttattcggtcaaccagtttaccagcattctatttatgatgttctacggcatcgttcaggataaactcggtctg

SEQ ID NO: 65545 - DNA, 75 bp, synthetic construct
  source 1..75: mol_type = other DNA
attaaaaaactcatgggcgcatcgagttttagcgttagacataaatgattacaaccacttgaaaatatacattga

SEQ ID NO: 65546 - DNA, 75 bp, synthetic construct
  source 1..75: mol_type = other DNA
aaacccctctcgaacgcaatggcgagactgcccactgtgcaacttgcgacaaagactttaccgtccaggcacttt

SEQ ID NO: 65547 - DNA, 75 bp, synthetic construct
  source 1..75: mol_type = other DNA
ttgaagcagaagcttttaattgccctcactgcggtgtatatgcccgtcagttctggcgtagtatgtatggtaatt

SEQ ID NO: 65548 - DNA, 75 bp, synthetic construct
  source 1..75: mol_type = other DNA
ctactgaaatactgaaacaactcggtggaaatcgtttcatagcgatgacaggggcaacaaaatttgcttatttcg

SEQ ID NO: 65549 - DNA, 75 bp, synthetic construct
  source 1..75: mol_type = other DNA
ggcggatatgatatgacgcagcgccctggttggctgggtaacattggtgcggaagtaatgaccagtgatgaagcc

SEQ ID NO: 65550 - DNA, 75 bp, synthetic construct
  source 1..75: mol_type = other DNA
acggagaaattgcgtgcaatttgcctgccagacggtagcgccaacaaaaaactggttgggaaaagcccatcagcc

SEQ ID NO: 65551 - DNA, 75 bp, synthetic construct
  source 1..75: mol_type = other DNA
acccgcgaaaattgttgtgtatgaagttccgattcgagtccgattgataaatatcgatgcaccggaaaaaaaaca

SEQ ID NO: 65552 - DNA, 75 bp, synthetic construct
  source 1..75: mol_type = other DNA
aacgaactgcttctggcaacaggcttcataaatattaacgaatatgaacgccgtaaaaaaatgttatctgattaa

SEQ ID NO: 65553 - DNA, 75 bp, synthetic construct
  source 1..75: mol_type = other DNA
ggcgcttcgccacggcgataacccactgaacggttattccatttgtgcattcccggacgccgcagacaaacaaac

SEQ ID NO: 65554 - DNA, 75 bp, synthetic construct
  source 1..75: mol_type = other DNA
acaggtctatatccacgcgcagaagaacatggatacggaggtgctgaataatcggacgacggatgtgaaggctga

SEQ ID NO: 65555 - DNA, 75 bp, synthetic construct
  source 1..75: mol_type = other DNA
tcgtgaactgcgccgcagtaacgatatccttcgccaggcttccgcttattttgcgaaggcggagttcgaccgcct

SEQ ID NO: 65556 - DNA, 75 bp, synthetic construct
  source 1..75: mol_type = other DNA
tgaaaaagttaaagcaggcacctcccagccaaagtcactggctgggaaagaagttgatgaagataccgtgatact

SEQ ID NO: 65557 - DNA, 75 bp, synthetic construct
  source 1..75: mol_type = other DNA
gtttcactgggacaggtataacccggcaacggaggcgagttcgtgctgggtgcgcgtgtctcaggcgtgggcggg

SEQ ID NO: 65558 - DNA, 75 bp, synthetic construct
  source 1..75: mol_type = other DNA
gtttcactgggacaggtataacccggcaacggaggcgagttcgtgctgggtgtgggtgtcgcaggcgtgggcggg

SEQ ID NO: 65559 - DNA, 75 bp, synthetic construct
  source 1..75: mol_type = other DNA
gcacggaaggggcaacagaatggtgcgcagaatacgatgaatggggcaacctgctgaatgaagagaacccgcatc

SEQ ID NO: 65560 - DNA, 75 bp, synthetic construct
  source 1..75: mol_type = other DNA
gtttcactgggacaggtataacccggcaacggaggcgagttcgtgctgggtgggggtgtctcaggcgtgggcggg

SEQ ID NO: 65561 - DNA, 75 bp, synthetic construct
  source 1..75: mol_type = other DNA
atgactatttctcccgtcgttacgactatctcaccgaatatgttcaggtgctgcgcgacctgtggggcacgggga

SEQ ID NO: 65562 - DNA, 75 bp, synthetic construct
  source 1..75: mol_type = other DNA
ctatggctggaatgctttttaatgtcgatccttctctggttttctggatggggtcaggaggcgcattattgttgc

SEQ ID NO: 65563 - DNA, 75 bp, synthetic construct
  source 1..75: mol_type = other DNA
cggctctgcaacgggaagcgcaggaacaaaaacgcggtttgtgggccgatgcaaatccggttccaccgtgggaat

SEQ ID NO: 65564 - DNA, 75 bp, synthetic construct
  source 1..75: mol_type = other DNA
gcgggaagttgcggtgccgacgccggggattaaccaggtactgatcaaaatgaaatcctccgggatttgcggaag

SEQ ID NO: 65565 - DNA, 75 bp, synthetic construct
  source 1..75: mol_type = other DNA
gtttgcgaccattcttgccggtatcagcgccggcggcatgtactgcccggagtgtggcacggttcactggccgga

SEQ ID NO: 65566 - DNA, 75 bp, synthetic construct
  source 1..75: mol_type = other DNA
tgatttcagacgtatttctggctctgaggaccaggcacaataccggatcacacttaaacctttcatttccctgct

SEQ ID NO: 65567 - DNA, 75 bp, synthetic construct
  source 1..75: mol_type = other DNA
cggcttcgcctgatgacaggtacacaatttgaagcaaccactcaccttgttcgtgtcccggtcccgctgatttgc

SEQ ID NO: 65568 - DNA, 75 bp, synthetic construct
  source 1..75: mol_type = other DNA
cgttgcgcgtggagctgaatcgctattcattaaaagtgcaaggattgctgggacgtcgctgcccaacgccaatgt

SEQ ID NO: 65569 - DNA, 75 bp, synthetic construct
  source 1..75: mol_type = other DNA
gctaaccgttttacttctaacattaaaggcctgactcaggctgcacgtaacgccaacgacggtatttccgttgcg

SEQ ID NO: 65570 - DNA, 75 bp, synthetic construct
  source 1..75: mol_type = other DNA
gaaaaaccacgctaccaatgagcgtgggatctgccggatacgacacacaacttgattacgtggttaaggggatta

SEQ ID NO: 65571 - DNA, 75 bp, synthetic construct
  source 1..75: mol_type = other DNA
gccgttttattcagctgaatctggaaaaattgaaaggggtacatgatgtcgccttgccagtgaaatgggaattca

SEQ ID NO: 65572 - DNA, 75 bp, synthetic construct
  source 1..75: mol_type = other DNA
gatgcaaaaggcaacctgctcaatgacgtcaaggtcactttcaatgttaattcagcagaggcgaaactgagccaa

SEQ ID NO: 65573 - DNA, 75 bp, synthetic construct
  source 1..75: mol_type = other DNA
ttgacgaagaagacgcagaagctctgcgctttgataattttgacgatgccgttgagtgctgcgcagacctgaata

SEQ ID NO: 65574 - DNA, 75 bp, synthetic construct
  source 1..75: mol_type = other DNA
tggtgcctgaagaacaggacattgttgtcactccagaatacaccctgaatttcgacaatgccgacgccaaaatca

SEQ ID NO: 65575 - DNA, 75 bp, synthetic construct
  source 1..75: mol_type = other DNA
tgtactcgctgtcacatcagacgaatggcaccggcgaatcagaatggattcatttcacaggtagcggatatctgt

SEQ ID NO: 65576 - DNA, 75 bp, synthetic construct
  source 1..75: mol_type = other DNA
gcgccgtaccatgatccgaactttctggaaaaaagcagcagccgccaatcgccaactcggcgggtctgggttcag

SEQ ID NO: 65577 - DNA, 75 bp, synthetic construct
  source 1..75: mol_type = other DNA
ccaatgtccagccagtgtccagcgcaaacgcagtagtaccaatgcctggggaggtggagtgtccagccgatgtcc

SEQ ID NO: 65578 - DNA, 75 bp, synthetic construct
  source 1..75: mol_type = other DNA
cgttatggtgtgacgtttaacactgtctataaagccatccgacgaatgcggcgtataaagtatcgtcagtatcaa

SEQ ID NO: 65579 - DNA, 75 bp, synthetic construct
  source 1..75: mol_type = other DNA
tctcggcgtccagcccgcttatcggtgtcaattccccaacaggtgcaactctgacggcaacgctaacttctgcaa

SEQ ID NO: 65580 - DNA, 75 bp, synthetic construct
  source 1..75: mol_type = other DNA
tgttaatggcagtaccgttattctgggaagtgaccatgtttttactgacaagaatgatggaaccggtaattcagt

SEQ ID NO: 65581 - DNA, 75 bp, synthetic construct
  source 1..75: mol_type = other DNA
taaatattccacaactctccggtaaagacgttctgactcttgacggatccgttaatttgccagaaggttcaataa

SEQ ID NO: 65582 - DNA, 75 bp, synthetic construct
  source 1..75: mol_type = other DNA
atcgtttaaaagagctggctaccgcaggttttactctaacgcagacgtatacccgtgcggtgaaaaatgctgatg

SEQ ID NO: 65583 - DNA, 75 bp, synthetic construct
  source 1..75: mol_type = other DNA
ctcgaacccttccagggcaaaatttatgacccgtgctgcggctcggcagggatgttcgtgcagtcggtgaagttt

SEQ ID NO: 65584 - DNA, 75 bp, synthetic construct
  source 1..75: mol_type = other DNA
atgtcagaaatcacatccctggtcactgctgaggcagtgaaggaagtcctgcgctctgaagaagtccggagcgca

SEQ ID NO: 65585 - DNA, 75 bp, synthetic construct
  source 1..75: mol_type = other DNA
aaacaactaattttatcaactgtggctgtgtttcgcttaagggcttagaacttgattcctttgcattaaatattg

SEQ ID NO: 65586 - DNA, 75 bp, synthetic construct
  source 1..75: mol_type = other DNA
gaccaccgaactggccagactgctcgatcttgacgaagagattatcctgcaatgggagagtggagaatacgaacc

SEQ ID NO: 65587 - DNA, 75 bp, synthetic construct
  source 1..75: mol_type = other DNA
taagcagggaaatcaagttgatgaacttggtaaggcaccgatggctgattttagcagcgccactattactaccgg

SEQ ID NO: 65588 - DNA, 75 bp, synthetic construct
  source 1..75: mol_type = other DNA
atgacgctcgcgcagtttgccatgattttctggcacgacctggcagcaccgatcctggcggggattattaccgca

SEQ ID NO: 65589 - DNA, 75 bp, synthetic construct
  source 1..75: mol_type = other DNA
ttcagcagaggcgaaactgagccaaaccgaagtgaatagccacgacgggatcgccacagctacgctgaccagttt

SEQ ID NO: 65590 - DNA, 75 bp, synthetic construct
  source 1..75: mol_type = other DNA
acttgccgaaatttactgtaacgtgaataacggtaaaaaattgaaaaaggcaatccgaaaaaaatcaggagtaac

SEQ ID NO: 65591 - DNA, 75 bp, synthetic construct
  source 1..75: mol_type = other DNA
gcttgcttgttcaggtagccagagagtcagacgacaggataacagcactggaagaagaaaacgcagaattaagac

SEQ ID NO: 65592 - DNA, 75 bp, synthetic construct
  source 1..75: mol_type = other DNA
acagggaaccgcttatgctggtgttactgctcaattgtggggcaactccagccgtcctgttgtttatgaagtcgg

SEQ ID NO: 65593 - DNA, 75 bp, synthetic construct
  source 1..75: mol_type = other DNA
gtttggcgagcctcacatcactatgcctagtggccatgtttattggctaagagctatggagaaatatggtgataa

SEQ ID NO: 65594 - DNA, 75 bp, synthetic construct
  source 1..75: mol_type = other DNA
caaacttccccgctatgtcgtgaagcttcacgacgatgacttctttgacgaagaagacgcagaagttctgcgctt

SEQ ID NO: 65595 - DNA, 75 bp, synthetic construct
  source 1..75: mol_type = other DNA
tatgcgcagaaaactaccagcaatacctacgaattaacggttaacggcgcgtgcaatgcaagtgcatttaatcaa

SEQ ID NO: 65596 - DNA, 75 bp, synthetic construct
  source 1..75: mol_type = other DNA
cggcggctatcctgacggcgtggcttttgccgtcctgctggcgaacatcacggttcctctgatcgattactacac

SEQ ID NO: 65597 - DNA, 75 bp, synthetic construct
  source 1..75: mol_type = other DNA
acgcaatctggcctggaaagatcggctgctcatcgcaccggcgagacttggcacctatgcaagctcaaatttgtc

SEQ ID NO: 65598 - DNA, 75 bp, synthetic construct
  source 1..75: mol_type = other DNA
cgcgactggaactttgcgccggaggccggggtaatgctcaaccgctatatcgcgagcgacggtatccgcaaaccc

SEQ ID NO: 65599 - DNA, 75 bp, synthetic construct
  source 1..75: mol_type = other DNA
atgcaatccattaacttccgtaccgcgcgcggcaacctttctgaagtgctcaacaatgttgaagccggggaagag

SEQ ID NO: 65600 - DNA, 75 bp, synthetic construct
  source 1..75: mol_type = other DNA
ttttctggcacgacctggcagcaccgatcctggcgggaattattaccgcagcgattgtcggctggtggcgtaacc

SEQ ID NO: 65601 - DNA, 75 bp, synthetic construct
  source 1..75: mol_type = other DNA
tgtccataaacaataatataaataatatctctaatactgacgtattagagagtgccacagcagacaaaaagtctg

SEQ ID NO: 65602 - DNA, 75 bp, synthetic construct
  source 1..75: mol_type = other DNA
tgcgtcattttcccctgccggacgttgttatgtggcacttgaagagcttcgctggggcgcgtttggtgatgtgat

SEQ ID NO: 65603 - DNA, 75 bp, synthetic construct
  source 1..75: mol_type = other DNA
tacgtgtgaagaataatacagaggcttcgttttctgtaggtgctgatgttcctattttaggtagtgttacagtta

SEQ ID NO: 65604 - DNA, 75 bp, synthetic construct
  source 1..75: mol_type = other DNA
gtctgggtggtctatttttggctcacgttcaacagaaaattcaaagacggatattgttgttatgcttcaggttcg

SEQ ID NO: 65605 - DNA, 75 bp, synthetic construct
  source 1..75: mol_type = other DNA
taccggcgccacgctggcaaatgttacctataaaattttagttaccaactcttggtttacctctgaagttaaggc

SEQ ID NO: 65606 - DNA, 75 bp, synthetic construct
  source 1..75: mol_type = other DNA
atggacatttttatttcgaaaaagatgcgcaatttcattttattagcgcaaaccaataatattgcccgggcggca

SEQ ID NO: 65607 - DNA, 75 bp, synthetic construct
  source 1..75: mol_type = other DNA
agcgtcggatactggcaggcagccgctatgacctggttgagcgtaataacaacatcgttcttgagtaccgcaaat

SEQ ID NO: 65608 - DNA, 75 bp, synthetic construct
  source 1..75: mol_type = other DNA
acatcgccctcattaacctggtctggtgttcctgaaggtaccaaaagctttgccgtaactgtatatgatccagat

SEQ ID NO: 65609 - DNA, 75 bp, synthetic construct
  source 1..75: mol_type = other DNA
gttctgtcttgccttgttagtggcgctgatgcagggggcgtcatggtttagtcaaaaccaccagcgacagcgtaa

SEQ ID NO: 65610 - DNA, 75 bp, synthetic construct
  source 1..75: mol_type = other DNA
gtaaaaacggaccgctcggctatctgcgcctgacgctcgacacccatacgctcgccaccgaagcccaacaggtgg

SEQ ID NO: 65611 - DNA, 75 bp, synthetic construct
  source 1..75: mol_type = other DNA
aggtgccggggggaagaaaggtaatctttgatggtagcgtgaacctgccggaaggtaccctgagtcaggacagtg

SEQ ID NO: 65612 - DNA, 75 bp, synthetic construct
  source 1..75: mol_type = other DNA
gtgagatttggatcgatcgcgccgatttccgcgaagaagctaacaagcagtacaaacgtctggtgctgggtaaag

SEQ ID NO: 65613 - DNA, 75 bp, synthetic construct
  source 1..75: mol_type = other DNA
caacggtattgggctggttatcggcgggttgatggtgccggtatttggcctgatcgcgatgggcaagggcagctt

SEQ ID NO: 65614 - DNA, 75 bp, synthetic construct
  source 1..75: mol_type = other DNA
ccggtaacttttcagcgtgggttattgaagcctgcaggagaaggctggcaacagatgcaacgcatctgcgcccgg

SEQ ID NO: 65615 - DNA, 75 bp, synthetic construct
  source 1..75: mol_type = other DNA
gggcctgctgttcaacaccaacggttttatgctggaagaaaacgtcgtcagcaccaaaccgcgtttccactttat

SEQ ID NO: 65616 - DNA, 75 bp, synthetic construct
  source 1..75: mol_type = other DNA
gaactggttattgctgccagtcaggtggagagggaaacgggtaaacctgttcgcatgattattctggacacgctg

SEQ ID NO: 65617 - DNA, 75 bp, synthetic construct
  source 1..75: mol_type = other DNA
atgaaactggcaccgaacgtaaaacgattaccgaaagataaatacaccgatgcgattatttttgcgggtattgat

SEQ ID NO: 65618 - DNA, 75 bp, synthetic construct
  source 1..75: mol_type = other DNA
cgggcatcagcgccctgcgctggctcaatactgaacaggcaagcagtgttattgagaaactgaagaagtggcagc

SEQ ID NO: 65619 - DNA, 75 bp, synthetic construct
  source 1..75: mol_type = other DNA
attgagaaactgaagaagtggcagcacagagctgcgggagtaaaacatgagcgacctgaatcagtttcgaagtaa

SEQ ID NO: 65620 - DNA, 75 bp, synthetic construct
  source 1..75: mol_type = other DNA
ggagcggattttttgtggttatcgccatcgccgccgggatttccgcactgctgttactgccctttttgaacgccc

SEQ ID NO: 65621 - DNA, 75 bp, synthetic construct
  source 1..75: mol_type = other DNA
gcctgggcacatgcgaaacagtggcaggaacaggacgggcgactggctggcgataatgtgcctcccgttgtgctg

SEQ ID NO: 65622 - DNA, 75 bp, synthetic construct
  source 1..75: mol_type = other DNA
ggcggcgggtgtaactgatgcgaattattaccccgaagggatgcacagccagaagcgggagaactggcgcgaata

SEQ ID NO: 65623 - DNA, 75 bp, synthetic construct
  source 1..75: mol_type = other DNA
gaatttcagcgtgattacgagcgtgccagaatagtgtggtcattcgccttacatgttgcaacaaccacgattaac

SEQ ID NO: 65624 - DNA, 75 bp, synthetic construct
  source 1..75: mol_type = other DNA
atgtccactgtaagtctcaaacaattatacggaaaaacgcatgcatactggagcggcgtattcgccatgacgctt

SEQ ID NO: 65625 - DNA, 75 bp, synthetic construct
  source 1..75: mol_type = other DNA
agccctgcaatctcgcgccgaattgcgtcaaaaagtacgtaattgtgcagatttcaaaccgcttccggcggaaat

SEQ ID NO: 65626 - DNA, 75 bp, synthetic construct
  source 1..75: mol_type = other DNA
aaaaaaggtatccggggctggagcaaacgcacagataaccgccgagccttttctgctgttattgatgtcgcagtt

SEQ ID NO: 65627 - DNA, 75 bp, synthetic construct
  source 1..75: mol_type = other DNA
gtataccaatgatactcattgtcctcgatgcagattgtcgtccacgtcatcggcaatagcacggtattcccagga

SEQ ID NO: 65628 - DNA, 75 bp, synthetic construct
  source 1..75: mol_type = other DNA
tggggactctgccatccacagtcttaccgtcagaaacagccgtattagttctgaaggagaccgtacattccgtac

SEQ ID NO: 65629 - DNA, 75 bp, synthetic construct
  source 1..75: mol_type = other DNA
taggttttaaagacgttctcatccgccctaaacgctccactcttaaaagccgttccgatgttgaactggaacgtc

SEQ ID NO: 65630 - DNA, 75 bp, synthetic construct
  source 1..75: mol_type = other DNA
ttattctcttcgcattgtcagaaatggttatccattaaaggctggcgattactacgctgcattgcgttttaaact

SEQ ID NO: 65631 - DNA, 75 bp, synthetic construct
  source 1..75: mol_type = other DNA
ttttacccccttcgataccaccaatgtacgaaactgttaacacttataatagaaacattgattattggaaggtaa

SEQ ID NO: 65632 - DNA, 75 bp, synthetic construct
  source 1..75: mol_type = other DNA
cgggctcgattttcttaatcatcttagcaaggatgaaaccgcagaaggcttcctgaagtactacaaggaccgtat

SEQ ID NO: 65633 - DNA, 75 bp, synthetic construct
  source 1..75: mol_type = other DNA
ccgcagataaaacgctggttcgccagatcgtcggtgatgcggatatccgcaaattgccgaaacaatcggtcgaca

SEQ ID NO: 65634 - DNA, 75 bp, synthetic construct
  source 1..75: mol_type = other DNA
ttcgtgaagcagcagagaaagcaactaaaggatgctacatcgtagggcatacatcgggcaatcagcatgggaata

SEQ ID NO: 65635 - DNA, 75 bp, synthetic construct
  source 1..75: mol_type = other DNA
gcggatacaatgcatgcaatggcagaaagaggatatgattaccctgtcgactttcctcgcctaattcaggagaag

SEQ ID NO: 65636 - DNA, 75 bp, synthetic construct
  source 1..75: mol_type = other DNA
tgacaccctggaacgtcgcgcattactggcggctcaggaagcgctgaatacggcaattgatgcgcatgatgatgc

SEQ ID NO: 65637 - DNA, 75 bp, synthetic construct
  source 1..75: mol_type = other DNA
tcacctcagtatttttgacactgttgagcgccgtgcattactggcggcccaggaagcgttgagcacggcaattga

SEQ ID NO: 65638 - DNA, 75 bp, synthetic construct
  source 1..75: mol_type = other DNA
attgataattttacacggacagtagtaagagaaaactgtatggaaatacacacaaagtatgtcaatatgccaatg

SEQ ID NO: 65639 - DNA, 75 bp, synthetic construct
  source 1..75: mol_type = other DNA
agtcgggatattgtttgcgagtcaacccatgaggccattgaaattctgaaaaatgacggcgtcatcacgggtggc

SEQ ID NO: 65640 - DNA, 75 bp, synthetic construct
  source 1..75: mol_type = other DNA
gcgcggggaactcatcggggtattcagtttcgatgcgggattgtacggtttatccccgctggcgcggggaactct

SEQ ID NO: 65641 - DNA, 75 bp, synthetic construct
  source 1..75: mol_type = other DNA
accgcagccaggcggtcagactgccaaaagcggttgcattgccggaaaacgtaaaacgcgttgaagtgattgctg

SEQ ID NO: 65642 - DNA, 75 bp, synthetic construct
  source 1..75: mol_type = other DNA
aaacgtaaagagaatggcttattgccagtaagcgtccaggaaggttatggcaatgtcagtaaagagataagccgc

SEQ ID NO: 65643 - DNA, 75 bp, synthetic construct
  source 1..75: mol_type = other DNA
atgttacgacgcatgatcctttcggtactgtttctctggtgtgcagtggctcaggctctgccatcagcttctttt

SEQ ID NO: 65644 - DNA, 75 bp, synthetic construct
  source 1..75: mol_type = other DNA
caggaaacagatgtactcggaagcaggatgcagcgcacgctggccggtgtccgtggcagtatccgtactgtgacg

SEQ ID NO: 65645 - DNA, 75 bp, synthetic construct
  source 1..75: mol_type = other DNA
caggtacccgtattttgcgtgtccttaaggctttacgcggtcacgctctgaacggtgtttctaacggcgagctgg

SEQ ID NO: 65646 - DNA, 75 bp, synthetic construct
  source 1..75: mol_type = other DNA
gagttgcgccagaaacaatacgagtactatcgtgatttactgttcagtttcccaaaacctgaaactgtcagtaat

SEQ ID NO: 65647 - DNA, 75 bp, synthetic construct
  source 1..75: mol_type = other DNA
ggattgctgtagaagcgggctggttcgtggctgaatatggccgccaaccgtgggctatcggtgaagtgctgccga

SEQ ID NO: 65648 - DNA, 75 bp, synthetic construct
  source 1..75: mol_type = other DNA
gccgcagcgaatcactctggctggtgcgcggcggtgtggcgaaactggatgaaggtcaccggctggccgcactct

SEQ ID NO: 65649 - DNA, 75 bp, synthetic construct
  source 1..75: mol_type = other DNA
ctgattttatccgcccgaacagcggcagcctacttaaacagattgaggtgaaaaccgccgccagattaaagcaat

SEQ ID NO: 65650 - DNA, 75 bp, synthetic construct
  source 1..75: mol_type = other DNA
cgcacagcccccctcacagaccgtagaacaaacagtccggcatatttatcagaactataaatcagatgccactgc

SEQ ID NO: 65651 - DNA, 75 bp, synthetic construct
  source 1..75: mol_type = other DNA
gcagtcaatatggaacgcctgaacctggtgcagtcaattatcacccgcacggcggacttcattaacaacgtgatg

SEQ ID NO: 65652 - DNA, 75 bp, synthetic construct
  source 1..75: mol_type = other DNA
atgaaactgaaaaaactccccgggtttagtttgggacttattgctctggcggtgggtaatgcatatgcaacacaa

SEQ ID NO: 65653 - DNA, 75 bp, synthetic construct
  source 1..75: mol_type = other DNA
atctcgctggtcgctgccgggtggatttttactgcgctgatttatctcgtggcgtcgctgtttttccggctgata

SEQ ID NO: 65654 - DNA, 75 bp, synthetic construct
  source 1..75: mol_type = other DNA
atgttcagcttccggcggcatacagataagaggaacggtttgaacatagacactcgcgaaatcaccctggagcca

SEQ ID NO: 65655 - DNA, 75 bp, synthetic construct
  source 1..75: mol_type = other DNA
aggtgataatcctgccgcatggaaaggtatgctgaaacctctgttgcctcagccaagtaaagttcagatcaccaa

SEQ ID NO: 65656 - DNA, 75 bp, synthetic construct
  source 1..75: mol_type = other DNA
atccgaaatcagtcccgtgcatgggttctttgcgtggctatgggaacccgaatcaacaatctcggtagaacagtt

SEQ ID NO: 65657 - DNA, 75 bp, synthetic construct
  source 1..75: mol_type = other DNA
cagtattctgacgggctacggtatcaacgtttatcagttgctggctgaaaaactgaaagttgatcagaaagtact

SEQ ID NO: 65658 - DNA, 75 bp, synthetic construct
  source 1..75: mol_type = other DNA
catcgtctggaatatatccagtttagataaaaaagatatattatctatatcaagaatagtttacgcactttcgac

SEQ ID NO: 65659 - DNA, 75 bp, synthetic construct
  source 1..75: mol_type = other DNA
gcgaacagcaatgatgatgcgtcactgcctccgccggagcaggataaactctgggaaccgccttctccgatgaga

SEQ ID NO: 65660 - DNA, 75 bp, synthetic construct
  source 1..75: mol_type = other DNA
ccaaaggcaaaaaaacggcaatcgataaaatttatccgcgacattttctggcgacagcaaaggtgctgaaattcc

SEQ ID NO: 65661 - DNA, 75 bp, synthetic construct
  source 1..75: mol_type = other DNA
aatacaaccattgaagaatatgttgtttcagttattcttgaaaaagccgatcaggatttccgtcgaattgtaaaa

SEQ ID NO: 65662 - DNA, 75 bp, synthetic construct
  source 1..75: mol_type = other DNA
attggtactgaaatgattgcctatcaagacagtaccattgttaacgatggtacactttttgtttgggataataat

SEQ ID NO: 65663 - DNA, 75 bp, synthetic construct
  source 1..75: mol_type = other DNA
ggtaactgcaaagaaacttctttcacaaaatattgttccaggactataccagagcgtatttcagttgaaaaaatt

SEQ ID NO: 65664 - DNA, 75 bp, synthetic construct
  source 1..75: mol_type = other DNA
tgctacacggtgaaatggcctgtgccgcgatggatgaagcatggctggaattagagggagatatgttacgcctta

SEQ ID NO: 65665 - DNA, 75 bp, synthetic construct
  source 1..75: mol_type = other DNA
acagtagctacatctgcacgcacgctgaaaccgtgggaggcattagggatcagtcgcgcctggtattaccaactg

SEQ ID NO: 65666 - DNA, 75 bp, synthetic construct
  source 1..75: mol_type = other DNA
cggatgcgcttcagcagtccggcggcgaagacggtggcagtgtggtgttcccgccggtgctggtgcagatgctcg

SEQ ID NO: 65667 - DNA, 75 bp, synthetic construct
  source 1..75: mol_type = other DNA
cattgtgggtgagcctgtttccatggcatccatgactgatgcaggcaaccggaacaaatatccggtggacatctg

SEQ ID NO: 65668 - DNA, 75 bp, synthetic construct
  source 1..75: mol_type = other DNA
ctgcatcaggttgggcgcaatgaagaggcgctggagttactgtttgggcatctgcgtaaagatctcaccgccgca

SEQ ID NO: 65669 - DNA, 75 bp, synthetic construct
  source 1..75: mol_type = other DNA
caaaggcgcactggactgcattttacgtgcacgactggaagccctgctggcacgcgccagcggtatcccggctct

SEQ ID NO: 65670 - DNA, 75 bp, synthetic construct
  source 1..75: mol_type = other DNA
gctcaggatgaaaaggtctaccgtaccgggcacgtcaaaaaactgacagccagtgatcgctgggccggtggtaag

SEQ ID NO: 65671 - DNA, 75 bp, synthetic construct
  source 1..75: mol_type = other DNA
cgcacttcgtgaacgatcccacgaatttatgaataaattgcatgtgattctcggattattgcatctgaagagtta

SEQ ID NO: 65672 - DNA, 75 bp, synthetic construct
  source 1..75: mol_type = other DNA
ggcccgtggctgctgctagccgcagccacgggctggatagcggggcgtatgatgttacacaagccctcccggcgt

SEQ ID NO: 65673 - DNA, 75 bp, synthetic construct
  source 1..75: mol_type = other DNA
gcgtgggctgaataccgcacgttatgcccgcacgctgagcatccttaatgccagtgcggtgccgctactccaggc

SEQ ID NO: 65674 - DNA, 75 bp, synthetic construct
  source 1..75: mol_type = other DNA
agtacgactggctgacctcagacgccgctgtggatgaggccattcacatcaatacatataccttcaccgaagccg

SEQ ID NO: 65675 - DNA, 75 bp, synthetic construct
  source 1..75: mol_type = other DNA
aacatccggtcgcttggatgtggtacttagtcgtctggctgactataccgagcaacgccagatcatgcgaaaccg

SEQ ID NO: 65676 - DNA, 75 bp, synthetic construct
  source 1..75: mol_type = other DNA
atgtacgaacaggacacgctcagcgcactggatgccatcaccgaagcacagcggattgcctttgctcctatgctt

SEQ ID NO: 65677 - DNA, 75 bp, synthetic construct
  source 1..75: mol_type = other DNA
gtggttgttacggtgtcggaccggcgctaccgcctgaaagggctgcagacgggtgaggtggctgtctatgacgat

SEQ ID NO: 65678 - DNA, 75 bp, synthetic construct
  source 1..75: mol_type = other DNA
ccgaatgacacggccattgccgggcacgccatcgcggcgggcgccatcctggtgacgaacaatgtgagagagttt

SEQ ID NO: 65679 - DNA, 75 bp, synthetic construct
  source 1..75: mol_type = other DNA
agccagagtttcgcatgatctctcccgatggcaccacgtttgttactcgtttctccagtgctgaactaaattatg

SEQ ID NO: 65680 - DNA, 75 bp, synthetic construct
  source 1..75: mol_type = other DNA
tggctgggctcactggaaaccggtctgcccttcagtatcactgacaacctgatgctggagccacaactgcagtac

SEQ ID NO: 65681 - DNA, 75 bp, synthetic construct
  source 1..75: mol_type = other DNA
atgaagcaacctgattttgcgaagtggtacttctatcaattaattaagaagtatgagggcgaacagctgtatctt

SEQ ID NO: 65682 - DNA, 75 bp, synthetic construct
  source 1..75: mol_type = other DNA
acagactggtatggaatcacattacgggcgcttttgtggtggcttccgaactggcccgctcacggggaaaacgcg

SEQ ID NO: 65683 - DNA, 75 bp, synthetic construct
  source 1..75: mol_type = other DNA
cattcgctggtgacaaggagtgctacgaaggagtggtaaggctgacgaaagacggtcaacgccttcgtaacatga

SEQ ID NO: 65684 - DNA, 75 bp, synthetic construct
  source 1..75: mol_type = other DNA
atgaagcaacctgattttgctaagtggtacttctatcaattacttaagagttatgagggagaacagatgtatctt

SEQ ID NO: 65685 - DNA, 75 bp, synthetic construct
  source 1..75: mol_type = other DNA
tgcgcgtactgggggcaatcggcgtggtcgaaaccactcatccggtgaatatggcggcgctgcaaaaattctttg

SEQ ID NO: 65686 - DNA, 75 bp, synthetic construct
  source 1..75: mol_type = other DNA
gagagcttgttgatgccgcgattaagcttgctggtgatttttattcaatgatggggtacgcgcatcgccctggat

SEQ ID NO: 65687 - DNA, 75 bp, synthetic construct
  source 1..75: mol_type = other DNA
ctctgcggtcgatcaccggctggcagaactgacgatgaacaaactttacgatcgcgtgccggcttccgtctggaa

SEQ ID NO: 65688 - DNA, 75 bp, synthetic construct
  source 1..75: mol_type = other DNA
aaccgtctgggcaatttcactgtggaaaacggtaaggctgacggtgttgttctggaatccggcggtcgtctggat

SEQ ID NO: 65689 - DNA, 75 bp, synthetic construct
  source 1..75: mol_type = other DNA
ggccaattcgtcagaaaatcagtcggacaaagggaaaaaaagcgccgctgttcggtggactgctaacgacgacaa

SEQ ID NO: 65690 - DNA, 75 bp, synthetic construct
  source 1..75: mol_type = other DNA
catgtgcgtgccggcttccgtctgggcagccacaacgatatgacctttggcgaaggcacctcatcccgtgacact

SEQ ID NO: 65691 - DNA, 75 bp, synthetic construct
  source 1..75: mol_type = other DNA
ccggtgtggcggttgcgctgtctcttgctgctgtcacgtcagtcccggtactggctgctgacacggtcgtacagg

SEQ ID NO: 65692 - DNA, 75 bp, synthetic construct
  source 1..75: mol_type = other DNA
gcgcggtggtaaggcagcacagccggacggccatacgctggcgcggctgtgggggcgctgccgccggatatccgg

SEQ ID NO: 65693 - DNA, 75 bp, synthetic construct
  source 1..75: mol_type = other DNA
aaacactggtggatgacggcggtaccctggcagtgtctgccggtggtaaggcaacagatgtcaccatgacatccg

SEQ ID NO: 65694 - DNA, 75 bp, synthetic construct
  source 1..75: mol_type = other DNA
accgaggcgacaaatgacctgtattttagccgagtgtcgcaatgggatgactggctatcaaactacaccaccctg

SEQ ID NO: 65695 - DNA, 75 bp, synthetic construct
  source 1..75: mol_type = other DNA
gccggattctgatgacaacaccggcgggcagcagataactccgggtggcactgccagaaacaccactgtcaccgc

SEQ ID NO: 65696 - DNA, 75 bp, synthetic construct
  source 1..75: mol_type = other DNA
ggatggaaaaagcccaggacctcagcaaacacctgtatccgatcatgaaagagctgaactcctcatacacgaaca

SEQ ID NO: 65697 - DNA, 75 bp, synthetic construct
  source 1..75: mol_type = other DNA
atgggatttccttcaccggcgtccgactacgtcgagcagcgactgtccgttaactcgatatgcaatgtcgggccg

SEQ ID NO: 65698 - DNA, 75 bp, synthetic construct
  source 1..75: mol_type = other DNA
caaacttatggtgggaacagaaactatcacctctggatgaagtgtttccatactccctgaaatgcccgaaagaaa

SEQ ID NO: 65699 - DNA, 75 bp, synthetic construct
  source 1..75: mol_type = other DNA
gctgctggcaatcactcaggcaggccgtatgttgatgttcccggtaagcgatctgccgcagctgtcgaagggcaa

SEQ ID NO: 65700 - DNA, 75 bp, synthetic construct
  source 1..75: mol_type = other DNA
ctccgctaattctcggctttgttattgtgccgttgttggtatggccgacggtgattgctttagctatatttatat

SEQ ID NO: 65701 - DNA, 75 bp, synthetic construct
  source 1..75: mol_type = other DNA
ggcgctactgcaagccagccacgaggccggcattcatactgcggtagaaacctgtctgcatgtgccgtggaaata

SEQ ID NO: 65702 - DNA, 75 bp, synthetic construct
  source 1..75: mol_type = other DNA
attgctcacacctatatggctgcggaatatctggaaaaagccggacgcaaactcggcgtgaatgtctacgttgaa

SEQ ID NO: 65703 - DNA, 75 bp, synthetic construct
  source 1..75: mol_type = other DNA
acgacttggcgcgatggatgtcgccgacgaaggcagggacaaaaatgccttttccacccgtcatggcttcctcct

SEQ ID NO: 65704 - DNA, 75 bp, synthetic construct
  source 1..75: mol_type = other DNA
atgaaccgtgttctgtgtgtggtgattattgtcctgctggtagcctgtggtgcgcttggtctggggctgaatcat

SEQ ID NO: 65705 - DNA, 75 bp, synthetic construct
  source 1..75: mol_type = other DNA
gcgaaccgcgaatgcgtaccgatggccgatctggcaggggaaaaactgctgatgctggaagatggtcactgtttg

SEQ ID NO: 65706 - DNA, 75 bp, synthetic construct
  source 1..75: mol_type = other DNA
gtggtggtggcacaggaacttgatctgaactacagcgcatcagcggaaggcgtcctgattccatccgaatgggta

SEQ ID NO: 65707 - DNA, 75 bp, synthetic construct
  source 1..75: mol_type = other DNA
gcaaatcgctatgtcgagcaacaactgctgctggcggcagatcgcgtccgcgaaggaagcagtctgcgcgccgcg

SEQ ID NO: 65708 - DNA, 75 bp, synthetic construct
  source 1..75: mol_type = other DNA
tatatccagatatatcatgctctctgagactgggagaaccattcattattacacttccagaaacagtcaggctgg

SEQ ID NO: 65709 - DNA, 75 bp, synthetic construct
  source 1..75: mol_type = other DNA
tgcaagttctgctccagaaatgattaaccatctcataaaaaatcaattggatatggttgtaggatgtcgtcaaga

SEQ ID NO: 65710 - DNA, 75 bp, synthetic construct
  source 1..75: mol_type = other DNA
atgtttcattgtcctttatgccagcatgccgcacatgcgcgtacaagccgctatatcactgacacgacaaaagag

SEQ ID NO: 65711 - DNA, 75 bp, synthetic construct
  source 1..75: mol_type = other DNA
agaagagtatttcaaaaaatatgagcaggctgagcgggcgctgaaaaatggcacctggacacaacgtcatgcctg

SEQ ID NO: 65712 - DNA, 75 bp, synthetic construct
  source 1..75: mol_type = other DNA
tgcggtcgatcaccggctggcagaactgacaatgaacaaactttacgatcgcgtgccggcttccgtctggaaata

SEQ ID NO: 65713 - DNA, 75 bp, synthetic construct
  source 1..75: mol_type = other DNA
aagacgctcaaaaattacagttatcctctgcaaatgaagctgaaacacgccttaagatcatagatcaaatactct

SEQ ID NO: 65714 - DNA, 75 bp, synthetic construct
  source 1..75: mol_type = other DNA
aattatcacttcattttcagatacaataacagaaatcgacaatgatctttttgaaagatgttatgtaaatactcc

SEQ ID NO: 65715 - DNA, 75 bp, synthetic construct
  source 1..75: mol_type = other DNA
ccgccaaagcgggctataccttacctctgcagatcctcagcagtgctcgtggttattatattggtactcagtgcg

SEQ ID NO: 65716 - DNA, 75 bp, synthetic construct
  source 1..75: mol_type = other DNA
atgaacatactaaaaaaacttatgcagcgtatgtgtggttgcggaaagcatgatggccgtgaacacgtgcagtcg

SEQ ID NO: 65717 - DNA, 75 bp, synthetic construct
  source 1..75: mol_type = other DNA
tgtgttttatgcgcaaaaaagaccgccgcgccatcactgcattactgcgtaagtttgccatccgtgaagaccgcg

SEQ ID NO: 65718 - DNA, 75 bp, synthetic construct
  source 1..75: mol_type = other DNA
tgaccagcggaaagatatctgttctgggtattcccacgcgacaggcgctacagaaaaacctggttgcctacgtcc

SEQ ID NO: 65719 - DNA, 75 bp, synthetic construct
  source 1..75: mol_type = other DNA
gcgctggaacgtgtcgatatggtgaattttcgccatcgacaaatcggcgagctttccggtggacaaaagaaacgc

SEQ ID NO: 65720 - DNA, 75 bp, synthetic construct
  source 1..75: mol_type = other DNA
aaggttactggtcatggattccggcacaccatgagcaccattttgcatgagcagggctataacaccgcgtggata

SEQ ID NO: 65721 - DNA, 75 bp, synthetic construct
  source 1..75: mol_type = other DNA
gtactgcgtaaaattgagaaacgtggtgcgttggagaaaatgcgtaaagtgcggcagcgttgctccgaagtgttt

SEQ ID NO: 65722 - DNA, 75 bp, synthetic construct
  source 1..75: mol_type = other DNA
ggtggctggcccaagtccggggtctatctttgcttacctggcactgacgccgaaaggctcgttcctggcgacaat

SEQ ID NO: 65723 - DNA, 75 bp, synthetic construct
  source 1..75: mol_type = other DNA
tcatcagcgcggttatggttcgaagtgggatgttatccgcgtgcgtgtgttgaagcgtgacaaaggactgtgcca

SEQ ID NO: 65724 - DNA, 75 bp, synthetic construct
  source 1..75: mol_type = other DNA
gaaagccacaaaagcgaaggctggaagcaatacaagtctggccagtcccgtcatcagcgcggttatggttcgaag

SEQ ID NO: 65725 - DNA, 75 bp, synthetic construct
  source 1..75: mol_type = other DNA
ccatccatcatcatgtatccggggggaagtggaccttcttatagtatgagtagttccacatccagtgcaaacagc

SEQ ID NO: 65726 - DNA, 75 bp, synthetic construct
  source 1..75: mol_type = other DNA
ggcagtacggaatgcgtttaacaaacaagtctatgatgatttacatcgcgcagcggcgtttttgttcctgaaccg

SEQ ID NO: 65727 - DNA, 75 bp, synthetic construct
  source 1..75: mol_type = other DNA
gtggcggtatgacgaacgtggctggctgacagacatcagccatatcagcgaagggcaccgggtagcggtgcatta

SEQ ID NO: 65728 - DNA, 75 bp, synthetic construct
  source 1..75: mol_type = other DNA
atgaaaccgcaggtgtaccacgtcgatgcttttacctctcaaccgtttcgcggcaattctgccggtgttgttttc

SEQ ID NO: 65729 - DNA, 75 bp, synthetic construct
  source 1..75: mol_type = other DNA
aatataacggcgtgagcgtcacgctttctgagctgtcagccctgcagcgtattgagcatcttgccctgctgaaac

SEQ ID NO: 65730 - DNA, 75 bp, synthetic construct
  source 1..75: mol_type = other DNA
atgagaaaaaataataccgcaataatattcggcggcctgtttttttcctgcagcgtgatggccggagccggtacg

SEQ ID NO: 65731 - DNA, 75 bp, synthetic construct
  source 1..75: mol_type = other DNA
cgggaatggctggacagtcacccggtagatattctgctgaatgagcagcctaattcgtgcctgacaccttaccag

SEQ ID NO: 65732 - DNA, 75 bp, synthetic construct
  source 1..75: mol_type = other DNA
gaagaaagcattattactgacgatgaacacccttttgtggcacatcgaccgtcagcggtgcagagggaagcaaga

SEQ ID NO: 65733 - DNA, 75 bp, synthetic construct
  source 1..75: mol_type = other DNA
aaatgcagcttatcgcccgcgaattaggtcattcggaaactgcttttctgctgcacagcgacgacagcgatgtgc

SEQ ID NO: 65734 - DNA, 75 bp, synthetic construct
  source 1..75: mol_type = other DNA
atgagtgtcggcgctttcctgcgtcagtggctgatgccagatgcaattattaccagtggcggcatgggagaacaa

SEQ ID NO: 65735 - DNA, 75 bp, synthetic construct
  source 1..75: mol_type = other DNA
gatcttatcagaggcggggcgtttctggtggcgatgtctctgtggcataaccatccgcagaagacaaagctgccg

SEQ ID NO: 65736 - DNA, 75 bp, synthetic construct
  source 1..75: mol_type = other DNA
gaagggaaagatttcaaagagattgatctgctggcgcgccagtcggagcgccatgcgcggatcggcaagtttaac

SEQ ID NO: 65737 - DNA, 75 bp, synthetic construct
  source 1..75: mol_type = other DNA
tttcagtgactgggctagttcagtcaaagaaggcgcatccaatgacttcaaagaaaatgtggatagagcattggt

SEQ ID NO: 65738 - DNA, 75 bp, synthetic construct
  source 1..75: mol_type = other DNA
ttcctgaaggtcgcgcgatgcgtctacaggaggcatctggcggcgagcttcagtatgatcccaaggtttatgacg

SEQ ID NO: 65739 - DNA, 75 bp, synthetic construct
  source 1..75: mol_type = other DNA
gcatgaaaggccagtactggcaagtgcgtgaaaaagtgttcgattacgaaggtcgttttcgtcgggcgcacgaat

SEQ ID NO: 65740 - DNA, 75 bp, synthetic construct
  source 1..75: mol_type = other DNA
tctgggataatctgatggatgagtattttttttgtaagtcgttacggaaagccactgagtggagttatcgcaagg

SEQ ID NO: 65741 - DNA, 75 bp, synthetic construct
  source 1..75: mol_type = other DNA
cacggcatctttctggtgacggggccgacgggttccggcaaaagcaccacgctgtacgccggattgcaggagctg

SEQ ID NO: 65742 - DNA, 75 bp, synthetic construct
  source 1..75: mol_type = other DNA
tctcgttccgtttatccagtaatgtcggatgacatgaatggttcatcctggaaatttagcacccgaatgcaaaaa

SEQ ID NO: 65743 - DNA, 75 bp, synthetic construct
  source 1..75: mol_type = other DNA
taacgcccgcatttttagcgagtatagcattcattgttttacctattgtaattacagttcttgtatcgtttacaa

SEQ ID NO: 65744 - DNA, 75 bp, synthetic construct
  source 1..75: mol_type = other DNA
attgttcctgatgataagtacatacaggaagcgattgtactgaacgccaatacgggcctgatcggtatgcctcag

SEQ ID NO: 65745 - DNA, 75 bp, synthetic construct
  source 1..75: mol_type = other DNA
gataagaacacctttaaagtgcgtgatgacttcactctggaatggagtggcccgaaagaaaataacatctttgcg

SEQ ID NO: 65746 - DNA, 75 bp, synthetic construct
  source 1..75: mol_type = other DNA
agccgcagcgaagaagccagccacgccgatctggcctgggcaacaatgcacgcactgtttaatgaaccgctgcag

SEQ ID NO: 65747 - DNA, 75 bp, synthetic construct
  source 1..75: mol_type = other DNA
cagcgcacgcagtatgaagtgtatgactaccccggacgtttcaagagcgcccacgggcagaactttgcccgctgg

SEQ ID NO: 65748 - DNA, 75 bp, synthetic construct
  source 1..75: mol_type = other DNA
cccggcttgatattacgggaatgtgggtattttccctgggtgtctggtttcatatcgtcgcccgtcttgtttaca

SEQ ID NO: 65749 - DNA, 75 bp, synthetic construct
  source 1..75: mol_type = other DNA
ggtgttctccctggggctctggtttcatattgttgcccgtctggtttacagaaagccctggatggctttttttct

SEQ ID NO: 65750 - DNA, 75 bp, synthetic construct
  source 1..75: mol_type = other DNA
acgcccggctaaatacaaatatacagatgaaaacggtaatgaacagacttggacgggtcagggccgtactcctaa

SEQ ID NO: 65751 - DNA, 75 bp, synthetic construct
  source 1..75: mol_type = other DNA
gtaaggcgttaagtcaggccgatctggtgcgcaattttattctgatgggcctcgaaccagagcatcaaacccggt

SEQ ID NO: 65752 - DNA, 75 bp, synthetic construct
  source 1..75: mol_type = other DNA
attaaagaggcatttttaatgccatggactcttacagggatttgctatgaaatatcgcagcgaaaatatattgtt

SEQ ID NO: 65753 - DNA, 75 bp, synthetic construct
  source 1..75: mol_type = other DNA
gaaagccctggatggctttttttctggcagagctgattgcggccattctcgttctgtttggcgcataccagatac

SEQ ID NO: 65754 - DNA, 75 bp, synthetic construct
  source 1..75: mol_type = other DNA
aaaccggcaagagacatgagcaggattatcgtcttatctggaaatcggagggcaccggtgatgagtctggcggat

SEQ ID NO: 65755 - DNA, 75 bp, synthetic construct
  source 1..75: mol_type = other DNA
tccgcaagacatgggaaaaggtggcagcggaaaccctgcgtctggatgtcatcccgcctgcgtttgagcaactcc

SEQ ID NO: 65756 - DNA, 75 bp, synthetic construct
  source 1..75: mol_type = other DNA
ttctggcggacgtcagcgcccagcccacccatattagcaagccgctgatgcaacgtatcgaatacttcagcagcc

SEQ ID NO: 65757 - DNA, 75 bp, synthetic construct
  source 1..75: mol_type = other DNA
tgcgccgcgaggcactgagtgatcaggtctgggagcgttatttctttaatgaatcacgtgatcctgtccagcgcg

SEQ ID NO: 65758 - DNA, 75 bp, synthetic construct
  source 1..75: mol_type = other DNA
gtggctttattattgacagcgttaaacgggactttcagtcccgttaccaaaccagcttcttaggcgcggcatggc

SEQ ID NO: 65759 - DNA, 75 bp, synthetic construct
  source 1..75: mol_type = other DNA
tattaatgcaggaagcacccagcaaactaatattgtagctggtaactatcaaggattggtgtcaattgtgcttac

SEQ ID NO: 65760 - DNA, 75 bp, synthetic construct
  source 1..75: mol_type = other DNA
ttcccatatcagcaagccgctgttgcaacgtattgaatacttcagcagcctaggcaggccaaaggcttattcccg

SEQ ID NO: 65761 - DNA, 75 bp, synthetic construct
  source 1..75: mol_type = other DNA
agtctgagctgataaacccgcgcaaaggaacgccgacaagctacattgcgaaatatatcagtaagaatattgacg

SEQ ID NO: 65762 - DNA, 75 bp, synthetic construct
  source 1..75: mol_type = other DNA
atggtgatacgcaaaacagtgtgcagagattatgataacgccatccctcataatacggaatgtttcccggactgc

SEQ ID NO: 65763 - DNA, 75 bp, synthetic construct
  source 1..75: mol_type = other DNA
gcagcggctttaacgaggtcgccgcagcattctcatggaacagcccaaaaaaggccattaacccttatctggacc

SEQ ID NO: 65764 - DNA, 75 bp, synthetic construct
  source 1..75: mol_type = other DNA
tgaaagacggggcgggtaagcctgtcgtaaattgtgcgattgaactgcgggccagaagaaccagtccgaccgttg

SEQ ID NO: 65765 - DNA, 75 bp, synthetic construct
  source 1..75: mol_type = other DNA
tgccgattatggcggtatatcagggagaaagttttggtgaaaatgcttctctgggactcggtgatactgtgccgg

SEQ ID NO: 65766 - DNA, 75 bp, synthetic construct
  source 1..75: mol_type = other DNA
ctgcgtggctttggcggcaaaactgagttctgggatcacaaccttgagtcgttcaccttgatggcgggtctggca

SEQ ID NO: 65767 - DNA, 75 bp, synthetic construct
  source 1..75: mol_type = other DNA
cggcagacccaacccgacctggacaaactcgacggtaagacaaagcagcgactatctggtcggcatgtttgctgc

SEQ ID NO: 65768 - DNA, 75 bp, synthetic construct
  source 1..75: mol_type = other DNA
agtgggcgtgtttggtcccggctggaaagcgcccttcgatatccgcttacaggttcatgagcgggaactgatact

SEQ ID NO: 65769 - DNA, 75 bp, synthetic construct
  source 1..75: mol_type = other DNA
atgtcaggctaactatatacgtgatgttcagggagggactgtggctccatcatcttcttctaaactgacggggat

SEQ ID NO: 65770 - DNA, 75 bp, synthetic construct
  source 1..75: mol_type = other DNA
gaattaatgcgtgcccgcctggctggcatggatggtccttttgcatacagcatctacttgtgttctggggtgtta

SEQ ID NO: 65771 - DNA, 75 bp, synthetic construct
  source 1..75: mol_type = other DNA
acgatgaggcggtcataagcgccaaacccggctttgatgaggcgtgggaagcaacgccggatgcaaaccgggtaa

SEQ ID NO: 65772 - DNA, 75 bp, synthetic construct
  source 1..75: mol_type = other DNA
tgctggctggtcaggcggcaaggcagcagggggacaaaaaagcaggtgcgccggtactggataacccacgccttg

SEQ ID NO: 65773 - DNA, 75 bp, synthetic construct
  source 1..75: mol_type = other DNA
gtatgacgaagtcaccgctggctggctcaaaaaacaggacggaaccccacagaacgagggaaacagggcgtaaaa

SEQ ID NO: 65774 - DNA, 75 bp, synthetic construct
  source 1..75: mol_type = other DNA
taaattctggaataatatcttttgaaagtcctgtagattcaccatctaacgaggatatcaaagttgcactcgaaa

SEQ ID NO: 65775 - DNA, 75 bp, synthetic construct
  source 1..75: mol_type = other DNA
gtagagagcctgttcaaagcgtttggccgcaccctacgccaggccatccgcgtggaaggcgacaccctgccctcg

SEQ ID NO: 65776 - DNA, 75 bp, synthetic construct
  source 1..75: mol_type = other DNA
ggtgctaatcactatttttggtgtcggctatgtgattcatttactcttaccgaatgtgccgctcatcgctgcttt

SEQ ID NO: 65777 - DNA, 75 bp, synthetic construct
  source 1..75: mol_type = other DNA
ggtagtcaggttaaactgctgtggtctaccggtgacgggctgtgcctgctgactaaacggctggagcgcggccgc

SEQ ID NO: 65778 - DNA, 75 bp, synthetic construct
  source 1..75: mol_type = other DNA
ccggtaacgcacgtttcacgggaagaacttcaggcattacatatcgcacgagctgaagaactgccggctgttact

SEQ ID NO: 65779 - DNA, 75 bp, synthetic construct
  source 1..75: mol_type = other DNA
atgacgcttgatgaatttatggcgctggctggtacattaaacacgggggcgggtgagtatgtatcatcggggaca

SEQ ID NO: 65780 - DNA, 75 bp, synthetic construct
  source 1..75: mol_type = other DNA
ggcagtcaggttaaactgctgtggtccaccggtaacggactgtgcctcctgaccaaacggctggagcgtgggcgc

SEQ ID NO: 65781 - DNA, 75 bp, synthetic construct
  source 1..75: mol_type = other DNA
gaagcctactgctttcctggtggcgtgattcaggcactgctacgggagatcggcgccggacgtccggggcttttt

SEQ ID NO: 65782 - DNA, 75 bp, synthetic construct
  source 1..75: mol_type = other DNA
aattattttcagggatacggaagatcgctattaatattttaacgaaagataagatactcaaggcaggggcaagat

SEQ ID NO: 65783 - DNA, 75 bp, synthetic construct
  source 1..75: mol_type = other DNA
aggatagcagctacgcataatctttcactgaacaatcatcagggtaaacaattcacatcttcgatggcccgaaaa

SEQ ID NO: 65784 - DNA, 75 bp, synthetic construct
  source 1..75: mol_type = other DNA
atattcgtgggctcaatggattcatgctatcacataaaggtagtgaagtgattgatgctgttatcgcaggccaga

SEQ ID NO: 65785 - DNA, 75 bp, synthetic construct
  source 1..75: mol_type = other DNA
gcgaaggccgcagcaatcttgaggcctatcttgcacgccaggctgaactggccgaaaccaccgtagaacgactgg

SEQ ID NO: 65786 - DNA, 75 bp, synthetic construct
  source 1..75: mol_type = other DNA
atcaaagagagcgacgagctgctgaaaagaatcaacagcatcggcgttgacgatcaggagggtgaaaaagtcctg

SEQ ID NO: 65787 - DNA, 75 bp, synthetic construct
  source 1..75: mol_type = other DNA
gaagcgacgcaatcccgctgacgtctctgatctggcatcacgtcgttatcgctgcgaacaggtgaactacgacac

SEQ ID NO: 65788 - DNA, 75 bp, synthetic construct
  source 1..75: mol_type = other DNA
agatgaagataagcaaccaggcgaaccgatcccagataatcagccagtcaatctgacagaagatcaaaaagagtt

SEQ ID NO: 65789 - DNA, 75 bp, synthetic construct
  source 1..75: mol_type = other DNA
ccgtatgagtgatgaagcattcgactcggtatatcaattgcttgaacaagcaagcaagcgttgggctgagaaatt

SEQ ID NO: 65790 - DNA, 75 bp, synthetic construct
  source 1..75: mol_type = other DNA
cccgttgtcagtctgctcaggtttaccgccatggtcagaaccctaaaggccgtgctcggtttcgctgccgtgact

SEQ ID NO: 65791 - DNA, 75 bp, synthetic construct
  source 1..75: mol_type = other DNA
aatattggtgccagtgcgaagtcatcctgggattacacgaaacaaaatattggagattcattgcgctggcttggc

SEQ ID NO: 65792 - DNA, 75 bp, synthetic construct
  source 1..75: mol_type = other DNA
cgagaattcaggggcgtatactttcgaaactattgctcgcgaatggcacgccagcaacaagcgatggagtgaaga

SEQ ID NO: 65793 - DNA, 75 bp, synthetic construct
  source 1..75: mol_type = other DNA
ctgcccgcagaaattgtcacgtaaatcaagattggctcatggaatgcttttacgaacagtcaaagagtttaaatc

SEQ ID NO: 65794 - DNA, 75 bp, synthetic construct
  source 1..75: mol_type = other DNA
aaagcccgaatcgacgcttaccagaaacgtaagcatcgggaaggtaaacgcgtgcatcccacaaccctgcattac

SEQ ID NO: 65795 - DNA, 75 bp, synthetic construct
  source 1..75: mol_type = other DNA
aattaaaggcgttcgttactcgtatcgtggcatgaagatgaaagaggagcatatagttcctcttagtcgacaggc

SEQ ID NO: 65796 - DNA, 75 bp, synthetic construct
  source 1..75: mol_type = other DNA
cagacgtccctctgacaaaaaagaggatcgtctcgcttttggtgtttggcctactgtgacgcttgctcaggcaag

SEQ ID NO: 65797 - DNA, 75 bp, synthetic construct
  source 1..75: mol_type = other DNA
tgttcaatattgattcgcgtgccaacgtagatgacaaagaagatgccattcttaaagtcttcctgaaagttttca

SEQ ID NO: 65798 - DNA, 75 bp, synthetic construct
  source 1..75: mol_type = other DNA
taaggttatgagtgagaacactgttaataatgcattgcgtgcgatgggctatgatacgaaaacagaagtttgcgg

SEQ ID NO: 65799 - DNA, 75 bp, synthetic construct
  source 1..75: mol_type = other DNA
tgatcggcacctgccgtctgaacggtatcgatccggaagcgtatctgcgccatatgctgagcctactgccggaat

SEQ ID NO: 65800 - DNA, 75 bp, synthetic construct
  source 1..75: mol_type = other DNA
ctggatttgtgacaataccgggatgtggacgcgcgacggcctggcattttacagcgccggtgatgaggagatacc

SEQ ID NO: 65801 - DNA, 75 bp, synthetic construct
  source 1..75: mol_type = other DNA
atctggcaaatgatgagcgggggcttaaatcgcgcatcagtgagactaccgcgcagcttaatcggcagcgtgagg

SEQ ID NO: 65802 - DNA, 75 bp, synthetic construct
  source 1..75: mol_type = other DNA
atgaaacatatccctgaaggcgtgattcaggtaccagaatcccccgacgccccggaagcgctgccggggtgtcgt

SEQ ID NO: 65803 - DNA, 75 bp, synthetic construct
  source 1..75: mol_type = other DNA
acaaaaaaatgcgcgatcgcatcagtaattccctgtttaaactcgcctcggttacgctgaagttccagagcgaga

SEQ ID NO: 65804 - DNA, 75 bp, synthetic construct
  source 1..75: mol_type = other DNA
ggcagcaacgtattcgtgagacagtgcggcacgcactgaatgttcatccccgcctgacggcattgcgggttgacc

SEQ ID NO: 65805 - DNA, 75 bp, synthetic construct
  source 1..75: mol_type = other DNA
tattactgttggtattggtcatttgctatctacgccagatatggcggcatctctcccttttacaagaactcatac

SEQ ID NO: 65806 - DNA, 75 bp, synthetic construct
  source 1..75: mol_type = other DNA
cgagaactcgggggcatatactttcgaaaccattgctcgtgaatggcatgctagtaacaagcgatggagtgaaga

SEQ ID NO: 65807 - DNA, 75 bp, synthetic construct
  source 1..75: mol_type = other DNA
gggtggggatcattcattcctttgcccgccataacgtgattggtgacaaagttgaactgccttttgtcgagtttg

SEQ ID NO: 65808 - DNA, 75 bp, synthetic construct
  source 1..75: mol_type = other DNA
cccacgcggcagctgcattcgttatgcagctggtgcatccggaacaagtaccggaccggcgacggctgcgactat

SEQ ID NO: 65809 - DNA, 75 bp, synthetic construct
  source 1..75: mol_type = other DNA
gatggcgattggcgaatgggtcgcgccgcagggcgagcagatggcgcgtaactaccgtgcgcaggcgatgtacgg

SEQ ID NO: 65810 - DNA, 75 bp, synthetic construct
  source 1..75: mol_type = other DNA
aataaagatgagttaatcatcttactctacaataaaaagtttattcattatttgtacgagaaggctatgtgtatc

SEQ ID NO: 65811 - DNA, 75 bp, synthetic construct
  source 1..75: mol_type = other DNA
gcacagttcactggccggatggcgttacccccccgtctgatgcttccccgttttgccgatatttttcagcagggt

SEQ ID NO: 65812 - DNA, 75 bp, synthetic construct
  source 1..75: mol_type = other DNA
atggatctaacacagatttcattgcgaacgtcgagagatcaagtcgagcgtatcaaaacctatgctaaagcaagt

SEQ ID NO: 65813 - DNA, 75 bp, synthetic construct
  source 1..75: mol_type = other DNA
gccggtaaatcctcactctgtaatgcactgtttcagggggaggtcaccccggtcagtgatgttcacgccggcacc

SEQ ID NO: 65814 - DNA, 75 bp, synthetic construct
  source 1..75: mol_type = other DNA
gatgcgtgaaggcattgtggtttatgacgcagagggaacgccggtctgggcctgtgccaacgtggatgccagagc

SEQ ID NO: 65815 - DNA, 75 bp, synthetic construct
  source 1..75: mol_type = other DNA
cgtgttgatgacgaagggtatcctgaaatagcccgctgcacggagcgggagtttgcgaccattcttgccggtatc

SEQ ID NO: 65816 - DNA, 75 bp, synthetic construct
  source 1..75: mol_type = other DNA
tgaaagggcgcggcggcgcgggcttttcgactggcctgaagtggagtctgatgccgaaagacgaatccatgaaca

SEQ ID NO: 65817 - DNA, 75 bp, synthetic construct
  source 1..75: mol_type = other DNA
cgctgaagcaacccagtcggtggtgcaagccacgctaactgaaggtgccattggctaccgtaaatttgctgtcat

SEQ ID NO: 65818 - DNA, 75 bp, synthetic construct
  source 1..75: mol_type = other DNA
ctgatattccagctgaagcaggaatggatgtttctggccgggcgaggagcctttccgctttttgccctggtgtgg

SEQ ID NO: 65819 - DNA, 75 bp, synthetic construct
  source 1..75: mol_type = other DNA
acacttccgcccctgaatttatccctgcgcctgatgaaaccctcatcaccgccacgcccgtaccggatgaggacc

SEQ ID NO: 65820 - DNA, 75 bp, synthetic construct
  source 1..75: mol_type = other DNA
ataaaaaaagttgatgccagtggtaagcatgatgtggcgcagcgtcttcagcaacgtgttactgctattatgcgc

SEQ ID NO: 65821 - DNA, 75 bp, synthetic construct
  source 1..75: mol_type = other DNA
ggagaacctgtctgtgtccggaatgacggttattttgtcaacattcgcattcttgatgacttgtttgatgtttct

SEQ ID NO: 65822 - DNA, 75 bp, synthetic construct
  source 1..75: mol_type = other DNA
gacaggaaaggcatccatccgcagactcatcttgcttgcttcagcggtgtgctgcaagcggatgcgtacgccggg

SEQ ID NO: 65823 - DNA, 75 bp, synthetic construct
  source 1..75: mol_type = other DNA
ggcagaaaatatagcgatcgacatggcatatgaaactgccggacgtggtgactggcgaacggatgcgtttattgt

SEQ ID NO: 65824 - DNA, 75 bp, synthetic construct
  source 1..75: mol_type = other DNA
gttctccggggtaaaaaggtccgtactaccgtcagccggaaagccgtttccgcaggcgaccgcgtaaaccgtcag

SEQ ID NO: 65825 - DNA, 75 bp, synthetic construct
  source 1..75: mol_type = other DNA
aatgtccctaaaggctcattttattactactttaagagtaaagaggattatgctcagaccgttctgaacgcctat

SEQ ID NO: 65826 - DNA, 75 bp, synthetic construct
  source 1..75: mol_type = other DNA
gcccgcggtgatccgcgcggtgacgtacattattcccgcacgttatttcgtcagcaccctgcaaagcctgttcct

SEQ ID NO: 65827 - DNA, 75 bp, synthetic construct
  source 1..75: mol_type = other DNA
tttcccaagtgaatttgaagaaacggagttgggttgggtgccaaaggggtggaaagaagggacgcttccagagat

SEQ ID NO: 65828 - DNA, 75 bp, synthetic construct
  source 1..75: mol_type = other DNA
cgtcagttgttacgggaaggtatcagagtggccagatgcactgtggcacgtctcatggcggttatgggacttgcc

SEQ ID NO: 65829 - DNA, 75 bp, synthetic construct
  source 1..75: mol_type = other DNA
agggaaatgatgcagtggtatgcggattatatcgatgagttagggagagctggggcagtggtagaagggatgttt

SEQ ID NO: 65830 - DNA, 75 bp, synthetic construct
  source 1..75: mol_type = other DNA
gtcacctgcgtctggcgggaatggggctgattgcttttctgctgggcagtctgaccccggcactggccgatttgc

SEQ ID NO: 65831 - DNA, 75 bp, synthetic construct
  source 1..75: mol_type = other DNA
atcatacgcggaacgtgtggcgcacgccggcgaacaataagctgcggatggaggataagcgccaggaagagcata

SEQ ID NO: 65832 - DNA, 75 bp, synthetic construct
  source 1..75: mol_type = other DNA
gggacagttcggggccattatcgtggtcggggtggtgctgctggttgcggttatctggctgctcggcaaatccgc

SEQ ID NO: 65833 - DNA, 75 bp, synthetic construct
  source 1..75: mol_type = other DNA
agaccgcaaagccgaaagagaaagcttataaaatggctgatggaggcggtttgtatcttgaggtctcccctaaag

SEQ ID NO: 65834 - DNA, 75 bp, synthetic construct
  source 1..75: mol_type = other DNA
atgcgctctgccttccagctttcaaacgataaggtcgcccatatcggtgatgttctgtcgatgacgatgaacaaa

SEQ ID NO: 65835 - DNA, 75 bp, synthetic construct
  source 1..75: mol_type = other DNA
ggttggtggtgcgaacgaggcaagcggagtgacaaagacactcaccggggtgttgaatggtgttgcagacaatat

SEQ ID NO: 65836 - DNA, 75 bp, synthetic construct
  source 1..75: mol_type = other DNA
ggttatgagagattagcttctacgcctgaacgaatggaagcacaagctaaattaccagagctagctaaagagtct

SEQ ID NO: 65837 - DNA, 75 bp, synthetic construct
  source 1..75: mol_type = other DNA
accagtactgacaacgacctggatgccgggctgctgctgcgtaaatcagccacatttacaatgggtacgggaggg

SEQ ID NO: 65838 - DNA, 75 bp, synthetic construct
  source 1..75: mol_type = other DNA
gccgcgcgtggagcagtacagcatcgacgagatgtttctggacattcgcggcatagacaattgcatcgattttga

SEQ ID NO: 65839 - DNA, 75 bp, synthetic construct
  source 1..75: mol_type = other DNA
ttccagccgaacgcgaacctctgccaggcgtaaaattttcataccgggctccaagatgcgaacaccacatcttgt

SEQ ID NO: 65840 - DNA, 75 bp, synthetic construct
  source 1..75: mol_type = other DNA
ggacggaatgatccaaataaacctatgagtgaggcaagtgttaatcaacttatcaaacgaataggctatgctgga

SEQ ID NO: 65841 - DNA, 75 bp, synthetic construct
  source 1..75: mol_type = other DNA
accagacgaaaaacgtcaaaaaatcaccatccataacccgcatagccacccggggaattattaacatttttgttc

SEQ ID NO: 65842 - DNA, 75 bp, synthetic construct
  source 1..75: mol_type = other DNA
aacaacgcttttaaacgctcttggtggaagtggtaaaagtcttggtgaatctcttggtagcttgatgactgatat

SEQ ID NO: 65843 - DNA, 75 bp, synthetic construct
  source 1..75: mol_type = other DNA
taaagctgggtcaatggataattcaaaattcaatgaagcccttgctaaactaaattcaagtgtacgagaagcaat

SEQ ID NO: 65844 - DNA, 75 bp, synthetic construct
  source 1..75: mol_type = other DNA
tcttcggtgaggtgatcgacagttacaccatgaccgaatccgttcaggatgaaatcactgtacgcatcgtgtacg

SEQ ID NO: 65845 - DNA, 75 bp, synthetic construct
  source 1..75: mol_type = other DNA
aaacgtgaaggaatttctgcaatcttatcaatcacccgaagtcgctaaagcggcagaaaccatctttaacggtgg

SEQ ID NO: 65846 - DNA, 75 bp, synthetic construct
  source 1..75: mol_type = other DNA
cggcctttaaggtggcatccggtgatgtggatctgaatgtggtgcatctgacatcggtgggaatgctggttgccg

SEQ ID NO: 65847 - DNA, 75 bp, synthetic construct
  source 1..75: mol_type = other DNA
aaaaaatccgggagcagttgcggtcccgggaagagaccctgaagaatgataatgtggctgcgcgtgcatcaaatg

SEQ ID NO: 65848 - DNA, 75 bp, synthetic construct
  source 1..75: mol_type = other DNA
atacaacggtattttctttgcgaaaaatggcggaactcttgacctgaacggatataatcagtctttcaataaaat

SEQ ID NO: 65849 - DNA, 75 bp, synthetic construct
  source 1..75: mol_type = other DNA
tgggggaagcgactattcgcgagggggggctggttacggctgaaaatacgattatcggtggcaatgccaccggtg

SEQ ID NO: 65850 - DNA, 75 bp, synthetic construct
  source 1..75: mol_type = other DNA
ggcgcgcagtctcgtccgcagcagtccgctccggcagcgccgtctaacgaaccgccgatggactttgatgacgat

SEQ ID NO: 65851 - DNA, 75 bp, synthetic construct
  source 1..75: mol_type = other DNA
gtagtgccattgcgacagcgctcggtgcgattacctggccgatagtggccgtcggtgcggcgattgtggcggggg

SEQ ID NO: 65852 - DNA, 75 bp, synthetic construct
  source 1..75: mol_type = other DNA
aagttattgcttctattgtattatttaatcattcctatgatgatattaaagatacgcttctctcgttatgccatg

SEQ ID NO: 65853 - DNA, 75 bp, synthetic construct
  source 1..75: mol_type = other DNA
cccttgccctaatggtactgagaaagtatcagcttatcatactcatggtgcagatagtcatggagaatattggga

SEQ ID NO: 65854 - DNA, 75 bp, synthetic construct
  source 1..75: mol_type = other DNA
tccggcgaacaaattaccctatgtctggccggagtcggtcagtatgcgttcttacaatcccactactaccggaca

SEQ ID NO: 65855 - DNA, 75 bp, synthetic construct
  source 1..75: mol_type = other DNA
atggctatttcagtaaagccggtattgataagtgagaagcaaatggaagcgataaagaaaattcaggaagagcag

SEQ ID NO: 65856 - DNA, 75 bp, synthetic construct
  source 1..75: mol_type = other DNA
ttttactttcccggaggcagatcgaagccctgcaacgcatccaggacgaagagcgtcagaaatctgtgcttggtg

SEQ ID NO: 65857 - DNA, 75 bp, synthetic construct
  source 1..75: mol_type = other DNA
atttttgcctttaatggctgtgagcgcagattcagacaacctgtaagtgaagataactggcaacaggcagtatca

SEQ ID NO: 65858 - DNA, 75 bp, synthetic construct
  source 1..75: mol_type = other DNA
ttgatatgatcaagcagttcggtccgcgtatttacttcacccatctgcgctccaccatgcgtgaagataacccga

SEQ ID NO: 65859 - DNA, 75 bp, synthetic construct
  source 1..75: mol_type = other DNA
aaacctacatcgaccagagtcggccaatctatcaaatcaccgtgccgggcaatggtatgccgggagatcggttgg

SEQ ID NO: 65860 - DNA, 75 bp, synthetic construct
  source 1..75: mol_type = other DNA
gtgttcaggtggatacaccggaggctcactttaccggtaatgtcacagtggataagaacctgcatgtcaaaggca

SEQ ID NO: 65861 - DNA, 75 bp, synthetic construct
  source 1..75: mol_type = other DNA
tgcgggtggatacgccggaggccacctttacgggcaatgtgacggtggataaaaacctgcatgttaagggtaatt

SEQ ID NO: 65862 - DNA, 75 bp, synthetic construct
  source 1..75: mol_type = other DNA
tcagttgatccagaaaaagcggcatcagcattggagctgtcaaaagaccgacgcattgaggatcttgaaaggcaa

SEQ ID NO: 65863 - DNA, 75 bp, synthetic construct
  source 1..75: mol_type = other DNA
tgacgctgcctacaaagctgcgcttgacaaagcattaaaaccggtcggactgagcggcatgttcggtaaaggcgg

SEQ ID NO: 65864 - DNA, 75 bp, synthetic construct
  source 1..75: mol_type = other DNA
cgccctgacctggtgtttattaatcgtgtgctgcacattgttaatattcacgtatctgacccggaatcgtttgtg

SEQ ID NO: 65865 - DNA, 75 bp, synthetic construct
  source 1..75: mol_type = other DNA
actaccgtcagccggaaaaccgttgccgcaggtgaccgcgtaaaccgtcagtgcgtggcagaacgtcctgaccag

SEQ ID NO: 65866 - DNA, 75 bp, synthetic construct
  source 1..75: mol_type = other DNA
gataaaaactcaaactgtattgtcgagtacaagcttcctgaagtttctcctggtaccttactgaaccagcagaca

SEQ ID NO: 65867 - DNA, 75 bp, synthetic construct
  source 1..75: mol_type = other DNA
gtggatcgacccggttaaggaagctgaagcctggagaattcagatccggggtggtgcagcgacagaatctgactg

SEQ ID NO: 65868 - DNA, 75 bp, synthetic construct
  source 1..75: mol_type = other DNA
ggatgaagataaacaaccaggcgaaccgatcccggataatcagccagccattctgacagaagatcaaaaagagtt

SEQ ID NO: 65869 - DNA, 75 bp, synthetic construct
  source 1..75: mol_type = other DNA
ataccgcgatttcaaatctaagcgcggggattatgagcacaacaagcggtagtggccagactcgtaatgcaggga

SEQ ID NO: 65870 - DNA, 75 bp, synthetic construct
  source 1..75: mol_type = other DNA
ggcccgtgaacagtttaccggtgcggtggaccggatatttgacacggcggagagcgtctgtgttgcctctgttgc

SEQ ID NO: 65871 - DNA, 75 bp, synthetic construct
  source 1..75: mol_type = other DNA
ggccttggcatcaccatgcctaacctgcatgaaatgggtggcgagaacgcgccgatcatcatggcgcagctgaaa

SEQ ID NO: 65872 - DNA, 75 bp, synthetic construct
  source 1..75: mol_type = other DNA
cgtacggttctgcgtgccgtccgtgacaccgtggtctctgttgcccgcgcggtatggaactggattttcttctga

SEQ ID NO: 65873 - DNA, 75 bp, synthetic construct
  source 1..75: mol_type = other DNA
gacctacgttcgtgacgaccgtaacgccgggtcaacgctggcgccggcggtgtggttcgcttacagcccggacag

SEQ ID NO: 65874 - DNA, 75 bp, synthetic construct
  source 1..75: mol_type = other DNA
aaaaaagaggactcatttccagtgaattttccagaaaaacattactgagactttataccaagataagaactgaga

SEQ ID NO: 65875 - DNA, 75 bp, synthetic construct
  source 1..75: mol_type = other DNA
tgcgttgcggatggtcagtctgggccgcaaaaactacctgttcttcggttcggatcatggaggagagcggggagc

SEQ ID NO: 65876 - DNA, 75 bp, synthetic construct
  source 1..75: mol_type = other DNA
ggttatggtaccagcgatcgttttatgcgtgccggggtggaaataaaccgacacggaaaagcgctggcctaccat

SEQ ID NO: 65877 - DNA, 75 bp, synthetic construct
  source 1..75: mol_type = other DNA
gctgaaaggctggcagcggtcagctggcgctaaggcagaactggcgctggcggagaaactggggcatgcagttat

SEQ ID NO: 65878 - DNA, 75 bp, synthetic construct
  source 1..75: mol_type = other DNA
aggctggtatcggagacatcgcgcagcggggagacagtacgctaccgctacgatgacgcgcacagtgagttaccg

SEQ ID NO: 65879 - DNA, 75 bp, synthetic construct
  source 1..75: mol_type = other DNA
aagggctgggaagatgtcgatcagtttcttgcacagccgctacttgctgacgtcgatgagcgtactaaaaaacag

SEQ ID NO: 65880 - DNA, 75 bp, synthetic construct
  source 1..75: mol_type = other DNA
gtccgatgaccgggtataaaaatttcaaccgtgaggcgttccacgatgcggaagaggaactgaaacgggaagggc

SEQ ID NO: 65881 - DNA, 75 bp, synthetic construct
  source 1..75: mol_type = other DNA
aggatatgatgcacttcgctctgctgtgctgatgcgaactttcgttttcatgattagcaatacagctaaagaaaa

SEQ ID NO: 65882 - DNA, 75 bp, synthetic construct
  source 1..75: mol_type = other DNA
gtaaaaaggtccgtacgaccatcagccggaaagccgttgccgcaggcgaccgcgtaaaccgtcagttcgtggcag

SEQ ID NO: 65883 - DNA, 75 bp, synthetic construct
  source 1..75: mol_type = other DNA
gagtaaaaaccttttgaaagcaggttactcgctggtggttgctgaccgtaacccagaagctatcgctgacgtgat

SEQ ID NO: 65884 - DNA, 75 bp, synthetic construct
  source 1..75: mol_type = other DNA
aactgggcctgacgtttacttatatggcgaccgacaacattggtgtggaattactggcagcaacgccgttccgcc

SEQ ID NO: 65885 - DNA, 75 bp, synthetic construct
  source 1..75: mol_type = other DNA
gaggcgaaaagtacgccccctgaggcagcgaaagccatgaccgtggcgattcgcacttttttacagcaaaacgcc

SEQ ID NO: 65886 - DNA, 75 bp, synthetic construct
  source 1..75: mol_type = other DNA
tcgctggcctacacacagcggcttaaggaagccggattactggcatcaacaggaagtactggtgactcgtatgac

SEQ ID NO: 65887 - DNA, 75 bp, synthetic construct
  source 1..75: mol_type = other DNA
gggattcacgaactattccggtcatgactttaagtttgaagagcaaaaacgcctggtgtctctgttgacggatgc

SEQ ID NO: 65888 - DNA, 75 bp, synthetic construct
  source 1..75: mol_type = other DNA
tggcccgcatgacaacttccacccgagtaattcgcatgtgatcccagcattgctgcgtcgcttccacgaggcgac

SEQ ID NO: 65889 - DNA, 75 bp, synthetic construct
  source 1..75: mol_type = other DNA
tccagcgaacgcagggggcgatcaaaaatctcgagcgtcaggcgcgttcatttgagcgcgcccgtgacgctgtca

SEQ ID NO: 65890 - DNA, 75 bp, synthetic construct
  source 1..75: mol_type = other DNA
ccgcataccagaaaacatattttccgtggcaagcgaaatccgagggagcatcaaagtaaccttgaatgatacgtg

SEQ ID NO: 65891 - DNA, 75 bp, synthetic construct
  source 1..75: mol_type = other DNA
tggctgaccgggtgagtgaggaaagccgccgctggctggcatcgtgcggcctgaccgtggagcagatgcaaaacc

SEQ ID NO: 65892 - DNA, 75 bp, synthetic construct
  source 1..75: mol_type = other DNA
gctgcggcagacccgtacccgcaaaccgttccctgaatcacttccccgtgacgaaaaacggctgctgccggcagc

SEQ ID NO: 65893 - DNA, 75 bp, synthetic construct
  source 1..75: mol_type = other DNA
gggccgtgaaacgcagtatgagtacaacgccgcaggcgacctgactgccgttatcaccccggacggcaaccggag

SEQ ID NO: 65894 - DNA, 75 bp, synthetic construct
  source 1..75: mol_type = other DNA
gctggatatggctgccacgctggcagtgcctttcacaggtgacgggcgcgatgctgcagagatcctgcgtacact

SEQ ID NO: 65895 - DNA, 75 bp, synthetic construct
  source 1..75: mol_type = other DNA
aacgcagacggcgtaccacacaggaaaagatcgcaattgttcagcagagctttgaacctgggatgacggtctccc

SEQ ID NO: 65896 - DNA, 75 bp, synthetic construct
  source 1..75: mol_type = other DNA
cgcacggttctgcgtgccgtccgtgactcggtggtctctgttgcccgcgcggtatggaactggattttcttctga

SEQ ID NO: 65897 - DNA, 75 bp, synthetic construct
  source 1..75: mol_type = other DNA
gcgcccttttgttcgggtgctgtcggaaaaagtgcgggcacgtcgtggccggccgccaaaagatgaagtgcgtct

SEQ ID NO: 65898 - DNA, 75 bp, synthetic construct
  source 1..75: mol_type = other DNA
tggaaggtgcgctggctgttgttgctgttgtgggtgtttactgcctggttgtgtttttgatggagcgcctgggga

SEQ ID NO: 65899 - DNA, 75 bp, synthetic construct
  source 1..75: mol_type = other DNA
ctgcagggcatgacggttccggattatacggtgaaggtgagaaagtggttttgtgtgatgtgtgacgaagattat

SEQ ID NO: 65900 - DNA, 75 bp, synthetic construct
  source 1..75: mol_type = other DNA
cagaacaacctggcgtacaccaaactgatctccgctgatggtaaaccggttagtccgaccgaagaaaacttcgct

SEQ ID NO: 65901 - DNA, 75 bp, synthetic construct
  source 1..75: mol_type = other DNA
gccggattggtgggcgtagaccgaagtttagcgacgagcagtggcaacagatgggagcgctcatagcggcaggga

SEQ ID NO: 65902 - DNA, 75 bp, synthetic construct
  source 1..75: mol_type = other DNA
ctggaacgcggtgatgacactggctttcagcaggtgctggaacgtgctgactatctggcgaaggaacataccaaa

SEQ ID NO: 65903 - DNA, 75 bp, synthetic construct
  source 1..75: mol_type = other DNA
gcgctatagagcgcatggtagaagcttatggattcaaaactcgacaggcgttgtgcgatcatttaggaatctcta

SEQ ID NO: 65904 - DNA, 75 bp, synthetic construct
  source 1..75: mol_type = other DNA
agctacatccttctctttatgaacggatttatattagttttgctgacaagattgagataaattcggccaatgaag

SEQ ID NO: 65905 - DNA, 75 bp, synthetic construct
  source 1..75: mol_type = other DNA
ccatccgttttcctgatgatccggagattttttcgcagacagaggcgcagcaactggtggcggaagagctggtgg

SEQ ID NO: 65906 - DNA, 75 bp, synthetic construct
  source 1..75: mol_type = other DNA
gtaatccagtgcgcccttgaaacgggcacctcgcttaattggctcacaaccggacatggttcaaagcaaacttca

SEQ ID NO: 65907 - DNA, 75 bp, synthetic construct
  source 1..75: mol_type = other DNA
tagagcgaatcgttttggcttatggatttaagacaagacaagctttagctgatcatattggtgtatcaaaaagta

SEQ ID NO: 65908 - DNA, 75 bp, synthetic construct
  source 1..75: mol_type = other DNA
ggtatcgcaggatcggggctgctggcccgcgtgctgatctcaaagtatgcagagcacaccccgctgtcccgccag

SEQ ID NO: 65909 - DNA, 75 bp, synthetic construct
  source 1..75: mol_type = other DNA
atggtgtcagcgaaaaacgaaaccgctgttgaaatccctggaaagctggttgcggaaaagatgaagaccctgtcg

SEQ ID NO: 65910 - DNA, 75 bp, synthetic construct
  source 1..75: mol_type = other DNA
tcttgcggggttcagtggtgtactgcaggcggatgcatacgccgggttcaacgagctgtaccgggatggccggat

SEQ ID NO: 65911 - DNA, 75 bp, synthetic construct
  source 1..75: mol_type = other DNA
ttaaatcatgctaatcatatggcaattcatgatccactaacgaatacatacaatagaagatactttattgactca

SEQ ID NO: 65912 - DNA, 75 bp, synthetic construct
  source 1..75: mol_type = other DNA
ggcatctcggccagaacttctacagtaaaagccgcgaagctgaacatcaggcttttcttgactggctgctggaga

SEQ ID NO: 65913 - DNA, 75 bp, synthetic construct
  source 1..75: mol_type = other DNA
tcatgttcgggcaggcactggctgacgcgctgatgctgccgcttaatgcgttcaacaaactgcgcagcggtattg

SEQ ID NO: 65914 - DNA, 75 bp, synthetic construct
  source 1..75: mol_type = other DNA
aaaccgttcatgcaatcctacctggtggtctttatcggctacctgacgatgtacctgattcgcaagaactttaac

SEQ ID NO: 65915 - DNA, 75 bp, synthetic construct
  source 1..75: mol_type = other DNA
tgttctctccatgacgatgaacaaaaccgccgccgattttgacggcatgagcgatgcgctgacctatgccgcacc

SEQ ID NO: 65916 - DNA, 75 bp, synthetic construct
  source 1..75: mol_type = other DNA
gcgtaaacgactcattgaccgattcaccggcagcgcggcagagagcgccgatcgattgttgttacgctggtggca

SEQ ID NO: 65917 - DNA, 75 bp, synthetic construct
  source 1..75: mol_type = other DNA
gtggggtgtttttgtgtgaggtgggttccgataccgtcaaggaaatgctgtatgcgcgttttgccctgccggtgg

SEQ ID NO: 65918 - DNA, 75 bp, synthetic construct
  source 1..75: mol_type = other DNA
atgaccagatggtcgacatggcatttatcactcaactgaccggcctgaccgataaatggttttacaagctcatca

SEQ ID NO: 65919 - DNA, 75 bp, synthetic construct
  source 1..75: mol_type = other DNA
aagctggtgaacatatcggcatatgttcagtctgttctgcccatccgttggttatcgaagcggcgctggcatttg

SEQ ID NO: 65920 - DNA, 75 bp, synthetic construct
  source 1..75: mol_type = other DNA
acggttgtcgatctcagcgggcagatcctctgcccaggttttattgatcaacacgtccatttgattggcggtggc

SEQ ID NO: 65921 - DNA, 75 bp, synthetic construct
  source 1..75: mol_type = other DNA
atccccgcgccggaaattgaccccgtgctgaaagccttcgggcgacacatagcccggagttttcaccgggggcgt

SEQ ID NO: 65922 - DNA, 75 bp, synthetic construct
  source 1..75: mol_type = other DNA
tccgcctctgtttacagctatctggcgaatgatctgcacgagcttcaacagctcatccagcagcaaaacaaacac

SEQ ID NO: 65923 - DNA, 75 bp, synthetic construct
  source 1..75: mol_type = other DNA
aagccctgactcatagcccgtggggaacgtataccgttgcgttcaccattccgctggcgatttttatgggaatct

SEQ ID NO: 65924 - DNA, 75 bp, synthetic construct
  source 1..75: mol_type = other DNA
caccgccagcacggtagcaatagcgggcataattggttgggtcggcctggtcgttccgcacattgcccgcttgtt

SEQ ID NO: 65925 - DNA, 75 bp, synthetic construct
  source 1..75: mol_type = other DNA
tcacgtggaggcgacgattcggaacgtgccatgcctgaaagacctttccccatggctgggtcgtaaacatcgtga

SEQ ID NO: 65926 - DNA, 75 bp, synthetic construct
  source 1..75: mol_type = other DNA
aacatcattcatgacgaaaaaatggtagatcaaacggcttgtattcttcatgagcttagaagaatcgctatagaa

SEQ ID NO: 65927 - DNA, 75 bp, synthetic construct
  source 1..75: mol_type = other DNA
tgaatcactggaatgcgctgaacgagttctgtcgtgacggctgggtggaaatagacaacaacatcggtgaaaacg

SEQ ID NO: 65928 - DNA, 75 bp, synthetic construct
  source 1..75: mol_type = other DNA
ctggcttgatgcactgaaggatccgaatggcgtcaagacgttcattaacaccacgctgggggagccttatgaaga

SEQ ID NO: 65929 - DNA, 75 bp, synthetic construct
  source 1..75: mol_type = other DNA
agagcttgttaagtttcgccttgccgcaggcaaaatgattgaagacggttcatatgtcttcgattcatcatttct

SEQ ID NO: 65930 - DNA, 75 bp, synthetic construct
  source 1..75: mol_type = other DNA
taactacggtgtagcatacgacatcggtgcgtggactgacgtcctgccagaattcggtggtgatacctggaccca

SEQ ID NO: 65931 - DNA, 75 bp, synthetic construct
  source 1..75: mol_type = other DNA
atgaatccgtctgatgccattgaggcaattgaaaaaccactttcttctcttccttactcactttcccgtcacatc

SEQ ID NO: 65932 - DNA, 75 bp, synthetic construct
  source 1..75: mol_type = other DNA
tcactctgtaatgcactgtttcagggggaggtcaccccggtcagtgatgttcacgctggcacccgggaagtgcgg

SEQ ID NO: 65933 - DNA, 75 bp, synthetic construct
  source 1..75: mol_type = other DNA
gcgatgatgatgctggtttacgggatatgctgaagcgtgctgactatctcgcgaaagagtacaccaaagtcaacg

SEQ ID NO: 65934 - DNA, 75 bp, synthetic construct
  source 1..75: mol_type = other DNA
tggggcgcaatgcgcaatttatgctcgatgtaatgcgcgaaaccgggatcaacgtggtggcctgtactggttatt

SEQ ID NO: 65935 - DNA, 75 bp, synthetic construct
  source 1..75: mol_type = other DNA
gttttgaccaggtggcaaagcgaacgcctgttactgccggattcttgctacagacgtgcaaacaggcgcttaagt

SEQ ID NO: 65936 - DNA, 75 bp, synthetic construct
  source 1..75: mol_type = other DNA
ataaacagtgatcaccgcccaatcactcttcctgttgaagaagttgataaaatgcattttgtttcagctattgtg

SEQ ID NO: 65937 - DNA, 75 bp, synthetic construct
  source 1..75: mol_type = other DNA
gcaggagctggacgccaggtatcaccggaacgcctgaagctgggaaattatcctgatctgagcctgaaagcagcc

SEQ ID NO: 65938 - DNA, 75 bp, synthetic construct
  source 1..75: mol_type = other DNA
ttatgagttgtgcgccacagtacaggaagcgctaaaacccgttacggtgaaggaggcgattaactactggctgga

SEQ ID NO: 65939 - DNA, 75 bp, synthetic construct
  source 1..75: mol_type = other DNA
gtcgcccaagcgccagagaagaatggataaataaacataatgccgagattgctaaaagtcgcgaagactttatca

SEQ ID NO: 65940 - DNA, 75 bp, synthetic construct
  source 1..75: mol_type = other DNA
atggcccgttcagctaaaccccgtaaacgaaaaccttccccacaaagaagcaaacttccccgctatgttgtgaaa

SEQ ID NO: 65941 - DNA, 75 bp, synthetic construct
  source 1..75: mol_type = other DNA
ctccacggacaataccgaagcggtcatggcggaagtcaaacgcaaatggggcgaccgctttgttgccgtcacgca

SEQ ID NO: 65942 - DNA, 75 bp, synthetic construct
  source 1..75: mol_type = other DNA
ggataatagccagcttgcctataagctgcgcggcatacaaatttcatccggtaatgcgacctcatttgtggccat

SEQ ID NO: 65943 - DNA, 75 bp, synthetic construct
  source 1..75: mol_type = other DNA
gtgggtggcgtacagcagcggccattcttctgatggccctgttgggggcctttgtccggcaccagttacggcatt

SEQ ID NO: 65944 - DNA, 75 bp, synthetic construct
  source 1..75: mol_type = other DNA
gcacagaacgcgcaacacaaagactggcattgtactgaagagatgatggaactgacccgtgatggcgaagccctg

SEQ ID NO: 65945 - DNA, 75 bp, synthetic construct
  source 1..75: mol_type = other DNA
atggatatacaaaacattcagttcgctgagccgactgtaattactgcctcggtggtccctgacgagttacgcatc

SEQ ID NO: 65946 - DNA, 75 bp, synthetic construct
  source 1..75: mol_type = other DNA
gcgaggacaacttcagcgtaactatgtctggcgctttctggaactttgtaatgcaggactgtcagttgaggatat

SEQ ID NO: 65947 - DNA, 75 bp, synthetic construct
  source 1..75: mol_type = other DNA
gaagtcattggcaataacattgatatgctgattccgcgggatttgcgtcctgcgcatcctgaatacattcgtcat

SEQ ID NO: 65948 - DNA, 75 bp, synthetic construct
  source 1..75: mol_type = other DNA
ttgccaactattgatacggttcctgatgaggttgttgtttcaggatatgtttttgaggttcaaacaggtcaaaat

SEQ ID NO: 65949 - DNA, 75 bp, synthetic construct
  source 1..75: mol_type = other DNA
agattgaacagcagccaaggtatcacgacagcactattgatgatccggaggagatggacgcgcccgaggtttatc

SEQ ID NO: 65950 - DNA, 75 bp, synthetic construct
  source 1..75: mol_type = other DNA
ctaacgagccacagttgattatcaccgctacagctgtacccgatgaacaacgtatcggcttctggccacaacact

SEQ ID NO: 65951 - DNA, 75 bp, synthetic construct
  source 1..75: mol_type = other DNA
ccctttcagataccgaaaatcccaacgccctcaccactacattattgtccgatgagcagcgtatcgacttctggc

SEQ ID NO: 65952 - DNA, 75 bp, synthetic construct
  source 1..75: mol_type = other DNA
gctgttcaacccgatgaatggtaacggcgcggaggtgagcgcagaggctgcgggcatagcggcctgcctgatggc

SEQ ID NO: 65953 - DNA, 75 bp, synthetic construct
  source 1..75: mol_type = other DNA
gtctgggaaaatcatgaaattcatattgtcgggctgaatattgatattactcatccgctaatgtgtgagttcctc

SEQ ID NO: 65954 - DNA, 75 bp, synthetic construct
  source 1..75: mol_type = other DNA
tgccggaaatctgcgaggctccacacctctctgatttccccctttattcatcactgtgctccggatttaatgttg

SEQ ID NO: 65955 - DNA, 75 bp, synthetic construct
  source 1..75: mol_type = other DNA
atgcagaatattcatgaagaaagcctgaacgagtcggttaaatcagagcagtcaccgcgggtggtgctctgggaa

SEQ ID NO: 65956 - DNA, 75 bp, synthetic construct
  source 1..75: mol_type = other DNA
tccgctatgtccttgacgtcatagccgactggccgataaaccgggtctgtgaactgctcccctggcgcgtagcac

SEQ ID NO: 65957 - DNA, 75 bp, synthetic construct
  source 1..75: mol_type = other DNA
gaagagctggatgcagatacctggcgggccacactgcatattgaggtgtttttaccagcacaggtaccggattcg

SEQ ID NO: 65958 - DNA, 75 bp, synthetic construct
  source 1..75: mol_type = other DNA
ccgcacctacagcagttaccggacaaaaacgcccgcgccggtggggagcctcggccccggctggaaaatgcctgc

SEQ ID NO: 65959 - DNA, 75 bp, synthetic construct
  source 1..75: mol_type = other DNA
ttccacattgtagaacagcaagttgacggaacaagttactatatcaaggatggggaatggcctattgatactggg

SEQ ID NO: 65960 - DNA, 75 bp, synthetic construct
  source 1..75: mol_type = other DNA
tgctggaattttgaacctgatgccggaaaacagctaaattcgtatctcgccagtgagggaattctcaggcaataa

SEQ ID NO: 65961 - DNA, 75 bp, synthetic construct
  source 1..75: mol_type = other DNA
ttgaaatcatgttcgaaaactacgttgaaggctttgaggccgcctgcgtagtttcccgtaacgctaaaaaattcc

SEQ ID NO: 65962 - DNA, 75 bp, synthetic construct
  source 1..75: mol_type = other DNA
gttgattaactggaactgtgcagcctcgaaatccccaccgaagacccctgatgaaaagcaggatacgccggatat

SEQ ID NO: 65963 - DNA, 75 bp, synthetic construct
  source 1..75: mol_type = other DNA
ccagctgatgagcgacacctgtcctgaaatcaccctggacaatgtactggcaacattccgccatctgaatgccag

SEQ ID NO: 65964 - DNA, 75 bp, synthetic construct
  source 1..75: mol_type = other DNA
atgaaacgagattacggtagtgtcggtaccatagcgctcagagcaagtgctctacttcaggccatgagtcgggat

SEQ ID NO: 65965 - DNA, 75 bp, synthetic construct
  source 1..75: mol_type = other DNA
aagaaaggctgtattgacgccattataccagcttataacgaaggcccgtgtctggcgcagtcactggataatctg

SEQ ID NO: 65966 - DNA, 75 bp, synthetic construct
  source 1..75: mol_type = other DNA
gcgaccgctttgttgccgtcacgcaaaaaaataccggtaaaggtggtgcgctgatgaatggcctcaattacgcca

SEQ ID NO: 65967 - DNA, 75 bp, synthetic construct
  source 1..75: mol_type = other DNA
gaccattcttgccggtatcagcgccggcggcatgttctgcccggaatgtggcaccgttcactggccggatagtgt

SEQ ID NO: 65968 - DNA, 75 bp, synthetic construct
  source 1..75: mol_type = other DNA
atataaccaccgatagtttttccgatggaggactttatttagatacagataaggcaattgagcatgctctgcatt

SEQ ID NO: 65969 - DNA, 75 bp, synthetic construct
  source 1..75: mol_type = other DNA
ttatatcagttacatggttgatttatttcttcaatttcgatccgttaaatggttttccaattgataagtctgaat

SEQ ID NO: 65970 - DNA, 75 bp, synthetic construct
  source 1..75: mol_type = other DNA
tctttgtggatgcgggaaacaaaaagctggtcttctggtttgttcgtgtcaatgacgaagggtatccggaaatag

SEQ ID NO: 65971 - DNA, 75 bp, synthetic construct
  source 1..75: mol_type = other DNA
tatgggctacaagttccagttcatcaccctggcaggtatccacagcatgtggttcaacatgtttgacctggcaaa

SEQ ID NO: 65972 - DNA, 75 bp, synthetic construct
  source 1..75: mol_type = other DNA
aacatcagggttgatgtttatcaggggcaaaatggtcaatcaatcactcttgaattactgaatgcaaagattgga

SEQ ID NO: 65973 - DNA, 75 bp, synthetic construct
  source 1..75: mol_type = other DNA
attctttttctggccgatctccattactctcgttttgttcctttaagcctgatttctgacgcgattgctcttggc

SEQ ID NO: 65974 - DNA, 75 bp, synthetic construct
  source 1..75: mol_type = other DNA
tatacgctgcagcaccgcacatatcacggaaacagacaacgcctggctgtactcgctgtcacaccagactaatga

SEQ ID NO: 65975 - DNA, 75 bp, synthetic construct
  source 1..75: mol_type = other DNA
aagagcagcgcgataaagccacatccatcatcgctgatatgcagaagcgtcaacgtgatgtagcagaactcgacg

SEQ ID NO: 65976 - DNA, 75 bp, synthetic construct
  source 1..75: mol_type = other DNA
caatttcgaccgcctgaccgtctggcaggacggcaagaaagtcgactttacgctggaggcatacagtattcccgg

SEQ ID NO: 65977 - DNA, 75 bp, synthetic construct
  source 1..75: mol_type = other DNA
ttactggcgataaagcggaagaggcttacaacgattatatctcagcgatcgcctatgcacgggcggaagaagaat

SEQ ID NO: 65978 - DNA, 75 bp, synthetic construct
  source 1..75: mol_type = other DNA
gatatcgacagggttaatcaccatattgttaatgtggaaaagattaactttagattgccagaacggagggagtag

SEQ ID NO: 65979 - DNA, 75 bp, synthetic construct
  source 1..75: mol_type = other DNA
ggtaagagtgagcagttggtggtgaactttattgcggatacgctcactgcgcaggttaatcttaacgttaccgag

SEQ ID NO: 65980 - DNA, 75 bp, synthetic construct
  source 1..75: mol_type = other DNA
ggtaactcaacttgtgttccctatggctgcggcagcacaaggtgtggtaaacgccgcaacccaacaaccagttcc

SEQ ID NO: 65981 - DNA, 75 bp, synthetic construct
  source 1..75: mol_type = other DNA
tactacaacaagacgatgttcgatcgggccgggatccaacagccgccgcagacctgggccgagttgctggccgat

SEQ ID NO: 65982 - DNA, 75 bp, synthetic construct
  source 1..75: mol_type = other DNA
cagtcggttatctgctgcctgctggctggcttgctgatgtggatccccgactggtttggcgtgatgaatgtctgg

SEQ ID NO: 65983 - DNA, 75 bp, synthetic construct
  source 1..75: mol_type = other DNA
ttggtaatacatcgggcgtcattcccggcaaaacaatcacggaacgacaggcagcagaagggctgatttccaacg

SEQ ID NO: 65984 - DNA, 75 bp, synthetic construct
  source 1..75: mol_type = other DNA
cggatgcatgccgacagttgccgcgctgggtttatgtaaaaggtgtgtttaatcaggggctggataaccgccgtg

SEQ ID NO: 65985 - DNA, 75 bp, synthetic construct
  source 1..75: mol_type = other DNA
atcccggtgcagagggatttctgaatcgcctgggggtacagacacgggatgccagcggtaacatgcgtgacatgg

SEQ ID NO: 65986 - DNA, 75 bp, synthetic construct
  source 1..75: mol_type = other DNA
acctttggtaagttctcgccgttcaccgctggcaacgtggttaatcacggctttgaaactgacaagcgcaagttg

SEQ ID NO: 65987 - DNA, 75 bp, synthetic construct
  source 1..75: mol_type = other DNA
atcgccagacaaaaaagaaagaatggacaaactacagcgccgttgtatttgccaagccgggagcgcaagcggatt

SEQ ID NO: 65988 - DNA, 75 bp, synthetic construct
  source 1..75: mol_type = other DNA
cttgctcgtcagttaatgttgtacgccgggcgaggaataaacagtgtggaaaaaattatctctacctgggcacct

SEQ ID NO: 65989 - DNA, 75 bp, synthetic construct
  source 1..75: mol_type = other DNA
atgaaactggccctgacgttggaagccgacagcattaatgtgcaggcactgagcatggggcgaattgtcgttgat

SEQ ID NO: 65990 - DNA, 75 bp, synthetic construct
  source 1..75: mol_type = other DNA
tccgcctctgttttcagctatctggcagatgatctgcgcgagcttcaaaagctcatccagcagcaaaacaaactc

SEQ ID NO: 65991 - DNA, 75 bp, synthetic construct
  source 1..75: mol_type = other DNA
agctgtatgagtttcgcagacgtcagcagatgctggggtatgcgtcgctggctgaggttccggcggaacagctgg

SEQ ID NO: 65992 - DNA, 75 bp, synthetic construct
  source 1..75: mol_type = other DNA
cggcagcgtcacgcagagtcagtttgatgcggtgggcaggcttaaggcacagacggatgccgcaggccggacaac

SEQ ID NO: 65993 - DNA, 75 bp, synthetic construct
  source 1..75: mol_type = other DNA
actcgctgtcgcatcagaccagtgacgttggtgaatcggaatggattcatttcacaggtagcggatatctgttac

SEQ ID NO: 65994 - DNA, 75 bp, synthetic construct
  source 1..75: mol_type = other DNA
atggaacaaacaagttacagcaaactatcacagcgtgatgttgatcgcgcagaaacagatttacttatcaacctg

SEQ ID NO: 65995 - DNA, 75 bp, synthetic construct
  source 1..75: mol_type = other DNA
gccacgcggcgaactggcggtggtgtatgaccgtagtggcaaacaggtgcgcagctttacttacgatgataaata

SEQ ID NO: 65996 - DNA, 75 bp, synthetic construct
  source 1..75: mol_type = other DNA
gaatctgaccgagcctcaacagactgcacgccaccatttgctgccctgaccggcatacgctgcagtaccgcgcat

SEQ ID NO: 65997 - DNA, 75 bp, synthetic construct
  source 1..75: mol_type = other DNA
ttcagagtgaaaccatcaatcaaaatcaacgctattgatttgaacattcaacagcagctttctaattttgttgca

SEQ ID NO: 65998 - DNA, 75 bp, synthetic construct
  source 1..75: mol_type = other DNA
accaggactatgacgccacggcgtccggtgtgaagcggggcgaggaactggcggaagccagcggtgatttgtggc

SEQ ID NO: 65999 - DNA, 75 bp, synthetic construct
  source 1..75: mol_type = other DNA
gtattgacccgtcttctgaaagaaggacgcatcaaactggccaagcacggtaagtttctggaaggaagtgttgac

SEQ ID NO: 66000 - DNA, 75 bp, synthetic construct
  source 1..75: mol_type = other DNA
ccgccacatgacagggctgaatatcattcaggagattcagggagatattttcgcggcggcagcaacttacgacgg

SEQ ID NO: 66001 - DNA, 75 bp, synthetic construct
  source 1..75: mol_type = other DNA
gtggcctgtggtgcgcttagtctggggctgaatcattaccgcgataacgccatcacctacaaagcgcagcgcgat

SEQ ID NO: 66002 - DNA, 75 bp, synthetic construct
  source 1..75: mol_type = other DNA
atgcgcacgactggcatgcaggccttgcgcctgcgtatctggcggcgcgcgggcgtccggcgaagtcggtgttta

SEQ ID NO: 66003 - DNA, 75 bp, synthetic construct
  source 1..75: mol_type = other DNA
tatttcaccctcagagagcgaatcgtcacagtgacgaagcaggtcggctacttgcaggactacatcaaagagcag

SEQ ID NO: 66004 - DNA, 75 bp, synthetic construct
  source 1..75: mol_type = other DNA
tatacgctgcagcacctcacatatcacggaaacagacaacgcttggctgtactcgctgtcgcatcagacgaatga

SEQ ID NO: 66005 - DNA, 75 bp, synthetic construct
  source 1..75: mol_type = other DNA
cacgacctggcagcaccgatcctggcgggaattattaccgcagcgattgtcagctggtggcgtaaccggaagtaa

SEQ ID NO: 66006 - DNA, 75 bp, synthetic construct
  source 1..75: mol_type = other DNA
atacacgaaggagttagctgatgcgaaagctgaaaatgaaactcttcgcgctgacgttgccgctggtcgtaagcg

SEQ ID NO: 66007 - DNA, 75 bp, synthetic construct
  source 1..75: mol_type = other DNA
gcgggccccagcgcggtgccgttcgccgcggaactggatgcagttgtgctgctggtggtcaatgccgcccaggtg

SEQ ID NO: 66008 - DNA, 75 bp, synthetic construct
  source 1..75: mol_type = other DNA
ctaacaaaaggtattacaggagagttaaaagggtttgttagttccaggacgaataaagaattttcggctaaagtt

SEQ ID NO: 66009 - DNA, 75 bp, synthetic construct
  source 1..75: mol_type = other DNA
tggacgtattaggattgagtattctttacctgaaatcaatttcgagtccattactggggactggcgttctctgcc

SEQ ID NO: 66010 - DNA, 75 bp, synthetic construct
  source 1..75: mol_type = other DNA
atgtattcatctgccacggtatgtttcacggtcagcgccgggcagaaatatcgcttttactcaattattatgaaa

SEQ ID NO: 66011 - DNA, 75 bp, synthetic construct
  source 1..75: mol_type = other DNA
gttgtcgttaatgagaagaaaacaacaccgccgccattatttaccgaagcctccttgcttgctgcgcttgttcgc

SEQ ID NO: 66012 - DNA, 75 bp, synthetic construct
  source 1..75: mol_type = other DNA
tattttcaattatcagtcagggatacaggtattgatacctacgtgttgattgtgggggagtctgtacgtgtcgac

SEQ ID NO: 66013 - DNA, 75 bp, synthetic construct
  source 1..75: mol_type = other DNA
gccgcaagggcggcagctccagttcacgcaccccgactgaacaaccagacgatctccagtccgtagcgaaagcca

SEQ ID NO: 66014 - DNA, 75 bp, synthetic construct
  source 1..75: mol_type = other DNA
gcaaatgggtttgaaaaacacattcgaggccgttgctcgcgaatggcatcagtcaaaagccgatcgctggtcatt

SEQ ID NO: 66015 - DNA, 75 bp, synthetic construct
  source 1..75: mol_type = other DNA
gcagagaaactacgtggggagcgtcagtattgccggcaggtgacgacatttgtacggacatccccctttgcagta

SEQ ID NO: 66016 - DNA, 75 bp, synthetic construct
  source 1..75: mol_type = other DNA
ggagaggaatgacgcctataccgtgttacgtgattttgcggcgatattccggggcatgacgtactggggtggcga

SEQ ID NO: 66017 - DNA, 75 bp, synthetic construct
  source 1..75: mol_type = other DNA
caggcctggtggttccgctggatgccgccaatgtcgataccgatgcaatcatcccgaaacagtttttgcagaaag

SEQ ID NO: 66018 - DNA, 75 bp, synthetic construct
  source 1..75: mol_type = other DNA
ggaaactgattggcgcggagtgctggtatgacgtggtggataacggcaccacggatttacgtcaggggcgtgtgc

SEQ ID NO: 66019 - DNA, 75 bp, synthetic construct
  source 1..75: mol_type = other DNA
aactcatcggtgcggagtgctggtatgacgtgctggacaacggcacgacggatttgcgtcaggggcgcgtgcgca

SEQ ID NO: 66020 - DNA, 75 bp, synthetic construct
  source 1..75: mol_type = other DNA
ggcgggttttatcgggcgttttagttcggcattttctgcactggctgaaacgttggataaccagcaagaaccgga

SEQ ID NO: 66021 - DNA, 75 bp, synthetic construct
  source 1..75: mol_type = other DNA
tagggattaccagacgctatttgcactcttttcctttacgttcaatttgttacgtgattgatggtttggactggt

SEQ ID NO: 66022 - DNA, 75 bp, synthetic construct
  source 1..75: mol_type = other DNA
tgctggcaacggtttgttacctggcggtggggccgcttttcgctacgccgcgtacagctaccgtttcttttgaag

SEQ ID NO: 66023 - DNA, 75 bp, synthetic construct
  source 1..75: mol_type = other DNA
aaggcgggagctccagttcccgaactcccaccgaacagcctgatgatctgcaatctgtagcgaaggcaaagatcc

SEQ ID NO: 66024 - DNA, 75 bp, synthetic construct
  source 1..75: mol_type = other DNA
agcgttatatggaggtattgcttgttgtcttgggaaaagaaacagacgtaacggcaatcaccaaacaagatatta

SEQ ID NO: 66025 - DNA, 75 bp, synthetic construct
  source 1..75: mol_type = other DNA
taaagaagttttgcagcttcaaccaccagccaaaccggaaaaggtgctaacacttgctgatgcgtgggctatgta

SEQ ID NO: 66026 - DNA, 75 bp, synthetic construct
  source 1..75: mol_type = other DNA
tcagaaaatcagaacaagttggtgctctgcagtcatcgctgactattgcccttcatacccgatatgcgatccgtc

SEQ ID NO: 66027 - DNA, 75 bp, synthetic construct
  source 1..75: mol_type = other DNA
agcagcgcgttgaagaagaacgccagcgccatatccgtgctgcccgtaccaaaacgccgggcgtgtcccgcgtac

SEQ ID NO: 66028 - DNA, 75 bp, synthetic construct
  source 1..75: mol_type = other DNA
gcgccatatctgtgctgcccgtgctaaaacaccgggcgtgtcccgcgtgctttgcattgagtgtgaagcgccaat

SEQ ID NO: 66029 - DNA, 75 bp, synthetic construct
  source 1..75: mol_type = other DNA
gcgccatatccgtgctgcccgtgccaaaacaccgggcgtgtctcgcgtgctttgtattgaatgtgaagcgccaat

SEQ ID NO: 66030 - DNA, 75 bp, synthetic construct
  source 1..75: mol_type = other DNA
aaaattatcaactgaaaattcttttgagtcagttagcagagaatggcatgcagcaaaagcagatcgctggactat

SEQ ID NO: 66031 - DNA, 75 bp, synthetic construct
  source 1..75: mol_type = other DNA
aatcaaaaaagaataaaactcagtcttgggggactcagcccggtggaataccggactgagtatcaaaaaaccggt

SEQ ID NO: 66032 - DNA, 75 bp, synthetic construct
  source 1..75: mol_type = other DNA
tgctttagatagttatacaggaagccgacttgttcagattgccacaaaattattaatggttacgggggttagaac

SEQ ID NO: 66033 - DNA, 75 bp, synthetic construct
  source 1..75: mol_type = other DNA
ccgggtgtgcagctttgcattacctgccaggaaattgcagagctgaaaggcaaacattacaacggaggtgctgta

SEQ ID NO: 66034 - DNA, 75 bp, synthetic construct
  source 1..75: mol_type = other DNA
aattcccttatgtaaatgccaacgtcattgacgcaaaaaccaaacagcccatgtttacaccgtatttaattaaag

SEQ ID NO: 66035 - DNA, 75 bp, synthetic construct
  source 1..75: mol_type = other DNA
atcacggctcaccacaaacttatgcagcgggttctctgggacgttttggtaacgagatgagcggttggtttgacc

SEQ ID NO: 66036 - DNA, 75 bp, synthetic construct
  source 1..75: mol_type = other DNA
taaatggatcgcagcaagttgccgttattgaaagtaaaggcgacaaaaccactatcgaaagcgtgaccctgaaag

SEQ ID NO: 66037 - DNA, 75 bp, synthetic construct
  source 1..75: mol_type = other DNA
tatccgtgatgtggcacagccgtgtgcggaggtgctggttcgcctggggaaggcggagtacatcacagcgcgacg

SEQ ID NO: 66038 - DNA, 75 bp, synthetic construct
  source 1..75: mol_type = other DNA
caatcggcgtcgggatgggaccgaccaaaacgctggctaaaagcgcgcaatgggcttccaaagagtggccacagt

SEQ ID NO: 66039 - DNA, 75 bp, synthetic construct
  source 1..75: mol_type = other DNA
taggagacttgctgggcgggccgctcatgagcagggaaagccgcgtcattgccgaactgttgctaaccgatcccg

SEQ ID NO: 66040 - DNA, 75 bp, synthetic construct
  source 1..75: mol_type = other DNA
ccgcgaaaactggtaaagcaacgcgccagggtgaagcgtgcgacggtcaatagacctcgtgcacttatccgggta

SEQ ID NO: 66041 - DNA, 75 bp, synthetic construct
  source 1..75: mol_type = other DNA
atgaaggggcttgagaatgccatccgcaatctgaacagccttgatacccgtatggtgccacaggccagcgcatgg

SEQ ID NO: 66042 - DNA, 75 bp, synthetic construct
  source 1..75: mol_type = other DNA
gagctctggagaaaatgcgcaaggtccgccagcgctgtggtgaggtgttccgctatgcaattgttactggccggg

SEQ ID NO: 66043 - DNA, 75 bp, synthetic construct
  source 1..75: mol_type = other DNA
cttctcatctgacaaccaccaacagggaatctaccaagccatgaacgaagaacagttcagccagttaatgggcgc

SEQ ID NO: 66044 - DNA, 75 bp, synthetic construct
  source 1..75: mol_type = other DNA
tgaaaaagcgcgccaggctaatggcaatgaaccctatatcgaaattatttgcatggattcagaagctgaaattca

SEQ ID NO: 66045 - DNA, 75 bp, synthetic construct
  source 1..75: mol_type = other DNA
cagaccgcactgctctacctgatgacccgcgaacaacgggcggtcaggcaccagggcgagagcgatatggcagga

SEQ ID NO: 66046 - DNA, 75 bp, synthetic construct
  source 1..75: mol_type = other DNA
gtgggcagatcaccgaccagaacacagacggaaatatcacgctcagcggcaccacagcacaacctgccagcatcg

SEQ ID NO: 66047 - DNA, 75 bp, synthetic construct
  source 1..75: mol_type = other DNA
aggggccaggcgtggtacatggatatgatgtgtgaagcgcgtggcgcgatggatctaaaaactcaatcagcactg

SEQ ID NO: 66048 - DNA, 75 bp, synthetic construct
  source 1..75: mol_type = other DNA
acgtcaggttaatggcgatgaaccctatatcgaaattatctgcatggattcagaagctgaaattcaaaaggcaga

SEQ ID NO: 66049 - DNA, 75 bp, synthetic construct
  source 1..75: mol_type = other DNA
tatttatccgctttattgatttccgcggtgagctgttgttgcgcgcatcagctattgatggagtggttccggtag

SEQ ID NO: 66050 - DNA, 75 bp, synthetic construct
  source 1..75: mol_type = other DNA
tgctggtggtctgtggtgcgcttagtctggggctgaatcattaccgcgataacgccataacctacaaagagcagc

SEQ ID NO: 66051 - DNA, 75 bp, synthetic construct
  source 1..75: mol_type = other DNA
atcggtatccagcctgacatcctgatttgtcgttcagatcgcgccgttccggcgaacgaacgtgcgaagattgca

SEQ ID NO: 66052 - DNA, 75 bp, synthetic construct
  source 1..75: mol_type = other DNA
agtctttaacgtctggggctaatgctgcttcggctacttcagatgttaatcaatctggagtgaattcagcgctgg

SEQ ID NO: 66053 - DNA, 75 bp, synthetic construct
  source 1..75: mol_type = other DNA
tggttcatctaatgacatgcaaaaattaaatgagttaatattttcagagccagatagcacattaacagttacgga

SEQ ID NO: 66054 - DNA, 75 bp, synthetic construct
  source 1..75: mol_type = other DNA
acggtgctgacggggggcttatggggcatttcctggggatgtgcaatgtggtttatctactgggggccgtcagga

SEQ ID NO: 66055 - DNA, 75 bp, synthetic construct
  source 1..75: mol_type = other DNA
accaattgggatcgaggttatccctgcgcatgtcactgaatatctgaacaaggtgctgattgaaaccgatcatgc

SEQ ID NO: 66056 - DNA, 75 bp, synthetic construct
  source 1..75: mol_type = other DNA
gggggcgggtgctctttggcatgacgcggcatctaatggataacgtagccgggcagtgtggcgcaacatggcaat

SEQ ID NO: 66057 - DNA, 75 bp, synthetic construct
  source 1..75: mol_type = other DNA
catcggcaacggcgtaaacgtccgcgctcttattaatccgaacatccgggttaacgggctcattcagctggatca

SEQ ID NO: 66058 - DNA, 75 bp, synthetic construct
  source 1..75: mol_type = other DNA
gactggaacaggaaaatactgactgtcacgaccactgcaacaccgcctgttgacctcacggcaccgcagggttca

SEQ ID NO: 66059 - DNA, 75 bp, synthetic construct
  source 1..75: mol_type = other DNA
tacacggtcgctgatgtaaaccgtgcgctgatgaaagactttgaagccaaaggcgcgaccgaaggcctgacgcct

SEQ ID NO: 66060 - DNA, 75 bp, synthetic construct
  source 1..75: mol_type = other DNA
cgcggcagatgtgggccagagtgatggccgcaactacgggctgattttcagcggagaaattcgctactcggtcac

SEQ ID NO: 66061 - DNA, 75 bp, synthetic construct
  source 1..75: mol_type = other DNA
ttctgagaccaagtctttacctacatcgggagtcagcaattcagtaggtgtaacggttggcggcggagttggggg

SEQ ID NO: 66062 - DNA, 75 bp, synthetic construct
  source 1..75: mol_type = other DNA
acacacctcgtgaggcgaaggataatctcaaatccacgcagatgatgagtgtgattgatgcgattggtgagggac

SEQ ID NO: 66063 - DNA, 75 bp, synthetic construct
  source 1..75: mol_type = other DNA
accagcgccgcgccattgaaacgctggctcagcactatggcgtgatgttcttctaccgcggacaggacccgatcg

SEQ ID NO: 66064 - DNA, 75 bp, synthetic construct
  source 1..75: mol_type = other DNA
ctgacgttgccgctggtcgtaagcgcctgcgtatcaacgccacctgtccaggtcccgtgcgtgaagccaccggca

SEQ ID NO: 66065 - DNA, 75 bp, synthetic construct
  source 1..75: mol_type = other DNA
ttcagcaccccttttcgtgaaataaccgaaacactgcttgttgataccgttgatactgaacgtcccggacatcac

SEQ ID NO: 66066 - DNA, 75 bp, synthetic construct
  source 1..75: mol_type = other DNA
gtttatccccgctggcgcggggaacacggcaacataacgaacaaaatcaacgtcaacctcggtttatccccgctg

SEQ ID NO: 66067 - DNA, 75 bp, synthetic construct
  source 1..75: mol_type = other DNA
cggctgccacacctgttcagttacctgtaaaaacgtctggaccagccgcgaaggcgtggaatacgcgtggttcaa

SEQ ID NO: 66068 - DNA, 75 bp, synthetic construct
  source 1..75: mol_type = other DNA
aaagaatcaatatcgttttgttgggtattccatgaccgatggctacgtcgaatatggcgatagctcactcccagt

SEQ ID NO: 66069 - DNA, 75 bp, synthetic construct
  source 1..75: mol_type = other DNA
agttattgcgtaacgaaagccccagggcgattgacttcaccatcacccacgggaaggggcgcaagggaatcatta

SEQ ID NO: 66070 - DNA, 75 bp, synthetic construct
  source 1..75: mol_type = other DNA
aagcacatcttcacaaacccgctttgccatgaaatccgtattcttcatcgtgcagttaaataccttccaccagca

SEQ ID NO: 66071 - DNA, 75 bp, synthetic construct
  source 1..75: mol_type = other DNA
actaccccggacgtttcaagggtgcccacgggcagaactttgcctgctggcagatggatggctggcgaaacaacg

SEQ ID NO: 66072 - DNA, 75 bp, synthetic construct
  source 1..75: mol_type = other DNA
tagcattggagctgtcgaaagaccgacgtattgaggatcttgaaagacaagttcgattccttgaaatgcggctta

SEQ ID NO: 66073 - DNA, 75 bp, synthetic construct
  source 1..75: mol_type = other DNA
gacacgaaaactgaaatctgcgggcatggactcagggcaatggcctgtagtgccctggtggagtcggatctctgg

SEQ ID NO: 66074 - DNA, 75 bp, synthetic construct
  source 1..75: mol_type = other DNA
acgtattgaggatcttgaaaggcaagttcgatttcttgaaacgcggcttatgtatctaaaaaagctgaaagcctt

SEQ ID NO: 66075 - DNA, 75 bp, synthetic construct
  source 1..75: mol_type = other DNA
gtaacctgcaacaatggcaaaactcgcttacactgtggcaaaaggcgctctctctggagccgcaaaataaggatt

SEQ ID NO: 66076 - DNA, 75 bp, synthetic construct
  source 1..75: mol_type = other DNA
atattatgcctgggtacaaaatcatctcaaagagcatcccgcagatcgcgttgttgggtttaataagatgcctgg

SEQ ID NO: 66077 - DNA, 75 bp, synthetic construct
  source 1..75: mol_type = other DNA
atgtccccgatattgatacgcttcgacgaatggcggcagagttaaacgtaccgttgaactattttttttgtgatg

SEQ ID NO: 66078 - DNA, 75 bp, synthetic construct
  source 1..75: mol_type = other DNA
ctggaaagtgagatcgcgaattaccagtatcgcgtcgggccgggggacgttcttaatgtcaccgtctgggatcac

SEQ ID NO: 66079 - DNA, 75 bp, synthetic construct
  source 1..75: mol_type = other DNA
atgtcttctattaatattttaaatatgcgttctgttttttcttctctttctgcacgccgtaaaaaagaacaggac

SEQ ID NO: 66080 - DNA, 75 bp, synthetic construct
  source 1..75: mol_type = other DNA
accttgagaactcctgaaggcggacttcgatacaaagctatgatcttacccagcaatagtggacacgcggctaag

SEQ ID NO: 66081 - DNA, 75 bp, synthetic construct
  source 1..75: mol_type = other DNA
catcgcagcctgaactctttccgctggcggttatggcccagcatagttgcctgctccccgcgacctccggattga

SEQ ID NO: 66082 - DNA, 75 bp, synthetic construct
  source 1..75: mol_type = other DNA
gcgatcacgttctgagcaacctcgacgcttacctgtaccaactctccgagaaagtgacggaaaacggcggacacg

SEQ ID NO: 66083 - DNA, 75 bp, synthetic construct
  source 1..75: mol_type = other DNA
ataactggacgccaacgaccagtatcagcgaccttcttgttgttgtgatgaagaaatctacagccggtatcagta

SEQ ID NO: 66084 - DNA, 75 bp, synthetic construct
  source 1..75: mol_type = other DNA
tttcgcatactgcttcgtggtatgactcttccgatcgaaataattcctggagcgtttctgcttcaggcgacaatg

SEQ ID NO: 66085 - DNA, 75 bp, synthetic construct
  source 1..75: mol_type = other DNA
cgcgatcctcgtctgctggtagtatgtggtccttgttccattcatgatccggaaactgctctggaatatgctcgt

SEQ ID NO: 66086 - DNA, 75 bp, synthetic construct
  source 1..75: mol_type = other DNA
cgggcattgcctatggcacctccgcaggcagtgctggctactggtttttacagctgctcgataaagtcacgccct

SEQ ID NO: 66087 - DNA, 75 bp, synthetic construct
  source 1..75: mol_type = other DNA
tgtttgcaccgggtaaagtgaatctggttgagcaactggaaagcctgtctgtcacgaaaattggccagccgctgg

SEQ ID NO: 66088 - DNA, 75 bp, synthetic construct
  source 1..75: mol_type = other DNA
gagcgataacccagcgcactatgcggatgccattcgttataatgctcgaacgcctctgcaaggttctttgctgcc

SEQ ID NO: 66089 - DNA, 75 bp, synthetic construct
  source 1..75: mol_type = other DNA
gttaaggctaataacgtcaaagtgaattatgaaacaatcatgattgcaccacaagaaagtcagaatgttagtgta

SEQ ID NO: 66090 - DNA, 75 bp, synthetic construct
  source 1..75: mol_type = other DNA
gtacgacgacagccatccggaagccctggctcgtaatacccagaaaattttccgttggctggataaagacacccc

SEQ ID NO: 66091 - DNA, 75 bp, synthetic construct
  source 1..75: mol_type = other DNA
catcagggatactctattctaatcccgctgaaacatcagcaagcattaaaagagaaatcacgccgactcagatag

SEQ ID NO: 66092 - DNA, 75 bp, synthetic construct
  source 1..75: mol_type = other DNA
tgtcgcagtggcgatcgctggtttcaaccagatgaatcgtggtggtccggcaggtaatgcagtggctgtacatta

SEQ ID NO: 66093 - DNA, 75 bp, synthetic construct
  source 1..75: mol_type = other DNA
aactggggatgacgttccctgaactgtacgacgacagccatccggaagccctggcccgtaatacccagaaaattt

SEQ ID NO: 66094 - DNA, 75 bp, synthetic construct
  source 1..75: mol_type = other DNA
ccaatagccatccggggctgtggaaagtcgggatgatggcgggcgcgcatgcggcgagctggtttatcaatggcg

SEQ ID NO: 66095 - DNA, 75 bp, synthetic construct
  source 1..75: mol_type = other DNA
ggcccgcgtgaggcggacaacgttgacggaccggaagagttccatctggtgattgtcgataacggtcgctcgcag

SEQ ID NO: 66096 - DNA, 75 bp, synthetic construct
  source 1..75: mol_type = other DNA
aaagaggatattcagaactacctgacacgtctgggtttcaatcgctggaataatggccagtatatgaaagcgtct

SEQ ID NO: 66097 - DNA, 75 bp, synthetic construct
  source 1..75: mol_type = other DNA
tggtgtttattcgctccagtgaactcagatatgcccgctggtcagaaattgatattgaaaatgccatgtggacca

SEQ ID NO: 66098 - DNA, 75 bp, synthetic construct
  source 1..75: mol_type = other DNA
gtcgaaaaccggacacgcctttattaaagaacgtatgcgcaaggaagacgccatctacggtggcgaaatgagcgc

SEQ ID NO: 66099 - DNA, 75 bp, synthetic construct
  source 1..75: mol_type = other DNA
tcgccgcacctgatgttgtggaagagctggattatgaaaccatcctgacagagcgaaaagcgacgcttgtctcgc

SEQ ID NO: 66100 - DNA, 75 bp, synthetic construct
  source 1..75: mol_type = other DNA
gaatgagcgtggccgggtcgaccggtgcgtatcagtttcatggccgcagcgctgacgggcgggtcgccgatattt

SEQ ID NO: 66101 - DNA, 75 bp, synthetic construct
  source 1..75: mol_type = other DNA
acagcgtcaccggaattaatcgcgaccgtcagccgggctctcaatgatgaaactgtgcgccccctggccgacaga

SEQ ID NO: 66102 - DNA, 75 bp, synthetic construct
  source 1..75: mol_type = other DNA
aactccgggaacggcgcggcgggtccggtggtggacgccatcgaagcccgctttaaagccctcggcgcaccggtg

SEQ ID NO: 66103 - DNA, 75 bp, synthetic construct
  source 1..75: mol_type = other DNA
gagaataacggcgcggcatccggggagctgctcgccgtggtgcgtaatgcgctgaacgatgaggatgtgaggccg

SEQ ID NO: 66104 - DNA, 75 bp, synthetic construct
  source 1..75: mol_type = other DNA
tgagcaagaggtgataacatttgaagtggtagccagagagtggcacgccagcaatcagaagtggtctgcatcgca

SEQ ID NO: 66105 - DNA, 75 bp, synthetic construct
  source 1..75: mol_type = other DNA
gttgttgcggacagtggtgaattacatctgcggggagataaaacagaacgctggaatgtgtccctgccagtgagt

SEQ ID NO: 66106 - DNA, 75 bp, synthetic construct
  source 1..75: mol_type = other DNA
acatggcattcgcctgactaaccacagtctctatctttacggtcactgtgccgaaggcgattgccgcgaagatga

SEQ ID NO: 66107 - DNA, 75 bp, synthetic construct
  source 1..75: mol_type = other DNA
ccacggcgatgagcgtgattgaaaacttaccgccaggaaacgcagaactgcgtcaggctattgctcgtcgctatg

SEQ ID NO: 66108 - DNA, 75 bp, synthetic construct
  source 1..75: mol_type = other DNA
cggcttgccgttatgctgaatttactggtttttattcgttccagtgaactcagatatgcccgctggtctgaaatt

SEQ ID NO: 66109 - DNA, 75 bp, synthetic construct
  source 1..75: mol_type = other DNA
atgaaaaaattaacctgctttaaagcctatgatattcgtggaaaattaggcgaagaactgaatgaagatattgcc

SEQ ID NO: 66110 - DNA, 75 bp, synthetic construct
  source 1..75: mol_type = other DNA
aagtattgggtgttaaagggcttaaatatccttctaaagaaaaaatgctctccgtcggtgagctggagtcagagg

SEQ ID NO: 66111 - DNA, 75 bp, synthetic construct
  source 1..75: mol_type = other DNA
gaccaggttgcggcaggccgtcagcaactcgaatgcggtgatgtgcttccccatgacatggtcgaatcctctgct

SEQ ID NO: 66112 - DNA, 75 bp, synthetic construct
  source 1..75: mol_type = other DNA
gacagcacctttgtgctgcgttctgactctacaggctctgataaggtggtagtgaaaaacaaacttgagggtaaa

SEQ ID NO: 66113 - DNA, 75 bp, synthetic construct
  source 1..75: mol_type = other DNA
cattgaactgacgccggggtattttcagataacagcggtcccgcgtcttgcggtgtatgacccgacggtacagtt

SEQ ID NO: 66114 - DNA, 75 bp, synthetic construct
  source 1..75: mol_type = other DNA
gagtttgattttgataacgcctgctggcggataccggcgcggcgtgaagaaatcgaaggtgtgcgttactcctat

SEQ ID NO: 66115 - DNA, 75 bp, synthetic construct
  source 1..75: mol_type = other DNA
acagtggtgggcagattttctgggtgcgaacagagaacaatgtatcagcccgtttgaatatgcaaagattaacaa

SEQ ID NO: 66116 - DNA, 75 bp, synthetic construct
  source 1..75: mol_type = other DNA
ctaacgcggaacagttttatcagtatcaacccactgaaatcattctctctgaaggtcgactggtcgatagccagg

SEQ ID NO: 66117 - DNA, 75 bp, synthetic construct
  source 1..75: mol_type = other DNA
gcattgaccacggtaaaacgccagcatcgccctgctcttgatctttctcgcctgcctgaacttgtgtcgcgtatt

SEQ ID NO: 66118 - DNA, 75 bp, synthetic construct
  source 1..75: mol_type = other DNA
ctatggtgtccgttctgatgagcggttctgctctggctgcgattggtgataacggtcaggcgaataacaatgatg

SEQ ID NO: 66119 - DNA, 75 bp, synthetic construct
  source 1..75: mol_type = other DNA
tcttactcaggaaacacttttcagctccaaatctcatggtaaatatgcgcttttccccatttttactgcgagttg

SEQ ID NO: 66120 - DNA, 75 bp, synthetic construct
  source 1..75: mol_type = other DNA
gaagttcgccacagcaatccgaaaccactggcacgtggagaataagctgcactggcgtctggacgtggtaatgaa

SEQ ID NO: 66121 - DNA, 75 bp, synthetic construct
  source 1..75: mol_type = other DNA
gcattgaccacggtaaaacgccagcatcgccctgctcttgatctttcgcgcctgcctgaacttttgtcgcgtatt

SEQ ID NO: 66122 - DNA, 75 bp, synthetic construct
  source 1..75: mol_type = other DNA
cttgctgttatgctgaatttactggtttttattcgttccagtgaactcagataagcccgttggtctgaaattgat

SEQ ID NO: 66123 - DNA, 75 bp, synthetic construct
  source 1..75: mol_type = other DNA
gaataactaaccaaattgtggctgctggatttattattgtgagtggattagctataggtactgatgcgaatgctc

SEQ ID NO: 66124 - DNA, 75 bp, synthetic construct
  source 1..75: mol_type = other DNA
atggtgaacatgtcaagagattacgccaaaaaactaaaggcaatcagaaacgcggaaaaccttacacaatctcag

SEQ ID NO: 66125 - DNA, 75 bp, synthetic construct
  source 1..75: mol_type = other DNA
tccgggtgctgccggtaaaaggcgcatctgtctatggcaagccggtgatcaccatgccgaaaaacccgcaatcag

SEQ ID NO: 66126 - DNA, 75 bp, synthetic construct
  source 1..75: mol_type = other DNA
actggcacgcgtgatggccatcatcaactgtcccgaagctgttgggcgcgaggcgcaggcaaaagcgctcgctgc

SEQ ID NO: 66127 - DNA, 75 bp, synthetic construct
  source 1..75: mol_type = other DNA
gccctcagagtgatggggtatgacacaaccaaggaagtctgtggccatggattccgggcgatggcgtgcagtgca

SEQ ID NO: 66128 - DNA, 75 bp, synthetic construct
  source 1..75: mol_type = other DNA
agtttgatgctcaaagaattaaacttcgtaatgaattacgtgttcactcttgagacttggtattcatttttcgtc

SEQ ID NO: 66129 - DNA, 75 bp, synthetic construct
  source 1..75: mol_type = other DNA
acagggatatcaccacactcaataccccggacctgcttatccctgttcgtgctgcagaagataaacagatttatg

SEQ ID NO: 66130 - DNA, 75 bp, synthetic construct
  source 1..75: mol_type = other DNA
acaaccctggaaagtggaacataaattatcggatattctactgttgactatttgtgccgttatttctggtgcaga

SEQ ID NO: 66131 - DNA, 75 bp, synthetic construct
  source 1..75: mol_type = other DNA
gtgtattgcgatccgccttattacggtacgttttccggctatcacactgatggcttcactgaggatgaccagtat

SEQ ID NO: 66132 - DNA, 75 bp, synthetic construct
  source 1..75: mol_type = other DNA
cggcaacgctggcggcgatgccggagatgacggtggaaaaagcccgcccgatcctggcggctgcaccactggcgg

SEQ ID NO: 66133 - DNA, 75 bp, synthetic construct
  source 1..75: mol_type = other DNA
ccgtccatgacagtcgtggcagactcattgatcagcatacggtcgatatgattaataatactatacttgatgctt

SEQ ID NO: 66134 - DNA, 75 bp, synthetic construct
  source 1..75: mol_type = other DNA
taagacgtaagatgcgaaaagcagccatggacagaaactatctggcgtcagtccttgcggggagcgggctttcgt

SEQ ID NO: 66135 - DNA, 75 bp, synthetic construct
  source 1..75: mol_type = other DNA
gtagatgtattgatcaccatgctggcgcgcagtgccgttggtgcacgtttgacgggatacaacacctggctgaca

SEQ ID NO: 66136 - DNA, 75 bp, synthetic construct
  source 1..75: mol_type = other DNA
gtgctgcttacattcataaagcagaacatctggaagaacgtcgactgatgctacagtggtgggccgattttctgg

SEQ ID NO: 66137 - DNA, 75 bp, synthetic construct
  source 1..75: mol_type = other DNA
tggtcattatggccattggtaatttctggttccacagtcacctcagccgtactgtgcaccatcagcagaccgctg

SEQ ID NO: 66138 - DNA, 75 bp, synthetic construct
  source 1..75: mol_type = other DNA
gcaaaggtccttcccggtgaaaccgacatcgccctgcccggcccgctgccgttcatcctctcccgcacctacagc

SEQ ID NO: 66139 - DNA, 75 bp, synthetic construct
  source 1..75: mol_type = other DNA
gactggtgagagacgctgatgattttgtcgcagtggcgatcgctggtttcaatcagatgaatcgtggtggcccgg

SEQ ID NO: 66140 - DNA, 75 bp, synthetic construct
  source 1..75: mol_type = other DNA
gatattctactgttgactatttgtgccgttatttctggtgcagaaggttgggaagatatagaggattttggggaa

SEQ ID NO: 66141 - DNA, 75 bp, synthetic construct
  source 1..75: mol_type = other DNA
gaatcgtacttcctgcaccgaaggaattcagttctgaatcattgccgcacaattttaatatggctgctgtcggtg

SEQ ID NO: 66142 - DNA, 75 bp, synthetic construct
  source 1..75: mol_type = other DNA
aaaaagaagagaatagttggcgcattatgctgatgacgatgcttatctcgcaaccggcactagcagaacaggtca

SEQ ID NO: 66143 - DNA, 75 bp, synthetic construct
  source 1..75: mol_type = other DNA
ttaatggtgatagcgataatatgggacgtaacataatgtcccagatatttgggaatccttttgttctcattgtta

SEQ ID NO: 66144 - DNA, 75 bp, synthetic construct
  source 1..75: mol_type = other DNA
gcttctggagcccgcctatgcgcgggttttcttttgcgcgctggggcgcgagatgggggcagcaagtctttcggt

SEQ ID NO: 66145 - DNA, 75 bp, synthetic construct
  source 1..75: mol_type = other DNA
tcaaaaaaacacggtgttttccgggtgctgccggtaaaaggcgcatctgtctatggcaagccggtgatcaccatg

SEQ ID NO: 66146 - DNA, 75 bp, synthetic construct
  source 1..75: mol_type = other DNA
tagataacagatttaagagtatactcgttatatcgtatgctgagattgatgaagcatataccattaatgtattaa

SEQ ID NO: 66147 - DNA, 75 bp, synthetic construct
  source 1..75: mol_type = other DNA
gatcggctacgcaaatacctggcgcgttttggtctgacgtgggaagccttgcaggatcagcacagctccagttga

SEQ ID NO: 66148 - DNA, 75 bp, synthetic construct
  source 1..75: mol_type = other DNA
tctttacatcggtaagacaccacgcgcggtggctgaaatggctaaagcaggaaagctgccagccttctacatgac

SEQ ID NO: 66149 - DNA, 75 bp, synthetic construct
  source 1..75: mol_type = other DNA
ttgattgaatcaggtttgtggtcccgcgatgctgtggaacgtcagatgagccatcaggaacgtaacggtgtacgt

SEQ ID NO: 66150 - DNA, 75 bp, synthetic construct
  source 1..75: mol_type = other DNA
gcaggtgaaaatggtctgatatttacgggagcacatgacccgcgtaaaccaatcagtgaaaacaccgtaaataag

SEQ ID NO: 66151 - DNA, 75 bp, synthetic construct
  source 1..75: mol_type = other DNA
atgataaagaaacttaaagtcatcatgttggcagcaatagttaccggatgttcatcgccgccgcctcccgttcct

SEQ ID NO: 66152 - DNA, 75 bp, synthetic construct
  source 1..75: mol_type = other DNA
gcacgggcggtaatgctggcctgtgccgccggtaatgaccttgatgtgattggtgccaattacaacaccacgcgc

SEQ ID NO: 66153 - DNA, 75 bp, synthetic construct
  source 1..75: mol_type = other DNA
ttgcctgtcttatttttgcgctggtcatttacgctatccacgctttcggtttattcgatctgctcaccgatttac

SEQ ID NO: 66154 - DNA, 75 bp, synthetic construct
  source 1..75: mol_type = other DNA
tgccggaatgatcggtgaaataggtgtctcaccgacatttaccgaagccgagcataacagcttgcgggctgcctc

SEQ ID NO: 66155 - DNA, 75 bp, synthetic construct
  source 1..75: mol_type = other DNA
tgtttctgatgttatggatggcgctgttgatcgcagcaatggtgtatccgcaggggatttttccggtactggcag

SEQ ID NO: 66156 - DNA, 75 bp, synthetic construct
  source 1..75: mol_type = other DNA
tgcggggaatcgcctgctatattgcgctggcaatctctggtggatcagtcaatgcatgggctgatgattccattc

SEQ ID NO: 66157 - DNA, 75 bp, synthetic construct
  source 1..75: mol_type = other DNA
acaccgtgaccgtgccggataaaaagaccgccaccgcctcgctgtcggctgaagatatcgccgccgcccatcttc

SEQ ID NO: 66158 - DNA, 75 bp, synthetic construct
  source 1..75: mol_type = other DNA
agggagaggcagaccttgcctcaggaagccagcagcataatagtttattcacggccatggttcagcagttcagaa

SEQ ID NO: 66159 - DNA, 75 bp, synthetic construct
  source 1..75: mol_type = other DNA
gcggcgtggccgcacgtattgcacgcgttcatcagttcggtgagcgcgatcaggttgcgccgggcattttcaccg

SEQ ID NO: 66160 - DNA, 75 bp, synthetic construct
  source 1..75: mol_type = other DNA
tctgccgaactggaaaaggcacagaaagccgccgttgacctgacgaaatacgtcccggtggaaagctacaacgcc

SEQ ID NO: 66161 - DNA, 75 bp, synthetic construct
  source 1..75: mol_type = other DNA
ctgtcggctgaagatatcgccgccgcacgtctgttgggtaaaaccgaagccgagttcctgaaaatgaaagaggaa

SEQ ID NO: 66162 - DNA, 75 bp, synthetic construct
  source 1..75: mol_type = other DNA
cattggcgcattcaatggtgccattatcgcggcctctcccgatctgtcagaagctgccgtacgcctggaggcgct

SEQ ID NO: 66163 - DNA, 75 bp, synthetic construct
  source 1..75: mol_type = other DNA
gcgttaacattaacgactacaatccacacgactggatcgcctcatttaaacaagccttcagcgaagggcaaacgg

SEQ ID NO: 66164 - DNA, 75 bp, synthetic construct
  source 1..75: mol_type = other DNA
aggaaaaagtacagcagcgcccactgaaccaacagcaacgtgataacgcccgccagcgtgttcaatcagcatcac

SEQ ID NO: 66165 - DNA, 75 bp, synthetic construct
  source 1..75: mol_type = other DNA
agtatcaacgtctgtggcaaccttccgccggaaagccgcaaaccgtcaccgtcagcgaactggccgaacgctgtt

SEQ ID NO: 66166 - DNA, 75 bp, synthetic construct
  source 1..75: mol_type = other DNA
ggtgatacatcgtaagagctggaaaaaccgcgccgaagtggaactggccacactgacgtgggtggactggtacaa

SEQ ID NO: 66167 - DNA, 75 bp, synthetic construct
  source 1..75: mol_type = other DNA
gctgacatgggcagtaattccggtatcactggctgcgttaattaagaacggcccgctctggcaggagttgagggc

SEQ ID NO: 66168 - DNA, 75 bp, synthetic construct
  source 1..75: mol_type = other DNA
atccggggggattcatgtgcagcaggaagcagggatagtgcatttattgccaccacttccagtttaagtgaaaca

SEQ ID NO: 66169 - DNA, 75 bp, synthetic construct
  source 1..75: mol_type = other DNA
tttttgctggtttgcatgttcacaacaatacttgtctcctggtttcaaagtaaaatgcaattagcaactgaagct

SEQ ID NO: 66170 - DNA, 75 bp, synthetic construct
  source 1..75: mol_type = other DNA
tgattaacaaagtcgctgaaaacggttattcactccgcgtggtggatgaacgtgacgctaccgaaacaccggcga

SEQ ID NO: 66171 - DNA, 75 bp, synthetic construct
  source 1..75: mol_type = other DNA
catcctggtatctggatcatgatgccggtactggtgctgaactgctgaaaaatggtggtttaatcagttgtcgtt

SEQ ID NO: 66172 - DNA, 75 bp, synthetic construct
  source 1..75: mol_type = other DNA
agctgtttgcccgtgagtacctgaaagatctcaatgccacgcaagcagccatcagggcgggttacagtgaggatt

SEQ ID NO: 66173 - DNA, 75 bp, synthetic construct
  source 1..75: mol_type = other DNA
attcaacagcagaacccgctctggttaatgccattgagcaaggccttcgggcagagcacggtgttgtcactgaag

SEQ ID NO: 66174 - DNA, 75 bp, synthetic construct
  source 1..75: mol_type = other DNA
tgcgaaacgactgacacaaaaactgaaggaggggtggcagccatttggcagtccggtggccatcacgccttatac

SEQ ID NO: 66175 - DNA, 75 bp, synthetic construct
  source 1..75: mol_type = other DNA
ctggtctggacaaggcgctggctgccggggctactgaaatcacgaaagaagaatatcttgcccgcaaaaacggaa

SEQ ID NO: 66176 - DNA, 75 bp, synthetic construct
  source 1..75: mol_type = other DNA
aagcaaaaaacaaaactactgtggctaagcctcaacttaaagaggctgaatttacaatccaagtgcaacaaaaaa

SEQ ID NO: 66177 - DNA, 75 bp, synthetic construct
  source 1..75: mol_type = other DNA
agtgatgggtgacgcaacctaccaggagacattcaacgaagaaagccaggatgaagcccgggaaaaagatccaga

SEQ ID NO: 66178 - DNA, 75 bp, synthetic construct
  source 1..75: mol_type = other DNA
aacatgccaatgacaataatgaaataggcgagacagcaaatcccttaattaaggtgaacagtcatcgtaaaagca

SEQ ID NO: 66179 - DNA, 75 bp, synthetic construct
  source 1..75: mol_type = other DNA
tgcggcatcccgtacccagggcagttttgtctccacacagcgtgacagccatttcagctcatgggcacgcagggg

SEQ ID NO: 66180 - DNA, 75 bp, synthetic construct
  source 1..75: mol_type = other DNA
tctgggaggcgcaatgacgttgatgttttccatgattgccatcgcagggattcgcatcatcatcaccaacggttt

SEQ ID NO: 66181 - DNA, 75 bp, synthetic construct
  source 1..75: mol_type = other DNA
ccggtcatgaaaagcgcctgcggcgggtggggataagtacctttaccggtcgcaaaagcccggaatatgcgtttg

SEQ ID NO: 66182 - DNA, 75 bp, synthetic construct
  source 1..75: mol_type = other DNA
gggatccagagtcgcgacgctgaggaccagaatcagcccaacgtgaaacaaaatgagccagaagcggaacaaaac

SEQ ID NO: 66183 - DNA, 75 bp, synthetic construct
  source 1..75: mol_type = other DNA
attatgattgatggttgtgtggctagactgcgaaagcataaaccagaggaatatgagctgatcattgcacatttt

SEQ ID NO: 66184 - DNA, 75 bp, synthetic construct
  source 1..75: mol_type = other DNA
ggcgcgtagctgcgggcattgcgatgcctgtattagcggtaatcagatcaactgcgagcaaggtgcggtgccaac

SEQ ID NO: 66185 - DNA, 75 bp, synthetic construct
  source 1..75: mol_type = other DNA
agtttatgagtacgatcccggtgaactgaagccacaagatgttgaagtgcaggtggattactgcgggatctgtca

SEQ ID NO: 66186 - DNA, 75 bp, synthetic construct
  source 1..75: mol_type = other DNA
agtttatcgagggctactacattgtcggcctgctggcagaagcgttcctcgaaaaaaatcccggcgcgaagatca

SEQ ID NO: 66187 - DNA, 75 bp, synthetic construct
  source 1..75: mol_type = other DNA
tgcggataatataactcttgcagagcttgaaaaggcgcttttctatttttactgtgcaaaaaatgagacagatcc

SEQ ID NO: 66188 - DNA, 75 bp, synthetic construct
  source 1..75: mol_type = other DNA
gatgctgaatatatgcaggaaaaccgctgggatgaggaatccgcttcctttattccggtcgaaccagaatccgat

SEQ ID NO: 66189 - DNA, 75 bp, synthetic construct
  source 1..75: mol_type = other DNA
gatccaagcactgtaaaatgcgctaacgctgtatttagtggaatgattggtggtgcgatcaaaggaggtcccata

SEQ ID NO: 66190 - DNA, 75 bp, synthetic construct
  source 1..75: mol_type = other DNA
tgcactacacgcggacacaatatgcagagccgctggtcgaaagtcgctatctttacgacccgctgggccgcaggg

SEQ ID NO: 66191 - DNA, 75 bp, synthetic construct
  source 1..75: mol_type = other DNA
ccgggcagaccgcgtgagcagtgaaagccgggcgtggcttgcgcagtgcgggctgacggtggagcaactggccag

SEQ ID NO: 66192 - DNA, 75 bp, synthetic construct
  source 1..75: mol_type = other DNA
tcggtctgcgcccatctgttgcttaccttcagtcaaaaggtaaagaccttggtgttcatggtgaccgagacttag

SEQ ID NO: 66193 - DNA, 75 bp, synthetic construct
  source 1..75: mol_type = other DNA
tgatgcgaacaatatctatctggctaccacatattctgaaactcagaatatgaccgtttttggtaataaccatat

SEQ ID NO: 66194 - DNA, 75 bp, synthetic construct
  source 1..75: mol_type = other DNA
gtttattcaaaaaaccgccgaaatgggtaatggtggcggaactggtagaaaccagccgcctgtgggggcgcattg

SEQ ID NO: 66195 - DNA, 75 bp, synthetic construct
  source 1..75: mol_type = other DNA
gaatctggctgcggcaggcgtacaggatgcaaatttttaccctgagggaatgcacggtaagaaggtggagaactg

SEQ ID NO: 66196 - DNA, 75 bp, synthetic construct
  source 1..75: mol_type = other DNA
ctgatcgggattggtgttctcggtgaatatataggtagaatttatttagaaacaaaatcaagaccacggtactta

SEQ ID NO: 66197 - DNA, 75 bp, synthetic construct
  source 1..75: mol_type = other DNA
ttatcacactcacggtttttactctgacgataaaggaaataaagtaacaaaagaaaatgatgtttatgatagtct

SEQ ID NO: 66198 - DNA, 75 bp, synthetic construct
  source 1..75: mol_type = other DNA
gcggcgaaagtttacgggcatgaatatattacgcgaaaagttaagggagtaacgcagaccaacgcaattacaaca

SEQ ID NO: 66199 - DNA, 75 bp, synthetic construct
  source 1..75: mol_type = other DNA
cgcaagagaaactcacctggctgaatgtgaacgatgcgctttcgattgatggtaaaacggtgctgttcgcggcgt

SEQ ID NO: 66200 - DNA, 75 bp, synthetic construct
  source 1..75: mol_type = other DNA
ctgtcaccagtccgtctccggcctgcgtcaccatctctgtgctgtcacgtgaaaataacggtgtcgcatccgaag

SEQ ID NO: 66201 - DNA, 75 bp, synthetic construct
  source 1..75: mol_type = other DNA
acgggctggatgtcgctgtcacggaaaccgcaagtgacctggtacggctgggacggcgaccggctgaccacgata

SEQ ID NO: 66202 - DNA, 75 bp, synthetic construct
  source 1..75: mol_type = other DNA
tctgtggccatggattccgggcgatggcgtgcagtgcattgattgaatcaggtttgtggtcccgcgatgctgtgg

SEQ ID NO: 66203 - DNA, 75 bp, synthetic construct
  source 1..75: mol_type = other DNA
ttatccatattgcccgtaatgaactgggtatggatgaagacacctaccgccagatgttacaggggctgaccggta

SEQ ID NO: 66204 - DNA, 75 bp, synthetic construct
  source 1..75: mol_type = other DNA
taactacggtgtagcatacgacatcggtgcgtggactgacgtcctgccagaattcggtggtgacacttggactca

SEQ ID NO: 66205 - DNA, 75 bp, synthetic construct
  source 1..75: mol_type = other DNA
cagcaatgagcaggcaagtagcgtgattgagaaactgaagaagtggcagcgcagagctgcgggagtgaagcaatg

SEQ ID NO: 66206 - DNA, 75 bp, synthetic construct
  source 1..75: mol_type = other DNA
attaacgcgctggctgtttcagacccgctagttgttccgctgtcatttacacgcaactttggtaaagaaccagcc

SEQ ID NO: 66207 - DNA, 75 bp, synthetic construct
  source 1..75: mol_type = other DNA
attatcggtgccaacatcaccaattgtaagttcagcgacttacaaggcgacgccattgaatggaacgtggcaatt

SEQ ID NO: 66208 - DNA, 75 bp, synthetic construct
  source 1..75: mol_type = other DNA
cagcagggcaggagggtcaattgctgactttaccgggcatcggcaaacggcgtttcgcgaactggaacgggtgct

SEQ ID NO: 66209 - DNA, 75 bp, synthetic construct
  source 1..75: mol_type = other DNA
gggaaaacagcagtatgccatccgatgtgtatcagcaattctgtctgatgccggtacaaaaactcctgatggcgg

SEQ ID NO: 66210 - DNA, 75 bp, synthetic construct
  source 1..75: mol_type = other DNA
tgcgcagtcattgccggaaaagattgttatcaagcggatacgttatcgcgactaccaggagtgaaaataatatcg

SEQ ID NO: 66211 - DNA, 75 bp, synthetic construct
  source 1..75: mol_type = other DNA
caagccgctgtataaggaccttatcggtcgaacaaaagcagcactgaagaagaatccgaaaaatgtgctgtttgc

SEQ ID NO: 66212 - DNA, 75 bp, synthetic construct
  source 1..75: mol_type = other DNA
tggcgaaacagcaaatcccttaattaaagtgaacggtcatcatgaaatctcatccaccagcaggttgtggcacca

SEQ ID NO: 66213 - DNA, 75 bp, synthetic construct
  source 1..75: mol_type = other DNA
actctatagccggtaagttttttgatccggcaaccggagagatggggccagaattcagcaaaactatcgatctgg

SEQ ID NO: 66214 - DNA, 75 bp, synthetic construct
  source 1..75: mol_type = other DNA
cagatgataaccagaaaataacatggcagaattttaaaactagcaatgcggcatattcacaactatgtgaaaaat

SEQ ID NO: 66215 - DNA, 75 bp, synthetic construct
  source 1..75: mol_type = other DNA
ctccagtccttcatcatttttttcaatacactcatctaagagatgcgcatttttatagatgtaaactcatagaac

SEQ ID NO: 66216 - DNA, 75 bp, synthetic construct
  source 1..75: mol_type = other DNA
tctcaataggtgcaatatttttcgatccgcaaaccggagatatgggaccggaatttattaagactatcgatctgg

SEQ ID NO: 66217 - DNA, 75 bp, synthetic construct
  source 1..75: mol_type = other DNA
gtgctgtcggtaaaccgattggtttacttttcattgctgaaaaaattgttccaggcaatgaacctctgccagatc

SEQ ID NO: 66218 - DNA, 75 bp, synthetic construct
  source 1..75: mol_type = other DNA
ctggcacttggtgtatacccggaggtttctctctccgaagctcgtacaaaacgggatgaggcccgaaaactgatt

SEQ ID NO: 66219 - DNA, 75 bp, synthetic construct
  source 1..75: mol_type = other DNA
aatatggctgctgtcggtgtgatgaaggagggaatgtcgatgcgtttattttcttctccggggcatattgtggtt

SEQ ID NO: 66220 - DNA, 75 bp, synthetic construct
  source 1..75: mol_type = other DNA
caggaaccgatgaggccgaagcagtcgtcccggatacgttgcagtctgcaacaggcgcggaggaaaaggctccgg

SEQ ID NO: 66221 - DNA, 75 bp, synthetic construct
  source 1..75: mol_type = other DNA
ggttcagcatcctgatggaacataagaagctgatgaacgtccgttacagccgggatagtggcaacgattacgcat

SEQ ID NO: 66222 - DNA, 75 bp, synthetic construct
  source 1..75: mol_type = other DNA
aaaaagggcaaagctccgtcgatatcgacagagttaatcaccatattgttaatgtggaaaagattaactttagat

SEQ ID NO: 66223 - DNA, 75 bp, synthetic construct
  source 1..75: mol_type = other DNA
ctgccgatcacgtcaaacaccataaacccgcgccagacacatttttgttgtgcgcgcagcgtatgggcgtgcaac

SEQ ID NO: 66224 - DNA, 75 bp, synthetic construct
  source 1..75: mol_type = other DNA
ctcgattagcaacggcggaaaaggcatgacggatagtaacggggttgcaatcgcctccctgaccggcacgttagc

SEQ ID NO: 66225 - DNA, 75 bp, synthetic construct
  source 1..75: mol_type = other DNA
cgattcatcgaaatttaaccgtcgcggttttaatcaggtactgccaatcgaaaaaattgacattattattaccga

SEQ ID NO: 66226 - DNA, 75 bp, synthetic construct
  source 1..75: mol_type = other DNA
aaccaaatctgacttgtacgccacaggatgattcccagtatccagggatggatacaaagacagcaagtgattacc

SEQ ID NO: 66227 - DNA, 75 bp, synthetic construct
  source 1..75: mol_type = other DNA
aaagaaggccagtttgctctgggtatttacctccacaccgatacggtcccggaaggtgtaaccatgagtggtaca

SEQ ID NO: 66228 - DNA, 75 bp, synthetic construct
  source 1..75: mol_type = other DNA
ttaataaacggggggatcaggatattccggctgaaacgccgtatacgccgggagaacaaattaagggagggcaag

SEQ ID NO: 66229 - DNA, 75 bp, synthetic construct
  source 1..75: mol_type = other DNA
gatttatatgtggaatatcctgatatatgtcattccgtatgcgttatatgcgcttgcagccgggtttcttgttac

SEQ ID NO: 66230 - DNA, 75 bp, synthetic construct
  source 1..75: mol_type = other DNA
tatcagaaaaggttgtacgcagacttatggtggaggaacagcttgtcgtcagccgtaaccgtcgtcgtcgctaca

SEQ ID NO: 66231 - DNA, 75 bp, synthetic construct
  source 1..75: mol_type = other DNA
gcgaagcggcgctggcccggctggtggcagtgattaaagatttaacaacagaacaaaaagcccgacgacccacgc

SEQ ID NO: 66232 - DNA, 75 bp, synthetic construct
  source 1..75: mol_type = other DNA
tatcacccgtcgctgccggaaaatcaggggcatgaaattgccgcgcgccagcaaaaaggctttggcgcaatgttg

SEQ ID NO: 66233 - DNA, 75 bp, synthetic construct
  source 1..75: mol_type = other DNA
gtaattatcatcttcgcgggcgcattctgcaggtgccgtcaaactatgatccggaaaaacgcacttacagcggca

SEQ ID NO: 66234 - DNA, 75 bp, synthetic construct
  source 1..75: mol_type = other DNA
tcggtgtgacggtgcaggtgccgtacaccgatgtgtggacgtataaaccggtgcagtactatccagggaaacatc

SEQ ID NO: 66235 - DNA, 75 bp, synthetic construct
  source 1..75: mol_type = other DNA
actgcgtgcaaaagccgattccctcgacacagaaatctcccgtcttgaagctgttgcggatgaagaacgtaacca

SEQ ID NO: 66236 - DNA, 75 bp, synthetic construct
  source 1..75: mol_type = other DNA
gcccggagaaacagcggagtgcctgcatcgtcgtgggcgtcttcgaaccacgtcgcctttctccgattgcagaac

SEQ ID NO: 66237 - DNA, 75 bp, synthetic construct
  source 1..75: mol_type = other DNA
gttcagaatatgagtctgctgaaccatccaaaagcagacctgaaaaaagggcagtatggttgtgtggggcaggga

SEQ ID NO: 66238 - DNA, 75 bp, synthetic construct
  source 1..75: mol_type = other DNA
agtctgcccttgaaaaacttagcgcacgtcgcggtaatacttggtacccgatttttcatctggctccacctgccg

SEQ ID NO: 66239 - DNA, 75 bp, synthetic construct
  source 1..75: mol_type = other DNA
ggtatcttcatgcccgtacgaacgctcccggcagcgaaaatctgaacgggattaacgtgaaataccgttatgagt

SEQ ID NO: 66240 - DNA, 75 bp, synthetic construct
  source 1..75: mol_type = other DNA
ggctccggctgtatgtggataaccaggcaggacggctggtgctttggcgtcactacccggatgaggggctggacg

SEQ ID NO: 66241 - DNA, 75 bp, synthetic construct
  source 1..75: mol_type = other DNA
gctatatcggtaaaactattttcaccaccatcatgatgacgctgttcatgctggtgtcgctgtccggcattatca

SEQ ID NO: 66242 - DNA, 75 bp, synthetic construct
  source 1..75: mol_type = other DNA
aatacacgcacaggaacttcacgccggaaactttcgcacagtatgtggctgatacgcacacgccagaaattcagg

SEQ ID NO: 66243 - DNA, 75 bp, synthetic construct
  source 1..75: mol_type = other DNA
ataaatttaacattcaggggttctatactcacaccctgcgtagcggttacctgcaacagggttcgcgcgtaaccc

SEQ ID NO: 66244 - DNA, 75 bp, synthetic construct
  source 1..75: mol_type = other DNA
tttatcactgcgaccaccggggactgccgctggcgcttatcagcgaagacggcaatacggcgtggagcgcggaat

SEQ ID NO: 66245 - DNA, 75 bp, synthetic construct
  source 1..75: mol_type = other DNA
cagtggtaaaaacgccagattttcaggcgatgtcacatcaaatcgttggttacatccaaatggtggcggcttcac

SEQ ID NO: 66246 - DNA, 75 bp, synthetic construct
  source 1..75: mol_type = other DNA
cgtggacacagcttctgccgctacgcagacgactgcaacatctacgtaagcagccggaaagcgggcgaccatctg

SEQ ID NO: 66247 - DNA, 75 bp, synthetic construct
  source 1..75: mol_type = other DNA
gtgaagccgtaaatcttacccgctcacaggtgactaaataccgaattacctttgtcagaacgaaggggaagaaaa

SEQ ID NO: 66248 - DNA, 75 bp, synthetic construct
  source 1..75: mol_type = other DNA
atgacagtaagtaagcaaaaaaatggtaaatggttatgtgagctttatccaaatggccgggaagggcggcgtata

SEQ ID NO: 66249 - DNA, 75 bp, synthetic construct
  source 1..75: mol_type = other DNA
tcttggcttacccagcctcaaattcgcgaagtgctcaatgcttgtgagtcatacgggaaaatttatttaacccgt

SEQ ID NO: 66250 - DNA, 75 bp, synthetic construct
  source 1..75: mol_type = other DNA
atcgagataaacgcctgacaggtgagatctacttcagtgagaaatggaagaaaggagcaagcccggtcaccatta

SEQ ID NO: 66251 - DNA, 75 bp, synthetic construct
  source 1..75: mol_type = other DNA
cgccggacgaagtgggcgtcgtgtgcgtaaacaattcgtcaccaaaggcgaagcactggcttttgagcgccacac

SEQ ID NO: 66252 - DNA, 75 bp, synthetic construct
  source 1..75: mol_type = other DNA
tcgtcagttttgtcggcgactcgagtaccgcacaggttgatctgcagaagtcgaaaaatgaagtggtcgctgacg

SEQ ID NO: 66253 - DNA, 75 bp, synthetic construct
  source 1..75: mol_type = other DNA
aaccggtgacctcttgatggtgcatgcctcacttaaagcgattggtccggtcgaaggaggagcggagacggtcgt

SEQ ID NO: 66254 - DNA, 75 bp, synthetic construct
  source 1..75: mol_type = other DNA
ccggtggcggtgattgcgccaacacatcaaatcttcagggctatgtgaacggcgctttcattggtatgaatgcca

SEQ ID NO: 66255 - DNA, 75 bp, synthetic construct
  source 1..75: mol_type = other DNA
tgactatgatgggaatccctgaacagaatagtaaaactgtaacgccgggtctccactacgctgctgatggattca

SEQ ID NO: 66256 - DNA, 75 bp, synthetic construct
  source 1..75: mol_type = other DNA
atcgcctgtatcgctttcaggtaccgggacgaccggagctgaaccagatgaacacggccatcaatatgggaggga

SEQ ID NO: 66257 - DNA, 75 bp, synthetic construct
  source 1..75: mol_type = other DNA
atggcagtacgaaaactaaccacagggaaatggctttgcgaatgttaccccgccggacgtagcggacgccgtgtg

SEQ ID NO: 66258 - DNA, 75 bp, synthetic construct
  source 1..75: mol_type = other DNA
aaatgctggcgcggaactgcgccgcccggcgccctggtcgcgatccctatgaaatggccgagtacatcgcgctgc

SEQ ID NO: 66259 - DNA, 75 bp, synthetic construct
  source 1..75: mol_type = other DNA
aggccaatggcgaagcgcatgtcaccctcaaaggtaaaaaagcgggcacgcatacggttaccgcaacgctgggta

SEQ ID NO: 66260 - DNA, 75 bp, synthetic construct
  source 1..75: mol_type = other DNA
ttacccagggcggcggagtgatgagttctaacgggattgtggttgatgcacatcagcatactggcgtcctgaaag

SEQ ID NO: 66261 - DNA, 75 bp, synthetic construct
  source 1..75: mol_type = other DNA
cagcgcactaagaccgcacgaatataatggtgggttaccaccaaacgaatcggaaaatcgatactggaaaaaact

SEQ ID NO: 66262 - DNA, 75 bp, synthetic construct
  source 1..75: mol_type = other DNA
tgtcgttctcgccggacagcaggcttaccatgaaagcactggaaatggcatgggaaacccgtggtaagcccgtcg

SEQ ID NO: 66263 - DNA, 75 bp, synthetic construct
  source 1..75: mol_type = other DNA
acggtcgccaacatctcgacgaaacccaggtgcgggtgtttggtcagcatctgatgcaggggatctacaccaccc

SEQ ID NO: 66264 - DNA, 75 bp, synthetic construct
  source 1..75: mol_type = other DNA
cgccaattcctggaattaccaccacgcctggtgtatatgacagcaccggattacttaatctaaaagaattgcctg

SEQ ID NO: 66265 - DNA, 75 bp, synthetic construct
  source 1..75: mol_type = other DNA
aaaacactatcacctgctgctgctggtcaaccgggatacctggtgtcgtgccggcgattaccgcgctccggggtc

SEQ ID NO: 66266 - DNA, 75 bp, synthetic construct
  source 1..75: mol_type = other DNA
tgtaaaaacgtctggaccgggcgcgaaggcatggagtacgcatggtttaacaacgtcgaaaccaaaccgggcatt

SEQ ID NO: 66267 - DNA, 75 bp, synthetic construct
  source 1..75: mol_type = other DNA
gcaccatagctcttcgtgcaagcgcattacttaaggccatgagtcaggatattgaagatcagcgcaaagagttca

SEQ ID NO: 66268 - DNA, 75 bp, synthetic construct
  source 1..75: mol_type = other DNA
gcgatcagcaaattcctttactgattagtggtggtatcggtcactcgacaacttttttgtatagcgccatcgcac

SEQ ID NO: 66269 - DNA, 75 bp, synthetic construct
  source 1..75: mol_type = other DNA
acgtaactcgattaaatatgtggcgtcaaaacaccataaagcgttcatggccgacctgaagccagtgtatcgtgc

SEQ ID NO: 66270 - DNA, 75 bp, synthetic construct
  source 1..75: mol_type = other DNA
gcctggcatctgatatcgaaatcatgatgcgtgaacgctttaatgtgctgaaccacattatctgggcgaagccgt

SEQ ID NO: 66271 - DNA, 75 bp, synthetic construct
  source 1..75: mol_type = other DNA
ggtgactgttggcttgtttgctaaccgtggcgcggacgttgcgctgattggcacacctgacggtgtcaaaaccat

SEQ ID NO: 66272 - DNA, 75 bp, synthetic construct
  source 1..75: mol_type = other DNA
gagtacttaaacaaactcagagagctttatgctacttatcaaaaaatatccacccctctgaaacacatgtttaat

SEQ ID NO: 66273 - DNA, 75 bp, synthetic construct
  source 1..75: mol_type = other DNA
gtccgttgcttacctgcaatctaaaggaaaagacttgggtgcgtggggtgatcaggacctggttgaatatattga

SEQ ID NO: 66274 - DNA, 75 bp, synthetic construct
  source 1..75: mol_type = other DNA
agaatgccgactttgttggcgcagtgacggcggcatatcagcagctgtgcgaacgcggtgcgcgcgagtgtgtgg

SEQ ID NO: 66275 - DNA, 75 bp, synthetic construct
  source 1..75: mol_type = other DNA
ggcaacaggcagtcatcgaagaggcgttaatgctggcggccatcgacgacaggcaggtaggttacattgaaaccc

SEQ ID NO: 66276 - DNA, 75 bp, synthetic construct
  source 1..75: mol_type = other DNA
ttttaatattcttgtttctaataccgatgaccatttacgtaatcatggatatatcttgataccgggaaaaggttg

SEQ ID NO: 66277 - DNA, 75 bp, synthetic construct
  source 1..75: mol_type = other DNA
atcgccagcgccagcttgatcaggagcgtcggcaactggaggatgaagagcggagaatggaagatgagtatgggc

SEQ ID NO: 66278 - DNA, 75 bp, synthetic construct
  source 1..75: mol_type = other DNA
aacccaaattctgctcagagatttatatcgcaagaagcggcctttaaaaccacccagcgggtattaacacaagga

SEQ ID NO: 66279 - DNA, 75 bp, synthetic construct
  source 1..75: mol_type = other DNA
atgctgcccttgccggggtggacagtacgatcgttgaagtgatggggatccgtgcgcagttcacctccggagcac

SEQ ID NO: 66280 - DNA, 75 bp, synthetic construct
  source 1..75: mol_type = other DNA
acttcagctacgatgcgctggaccggttggtacagcagggcggctttgacgggcggacgcaacgttatcattatg

SEQ ID NO: 66281 - DNA, 75 bp, synthetic construct
  source 1..75: mol_type = other DNA
cctgccgggaacaaagacgcagatgaccatccgctccaaaacgtacatgggcagcggatttaatgagctgaagtt

SEQ ID NO: 66282 - DNA, 75 bp, synthetic construct
  source 1..75: mol_type = other DNA
tttgccagtggtgggatccgtattgaaggaagtaacccgtcattatttgtgcttacggatacggtttgtgctgta

SEQ ID NO: 66283 - DNA, 75 bp, synthetic construct
  source 1..75: mol_type = other DNA
cccgaccgaatccgtggccattgatgtcgcttatgaaggctccggtagtggcgactggcgcactgacgggttcat

SEQ ID NO: 66284 - DNA, 75 bp, synthetic construct
  source 1..75: mol_type = other DNA
atacccgctggcatgaagattccgtgcgtaaccgctggttcagcatgatggcggggccatctgtacgcgtgaatg

SEQ ID NO: 66285 - DNA, 75 bp, synthetic construct
  source 1..75: mol_type = other DNA
ataaagcaaaaattttataaaaaagcacagctaaaatatatcccactaaaagctaacggtatatcaagtatactt

SEQ ID NO: 66286 - DNA, 75 bp, synthetic construct
  source 1..75: mol_type = other DNA
gttaagcccgcatctttacctggcgaccaacagcgcacaggggccgtggtggatactggggtggtcagagctggt

SEQ ID NO: 66287 - DNA, 75 bp, synthetic construct
  source 1..75: mol_type = other DNA
accactacgacagccagcaccgcctggtgttctacacgcggatacagcatggcgagccactggtcgagagccgct

SEQ ID NO: 66288 - DNA, 75 bp, synthetic construct
  source 1..75: mol_type = other DNA
caacctggaacgctggatgagcgaaagccgcgacctttcaacacagggaaaacttcaccgcgcatccggcgtcgc

SEQ ID NO: 66289 - DNA, 75 bp, synthetic construct
  source 1..75: mol_type = other DNA
taccgccatggcaattcagtggtatgcgcagagggaagctgatatcgaaaatgaaaaactccgtaaagaggttga

SEQ ID NO: 66290 - DNA, 75 bp, synthetic construct
  source 1..75: mol_type = other DNA
cgacgtgatcgacggccaggcggagtttatcaataatcatagcctgcgtgttcatcggcctgagggaaatctgga

SEQ ID NO: 66291 - DNA, 75 bp, synthetic construct
  source 1..75: mol_type = other DNA
ctggtctgcctgttactgatgagtaccattgcagcactgtgtgcctcaaaagccctgattgcgtcataccgcctc

SEQ ID NO: 66292 - DNA, 75 bp, synthetic construct
  source 1..75: mol_type = other DNA
cccgaactgctctgggtccatattctggggatctcctgcatgctctgggacaaaagcaccgaaatggcgagggct

SEQ ID NO: 66293 - DNA, 75 bp, synthetic construct
  source 1..75: mol_type = other DNA
tgcctgacggcgaatttgctggtgcaggctatcagtgtgctgcttactctcgccagcgactctcctctcttgctt

SEQ ID NO: 66294 - DNA, 75 bp, synthetic construct
  source 1..75: mol_type = other DNA
tcgtaatggctggtggtacggggagccgcctttggcctctgtctagagaacactatcctaagcaatttttgcaac

SEQ ID NO: 66295 - DNA, 75 bp, synthetic construct
  source 1..75: mol_type = other DNA
acgttttattaccatctaaaggctctcagcaagcctgacaagtatgcggacgttaaaaagcgtattggtgagatt

SEQ ID NO: 66296 - DNA, 75 bp, synthetic construct
  source 1..75: mol_type = other DNA
aactgacagcggcgcgtattgctgcggcgctgggactgtatatccgtaaaggtgacggacaggactatgaagatc

SEQ ID NO: 66297 - DNA, 75 bp, synthetic construct
  source 1..75: mol_type = other DNA
gctcgaatgacagcacatctcccgaacaaagatgagtcttacgaatgtttaacaaaaatacagcatgaactgctt

SEQ ID NO: 66298 - DNA, 75 bp, synthetic construct
  source 1..75: mol_type = other DNA
gcccgggctgtgctggctgcgggatcaggtaaggcagaaccggtctctgcatccacaaccgccctgtttgaacgc

SEQ ID NO: 66299 - DNA, 75 bp, synthetic construct
  source 1..75: mol_type = other DNA
gtgaagtgatgaatccgctgcagtatgttccttttaaccagacgctgtatttcatcaatggcgatgatccggcgc

SEQ ID NO: 66300 - DNA, 75 bp, synthetic construct
  source 1..75: mol_type = other DNA
ccgacggaagagcgaggcgtcccggtttcaggatcttgttgcctgtggagatatgaccattgtccggcgtgtcgg

SEQ ID NO: 66301 - DNA, 75 bp, synthetic construct
  source 1..75: mol_type = other DNA
atcctggcggctgcaccactggcggatgccgggccctcgcttcgtgatcagatcatggccctggatgaggcaaaa

SEQ ID NO: 66302 - DNA, 75 bp, synthetic construct
  source 1..75: mol_type = other DNA
cccggtttatccccgctggcgcggggaactctactgctccgctggcgtttctccctcgcccagcggtttatcccc

SEQ ID NO: 66303 - DNA, 75 bp, synthetic construct
  source 1..75: mol_type = other DNA
atgaaaaacggccttgaactgaaagcgcctgtaactgatgacatcagcagagcgctggcttttgctattaagtgg

SEQ ID NO: 66304 - DNA, 75 bp, synthetic construct
  source 1..75: mol_type = other DNA
cgagcagtttgatgaaatcaatattgtgcgcggtcagctcgttcctggtgggcggctgggcgtgaagatttacaa

SEQ ID NO: 66305 - DNA, 75 bp, synthetic construct
  source 1..75: mol_type = other DNA
ctctgccagcgcctcggcatcgatcaggtcccggcacgggtgagcgccgttcccggcgatcgcttcctgaaggtg

SEQ ID NO: 66306 - DNA, 75 bp, synthetic construct
  source 1..75: mol_type = other DNA
gtgaagttggcgcggcacttgatgacggctacaaacaaggggttctgccacagcgtccggctttagtgaacctgc

SEQ ID NO: 66307 - DNA, 75 bp, synthetic construct
  source 1..75: mol_type = other DNA
agacactgcagcgtaaataccctgatatatcacccgcacatcttgatgctgtgaaaactgaaatcgcgaaagcat

SEQ ID NO: 66308 - DNA, 75 bp, synthetic construct
  source 1..75: mol_type = other DNA
agccaagaacagaaaaaacaattaaacaaaaaatagcatcagcacagatgcgtctgaatcgcttgaagagtaaag

SEQ ID NO: 66309 - DNA, 75 bp, synthetic construct
  source 1..75: mol_type = other DNA
ctgaaggttgttttgaaattggtgtcactatcagtaaccctgtatttactgaagatgccattaacaagagaaaac

SEQ ID NO: 66310 - DNA, 75 bp, synthetic construct
  source 1..75: mol_type = other DNA
ggcggatttctggctttcagtgcgctcttccatgcccgggcatgaactgcagacgaagtttccgcagctatgcaa

SEQ ID NO: 66311 - DNA, 75 bp, synthetic construct
  source 1..75: mol_type = other DNA
gcgcagcgcgaagctgatattgaaaacgaaaaactccgtaaagaggtcgaggatttgagggctgccagcgaatca

SEQ ID NO: 66312 - DNA, 75 bp, synthetic construct
  source 1..75: mol_type = other DNA
agccggtggcatccgcgcagagtgaagccgatcgcattatggcgtgtgaagaagcgaacggtcgtgaacaactgg

SEQ ID NO: 66313 - DNA, 75 bp, synthetic construct
  source 1..75: mol_type = other DNA
ggcgatcacgcctcgagaacgagaactggtatcaggcttcgttgagtatctgtgcgaatcagttggtcgggaaca

SEQ ID NO: 66314 - DNA, 75 bp, synthetic construct
  source 1..75: mol_type = other DNA
ctgaaagcaccactggatgcgctgacgcatgccggactactcatagacgacgagcagtttgatgaaatcaatatt

SEQ ID NO: 66315 - DNA, 75 bp, synthetic construct
  source 1..75: mol_type = other DNA
tcgattactggactccgagcggtggggtgatcacgcctcgagaacgagaactggtatcaggcttcgttgagtacc

SEQ ID NO: 66316 - DNA, 75 bp, synthetic construct
  source 1..75: mol_type = other DNA
aacatctcaaccaaagtctttaatagtggattaggtatttccgtattccgcgacaattccacccgtacccgcttc

SEQ ID NO: 66317 - DNA, 75 bp, synthetic construct
  source 1..75: mol_type = other DNA
tctggttatcaggacatcacgcaaggaagtctggcgacgaacacaaccataaatggtgggcgacagtatgttgaa

SEQ ID NO: 66318 - DNA, 75 bp, synthetic construct
  source 1..75: mol_type = other DNA
atttgtcagcgcctcggcatcgatcaggttccggcacgggtgagcgcggtccccggcgatcgcttcctgaaggtg

SEQ ID NO: 66319 - DNA, 75 bp, synthetic construct
  source 1..75: mol_type = other DNA
ctggcggcgatgccggagatgacggtggaaaaagcccgcccgatcctggctgcttcaccgcaggcggatgccgga

SEQ ID NO: 66320 - DNA, 75 bp, synthetic construct
  source 1..75: mol_type = other DNA
cgggagatcgtcaaaacaaaagccactgcgacaggcacgacgctcaccggcggcgaacaaatcgtcgagggggtg

SEQ ID NO: 66321 - DNA, 75 bp, synthetic construct
  source 1..75: mol_type = other DNA
tttatgccaggtacaacagaaaccacggcggagaccacgaccacagaacaaaccgcggctacgactacggtcgcg

SEQ ID NO: 66322 - DNA, 75 bp, synthetic construct
  source 1..75: mol_type = other DNA
tccagaacatgacagttacgcaattagtgaaaagagtcacggcagagaagaaatccgtcttcacattgtttgcga

SEQ ID NO: 66323 - DNA, 75 bp, synthetic construct
  source 1..75: mol_type = other DNA
aattatgcgtggcagtctcctttcggtcaataatagcagaacaaaagaaagagcccgaaatgacggtcagatatt

SEQ ID NO: 66324 - DNA, 75 bp, synthetic construct
  source 1..75: mol_type = other DNA
gcgttttctacctctgtgaacatcatggctgcgtgatccatcagtctgagcttgaccagagcaacgggcggtgga

SEQ ID NO: 66325 - DNA, 75 bp, synthetic construct
  source 1..75: mol_type = other DNA
ctcctgaaacgggcggattctggatccgggaaattggtgtatttgatgagcacggcgatttaatcgcggtgggaa

SEQ ID NO: 66326 - DNA, 75 bp, synthetic construct
  source 1..75: mol_type = other DNA
actcaggggcgcacaaggtggatggcaatcagtttgaagccttaccggcagaggttcgccaggacatgcagcagc

SEQ ID NO: 66327 - DNA, 75 bp, synthetic construct
  source 1..75: mol_type = other DNA
cgtatgtcaaaagtggttcaggatgaactggacaaagctatcaacgaggtccttgatagaaatttgagtcaataa

SEQ ID NO: 66328 - DNA, 75 bp, synthetic construct
  source 1..75: mol_type = other DNA
cgccagtaagtgatgacatcagcagagcgctggcttttgctattaagtgggtggcggttggtatcgctgtgtctc

SEQ ID NO: 66329 - DNA, 75 bp, synthetic construct
  source 1..75: mol_type = other DNA
ggcaccattaacggtgatgaccatgtttttggtttatcggcggcccagcgttatggcggtatttttgtgcctccg

SEQ ID NO: 66330 - DNA, 75 bp, synthetic construct
  source 1..75: mol_type = other DNA
acgattattgccagcaaagatcgtgaaattgctgggcttaaatcctctctaacgatgttgatgtctgcgttcaat

SEQ ID NO: 66331 - DNA, 75 bp, synthetic construct
  source 1..75: mol_type = other DNA
atcttttgaaatcccatggaacccgaacacccgtaccgaggtgagcaccctctgcatcagccagttccgctacag

SEQ ID NO: 66332 - DNA, 75 bp, synthetic construct
  source 1..75: mol_type = other DNA
catggctgggtcgtaaacatcgtgataataccctcacgctgaaacgcttttcatcgggcgtcggtttctggtgcc

SEQ ID NO: 66333 - DNA, 75 bp, synthetic construct
  source 1..75: mol_type = other DNA
ctgggtaccagggacacgcgaagaggtcattgagggaatcagactactcggtgacgcacaacgtgaactggtcag

SEQ ID NO: 66334 - DNA, 75 bp, synthetic construct
  source 1..75: mol_type = other DNA
tgccctgctgtacagttccgcgtgaattacaggaacggcggtatcttttatcgttcagcgcgtgatggttatggc

SEQ ID NO: 66335 - DNA, 75 bp, synthetic construct
  source 1..75: mol_type = other DNA
gattctggataatctgcctccccgtccttttaacatccggatggtcagggagacggcggacagcaccacggacca

SEQ ID NO: 66336 - DNA, 75 bp, synthetic construct
  source 1..75: mol_type = other DNA
gccgcttaactgcgggtatctgcctgataactcaacttgtgttccctatggctgcggcagcacaaggtgtggtaa

SEQ ID NO: 66337 - DNA, 75 bp, synthetic construct
  source 1..75: mol_type = other DNA
tgcgattgaaatagaagcgttacgcaacgtctatgcgccgcgcccgcaggacaggcgctgtgcgctcggttccgt

SEQ ID NO: 66338 - DNA, 75 bp, synthetic construct
  source 1..75: mol_type = other DNA
ctgtagacagggtggtgatcacttctggagtgaatccagattaaacatctcattgctgatgcttgaagttgagca

SEQ ID NO: 66339 - DNA, 75 bp, synthetic construct
  source 1..75: mol_type = other DNA
atgaggaaactaacatttgaactaagaagccccatccatcagcagaacgccattcaagctatccagcaaattctt

SEQ ID NO: 66340 - DNA, 75 bp, synthetic construct
  source 1..75: mol_type = other DNA
tattgctgagccattccgccaggaaacattgaatgagattttacgcaaagcgttaacgcaatcttcattgcgcca

SEQ ID NO: 66341 - DNA, 75 bp, synthetic construct
  source 1..75: mol_type = other DNA
gcaatcagtgggcaggtaatatcaccgactgtacggtgattgtgaccaaaaaagccgcttccggcatcagtattc

SEQ ID NO: 66342 - DNA, 75 bp, synthetic construct
  source 1..75: mol_type = other DNA
ctggtcaccaaggaatggttggatcagctattacccgacgcctcaaacaacgtgatgatgttgagttggttttgc

SEQ ID NO: 66343 - DNA, 75 bp, synthetic construct
  source 1..75: mol_type = other DNA
accttgcaggataaaaatggcaacccactaaaagataaagaaatcaccttctctgtgccaaacgacgtcgcaagt

SEQ ID NO: 66344 - DNA, 75 bp, synthetic construct
  source 1..75: mol_type = other DNA
tggagtgaatccagattaaacatctcattgctgatgcttgaagttgagcatatggcgcgcggtaaggggctgcgt

SEQ ID NO: 66345 - DNA, 75 bp, synthetic construct
  source 1..75: mol_type = other DNA
tggagtgaatcatggttaaacatctcattgctgatgcttgatattgagcatctggcgcgcggtaaggggctgcgt

SEQ ID NO: 66346 - DNA, 75 bp, synthetic construct
  source 1..75: mol_type = other DNA
gtggtattccctgtatggtcaaacactcgcagaccccaagcgactcatggcgaaacttggaattatctgtaatgg

SEQ ID NO: 66347 - DNA, 75 bp, synthetic construct
  source 1..75: mol_type = other DNA
atcagggaccattaccgtcagggtttatgacgatcagccgtttgaccggcagattgttattccggcggtggcatt

SEQ ID NO: 66348 - DNA, 75 bp, synthetic construct
  source 1..75: mol_type = other DNA
tatgacgatcagccgtttgaccggcagattgttattccggcggtggcattcagcggcgctaaacatgagagagag

SEQ ID NO: 66349 - DNA, 75 bp, synthetic construct
  source 1..75: mol_type = other DNA
agcgtggcatcactcaggcagcagtagcacaggctaccggagtttccgcagcggttatcgcgcagatggttaatc

SEQ ID NO: 66350 - DNA, 75 bp, synthetic construct
  source 1..75: mol_type = other DNA
gcagatgggacttatttatgtcaatcctgaaggccccggtggaaaaccagatcctctggcttccgcgaaagatat

SEQ ID NO: 66351 - DNA, 75 bp, synthetic construct
  source 1..75: mol_type = other DNA
cttctctgccgcatggttttgcctgtggagtatcagcctgcacctggttgagcgccctgatatggcggtgctgtt

SEQ ID NO: 66352 - DNA, 75 bp, synthetic construct
  source 1..75: mol_type = other DNA
atgtttgattttgtctgcaaccatatgtcggcaaaaagtgaatggtttaaaaactatttacaacagcatccaggt

SEQ ID NO: 66353 - DNA, 75 bp, synthetic construct
  source 1..75: mol_type = other DNA
aaaaatgccgatatcagcggtaacgtgaatgcgaactccgggacgctcaacaacgtcacgattaacgagaactgt

SEQ ID NO: 66354 - DNA, 75 bp, synthetic construct
  source 1..75: mol_type = other DNA
gaaaactgcgaaaaggtggctgatggagaactgcctgtcacctgccacacctgtttttctatatggcaggatgta

SEQ ID NO: 66355 - DNA, 75 bp, synthetic construct
  source 1..75: mol_type = other DNA
tgttatcgctgttgactggagcggttacccttttcaggaatatcatgtccttcgtgccagcctcctctgcgacgg

SEQ ID NO: 66356 - DNA, 75 bp, synthetic construct
  source 1..75: mol_type = other DNA
cagaagcagctggtaaaggaagggatgccttgtcaggtaaagcttggtaacgacctggtagtgacggggtatgtt

SEQ ID NO: 66357 - DNA, 75 bp, synthetic construct
  source 1..75: mol_type = other DNA
ggtgatgaagcggcgctggcgcgcggtgtctataacacttatatcgaagataatctgcgctactcgcaaaacgcg

SEQ ID NO: 66358 - DNA, 75 bp, synthetic construct
  source 1..75: mol_type = other DNA
ggattattgcagagccaccggataagcgtcgtcgtgacctggacaatattctgaaagcaccgctggatgcgctga

SEQ ID NO: 66359 - DNA, 75 bp, synthetic construct
  source 1..75: mol_type = other DNA
ctgcgctttgctcatgataacaatcaggattacatcacctgcccactggcgcgtctggtgcgggatgttcagggc

SEQ ID NO: 66360 - DNA, 75 bp, synthetic construct
  source 1..75: mol_type = other DNA
atgacgatggcgctgggactttcagatatcaaagcgcagatgggcgggctggtatatcgcggttttgtcaccggt

SEQ ID NO: 66361 - DNA, 75 bp, synthetic construct
  source 1..75: mol_type = other DNA
atgatcgatacccccagagatttcatggccggtctggtctgccagattgaacgcagtgttcatgcattacgtgag

SEQ ID NO: 66362 - DNA, 75 bp, synthetic construct
  source 1..75: mol_type = other DNA
gagcaatcgcagtttatcgccatcgattttccggaaacctcaagcaccgcgctgcttacatcgcagcttgaagag

SEQ ID NO: 66363 - DNA, 75 bp, synthetic construct
  source 1..75: mol_type = other DNA
atcttctgcgacgaacatggtcgcgtgcgggtgaagttcaactgggaccgttataacccggcagaccaagacagt

SEQ ID NO: 66364 - DNA, 75 bp, synthetic construct
  source 1..75: mol_type = other DNA
tacgagccgttcgattttgactatcagaacctgcataccgcgccggaaggcagcaaatcgcagccgattgcccgt

SEQ ID NO: 66365 - DNA, 75 bp, synthetic construct
  source 1..75: mol_type = other DNA
tttgcaattattatggcggctgtgagtgcgcttgttaatgataagtttattgagcaggtcaataaacttattggt

SEQ ID NO: 66366 - DNA, 75 bp, synthetic construct
  source 1..75: mol_type = other DNA
caccctggatgatgtggtgtcatcctgccgcgattgcgttcttagtccgtggctattgcaccaccatcacgcgaa

SEQ ID NO: 66367 - DNA, 75 bp, synthetic construct
  source 1..75: mol_type = other DNA
acgcattgtactggcgaccaacgtcgcggaaacctcgctgaccgtaccgggtattaaatacgttatcgacccagg

SEQ ID NO: 66368 - DNA, 75 bp, synthetic construct
  source 1..75: mol_type = other DNA
atggattcagaaacagttcacggaacggtcaggtctggcgttggcagcgtgccggaagccgggccgttattctgg

SEQ ID NO: 66369 - DNA, 75 bp, synthetic construct
  source 1..75: mol_type = other DNA
ggcatgcctggacacttgacgaaaacaagcgcgataccgccgatcgcgcactgctaactcgccatgttcgtcatc

SEQ ID NO: 66370 - DNA, 75 bp, synthetic construct
  source 1..75: mol_type = other DNA
cctatgaagtgaatggtaagcagtatgtggtgatctccgcaggcggtcacggttcatttggtacgaagatgggcg

SEQ ID NO: 66371 - DNA, 75 bp, synthetic construct
  source 1..75: mol_type = other DNA
tggtcgcgattggcggctcctggtactaccctatcgctggccttgtgatgctcggcgtcgcctggatgctgtggc

SEQ ID NO: 66372 - DNA, 75 bp, synthetic construct
  source 1..75: mol_type = other DNA
acaacattccggcggcggacgagggaaataaccgcaccgactgggctgaggtgacgacgggaattaaccagagca

SEQ ID NO: 66373 - DNA, 75 bp, synthetic construct
  source 1..75: mol_type = other DNA
ctaaaaaagcgttactagcttccttcgtggcgtcaatcatggccctacctgcgaaagctggtattcctgtttttg

SEQ ID NO: 66374 - DNA, 75 bp, synthetic construct
  source 1..75: mol_type = other DNA
ttaagctgtccgaacagggagctaaaaaagccagaattgttccgaagggtagtatattagttacatgtatagcct

SEQ ID NO: 66375 - DNA, 75 bp, synthetic construct
  source 1..75: mol_type = other DNA
tatttcacaccttatgcgctaattgttggtcagttaggctcgaccttcaaagatgggaagggcggggtcagtacc

SEQ ID NO: 66376 - DNA, 75 bp, synthetic construct
  source 1..75: mol_type = other DNA
tgctcaggacgtgcaatacccagaacggcagttgcttggtgttgactttggagacaatttgttgattgaaaaatt

SEQ ID NO: 66377 - DNA, 75 bp, synthetic construct
  source 1..75: mol_type = other DNA
ttacagccaggctgtacaggctctacgcagcaacgactgggatctctggcaggcagaagcctctatccgcaacaa

SEQ ID NO: 66378 - DNA, 75 bp, synthetic construct
  source 1..75: mol_type = other DNA
aggcgttagaacttgatacagccaaaaatggttacatcctcctagttcaggacgcagagccaaacttcgatgtaa

SEQ ID NO: 66379 - DNA, 75 bp, synthetic construct
  source 1..75: mol_type = other DNA
cgctgaacccagcggtaaatcgtggagtgatcgacattcactccgcgttcagccagcatctcctgcagctcacgg

SEQ ID NO: 66380 - DNA, 75 bp, synthetic construct
  source 1..75: mol_type = other DNA
ctgaagcaatggcagctcgccttgatagcctggcgtgtcatatcacatcccgccagctaacccacgtcgaagcgg

SEQ ID NO: 66381 - DNA, 75 bp, synthetic construct
  source 1..75: mol_type = other DNA
ttcctgtttcgcaaccaatcatcattaacgctgctggttaccctgtatataacggacggattgccaagttcgtaa

SEQ ID NO: 66382 - DNA, 75 bp, synthetic construct
  source 1..75: mol_type = other DNA
ggcacacactccgggacgcactgaaaatgacgggcagatcgcgttcacagttttaccgtgatatgcgcgcaggcc

SEQ ID NO: 66383 - DNA, 75 bp, synthetic construct
  source 1..75: mol_type = other DNA
gaagaaagtcatggatgcagggaaaagaataccgccattacgctgtagaaggtgatccggggcattacagtgaat

SEQ ID NO: 66384 - DNA, 75 bp, synthetic construct
  source 1..75: mol_type = other DNA
acgaagaattcattcgtcagatgaaagaattaatcggtaacgaaggagatattcatgtcacttgcaaccacagtg

SEQ ID NO: 66385 - DNA, 75 bp, synthetic construct
  source 1..75: mol_type = other DNA
aatggcggaacccagagtgtacgagcttacccgcaactttctgatgaaatatcgtgcagaacgacttcatagtgg

SEQ ID NO: 66386 - DNA, 75 bp, synthetic construct
  source 1..75: mol_type = other DNA
cgtctgtctcaggaagtcaccgagcgtttttatgtgtgcacggatccgggctgtggtctggtgtttaaaacgctt

SEQ ID NO: 66387 - DNA, 75 bp, synthetic construct
  source 1..75: mol_type = other DNA
ccgggaaaacaagactgatgtttgagtcaaaggagcaggcactggaagttaaagaagggtacaaatttttaacgt

SEQ ID NO: 66388 - DNA, 75 bp, synthetic construct
  source 1..75: mol_type = other DNA
ggttaccacaagcgctgccatgtgcagggctgctcttgcctccgtacgcgcactggcgtcgttcggccagcagat

SEQ ID NO: 66389 - DNA, 75 bp, synthetic construct
  source 1..75: mol_type = other DNA
tttgtggcgcaggggaatcagttgttcatgaacgatgtgttcctgaagcggctgtttgcggtgagtatcacctcg

SEQ ID NO: 66390 - DNA, 75 bp, synthetic construct
  source 1..75: mol_type = other DNA
tttttgacagcgccagtcagaaacaactgtcagaagcacagtcaaaagctctttcagcgcgttttaacacggcac

SEQ ID NO: 66391 - DNA, 75 bp, synthetic construct
  source 1..75: mol_type = other DNA
cagaattactttctgttgcaacaggtggtgaaaagatagatgggcgagggcttacttttaaagtatcaactcttc

SEQ ID NO: 66392 - DNA, 75 bp, synthetic construct
  source 1..75: mol_type = other DNA
atattatatgtgagcaaaagttacgctctgaagccaaaagagatgaatacttgttgaatctgttggagaaagagt

SEQ ID NO: 66393 - DNA, 75 bp, synthetic construct
  source 1..75: mol_type = other DNA
atggcattaaccgatattaaagtgaaaaccgcaaaaccaaaagaaaagccctataaacttgctgatggcggcggt

SEQ ID NO: 66394 - DNA, 75 bp, synthetic construct
  source 1..75: mol_type = other DNA
atcgccagcgccagcttgatcaggagcgtcggcagctagaagatgaagagcggagaatggaagatgagtatgggc

SEQ ID NO: 66395 - DNA, 75 bp, synthetic construct
  source 1..75: mol_type = other DNA
ataaaacggattcggcagcactgctgccctgtattgaacaggcgagggaggatatccataccctgcgccagttgc

SEQ ID NO: 66396 - DNA, 75 bp, synthetic construct
  source 1..75: mol_type = other DNA
cgctggatattctgattgcgtggctgcaggacaatattgactgtgaatccgggattatcttcgacaacgatgagg

SEQ ID NO: 66397 - DNA, 75 bp, synthetic construct
  source 1..75: mol_type = other DNA
ctgacctctccgtgtttaacgcgcagtgccatggtggcagtgctgcagatgtgccgtgggtttgtggtgacacga

SEQ ID NO: 66398 - DNA, 75 bp, synthetic construct
  source 1..75: mol_type = other DNA
atctcgcttggtgtttacccaacgatcactcttgctgatgctcgttcccgtcgtgatgaagctcgaaaacttgtg

SEQ ID NO: 66399 - DNA, 75 bp, synthetic construct
  source 1..75: mol_type = other DNA
acgtttgttatctgggcatggaacagtcctctggatgaagtgacccgtggtcaggggagtattattcccggcagc

SEQ ID NO: 66400 - DNA, 75 bp, synthetic construct
  source 1..75: mol_type = other DNA
ttatggtggagtggttaagcagactatagctgcgcgcgtcgacatacgaacgggagaggttgtatcaatattaga

SEQ ID NO: 66401 - DNA, 75 bp, synthetic construct
  source 1..75: mol_type = other DNA
ttatgcccctcaacccattccggagatggacagttctgctgttgttcccccaactaatgaaaacacctcgcctcc

SEQ ID NO: 66402 - DNA, 75 bp, synthetic construct
  source 1..75: mol_type = other DNA
atcatcaccaaaaatgctacgaagatagttatgctaactggtgtaagaacgcaggagatgcgctttgctacgtgg

SEQ ID NO: 66403 - DNA, 75 bp, synthetic construct
  source 1..75: mol_type = other DNA
aagtgcttaatctgccccccctcggtcggagccctggtccttcctgtcatctatcgggcgattaaaactcactat

SEQ ID NO: 66404 - DNA, 75 bp, synthetic construct
  source 1..75: mol_type = other DNA
cgaagaggcgctggaatggctgaaaacagcgggccgggtaagtgcgattaacgtcagagcggaacagttacatca

SEQ ID NO: 66405 - DNA, 75 bp, synthetic construct
  source 1..75: mol_type = other DNA
ttcaagaatagccgcaaaatgttgtcattacaacaaggcggctatatgacgctcgcgcagtttgccatgattttc

SEQ ID NO: 66406 - DNA, 75 bp, synthetic construct
  source 1..75: mol_type = other DNA
tgtcaacatgaagctggcgcacccatggaagctgaaagatatttgtgactgcctgtacatcagtgaaagcctgtt

SEQ ID NO: 66407 - DNA, 75 bp, synthetic construct
  source 1..75: mol_type = other DNA
agaacagcattcgcggtgtatacaatcatgcacaatatcttaatggtcgatctcgtatgcttcagttttatgcag

SEQ ID NO: 66408 - DNA, 75 bp, synthetic construct
  source 1..75: mol_type = other DNA
gaaaatgcgtagacctcacattgttcctttatctactcaggtagttgaccttttcaaacagctcaaacctattac

SEQ ID NO: 66409 - DNA, 75 bp, synthetic construct
  source 1..75: mol_type = other DNA
tgtcgttaatcaggggtggatcacgctgcaggaagcggggatcaatctcgatcgtaatacgttggcggccatgct

SEQ ID NO: 66410 - DNA, 75 bp, synthetic construct
  source 1..75: mol_type = other DNA
atgacagagcagaaacggccagtactgacactgaaacgaagaaccgacgtggaaacaccgacccggagccggaaa

SEQ ID NO: 66411 - DNA, 75 bp, synthetic construct
  source 1..75: mol_type = other DNA
ggcaaccggcttctacggttccctgctgccaagcccggacgtacatggttataagtccagcgaaatgctttacaa

SEQ ID NO: 66412 - DNA, 75 bp, synthetic construct
  source 1..75: mol_type = other DNA
atgtcaggatccaacactgcaatcagccgtcgtcgtttactgcaaggcgcgggtgccatgtggctattgagcgta

SEQ ID NO: 66413 - DNA, 75 bp, synthetic construct
  source 1..75: mol_type = other DNA
agcttcatcgtcaaatctggcaaattgctaacgatgtcaggggttcggtcgatggatgggattttaagcaatacg

SEQ ID NO: 66414 - DNA, 75 bp, synthetic construct
  source 1..75: mol_type = other DNA
attacccgatgttcaaaacgctcgctcagggacgcttatttgatgtgctgccttatcctgttttctaccttgtca

SEQ ID NO: 66415 - DNA, 75 bp, synthetic construct
  source 1..75: mol_type = other DNA
ctccgctggcagctgacgactggaaaggtgtagagccgatttacgaaaccatgccgggctggtctgaatccacct

SEQ ID NO: 66416 - DNA, 75 bp, synthetic construct
  source 1..75: mol_type = other DNA
gcgatcggcaccaccggtcgtggtatcgggcctgcttatgaagataaagtagcacgtcgcggtctgcgtgttggc

SEQ ID NO: 66417 - DNA, 75 bp, synthetic construct
  source 1..75: mol_type = other DNA
ctttcaggtgaatgccacgaatgaagagctaaccgttgagtgtacgatgaatgccgctaaatgccgtatggtatc

SEQ ID NO: 66418 - DNA, 75 bp, synthetic construct
  source 1..75: mol_type = other DNA
atatcatttccataaacgaccttagtcgcgatgaccttaatctggtgctggcgacagcggcgaaactgaaagcaa

SEQ ID NO: 66419 - DNA, 75 bp, synthetic construct
  source 1..75: mol_type = other DNA
gccagaagcgcgaaagccgccatcaaaaaagagttgttgccggatttttccggctggattgagggaacgctggag

SEQ ID NO: 66420 - DNA, 75 bp, synthetic construct
  source 1..75: mol_type = other DNA
ttcactggagcactatgtcgcagcgttgcggcgcaatgccgcactgcgcgatgcagaaaaaacactgactgaagc

SEQ ID NO: 66421 - DNA, 75 bp, synthetic construct
  source 1..75: mol_type = other DNA
gccccgggtttcctggagagtgttttatctgtgaactcaggctgccagatcatcgtttccgatggaagcataata

SEQ ID NO: 66422 - DNA, 75 bp, synthetic construct
  source 1..75: mol_type = other DNA
acgatgggcgcatcggtgatgacgctgctgaaattccacccggtgatccaggcggcaatcggcgcgaacgaacgc

SEQ ID NO: 66423 - DNA, 75 bp, synthetic construct
  source 1..75: mol_type = other DNA
caacgggtgaaattacagatgtgtgatgtagaatacctctttgaaattgaaatgaatctaatgaaaacacttttg

SEQ ID NO: 66424 - DNA, 75 bp, synthetic construct
  source 1..75: mol_type = other DNA
gtggaatatcatttatgtcacgctgaaaacctgtggctggagccgaaatggccaaagcaaaacgccgaatggtga

SEQ ID NO: 66425 - DNA, 75 bp, synthetic construct
  source 1..75: mol_type = other DNA
tgcatacggcgacaattggcgcgttagcgtcttttttgttgctacaactcagctatacccaaattatggtgggct

SEQ ID NO: 66426 - DNA, 75 bp, synthetic construct
  source 1..75: mol_type = other DNA
gcgtcgttaacccgatcctgaccaccgtcgcgcgcggttataaaaacgcggcgtttatcggggagaagattttcc

SEQ ID NO: 66427 - DNA, 75 bp, synthetic construct
  source 1..75: mol_type = other DNA
aaccattaatggcaatacggtgacgtggtcgaatcttgagcagggtatgggatcttatatttatacattctgggg

SEQ ID NO: 66428 - DNA, 75 bp, synthetic construct
  source 1..75: mol_type = other DNA
atttgccgcctgaaatgacgctaacacctgaacagcgtcaactggcgcaaaactggaatcaggggaacgggaaaa

SEQ ID NO: 66429 - DNA, 75 bp, synthetic construct
  source 1..75: mol_type = other DNA
gcaatagataaccacgggaaggaaataacaaacagaaaaggattacctaatgtctgcagagttcatggtaatatg

SEQ ID NO: 66430 - DNA, 75 bp, synthetic construct
  source 1..75: mol_type = other DNA
accaggagccggtgcagaatacgccagggcaacaatctcctgctggcagtaatttttcttcactatggggtgatt

SEQ ID NO: 66431 - DNA, 75 bp, synthetic construct
  source 1..75: mol_type = other DNA
acagagatacagggctaaatattcttgatattgccgctaactatgctgatttcgtgacagaagctgttttaagaa

SEQ ID NO: 66432 - DNA, 75 bp, synthetic construct
  source 1..75: mol_type = other DNA
tcacgagtatttttatggaccgattcaacaaccggtattcgtgatgaaggggtgtataacagccagacgggaaaa

SEQ ID NO: 66433 - DNA, 75 bp, synthetic construct
  source 1..75: mol_type = other DNA
gcatccggcctcggtggttgccctcaatgcgcgggcactgcaggagattttcagcgataaccgtcagcgggtcag

SEQ ID NO: 66434 - DNA, 75 bp, synthetic construct
  source 1..75: mol_type = other DNA
atgtgtacgcgctggcgaaaaaaatgatgccggaatatcagggaggcttctggcacttcatctgcctgccggacg

SEQ ID NO: 66435 - DNA, 75 bp, synthetic construct
  source 1..75: mol_type = other DNA
tttccaggtgagctatcgctatccgggcgaagaacgggacaaagcgagccgggaggcgacggccagacagcgcga

SEQ ID NO: 66436 - DNA, 75 bp, synthetic construct
  source 1..75: mol_type = other DNA
ataagcaatttggcatctacatgattaataactcaaggacagccaatggcaccgatggtcaggcgtacatggaca

SEQ ID NO: 66437 - DNA, 75 bp, synthetic construct
  source 1..75: mol_type = other DNA
aacccaaagcgctgatccacgatatcagcgagatgttgcttgtgcagtacgccaacagtgagttgctgaacaagt

SEQ ID NO: 66438 - DNA, 75 bp, synthetic construct
  source 1..75: mol_type = other DNA
aatgaatgtgctaaggaatcggtgcgctcaccattcacgcatctggaacaaggtcaacgaaccaagattaatgcc

SEQ ID NO: 66439 - DNA, 75 bp, synthetic construct
  source 1..75: mol_type = other DNA
cgaatcccccatataacaacagacaatattagaaccagactcgatcaggttcgtccaggtactaattttcgcgca

SEQ ID NO: 66440 - DNA, 75 bp, synthetic construct
  source 1..75: mol_type = other DNA
ttattggtttgttcactcttattgtggtgagtgccgcgctgctgttttgcctatggctgacaaattccggttctg

SEQ ID NO: 66441 - DNA, 75 bp, synthetic construct
  source 1..75: mol_type = other DNA
tgtgttactggaccagtagttgtcctttagatagcccacatgagaatgataattcgtcagggagtcagccgaatg

SEQ ID NO: 66442 - DNA, 75 bp, synthetic construct
  source 1..75: mol_type = other DNA
ttgtgggaggcgggatcggcggtgcggcaactgcgctgtcactggcccgcctggggatcaaagtggtgctgctgg

SEQ ID NO: 66443 - DNA, 75 bp, synthetic construct
  source 1..75: mol_type = other DNA
ttagcggcgatttaggccagtctgcactccttgtttctgtaccgcaggcttatctggaatataccgacagcgagt

SEQ ID NO: 66444 - DNA, 75 bp, synthetic construct
  source 1..75: mol_type = other DNA
tatttgatgaatggtttgaagagcaggaactagccctaaaacgaaaagtgctggctgaacttaaacatcttgaag

SEQ ID NO: 66445 - DNA, 75 bp, synthetic construct
  source 1..75: mol_type = other DNA
tagtgaatcaggcaatgggcggaattttacaggacagcattaatgaaatgggcgcgaaagcggtgctgaaaagcg

SEQ ID NO: 66446 - DNA, 75 bp, synthetic construct
  source 1..75: mol_type = other DNA
gtgttaattatcgaaaccctgccgctgctgcgtcagcaaatccgccgcctgcgtatggaaggtaagcgcgtggcg

SEQ ID NO: 66447 - DNA, 75 bp, synthetic construct
  source 1..75: mol_type = other DNA
aggcattttcccgcacaaaccgtatctatgatgccaccaaaaccttcggcaatatcgtgacgttcagggacctgg

SEQ ID NO: 66448 - DNA, 75 bp, synthetic construct
  source 1..75: mol_type = other DNA
caatggcaacggataactgtgcccgctgggtgttgtctgtcgtgcgtcgggatctcggttttgatgacagtcacg

SEQ ID NO: 66449 - DNA, 75 bp, synthetic construct
  source 1..75: mol_type = other DNA
aaggtggactataacgatgtccgcccacagtttaagtctcttgaaacggaaacagacgagaaaaaactcagcgcg

SEQ ID NO: 66450 - DNA, 75 bp, synthetic construct
  source 1..75: mol_type = other DNA
gctttttccccgtccaggttcgtttcacgccagcccacgaacgtttccacctggcattatgttcgccgggagacg

SEQ ID NO: 66451 - DNA, 75 bp, synthetic construct
  source 1..75: mol_type = other DNA
ccagaatacttgatatgggtgttctgctggaaatgaaagcgcttgtgaatgcaaatggtggtgtgtcacggtgca

SEQ ID NO: 66452 - DNA, 75 bp, synthetic construct
  source 1..75: mol_type = other DNA
ccagtggcctcattccgactggcacagcgagaacatgacaacaatgcgacacgcgccgggcgcaatccgtctgtg

SEQ ID NO: 66453 - DNA, 75 bp, synthetic construct
  source 1..75: mol_type = other DNA
atatgtgcagatcagaaagaatttgatgcttttttaaaactggcagaaaaactgagagaaaaccctacgggtaat

SEQ ID NO: 66454 - DNA, 75 bp, synthetic construct
  source 1..75: mol_type = other DNA
ggcactggcagcgtcactggatgaacagggatacagcgttaatgacatcatccatatcctgatggcagaaggagg

SEQ ID NO: 66455 - DNA, 75 bp, synthetic construct
  source 1..75: mol_type = other DNA
ccacgcagtacgacaccgacgcggtttacgcgctgatttgtgagctaaaacaggcggagtttgaccaccacgcgt

SEQ ID NO: 66456 - DNA, 75 bp, synthetic construct
  source 1..75: mol_type = other DNA
acatgttctacgccatacctttgcagctcactttatgattaatggaggaaatatacttacgctccagcgaattat

SEQ ID NO: 66457 - DNA, 75 bp, synthetic construct
  source 1..75: mol_type = other DNA
attcaggaaattccgggggatattttcgcagcggcggcaacttatgacggtgaagttatcaccatttatccaggc

SEQ ID NO: 66458 - DNA, 75 bp, synthetic construct
  source 1..75: mol_type = other DNA
ccgctacccgcagggcgtaaagctcgatcaggaaaacagccgtatttttctgccgaaactgggctggatgcgcta

SEQ ID NO: 66459 - DNA, 75 bp, synthetic construct
  source 1..75: mol_type = other DNA
tcacgttatgcgtcacacgttcgccacgcatttcatgatgaacggcggaaatatcgttacgttacagcgaatcct

SEQ ID NO: 66460 - DNA, 75 bp, synthetic construct
  source 1..75: mol_type = other DNA
cggtgagcgacctgacgggccgtccgctgatgctctttaacagtgaaggtaaaaccgtctggcgaccgggacaga

SEQ ID NO: 66461 - DNA, 75 bp, synthetic construct
  source 1..75: mol_type = other DNA
ggagagcaggttaaagagacgatacgaaaaaatgtatctcctcttgaacgttaccgtaagaacaaagaacgatag

SEQ ID NO: 66462 - DNA, 75 bp, synthetic construct
  source 1..75: mol_type = other DNA
accgtggcatttgaagagatgtatggctcccagctggagctgatatttcgttttatcgatcatgcgctggcaata

SEQ ID NO: 66463 - DNA, 75 bp, synthetic construct
  source 1..75: mol_type = other DNA
gtggttaaaaaagaaccacgggcatcttatttttttctgttccggctgtatacccgcattcacaatacatttttc

SEQ ID NO: 66464 - DNA, 75 bp, synthetic construct
  source 1..75: mol_type = other DNA
aacgcttcttccgcagtctgaaaacagaatgggtgccaaccgatggctacacaggcaaagacgtggcccggcagc

SEQ ID NO: 66465 - DNA, 75 bp, synthetic construct
  source 1..75: mol_type = other DNA
tatattcaaaagagaagtgatcaataaagcaataaaagagattaaagaaaaaacggaaatagaattcctgtcctg

SEQ ID NO: 66466 - DNA, 75 bp, synthetic construct
  source 1..75: mol_type = other DNA
tatggtgcggagatattacgtatatctgggcaggaaatcgctggtgctatctggcggtcgtcatggatctttttg

SEQ ID NO: 66467 - DNA, 75 bp, synthetic construct
  source 1..75: mol_type = other DNA
ggatgatgcaggcgcgaaaaaattcggttctgtcctcgccggtacaactacaaatgtcatcaaaatggggctggc

SEQ ID NO: 66468 - DNA, 75 bp, synthetic construct
  source 1..75: mol_type = other DNA
gcgctgcgcattctgaacagtacgttctggatgtcgccgattggcctcattaccgcgctggcggcggggattgcc

SEQ ID NO: 66469 - DNA, 75 bp, synthetic construct
  source 1..75: mol_type = other DNA
attgtcaccttactcaagggcttatagctgtatcagaattagcatcccgagtatcctctaaaaccggtcgaaaac

SEQ ID NO: 66470 - DNA, 75 bp, synthetic construct
  source 1..75: mol_type = other DNA
cggcaatctatatgtcagatggatataatatgacagaagatggtgccacgttaaaggctcaaaactatgcctggg

SEQ ID NO: 66471 - DNA, 75 bp, synthetic construct
  source 1..75: mol_type = other DNA
cagaaccgtattgatatttactgagagctcagatcaactttccagggcaacagatcgcgtacccggtttgccggc

SEQ ID NO: 66472 - DNA, 75 bp, synthetic construct
  source 1..75: mol_type = other DNA
aggaaatcgctggtgctatctggcggtcgtcatggatctttttgcccgcagggttatcggctggagcctgtcagc

SEQ ID NO: 66473 - DNA, 75 bp, synthetic construct
  source 1..75: mol_type = other DNA
gtcctggcatttggcagacaggccgaagcactggcaaggcaccgcaaaggtgaactcctgaccgtggcgggtaac

SEQ ID NO: 66474 - DNA, 75 bp, synthetic construct
  source 1..75: mol_type = other DNA
tgttgatcccctgctacaaccacggcgcgatgatgccgggcgtgctggcgcgtcttaagccatttaatctgccct

SEQ ID NO: 66475 - DNA, 75 bp, synthetic construct
  source 1..75: mol_type = other DNA
ggttttaccaagcaggggacgcatcaggcgatggatgatatccgtgaatcggtggcggagctggcttactaccgc

SEQ ID NO: 66476 - DNA, 75 bp, synthetic construct
  source 1..75: mol_type = other DNA
tctaaatcaattaagggtgtattacgcggattgcactatcagctggaaccttatgctcaaggtaaattagttcgt

SEQ ID NO: 66477 - DNA, 75 bp, synthetic construct
  source 1..75: mol_type = other DNA
gccatgcaggcagtgatgccttcagtggtgaaacgaagtctgtgggtgccggtctctatgcctctgccatgtttg

SEQ ID NO: 66478 - DNA, 75 bp, synthetic construct
  source 1..75: mol_type = other DNA
ccctgcagtccatgaacgcacaggaatatgaagaaatccgtgctgcgggaagcgatatgcgccgtaatctcactc

SEQ ID NO: 66479 - DNA, 75 bp, synthetic construct
  source 1..75: mol_type = other DNA
ctgaatccaataactttatcgttcttgataagtacatcaaagctgagccaacaggcgacagctaccagagcgaat

SEQ ID NO: 66480 - DNA, 75 bp, synthetic construct
  source 1..75: mol_type = other DNA
atttttaaaattaccgctgatacctatacatctattacaaaagtcaaaccttcagttgcatatcgccagttaaaa

SEQ ID NO: 66481 - DNA, 75 bp, synthetic construct
  source 1..75: mol_type = other DNA
cagcgattcttatgcggtatccatcactgatggaagccagaacatgcacgatggtctgctaatggcctccgtatc

SEQ ID NO: 66482 - DNA, 75 bp, synthetic construct
  source 1..75: mol_type = other DNA
aacagcgtctggcacatgtctccattggtcatgtgctgatgcgaaacctgccgatggtgcagaccattctggtgg

SEQ ID NO: 66483 - DNA, 75 bp, synthetic construct
  source 1..75: mol_type = other DNA
gggtgatgttccacagcgatcagggcagtcattatacgagcaggcagttccggcagttattgtggcgataccaga

SEQ ID NO: 66484 - DNA, 75 bp, synthetic construct
  source 1..75: mol_type = other DNA
aagacctgctggaaaaagcagcaaccgaaccggcgcaccgcccggcctttttccgtactctactggaatccaccg

SEQ ID NO: 66485 - DNA, 75 bp, synthetic construct
  source 1..75: mol_type = other DNA
atcaagatataggaagtcataacaattttgtggggcaggctaataatacaaccattaacggtggcagacagtcaa

SEQ ID NO: 66486 - DNA, 75 bp, synthetic construct
  source 1..75: mol_type = other DNA
tggaacatgccccagctggcaaaaccttatcttgagcactgggaggaccgttggaatcgtggggaggactataaa

SEQ ID NO: 66487 - DNA, 75 bp, synthetic construct
  source 1..75: mol_type = other DNA
tgaaacaagaattttccggcgttcctgatgatgcggctgatgcgctttcgtcaatgccagaacttattagagcgg

SEQ ID NO: 66488 - DNA, 75 bp, synthetic construct
  source 1..75: mol_type = other DNA
tgaagaaaacctgctaccagctccttcatcgtccttaattaatatattgaaagaacattataatgaagatgaaat

SEQ ID NO: 66489 - DNA, 75 bp, synthetic construct
  source 1..75: mol_type = other DNA
aagggcagggtggctgtcagccgttttggcaaacctgatccggatgtcatgagtggtaaaaaacgctctgttttt

SEQ ID NO: 66490 - DNA, 75 bp, synthetic construct
  source 1..75: mol_type = other DNA
acatctctggcactggtagctgtcacaaccggccctgacatgatcaaaatgttgcggggacggatctccggtgcg

SEQ ID NO: 66491 - DNA, 75 bp, synthetic construct
  source 1..75: mol_type = other DNA
agtctctggaagatgccgcgaaaattctttcctttggcgcggataaaatttccatcaactcccctgcgctggcgg

SEQ ID NO: 66492 - DNA, 75 bp, synthetic construct
  source 1..75: mol_type = other DNA
cacaacgaccagcctttacagccggatatacggtgtggagtggccgtcaggaaataatgttcgccatgcgcgtga

SEQ ID NO: 66493 - DNA, 75 bp, synthetic construct
  source 1..75: mol_type = other DNA
atgccgatgaatacttcaggtacgtctttcagctcttttggtataagttgccatagagaaggctcctttaggaac

SEQ ID NO: 66494 - DNA, 75 bp, synthetic construct
  source 1..75: mol_type = other DNA
atatccggatctgcaaatcatcggcggcaacgtggcaacagctgcaggtgcacgcgctctggcagaagctggttg

SEQ ID NO: 66495 - DNA, 75 bp, synthetic construct
  source 1..75: mol_type = other DNA
actggtttgcctgcgccacgtttgataactgggagggctggaatgagcaacagatacagtttttactgaaaagta

SEQ ID NO: 66496 - DNA, 75 bp, synthetic construct
  source 1..75: mol_type = other DNA
tgattaacgaaaaactgaacagcgcggcgattagtgattacgcgccgaatggtttgcaggtggaaggcaaagaga

SEQ ID NO: 66497 - DNA, 75 bp, synthetic construct
  source 1..75: mol_type = other DNA
gaaggactgccattaccggacagggaagatgcgcctcatcccagaattaaacaattagcgagatttgcgcatacg

SEQ ID NO: 66498 - DNA, 75 bp, synthetic construct
  source 1..75: mol_type = other DNA
atgggaattgcattatctactgttttatttgacaaaaacgtaaaaaagatcccagctttattaatatttttaatg

SEQ ID NO: 66499 - DNA, 75 bp, synthetic construct
  source 1..75: mol_type = other DNA
cactggtacagcgaacctgtccggggcatacagggttacaactgttatgacggtggtgaacatacggacagtgac

SEQ ID NO: 66500 - DNA, 75 bp, synthetic construct
  source 1..75: mol_type = other DNA
accgggcgttatttccaggagattaacggtaagcgcgtgttactggaacggggcgattttgtttttattccgtta

SEQ ID NO: 66501 - DNA, 75 bp, synthetic construct
  source 1..75: mol_type = other DNA
tttttcgactgccagcccgactgtccgactggctcttcagaaggggaccggtgcaggaaattgtagtggcacact

SEQ ID NO: 66502 - DNA, 75 bp, synthetic construct
  source 1..75: mol_type = other DNA
tgctatggcattccggtggtgaaaggtccggtgcttggtttgccacttgttgaagagaaatgtctggcgtggatg

SEQ ID NO: 66503 - DNA, 75 bp, synthetic construct
  source 1..75: mol_type = other DNA
gtcagcatcttccagcgcaggaacggcatcaacaaaggccagtgaagcatcgaaaagtgctgctgctgcagagtc

SEQ ID NO: 66504 - DNA, 75 bp, synthetic construct
  source 1..75: mol_type = other DNA
gcggtgactggtatcccttttcagaaggtcgccgttttgtatcattccatcacgtggatgagcttcgtatctgtg

SEQ ID NO: 66505 - DNA, 75 bp, synthetic construct
  source 1..75: mol_type = other DNA
accagtttgaacgtgcgaacggttcgacttatcgggaactggaaatcgctctgccccgtgaactgacagcggaac

SEQ ID NO: 66506 - DNA, 75 bp, synthetic construct
  source 1..75: mol_type = other DNA
tggctatcaaaaccaacagacaagcgacgtctgtcggagctgacacagatctggtgggatttaaagggtaaacac

SEQ ID NO: 66507 - DNA, 75 bp, synthetic construct
  source 1..75: mol_type = other DNA
gcaaacctgtagcgggatttctgatttgcaggtgccgctgcgtgacttgtggaatccggctacctgtccggtcag

SEQ ID NO: 66508 - DNA, 75 bp, synthetic construct
  source 1..75: mol_type = other DNA
gcggttctgctgggtggcatggttggggcgggtattgtgctggggcgtaatgcgctgcgtaattacaacgcgaag

SEQ ID NO: 66509 - DNA, 75 bp, synthetic construct
  source 1..75: mol_type = other DNA
ggttttatggaaacccgttcagttttcccttctgactatactattcggtggttatgatacagcgcgttatatcca

SEQ ID NO: 66510 - DNA, 75 bp, synthetic construct
  source 1..75: mol_type = other DNA
ttgttaagaagataaaagaaagcagtccctttgcgccgaccagcgattacgagcaactgtcattctcgaagagtt

SEQ ID NO: 66511 - DNA, 75 bp, synthetic construct
  source 1..75: mol_type = other DNA
tatcgccgcttataccaaaggacttttcccggcagctattggggcgatgtttatagcgtttgttatctggtttat

SEQ ID NO: 66512 - DNA, 75 bp, synthetic construct
  source 1..75: mol_type = other DNA
cttcctggtgggcatattattaccttgttcgcaatgcttattttatatttggcataccatgcttatcattttatg

SEQ ID NO: 66513 - DNA, 75 bp, synthetic construct
  source 1..75: mol_type = other DNA
ttatcgccgacatcatcgcctggtgttccggcaacatgccgcgatttaataccatcagtatcagcggttaccaca

SEQ ID NO: 66514 - DNA, 75 bp, synthetic construct
  source 1..75: mol_type = other DNA
gagcagattcggattgccgcgtacgacaccagcgaaaccccctggctactggagatggttgccgggatgattgaa

SEQ ID NO: 66515 - DNA, 75 bp, synthetic construct
  source 1..75: mol_type = other DNA
cgattcttcttgatgagctgaaaagtgcccgggagcaacaaaaaaggcgtgatgaacgtgctgatggttccgtcc

SEQ ID NO: 66516 - DNA, 75 bp, synthetic construct
  source 1..75: mol_type = other DNA
cctctctggttatctgcaccatcgtctgcctatcatgggctgttaatcattatcgtgataacgccatcgcctaca

SEQ ID NO: 66517 - DNA, 75 bp, synthetic construct
  source 1..75: mol_type = other DNA
ggaacgtctgctgcgtatctgttttatgcgcaaaaaacaacagacgggcaaaaccttactgaaccgccccgggtt

SEQ ID NO: 66518 - DNA, 75 bp, synthetic construct
  source 1..75: mol_type = other DNA
ccgcgcaagaaaaatacgatacgctatttggcgaagtggtatctgcagcggcagacgcacgagtatttgtcgaag

SEQ ID NO: 66519 - DNA, 75 bp, synthetic construct
  source 1..75: mol_type = other DNA
gaagaatatttcgcccgcaaaaacagtacatactcaggttcacaacaaaatactggtgcatctgacacgaccgca

SEQ ID NO: 66520 - DNA, 75 bp, synthetic construct
  source 1..75: mol_type = other DNA
aaggacgattggcgcaactgcgactcttggagtatcaatggggcttgaggctggctttggtgcaatgatgcgttt

SEQ ID NO: 66521 - DNA, 75 bp, synthetic construct
  source 1..75: mol_type = other DNA
tccatcgatactatcaatgacatgttggctgatggacgtcttatccgtcaccgtctgcggaaagataaaaaacgc

SEQ ID NO: 66522 - DNA, 75 bp, synthetic construct
  source 1..75: mol_type = other DNA
tacccgaaggccctttctcacgcgaacaggcggttgccgtcacaacagcttaccgcaatgtgcttattgaagatg

SEQ ID NO: 66523 - DNA, 75 bp, synthetic construct
  source 1..75: mol_type = other DNA
gaactcttaccgagttgttaggccgatggtggatatatcacggaaaatcgcatgagcggggggatattgaacggg

SEQ ID NO: 66524 - DNA, 75 bp, synthetic construct
  source 1..75: mol_type = other DNA
cgtggctacctttgacggacatatcgttgaagcactgatgaaaacgcctgaaattaacgctatgtatccggaacg

SEQ ID NO: 66525 - DNA, 75 bp, synthetic construct
  source 1..75: mol_type = other DNA
cggatgaacgaaacggaagcagcacgacatcagcgtgaaattgcgcgtattaatgccatgcagtacgccgatcag

SEQ ID NO: 66526 - DNA, 75 bp, synthetic construct
  source 1..75: mol_type = other DNA
agtttaagcgactgaaggatgacccggtaaatgcagccaggacgctggataatgaactgcatttcctgactgcca

SEQ ID NO: 66527 - DNA, 75 bp, synthetic construct
  source 1..75: mol_type = other DNA
atggcctatgcgcaccttgcgcctgactacctgcaaaatgccgtcgctctgaatccactaaaaggcggagtgacg

SEQ ID NO: 66528 - DNA, 75 bp, synthetic construct
  source 1..75: mol_type = other DNA
tgcgtccggactggaaccctccggccattgaacacctgcgcaataacgaatttccctggttttccccggtgattg

SEQ ID NO: 66529 - DNA, 75 bp, synthetic construct
  source 1..75: mol_type = other DNA
actgaacgaaaacagacgctactggcaggaacaggaactgatgcaggcagactggaaaaacggtgccatgcgggc

SEQ ID NO: 66530 - DNA, 75 bp, synthetic construct
  source 1..75: mol_type = other DNA
taaattctggagtaatatattttgaaagtcctgtaggttcaccatctaacgaggatgttaaagttgcactcgaaa

SEQ ID NO: 66531 - DNA, 75 bp, synthetic construct
  source 1..75: mol_type = other DNA
gatcgacattcacaaagatcccgtggcactgaacaaatacatcactgaatacctgactacaaagggcgtgtttga

SEQ ID NO: 66532 - DNA, 75 bp, synthetic construct
  source 1..75: mol_type = other DNA
gactggtgtcagatcatgccagccggtcgggtaaaggcccgtgacggtcgcccggaaaaaccggctgaaggctgg

SEQ ID NO: 66533 - DNA, 75 bp, synthetic construct
  source 1..75: mol_type = other DNA
atcccctgcccgtggcgttactacaacgatcgcgatgtacgcacaatcgttgagctggggaaagccatagacttc

SEQ ID NO: 66534 - DNA, 75 bp, synthetic construct
  source 1..75: mol_type = other DNA
ctatgaaagccactgtgaacgcttccagcactgacaccacgaagatttttaaagaatttgatcagattgctactg

SEQ ID NO: 66535 - DNA, 75 bp, synthetic construct
  source 1..75: mol_type = other DNA
gtctgtgatatcagccttaacctgcaattgacggaacgtgtgctggtcagtactgacggcagtgtgtcgagcgtt

SEQ ID NO: 66536 - DNA, 75 bp, synthetic construct
  source 1..75: mol_type = other DNA
atgaggaaaataaaattagacaatgatgatttaattcagtacatgaacaccattaaagcattaaaaaaatatcca

SEQ ID NO: 66537 - DNA, 75 bp, synthetic construct
  source 1..75: mol_type = other DNA
tgatcggcggcaccctgaacatcaagcacgtgcgtgcccactgggacgacatcctgcgcctggccagctcgatca

SEQ ID NO: 66538 - DNA, 75 bp, synthetic construct
  source 1..75: mol_type = other DNA
cgaagtgatcttcaccttctccggtgattccggtgcagtacgtcaggcggtgattgccgcgcgtgaagtcggtct

SEQ ID NO: 66539 - DNA, 75 bp, synthetic construct
  source 1..75: mol_type = other DNA
cggctttgacgggcggacgcaacgttatcattatgacctgaccggaaaactcacgcagagtgaagatgaggggct

SEQ ID NO: 66540 - DNA, 75 bp, synthetic construct
  source 1..75: mol_type = other DNA
tggaatatcaccgaccatgtactgcgttatctcatcattgatttttcatcagcaccgggtgtggtgcaggaggct

SEQ ID NO: 66541 - DNA, 75 bp, synthetic construct
  source 1..75: mol_type = other DNA
agaattgggctgcgaatcctaataaatcctaagtttttttcgagttttgcgaccagtacgcgcacgcgcgaaggt

SEQ ID NO: 66542 - DNA, 75 bp, synthetic construct
  source 1..75: mol_type = other DNA
tattgcgggtaagaaggcagacctgattatcagctcagcactgttaaggcgggtgatggcagtgaaaatgtcgga

SEQ ID NO: 66543 - DNA, 75 bp, synthetic construct
  source 1..75: mol_type = other DNA
atcgcggttgtggagggactggggcgtcgtgatctgcgccggtatggtgctgcgtatgagtccagctttgtttat

SEQ ID NO: 66544 - DNA, 75 bp, synthetic construct
  source 1..75: mol_type = other DNA
atgactaaaaatactcgtttttcccccgaagtcagtcatagggcgattcgtatggttctggaaagtcagggcgaa

SEQ ID NO: 66545 - DNA, 75 bp, synthetic construct
  source 1..75: mol_type = other DNA
gggcttgatatgcagataggggaaggaggtcaggggctgtcaggaggacagcggcagatggtggccctgacaaga

SEQ ID NO: 66546 - DNA, 75 bp, synthetic construct
  source 1..75: mol_type = other DNA
acagtgtattgctgcgtgccgacgatcccctgatcgacatgaactacatcaccagtttcactggcatgacagata

SEQ ID NO: 66547 - DNA, 75 bp, synthetic construct
  source 1..75: mol_type = other DNA
tgattataagaatgccattcaggagataacaaatggagatgatgcctttgagttacttgataagctgagaactca

SEQ ID NO: 66548 - DNA, 75 bp, synthetic construct
  source 1..75: mol_type = other DNA
atgggccagcaacagcagggatagatgatttgggtgaaattttagctaagatgaaacagagaacatcgagaggaa

SEQ ID NO: 66549 - DNA, 75 bp, synthetic construct
  source 1..75: mol_type = other DNA
ttaggggatatcatgaattacttactttttctcaaacaggaatatggaatcgcaatggcagaggtgcggcaagag

SEQ ID NO: 66550 - DNA, 75 bp, synthetic construct
  source 1..75: mol_type = other DNA
gagggagccatgaaactgacaaatcagacgatcagcgtcaaagatggcagtaatgttcttagggtgcaggttggc

SEQ ID NO: 66551 - DNA, 75 bp, synthetic construct
  source 1..75: mol_type = other DNA
agggatggatacaaagacagcaagtgattacctgccacagacaaattggccaacaactcaattaccaccaggata

SEQ ID NO: 66552 - DNA, 75 bp, synthetic construct
  source 1..75: mol_type = other DNA
tcacgcaaatactattagcagagcttgagggtcgggaatattttgggattctaaatatacaaaaaagtgtaggga

SEQ ID NO: 66553 - DNA, 75 bp, synthetic construct
  source 1..75: mol_type = other DNA
cggtagctatggcagtggtgtcttttggtgcaaatgcagctgtatctatccctcaaggacaaggtgaagtaagtt

SEQ ID NO: 66554 - DNA, 75 bp, synthetic construct
  source 1..75: mol_type = other DNA
atgacaccacgacaattactcgaagacgtcaaatcccgcttcacacctttgattgcggatgaacctgccttactg

SEQ ID NO: 66555 - DNA, 75 bp, synthetic construct
  source 1..75: mol_type = other DNA
tcccgagcttacagtagaggaaaatatttttatcggcagggagttttgtaaaaaaaatcgctggcgtctggatga

SEQ ID NO: 66556 - DNA, 75 bp, synthetic construct
  source 1..75: mol_type = other DNA
accgctcaacggaaaacattgcgtgattttcttgatgccattcgtgatgacatcattgtcctggtaaggacaaag

SEQ ID NO: 66557 - DNA, 75 bp, synthetic construct
  source 1..75: mol_type = other DNA
aatgactctgatcaggacatttctgttgttgactttggcgatgtatatatttctgaaatcaatgccaagaccaaa

SEQ ID NO: 66558 - DNA, 75 bp, synthetic construct
  source 1..75: mol_type = other DNA
tggcgagacggcagatcactcaattaaggtgaacggtcatcaagaaatcacatccaccagcaggacgtgtgacca

SEQ ID NO: 66559 - DNA, 75 bp, synthetic construct
  source 1..75: mol_type = other DNA
tcctccggcggtggcagcggtctgttcgggcagattaaagggtattcccaggacggtgtggtgctgggtggtctg

SEQ ID NO: 66560 - DNA, 75 bp, synthetic construct
  source 1..75: mol_type = other DNA
aagatgcatccgtacgcacaatctccctgttgccgacagccggagaggctgctgcgcagggctggaccattaagg

SEQ ID NO: 66561 - DNA, 75 bp, synthetic construct
  source 1..75: mol_type = other DNA
tgtcccctgaagtgcagaacgcagtcctggttaagttcggtacatgcgaaaacatcaccgttgatatggtgatta

SEQ ID NO: 66562 - DNA, 75 bp, synthetic construct
  source 1..75: mol_type = other DNA
atgacgcggagaatgaagagtgcgtacatattattcgtatcctcgctgacgggcgtgagctttttgccggtcatg

SEQ ID NO: 66563 - DNA, 75 bp, synthetic construct
  source 1..75: mol_type = other DNA
cggaagtgatgctcggcatggtgcctggctggatgggcattgaacgcgtgcttaatcaggttggcccggtggtcg

SEQ ID NO: 66564 - DNA, 75 bp, synthetic construct
  source 1..75: mol_type = other DNA
gccattattgtggtgggggtggtactgctggtcgcggtcatctggctgcttggtaaatccgcgtccatcatcctg

SEQ ID NO: 66565 - DNA, 75 bp, synthetic construct
  source 1..75: mol_type = other DNA
gcctgaccacgcaaaacttcctgcaaatgagcttattcaccgatccgcttggcgatggttcatttacccgcaact

SEQ ID NO: 66566 - DNA, 75 bp, synthetic construct
  source 1..75: mol_type = other DNA
gcatgaaagaacttgctgataagaaatttatcgcagagactatggtacagaactattactttattaatccagact

SEQ ID NO: 66567 - DNA, 75 bp, synthetic construct
  source 1..75: mol_type = other DNA
ggtatctgatatcccaaaaaatgaaaccgcgccggaagctgaaccatctgtagagcgtgaggggccgttctactt

SEQ ID NO: 66568 - DNA, 75 bp, synthetic construct
  source 1..75: mol_type = other DNA
gctcatcaagttgaacattatctcccgcagacaccggttgaagtcctggaaaaaacgccagtgctccctgcggga

SEQ ID NO: 66569 - DNA, 75 bp, synthetic construct
  source 1..75: mol_type = other DNA
gcctgctgtttactgcattcggttttcagggggttcatgcaaatgaatacagtgagaaaacgcaatatctggggg

SEQ ID NO: 66570 - DNA, 75 bp, synthetic construct
  source 1..75: mol_type = other DNA
tattaatgccttatatgtgtaatgaatcgatttcatacttacttggtgaaaaatggacactgaaagaaatagatg

SEQ ID NO: 66571 - DNA, 75 bp, synthetic construct
  source 1..75: mol_type = other DNA
catgtttcgccaggggcgttagatgctgaagcttatggtgtgaagtcgaccattgaagatatggcccgctgggta

SEQ ID NO: 66572 - DNA, 75 bp, synthetic construct
  source 1..75: mol_type = other DNA
ttcaacctcaataaagaaccctataaaaacagccctgagttacaggaattgatttgggagaagttggttgtatat

SEQ ID NO: 66573 - DNA, 75 bp, synthetic construct
  source 1..75: mol_type = other DNA
gaaaacgctgctgaaaaaaccggggctgtcactgttgccgttcgccgcgaatacaaacagacatggaaaacactc

SEQ ID NO: 66574 - DNA, 75 bp, synthetic construct
  source 1..75: mol_type = other DNA
gtgaacaacgacggtgacaatgccatcagcaacggcggcaccggcacgcaggttaacggcgacgaagccaccgtg

SEQ ID NO: 66575 - DNA, 75 bp, synthetic construct
  source 1..75: mol_type = other DNA
atggaacttaaaaaattgatggaacatatttctattatccccaattacagacaagcctggaaaatggaacataag

SEQ ID NO: 66576 - DNA, 75 bp, synthetic construct
  source 1..75: mol_type = other DNA
cctgccagctatgaagtaaacgccgtatcgtttgatcactataacggcgtggcaacggtctattttgcatattga

SEQ ID NO: 66577 - DNA, 75 bp, synthetic construct
  source 1..75: mol_type = other DNA
gtggactcatccgatttttgtcttgaatgcctgctgaatgccatcaaaaacgatgacgctgttgttgaaggagtg

SEQ ID NO: 66578 - DNA, 75 bp, synthetic construct
  source 1..75: mol_type = other DNA
cactacatcatccgtgatttcgaccgtaaacagtttgaagcgcgtaaacgtaaaatgatggagatcgccaaaaaa

SEQ ID NO: 66579 - DNA, 75 bp, synthetic construct
  source 1..75: mol_type = other DNA
tttgccctgctggccgtggtgcgtttccggcaggggatgaacatcatccggtatcgccgtaatctgcgccggctg

SEQ ID NO: 66580 - DNA, 75 bp, synthetic construct
  source 1..75: mol_type = other DNA
atgctgccttttattttgcccgttatgcaacttaaaagttgtatttcttactttaaacaaggtaacaaggtttat

SEQ ID NO: 66581 - DNA, 75 bp, synthetic construct
  source 1..75: mol_type = other DNA
cgctggcggtgccggaactctgaagctgatgccggaaaacagcttaatgcgtggctcgccagtggagggcttctc

SEQ ID NO: 66582 - DNA, 75 bp, synthetic construct
  source 1..75: mol_type = other DNA
acttgatgacgcccgttaccaggcaaaatacgtttcagttatctggcaaaaactgatcccgagtcaggctgattt

SEQ ID NO: 66583 - DNA, 75 bp, synthetic construct
  source 1..75: mol_type = other DNA
acagccattgaagctggcgacgaacgccgtgctcgagcaaaatttcactggcagttcctggaacattatccggct

SEQ ID NO: 66584 - DNA, 75 bp, synthetic construct
  source 1..75: mol_type = other DNA
cacaaaggcggagttatcccgcgtggagatagttgagctgctcagtcaggagtcggaaaaatttcacaatatcgg

SEQ ID NO: 66585 - DNA, 75 bp, synthetic construct
  source 1..75: mol_type = other DNA
gccagcaatgatgcagaagggtatctggggctgtttcgggaaaaaataggaaaactgcatctggctcaggggctg

SEQ ID NO: 66586 - DNA, 75 bp, synthetic construct
  source 1..75: mol_type = other DNA
cacaaggagaatgctggcagcgctcaggatcacgccagcgatagtgaaactggcgagacggcagatcccttaatt

SEQ ID NO: 66587 - DNA, 75 bp, synthetic construct
  source 1..75: mol_type = other DNA
tagagcgtgaggggccgttctatttcctcttcgcagataaggacggagaaaaatacggtcgcgcaaacaaactct

SEQ ID NO: 66588 - DNA, 75 bp, synthetic construct
  source 1..75: mol_type = other DNA
atacaagcagacatggaaaacgctggatgaagaactggcctacgctctctggcctggtgatgtggatgccggaaa

SEQ ID NO: 66589 - DNA, 75 bp, synthetic construct
  source 1..75: mol_type = other DNA
ccagcaatacatcaaaagccgtgatcaggagaacgaggatattgcgctaacggtagggaagctgcgagttgagct

SEQ ID NO: 66590 - DNA, 75 bp, synthetic construct
  source 1..75: mol_type = other DNA
gccaacacctgaacccggtacaaacaacacacagatcgcaaatgcggcctttgtctatgctgctataaatgcgct

SEQ ID NO: 66591 - DNA, 75 bp, synthetic construct
  source 1..75: mol_type = other DNA
ttgatgacgcccgttaccaggcaaaatacgtttcagttatctggcaaaaactgatcccgagtcaggctgattttt

SEQ ID NO: 66592 - DNA, 75 bp, synthetic construct
  source 1..75: mol_type = other DNA
gtacgaccaaaaagcggaacaaaacagccaaaatgcgttacaaaacgagccagaaacgaaacaacctgaaccagt

SEQ ID NO: 66593 - DNA, 75 bp, synthetic construct
  source 1..75: mol_type = other DNA
gccggattcggtcgggaagatgacagcgcggtgatcaagattttcaacggcatcaccctgccgggccataaacag

SEQ ID NO: 66594 - DNA, 75 bp, synthetic construct
  source 1..75: mol_type = other DNA
tggatccgcgtatcggcaaccactataacaacccgtcctttggctacggcggctactgcctgccaaaagatacca

SEQ ID NO: 66595 - DNA, 75 bp, synthetic construct
  source 1..75: mol_type = other DNA
cgcgacctgaatgccttcaaacaagaggcggatgtgatcatctctaaccgtatggcggaagagctggcggatgtg

SEQ ID NO: 66596 - DNA, 75 bp, synthetic construct
  source 1..75: mol_type = other DNA
aagactttatcgcggattctattctcgcccgtaagccgaaagtggtgggtgtgtatcgcctgatcatgaagagtg

SEQ ID NO: 66597 - DNA, 75 bp, synthetic construct
  source 1..75: mol_type = other DNA
gtaaaaaggttgatagcttcggtgactggtcgccacagactgaacatccagctatcgctattcagcgtcaagagc

SEQ ID NO: 66598 - DNA, 75 bp, synthetic construct
  source 1..75: mol_type = other DNA
cggtgaaaggtaagagcaaccaaccggtagtgtttgttgattccaccggtcgtagctatgccatcgacccgatta

SEQ ID NO: 66599 - DNA, 75 bp, synthetic construct
  source 1..75: mol_type = other DNA
gtaaagcgggtgagtccggcacgctggcccgttcgctggatgccatctctgaccaggcaaaacccgtgaccgttg

SEQ ID NO: 66600 - DNA, 75 bp, synthetic construct
  source 1..75: mol_type = other DNA
tctttattttacaggcgaaaatggcattattgatttaaaagataatgttaatcagggggccggatatcttcagtt

SEQ ID NO: 66601 - DNA, 75 bp, synthetic construct
  source 1..75: mol_type = other DNA
gacatttgtcgatccacgccagcaaggcggcaaactgaatgaagtcactaaagaagacctgattaaactggtcga

SEQ ID NO: 66602 - DNA, 75 bp, synthetic construct
  source 1..75: mol_type = other DNA
aatatgagtcgcagaagaagattgctttgatggctgatattgagcagttaacgaagatttctcagaagtatagca

SEQ ID NO: 66603 - DNA, 75 bp, synthetic construct
  source 1..75: mol_type = other DNA
cgatgctgttaagaacttcgaagaaacctcgaaaccttcagaatatgatattgcttacgagattaagtcaaaccc

SEQ ID NO: 66604 - DNA, 75 bp, synthetic construct
  source 1..75: mol_type = other DNA
tagcggaacgttgaaagcgggaagctggctggttttgttactccctgtatgggaagagtgggaaaaccaacctga

SEQ ID NO: 66605 - DNA, 75 bp, synthetic construct
  source 1..75: mol_type = other DNA
gatgttgttccctgagttagctatggctgctggtaaaggcgacctgatggctaaaggtaacgatacggttaaggc

SEQ ID NO: 66606 - DNA, 75 bp, synthetic construct
  source 1..75: mol_type = other DNA
catgagctggaagttccgcaccttacaggaaggcattaagtgggctttcgtcagcaaagaagctcgcgatgtggc

SEQ ID NO: 66607 - DNA, 75 bp, synthetic construct
  source 1..75: mol_type = other DNA
atagtgaaatcgattgttgtcgcgcataaaggcacggttgcggtaacgtcagatgcgcgggggacaaggtttgtg

SEQ ID NO: 66608 - DNA, 75 bp, synthetic construct
  source 1..75: mol_type = other DNA
gagttcaccctgtcaaacggtttcttttgcaggaaaggaatatgagttaaaggtcattgatgaaaaaacgcctat

SEQ ID NO: 66609 - DNA, 75 bp, synthetic construct
  source 1..75: mol_type = other DNA
aggctgatgtcattatctcaaatcgcatggcgagcgagctgctcgatgtcgaagataaggtctatactcgagatc

SEQ ID NO: 66610 - DNA, 75 bp, synthetic construct
  source 1..75: mol_type = other DNA
ttgtcgaacggtattctgattgcccagcaccacgaagtggtcgctctggatatcgttccaacgaaggtcgagatg

SEQ ID NO: 66611 - DNA, 75 bp, synthetic construct
  source 1..75: mol_type = other DNA
ctgccctaccacacgctgggcatcaacaaatatcacttacttaatctgccctatgacgccccggaaaaaccgctt

SEQ ID NO: 66612 - DNA, 75 bp, synthetic construct
  source 1..75: mol_type = other DNA
accggcgatattgcacgtgtaactctgattatcaatggtggccggaacggcatcgacgaccggcgcgcgcggtac

SEQ ID NO: 66613 - DNA, 75 bp, synthetic construct
  source 1..75: mol_type = other DNA
tcaattaaagaacgtctgggtatcgataaccttattttctctccggaatttctccgtgaaggtaaagccctttac

SEQ ID NO: 66614 - DNA, 75 bp, synthetic construct
  source 1..75: mol_type = other DNA
attacgtgatgcgcatacctgtgaagcagctgaagatgctctgaaggatgctcaaaacatgatggcctcattgtc

SEQ ID NO: 66615 - DNA, 75 bp, synthetic construct
  source 1..75: mol_type = other DNA
tcgctgggctgccgctggtgtcagaacccggaaagccgcgcccgcacgcaggatctgctgtatgacgcacgactg

SEQ ID NO: 66616 - DNA, 75 bp, synthetic construct
  source 1..75: mol_type = other DNA
ggggctgatccggaagtgatggatattctggccacgcttccggcggatgtctttttcgtgcgtcagtacagggat

SEQ ID NO: 66617 - DNA, 75 bp, synthetic construct
  source 1..75: mol_type = other DNA
agccagctctcccgcggcgtggaatccagacccaataaacgccccatgaactcggacctgaaaaactccggggaa

SEQ ID NO: 66618 - DNA, 75 bp, synthetic construct
  source 1..75: mol_type = other DNA
tggtggtcgattacctcggcctgattaaaacccgcagcacggggcgtcacgaccttgcggtgggggaaatctcaa

SEQ ID NO: 66619 - DNA, 75 bp, synthetic construct
  source 1..75: mol_type = other DNA
aatgccgaccatgccggatctgccacaactggaaagcgcgttcgtcgaaatcaatgagccgcaatccgcatacgg

SEQ ID NO: 66620 - DNA, 75 bp, synthetic construct
  source 1..75: mol_type = other DNA
taagggggttaaatcccacggtacccgaccagcttcccgccatgctctggcgattaagggggttaaatgccagga

SEQ ID NO: 66621 - DNA, 75 bp, synthetic construct
  source 1..75: mol_type = other DNA
cgctcatcaggtcgaaggcggctggaacaaaggcggcaaagggccgagcatttgtgacgttctgaccggtggcgc

SEQ ID NO: 66622 - DNA, 75 bp, synthetic construct
  source 1..75: mol_type = other DNA
aactatccctgttggttttacagagtccattaaagaacggtttggtattgaaaatgtgatcttttcgccggagtt

SEQ ID NO: 66623 - DNA, 75 bp, synthetic construct
  source 1..75: mol_type = other DNA
atgttgccgcgcctgcgctgcgcagtgcggcactgttattaaaagagaaaatcatcgctcacgccgcagtcatgc

SEQ ID NO: 66624 - DNA, 75 bp, synthetic construct
  source 1..75: mol_type = other DNA
gccagaggcatagcagaaatcaacatcacgaaacagcgtaatggcacgctgggtaccatttaccggcgttttcat

SEQ ID NO: 66625 - DNA, 75 bp, synthetic construct
  source 1..75: mol_type = other DNA
atgctgcggttatcgaacaaattcgtcgcgctcgtccacactggctggatgtgcaaccggcttcttcacttatca

SEQ ID NO: 66626 - DNA, 75 bp, synthetic construct
  source 1..75: mol_type = other DNA
cgtggctgtgatctggtcaacctcaaagtatctgatgttgcatatggtagctcggtttccagcagagcaactgtg

SEQ ID NO: 66627 - DNA, 75 bp, synthetic construct
  source 1..75: mol_type = other DNA
ttcctggatgtttgagaatcgcatgcagcacgtcctggatggcgattactcgccaaaatccgctgtcgatatttt

SEQ ID NO: 66628 - DNA, 75 bp, synthetic construct
  source 1..75: mol_type = other DNA
aaactgctgaatgaaatgattgagcaggcgtaccaggactttgtggcaaatgagcaacacaagacactgagttaa

SEQ ID NO: 66629 - DNA, 75 bp, synthetic construct
  source 1..75: mol_type = other DNA
gacccgacgctgttttcacagtacggcattcgcagcgtaccggcactggtggtgttctgcagtcagggatacgac

SEQ ID NO: 66630 - DNA, 75 bp, synthetic construct
  source 1..75: mol_type = other DNA
ggatgcccgcgccctgacggcaaaaaccaaagggaatcctgacagttgggctgacgtaaaacagcgtctgccttt

SEQ ID NO: 66631 - DNA, 75 bp, synthetic construct
  source 1..75: mol_type = other DNA
ataataaaggagaatatatttttatcagaaatagtgtcccgggattgagttcagtatgcataccgtatcatgatt

SEQ ID NO: 66632 - DNA, 75 bp, synthetic construct
  source 1..75: mol_type = other DNA
gtgagcttgaggttactcaatcacaattaagcaaaaccggaatgtcggcaaaacaaacggcttttgctatgcgca

SEQ ID NO: 66633 - DNA, 75 bp, synthetic construct
  source 1..75: mol_type = other DNA
accagaatcagcccaacgtgaaacaaaatgagccagaagcggaacaaaacagcccggatacgcaacaaaacgggc

SEQ ID NO: 66634 - DNA, 75 bp, synthetic construct
  source 1..75: mol_type = other DNA
aaggtcgtgacttcgccttcgctaaacgctcctttgctatcgctgccagcttcggtatggctgccgttctgtctg

SEQ ID NO: 66635 - DNA, 75 bp, synthetic construct
  source 1..75: mol_type = other DNA
ccgtggccatcagatactgtgccgtctggttacgccctgatgcagggacagacttttgacaaatctgcatacccg

SEQ ID NO: 66636 - DNA, 75 bp, synthetic construct
  source 1..75: mol_type = other DNA
aggatgattcccagtatccagggatggatacaaagacagcaagtgattacctgccacagacaaattggccaacaa

SEQ ID NO: 66637 - DNA, 75 bp, synthetic construct
  source 1..75: mol_type = other DNA
ccagcagcgatagcggagatgagtacaggtgtcgccgtttccaccgttgttggcactattattgtgctggttgct

SEQ ID NO: 66638 - DNA, 75 bp, synthetic construct
  source 1..75: mol_type = other DNA
tgaagcagcaggaaacactgagtcagcagttacgtgaaaagccggacacacagttgcaggcatgggcagggcagc

SEQ ID NO: 66639 - DNA, 75 bp, synthetic construct
  source 1..75: mol_type = other DNA
ggtgacagaatggatagcaacggcgtatcagtggctgtttgtggaaacaggttttctgtcgtggctgaagcagca

SEQ ID NO: 66640 - DNA, 75 bp, synthetic construct
  source 1..75: mol_type = other DNA
tgatgcttcaattttgccacgcaatatattcagccagtcttacctgctgtatgtcataaatcagggtgctgatgt

SEQ ID NO: 66641 - DNA, 75 bp, synthetic construct
  source 1..75: mol_type = other DNA
agccgccgaaggaatgctcaccaacatgctcggagatattgcagcagaagctcagctttatgctgaaattgctga

SEQ ID NO: 66642 - DNA, 75 bp, synthetic construct
  source 1..75: mol_type = other DNA
tcgcggcatcgagcgcacttatacccgcgacttgctcgtggaagtttttctcgacgggcgcggcaacggtctgaa

SEQ ID NO: 66643 - DNA, 75 bp, synthetic construct
  source 1..75: mol_type = other DNA
gaacccgccacctttgttgagccggacctgcatcagtacgccagcgatatcctctggagtgtgaaaaccaccggg

SEQ ID NO: 66644 - DNA, 75 bp, synthetic construct
  source 1..75: mol_type = other DNA
ctgccgatacagtccgaacattatcaggtcatgcgtaccgatcagcgtcgctatttcggacacccggatctggtg

SEQ ID NO: 66645 - DNA, 75 bp, synthetic construct
  source 1..75: mol_type = other DNA
acggctttatgcagcgtctggaccgccaactggtgtggctggtcagccccggtaaagaggctaatcccagggtgg

SEQ ID NO: 66646 - DNA, 75 bp, synthetic construct
  source 1..75: mol_type = other DNA
tatttatccgttttattgattttcgcggtgaactgttattacgtgcatcagctattgatgctgtagcccaggcag

SEQ ID NO: 66647 - DNA, 75 bp, synthetic construct
  source 1..75: mol_type = other DNA
ttgtcggtgaagtcgatggtgatgaccccgcagtattcagaccaatacaaaaatacatcaatggcacatggtata

SEQ ID NO: 66648 - DNA, 75 bp, synthetic construct
  source 1..75: mol_type = other DNA
ccgtacgagaaatcattagcgaagctgaaaaggcacgccaggttaatggcgatgaaccctatatcgaaattattt

SEQ ID NO: 66649 - DNA, 75 bp, synthetic construct
  source 1..75: mol_type = other DNA
tatcgcccgtactgaacttggacgtgcaaccggcgcgctcgatcaggcgcgtgcgctgtcaatcggctcgaatgg

SEQ ID NO: 66650 - DNA, 75 bp, synthetic construct
  source 1..75: mol_type = other DNA
attgaacaggggcgaagtatatcccgtgatgaggctgttaaagatgcacaacagaaagccgctgaaatttctgcc

SEQ ID NO: 66651 - DNA, 75 bp, synthetic construct
  source 1..75: mol_type = other DNA
gtacatgatgaccaaaaacgtcaagttcctggccggctttgccatactctctgtatttattgctgtgggtatggc

SEQ ID NO: 66652 - DNA, 75 bp, synthetic construct
  source 1..75: mol_type = other DNA
ttaagcgcatgaaatgtgtggcaatggaaggtctcattgaagaagctaatgaggtcatcgaaagcaccgagaaaa

SEQ ID NO: 66653 - DNA, 75 bp, synthetic construct
  source 1..75: mol_type = other DNA
gaaagccgagatgctgcgcctgcaaacagcggtagaagagcgttttggcaaagagataaccgaagaggcgctgcg

SEQ ID NO: 66654 - DNA, 75 bp, synthetic construct
  source 1..75: mol_type = other DNA
cgaccgaagtgtccaacatgtcgaaagcgcagattatccagcaggccggtaactccgtgctggcaaaagccaacc

SEQ ID NO: 66655 - DNA, 75 bp, synthetic construct
  source 1..75: mol_type = other DNA
aatttcgactggctggatggtgcatcaagtggcacggtggtggggaatggaactgtgccttcttctggcgcacat

SEQ ID NO: 66656 - DNA, 75 bp, synthetic construct
  source 1..75: mol_type = other DNA
cctgatggacgatttgaggcgcttaataataaaggagaatatatttttatcagaaatagtgtcccgggattgagt

SEQ ID NO: 66657 - DNA, 75 bp, synthetic construct
  source 1..75: mol_type = other DNA
agctatgcgcctgaaccgccattacctgagcctgtcacgcgaccgactgagctgtatatcaatggcgagctggtg

SEQ ID NO: 66658 - DNA, 75 bp, synthetic construct
  source 1..75: mol_type = other DNA
atgtcgcacaaattctgctttcggtgctgtttttagccatcatgattgtggcatgtctgtggattgttcaaccct

SEQ ID NO: 66659 - DNA, 75 bp, synthetic construct
  source 1..75: mol_type = other DNA
aagccatattttgaattaaacacggtgttgaatgaaggtgtattctggaccgcgaatcagctcttcggtattaag

SEQ ID NO: 66660 - DNA, 75 bp, synthetic construct
  source 1..75: mol_type = other DNA
tcagcattagagaaacagcagatgctacgggctacagcacttcgcaggtttgccgtattcaggcactttatcgag

SEQ ID NO: 66661 - DNA, 75 bp, synthetic construct
  source 1..75: mol_type = other DNA
tatttatccgttttattgattttcgcggtgaactgttattacgcgcatcagccattgacggagttgttccatccg

SEQ ID NO: 66662 - DNA, 75 bp, synthetic construct
  source 1..75: mol_type = other DNA
tatcagcgattaaaaaagacggggcaaattattccgccctgggggcaatattgggttgcatcggcttatctcaaa

SEQ ID NO: 66663 - DNA, 75 bp, synthetic construct
  source 1..75: mol_type = other DNA
tggcgtccgttgagctgagtattgatgccagcacggtgatggcgacgcaggattacgtcgatgacaaaatcgcag

SEQ ID NO: 66664 - DNA, 75 bp, synthetic construct
  source 1..75: mol_type = other DNA
tcagatgccgctaatgagcaagcttcaaaggtgcttaataatgctggtacaggtagtactttgaagaagttttcg

SEQ ID NO: 66665 - DNA, 75 bp, synthetic construct
  source 1..75: mol_type = other DNA
gtctggtgggtcaggtcttatctggatgactgtagaacaggcaattttaaatggttacaccactggagataattt

SEQ ID NO: 66666 - DNA, 75 bp, synthetic construct
  source 1..75: mol_type = other DNA
gtcgaagagtgcagggccatcaaggcgaagtatcagcagaaacttaaagacctgcgaaacagcagaagtgaggcc

SEQ ID NO: 66667 - DNA, 75 bp, synthetic construct
  source 1..75: mol_type = other DNA
atgacattgcagggcgcttcaccgggacgtataccggagctgatgcgcgatcttgcaagtatgggacaacttgtg

SEQ ID NO: 66668 - DNA, 75 bp, synthetic construct
  source 1..75: mol_type = other DNA
caatggcaaccgcgttttttggcatgactgctgcccatgcagctgataccaatgttggcggcggccaggttaatt

SEQ ID NO: 66669 - DNA, 75 bp, synthetic construct
  source 1..75: mol_type = other DNA
atggaaaaacctgaaacggcaatgaaagccatcacacgcaatctcgatcgcgaaatctggcgtgacctgatgcaa

SEQ ID NO: 66670 - DNA, 75 bp, synthetic construct
  source 1..75: mol_type = other DNA
atggctaaaccagcgcgaaggaaatgcaaaatatgcaaggaatggtttcacccggcattctcaaatcagtggtgg

SEQ ID NO: 66671 - DNA, 75 bp, synthetic construct
  source 1..75: mol_type = other DNA
tgaaggatgaggttactggcgcttatcaaacacttcaagtgtttgatactgactctttctcacaacgcgatgcgg

SEQ ID NO: 66672 - DNA, 75 bp, synthetic construct
  source 1..75: mol_type = other DNA
gtgcgggccaaccgggaacttcccgtggtctggggcgtggcgaaaggatcgctgatcaataaagtgattctggtg

SEQ ID NO: 66673 - DNA, 75 bp, synthetic construct
  source 1..75: mol_type = other DNA
tttacctcacgggctgcaggtggagctgccggacattccgaccaccaccactgtgcagaccgtccagttatggga

SEQ ID NO: 66674 - DNA, 75 bp, synthetic construct
  source 1..75: mol_type = other DNA
aagaatatcccggaacccccgccgccggagccggtcacccgcccgatggagctttatatcaatggtgaactggtg

SEQ ID NO: 66675 - DNA, 75 bp, synthetic construct
  source 1..75: mol_type = other DNA
gatcgcatcggctttatctcgattcacagccaggtcactgacttgctggcattctgcgccttctttgttattggg

SEQ ID NO: 66676 - DNA, 75 bp, synthetic construct
  source 1..75: mol_type = other DNA
ctgccgccattgcatggaaaattatccgggcgttgtggcgctggctgcgcaaacctcagcaacctcataaggagc

SEQ ID NO: 66677 - DNA, 75 bp, synthetic construct
  source 1..75: mol_type = other DNA
tttacctcacgggctgcaggtggagctgccggacattccgacaaccaccaccgtgcagaccgtccagctatggga

SEQ ID NO: 66678 - DNA, 75 bp, synthetic construct
  source 1..75: mol_type = other DNA
gtcgtttgaccggcaaattgttattccagcggtggctttctgcggtgccagacatgagcgggagaatagcgatac

SEQ ID NO: 66679 - DNA, 75 bp, synthetic construct
  source 1..75: mol_type = other DNA
tattacaatagcatttattatagtgataatttttgaagtgatattaaccggagccagaacttatattttctctca

SEQ ID NO: 66680 - DNA, 75 bp, synthetic construct
  source 1..75: mol_type = other DNA
atggactccttcgcgaaatatacgattattgactggatagcattccttcaggttttgctcatctggttttatatg

SEQ ID NO: 66681 - DNA, 75 bp, synthetic construct
  source 1..75: mol_type = other DNA
ggctcagtacacatcacgttcaggaaaccagaactggttgacaggctaaatgatattatagccagacactatccg

SEQ ID NO: 66682 - DNA, 75 bp, synthetic construct
  source 1..75: mol_type = other DNA
caccggtcagctccgttaatggcaatgcgcctgcaaataccaattctggtatgttgattacgccgccgccgaaaa

SEQ ID NO: 66683 - DNA, 75 bp, synthetic construct
  source 1..75: mol_type = other DNA
cacctcgctgagactacgggcgcaacgggcatatgacggtctgagtgttgctggcccttcaggtgcatacgagta

SEQ ID NO: 66684 - DNA, 75 bp, synthetic construct
  source 1..75: mol_type = other DNA
gatccggtctgtggtttcgacaataccgaactgcttgtttcggaagtcacgtttactcaggaccagaacggcacc

SEQ ID NO: 66685 - DNA, 75 bp, synthetic construct
  source 1..75: mol_type = other DNA
agattgccgatcgcattcgtgaacaaattgcgcgtggcgagcttaaacctggcgatgcgttacccactgaatcag

SEQ ID NO: 66686 - DNA, 75 bp, synthetic construct
  source 1..75: mol_type = other DNA
gccggtctctgacgccgttcatgagcgttttattcgtctgcctgaagtgatgcatttatgcggcctgtctcgttc

SEQ ID NO: 66687 - DNA, 75 bp, synthetic construct
  source 1..75: mol_type = other DNA
ggtgatatccgttgcctcggtccccgttgcgacaaacccgccgggcatacgcttcagaacccggtggacggtgtg

SEQ ID NO: 66688 - DNA, 75 bp, synthetic construct
  source 1..75: mol_type = other DNA
atgttgtccggttttactccccgccctctgaaacgtctgttcacagccaaccagtgctggacgtccttcctggat

SEQ ID NO: 66689 - DNA, 75 bp, synthetic construct
  source 1..75: mol_type = other DNA
gctgcttgaacaaagaatcagcgaactggaaaatcgcagtactgagatcaaaaagcagccagatccagagactct

SEQ ID NO: 66690 - DNA, 75 bp, synthetic construct
  source 1..75: mol_type = other DNA
ctcaaaaagcagctattcggctaacaaaaatttgcgatactttcagtgagattcacggcacagaacgatttcctg

SEQ ID NO: 66691 - DNA, 75 bp, synthetic construct
  source 1..75: mol_type = other DNA
tactgttggcctcgcgttacacccgcgatacgttggaagataaagcggaaaataagcgccagttacaaatcgcaa

SEQ ID NO: 66692 - DNA, 75 bp, synthetic construct
  source 1..75: mol_type = other DNA
gaaggaagcttattattaactcgtcagggtcaattagtagaaaacttcatcgacactcttgaaagctggcgtgac

SEQ ID NO: 66693 - DNA, 75 bp, synthetic construct
  source 1..75: mol_type = other DNA
ggatctgcacacatcactttcaaaaggctggaactgattgacagaattaacgatataatagctaggcactttcct

SEQ ID NO: 66694 - DNA, 75 bp, synthetic construct
  source 1..75: mol_type = other DNA
atgactggtatcccacagcaagtatcagcgatttgctggttgtggtgatgaagaaagccaccgcaggcatcagta

SEQ ID NO: 66695 - DNA, 75 bp, synthetic construct
  source 1..75: mol_type = other DNA
atcgggattgcttttttctggccggagcagggggcagcacacagtgaggcagtgatgaagacagaactggggtgg

SEQ ID NO: 66696 - DNA, 75 bp, synthetic construct
  source 1..75: mol_type = other DNA
atgatgcatccggctatctggattttttcaaaggcgagatagggaaaacccatctggctcaggagttgtggacgc

SEQ ID NO: 66697 - DNA, 75 bp, synthetic construct
  source 1..75: mol_type = other DNA
gcaacaaatcacttcaccaacttccccatcccctcacgggctgtcaggaataccgtgatattcactgccaaaacc

SEQ ID NO: 66698 - DNA, 75 bp, synthetic construct
  source 1..75: mol_type = other DNA
ctgcatcttctgacaccctgtcattccatgacaacaaatcccattaaagaacaattagttaaaaataacccccat

SEQ ID NO: 66699 - DNA, 75 bp, synthetic construct
  source 1..75: mol_type = other DNA
ctccgcaatgcgatgaaaagcgccaaagggccgggcaatttccgtaacttgtttatgtactcgcccaacggtaaa

SEQ ID NO: 66700 - DNA, 75 bp, synthetic construct
  source 1..75: mol_type = other DNA
gctacaacacagaatatctgaaattaactcatggattggacttaatgaagaactggttaaatttacctcatatga

SEQ ID NO: 66701 - DNA, 75 bp, synthetic construct
  source 1..75: mol_type = other DNA
ctactggtttgtgcaatacggtatgaccacgcagccatatcagttcacaaaaggaagcatctttcatctgatgga

SEQ ID NO: 66702 - DNA, 75 bp, synthetic construct
  source 1..75: mol_type = other DNA
aagccatcgttattaccagccgcggtgggatccacaaagatggaccaacggacctggtgacgccgtatctgtcca

SEQ ID NO: 66703 - DNA, 75 bp, synthetic construct
  source 1..75: mol_type = other DNA
ggcccgacaggagcaaccggaccggcgggtccacggggtgaacgtggtgaacagggcatacaggggccagccgga

SEQ ID NO: 66704 - DNA, 75 bp, synthetic construct
  source 1..75: mol_type = other DNA
cctgtatcgcgctggctttaagcggatcgggctgggctgctgacattgatgatacagatagtgcaactcgtcagc

SEQ ID NO: 66705 - DNA, 75 bp, synthetic construct
  source 1..75: mol_type = other DNA
atgcggatgctggatggcagaactcacagacaaatttgtgaaatgtttggtcgggtgcagcgggatccattctgg

SEQ ID NO: 66706 - DNA, 75 bp, synthetic construct
  source 1..75: mol_type = other DNA
gctcagccaacaggctttttcgcgttttgtacaggactatctggtatttggtaacgcctatctggagaaacgcac

SEQ ID NO: 66707 - DNA, 75 bp, synthetic construct
  source 1..75: mol_type = other DNA
tgaggaaaatacccgacagatagcacaggtccgccagtacgtggacaaaaagcaaagtgaaatcaagcagacagt

SEQ ID NO: 66708 - DNA, 75 bp, synthetic construct
  source 1..75: mol_type = other DNA
tcgaaaaagtgacgaagccttcttatcagtttataagcttattgagcaggcaggtaaactttgggctcaaaaatt

SEQ ID NO: 66709 - DNA, 75 bp, synthetic construct
  source 1..75: mol_type = other DNA
tcagcatggctgatgaataactggtatcccacagcaagtatcagcgatttgctggttgtggtgatgaagaaagcc

SEQ ID NO: 66710 - DNA, 75 bp, synthetic construct
  source 1..75: mol_type = other DNA
tcactcaggatccgattgggctgaaggggggatggaatttttatcagtatccgttgaatccagttacgaatacag

SEQ ID NO: 66711 - DNA, 75 bp, synthetic construct
  source 1..75: mol_type = other DNA
ccgctccgtgctgccggcgggctggtttatcgccgataagaccggagctagcaagcggggtgcgcgcgggattgt

SEQ ID NO: 66712 - DNA, 75 bp, synthetic construct
  source 1..75: mol_type = other DNA
ttgcgcctgacaacccacaaaactgtatcagaaatgttaatgcatttctaaaagaaaagtattgtaatacttcag

SEQ ID NO: 66713 - DNA, 75 bp, synthetic construct
  source 1..75: mol_type = other DNA
gtttctgaatatcaaaaatgtcagccgcgatgacatgatggcagcgcaccgtgtgccaccgcaaatgatggggat

SEQ ID NO: 66714 - DNA, 75 bp, synthetic construct
  source 1..75: mol_type = other DNA
agcagtaaagcggcaaaagagaaaaagccacggccagtaaagagggatgagaatgcttctgacactggaagagat

SEQ ID NO: 66715 - DNA, 75 bp, synthetic construct
  source 1..75: mol_type = other DNA
aaagaagtggtctataaagccgagaaaaaccagtcaacgcctccgggaaatgaacagcctgcatccagagagtat

SEQ ID NO: 66716 - DNA, 75 bp, synthetic construct
  source 1..75: mol_type = other DNA
gcagaatcaaaacactgaatacccgacgggtgaatattctgaagggggaacagcgtcgtgtcagtggcagtgccc

SEQ ID NO: 66717 - DNA, 75 bp, synthetic construct
  source 1..75: mol_type = other DNA
ggtgaacggagagagtgtacacgtccaccgctaccgcagggccgttttcgcactcacccgcgcgtttgtactgga

SEQ ID NO: 66718 - DNA, 75 bp, synthetic construct
  source 1..75: mol_type = other DNA
cggcgaccggctgaccacgatacagaacgacaggagccgcatccagacgatttatcagccggggagcttcacacc

SEQ ID NO: 66719 - DNA, 75 bp, synthetic construct
  source 1..75: mol_type = other DNA
cgttcagggatgctttccttaatggatgcacaggcccgtgatacatggtaccagtcactggagtacgataatttt

SEQ ID NO: 66720 - DNA, 75 bp, synthetic construct
  source 1..75: mol_type = other DNA
ttttaacggtgtggcgtatgacgatccggggagcggtaataacccgggaggtacgcgatacacgggttatggttt

SEQ ID NO: 66721 - DNA, 75 bp, synthetic construct
  source 1..75: mol_type = other DNA
aaagagtcacggcagagaagaaacccgtcttcatattgtttgcgatgtccctgatgagcttattgatttcacgtt

SEQ ID NO: 66722 - DNA, 75 bp, synthetic construct
  source 1..75: mol_type = other DNA
tggctggcacataatgattattccaccaacacaccatgcccggtgggatgaggcagaaaaggctttccatgtccg

SEQ ID NO: 66723 - DNA, 75 bp, synthetic construct
  source 1..75: mol_type = other DNA
cacctcgtattctaatgctttatggctcagttcgtgagcgctcatacagtcgactggcgacagaggaagcaggcc

SEQ ID NO: 66724 - DNA, 75 bp, synthetic construct
  source 1..75: mol_type = other DNA
tgagcttatcgccatggctgagaagctgggcgcggtgacctacatcgacgcgccgattggtaccacttttgcgca

SEQ ID NO: 66725 - DNA, 75 bp, synthetic construct
  source 1..75: mol_type = other DNA
ccgccccgatgggggacgtcaatacgctggtgcagtgcctgtctgagaaagatgctgctgcgtttggcaaccagc

SEQ ID NO: 66726 - DNA, 75 bp, synthetic construct
  source 1..75: mol_type = other DNA
tgtttgttcgaaacgagttgctacctttacaaaaaaggatggaggaggtcaatgattggctaggtgaagatttaa

SEQ ID NO: 66727 - DNA, 75 bp, synthetic construct
  source 1..75: mol_type = other DNA
aatggatgaggccaaggcggcgagacagaaggcagaagaggttgctgcaggtggtggcgttcccggcccgaaggg

SEQ ID NO: 66728 - DNA, 75 bp, synthetic construct
  source 1..75: mol_type = other DNA
tgagcacatttgaacaactgcaccagaacaaggatgaggtgtttaagcggggagtgattaacgtcttcagggaac

SEQ ID NO: 66729 - DNA, 75 bp, synthetic construct
  source 1..75: mol_type = other DNA
gtcaaaatgcgccactccatcaggtcaaaatgacacgatggaagaggtcaaaatgaaacgttccattggttcaaa

SEQ ID NO: 66730 - DNA, 75 bp, synthetic construct
  source 1..75: mol_type = other DNA
acgttgccgaaactgtcgaacaaatcaaaagaggcaccatacgcgatggttatgcaggataccgtcagctggtgg

SEQ ID NO: 66731 - DNA, 75 bp, synthetic construct
  source 1..75: mol_type = other DNA
atcgtcaacaatctggtgagatgggaccggtggggatttcatcttatcaccgggcaccaggtagatcgacttgcc

SEQ ID NO: 66732 - DNA, 75 bp, synthetic construct
  source 1..75: mol_type = other DNA
cattagccaaaggtggcgttgtccggtctcctcaaattgaggtttccgaaagaatcaataacttaggttttaaag

SEQ ID NO: 66733 - DNA, 75 bp, synthetic construct
  source 1..75: mol_type = other DNA
gaacaaggatgaggtgtttgagcggggagtgatcaacgtcttcaggggactgagctggaattataaaaccaactc

SEQ ID NO: 66734 - DNA, 75 bp, synthetic construct
  source 1..75: mol_type = other DNA
atgtattccagaaggatcgcttgctgcaaaccagaacgtttcaatggaaagagcaggaatgaagatcccagcatc

SEQ ID NO: 66735 - DNA, 75 bp, synthetic construct
  source 1..75: mol_type = other DNA
gcactagcagttattaatgaccataattatccgatgttagttcaatcagaagtgctgacagaagataaaaaagaa

SEQ ID NO: 66736 - DNA, 75 bp, synthetic construct
  source 1..75: mol_type = other DNA
atggcgttcggtgtttacccggatgtttcgctggcggatgcgcggaagaaaagggaagaggccagaaagctggta

SEQ ID NO: 66737 - DNA, 75 bp, synthetic construct
  source 1..75: mol_type = other DNA
actggggaatttactctcccaatgactgccgcgacctggaagatatgaatccgcgtcccggtggtgatgtctatc

SEQ ID NO: 66738 - DNA, 75 bp, synthetic construct
  source 1..75: mol_type = other DNA
ggcgaaagagattattactttcgagaaggttgccagagagtggctcgtaaccaaccaaaaatggtcggaagatca

SEQ ID NO: 66739 - DNA, 75 bp, synthetic construct
  source 1..75: mol_type = other DNA
tgtttctccggatgacgggggcagttgttatctctggctcaaccgggggcaaccacctgctgccagccgtcgtcg

SEQ ID NO: 66740 - DNA, 75 bp, synthetic construct
  source 1..75: mol_type = other DNA
cgtttattgtggttttacccgacattaataatgaagccagtctcaggcaaaatggcaaagcgatgctggcgcatg

SEQ ID NO: 66741 - DNA, 75 bp, synthetic construct
  source 1..75: mol_type = other DNA
cgatgctgttaacgtggcacagttgaagtcttccgaagctggcggtgtgcgttacgacaccaaagctgatggttc

SEQ ID NO: 66742 - DNA, 75 bp, synthetic construct
  source 1..75: mol_type = other DNA
gaaaatcaagactatattttgctttccaatttgggaaagcaaacatctggtagaggcggccacaaccgcaaagag

SEQ ID NO: 66743 - DNA, 75 bp, synthetic construct
  source 1..75: mol_type = other DNA
ctacaaaatggccgatggcggcggtttatatcttgaggtttctgcaaagggttctaaatactggcgcatgaaata

SEQ ID NO: 66744 - DNA, 75 bp, synthetic construct
  source 1..75: mol_type = other DNA
aaagtcattccgtttacgttatgggcgctggcagcagggtttcttgttacattttttctgtccccaatgtgcgaa

SEQ ID NO: 66745 - DNA, 75 bp, synthetic construct
  source 1..75: mol_type = other DNA
atgcgtgattttcagaatgcctttgatgccgcccttgccggggtggacagtacgattgttgaagtgatgggcatc

SEQ ID NO: 66746 - DNA, 75 bp, synthetic construct
  source 1..75: mol_type = other DNA
ttggtgatcacgattcgcacaaacccatgagtgagaatacggtaaatagtgcgttacgggtcatggggtatgata

SEQ ID NO: 66747 - DNA, 75 bp, synthetic construct
  source 1..75: mol_type = other DNA
aagccagggggaagtgaataagcagccgaacatcgaagagctgaaaaaacgcatggagcaaagtcgattgcggaa

SEQ ID NO: 66748 - DNA, 75 bp, synthetic construct
  source 1..75: mol_type = other DNA
gggagcgagcggatttatctaaggtgaagatagaaattacacttgcctcagcttctactaaagggattcgtgaag

SEQ ID NO: 66749 - DNA, 75 bp, synthetic construct
  source 1..75: mol_type = other DNA
taacacgccagaattgccgtcgctggcagatgccgttacaggttgttatctcaccccctacagtgaaaagcgcct

SEQ ID NO: 66750 - DNA, 75 bp, synthetic construct
  source 1..75: mol_type = other DNA
gctcaaaatactggcggttccgctttcgcttcggtggcaagcaacacctgatggctttcggtgtttaccctgaaa

SEQ ID NO: 66751 - DNA, 75 bp, synthetic construct
  source 1..75: mol_type = other DNA
ccgtcgcctgttccgctgtgtctccgtccgggaaaacacggacggcacctttgccatcacggcggtgcagcacgt

SEQ ID NO: 66752 - DNA, 75 bp, synthetic construct
  source 1..75: mol_type = other DNA
ctgagcttggtggtgcaggggctggaacaccggggggatgggagccgcaggatgaggagaacgccaggaataatg

SEQ ID NO: 66753 - DNA, 75 bp, synthetic construct
  source 1..75: mol_type = other DNA
gagaccccggaatacagagaggtcatgaaaggctacggtacgggcagtacgccgcagatggtggtacaggccatc

SEQ ID NO: 66754 - DNA, 75 bp, synthetic construct
  source 1..75: mol_type = other DNA
gtggcgtagggcagtgtccgcgcttagtggataccagcaggcttggttgcggtactgttacggttttgaccttaa

SEQ ID NO: 66755 - DNA, 75 bp, synthetic construct
  source 1..75: mol_type = other DNA
attacatatctcttcctgatgattttcccgttcgtaatattgcacctcaggtaaaagaagttttaaaggatttta

SEQ ID NO: 66756 - DNA, 75 bp, synthetic construct
  source 1..75: mol_type = other DNA
attattatttttacatccgcagtgtgaacaccgttggcaaatcggcatttgtggaggctgttggccagccgagtg

SEQ ID NO: 66757 - DNA, 75 bp, synthetic construct
  source 1..75: mol_type = other DNA
tctgtattgcatggacagcatactactttctttcgcttttcaagtattttgtaaaatacttctttcctctcgatc

SEQ ID NO: 66758 - DNA, 75 bp, synthetic construct
  source 1..75: mol_type = other DNA
aacaacgtcacgattaatgagaactgtcagattaaggggaaactgtcagccaaccagattgaaggtgatattgtc

SEQ ID NO: 66759 - DNA, 75 bp, synthetic construct
  source 1..75: mol_type = other DNA
caaaatcgggggcatgtactaatggtctttgcggcacactatccgctatgataggtccagataaatttgattcta

SEQ ID NO: 66760 - DNA, 75 bp, synthetic construct
  source 1..75: mol_type = other DNA
gatttgcgggagcgcctgcaatcctcatcgttcagcgatatgctgtccggcttcaaagataaggtgacatcatct

SEQ ID NO: 66761 - DNA, 75 bp, synthetic construct
  source 1..75: mol_type = other DNA
tcagtcagatcgacggcctgaaaacaacacagctaccatcaccagtaatggctgtactcacggcacttgaaatga

SEQ ID NO: 66762 - DNA, 75 bp, synthetic construct
  source 1..75: mol_type = other DNA
tgcgaacgccgggacgctcaacaatgtcacaattaatgagaactgtcagattaaggggaaactgtcagccaacca

SEQ ID NO: 66763 - DNA, 75 bp, synthetic construct
  source 1..75: mol_type = other DNA
catcgttcagcgatatgctgtccggcttcaaagataaggtgacagcatccattaacaacgcggccagttcagtta

SEQ ID NO: 66764 - DNA, 75 bp, synthetic construct
  source 1..75: mol_type = other DNA
cagatccgtgtcgccttgcctggcattattcagtcattcgatcctgatgcggtgacggcggttgtgcagcctgct

SEQ ID NO: 66765 - DNA, 75 bp, synthetic construct
  source 1..75: mol_type = other DNA
ctgttaccgcgctcggtttaccggtagcgtttgtgctgatggcgttgagcctggtgtattggtatgacagacaac

SEQ ID NO: 66766 - DNA, 75 bp, synthetic construct
  source 1..75: mol_type = other DNA
acaccgccggaaggctttgagtcctccggggcggaaaccgcactgggcgtggaggtgacgaaggcaaagccggtg

SEQ ID NO: 66767 - DNA, 75 bp, synthetic construct
  source 1..75: mol_type = other DNA
tgatgttcttctccgtagccgaaccggtaacgcagtatatgcagccgccggaaggcgcgggacagacgattgagg

SEQ ID NO: 66768 - DNA, 75 bp, synthetic construct
  source 1..75: mol_type = other DNA
tgtcggaaagagaatctctactggcattgccagatgatgaattgaccctgacccgaatggtatatttcagcgaac

SEQ ID NO: 66769 - DNA, 75 bp, synthetic construct
  source 1..75: mol_type = other DNA
gagcgccaccatacagcagatacagcgcgtgcagaaggacacaaatgatgaccttgctgcactttacatgctgaa

SEQ ID NO: 66770 - DNA, 75 bp, synthetic construct
  source 1..75: mol_type = other DNA
gcccgttttgatttacgctcaaaattctacgtaaaacctaaagctgaccatccttggctcacgcgccgcacgcaa

SEQ ID NO: 66771 - DNA, 75 bp, synthetic construct
  source 1..75: mol_type = other DNA
atgacgatatggtcagggcaattctcgaaggaagaaagacgcaaacacgccgcccggtaaaaaatgtcggacacg

SEQ ID NO: 66772 - DNA, 75 bp, synthetic construct
  source 1..75: mol_type = other DNA
accggcagtgcagcacctgacggtggaggtgagcgcagctgacggccagtatctggcacaggcgaaatgggacac

SEQ ID NO: 66773 - DNA, 75 bp, synthetic construct
  source 1..75: mol_type = other DNA
cctgcgtgaaaaaatgaacgggattgccctgattctgacaccagattcattcatcaaaaaagaatacgttgattg

SEQ ID NO: 66774 - DNA, 75 bp, synthetic construct
  source 1..75: mol_type = other DNA
taatgaattcgttggctgcatggatacatttctgtggatggcaaaaagagcgggttacacgattattccaccagc

SEQ ID NO: 66775 - DNA, 75 bp, synthetic construct
  source 1..75: mol_type = other DNA
ggaaatgccattacccaggccgacgcagcagagcaaggagttgtgatcaagcctgcacaaaattccaccgttgct

SEQ ID NO: 66776 - DNA, 75 bp, synthetic construct
  source 1..75: mol_type = other DNA
gtgaaccagtcgcaaccggcgaaaaggaaaagtacaacacggcagtaaaagccgctgaacgggcgcttgagcagg

SEQ ID NO: 66777 - DNA, 75 bp, synthetic construct
  source 1..75: mol_type = other DNA
tgcttataagtagtttgattttgtcaggatgtgggccggaacctgaggataagaaaagtcagcaacaacaatcta

SEQ ID NO: 66778 - DNA, 75 bp, synthetic construct
  source 1..75: mol_type = other DNA
cagttataaaggccagcctgtcacccgactggcagttatgctgaatttactggtttttattcgttccagtgaact

SEQ ID NO: 66779 - DNA, 75 bp, synthetic construct
  source 1..75: mol_type = other DNA
ccatcaggagcgtaatggtgtacgtgctgcgtatatccataaagcagaacatctggaagaacgtcgactgatgct

SEQ ID NO: 66780 - DNA, 75 bp, synthetic construct
  source 1..75: mol_type = other DNA
gtatagccatatcacttgttcttaatccggcatccatatcacaggccagtgctcaggcagatacaaataagttaa

SEQ ID NO: 66781 - DNA, 75 bp, synthetic construct
  source 1..75: mol_type = other DNA
ggtctgcgcagagcaataccttgtttagcactatcaacaaacctgcaaccatcgttgaaatgacgaccgagggtg

SEQ ID NO: 66782 - DNA, 75 bp, synthetic construct
  source 1..75: mol_type = other DNA
gtcccggagagatatctcgtttccgtaactcgctgaatgcgaaaattaatgcagatcaacaccgtaaaaaacaac

SEQ ID NO: 66783 - DNA, 75 bp, synthetic construct
  source 1..75: mol_type = other DNA
ggtgagcagattattgctaacgccttagaaactaaaccggaagtaatctggcctagccgatatcaagcaggtgaa

SEQ ID NO: 66784 - DNA, 75 bp, synthetic construct
  source 1..75: mol_type = other DNA
gtcgcgaggctgaaacagcacatcccggagaagttttttaagatggtgaggtacttcgggttccttgccaaccgg

SEQ ID NO: 66785 - DNA, 75 bp, synthetic construct
  source 1..75: mol_type = other DNA
aacgcgaagcacgtagccgttgcccgtccggttgtgttgctgtattcgccgcccgtattcgtcaggaggtgtgcc

SEQ ID NO: 66786 - DNA, 75 bp, synthetic construct
  source 1..75: mol_type = other DNA
tgccttagggttagaactggaagatcaccagggactagttcatttccctgctaatggacgttacatcctggatat

SEQ ID NO: 66787 - DNA, 75 bp, synthetic construct
  source 1..75: mol_type = other DNA
acctggtcggcacaaagcaatactctttttagcactatcaacaaacctgccgccattgttgaaatgaccaccaat

SEQ ID NO: 66788 - DNA, 75 bp, synthetic construct
  source 1..75: mol_type = other DNA
cgttgagggagaaaatggacggggtggcgctcattctgctgccggattcgtttcctgacaaaaagtacgtcatgt

SEQ ID NO: 66789 - DNA, 75 bp, synthetic construct
  source 1..75: mol_type = other DNA
cggcaaggcgcaatctgccaccctgctcggcgaaacgctgacaccgatggccagcaaggtgctatcgaccctggg

SEQ ID NO: 66790 - DNA, 75 bp, synthetic construct
  source 1..75: mol_type = other DNA
cttatgctgaaaatggaaagcttgtgacatttggtatagtcccgaataaagcagagactggctatggttacattc

SEQ ID NO: 66791 - DNA, 75 bp, synthetic construct
  source 1..75: mol_type = other DNA
aaagcgttcgaaatgatgttaagcgcgatcgaagaaagaccagtcaaaaaaacagttaaagtagaaatgaaatta

SEQ ID NO: 66792 - DNA, 75 bp, synthetic construct
  source 1..75: mol_type = other DNA
ccggggcgttgtgtctgttctggtcgtggctggtggcgcgatatctcgaccgtacacagtcgtctgtcggcggag

SEQ ID NO: 66793 - DNA, 75 bp, synthetic construct
  source 1..75: mol_type = other DNA
ctcgaaatcgacttcaatggagaaaccgtaagcaaatggacattctctactgataataacaatacaaaatctggc

SEQ ID NO: 66794 - DNA, 75 bp, synthetic construct
  source 1..75: mol_type = other DNA
gaagaagcccaacatgaaatggctgctgaagcggggattaatcccgtacgcattgatgagatcgcagagtttttg

SEQ ID NO: 66795 - DNA, 75 bp, synthetic construct
  source 1..75: mol_type = other DNA
ccagtggattgatgaagccggtgatagggacgttattatcgataacggcgctccgtcatttattccgttatcaag

SEQ ID NO: 66796 - DNA, 75 bp, synthetic construct
  source 1..75: mol_type = other DNA
gaagatagagtcgtgggatgagcacacgcctctaagtgatgatgaggttgaagtcccttttcttaaagatattga

SEQ ID NO: 66797 - DNA, 75 bp, synthetic construct
  source 1..75: mol_type = other DNA
atgaatttttcgcaatgggcggttacgccttttttgtctggctggcggtggtgatgaccgttattccgctggtgg

SEQ ID NO: 66798 - DNA, 75 bp, synthetic construct
  source 1..75: mol_type = other DNA
tttagctatctggcaagcatattgtgtcagcatccggcggagattattgccgggttaacaggatatgaggcattt

SEQ ID NO: 66799 - DNA, 75 bp, synthetic construct
  source 1..75: mol_type = other DNA
aatggcgcgaagggtttgatgcgatggtcgataaaaccgcaatcaaagtgatcatgacttacgactttgatgaat

SEQ ID NO: 66800 - DNA, 75 bp, synthetic construct
  source 1..75: mol_type = other DNA
aagaatatcccggaacctccgccgccggagccggtcacccgcccgatggagctttatatcaatggcgaactggtg

SEQ ID NO: 66801 - DNA, 75 bp, synthetic construct
  source 1..75: mol_type = other DNA
tcaatagttatatgcaacgaagagcatagatttattgttgcagaacaattaagagagttaggcaaactttcaaat

SEQ ID NO: 66802 - DNA, 75 bp, synthetic construct
  source 1..75: mol_type = other DNA
agcatcatttacgcaaaattcgtaagccaatggttttactcgatcgtgattttaaatataccgataacgcattgg

SEQ ID NO: 66803 - DNA, 75 bp, synthetic construct
  source 1..75: mol_type = other DNA
gcgatcaaattgatgaagtcgataaagcgctgctgaatttattagcgaagcgtctggaactggttgctgaagtgg

SEQ ID NO: 66804 - DNA, 75 bp, synthetic construct
  source 1..75: mol_type = other DNA
tacaggggagtccttaccgacagacagggagtctcttttttatctgaatgtgctggacattccagcaaaaccaga

SEQ ID NO: 66805 - DNA, 75 bp, synthetic construct
  source 1..75: mol_type = other DNA
aactcaccggtcagccaacagaatgttgttcgtctccgaagtacggcaaacaggaaaacgccccggataatcctt

SEQ ID NO: 66806 - DNA, 75 bp, synthetic construct
  source 1..75: mol_type = other DNA
ctgtgtctgtgctggtcgtggctggttgcgcgttatctcgatcgtggtcaccgggtcgcctccggaggtgagtaa

SEQ ID NO: 66807 - DNA, 75 bp, synthetic construct
  source 1..75: mol_type = other DNA
gaatgccatcgtggcgcgtttcgttaaagatccgaccgaaccgcggtttatctggcgtgccgtacccattcaact

SEQ ID NO: 66808 - DNA, 75 bp, synthetic construct
  source 1..75: mol_type = other DNA
cccaccgtgccgggctgtgggtgataaagaccggactgctggaaacgcagacggtggatttcacgctcgggtcac

SEQ ID NO: 66809 - DNA, 75 bp, synthetic construct
  source 1..75: mol_type = other DNA
acaatttcgaagtccgtgggttcgctaccgtcaacaacgccgatatgccagttcgtcttgttgttctgagaaacg

SEQ ID NO: 66810 - DNA, 75 bp, synthetic construct
  source 1..75: mol_type = other DNA
ttatcagagcaaagtcatcggcgtccttgagcgtgcgctgcgtgagcagtccggctcacggatacggcggatcct

SEQ ID NO: 66811 - DNA, 75 bp, synthetic construct
  source 1..75: mol_type = other DNA
tgatgaccgtaaagagcttttagaacaagttaagcgtgaaaaagagttaagaaaatctgctcaacaacaagctcg

SEQ ID NO: 66812 - DNA, 75 bp, synthetic construct
  source 1..75: mol_type = other DNA
actataaccatccgccggaattatacaaaactaggcgaattcactccaccaaaaactgatgctggtaccggaaga

SEQ ID NO: 66813 - DNA, 75 bp, synthetic construct
  source 1..75: mol_type = other DNA
agtcgcaggcgcagaaaatcagcagcatcagtaccagtgcggttgaactgcgcagtgacgacggtggaacaaaac

SEQ ID NO: 66814 - DNA, 75 bp, synthetic construct
  source 1..75: mol_type = other DNA
gtttcggcgatgaccgccgccgggattatcagtgctgcaatccttgatccagcaactggtcagctggttggcgtg

SEQ ID NO: 66815 - DNA, 75 bp, synthetic construct
  source 1..75: mol_type = other DNA
atatcaggaaagatttgcttaccgggtatcagaattcaacgaaaaacaaagcagcagcaaaaggacggagcgtcg

SEQ ID NO: 66816 - DNA, 75 bp, synthetic construct
  source 1..75: mol_type = other DNA
tgggattaatcagtgacgaagacagggagaagctgaaagcgtaccgcatttacgcgaaatcgctgcaggcgatgg

SEQ ID NO: 66817 - DNA, 75 bp, synthetic construct
  source 1..75: mol_type = other DNA
cggcatggtacgcggcgatgagaaagcccttttccgtgactgcatttatgagctgccgctgcgttatatgattaa

SEQ ID NO: 66818 - DNA, 75 bp, synthetic construct
  source 1..75: mol_type = other DNA
gaagagagccagtatcagcaaatcctcactcacctgacaaaagtgaatccccgcttacgcctgttagggctgact

SEQ ID NO: 66819 - DNA, 75 bp, synthetic construct
  source 1..75: mol_type = other DNA
attatttaatcgttacaaagatagtgccttagctgttgattacactgatggattaactatggagttctctgattg

SEQ ID NO: 66820 - DNA, 75 bp, synthetic construct
  source 1..75: mol_type = other DNA
acagctacgactgcggtaaaaaaatgggctatatgcaggcgtttgtgaagtatggactacgcaacctgaaagaag

SEQ ID NO: 66821 - DNA, 75 bp, synthetic construct
  source 1..75: mol_type = other DNA
catcgcggcctgccgctggcgcttatcagcacggaaggggcaacagaatggtgcgcagaatacgatgaatggggc

SEQ ID NO: 66822 - DNA, 75 bp, synthetic construct
  source 1..75: mol_type = other DNA
cgacgagtttttgctccccttgggaagcaatgatttgctcccgacagttacagcgtggtttactgatgatagcgt

SEQ ID NO: 66823 - DNA, 75 bp, synthetic construct
  source 1..75: mol_type = other DNA
aagttaggggtagttactgtatttgatcatccaactgttgggcagcagaagccccaactgcccgcgtataataaa

SEQ ID NO: 66824 - DNA, 75 bp, synthetic construct
  source 1..75: mol_type = other DNA
gcgtagaaaaagtgttcgattacgaaggtcgttttcgtcgggcgcacgaattacgcggttaatggtagttttgat

SEQ ID NO: 66825 - DNA, 75 bp, synthetic construct
  source 1..75: mol_type = other DNA
ttgctagcgaagggttggtcattgagcgtttcacacagcgtgcacctcttggtttcaatgtgaaccacaacttta

SEQ ID NO: 66826 - DNA, 75 bp, synthetic construct
  source 1..75: mol_type = other DNA
cgatcgaaaaagacgaaatgaatcgggtatttatatttgggaaagttattgggagcatgccacagacatatagaa

SEQ ID NO: 66827 - DNA, 75 bp, synthetic construct
  source 1..75: mol_type = other DNA
agtcagacgacagaataacagcactggaagaagaaaacgcagaattaagacaaagattatctgtaattgaggcgg

SEQ ID NO: 66828 - DNA, 75 bp, synthetic construct
  source 1..75: mol_type = other DNA
attaagcgtacccgtcgccttttgatgagtgccgacgacgatgctgtttcccagcggctggatctggatgtggcg

SEQ ID NO: 66829 - DNA, 75 bp, synthetic construct
  source 1..75: mol_type = other DNA
gctgaaaagcaggtgtctatggtggagatcatgcaggaaggaacctggaagaaaccggaaacacttatgcggtat

SEQ ID NO: 66830 - DNA, 75 bp, synthetic construct
  source 1..75: mol_type = other DNA
aacattcaggtgatcgataatgcaaccgaccgcatccgtaaaatgaacggctatacatacacgcttaaagaaaac

SEQ ID NO: 66831 - DNA, 75 bp, synthetic construct
  source 1..75: mol_type = other DNA
gacgccatgaaactaaatcagtgtgccaccatcaagaagtacatcccgtactcatcgcacattcatcagcatgtg

SEQ ID NO: 66832 - DNA, 75 bp, synthetic construct
  source 1..75: mol_type = other DNA
gtggtactcaaatactggccgccaacccaagcgcagatcgctctcattacgtggatggaatgaaatttgaaccag

SEQ ID NO: 66833 - DNA, 75 bp, synthetic construct
  source 1..75: mol_type = other DNA
cttacgtgagtgatacagcacaatccgcccagcgcggtgtagctgaatacatccagaaaatcgacgaacaaatcg

SEQ ID NO: 66834 - DNA, 75 bp, synthetic construct
  source 1..75: mol_type = other DNA
acaggcatgagtcctttttttacgcgggtatttctcgcaatgaaataccattaaaaaatcttccaagttcagacg

SEQ ID NO: 66835 - DNA, 75 bp, synthetic construct
  source 1..75: mol_type = other DNA
gatacgcgaaagcacatcccgaactgataagcgcattcatgaccacgacggcggcaaattttgccacgctgacag

SEQ ID NO: 66836 - DNA, 75 bp, synthetic construct
  source 1..75: mol_type = other DNA
gccgggtgctgaggacgtactgccagcgccgctgccgccgtaccgggtgcttaccgggctggcggaccgcttcgg

SEQ ID NO: 66837 - DNA, 75 bp, synthetic construct
  source 1..75: mol_type = other DNA
aggtggtggccgcactgatggccatcgagagagagttgcgcagcttacggcaggtcgtcagggaacatggagcgc

SEQ ID NO: 66838 - DNA, 75 bp, synthetic construct
  source 1..75: mol_type = other DNA
gcgtgcaggtcgtcgccgcgctgatggccatagatgccggactcgagcggctgcggcatgccgtgctggaaaagg

SEQ ID NO: 66839 - DNA, 75 bp, synthetic construct
  source 1..75: mol_type = other DNA
cggggttacgtctgaagacagtcatatcaatgtttcttcatcttcagtcctgttctcagatgcatcgtcatttat

SEQ ID NO: 66840 - DNA, 75 bp, synthetic construct
  source 1..75: mol_type = other DNA
gggcatgaccgggttcatgtggtggctgcactgatggccatcggacgtgaactgagtgagctgagggatgaggtc

SEQ ID NO: 66841 - DNA, 75 bp, synthetic construct
  source 1..75: mol_type = other DNA
ggtgataaaagttttggctttgccctgggggcagtaaaaataaaacccagtgaaaatagcctgcttaaattaggt

SEQ ID NO: 66842 - DNA, 75 bp, synthetic construct
  source 1..75: mol_type = other DNA
ttggtgatgatatcagcatccctgaatgcgatgtaatcaattggatgccgctaccagaaccgcctcaggaggtta

SEQ ID NO: 66843 - DNA, 75 bp, synthetic construct
  source 1..75: mol_type = other DNA
gcacagcatagcgccgcagtagatgcagcagaagcacagcgccagtcgctgatggatactgcaatggcttccatc

SEQ ID NO: 66844 - DNA, 75 bp, synthetic construct
  source 1..75: mol_type = other DNA
tggtggatacgtgaagtgggcctgtttgatgaatccggggcattgattgccgtgggaaactgcccggaaagctat

SEQ ID NO: 66845 - DNA, 75 bp, synthetic construct
  source 1..75: mol_type = other DNA
agtgccggtaactccggatggttggataagctgtagtgagcgaatgccgaacgacgcgcagtggtgcgtagtgaa

SEQ ID NO: 66846 - DNA, 75 bp, synthetic construct
  source 1..75: mol_type = other DNA
aaggtaaccttcacgcaaattgaccgtgaatataacacgttcactggtatgtatcctgacaaagcagaagtcgaa

SEQ ID NO: 66847 - DNA, 75 bp, synthetic construct
  source 1..75: mol_type = other DNA
atgaaatcactaattgctgatgttatcgggctggctggttttggcctgcttacgtgcggggtttacctgcagttt

SEQ ID NO: 66848 - DNA, 75 bp, synthetic construct
  source 1..75: mol_type = other DNA
agaattaaagacaagatcgaaggcgaacgtaccatccctctcactccttatgtttctgagctgttaaatgcgcta

SEQ ID NO: 66849 - DNA, 75 bp, synthetic construct
  source 1..75: mol_type = other DNA
atggcggcgatgctgaccggtgcagaggcagactggcggggattcacccgttcggtgctgtccatgatgacagaa

SEQ ID NO: 66850 - DNA, 75 bp, synthetic construct
  source 1..75: mol_type = other DNA
cagaaagcgattgagtcaattaagcaggctgatgcagctgttaagttggcacacgagaagttttcggcgctggca

SEQ ID NO: 66851 - DNA, 75 bp, synthetic construct
  source 1..75: mol_type = other DNA
agaacaagatgtcgcggaagtcgctaaaaaggtggcaaaagagaaatatggcctcgatgttgaactggtaggatt

SEQ ID NO: 66852 - DNA, 75 bp, synthetic construct
  source 1..75: mol_type = other DNA
attggaatttccagtgcatcttattttattagggtttttaataaacattatggtgttacaccaaagcagtttttt

SEQ ID NO: 66853 - DNA, 75 bp, synthetic construct
  source 1..75: mol_type = other DNA
tggcctggcgtccgggtgacagcgggcagaaaaaactggttcagttgttcgactccggtgaagtctgcgcgtttc

SEQ ID NO: 66854 - DNA, 75 bp, synthetic construct
  source 1..75: mol_type = other DNA
aacggaagatagcgaactgcccggatttctggcctttgacgcctcatcttctgcatccggagctgggattggtat

SEQ ID NO: 66855 - DNA, 75 bp, synthetic construct
  source 1..75: mol_type = other DNA
taatgatggcaagcccacttgggatgacggtggtggcgaagacctgtatctcaaggaggtaacccactggatgcc

SEQ ID NO: 66856 - DNA, 75 bp, synthetic construct
  source 1..75: mol_type = other DNA
gattgatgctgctatggcttccatcagtctgattcagctgaaattgcaggccggacgtaaactgacgcaggcaga

SEQ ID NO: 66857 - DNA, 75 bp, synthetic construct
  source 1..75: mol_type = other DNA
tgatggcgatggcgcgccagttccgtaacgtgacggcagagcagattgcgtatgttgcacagctgcagcgttccg

SEQ ID NO: 66858 - DNA, 75 bp, synthetic construct
  source 1..75: mol_type = other DNA
taacagacgaatacgtttcaaatgcaacgttgattcggctcattctgtgggctgaccagcacaatagtcattatg

SEQ ID NO: 66859 - DNA, 75 bp, synthetic construct
  source 1..75: mol_type = other DNA
cagtttttcgcaggttaaaagcgtggccacgcagacctttgacggtattgcacagaatatggcagcgatgctgac

SEQ ID NO: 66860 - DNA, 75 bp, synthetic construct
  source 1..75: mol_type = other DNA
caccgcattgaaactgagctaatgggcaaatttgatgaaggtaaattgcccaccgatccacacctgatgctccga

SEQ ID NO: 66861 - DNA, 75 bp, synthetic construct
  source 1..75: mol_type = other DNA
cccggatatggaaattcgaggacgggttgagcaacgtgttggttatacaattgaacaaattaatcatatgcgtga

SEQ ID NO: 66862 - DNA, 75 bp, synthetic construct
  source 1..75: mol_type = other DNA
cgccatgcgtatgctgcctgcgcagttcactgacgtggccacgcagcttgcaggtgggcaaagtccgtggctgat

SEQ ID NO: 66863 - DNA, 75 bp, synthetic construct
  source 1..75: mol_type = other DNA
gcggcaaactttgccacgttgacagaacgggagattgccgaagcggaacaggtaacaaccatcaacgtaaaaacc

SEQ ID NO: 66864 - DNA, 75 bp, synthetic construct
  source 1..75: mol_type = other DNA
atagccgccaaatcctgctcgacgatatcgctcttgacgggcagcaaaaactgctcgacagccaggtgctgatta

SEQ ID NO: 66865 - DNA, 75 bp, synthetic construct
  source 1..75: mol_type = other DNA
ctgacagaacgggagattgccgaagcggaacaggtaacaaccatcaacgttaaaaccggagaggtggaatcatga

SEQ ID NO: 66866 - DNA, 75 bp, synthetic construct
  source 1..75: mol_type = other DNA
cagcgccgctgaaatcaccggcgcagtagcaatccatccgggttacggcttcctctccgagaacgccaattttgc

SEQ ID NO: 66867 - DNA, 75 bp, synthetic construct
  source 1..75: mol_type = other DNA
gtagccaggtgctggcaaaacgtatgccgggtgacctctctgaatactccgtcattcagaccaaagaaccactgg

SEQ ID NO: 66868 - DNA, 75 bp, synthetic construct
  source 1..75: mol_type = other DNA
gtaaatgactggtatcccacagcaagtatcagcgatttgctggttgtggtgatgaagaaagccaccgcaggcatc

SEQ ID NO: 66869 - DNA, 75 bp, synthetic construct
  source 1..75: mol_type = other DNA
ctgtgcgtagcctcaataatcccattgcatcggcctatctccaggtacttttgctcaccggtgcacggcgtgaag

SEQ ID NO: 66870 - DNA, 75 bp, synthetic construct
  source 1..75: mol_type = other DNA
catgccgcctgatagtgaagaaaaacggtgctgaaatttataaccgtaccgcgctggataatacgctggtttata

SEQ ID NO: 66871 - DNA, 75 bp, synthetic construct
  source 1..75: mol_type = other DNA
cacggccactgttaatctgattaacggcagcggtaagccggcgagcgtggccatcaccgcacaccccgcgcctga

SEQ ID NO: 66872 - DNA, 75 bp, synthetic construct
  source 1..75: mol_type = other DNA
atttgatattacagtgtcgcccggttcaggatatggttcatctgctgatgcgtattacattgcaatgggatatta

SEQ ID NO: 66873 - DNA, 75 bp, synthetic construct
  source 1..75: mol_type = other DNA
acaaaaagcgttatcccgcaagcgcgaaccgtaaaaaggccagaatccgtctggcagacttacacgaacgggtag

SEQ ID NO: 66874 - DNA, 75 bp, synthetic construct
  source 1..75: mol_type = other DNA
gccgtggtggataccgacattggctatcccttttcattaagtcttgatcgtaaccgtgaaggaatgcagtcctgg

SEQ ID NO: 66875 - DNA, 75 bp, synthetic construct
  source 1..75: mol_type = other DNA
cataacagtcgtgaacagtttacggactcactgcataaggtttcaggaaacccttacgcggataccgtgagcgaa

SEQ ID NO: 66876 - DNA, 75 bp, synthetic construct
  source 1..75: mol_type = other DNA
ctaccgcgccgctgtgcatcacagctcaccgattgctgttaagcgtgacattctcagcagtacctacattccgca

SEQ ID NO: 66877 - DNA, 75 bp, synthetic construct
  source 1..75: mol_type = other DNA
caagtagtcggtattgataatctgaacgattactacgacgtcagccttaaacaagctcgtctggaattactggca

SEQ ID NO: 66878 - DNA, 75 bp, synthetic construct
  source 1..75: mol_type = other DNA
gtgaatgtcattgccattcatcacgcgctggtcaaatcaggcatcacgccacaggaggtggatgtggttgtcacc

SEQ ID NO: 66879 - DNA, 75 bp, synthetic construct
  source 1..75: mol_type = other DNA
acgcattgaggatcttgaaaggcaagttcgatttcttgaaacgcggcttgtgtatctaaaaaagctgaaagcctt

SEQ ID NO: 66880 - DNA, 75 bp, synthetic construct
  source 1..75: mol_type = other DNA
acagcatccgccttgaaaacacagagaaaggtgaaatcagtgccgggcagacctggcttaacgtgacggacacac

SEQ ID NO: 66881 - DNA, 75 bp, synthetic construct
  source 1..75: mol_type = other DNA
gtggccgttgtggaggggctggggcgccgtgatttgcggcgttacggcgcggcttatgagtccagctttgtctat

SEQ ID NO: 66882 - DNA, 75 bp, synthetic construct
  source 1..75: mol_type = other DNA
gagcgtcagatgaccgaaggggagttaaaacgacttgcagaacggcaactggcgaaatgggcaaagcatgttggt

SEQ ID NO: 66883 - DNA, 75 bp, synthetic construct
  source 1..75: mol_type = other DNA
ccagatggactattgatattaaggggaataaacaactttctgacattgcatataaatacaaagatgtggagataa

SEQ ID NO: 66884 - DNA, 75 bp, synthetic construct
  source 1..75: mol_type = other DNA
tggaaatgcagcccgccgtgccggtcaggagacagagcttgtcggctcccgtatgcagcgtacgcttgccggtgt

SEQ ID NO: 66885 - DNA, 75 bp, synthetic construct
  source 1..75: mol_type = other DNA
cgtaactttatcaccatgcttcaggatcaggggggctatcacggctggtcccttgctgacgcgcagggcgcatcc

SEQ ID NO: 66886 - DNA, 75 bp, synthetic construct
  source 1..75: mol_type = other DNA
gtgagcagctggcggaaagtgccggtaaacagggcttcttcggtcgcatgatgagccgtgccggtgggctgctga

SEQ ID NO: 66887 - DNA, 75 bp, synthetic construct
  source 1..75: mol_type = other DNA
aaacgttaagccggacactattcatgtctatcgttacgtcatgaagccggatcttcctatccgacgtgacagccc

SEQ ID NO: 66888 - DNA, 75 bp, synthetic construct
  source 1..75: mol_type = other DNA
tcgccttcccattcaggtggtgaaaatcccgatggcggccccactgaaacaggcgtttgatgaaaacgttgaccg

SEQ ID NO: 66889 - DNA, 75 bp, synthetic construct
  source 1..75: mol_type = other DNA
aaaaaccccaagcatgttcaggttatagaggtcactaatcattttccgggggggtactgggaagaccagggttat

SEQ ID NO: 66890 - DNA, 75 bp, synthetic construct
  source 1..75: mol_type = other DNA
atgaaatacctggttacgggtgccgctggtttcatcggcttccacgttagcaaacgcctccttgaggctggccat

SEQ ID NO: 66891 - DNA, 75 bp, synthetic construct
  source 1..75: mol_type = other DNA
acagcaggttgatcaagtatctcaggattctatgtttatgctgggtagtgaggctctttcctcaatggttgagaa

SEQ ID NO: 66892 - DNA, 75 bp, synthetic construct
  source 1..75: mol_type = other DNA
catggcctccggacctggctgagtttgtggcactgatttcggagagtggggcaaatccatttggtctgacggtgg

SEQ ID NO: 66893 - DNA, 75 bp, synthetic construct
  source 1..75: mol_type = other DNA
aacgcagcccgcagtcccgggcgccccgtcagcatggtctgctgtacaatctggtgtggggctggccgtgggcac

SEQ ID NO: 66894 - DNA, 75 bp, synthetic construct
  source 1..75: mol_type = other DNA
gtaccgcgccagtacaggaagccgcgcagcagaagaacacaactcaagccgaagcattcagctttggcgatccta

SEQ ID NO: 66895 - DNA, 75 bp, synthetic construct
  source 1..75: mol_type = other DNA
gattgaatgcgatcatggcaaactgaaacggataatcggcgccacgctgggatttaaatccatgaagacggctta

SEQ ID NO: 66896 - DNA, 75 bp, synthetic construct
  source 1..75: mol_type = other DNA
aaaatcaataacttaggattacttcgtggcgtagaggcttacgtttttgagggcgaacaaggtaagcgagacagc

SEQ ID NO: 66897 - DNA, 75 bp, synthetic construct
  source 1..75: mol_type = other DNA
tatattaattaactttgccatattatcgccagacggttttattgccggattactgcatctgaatagcattttccc

SEQ ID NO: 66898 - DNA, 75 bp, synthetic construct
  source 1..75: mol_type = other DNA
agggacagagccgcggatgacgtttaatgcgtacctgtcacagcagcgtaaggcatgggatgtgctctgcgattt

SEQ ID NO: 66899 - DNA, 75 bp, synthetic construct
  source 1..75: mol_type = other DNA
atgaaacgctgggacaacgatgttcaacttcttggtacagaaatcccgaaaattacatgggaaaagattgagaga

SEQ ID NO: 66900 - DNA, 75 bp, synthetic construct
  source 1..75: mol_type = other DNA
gccacccgcaccctgacgctggaccgtgaagtgacacttccggagaccggtgccgccacggtgaacctgattaac

SEQ ID NO: 66901 - DNA, 75 bp, synthetic construct
  source 1..75: mol_type = other DNA
ccacgggcagaactttgcccgctggcagatggacggctggcgaaacaacgcagaaaccgcgcggggaatgagccg

SEQ ID NO: 66902 - DNA, 75 bp, synthetic construct
  source 1..75: mol_type = other DNA
cagtcatactggtattcaacctgccggttaagagtgacccgcaatggtcaggagatttttaatcagtccacgacg

SEQ ID NO: 66903 - DNA, 75 bp, synthetic construct
  source 1..75: mol_type = other DNA
cactggttgatttgaaattcatcatggctgatactggcttcggtaaaaccttcatctatgaccggattaagtccg

SEQ ID NO: 66904 - DNA, 75 bp, synthetic construct
  source 1..75: mol_type = other DNA
ggcacactggacagtaccgcaggggtacttttgtcgggagaggcgctgtctctgaccgcaggcgtggttaacaat

SEQ ID NO: 66905 - DNA, 75 bp, synthetic construct
  source 1..75: mol_type = other DNA
cccactctcagttaataaacagcatcgatatcctccgggcccgccgggcgacaggcctgatgacccgcgacaatt

SEQ ID NO: 66906 - DNA, 75 bp, synthetic construct
  source 1..75: mol_type = other DNA
gtcagcaacggtaacagcaggctggatgttacccgctctgataatcagggtggcagactggtggcacagcagtca

SEQ ID NO: 66907 - DNA, 75 bp, synthetic construct
  source 1..75: mol_type = other DNA
gctccctggcaggtgattaaagtcgcgccgtttgcattgtctcgttacaccacgccgtacgggcatcaggtgatt

SEQ ID NO: 66908 - DNA, 75 bp, synthetic construct
  source 1..75: mol_type = other DNA
ctctatggtgcaacgcttttcagatatcaccatcatgtttgccggactatggctggtttgcgaagtgagcggact

SEQ ID NO: 66909 - DNA, 75 bp, synthetic construct
  source 1..75: mol_type = other DNA
atatcagcaactggaggaagcgatcaagcttaaccaactggaagaaattctcgcgccggttcgccagcgaatcgt

SEQ ID NO: 66910 - DNA, 75 bp, synthetic construct
  source 1..75: mol_type = other DNA
ttcaggttgatacaaataataacctgaacagcatgtgggctgtgaagctgcagcagatgcaggacggacgccttt

SEQ ID NO: 66911 - DNA, 75 bp, synthetic construct
  source 1..75: mol_type = other DNA
cgattatctccgaacccgtcctgttgatttaatcattatggatatagacttgcccggaacagacggttttacctt

SEQ ID NO: 66912 - DNA, 75 bp, synthetic construct
  source 1..75: mol_type = other DNA
tgttttccgccgtgcagtatgtgcaattccgacgaattctttgaacaagacgtttgccactttttataaggtcat

SEQ ID NO: 66913 - DNA, 75 bp, synthetic construct
  source 1..75: mol_type = other DNA
acaacacttccacatcaactgtcgatgcggcaactgtttgctcatctgacagcaatacgctgaccttcagcactg

SEQ ID NO: 66914 - DNA, 75 bp, synthetic construct
  source 1..75: mol_type = other DNA
aggcactgctagccagacaatgaagccaaacctgttctataacaagttcttctgtggacttggctctatcccact

SEQ ID NO: 66915 - DNA, 75 bp, synthetic construct
  source 1..75: mol_type = other DNA
tatgcaggttatgaatcaggtaaggctatgatgtccctagaaaatgctaagaagttttttaaagtagaaaggttc

SEQ ID NO: 66916 - DNA, 75 bp, synthetic construct
  source 1..75: mol_type = other DNA
gcacgctgacgcttatgccacagctgaacggtgtggatgcggctaaagcccccgccgtggtgaatatcatttctg

SEQ ID NO: 66917 - DNA, 75 bp, synthetic construct
  source 1..75: mol_type = other DNA
atgaagacgaacgcgccgcgcttgttctttgtggataaggagtccggtgtgagtttttatgtttttcatgtgctt

SEQ ID NO: 66918 - DNA, 75 bp, synthetic construct
  source 1..75: mol_type = other DNA
gaaatcctcctggtaactcacgcgtccaagaacgcggtcgaaaaccacttcgacacctcttatgaattagaatct

SEQ ID NO: 66919 - DNA, 75 bp, synthetic construct
  source 1..75: mol_type = other DNA
tcaatccgattagtaagcaaggaaacacgccaatgttatctaactcaggttttatgaattctgactcccgattca

SEQ ID NO: 66920 - DNA, 75 bp, synthetic construct
  source 1..75: mol_type = other DNA
atattccttcagaaataaaagaagggcaaaccactgactggatcaacattaacagcgataacgacaataaacgct

SEQ ID NO: 66921 - DNA, 75 bp, synthetic construct
  source 1..75: mol_type = other DNA
gcctgggccactccatcctgtgtgctcgccctgtcgtgggcgacaacccgtttatcgtggtcctgccggatatca

SEQ ID NO: 66922 - DNA, 75 bp, synthetic construct
  source 1..75: mol_type = other DNA
tatgccagtaaagaatcctgcctccaggcaagagacgagcaaaaaatttctggtgaatgcctcccggtaaaaaaa

SEQ ID NO: 66923 - DNA, 75 bp, synthetic construct
  source 1..75: mol_type = other DNA
tggtggaagactacggcaagtgcgcactgattgagggcatttctttcgccggtgaagatccggaagacaagaaag

SEQ ID NO: 66924 - DNA, 75 bp, synthetic construct
  source 1..75: mol_type = other DNA
actaatgacgatggcacgatggcgcgtgcaccagagtgcattgagtttgccaataaacacaatatggcgctcgtg

SEQ ID NO: 66925 - DNA, 75 bp, synthetic construct
  source 1..75: mol_type = other DNA
ccggtcgcgccggtgcatcaccctcctcccgaacaggatatccacgcaggcaacgtatctgccgtgtcacgccgc

SEQ ID NO: 66926 - DNA, 75 bp, synthetic construct
  source 1..75: mol_type = other DNA
ctctcctgatgaccacacttctggttggctgtgaccgcgtggagccgggcaatgtaggcatcaaagtcaacaaac

SEQ ID NO: 66927 - DNA, 75 bp, synthetic construct
  source 1..75: mol_type = other DNA
gcgagagagaaaatccgtcatgagctgcgcatgctggagcagggtattcccgcagagcccggtcgtccgcaggaa

SEQ ID NO: 66928 - DNA, 75 bp, synthetic construct
  source 1..75: mol_type = other DNA
aatgtcacggtaaatgaaaactgtacgattaagggcatgctggaggcgactcaggtcagaggtgacttcgttaaa

SEQ ID NO: 66929 - DNA, 75 bp, synthetic construct
  source 1..75: mol_type = other DNA
ctacatgatgaggcgttttgcaatacagatgcgagacatcaaagatcctaaagagattgattactcaagctacaa

SEQ ID NO: 66930 - DNA, 75 bp, synthetic construct
  source 1..75: mol_type = other DNA
tgaagtgaaaccggggtatgtgaaggagaccaccaccgccagtgatggtcatactgcgcgtcatctgtcgccggc

SEQ ID NO: 66931 - DNA, 75 bp, synthetic construct
  source 1..75: mol_type = other DNA
acgacattttctgcattagcagaaacgctggataatcaggaagaacctgaaaaactgaccattgagcctaccgtt

SEQ ID NO: 66932 - DNA, 75 bp, synthetic construct
  source 1..75: mol_type = other DNA
agcgcgccctgttgcagttgctgcctgacgggctggcatgggataagcggccgtcatccgttcttgcggctttgt

SEQ ID NO: 66933 - DNA, 75 bp, synthetic construct
  source 1..75: mol_type = other DNA
ccgcatcccgtcagcactgacggaagaagccctggagcagatcggtcagttgtacgccatagaggcggatataag

SEQ ID NO: 66934 - DNA, 75 bp, synthetic construct
  source 1..75: mol_type = other DNA
attacggatgtcagcaatgaaatcacacagaccgtcaataagaaactggaagaccagagtgcagcgatccagcag

SEQ ID NO: 66935 - DNA, 75 bp, synthetic construct
  source 1..75: mol_type = other DNA
aaaaatctgaactctgataatgtcgttatggatgcttcatatttacgagatcaactggtttctgcaattgacatg

SEQ ID NO: 66936 - DNA, 75 bp, synthetic construct
  source 1..75: mol_type = other DNA
catcaacctgccgcccgtgagctggcggcaattgtctggcggctgtactgctcgctttcgcaacttgagcaagca

SEQ ID NO: 66937 - DNA, 75 bp, synthetic construct
  source 1..75: mol_type = other DNA
agtccgcaacaactaaaatcgctcccgtctgaatgttctacaaccaatgacaacaacctctattccttgattgcc

SEQ ID NO: 66938 - DNA, 75 bp, synthetic construct
  source 1..75: mol_type = other DNA
agccggaaactggtaaaggaacggtccagactgaaacgggcgacggtcagaaatccgaatgccagaattatcgtt

SEQ ID NO: 66939 - DNA, 75 bp, synthetic construct
  source 1..75: mol_type = other DNA
tgggctcgcgcgtcatgcgccgcgaatatggctcgctgttgtctgcactgattgaccagccgcagaccccggcgc

SEQ ID NO: 66940 - DNA, 75 bp, synthetic construct
  source 1..75: mol_type = other DNA
taaccgttttgctaccagtgcatcacgcagcaacatccgctacagcctgagtgatacacacgcaacgccggatgg

SEQ ID NO: 66941 - DNA, 75 bp, synthetic construct
  source 1..75: mol_type = other DNA
taaggtgaaagtgaaccgggttcctgacggcgttgcagaatacagtgtgtgggggctgaagttgccgacgttgcg

SEQ ID NO: 66942 - DNA, 75 bp, synthetic construct
  source 1..75: mol_type = other DNA
tcagcggcaaaccgattcctgacaaccgggaaaacataaccattcatctggatgatcacatccactcagttcagg

SEQ ID NO: 66943 - DNA, 75 bp, synthetic construct
  source 1..75: mol_type = other DNA
acctgctggattgcctcaatggatgttttaagaaaggctgtttttgaaggtgtcaatatcattattactcatgag

SEQ ID NO: 66944 - DNA, 75 bp, synthetic construct
  source 1..75: mol_type = other DNA
gcttttgactaaggctatggataatccgacccctgaaaatttatcgagattttatacagcacaacgtttaatgct

SEQ ID NO: 66945 - DNA, 75 bp, synthetic construct
  source 1..75: mol_type = other DNA
ttgataaggtcactgataatatggaggcgatgaaagaaattcatcttaacagtgacgagcaacatttatttggca

SEQ ID NO: 66946 - DNA, 75 bp, synthetic construct
  source 1..75: mol_type = other DNA
tacttgggaacaccaaataacacctatctaaaatataatcccaaagctaaagggaatggagttacaattatcagg

SEQ ID NO: 66947 - DNA, 75 bp, synthetic construct
  source 1..75: mol_type = other DNA
atgcacgacctgccgactattctggtgccgggcggggcgacgctgccgccgaccgtcggggaagacgcgggcaag

SEQ ID NO: 66948 - DNA, 75 bp, synthetic construct
  source 1..75: mol_type = other DNA
ggaagagggcgcgcgcgagctggcgcggcggcagacgcacccggacctgcacgcccacgactttttgccggacga

SEQ ID NO: 66949 - DNA, 75 bp, synthetic construct
  source 1..75: mol_type = other DNA
gcgtatacaacatagaggaaattatgcgctggatcgaaaatcagaaacaaccaggtgttaaaaatgcaagttccg

SEQ ID NO: 66950 - DNA, 75 bp, synthetic construct
  source 1..75: mol_type = other DNA
ggccgccgaactgggctgtcgcgcctgcgcctcgccgggcggcgggtgtcagttcctcggcacggcgggcacctc

SEQ ID NO: 66951 - DNA, 75 bp, synthetic construct
  source 1..75: mol_type = other DNA
gtgtggtggaaccgtctgtgtgacaacgtactgccggaaaaaaccatgccgtttgacctgctgacggttctgccc

SEQ ID NO: 66952 - DNA, 75 bp, synthetic construct
  source 1..75: mol_type = other DNA
gcagtgaggaaacactgaaggcggtgattaacaccgactggggattaccttatttgcctcgttccgccatggagt

SEQ ID NO: 66953 - DNA, 75 bp, synthetic construct
  source 1..75: mol_type = other DNA
gccggtgatgaaagcgtcattaacccggtacagcagaaaatgctcggctatatccgccattctgcctctcttggt

SEQ ID NO: 66954 - DNA, 75 bp, synthetic construct
  source 1..75: mol_type = other DNA
ggaaagactgaataacaaaataatgcagaagttgggttattcacgtgcagaactcttcatccagcttgataaacc

SEQ ID NO: 66955 - DNA, 75 bp, synthetic construct
  source 1..75: mol_type = other DNA
tccagctcgaacgtgctctccacgccgagcatcaccacgctggacaaccaggaagccttcttcatggtgggccag

SEQ ID NO: 66956 - DNA, 75 bp, synthetic construct
  source 1..75: mol_type = other DNA
gccagcgaacgcctgagcgacgagctaaaacaggcgatggcggtggcagtaaagaatattgaaaccttccacact

SEQ ID NO: 66957 - DNA, 75 bp, synthetic construct
  source 1..75: mol_type = other DNA
gtgattacgcctccggcaccaaccacgtgctgccgacttacggttacaccgccacctgttccagcctcgggctgg

SEQ ID NO: 66958 - DNA, 75 bp, synthetic construct
  source 1..75: mol_type = other DNA
aaacaacagctctactgagcttgataaaagataaaggtctgctctcagggctagacgaatatatagctcctcacc

SEQ ID NO: 66959 - DNA, 75 bp, synthetic construct
  source 1..75: mol_type = other DNA
ccggaatcaccacacaaaacaatcgacatcatcacgcagaacaaacgtcccctacacaaataccgcaatccgaat

SEQ ID NO: 66960 - DNA, 75 bp, synthetic construct
  source 1..75: mol_type = other DNA
gatcgatttacggcgtcatcaggctctaagacgtactctaatccgccaccgggtaaatcactacatgccgtgtgg

SEQ ID NO: 66961 - DNA, 75 bp, synthetic construct
  source 1..75: mol_type = other DNA
acggccctgacccttgcgacggttgctgcactcttgacgggcggaggtgcagcaggagccgccagtgtcgcgctg

SEQ ID NO: 66962 - DNA, 75 bp, synthetic construct
  source 1..75: mol_type = other DNA
acacgtctctggcgtggggagctggcgtgcagtttaacccgaccgaatccgtggccattgatattgcttatgaag

SEQ ID NO: 66963 - DNA, 75 bp, synthetic construct
  source 1..75: mol_type = other DNA
atgagtgaaaagagtcacggcagagaagaaatccgtcttcatattgtttgcgatgtccctgatgaacttattgat

SEQ ID NO: 66964 - DNA, 75 bp, synthetic construct
  source 1..75: mol_type = other DNA
gacttagcatcaaaaaaggccacatgtttggcgagaaagagtcacaacgaaaaatggtgtctatccggttgccat

SEQ ID NO: 66965 - DNA, 75 bp, synthetic construct
  source 1..75: mol_type = other DNA
attgatttcacgtttgaatggaaagggctgaagaaattatgcgtggcagtctcctttcggtccataatagcagaa

SEQ ID NO: 66966 - DNA, 75 bp, synthetic construct
  source 1..75: mol_type = other DNA
gaaagatttcagacgcaaagcttgcggtattgcttggtgttccagcaatcatcgctgcaggaacaggtctttata

SEQ ID NO: 66967 - DNA, 75 bp, synthetic construct
  source 1..75: mol_type = other DNA
ggacggacgcctttatattgcgggtatcggagccggtattgagaatacgccagcaggtatgcagagtcaggtgct

SEQ ID NO: 66968 - DNA, 75 bp, synthetic construct
  source 1..75: mol_type = other DNA
cggcggacgttatcattacacggcggcagggcaactggctcagcatgaagacacttctacggtgcagcttagcgg

SEQ ID NO: 66969 - DNA, 75 bp, synthetic construct
  source 1..75: mol_type = other DNA
cggcggagattatcattacacagcagcggggcaactggctcaacatgaagacacttctacggtgcaacttagcgg

SEQ ID NO: 66970 - DNA, 75 bp, synthetic construct
  source 1..75: mol_type = other DNA
atgaaagaaattcatcttaacagtgatgagcaacatttatttggcagaactgcactgatagtcaggtatgaagat

SEQ ID NO: 66971 - DNA, 75 bp, synthetic construct
  source 1..75: mol_type = other DNA
taagaaaactcccggcagaaataaaaccggcagtgatgcgtattatggcttcgtatgcgtttgaagattatgccc

SEQ ID NO: 66972 - DNA, 75 bp, synthetic construct
  source 1..75: mol_type = other DNA
gatgtcccttaattctgcgcctattttaacggatgcaagaacttcaaaatttgtagaaaaagagtttgatttacc

SEQ ID NO: 66973 - DNA, 75 bp, synthetic construct
  source 1..75: mol_type = other DNA
tttgactcactaataatgttagatatatcaaaggattttatcgaagagttattgactgcaaaacattatgatttt

SEQ ID NO: 66974 - DNA, 75 bp, synthetic construct
  source 1..75: mol_type = other DNA
atgaaactggaagatttaccgaaatactactccccaaaatcccccggcctgactgatgcatcggcctcaacgtca

SEQ ID NO: 66975 - DNA, 75 bp, synthetic construct
  source 1..75: mol_type = other DNA
gtccacatccggaacaaagctatcgcttctgccttggactcctgaaccttcataaaaaatacagtaaagccagac

SEQ ID NO: 66976 - DNA, 75 bp, synthetic construct
  source 1..75: mol_type = other DNA
gaaggagagacctacgaaattttcgtaggtcagaaaaacggcgcagaaatagaagttataacaatgactttcaag

SEQ ID NO: 66977 - DNA, 75 bp, synthetic construct
  source 1..75: mol_type = other DNA
aactcttcatccagcttgataaacccgcactgaagcctcttcctgaagccagttacagttacaccctggtgaaga

SEQ ID NO: 66978 - DNA, 75 bp, synthetic construct
  source 1..75: mol_type = other DNA
cagatagttgacctgaagacagaaggtgcaggattacatggcgtcgctcgtctgacattcaaatgtggagagtga

SEQ ID NO: 66979 - DNA, 75 bp, synthetic construct
  source 1..75: mol_type = other DNA
gaccgctttgttgccgtcacgcaaaaaaataccggtaaaggtggtgcgctgatgaatggcctcaattacgccacc

SEQ ID NO: 66980 - DNA, 75 bp, synthetic construct
  source 1..75: mol_type = other DNA
gccagtgcggcgtgatccacaccggcggcactctgtgccgggagaaccgctcctgcgtgggcgaatcggcggcgc

SEQ ID NO: 66981 - DNA, 75 bp, synthetic construct
  source 1..75: mol_type = other DNA
tactgatatcaccgaagtggcgaaaaataacgtgctgactgatgatgatttttctgtgggaaagtcttcgacggc

SEQ ID NO: 66982 - DNA, 75 bp, synthetic construct
  source 1..75: mol_type = other DNA
tctgggcacggtcggacgcaccggtatttcagcagcattcctcggcaacacggcggaacaggtgattgatcatct

SEQ ID NO: 66983 - DNA, 75 bp, synthetic construct
  source 1..75: mol_type = other DNA
tttgtggactgacgataaagacaatttgtggaccaatatcgtcgaacgccagagacatgcgttacaggagatagg

SEQ ID NO: 66984 - DNA, 75 bp, synthetic construct
  source 1..75: mol_type = other DNA
aaggtgcaccgctgagctatactcctgaacacatggtgaatgcgaaactgaactggcagatcaccgaagaagttg

SEQ ID NO: 66985 - DNA, 75 bp, synthetic construct
  source 1..75: mol_type = other DNA
tttgaaccagttcccggcacagggttgagcgtccgtataacttctgaaaattcagaaggtaaaggggctgcttca

SEQ ID NO: 66986 - DNA, 75 bp, synthetic construct
  source 1..75: mol_type = other DNA
gagacttgagcacccggcggtactcgatcttctccagcgatatccctcaccagaaaaactcgcttcgctgggctt

SEQ ID NO: 66987 - DNA, 75 bp, synthetic construct
  source 1..75: mol_type = other DNA
tagcgaggagatcaaccgcctgaatcgccagttgcgggtggaaaaaattctgaatcgctcaggcatccagccgtt

SEQ ID NO: 66988 - DNA, 75 bp, synthetic construct
  source 1..75: mol_type = other DNA
gggcagtcaggcgaaaaatttttgcgggaactgtgcgaagtggatctgctggttcttgatgaaattggcattcag

SEQ ID NO: 66989 - DNA, 75 bp, synthetic construct
  source 1..75: mol_type = other DNA
cgggatacgcgtaatgagcaggtcacgcttaatcagattgttgaccgcagaacggcatcgttactcagtgtgggg

SEQ ID NO: 66990 - DNA, 75 bp, synthetic construct
  source 1..75: mol_type = other DNA
gtgtggctgatgcacgacccggcatacccggaaagcctgcccggtgcgccactggcgcggtacacgtatacggaa

SEQ ID NO: 66991 - DNA, 75 bp, synthetic construct
  source 1..75: mol_type = other DNA
tggttacaacggcgtccgcctccccctgccactgacgctgcatgtccgggatatgacctttgaaaatacgttaag

SEQ ID NO: 66992 - DNA, 75 bp, synthetic construct
  source 1..75: mol_type = other DNA
acgtgactcccaacggtttttctgccatgaatacagggttcatgccccctctggccgcgattgagcgtattgagg

SEQ ID NO: 66993 - DNA, 75 bp, synthetic construct
  source 1..75: mol_type = other DNA
ggcgttggcctcaacacggttttacgtcacttaaaaaactcaggtcgcagtcggtaacctcgcgcatacaaccgg

SEQ ID NO: 66994 - DNA, 75 bp, synthetic construct
  source 1..75: mol_type = other DNA
ccccgacctgaagccggaagagagcgtcagttatgaggctggggtgtattacgataaccccgccggtctgaatgc

SEQ ID NO: 66995 - DNA, 75 bp, synthetic construct
  source 1..75: mol_type = other DNA
cagtccgcgtgcatatctggtctgggatgtggcagatgcctggacgctgaaaggcggtgtgaccacgggatataa

SEQ ID NO: 66996 - DNA, 75 bp, synthetic construct
  source 1..75: mol_type = other DNA
tttgatgaaccgctttcgcgaatctggtgctgcaggtctggcaaaccttcgacgaggacgcccggtaatcacaga

SEQ ID NO: 66997 - DNA, 75 bp, synthetic construct
  source 1..75: mol_type = other DNA
atgactggcagcgactggcgaaggtgaaggatctgacccccggcgagatgacggcggaatcctacgatgataact

SEQ ID NO: 66998 - DNA, 75 bp, synthetic construct
  source 1..75: mol_type = other DNA
aagaacacgtatggtgggacggcagggctgcttttcatggtgaggttgtcagacctgcctgtactctggcgatgg

SEQ ID NO: 66999 - DNA, 75 bp, synthetic construct
  source 1..75: mol_type = other DNA
tggttgatatccgcctgctggaccacctggtggtcggtggcatggagatcacctcgtttgcagatcgtggctggc

SEQ ID NO: 67000 - DNA, 75 bp, synthetic construct
  source 1..75: mol_type = other DNA
tgcagatagctgatgccaggggaaatattgcccgggcagggaaagtaatgcctgcaataccattgacgggtaatg

SEQ ID NO: 67001 - DNA, 75 bp, synthetic construct
  source 1..75: mol_type = other DNA
gaatccccgccggaaggccgtatccccggagcaattcagacagccgttatggataccacccggggctgggtggac

SEQ ID NO: 67002 - DNA, 75 bp, synthetic construct
  source 1..75: mol_type = other DNA
ccggagaatatcgcgttcacccgctggctgacacacctgcaggacggtgtactgctggatgagcaaaactgcctg

SEQ ID NO: 67003 - DNA, 75 bp, synthetic construct
  source 1..75: mol_type = other DNA
ccgcactgctggcgtggcgtgacggggcgaacggtgatcgcagaagttatctccccggatgcgcgttttttccag

SEQ ID NO: 67004 - DNA, 75 bp, synthetic construct
  source 1..75: mol_type = other DNA
atgctgcatgaactctggctgcagagtggtactggacagcgtcgctgggaaggattaccggatgatgtcagggaa

SEQ ID NO: 67005 - DNA, 75 bp, synthetic construct
  source 1..75: mol_type = other DNA
atgctgatgcggtatatctgagaaaccatgacggctgcccacactgctggcgtggtgtcacagggcgcacagtga

SEQ ID NO: 67006 - DNA, 75 bp, synthetic construct
  source 1..75: mol_type = other DNA
acttccttaaactgctggactacaccccggcagagatccagtacctgatcgatctcgcgatcaaactgaaagcgg

SEQ ID NO: 67007 - DNA, 75 bp, synthetic construct
  source 1..75: mol_type = other DNA
ctctggtttgatatggataccacccggcagcgttatgataaccgggatgggcaactggggagtctgacgggggga

SEQ ID NO: 67008 - DNA, 75 bp, synthetic construct
  source 1..75: mol_type = other DNA
gctttaatgattctgctatcagcatcgggcaatccttgcgtccggctttgctccagttgggtgaaacatttattc

SEQ ID NO: 67009 - DNA, 75 bp, synthetic construct
  source 1..75: mol_type = other DNA
tttcaacgtttttctaaactgttacctttcagaattgattttgcctacaggaaagacacgcccagtttcgggcat

SEQ ID NO: 67010 - DNA, 75 bp, synthetic construct
  source 1..75: mol_type = other DNA
atgtataatgccaatcccaattacgaaatgaacgtcgcgattctgaaagatgtgaatgaacacatggaggggttg

SEQ ID NO: 67011 - DNA, 75 bp, synthetic construct
  source 1..75: mol_type = other DNA
ttgtctccgagaactttttctacgaaagcgaaatctacaacacccgcttgtatatctttaccgatcgcccgctat

SEQ ID NO: 67012 - DNA, 75 bp, synthetic construct
  source 1..75: mol_type = other DNA
ccgccggattaccggcatccgcgcaacacaccatccgtgaggcattaaccctgctggagcgtcagttacgcgagc

SEQ ID NO: 67013 - DNA, 75 bp, synthetic construct
  source 1..75: mol_type = other DNA
aggagaatacctgaaagcctggacggtggtggatgcaggtctgtcgtggaagatgacggatgccctgacgctgaa

SEQ ID NO: 67014 - DNA, 75 bp, synthetic construct
  source 1..75: mol_type = other DNA
tattattctgaggcgtagcaggctttccgaaaaaagcaaccggggccgaccacgactgaacagtatcctgccagg

SEQ ID NO: 67015 - DNA, 75 bp, synthetic construct
  source 1..75: mol_type = other DNA
ggccacaccagagtataaatatagatatatagataaagtgaagaatgtctatggtcaaataacatacagccaatc

SEQ ID NO: 67016 - DNA, 75 bp, synthetic construct
  source 1..75: mol_type = other DNA
cggaacagtccgactggtcaggcaatgacaaccgatgcggaagccgctgtcagcgaagccctgcgcgacctggcc

SEQ ID NO: 67017 - DNA, 75 bp, synthetic construct
  source 1..75: mol_type = other DNA
ccacagaatgatgtcacgctgaaaatgccggcctttgaatgggttcatgtgcagctccatcagcaaaaggggatg

SEQ ID NO: 67018 - DNA, 75 bp, synthetic construct
  source 1..75: mol_type = other DNA
ttctggctgtaccgccagctggaaaacgagtacgactggctgacctcagacgccgctgtagatgaggccattcac

SEQ ID NO: 67019 - DNA, 75 bp, synthetic construct
  source 1..75: mol_type = other DNA
acaataaggccatcctcaacgtcgaagtgatccgcaagaacatggacgagcccagagagttctggacgtacgact

SEQ ID NO: 67020 - DNA, 75 bp, synthetic construct
  source 1..75: mol_type = other DNA
aagatcttatgggcgatttttatcggtatcatgcttctatgataagccatttataaaaaaacatttttttgagat

SEQ ID NO: 67021 - DNA, 75 bp, synthetic construct
  source 1..75: mol_type = other DNA
tgtccgcagtagtctggctggttgccgctggtacgccagcaagcgcagcagagcatcagtccacactaagcgccg

SEQ ID NO: 67022 - DNA, 75 bp, synthetic construct
  source 1..75: mol_type = other DNA
gcacagcatagcgccgcagtagatgcagcagaagcacagcgccagtcgcttattgatgctgctatggcttccatc

SEQ ID NO: 67023 - DNA, 75 bp, synthetic construct
  source 1..75: mol_type = other DNA
gctatagagaagtctaacgtctctgtttatgcgaaagattcctcttatcattttaaacttccatttacacaaata

SEQ ID NO: 67024 - DNA, 75 bp, synthetic construct
  source 1..75: mol_type = other DNA
gggagtttggggagtgcaaaggtaaaaaacactatcatctgatgctgctggtcaaccgggatacctggtgtcgtg

SEQ ID NO: 67025 - DNA, 75 bp, synthetic construct
  source 1..75: mol_type = other DNA
gcactctctgattgtggctcattacctgtatggcatctcgaaaaggaagatagcaaaagcatacaaaaaagatga

SEQ ID NO: 67026 - DNA, 75 bp, synthetic construct
  source 1..75: mol_type = other DNA
aaaagcggcactgtcactgggacgcagggcgactggcgtggaactggaaaaagaacgttttgaacagaccgttgg

SEQ ID NO: 67027 - DNA, 75 bp, synthetic construct
  source 1..75: mol_type = other DNA
cagttatttctctggcgtaagcaataccaggaaggaagtcttactgctgtcgccgccggagaacaggttgttcct

SEQ ID NO: 67028 - DNA, 75 bp, synthetic construct
  source 1..75: mol_type = other DNA
tgctgctggagcaggtggaacaatttgaaaatatcgttggtttcttctgggtgattgaatggacggctgatcatg

SEQ ID NO: 67029 - DNA, 75 bp, synthetic construct
  source 1..75: mol_type = other DNA
aattacaggcgctgtttgcccgggtggcagaagagaagcatcagcgcggtgaactggaaaagccccaccaccagc

SEQ ID NO: 67030 - DNA, 75 bp, synthetic construct
  source 1..75: mol_type = other DNA
aagaagagcaaaaagacgggctgtgtgcctacggctgcaatgaagttcctgaacgtcctgctgcaggggtcctcg

SEQ ID NO: 67031 - DNA, 75 bp, synthetic construct
  source 1..75: mol_type = other DNA
cccgaccgaatccgtggccattgatattgcttatgaaggctccggcagtggcgactggcgcactgacgggttcat

SEQ ID NO: 67032 - DNA, 75 bp, synthetic construct
  source 1..75: mol_type = other DNA
cgtcaaaaaagaagtcgatgaactaatcgctatttcagacggtgtaggtaattcccgaaatccgctcattttaat

SEQ ID NO: 67033 - DNA, 75 bp, synthetic construct
  source 1..75: mol_type = other DNA
atggtatttccacgaaatcaggtgatattactgtttacaattatgattgtgagacgcgcgaatatctttcttcaa

SEQ ID NO: 67034 - DNA, 75 bp, synthetic construct
  source 1..75: mol_type = other DNA
cccgacagaatccgtggccgttgatgtcgcttatgaaggctccggcagcggtgactggcgtaccaacagtttcat

SEQ ID NO: 67035 - DNA, 75 bp, synthetic construct
  source 1..75: mol_type = other DNA
aattatgccgtaactgcaaaatcgttaagcgtgatggtgtcatccgtgtgatttgcagtgccgagccgaagcata

SEQ ID NO: 67036 - DNA, 75 bp, synthetic construct
  source 1..75: mol_type = other DNA
atgactgtgtcccacgtggcacgtttgcatggcattcagcccagcctgttgtttaagtggaaaaaacaatacctg

SEQ ID NO: 67037 - DNA, 75 bp, synthetic construct
  source 1..75: mol_type = other DNA
gcctcagtatccgcagatacagttttccacgccggataagccgcgcactgtagcgccttatgccacctatcgtgt

SEQ ID NO: 67038 - DNA, 75 bp, synthetic construct
  source 1..75: mol_type = other DNA
taaaactcaatattacagaaaatgataatgcacttgatttggaattagctcgagaagttgcggagtattttcgac

SEQ ID NO: 67039 - DNA, 75 bp, synthetic construct
  source 1..75: mol_type = other DNA
ggacgggcatgacattgattatcttgagccatctgaagtttacgcgcttgggcgaacagctggctggaacgcctg

SEQ ID NO: 67040 - DNA, 75 bp, synthetic construct
  source 1..75: mol_type = other DNA
acaccggacgggcggctgacggcgaaaaatgccgatatcagcggtaacgtgaatgcgaactccgggacgctcaac

SEQ ID NO: 67041 - DNA, 75 bp, synthetic construct
  source 1..75: mol_type = other DNA
ataacgatcagtaccgttattactcagcttcagtgcaactcttcccgtggctggaaacaacgctgcgctacaccg

SEQ ID NO: 67042 - DNA, 75 bp, synthetic construct
  source 1..75: mol_type = other DNA
gccgtggggcgcgtatggttatagatccacaaggcaaatgcctaccacaaactcgtcgcggcgcaaaagaagaat

SEQ ID NO: 67043 - DNA, 75 bp, synthetic construct
  source 1..75: mol_type = other DNA
aaaattgcgatggtgacaggcgttgatttaaatgaattggcacatggagatattgttaatataaaggaagatgca

SEQ ID NO: 67044 - DNA, 75 bp, synthetic construct
  source 1..75: mol_type = other DNA
catgataaaattggtggttgctccaggaacagtagtacatgccctttcagcgaagtgcgttcttgttacggctgt

SEQ ID NO: 67045 - DNA, 75 bp, synthetic construct
  source 1..75: mol_type = other DNA
aacttaaacgccgccagcaaaatgtgctgatcgccaccgccgggttatatatggggacgtcggcatgttctggtt

SEQ ID NO: 67046 - DNA, 75 bp, synthetic construct
  source 1..75: mol_type = other DNA
agtgattaaactgctgcatcagcgtgacgaaaacggcgaagaccgtgtggcgggggcaatcctcgcgaccggtca

SEQ ID NO: 67047 - DNA, 75 bp, synthetic construct
  source 1..75: mol_type = other DNA
agtttattgccacgaaggcggggagtattaccgtctataactatgatagtgaaacacgggaatatatttccacgt

SEQ ID NO: 67048 - DNA, 75 bp, synthetic construct
  source 1..75: mol_type = other DNA
ctggaacgcgatgatgaaaccggctttcagcaggtgctggaacgtgctggctatctggcgaaggagcataccaaa

SEQ ID NO: 67049 - DNA, 75 bp, synthetic construct
  source 1..75: mol_type = other DNA
ttatcatattaccacttggtggctgtaccgttcatggtaataaatccctaactgatgaaaatcatcaaacggtta

SEQ ID NO: 67050 - DNA, 75 bp, synthetic construct
  source 1..75: mol_type = other DNA
ccgcagcaaaagccagggtaacggcaatcatagcggcagaacggaaggcagccgcaagggcggaacgaaaggcgc

SEQ ID NO: 67051 - DNA, 75 bp, synthetic construct
  source 1..75: mol_type = other DNA
tgtcgactttctccggggattatctccgcgtaactgacaacaaggggaaaacgcacgacgtgctgaccggaagtg

SEQ ID NO: 67052 - DNA, 75 bp, synthetic construct
  source 1..75: mol_type = other DNA
aatcgccagctgacccattacagcgatacccgctggcatgaagattccgttcgtaaccgctggttcagcgtgatg

SEQ ID NO: 67053 - DNA, 75 bp, synthetic construct
  source 1..75: mol_type = other DNA
gtgacagagctggaaacacatttgctgaacgccttagagcagctgcaacaggactatatgcagcggctgagcgaa

SEQ ID NO: 67054 - DNA, 75 bp, synthetic construct
  source 1..75: mol_type = other DNA
tgaattgaaattcaaagttattgcgaaaaaaatatccattaactttgatactgtattttattacaaaagagaaaa

SEQ ID NO: 67055 - DNA, 75 bp, synthetic construct
  source 1..75: mol_type = other DNA
gtatgtgattgagggactgaatctgactaaaacggagtttttccgcgacggtatgccgcgccggattgagttcac

SEQ ID NO: 67056 - DNA, 75 bp, synthetic construct
  source 1..75: mol_type = other DNA
ccgttggttgggccggtactggcggcgcaaatgggttacctgccagggatgatctggctgctcgccggggtggtt

SEQ ID NO: 67057 - DNA, 75 bp, synthetic construct
  source 1..75: mol_type = other DNA
agggtgtacgacatccagaatcgggcgacagaagctgttgtgaccggtgggagagcagaacattttgctaaagaa

SEQ ID NO: 67058 - DNA, 75 bp, synthetic construct
  source 1..75: mol_type = other DNA
tggcgacatgcggcaaacagccgggtaaaccgacgcccgtcaacgcagtttctgggaccggacaacgacatgctg

SEQ ID NO: 67059 - DNA, 75 bp, synthetic construct
  source 1..75: mol_type = other DNA
gcatgacgcctgaggtataccagcgtttgtcgaccgccgttgaactggggaaatggcctgatggcgttgcgttga

SEQ ID NO: 67060 - DNA, 75 bp, synthetic construct
  source 1..75: mol_type = other DNA
gtaacgggttcatttcagcagcgctgataaatcgcgctcaaccaaaaccgggcgtcagttgtggtgccctccgtg

SEQ ID NO: 67061 - DNA, 75 bp, synthetic construct
  source 1..75: mol_type = other DNA
aatttttatgaaatgggtgatattgaaagagaaaaaatatttaaacatgtcgaagatggtatggtctcgattgat

SEQ ID NO: 67062 - DNA, 75 bp, synthetic construct
  source 1..75: mol_type = other DNA
acataccttgggtgattctcggaatcatcggtgcattctgcctcgcggtagttgcattacgtcggggggagcacg

SEQ ID NO: 67063 - DNA, 75 bp, synthetic construct
  source 1..75: mol_type = other DNA
aaggggtttaccttgcgtgatatcagtcgtttttatccggaacaccgcccatcatttggtgaattgctggagcct

SEQ ID NO: 67064 - DNA, 75 bp, synthetic construct
  source 1..75: mol_type = other DNA
aaaatgacacccgttttgccgtcgattttacctggcaacctggcagcgcgatgcagaaacagcttgacccgaatg

SEQ ID NO: 67065 - DNA, 75 bp, synthetic construct
  source 1..75: mol_type = other DNA
gggagctggcgtgcagtttaacccgaccgaatccgtggccattgatattgcttatgaaggctccggcagtggcga

SEQ ID NO: 67066 - DNA, 75 bp, synthetic construct
  source 1..75: mol_type = other DNA
aacattatcagggaccgtatcgcccgaaagatgatggctatgtggcacaggggcgcgagctaaaacagcacgtca

SEQ ID NO: 67067 - DNA, 75 bp, synthetic construct
  source 1..75: mol_type = other DNA
cccgaccgaatccgtggccattgatattgcttatgaaggctccggcagtggcgactggcgatcggatgcatttat

SEQ ID NO: 67068 - DNA, 75 bp, synthetic construct
  source 1..75: mol_type = other DNA
caattcggagcgtagcaaaagatttcagtgtcagcacgcagacggtgcaacgtatcaagaaagagcaggtggcgt

SEQ ID NO: 67069 - DNA, 75 bp, synthetic construct
  source 1..75: mol_type = other DNA
cgattacatcagtatcatacctaaaccggacgtgttaacggcagtaaaaaaccttgcggaggcgttcgaacacta

SEQ ID NO: 67070 - DNA, 75 bp, synthetic construct
  source 1..75: mol_type = other DNA
tcgtaaccgctggttcagcgtgatggcggggccctctgtgcgcgtgaatgaatggttcagtgcgtatgcgatggc

SEQ ID NO: 67071 - DNA, 75 bp, synthetic construct
  source 1..75: mol_type = other DNA
cctgcaggcggtgcagaaacgtaacttctggcagttacaggctgaaatcagtcaccggggacgttactgccatcc

SEQ ID NO: 67072 - DNA, 75 bp, synthetic construct
  source 1..75: mol_type = other DNA
cggtttacccggtcagtgcgctgttatgcgcgatactggcggcgctgataacgcaatatcaggtgaatacatgcg

SEQ ID NO: 67073 - DNA, 75 bp, synthetic construct
  source 1..75: mol_type = other DNA
cccgaccgagtccgtggccattgatgtcgcttatgaaggttccggcagtggtgactggcgcactgacggtttcat

SEQ ID NO: 67074 - DNA, 75 bp, synthetic construct
  source 1..75: mol_type = other DNA
ccaagaccatcaaacacatttttaacatcaacctactcaaaatcatcttctggagcttatcagcttggtatgcca

SEQ ID NO: 67075 - DNA, 75 bp, synthetic construct
  source 1..75: mol_type = other DNA
ttgagtctgatgtgtcctatatccgacgtgacgttgatgagcttaagacagatgtcaaatctatcgacagaaaca

SEQ ID NO: 67076 - DNA, 75 bp, synthetic construct
  source 1..75: mol_type = other DNA
gctgatgccacagctgaacggtgtggatgcggctaaagcccccgccgtggtgaatatcatttctgtttcgtcatc

SEQ ID NO: 67077 - DNA, 75 bp, synthetic construct
  source 1..75: mol_type = other DNA
tgtcagccgtggtgtggctgttcagtcagatgctcaggccagagccgtgccgcagtccggcgacggtaaatcctg

SEQ ID NO: 67078 - DNA, 75 bp, synthetic construct
  source 1..75: mol_type = other DNA
tacggatttggggacgaaaaccacatcgtcgtttgattacggcactaaatccacgaataacaccggggcgcatac

SEQ ID NO: 67079 - DNA, 75 bp, synthetic construct
  source 1..75: mol_type = other DNA
cgcagtccggcgacggtaaaccctgtggtattgccctggatgaagccacagcagaaggcgacgtcattcgtatcc

SEQ ID NO: 67080 - DNA, 75 bp, synthetic construct
  source 1..75: mol_type = other DNA
tcaacaagacgcagaaaactcttttgaggctatcacgcgggagtggtatcagcgtcgctatgaccgctggtctgt

SEQ ID NO: 67081 - DNA, 75 bp, synthetic construct
  source 1..75: mol_type = other DNA
agaaagtctgcgcgcatattttcccgcaacagaacgcgttctgtttgctgaacattaccagggaccatatcgcgg

SEQ ID NO: 67082 - DNA, 75 bp, synthetic construct
  source 1..75: mol_type = other DNA
ccgatccgccgtacttcaaagtgaagcccaacggctgggacaatcagtggaaaggggacgaagattacctgaagt

SEQ ID NO: 67083 - DNA, 75 bp, synthetic construct
  source 1..75: mol_type = other DNA
aatcgccagctgacccgttacagcgatacccgctggcatgaagattccgttcgtaaccgctggttcagcgtaatg

SEQ ID NO: 67084 - DNA, 75 bp, synthetic construct
  source 1..75: mol_type = other DNA
gcaggaaagcgccaccgcgaaagcgcagaaagcggtggatgacatcgccgttcagtgctggctgcggcataagtt

SEQ ID NO: 67085 - DNA, 75 bp, synthetic construct
  source 1..75: mol_type = other DNA
cgcagttgcagcgcctgcgggataaatcggtcaaagacaaaaccgtcgagctggcaaagcaaaaacagatttgcg

SEQ ID NO: 67086 - DNA, 75 bp, synthetic construct
  source 1..75: mol_type = other DNA
tgccgaaatagtcagggataattacggcaagctggatagcatcagcaagccgacacattactcaccgccaccacg

SEQ ID NO: 67087 - DNA, 75 bp, synthetic construct
  source 1..75: mol_type = other DNA
tgccgaaatagtccgggataattacgtatggcttaactatatcggtcagtccagcgctgcaccgccaccacgcag

SEQ ID NO: 67088 - DNA, 75 bp, synthetic construct
  source 1..75: mol_type = other DNA
ccactgaccccagagcaaaatcagcaacgcttcaatttccgccgtctgcatgaggaggtcggtcgccgctggacg

SEQ ID NO: 67089 - DNA, 75 bp, synthetic construct
  source 1..75: mol_type = other DNA
cgaataactggacaccaacaaccagtatcagcgatctgctggttgtggtgatgaaaaaatccacagcaggtatca

SEQ ID NO: 67090 - DNA, 75 bp, synthetic construct
  source 1..75: mol_type = other DNA
cagggctggacggatgccattaacaatgccgtacagaaaggaactgcccacgatgtgcttgagccgaaatcggac

SEQ ID NO: 67091 - DNA, 75 bp, synthetic construct
  source 1..75: mol_type = other DNA
atgactcacaatgggcggcaatttgttccattgctccaaagactggctgtacgccggagactctgcgtgtctggg

SEQ ID NO: 67092 - DNA, 75 bp, synthetic construct
  source 1..75: mol_type = other DNA
gcaggcggtgacacaggcgattgccggattaagtgaacgaaaagtgcagttcacgtacacggacgtgctggccag

SEQ ID NO: 67093 - DNA, 75 bp, synthetic construct
  source 1..75: mol_type = other DNA
tctgaggcatatgtcgggctttatggtaatggtgatatttccttaaaaaatggaggtcagttatctgccagtaac

SEQ ID NO: 67094 - DNA, 75 bp, synthetic construct
  source 1..75: mol_type = other DNA
tgctgatgctgtttaccgcaagcgtcagtgccgcattacctgcccgttatatgcaaaccatcgaaaatgccgcgg

SEQ ID NO: 67095 - DNA, 75 bp, synthetic construct
  source 1..75: mol_type = other DNA
gttatgcacgtaattaaactaacatgggaaaagtaccctaaagccagtaaaacaggtttattgaacgagctttct

SEQ ID NO: 67096 - DNA, 75 bp, synthetic construct
  source 1..75: mol_type = other DNA
ttagatactcgtatctggctcgttgccgacgttaccgatatgcgtaaatccttcaacggatacgacatatgctga

SEQ ID NO: 67097 - DNA, 75 bp, synthetic construct
  source 1..75: mol_type = other DNA
ttgcgcctgacctggctgaaatcaggacgtccattacggatgtcagcaatgaaatcacgcagaccgtcaataaga

SEQ ID NO: 67098 - DNA, 75 bp, synthetic construct
  source 1..75: mol_type = other DNA
ggtgcaaataactggacgccaacgaccagtatcagcgaccttcttgttgtcgtgatgaagaaatcaacagccggc

SEQ ID NO: 67099 - DNA, 75 bp, synthetic construct
  source 1..75: mol_type = other DNA
atctgatagagcgacagagtttgatgcaatggtggagtgattacgttcaaactcaaagagctaaagctatcgctg

SEQ ID NO: 67100 - DNA, 75 bp, synthetic construct
  source 1..75: mol_type = other DNA
ttacaactggcggggctgcaactggcggatattgatctcattgaggctaatgaagcatttgccgcgcagttcctt

SEQ ID NO: 67101 - DNA, 75 bp, synthetic construct
  source 1..75: mol_type = other DNA
attcagggggaagccgcgccaggaaccagttccggcgatgccatggcgttgatggaaaaccttgcgtcaaaatta

SEQ ID NO: 67102 - DNA, 75 bp, synthetic construct
  source 1..75: mol_type = other DNA
attcgtcgtgcggtgaaacgtcacagtcaggtgagcggcggtcgtcgttctggtggacgtaataataacggttaa

SEQ ID NO: 67103 - DNA, 75 bp, synthetic construct
  source 1..75: mol_type = other DNA
cagcaataccctatccctttgctattgtttgtttccattgacaacaaaagagaaatccttgatggaatgcaaaga

SEQ ID NO: 67104 - DNA, 75 bp, synthetic construct
  source 1..75: mol_type = other DNA
tataagaataattataatgttcgaccacttttaaagagacacagaggaaagtatagaaggtatcttttgaaagtc

SEQ ID NO: 67105 - DNA, 75 bp, synthetic construct
  source 1..75: mol_type = other DNA
cttcacaggacgggccggatgtgcagcaggcggtgacacaggccattgccggattaagtgaacgcaaagtgcagt

SEQ ID NO: 67106 - DNA, 75 bp, synthetic construct
  source 1..75: mol_type = other DNA
tgttgtgggcattgtattgtgtgtctccagttttctgttgaaaacgcaccagttactgctgttttacccggtagt

SEQ ID NO: 67107 - DNA, 75 bp, synthetic construct
  source 1..75: mol_type = other DNA
accgtgtcggcaatggtgccagcctgtcaggtctgggcattgcagagagcaggagaagggaatcgcatggccgct

SEQ ID NO: 67108 - DNA, 75 bp, synthetic construct
  source 1..75: mol_type = other DNA
tgtcgcaatagcactgattgtgatggcattatttgccgctgtattatttagcatggtgactgtatttatctggcg

SEQ ID NO: 67109 - DNA, 75 bp, synthetic construct
  source 1..75: mol_type = other DNA
gcggctttaattcctttttctattaggtatatagtttatataacgaataacgcgtcaacgaaaatttcaccaaaa

SEQ ID NO: 67110 - DNA, 75 bp, synthetic construct
  source 1..75: mol_type = other DNA
aaaccggagaccatgcttgatggcgtgaagcggtatgccgcctgggtacgtgctacaggaaataccggcacacag

SEQ ID NO: 67111 - DNA, 75 bp, synthetic construct
  source 1..75: mol_type = other DNA
tccttcatcttgatggtgcaggagattcactagggggtagtgcaaataattcactatctggtgcagcaaattcac

SEQ ID NO: 67112 - DNA, 75 bp, synthetic construct
  source 1..75: mol_type = other DNA
ctccgtcaggcagggctggccgggggagacagtcctgcacggtttattgcaccggggcgcaaatatccgcagccg

SEQ ID NO: 67113 - DNA, 75 bp, synthetic construct
  source 1..75: mol_type = other DNA
tacccgccgtcaatttcttgcgtgaagaaaacgtctttgtgatgacaacttctcgcgcgtctggtcaggaaattc

SEQ ID NO: 67114 - DNA, 75 bp, synthetic construct
  source 1..75: mol_type = other DNA
ataaaataaatcagttccagagcgctgatgaacatgcacgatataattacggtgatgacctggaaaaagtattaa

SEQ ID NO: 67115 - DNA, 75 bp, synthetic construct
  source 1..75: mol_type = other DNA
gcaatggatgctccgggcagacgtgtctgcgcggactgtggcggagagatccccgccgcacgtcttgttgctgtg

SEQ ID NO: 67116 - DNA, 75 bp, synthetic construct
  source 1..75: mol_type = other DNA
atactttaatttagatgccattgcattaacaaaacaactaaaagacagtggtaaacttcaacaaaaagagccagt

SEQ ID NO: 67117 - DNA, 75 bp, synthetic construct
  source 1..75: mol_type = other DNA
gccatttacttaatatttatattctgcaagcgacggcgtaatcaacaacagcctgttcagttgcctcatcggtac

SEQ ID NO: 67118 - DNA, 75 bp, synthetic construct
  source 1..75: mol_type = other DNA
tctgagggtgacagggaaaattcccggactccgcgtctccggcggtgaccgcctgcaggtggcatccgtcagtga

SEQ ID NO: 67119 - DNA, 75 bp, synthetic construct
  source 1..75: mol_type = other DNA
gtgcttgccgatcttcacaacagctttattgccgaactaaacgaaaacggcatcccagaagcaccagtgacgcac

SEQ ID NO: 67120 - DNA, 75 bp, synthetic construct
  source 1..75: mol_type = other DNA
atccgttcgaaggtgaatttgcttggggacatactggctataaaaaattcattgagacacaggaaaaactatgcg

SEQ ID NO: 67121 - DNA, 75 bp, synthetic construct
  source 1..75: mol_type = other DNA
tcttttacgctacacatcaacggcaaagatcacgatttgttagcggtggataaaattcatgtcgatttaaactgg

SEQ ID NO: 67122 - DNA, 75 bp, synthetic construct
  source 1..75: mol_type = other DNA
ttatctgggggaagtcagcgcagaacaactggaactggtgagcagcgctctgaaagtgatccgcacagaacgggt

SEQ ID NO: 67123 - DNA, 75 bp, synthetic construct
  source 1..75: mol_type = other DNA
ggtattagcgtgaaggttcagtcagagcgcagccagcatgctaacaaacggctggcgcgattgctgattgcctgg

SEQ ID NO: 67124 - DNA, 75 bp, synthetic construct
  source 1..75: mol_type = other DNA
ttaaaggcactgctgataataaagaagtactgttcgaagcaaaagttgctgctgatggcaaagtgactaagggtg

SEQ ID NO: 67125 - DNA, 75 bp, synthetic construct
  source 1..75: mol_type = other DNA
atgaatccatcaatcgttaaacgttgccttgtcgggaccgtgctggctattgctgccactctgccgggttttcag

SEQ ID NO: 67126 - DNA, 75 bp, synthetic construct
  source 1..75: mol_type = other DNA
attcgctgtggtctggaaagtgccgttgaaattgcccttctcgctcttcaacttagatataaaccagtaaaaggc

SEQ ID NO: 67127 - DNA, 75 bp, synthetic construct
  source 1..75: mol_type = other DNA
agcgaggtcaggcctctgacgtacgcggaccgcgcactgaacagcgtcccatgactcatgtggaggccgcgaaag

SEQ ID NO: 67128 - DNA, 75 bp, synthetic construct
  source 1..75: mol_type = other DNA
agctgatgcgcaggttatagaactggtgcgtcagcagctggggttggatcagccgctgtatcaccagttctggca

SEQ ID NO: 67129 - DNA, 75 bp, synthetic construct
  source 1..75: mol_type = other DNA
ttaccagtcagaaatatcatgatattcctgctgaaacgccgtatgcgccgggagaacgaattaagggagggcaag

SEQ ID NO: 67130 - DNA, 75 bp, synthetic construct
  source 1..75: mol_type = other DNA
gctgcgcaggctgaaggaggtctctgtgactgataaacgcaaaaaacgcgccgatgccgggcgcagcgccctgac

SEQ ID NO: 67131 - DNA, 75 bp, synthetic construct
  source 1..75: mol_type = other DNA
tatgtccggtacatttactcaggaaaacggtcgtctgaccattcagggccacccggttatccatgcttcaacgtc

SEQ ID NO: 67132 - DNA, 75 bp, synthetic construct
  source 1..75: mol_type = other DNA
gtgaagacggtggggaaagcctttccccggaataacagttatgccagcgggacggtaaccgtcacagtttacgat

SEQ ID NO: 67133 - DNA, 75 bp, synthetic construct
  source 1..75: mol_type = other DNA
tggctgaagtgcttagtaaaagatctttacttgatgtggttggtgctgagcaggacgccaaggcaatcaacgccg

SEQ ID NO: 67134 - DNA, 75 bp, synthetic construct
  source 1..75: mol_type = other DNA
ggaacactcgcgttcgggttgataacattggcggcgtcggtgcacaaacggtcaacggtattgaactcattgagg

SEQ ID NO: 67135 - DNA, 75 bp, synthetic construct
  source 1..75: mol_type = other DNA
tcactggtatacgtgtatctgtgggataccggcgaggcgctgggctggctgttgtatgacctggagcaggaggag

SEQ ID NO: 67136 - DNA, 75 bp, synthetic construct
  source 1..75: mol_type = other DNA
ttgccatcacggcggtgcagcatgtgccggaaaaagaagccattgtggataacggggcccgctttgagccgatgt

SEQ ID NO: 67137 - DNA, 75 bp, synthetic construct
  source 1..75: mol_type = other DNA
taaccggatatctaatgtcataagcatccctttaattatcccctcaacctcttgtaactttcccactcttgagct

SEQ ID NO: 67138 - DNA, 75 bp, synthetic construct
  source 1..75: mol_type = other DNA
aatgctatgttctgatcgttatttcggaaataaggtcgaagattatgttgtcacttttggtagttggttcttatt

SEQ ID NO: 67139 - DNA, 75 bp, synthetic construct
  source 1..75: mol_type = other DNA
cgcagacggtggatttcacgctcgggtcacaggggctgcgtcacacacccggtgacattattgaaatctgtgata

SEQ ID NO: 67140 - DNA, 75 bp, synthetic construct
  source 1..75: mol_type = other DNA
gaggcgatgggcaagctcagggagcggttgccggagaagcggcgcaaggatgcggtgctggcggtcgaatacgtg

SEQ ID NO: 67141 - DNA, 75 bp, synthetic construct
  source 1..75: mol_type = other DNA
aaacgtgacgatgttattttgaaaacagttagagatgcaataggaaatcttcctccgttagaagatggccaaaca

SEQ ID NO: 67142 - DNA, 75 bp, synthetic construct
  source 1..75: mol_type = other DNA
atagatatgaccaagattttattttccatatgcgattattatgtgactacgaattaatagtcagggttgatggaa

SEQ ID NO: 67143 - DNA, 75 bp, synthetic construct
  source 1..75: mol_type = other DNA
gtatcgtatgagaagatatcaaaatatccttaaagaacatggtattaaacaaagcatgtccagaaaaggcaattg

SEQ ID NO: 67144 - DNA, 75 bp, synthetic construct
  source 1..75: mol_type = other DNA
taagttaccatttacttttttacttgagattcataaaaactgggatattgcaccaaacgccgcaccccgcgtgtg

SEQ ID NO: 67145 - DNA, 75 bp, synthetic construct
  source 1..75: mol_type = other DNA
ccgatgatttcagtcagtgttatgtctgatgccgttcagtcagacccgtcgaatcctgccccgcaggttttgtct

SEQ ID NO: 67146 - DNA, 75 bp, synthetic construct
  source 1..75: mol_type = other DNA
ggattgatcaaccaggcgcaggcgcaaacccggcgtaaagatgttgccagcgaggccgatttctacggcgcgatg

SEQ ID NO: 67147 - DNA, 75 bp, synthetic construct
  source 1..75: mol_type = other DNA
tcgcgctgctgcgcggcggcaatctcggcgtgccgctggtgatcctgtgtattctggcgatggttattttgccgc

SEQ ID NO: 67148 - DNA, 75 bp, synthetic construct
  source 1..75: mol_type = other DNA
acagcgcatgcacaccacttcaggatcgtttggctgatgcatcatctgagtttgatgttggtcagcaacatctgt

SEQ ID NO: 67149 - DNA, 75 bp, synthetic construct
  source 1..75: mol_type = other DNA
ggtcgggtcagtggatatgaaggcaaggataaaaatccacagggcattaatatcaggtatcgctacgagataacg

SEQ ID NO: 67150 - DNA, 75 bp, synthetic construct
  source 1..75: mol_type = other DNA
caattggctctgccaatatagatatagccggatattcgtatgcctccttaaattatgctgattctaacccgggga

SEQ ID NO: 67151 - DNA, 75 bp, synthetic construct
  source 1..75: mol_type = other DNA
tgaagattttatccagggagagttatttaaaattacagatacaccgtggtacaacgcctggacgcaggataaaac

SEQ ID NO: 67152 - DNA, 75 bp, synthetic construct
  source 1..75: mol_type = other DNA
gttgcagagggttctaaggctatccgtatcacagtagagcaattggatgaactgagaacacaaactaaaggtaca

SEQ ID NO: 67153 - DNA, 75 bp, synthetic construct
  source 1..75: mol_type = other DNA
tcggaaataacgttaccttcaccgttggtaaaacgaaaaaggatgataccgggcagaccgcgatttactccgccg

SEQ ID NO: 67154 - DNA, 75 bp, synthetic construct
  source 1..75: mol_type = other DNA
aagttgtccgtgttgatattgatgttgatctgcaaggctggcgcccaaccaaagggcaaactgacttaaacggcg

SEQ ID NO: 67155 - DNA, 75 bp, synthetic construct
  source 1..75: mol_type = other DNA
cgttcgcaagcaggagctgacggtgtatacgctgaataatgagctggaaaatctgctgaccaacgtggtgaatca

SEQ ID NO: 67156 - DNA, 75 bp, synthetic construct
  source 1..75: mol_type = other DNA
gacattgctcacaatatcgagttaatcattcggccgttgaacattcccattgaaaaatttctcagtatagaatat

SEQ ID NO: 67157 - DNA, 75 bp, synthetic construct
  source 1..75: mol_type = other DNA
catagacaaaaggcgagaagaaggacgtatcgagtgggaacaggtcagaacagtcaaacagaagggcaaagaaca

SEQ ID NO: 67158 - DNA, 75 bp, synthetic construct
  source 1..75: mol_type = other DNA
cgaaaaatccacctgtaccactgcgaccatcgcggcctgccgctggcgctcatcagcacggaaggggcaacagcg

SEQ ID NO: 67159 - DNA, 75 bp, synthetic construct
  source 1..75: mol_type = other DNA
agtctgtgttgacggggaagttcgggtcagcacatcgaagagtgaagggcgtattgtccgctttgacctgaagtt

SEQ ID NO: 67160 - DNA, 75 bp, synthetic construct
  source 1..75: mol_type = other DNA
ctggatcgcagcctgtttccctatgcgcggccaaattattttcagtcagcggaaaatgaacaacgtctctttgcc

SEQ ID NO: 67161 - DNA, 75 bp, synthetic construct
  source 1..75: mol_type = other DNA
ccactttcactgacgacccgtatcgggcatgcaatggtggccagttacgagatgatcttcacgcaaccggacagt

SEQ ID NO: 67162 - DNA, 75 bp, synthetic construct
  source 1..75: mol_type = other DNA
attttcagcacaggcagtggatacgacgattactgtgacgggtaatgttttgcaaagaacatgtacgactccaaa

SEQ ID NO: 67163 - DNA, 75 bp, synthetic construct
  source 1..75: mol_type = other DNA
gtggcagacaacagctatctggacagtgaaacactgcataccagcgcatatgttcttcgcaaactgaaatcggtc

SEQ ID NO: 67164 - DNA, 75 bp, synthetic construct
  source 1..75: mol_type = other DNA
caacaacacccgcgcagagcaccggctggccttccgtcacgcatccggcactgaacaatgcaccggcggtgaaaa

SEQ ID NO: 67165 - DNA, 75 bp, synthetic construct
  source 1..75: mol_type = other DNA
ttctggagcgtatccgcagactgaccccaccacatgtaaccgccccattcagaacggtagcggagtggcgcgagt

SEQ ID NO: 67166 - DNA, 75 bp, synthetic construct
  source 1..75: mol_type = other DNA
aggcgaacctgaaccgggaatggcaggtggtggcaagtgaactgcacggcgaacagccgcaggcggtgccgggac

SEQ ID NO: 67167 - DNA, 75 bp, synthetic construct
  source 1..75: mol_type = other DNA
aaccaggacagttcatgctggatccgtgtggcacaggcgtgggcaggcaccggctttggcaacctggcgataccg

SEQ ID NO: 67168 - DNA, 75 bp, synthetic construct
  source 1..75: mol_type = other DNA
gatatattgattataagtactcctcatgatctccctagatttattaaccttcttggagatggatcacaatgggga

SEQ ID NO: 67169 - DNA, 75 bp, synthetic construct
  source 1..75: mol_type = other DNA
gcgacctactttgtccgggccatcggagactcgatgaaagatatgggcctgtactccggcgatttaatggttgtc

SEQ ID NO: 67170 - DNA, 75 bp, synthetic construct
  source 1..75: mol_type = other DNA
atccccgtgatttccggtaatggtcagtttgccacggtagctgaagtcaccgttactgaagcaggcgctgcaggg

SEQ ID NO: 67171 - DNA, 75 bp, synthetic construct
  source 1..75: mol_type = other DNA
catcgctgatgaactgatgaccgggtgtacaaattttgcgttcagcggaaaacctggtaccgggaagaaccactt

SEQ ID NO: 67172 - DNA, 75 bp, synthetic construct
  source 1..75: mol_type = other DNA
attatgcccgtagtctggcggtgggcgaatatcgcggcgtggtgactgctattccggatatagcccgccatactc

SEQ ID NO: 67173 - DNA, 75 bp, synthetic construct
  source 1..75: mol_type = other DNA
tatgggccgtggctatgcctggcttgatacaggtacgcatgagagtcttattgaggcaggtaactttattcagac

SEQ ID NO: 67174 - DNA, 75 bp, synthetic construct
  source 1..75: mol_type = other DNA
ggttgcggagtgcgtgattaataaattatgtccgtcgcataccgttgttttattttcttatccagaggaggctga

SEQ ID NO: 67175 - DNA, 75 bp, synthetic construct
  source 1..75: mol_type = other DNA
ggttcttgatgaaattggcattcagcgtgagacaaaaaacgagcaggtggtgctgcatcagattgttgatcgccg

SEQ ID NO: 67176 - DNA, 75 bp, synthetic construct
  source 1..75: mol_type = other DNA
taattgattgtggtgatattagtgctaaagatgcaaaaagcacacagaaagcctggaattgtcgtcactccagac

SEQ ID NO: 67177 - DNA, 75 bp, synthetic construct
  source 1..75: mol_type = other DNA
atgaactatccgacgattgttaacggtattgatttccgcgatcttgtttttgtgacaggcaacgagccggtgacg

SEQ ID NO: 67178 - DNA, 75 bp, synthetic construct
  source 1..75: mol_type = other DNA
tcggtgttgaccatattcaggatgtgattgatagccttggctatgcgtgggccgatcaggcattgctggaagtgg

SEQ ID NO: 67179 - DNA, 75 bp, synthetic construct
  source 1..75: mol_type = other DNA
gtgggtaaaggtggcggcagggcgcacacgccggttgaggcaaaggacaatcttaagtccacgcagatgatgagc

SEQ ID NO: 67180 - DNA, 75 bp, synthetic construct
  source 1..75: mol_type = other DNA
atggcgaaggggcgcagcgtgattatcgtcaccgtgtctgatgtcatgagcgtgttgcatgacagctacgacaac

SEQ ID NO: 67181 - DNA, 75 bp, synthetic construct
  source 1..75: mol_type = other DNA
tgttgccgcatgcgcatccgcaggatttaatgcaaaaatcggtgcaaccgttgcccaaatcgatcaagcgcactg

SEQ ID NO: 67182 - DNA, 75 bp, synthetic construct
  source 1..75: mol_type = other DNA
caagaacaacgtcaggctaagcttgaagccttccgccggaaactgttagaagatggtatcgatcctgcggagcta

SEQ ID NO: 67183 - DNA, 75 bp, synthetic construct
  source 1..75: mol_type = other DNA
aggaaacagtacctgaaacagctgtgggaaaacagcagtatgccacctgacgtgtatcagcagttctgtcttact

SEQ ID NO: 67184 - DNA, 75 bp, synthetic construct
  source 1..75: mol_type = other DNA
ctatttttgaactgcaggcccgggcagtaagcaaagggggggttactcctgggaatataagatcagaaattacgg

SEQ ID NO: 67185 - DNA, 75 bp, synthetic construct
  source 1..75: mol_type = other DNA
atgaaaaacattgcggcaggcggcgttcttgaacgtatccgaagactggctccgccacatgtaaccgccccattc

SEQ ID NO: 67186 - DNA, 75 bp, synthetic construct
  source 1..75: mol_type = other DNA
tattataattttggcacaacgattatttcagatataaataataatataccaggtactattctgcccgaaaaaaac

SEQ ID NO: 67187 - DNA, 75 bp, synthetic construct
  source 1..75: mol_type = other DNA
tgaccatctcgaccgaccggtgattgtcctcgatccggaacgccatattgtgcagtgcaatcgcgcatttaccga

SEQ ID NO: 67188 - DNA, 75 bp, synthetic construct
  source 1..75: mol_type = other DNA
cagcccgccatttcatgaaatgggggaaatcatttgtcgtaacatcgaatctgttctcaacgaatcgcatgtttc

SEQ ID NO: 67189 - DNA, 75 bp, synthetic construct
  source 1..75: mol_type = other DNA
ccagggggccgaagggtgataaaggtgacccgggaccgcagggggtacagggaccgaaaggtgagacaggtgcaa

SEQ ID NO: 67190 - DNA, 75 bp, synthetic construct
  source 1..75: mol_type = other DNA
gcggcaagccgtaccgcccgcgcagcggtgtttatccgcaacgatccggcacgtcccacgcagaccggtgagctg

SEQ ID NO: 67191 - DNA, 75 bp, synthetic construct
  source 1..75: mol_type = other DNA
ctggggcaacctgattaacttcatggccaactggcgcgcgctaaaacaggtacttcaacacggcgatccacgtcg

SEQ ID NO: 67192 - DNA, 75 bp, synthetic construct
  source 1..75: mol_type = other DNA
agcggtgtggtggtaagaatcgccggtgaaggtcgtccgtggaatcccggtaccatcaccggtggtcgcgtgtgg

SEQ ID NO: 67193 - DNA, 75 bp, synthetic construct
  source 1..75: mol_type = other DNA
gcgttcagttcttccggctactgaaccgtcgatatgaaaaagcgagcatcatactgacgtcaaacaaagggttcg

SEQ ID NO: 67194 - DNA, 75 bp, synthetic construct
  source 1..75: mol_type = other DNA
aatatcgtctggaacgccacggccacctttattgccgtcattatcatcagtctgttgctggatgagtccggcttt

SEQ ID NO: 67195 - DNA, 75 bp, synthetic construct
  source 1..75: mol_type = other DNA
cgacaacttccgcctgccagccaacccggaaacgccggtaattatgattggtccgggcaccggtattgcgccgtt

SEQ ID NO: 67196 - DNA, 75 bp, synthetic construct
  source 1..75: mol_type = other DNA
caagaaaaattggtatttcaggtatgcagtaccagtaagcaagaaaagaacaaaaatgagccttgggacctatcc

SEQ ID NO: 67197 - DNA, 75 bp, synthetic construct
  source 1..75: mol_type = other DNA
atgcaataactgataaagcgttagcaagttactttcgcagttcgggtaatttgttagaagaagagtcagcagtgt

SEQ ID NO: 67198 - DNA, 75 bp, synthetic construct
  source 1..75: mol_type = other DNA
cacacctcgctcacgcaatgccgttcctccattcagtcgcagaagccgtgaacacgcagcaaaaaactgtcgcga

SEQ ID NO: 67199 - DNA, 75 bp, synthetic construct
  source 1..75: mol_type = other DNA
attaatgacattagcgcaacgtattactcagatctggccacaaatggcgttacagcagggaaagtgtgttgtcga

SEQ ID NO: 67200 - DNA, 75 bp, synthetic construct
  source 1..75: mol_type = other DNA
tgggttaaaagaacgcgtcacttggatgattcagtctcgtggtcgtcctgttactggcagtgaaatagcagagaa

SEQ ID NO: 67201 - DNA, 75 bp, synthetic construct
  source 1..75: mol_type = other DNA
ggttcgttacggaacaacatttatgccggagggcagggtgttgctgcgtcatctgaaacagcagcggtacgttca

SEQ ID NO: 67202 - DNA, 75 bp, synthetic construct
  source 1..75: mol_type = other DNA
atgtgtggataccctttaatgattcgctggatatgattacgggctattctccgggttataaaaaagtgaagattg

SEQ ID NO: 67203 - DNA, 75 bp, synthetic construct
  source 1..75: mol_type = other DNA
agcagtgacaaagtggggaaaaccggattttccgagaacgtgctcgctaaccggattgcgttcgggaaaatatat

SEQ ID NO: 67204 - DNA, 75 bp, synthetic construct
  source 1..75: mol_type = other DNA
tcaggagggcgcatgggcaccggagcactccgtgacggagttcagtcacagccaggaagcgaaactggcagaagc

SEQ ID NO: 67205 - DNA, 75 bp, synthetic construct
  source 1..75: mol_type = other DNA
catcgtcccggctacgatctgaccttctccgcccccaaaagtgtctccatgatggccatgttaggtggcgataag

SEQ ID NO: 67206 - DNA, 75 bp, synthetic construct
  source 1..75: mol_type = other DNA
tcaagccacatcgggaactcgtcatctattcggccatttgagaaatcttcgtctctggcataaagaattaactga

SEQ ID NO: 67207 - DNA, 75 bp, synthetic construct
  source 1..75: mol_type = other DNA
ggtataactgaagcgggagattatatttaccttgcaacaccacaatttgaaaacggcggatgtgcttcatctttt

SEQ ID NO: 67208 - DNA, 75 bp, synthetic construct
  source 1..75: mol_type = other DNA
atctagtcgtctgcgagtcgtcagaattggaggtacgtttccggcagatcgtgagactctacagtggatttgtgt

SEQ ID NO: 67209 - DNA, 75 bp, synthetic construct
  source 1..75: mol_type = other DNA
agatcgatctcgatgcaaagctctggatgattccagccgaacggatgaaggccaaacgagagcacatagttcctt

SEQ ID NO: 67210 - DNA, 75 bp, synthetic construct
  source 1..75: mol_type = other DNA
gcaagtaagaaaattagctgtaccactaataaagaataattatgggcagtatctttataaaatgacgaaggattc

SEQ ID NO: 67211 - DNA, 75 bp, synthetic construct
  source 1..75: mol_type = other DNA
aaatattaataatattaagccggcaagctttgatttgataaatataccaatcccaccacttgccgaacaaaaaat

SEQ ID NO: 67212 - DNA, 75 bp, synthetic construct
  source 1..75: mol_type = other DNA
tatccacgcaggcattagaaattctagaagtgatgcaacctattagcgcacatcgtgagcatgttttcccaagca

SEQ ID NO: 67213 - DNA, 75 bp, synthetic construct
  source 1..75: mol_type = other DNA
gcaggtgaaagtattagctgaaccgctgaaaaaaaatgcttatggtcagtatctgctgaaaatgattaaaggtta

SEQ ID NO: 67214 - DNA, 75 bp, synthetic construct
  source 1..75: mol_type = other DNA
gttttgaggaatcaacttacgccagaactcaggctaatttctacatcgatggtcccttgcttcataccaggggcc

SEQ ID NO: 67215 - DNA, 75 bp, synthetic construct
  source 1..75: mol_type = other DNA
caccggccaccagggcaatgtctttaacaacggacgggacgtcgtcggaatgctcagtattgtgagcggttttat

SEQ ID NO: 67216 - DNA, 75 bp, synthetic construct
  source 1..75: mol_type = other DNA
gcaggtgaaagtattagctgaaccgctcaagaaaaatgcttacggccaatacctgttaaaaatgattaaaggtta

SEQ ID NO: 67217 - DNA, 75 bp, synthetic construct
  source 1..75: mol_type = other DNA
taacaaaagaacgtaaacaaatccatccagaagatatacatctcactgcaaaagacttcgaagcaagtaaagata

SEQ ID NO: 67218 - DNA, 75 bp, synthetic construct
  source 1..75: mol_type = other DNA
accttgtacacacacaaacggcctttgtgtggcgttttctggccctgaatatcggagaaaaaaaccagttgatcg

SEQ ID NO: 67219 - DNA, 75 bp, synthetic construct
  source 1..75: mol_type = other DNA
agatacctgacgacctgatacaggatatcgccatcagagaactggcgtttggcgcaggtgcattacgcgcggcag

SEQ ID NO: 67220 - DNA, 75 bp, synthetic construct
  source 1..75: mol_type = other DNA
tgaactacgacccgaacatgacattatgcgggcgcatggcaagacagacggttcgtctgacactcgggcaatggg

SEQ ID NO: 67221 - DNA, 75 bp, synthetic construct
  source 1..75: mol_type = other DNA
cgctggcggcgggcaactgcgtggtgctgaaacctgcgcgacttactcctctttcggtactgctgctaatggaga

SEQ ID NO: 67222 - DNA, 75 bp, synthetic construct
  source 1..75: mol_type = other DNA
attccaataattaaaaccatacttgatttcattgttagtcttggtttgtttgcctttgttaatttacctgtattg

SEQ ID NO: 67223 - DNA, 75 bp, synthetic construct
  source 1..75: mol_type = other DNA
gcgggagtgagcacgctcgcgtggcagggcggtgagaagacgcaggtctcggttatcagcgagcctgaccggcgg

SEQ ID NO: 67224 - DNA, 75 bp, synthetic construct
  source 1..75: mol_type = other DNA
cgggcagctgcccgcgcggtcgggcatggtggagatggcgcgtgacggcatcgatgcggcgataaaaaatgagca

SEQ ID NO: 67225 - DNA, 75 bp, synthetic construct
  source 1..75: mol_type = other DNA
gttcagaacgcaggtgtccctgcaggttgaacgggggcgcagaagcagcgtgaatttcaggaccgcagaacggtt

SEQ ID NO: 67226 - DNA, 75 bp, synthetic construct
  source 1..75: mol_type = other DNA
cagcagggcgggtttagcgcgcagccgtgggactgggcattttatgccgagcaggtaagacgtgagaaattcgat

SEQ ID NO: 67227 - DNA, 75 bp, synthetic construct
  source 1..75: mol_type = other DNA
gctcgatttgctgaaagtctcatcaccgccaggcgatggcggaacatggcgaccgctggagctaactgttgtcgc

SEQ ID NO: 67228 - DNA, 75 bp, synthetic construct
  source 1..75: mol_type = other DNA
ggggcaaccagcttaatgaggagaacccgcatcacctgcaccagccgtaccgtctgccagggcagcagcatgatg

SEQ ID NO: 67229 - DNA, 75 bp, synthetic construct
  source 1..75: mol_type = other DNA
ggtgccggtcggctgggcggtggtgccctgtgggccggggccatggcggctcctgtactgctggacagcagtgcc

SEQ ID NO: 67230 - DNA, 75 bp, synthetic construct
  source 1..75: mol_type = other DNA
ccgccactcatgggctggcggtggatctcaccgttcccgtattaaccatcaacaccgtctccggcgatgacatta

SEQ ID NO: 67231 - DNA, 75 bp, synthetic construct
  source 1..75: mol_type = other DNA
cggcaacgccgccagcctcaccccctcagggcttcttcgggcgcatgatgagccgtgccggtggcttgctttcat

SEQ ID NO: 67232 - DNA, 75 bp, synthetic construct
  source 1..75: mol_type = other DNA
ttccgcagtgccggtggactggccggccggctgggtggcggtgccctgtgggctggcgcgatggcagccccggtt

SEQ ID NO: 67233 - DNA, 75 bp, synthetic construct
  source 1..75: mol_type = other DNA
cattttctggaattgccagagagggagtcaaagataagcgcagcgcggcgcaaaaccgctggaaaaaccacttgc

SEQ ID NO: 67234 - DNA, 75 bp, synthetic construct
  source 1..75: mol_type = other DNA
agacctgtgcgactccagcggcaccaccatgtcagcgatgcggcttgcctataacgggcatcgtcacagagagaa

SEQ ID NO: 67235 - DNA, 75 bp, synthetic construct
  source 1..75: mol_type = other DNA
aaaaagggcaaaattcagtcgatatcgacaggattaatcaccatgtggttaatgtggagaaggtgaattttgagc

SEQ ID NO: 67236 - DNA, 75 bp, synthetic construct
  source 1..75: mol_type = other DNA
cgcggtatccaaatctccgccgggaatgccgtctcctttgtgtcgctaactaacattgagatgaagcgtgcctcg

SEQ ID NO: 67237 - DNA, 75 bp, synthetic construct
  source 1..75: mol_type = other DNA
ccgccactggttgcaggtccaacctttgctattcgtaagaaagcctcacgtattttccttctggatgaatatgta

SEQ ID NO: 67238 - DNA, 75 bp, synthetic construct
  source 1..75: mol_type = other DNA
tgtcgaatgtttttcttgctccaggagaagagaaaatcattaatatatcgggaggccagaagggagtggcttccg

SEQ ID NO: 67239 - DNA, 75 bp, synthetic construct
  source 1..75: mol_type = other DNA
gttgcgcagccgttaccgccagaagcaactggtggccacgggtaagagccagaccatgaacagccgccaccttac

SEQ ID NO: 67240 - DNA, 75 bp, synthetic construct
  source 1..75: mol_type = other DNA
tgattaacgccagcgaaaaaggggccgatgtccagattaccggcaccagcgatcagcctgttaataccgccatca

SEQ ID NO: 67241 - DNA, 75 bp, synthetic construct
  source 1..75: mol_type = other DNA
acgggtatcagaagcttccagtgcccggacacaggattactggctgatggatgcagcggtaagaaacggagaatg

SEQ ID NO: 67242 - DNA, 75 bp, synthetic construct
  source 1..75: mol_type = other DNA
ccggaaatccgccgcaaacgcaccagtgggaaggggtttctgtaccatatcagcgcggcagggatggcgttgaaa

SEQ ID NO: 67243 - DNA, 75 bp, synthetic construct
  source 1..75: mol_type = other DNA
tatgactggttaaaccctgaatcgatcggcgttaatgatgtcacgcccgcagatgaaagtacctggtgtatagga

SEQ ID NO: 67244 - DNA, 75 bp, synthetic construct
  source 1..75: mol_type = other DNA
tcaacaggaagccagcaaacgcggttacaggttacagcaatgcaaagaggcaaaagatgcactggaacgagaaga

SEQ ID NO: 67245 - DNA, 75 bp, synthetic construct
  source 1..75: mol_type = other DNA
gttgattccggagtggcatttgtaggaggcctcagcgacagcgaatttgccaaattcagttttactcaggatggt

SEQ ID NO: 67246 - DNA, 75 bp, synthetic construct
  source 1..75: mol_type = other DNA
tacggttttaccgcaagggcaaacagcggtgcggaagcggtggtgttgtttccggatggcgaccgttctcatgcg

SEQ ID NO: 67247 - DNA, 75 bp, synthetic construct
  source 1..75: mol_type = other DNA
cccggggatggggagtaagcttagtcagccgttgtctccgggggtcgcgtgcgcagttgcacgtcattctcagac

SEQ ID NO: 67248 - DNA, 75 bp, synthetic construct
  source 1..75: mol_type = other DNA
caagaacgaaggagaagcatgcgcctggctggacagccttacaccagaagcccgcaaaagcggccaacgcgtggc

SEQ ID NO: 67249 - DNA, 75 bp, synthetic construct
  source 1..75: mol_type = other DNA
ccttccataaaaatacgcgcaatctaacggttcgctctgtgccaaaaaaagacattgctcacaatatcgagttaa

SEQ ID NO: 67250 - DNA, 75 bp, synthetic construct
  source 1..75: mol_type = other DNA
caccgagaatatatattccccagcaggaacgatccgaaacaacctatgaacagtcaaactgctaatgctgcacta

SEQ ID NO: 67251 - DNA, 75 bp, synthetic construct
  source 1..75: mol_type = other DNA
gactggctgcatgggctgacgatgaggcgttatcagtgacacaaaccaggacagaacgccccgcgtcacagccag

SEQ ID NO: 67252 - DNA, 75 bp, synthetic construct
  source 1..75: mol_type = other DNA
acatcatcaacgccgccgaaagtgggcaggatctgcccatcaccggcaccaccgacgctcagccagggcagacgg

SEQ ID NO: 67253 - DNA, 75 bp, synthetic construct
  source 1..75: mol_type = other DNA
ggtcgtaagcggcagcaccagcggtgtggaagctgggcagacggtgaccgtcacctttggcggtaaaaattacac

SEQ ID NO: 67254 - DNA, 75 bp, synthetic construct
  source 1..75: mol_type = other DNA
atcaatatgaggcgagctgggaaacggatgatacgctgttcaaccaaccgcaggatgatctgtacagtatttcac

SEQ ID NO: 67255 - DNA, 75 bp, synthetic construct
  source 1..75: mol_type = other DNA
gccagattgcgattgatgatttcggcaccggctacgccagctatgcgcggcttaaaaatgtgaatgccgatctgc

SEQ ID NO: 67256 - DNA, 75 bp, synthetic construct
  source 1..75: mol_type = other DNA
atggacaaaaacacacctgcttactggagtttatcacttgatactgaatgcccaaaatgcggccacaatttcgat

SEQ ID NO: 67257 - DNA, 75 bp, synthetic construct
  source 1..75: mol_type = other DNA
cctaagccaaaaccgaagccggtgaaaaaggtacaggagcagccaaaacgcgatgtcaaacccgtagagtcgcgt

SEQ ID NO: 67258 - DNA, 75 bp, synthetic construct
  source 1..75: mol_type = other DNA
gcgaagactacctgaattctgatattttcgacggctttaactacgtgggtggcagtatcagcaccgacgatcaaa

SEQ ID NO: 67259 - DNA, 75 bp, synthetic construct
  source 1..75: mol_type = other DNA
agggagccatcgaggatgtaacgacgctgtttgactatatcgcggaaaattcatccctgtgggatgcgcagaacg

SEQ ID NO: 67260 - DNA, 75 bp, synthetic construct
  source 1..75: mol_type = other DNA
acttggacagcatgtactttatgaagtgaatgatgaggccagtcgtgtcaatatcctggcggttgtaggccagcg

SEQ ID NO: 67261 - DNA, 75 bp, synthetic construct
  source 1..75: mol_type = other DNA
gaaaacagtgggcgcgctggcgggtgatgattctgccgatattgctgattctggttgcgctggcagtggaacggg

SEQ ID NO: 67262 - DNA, 75 bp, synthetic construct
  source 1..75: mol_type = other DNA
gccagtcattgaccgtcacggttgataccgccgcgccggtgattggcattaacactatcgcgggcgatgatgtga

SEQ ID NO: 67263 - DNA, 75 bp, synthetic construct
  source 1..75: mol_type = other DNA
gcggagaaacagttcttaacgttgttcccggagcagaagcggattgtgaatttacgctctcaggtgacgatggcg

SEQ ID NO: 67264 - DNA, 75 bp, synthetic construct
  source 1..75: mol_type = other DNA
ggaaatgggcgcagacgattacgtcaccaaaccgctggaactgcgcgaactggtagtacgggtgaaaaatctgct

SEQ ID NO: 67265 - DNA, 75 bp, synthetic construct
  source 1..75: mol_type = other DNA
gccgggctaaatcgcgccagtggcgaagcctggctgaatgaagagaatctcttatcgctgccgtttgctcgtcgg

SEQ ID NO: 67266 - DNA, 75 bp, synthetic construct
  source 1..75: mol_type = other DNA
aaccagagggaatttacaacaggtcacataaaaccgtgcagacaacaccacagccgggtaaaacagccacggaat

SEQ ID NO: 67267 - DNA, 75 bp, synthetic construct
  source 1..75: mol_type = other DNA
gggatcggagttcgaccatgcggcgttgattttaccgagccaacgcacgccggtagtaacgcgagagctggttta

SEQ ID NO: 67268 - DNA, 75 bp, synthetic construct
  source 1..75: mol_type = other DNA
gcccagcgcgcctccggcgccgggcaaaatcaggcgcaggctatagcgctgctcgaagagctaggcatcgcacat

SEQ ID NO: 67269 - DNA, 75 bp, synthetic construct
  source 1..75: mol_type = other DNA
cgcgtcgtgaacggtgtttacggaaaagcagtaagcgggctgcatcaggtgaagagtggtatctgtcagggaatt

SEQ ID NO: 67270 - DNA, 75 bp, synthetic construct
  source 1..75: mol_type = other DNA
cctgtgtgatggatggtaacaccctgaaagccggtgcggtggcgggcgttagtcatctgcgtaatccggttcttg

SEQ ID NO: 67271 - DNA, 75 bp, synthetic construct
  source 1..75: mol_type = other DNA
aggacagggaccagcatatccgcagcctgcgcattatcagtgccgtgctggcaggatttctgttgctggcctgta

SEQ ID NO: 67272 - DNA, 75 bp, synthetic construct
  source 1..75: mol_type = other DNA
ccccaagggcggcgatttcagtctcaccgacagactggctgatgatgtacggctccatatcctctgcattccgtg

SEQ ID NO: 67273 - DNA, 75 bp, synthetic construct
  source 1..75: mol_type = other DNA
gattttgtgcctgacccgccaggcggaagaactggagtccaggggcttataccgtcgtgctgcaacggtgtggat

SEQ ID NO: 67274 - DNA, 75 bp, synthetic construct
  source 1..75: mol_type = other DNA
ctctcccacccgacgctcaggtttccaggcagtgactgagttaatgtcacttccgcttcccccgacggccattat

SEQ ID NO: 67275 - DNA, 75 bp, synthetic construct
  source 1..75: mol_type = other DNA
attgccgacatgatacgccagctggtcacgaatgtttcacctgaaatgctacaagtactctggcagccggaattt

SEQ ID NO: 67276 - DNA, 75 bp, synthetic construct
  source 1..75: mol_type = other DNA
atgcagaaaatgaaaccggcgctgaaaaaaacgctgatggcggtagcgtgtctgagcgcagtacctgcagcccag

SEQ ID NO: 67277 - DNA, 75 bp, synthetic construct
  source 1..75: mol_type = other DNA
gtttatccgtctggatgaacccgccccgcttcgcgccatgacgctggcgcaatggtcatcaccgaatacgctaag

SEQ ID NO: 67278 - DNA, 75 bp, synthetic construct
  source 1..75: mol_type = other DNA
tcgcctggcgtgtcatatcacatcccgccagttaaaccacgtcgaagcggcagaactgctgcgtgtgactgctga

SEQ ID NO: 67279 - DNA, 75 bp, synthetic construct
  source 1..75: mol_type = other DNA
caaccacgatctggttattggtgtatttgacaagctggaagaacgggtggtggggaaaaacgggattattgtcga

SEQ ID NO: 67280 - DNA, 75 bp, synthetic construct
  source 1..75: mol_type = other DNA
cggagctgcagacagcggtgcatccgggtggcgttgtgttttttttgccgccacagggtaagcccggggtgacag

SEQ ID NO: 67281 - DNA, 75 bp, synthetic construct
  source 1..75: mol_type = other DNA
cctgagtctgaacagccgtcctgatgaggtatctcacacacttttacctgtatacgattatgccggttcatggaa

SEQ ID NO: 67282 - DNA, 75 bp, synthetic construct
  source 1..75: mol_type = other DNA
atgaacggcaaagaagccgctgaactgctgcgccgtgaagccacccgctttgaaaacgaatctcaggagttgcac

SEQ ID NO: 67283 - DNA, 75 bp, synthetic construct
  source 1..75: mol_type = other DNA
cgggcttgtgagcaaagtgcacagtactgtgtaaaacatccgcctgtctggctgacatataaaaagtgtggccga

SEQ ID NO: 67284 - DNA, 75 bp, synthetic construct
  source 1..75: mol_type = other DNA
atgtgcaaatgtaataccgtcacccgcgacgatattccgtttgccatctggtcagagcttcgccccgacaccccg

SEQ ID NO: 67285 - DNA, 75 bp, synthetic construct
  source 1..75: mol_type = other DNA
aaaataaaaaaagaacaaaacacatggcaggatctgtccacaaaagaacaaaaattacagcttattaaagcattg

SEQ ID NO: 67286 - DNA, 75 bp, synthetic construct
  source 1..75: mol_type = other DNA
aagggtttcttcgcgggaaatgtgtaccgcgagatctgaaagtgaacgaaacaaacgctgaatatctggtgcgta

SEQ ID NO: 67287 - DNA, 75 bp, synthetic construct
  source 1..75: mol_type = other DNA
gtcggtcacggatgcagggcaggccggagttgctgcaatgattatcaacgatgccctacaccacagcgaaactcc

SEQ ID NO: 67288 - DNA, 75 bp, synthetic construct
  source 1..75: mol_type = other DNA
atgaccactttaaccgacaaagaactgattaaagaaatcaaagagcgtatcagcagcctggacgtgcgagacaat

SEQ ID NO: 67289 - DNA, 75 bp, synthetic construct
  source 1..75: mol_type = other DNA
acattatcggcaggtgatacgctggtggtctggaaactggaccgactggggcgcagtatgcggcatcttgtcgtg

SEQ ID NO: 67290 - DNA, 75 bp, synthetic construct
  source 1..75: mol_type = other DNA
tcagagtctatcacagattttaaaggttattattggtatggctttatggaatatattgaaaacattaatgcgtgt

SEQ ID NO: 67291 - DNA, 75 bp, synthetic construct
  source 1..75: mol_type = other DNA
tggagtggctgggatgtatggatatgttgtctggcggcaattttgctgatggatcctgttgccattctctcgcaa

SEQ ID NO: 67292 - DNA, 75 bp, synthetic construct
  source 1..75: mol_type = other DNA
agcaggacatcctgaacagcttccgtaaaaacggttttgagctgatttcaccgcgctttaaccacatgcgcaatt

SEQ ID NO: 67293 - DNA, 75 bp, synthetic construct
  source 1..75: mol_type = other DNA
aattcatgccctgtcggcctatctgacgccgtcgtgtcgtgaactgatggagaacgatgcccgccgccgtaagga

SEQ ID NO: 67294 - DNA, 75 bp, synthetic construct
  source 1..75: mol_type = other DNA
atggcatggcctgccgctgtcttaccgtgctttatttcccgttttctctatcgacccctttcggtctaccgcctg

SEQ ID NO: 67295 - DNA, 75 bp, synthetic construct
  source 1..75: mol_type = other DNA
tattttaatcctgtcggtgctcattctagtggtaaaataggtgaagctccatctggtatccctaataatcttgtc

SEQ ID NO: 67296 - DNA, 75 bp, synthetic construct
  source 1..75: mol_type = other DNA
gaacggtgccgacctgctgacggatgacagtctgctgacggccgttctgatttcgctgtttactgaccgccgggc

SEQ ID NO: 67297 - DNA, 75 bp, synthetic construct
  source 1..75: mol_type = other DNA
ctgatgttgattatcggctgggaaaaacgcttcttccgccgtgcggcaccgcagactgctaaggagatcgcatga

SEQ ID NO: 67298 - DNA, 75 bp, synthetic construct
  source 1..75: mol_type = other DNA
ctttgcggctggacttgccgccaacatgatcggttccgggtttctcggcgcggtcgttggcggattgatagccgg

SEQ ID NO: 67299 - DNA, 75 bp, synthetic construct
  source 1..75: mol_type = other DNA
gttgatttatcatatccaatactcgaaaccggtctgataaagataatttccaatgaccactatataggactgaac

SEQ ID NO: 67300 - DNA, 75 bp, synthetic construct
  source 1..75: mol_type = other DNA
aaatagcgcagcaactggtactcgagttctaccgtattctgaaaacccaaaataaatcacagctaagcagcttgt

SEQ ID NO: 67301 - DNA, 75 bp, synthetic construct
  source 1..75: mol_type = other DNA
tcgaccaaaactggcggcggaagtcgataatgaaggcggtacggttaacgatcacaatgaaacctggtccacctt

SEQ ID NO: 67302 - DNA, 75 bp, synthetic construct
  source 1..75: mol_type = other DNA
atcaccgcagtcagcggctgatgaagctaaaaggagttggtcccacaactgcctgtgctctggttgcctgtatcg

SEQ ID NO: 67303 - DNA, 75 bp, synthetic construct
  source 1..75: mol_type = other DNA
agaaatggatgctaatgaactggtcaaaatgttagccattcttcgaggaatagaagacgtttccatatttgagag

SEQ ID NO: 67304 - DNA, 75 bp, synthetic construct
  source 1..75: mol_type = other DNA
gtacgaacgttctggcacttgaacaggcgcgaggacaaatcgaaagtacccgcgccgaaatagccaaacgagaag

SEQ ID NO: 67305 - DNA, 75 bp, synthetic construct
  source 1..75: mol_type = other DNA
ttgtccggcaccagttacggtattgccgggctgctgatgctggcagtcagtcaccggctgtaccgggcggaagac

SEQ ID NO: 67306 - DNA, 75 bp, synthetic construct
  source 1..75: mol_type = other DNA
cgtttctggcccggggattttttcccgacgttctatgcctgtcatctggctgtgctgggcgttctggcgctgtga

SEQ ID NO: 67307 - DNA, 75 bp, synthetic construct
  source 1..75: mol_type = other DNA
agccagattatgcgccagaacgtcaccatgaatgccctgaaagagggtatcaccagtaatgcggcccgcaatggt

SEQ ID NO: 67308 - DNA, 75 bp, synthetic construct
  source 1..75: mol_type = other DNA
ccaccggctgtaccgggcggaagacagagcggaacgtctggcgctggtcgcctgcctgctggctgttattccggc

SEQ ID NO: 67309 - DNA, 75 bp, synthetic construct
  source 1..75: mol_type = other DNA
cctgcctgctggctgttattccggcgcttaaccttgccaccagtgatgcagcggcggtggccggtcttgtgatga

SEQ ID NO: 67310 - DNA, 75 bp, synthetic construct
  source 1..75: mol_type = other DNA
ggatgtttctggccgggcgtggggcctttccgttgtttgcccttgtgtgggggctgaatctgtcccgtcatgcgc

SEQ ID NO: 67311 - DNA, 75 bp, synthetic construct
  source 1..75: mol_type = other DNA
ccaaaaacacgctggacctccgcgcagctcttgcgcccgcaagcgttagatttagtttcccgcgacggtaaacac

SEQ ID NO: 67312 - DNA, 75 bp, synthetic construct
  source 1..75: mol_type = other DNA
accccggagacacccgacaaattatcaaccagcttatcgagctggcttttaaagagtacggtgaaaataatccgc

SEQ ID NO: 67313 - DNA, 75 bp, synthetic construct
  source 1..75: mol_type = other DNA
aactgctgggataacagtcctatggaacgcttcttccgcagtctgaaaacagaatgggtgccgacggatggttac

SEQ ID NO: 67314 - DNA, 75 bp, synthetic construct
  source 1..75: mol_type = other DNA
gcgcagacgctggaacgctggctggagaactatcaccgcgccgcagaactgccagaaccccctcgttttgtggaa

SEQ ID NO: 67315 - DNA, 75 bp, synthetic construct
  source 1..75: mol_type = other DNA
agcaagaagccgtggatgccacgctcaaccattttcgtcgtcataaaacccctgccgttatcgtgctgcccaccg

SEQ ID NO: 67316 - DNA, 75 bp, synthetic construct
  source 1..75: mol_type = other DNA
cttgatagcgactctcttctctgtgctgtgagaacacgatcacaacaaaaagcgactttttcgcagcagggtctt

SEQ ID NO: 67317 - DNA, 75 bp, synthetic construct
  source 1..75: mol_type = other DNA
aaacaaaagggttagttggcgcgattgaagccgcagacgccatggttaagtccgccaatgtacaactggttggtt

SEQ ID NO: 67318 - DNA, 75 bp, synthetic construct
  source 1..75: mol_type = other DNA
ataccatgcggagtgtttaaaggaagattggccaaatcacgcatacagtttgttcaaagataatcgcctctctct

SEQ ID NO: 67319 - DNA, 75 bp, synthetic construct
  source 1..75: mol_type = other DNA
aaaaaattgggcagaaaaaacgactgcggacactgaaggacctcgataaatataaatctgcactggagttggcaa

SEQ ID NO: 67320 - DNA, 75 bp, synthetic construct
  source 1..75: mol_type = other DNA
tagaaaccaaaggcttaactgcagccatagaggctgcagacgcaatggtgaagtcggctaatgtgatgctgatcg

SEQ ID NO: 67321 - DNA, 75 bp, synthetic construct
  source 1..75: mol_type = other DNA
gtgtgcaggaaaatcattaccccgtttctggcccggagactttttcccgacgttctatgcctgtcatctggctgt

SEQ ID NO: 67322 - DNA, 75 bp, synthetic construct
  source 1..75: mol_type = other DNA
gacgtagtggaagactatctatccctgccgaacgtcattaagctggtggcatataaagaagtcaaaagcgcattg

SEQ ID NO: 67323 - DNA, 75 bp, synthetic construct
  source 1..75: mol_type = other DNA
acagcgtattgctgcgtgtcgacgatcccctgatcgacatgaactacatcaccagctttacaggtatgactgaca

SEQ ID NO: 67324 - DNA, 75 bp, synthetic construct
  source 1..75: mol_type = other DNA
gatgaagtgactggaaaaatgataacgcgggataatccaccaatcccgggaaagcaatcgctggcgaaggtgacg

SEQ ID NO: 67325 - DNA, 75 bp, synthetic construct
  source 1..75: mol_type = other DNA
ctggcgcagaatctgataaccagcgaggttgccgcgctggcaggactgctggtcacgggcgtgacgatatggctg

SEQ ID NO: 67326 - DNA, 75 bp, synthetic construct
  source 1..75: mol_type = other DNA
gttgcacgccactttgacgatgggctgacactggaggtcaatcgtacctgtactactggtgaacgtaacgctaac

SEQ ID NO: 67327 - DNA, 75 bp, synthetic construct
  source 1..75: mol_type = other DNA
aacgcgatccggtcggaaacggtggtgttcctcgtgtgctttgggaaatcaggagaatgagtaccactggcattc

SEQ ID NO: 67328 - DNA, 75 bp, synthetic construct
  source 1..75: mol_type = other DNA
accaaccgcgcgacaaaatgacggaagtcatcatttttgctggcagtgatgcctggagccatgcaaaagaatgga

SEQ ID NO: 67329 - DNA, 75 bp, synthetic construct
  source 1..75: mol_type = other DNA
ctattaagtgggtggcggtcggtattgctgtgtctccgatgctgtatgggctggcaaaactggtcattgcgttga

SEQ ID NO: 67330 - DNA, 75 bp, synthetic construct
  source 1..75: mol_type = other DNA
gaatcaaccctcacgatgaaactgaacgctatcgtcagcatgttcttgagacgaaaggcagggatctggatgagg

SEQ ID NO: 67331 - DNA, 75 bp, synthetic construct
  source 1..75: mol_type = other DNA
ccactttcactgacgacccgtatcgggcatgcgatggtggtcagctacgagatgatattcacccaaccggacagc

SEQ ID NO: 67332 - DNA, 75 bp, synthetic construct
  source 1..75: mol_type = other DNA
tgtactggcaaaaagccaatggcgaagcgtggggaacgttacatgctctgctggcggatattaatagtcagggtc

SEQ ID NO: 67333 - DNA, 75 bp, synthetic construct
  source 1..75: mol_type = other DNA
gagtgctgacaagtcctggcgtccctcccgccagtcagcgtaaggcggttgaactggtcaatcgcttccgtcgtg

SEQ ID NO: 67334 - DNA, 75 bp, synthetic construct
  source 1..75: mol_type = other DNA
taccgggataaagagcagtaaaggcatccaggttccgaccacgaagaaatcacttccggaaattaacagcgtgca

SEQ ID NO: 67335 - DNA, 75 bp, synthetic construct
  source 1..75: mol_type = other DNA
aagcgatatcaaatatcaccatctggcgcaaaggtgaacaacgtgcgccacataagccattattgctgctgtacg

SEQ ID NO: 67336 - DNA, 75 bp, synthetic construct
  source 1..75: mol_type = other DNA
gtttcatcctggtcttgaccggaccgtttatgatttacgtttatgaaccgttactgcaaagcaatttttctgtag

SEQ ID NO: 67337 - DNA, 75 bp, synthetic construct
  source 1..75: mol_type = other DNA
aatttgatgcgcttgaagctaaatgtgcagcactggaaaacaaagtaataccagtgtcagctgaactgccgccag

SEQ ID NO: 67338 - DNA, 75 bp, synthetic construct
  source 1..75: mol_type = other DNA
tgctggccgtgattccggcgcttaaccttgccaccagtgatgcggcggctgtagccggccttgtgatgacggtgc

SEQ ID NO: 67339 - DNA, 75 bp, synthetic construct
  source 1..75: mol_type = other DNA
ttctgccggaggagtatggcccagccttcccagcaatcgtcgattgttataccagtccacccacgttagtgtggc

SEQ ID NO: 67340 - DNA, 75 bp, synthetic construct
  source 1..75: mol_type = other DNA
gcggagcgatgtcccggttaccggtcggcatcaatgcaacgcgtcagattgcggcggcacaacaggaaatggccc

SEQ ID NO: 67341 - DNA, 75 bp, synthetic construct
  source 1..75: mol_type = other DNA
attaccccgatttcggcactcaaccagccgggcaagaagattgtgattcgcccgctgccaggtttaccggtgatc

SEQ ID NO: 67342 - DNA, 75 bp, synthetic construct
  source 1..75: mol_type = other DNA
ctcagcgaaagctggcgctggtaaggaaacagtatccgaagctatttgcccactggtatttactacgtgcatcga

SEQ ID NO: 67343 - DNA, 75 bp, synthetic construct
  source 1..75: mol_type = other DNA
acacggcgaacgcggtggcaaccgttatttatactcgtgccatgcagccgcatcttgcggtagtaatggcggcgt

SEQ ID NO: 67344 - DNA, 75 bp, synthetic construct
  source 1..75: mol_type = other DNA
taacccaatttctcgccagcttgccggaagacgatcgcatcaaagcgattaatgaaatccgcatggcgatccatc

SEQ ID NO: 67345 - DNA, 75 bp, synthetic construct
  source 1..75: mol_type = other DNA
tatcaactgtaccaacggcaagatcaattgggggattggcattggcctcgcaggaagtacttacgataacaagta

SEQ ID NO: 67346 - DNA, 75 bp, synthetic construct
  source 1..75: mol_type = other DNA
tggggttggtgtcagaggcgggtttaagggaagtcttgatcgaacggatgatgattcacattctgcaagtagtgg

SEQ ID NO: 67347 - DNA, 75 bp, synthetic construct
  source 1..75: mol_type = other DNA
gatgctcatgctgaatggggggttaaacctaaaattcttggtgttggtggtggggtaggcatcagaggtggattt

SEQ ID NO: 67348 - DNA, 75 bp, synthetic construct
  source 1..75: mol_type = other DNA
cattattgatcaaagaacgcaggacagtaatatccgtaatgatgtaaaacatcaggttgataatatggtcacaga

SEQ ID NO: 67349 - DNA, 75 bp, synthetic construct
  source 1..75: mol_type = other DNA
aacaactacgtgagctgggtattaaggtggatgaaatcccggcgctggctgaaaaagatgacgatagcgtgatca

SEQ ID NO: 67350 - DNA, 75 bp, synthetic construct
  source 1..75: mol_type = other DNA
ccaccagcggcagtattttttccagctacacctttactggcgtgcaactcgcttccgacgataatatgttgccaa

SEQ ID NO: 67351 - DNA, 75 bp, synthetic construct
  source 1..75: mol_type = other DNA
ggggagcctgaatacacgcgagacgaagggtactttgttaatattcgtcttcttgacgatggctttgatgaatcc

SEQ ID NO: 67352 - DNA, 75 bp, synthetic construct
  source 1..75: mol_type = other DNA
gctgatccttgccgtaagcgggcccataaggggcgcgtagcagtagcggaaagtaaccggcgctggtgctcagat

SEQ ID NO: 67353 - DNA, 75 bp, synthetic construct
  source 1..75: mol_type = other DNA
atagattctgatagatatctaataaaatcaacttattataatttatttagtggcgaatattctaataaaaaaaca

SEQ ID NO: 67354 - DNA, 75 bp, synthetic construct
  source 1..75: mol_type = other DNA
attatgtgcagaactgcgtgatgggggatatttacctgaaccacaaatacacgctggaggagctgatggcctccg

SEQ ID NO: 67355 - DNA, 75 bp, synthetic construct
  source 1..75: mol_type = other DNA
gatggctctgtttgttttatggaaggacaacaccacaccaggaaaattactggttcaggaaattgacttcgtaag

SEQ ID NO: 67356 - DNA, 75 bp, synthetic construct
  source 1..75: mol_type = other DNA
gtcttcgaaatgagtcattcgtggcgctggttgatgtcatgaaggacggctgcgaatgggtcaacttttatggtg

SEQ ID NO: 67357 - DNA, 75 bp, synthetic construct
  source 1..75: mol_type = other DNA
atgggagttgctaaatctacatggacaacaacacacaggcctcactggttggctatgcggggtagtgcagagggg

SEQ ID NO: 67358 - DNA, 75 bp, synthetic construct
  source 1..75: mol_type = other DNA
ttctggaggcgttcgcagcagcgccgccaccgctggactacgttttgcccaacatggtggccggtacggtcgggg

SEQ ID NO: 67359 - DNA, 75 bp, synthetic construct
  source 1..75: mol_type = other DNA
cattgcttcttacatcggtcgctgtactggctgatgtgcagattagcatcaggggaaatgtttatatccccccat

SEQ ID NO: 67360 - DNA, 75 bp, synthetic construct
  source 1..75: mol_type = other DNA
tttaccggatttatacctggataaagagcagtaaaggcatccgggttccgaccacgaagaaatcacttccggaaa

SEQ ID NO: 67361 - DNA, 75 bp, synthetic construct
  source 1..75: mol_type = other DNA
catcatggccccggagtggttcgacggcctcaagcgagccgctgagggacgacggttgatggtgctggatacctt

SEQ ID NO: 67362 - DNA, 75 bp, synthetic construct
  source 1..75: mol_type = other DNA
ggtaaaccgcgaaagcatggactccctgaaagaaacgttacagggtgcgcgtggtggtggtgcgtttaaaaacgt

SEQ ID NO: 67363 - DNA, 75 bp, synthetic construct
  source 1..75: mol_type = other DNA
taattttgtcaatgatttgtcgggcagacgtggaatataccaggcaggtattaaagcctcattcagcagtacgtt

SEQ ID NO: 67364 - DNA, 75 bp, synthetic construct
  source 1..75: mol_type = other DNA
agttactccctgttgcaattatcgcaataataatattcatgttttcatggtctttatttagaaaacatgctgccg

SEQ ID NO: 67365 - DNA, 75 bp, synthetic construct
  source 1..75: mol_type = other DNA
tgtttttattagtaatgccaatgttttaaaaaaaataaattttcccaaaatatgtttgccaataattgtctcggt

SEQ ID NO: 67366 - DNA, 75 bp, synthetic construct
  source 1..75: mol_type = other DNA
catgatgggtgcggtaagtattgatctcggtctggacgactccgcgcttgatgcgagctttgtcatggggggcgc

SEQ ID NO: 67367 - DNA, 75 bp, synthetic construct
  source 1..75: mol_type = other DNA
gtcctgccggcatcatttctgcccgtaatgcgattaaagcaggtcactccgtggttctgtttgagaagaataccc

SEQ ID NO: 67368 - DNA, 75 bp, synthetic construct
  source 1..75: mol_type = other DNA
aataccagatgcaactatccggggagaagacgaaatatgcctgttttatttatatagaaagaacaatatacaatc

SEQ ID NO: 67369 - DNA, 75 bp, synthetic construct
  source 1..75: mol_type = other DNA
tgaccagtgatgagacgctgcgaattgtggatgagtactgtcatacccacaaactttcgcgctctaaggtaatcg

SEQ ID NO: 67370 - DNA, 75 bp, synthetic construct
  source 1..75: mol_type = other DNA
cgggaaaaactgcgttaccttgcagagtgtggcgttgattacgtgctgtgcgtgcgtttcgacaggcgtttcgcg

SEQ ID NO: 67371 - DNA, 75 bp, synthetic construct
  source 1..75: mol_type = other DNA
ttgcgcgatcatctttcagaacttaatgaagctgacgcaaatagattaagacgctatgccgagagtaaaggtacg

SEQ ID NO: 67372 - DNA, 75 bp, synthetic construct
  source 1..75: mol_type = other DNA
taggggggcgatgattgaccccgatccgtcagtattaaaacctgatccgtcagataaaagatcttcttgtccgga

SEQ ID NO: 67373 - DNA, 75 bp, synthetic construct
  source 1..75: mol_type = other DNA
gctatagcctttaaaaaatggggagtctcctgggaggctgttggtgcatacaacgcaggattcaggaaaaccgaa

SEQ ID NO: 67374 - DNA, 75 bp, synthetic construct
  source 1..75: mol_type = other DNA
gtgggagtgacaactaaaaactggtccaaaacatttactcgtcactgggttgcaatgaaacacatttttcaccga

SEQ ID NO: 67375 - DNA, 75 bp, synthetic construct
  source 1..75: mol_type = other DNA
atgcagagattgccacggtacaggccgtgcggttgatatagcaaaaacagagcagtgggggagagttgttgagaa

SEQ ID NO: 67376 - DNA, 75 bp, synthetic construct
  source 1..75: mol_type = other DNA
gcatggtcggctctggcggcaacggtcagtgcagagattccttatcagatattccgcgactttgccgagaataaa

SEQ ID NO: 67377 - DNA, 75 bp, synthetic construct
  source 1..75: mol_type = other DNA
gtgctgatactcttcttcgcagggttatcaataccccggagacgaaacagtcaggcgcgcctcatgtcggtattg

SEQ ID NO: 67378 - DNA, 75 bp, synthetic construct
  source 1..75: mol_type = other DNA
cgacaaaagaaaacgccaccggaagtcatggcgatgatgaattaaagccccgcgttgaaagccgcgcagatggtg

SEQ ID NO: 67379 - DNA, 75 bp, synthetic construct
  source 1..75: mol_type = other DNA
cggcctgagacgtggttatgttctccgcttgaactactgggaacaggaacaatcggcaaagagcattaccgcgtg

SEQ ID NO: 67380 - DNA, 75 bp, synthetic construct
  source 1..75: mol_type = other DNA
ggcaaaatgaagcgtgactttacctatatcgatgatatcgcagaagcaatcattcgcctgcaggatgtcattcca

SEQ ID NO: 67381 - DNA, 75 bp, synthetic construct
  source 1..75: mol_type = other DNA
gaacggagtggccggtgataacctgcataaaattggcgaaggcaccctgacagtaaacgggaccggtgtgaatgc

SEQ ID NO: 67382 - DNA, 75 bp, synthetic construct
  source 1..75: mol_type = other DNA
tgggtcatcgaaatattcagcatactgtcagatacacagccagtaatgctgctcgttttaaaggggtgtggaaaa

SEQ ID NO: 67383 - DNA, 75 bp, synthetic construct
  source 1..75: mol_type = other DNA
gtttaaaaaaaactcaggctatactccttttcagtacagaaaaaacaaactgtggatgtttaaatatcaaactgg

SEQ ID NO: 67384 - DNA, 75 bp, synthetic construct
  source 1..75: mol_type = other DNA
ccatcaaaatgacaagcattgaaatcgctgagttggtgggaagccaacacggtaatgtcagaatatcaatagaac

SEQ ID NO: 67385 - DNA, 75 bp, synthetic construct
  source 1..75: mol_type = other DNA
tgattataacgagttattagaaaagccattagccagtacattagaaaaaataaagaaagaacatctgctattaat

SEQ ID NO: 67386 - DNA, 75 bp, synthetic construct
  source 1..75: mol_type = other DNA
gaaactcagaatatgaccgtttttggtaataaccatattgcaaacaaagcacaaaactttgaagcagtagcacaa

SEQ ID NO: 67387 - DNA, 75 bp, synthetic construct
  source 1..75: mol_type = other DNA
atttatgaacggcgatatttaccgcgataaatatggcggcatggtaacgattaaaggcgtggcagaacggcgcat

SEQ ID NO: 67388 - DNA, 75 bp, synthetic construct
  source 1..75: mol_type = other DNA
ttagtctgatgattgcgatagccgtgctttgctcatgggttggcgcactctgctggaacgtcgccagccagcgat

SEQ ID NO: 67389 - DNA, 75 bp, synthetic construct
  source 1..75: mol_type = other DNA
cggggagatccctgtccagcaaatcaaagcccgaacactagttgaaacccttgagccaatcaaagcacgtggggc

SEQ ID NO: 67390 - DNA, 75 bp, synthetic construct
  source 1..75: mol_type = other DNA
cagtcagactgcaaatgcagctttaaaacgtattggttttggcggaaaattagttgcccatggattacgttcaat

SEQ ID NO: 67391 - DNA, 75 bp, synthetic construct
  source 1..75: mol_type = other DNA
gtagcccgcccggaaattctctttctgatgcgacttgcgctccgtctggggcgcaccttatccgaactgggccac

SEQ ID NO: 67392 - DNA, 75 bp, synthetic construct
  source 1..75: mol_type = other DNA
gcagtcaggcgaaattatccggcctgagacgtggttatgttccccgcttgaactactgggaacggggacaatcgg

SEQ ID NO: 67393 - DNA, 75 bp, synthetic construct
  source 1..75: mol_type = other DNA
gggcagtgagcggtgcctatcaggccggaggacgctttactgcattctatcgccttgggggggggatgcagtacg

SEQ ID NO: 67394 - DNA, 75 bp, synthetic construct
  source 1..75: mol_type = other DNA
cctcgctgattatgaaccagatttgggcattctgtttggcccctatttaaccgacgatccgcaaaaactgttcaa

SEQ ID NO: 67395 - DNA, 75 bp, synthetic construct
  source 1..75: mol_type = other DNA
tttatcactttcgttacagaggggagaattattcagtacctgaagatgatttgctcagttgctatccgtcgttgt

SEQ ID NO: 67396 - DNA, 75 bp, synthetic construct
  source 1..75: mol_type = other DNA
tcacatttgaagccgcacaccgtcttcccaatgttcctgaaggccataaatgcggccgcttacacggacactctt

SEQ ID NO: 67397 - DNA, 75 bp, synthetic construct
  source 1..75: mol_type = other DNA
atgaaggtcatctggtcaccttcggtatcgtgccgaatgccccggaaactggctacggttacattcagcgcggcg

SEQ ID NO: 67398 - DNA, 75 bp, synthetic construct
  source 1..75: mol_type = other DNA
tggaggaaacggcaaagctgatttttattctcggtgaccgcccgatccgttatctgaccgcaggtgaaattgcgg

SEQ ID NO: 67399 - DNA, 75 bp, synthetic construct
  source 1..75: mol_type = other DNA
agattgattcttttgatgcgaaatttttagatataaatacattaagcaggcttatttatgaacgtaagagttttg

SEQ ID NO: 67400 - DNA, 75 bp, synthetic construct
  source 1..75: mol_type = other DNA
aagacagtaccattgttaacgatggtacactttttgtttgggataataatgataaatatgctctccaggcagagg

SEQ ID NO: 67401 - DNA, 75 bp, synthetic construct
  source 1..75: mol_type = other DNA
gttccattgctccaaagactggctgtacgccagagactctgcgtgtctggggtcgccagcatgagcgggataccg

SEQ ID NO: 67402 - DNA, 75 bp, synthetic construct
  source 1..75: mol_type = other DNA
gccctggagaataaccagggatgaagaaaattatgcttcccgatttattagtctgatgtgtgaaaaagaacctga

SEQ ID NO: 67403 - DNA, 75 bp, synthetic construct
  source 1..75: mol_type = other DNA
tgcagatgctgtgcgaataccacagcggcgatcggatgagttatccgacgttgcgtctggcactgttgagcggcg

SEQ ID NO: 67404 - DNA, 75 bp, synthetic construct
  source 1..75: mol_type = other DNA
tggagtgcattttaaaccgttataagccagcctggcagacgtttttatatctgtacgaaaacagtcatgaggaga

SEQ ID NO: 67405 - DNA, 75 bp, synthetic construct
  source 1..75: mol_type = other DNA
ggctaatttcaatagtggtttctgaatttacaggaagagaacatatatacacgatacctgagacagaagaggacg

SEQ ID NO: 67406 - DNA, 75 bp, synthetic construct
  source 1..75: mol_type = other DNA
tttttgaactccaatgaaaacttttccatgcatcctcagtttttggtctggtgtctaacctttggggcgcagttc

SEQ ID NO: 67407 - DNA, 75 bp, synthetic construct
  source 1..75: mol_type = other DNA
caacagatttttattctccaaaacatgaggtttgcattcggtatgatgatgagagcattggtatacaatggccta

SEQ ID NO: 67408 - DNA, 75 bp, synthetic construct
  source 1..75: mol_type = other DNA
agtattaggtatgaatattatcaagtctttatattacttcttgaattatatatattttgcgataaaaaaaagaaa

SEQ ID NO: 67409 - DNA, 75 bp, synthetic construct
  source 1..75: mol_type = other DNA
attattgatttcgctgaactcaaggccattttcaagccgacgctagatcgcctagaccactactatctcaacgac

SEQ ID NO: 67410 - DNA, 75 bp, synthetic construct
  source 1..75: mol_type = other DNA
aagaagtctcctttctttccgaaccttgttgatcatcttctggttaagcatcacacggctgatggcgttgaagat

SEQ ID NO: 67411 - DNA, 75 bp, synthetic construct
  source 1..75: mol_type = other DNA
gagaactaccggaacacacacctgctatatgaatttacgccatacagcaaacagcgtgagttcatcgacgccggg

SEQ ID NO: 67412 - DNA, 75 bp, synthetic construct
  source 1..75: mol_type = other DNA
agcttcactctcggacaaggcggttccgccattactgatatcaacggcaaggctgaagttacactgagcggtacc

SEQ ID NO: 67413 - DNA, 75 bp, synthetic construct
  source 1..75: mol_type = other DNA
tgcgggcacgttaccgcgaggatttgctcaggccattactggccgtgccccgttcggatgaaccggacacgcgca

SEQ ID NO: 67414 - DNA, 75 bp, synthetic construct
  source 1..75: mol_type = other DNA
gtggagtttggtgatgtttctgtgacggatgttgccaatgaacgtaaccgccgcaaagtcacagttcctgttacg

SEQ ID NO: 67415 - DNA, 75 bp, synthetic construct
  source 1..75: mol_type = other DNA
cgttccgggatgctgagtctgatggatgcgcaggcccgggacacatggtaccgatcactggaatatgataatttt

SEQ ID NO: 67416 - DNA, 75 bp, synthetic construct
  source 1..75: mol_type = other DNA
tgttcagtctgtttaccgttattggctttaatgcccaggctaacgaacatcatcatgaaaccatgagcgaagcac

SEQ ID NO: 67417 - DNA, 75 bp, synthetic construct
  source 1..75: mol_type = other DNA
atgtcagatatcacaatctcccgtccggaagtggtcaacgggcatacggacgttatctgctcaaccagcattcgc

SEQ ID NO: 67418 - DNA, 75 bp, synthetic construct
  source 1..75: mol_type = other DNA
tgtcgaatatcgaaatcagttttttacgtctgccgcttaatcccaacatcgagtcaacgtttgttggggtgagca

SEQ ID NO: 67419 - DNA, 75 bp, synthetic construct
  source 1..75: mol_type = other DNA
atgcgcgaacgtgaacggcacgagaagaatcgagccagaccccgcaaggtgatcactgaggcgatacgcgctgac

SEQ ID NO: 67420 - DNA, 75 bp, synthetic construct
  source 1..75: mol_type = other DNA
atgtatgtttgggtgcgaatacggttatattggatggagtaactgtaggtaatggcgctattattggggctggct

SEQ ID NO: 67421 - DNA, 75 bp, synthetic construct
  source 1..75: mol_type = other DNA
caatcaaaaataatgcccggtcaagttaatattaacgcagttattactcgatttaatgcgagaactggaaatggt

SEQ ID NO: 67422 - DNA, 75 bp, synthetic construct
  source 1..75: mol_type = other DNA
atggcaaacctacctgaaaccccgcagtgggaagaaggcatctaccagattgaggtctctgaccccgttctgggt

SEQ ID NO: 67423 - DNA, 75 bp, synthetic construct
  source 1..75: mol_type = other DNA
atgtcatccgatattaagatcaaagtgcaaagctttggtcgtttcctcagcaacatggtgatgccaaatatcggc

SEQ ID NO: 67424 - DNA, 75 bp, synthetic construct
  source 1..75: mol_type = other DNA
tggagcagacttccgatgctgttgttgtgccaatggatgcgggctggagtgatgtcggttcctggtcttcgctat

SEQ ID NO: 67425 - DNA, 75 bp, synthetic construct
  source 1..75: mol_type = other DNA
tgatacgaaacaggtgactttgattgccgatgctggtaccgcaacactagcctccttaacctctgtatactcatt

SEQ ID NO: 67426 - DNA, 75 bp, synthetic construct
  source 1..75: mol_type = other DNA
ggcagtaaaattatcgtcaacaacctggtgaggtgggaccggtgggggtttcatcttatcaccgggcaacagact

SEQ ID NO: 67427 - DNA, 75 bp, synthetic construct
  source 1..75: mol_type = other DNA
tgacccgacgctgatcccggacagcaatggcgataagacgaccattccggcagatagtgtgaaggataacagtga

SEQ ID NO: 67428 - DNA, 75 bp, synthetic construct
  source 1..75: mol_type = other DNA
gtgtgctatgaagatgagatgttcaacatcagatactttaagaagggctccgcacacatcacgttcaggaaacca

SEQ ID NO: 67429 - DNA, 75 bp, synthetic construct
  source 1..75: mol_type = other DNA
accgctggggggcatgggctgcagcagaaaatagtggtgtcgattggcaaccgatagcagcgggtttcaaggggc

SEQ ID NO: 67430 - DNA, 75 bp, synthetic construct
  source 1..75: mol_type = other DNA
ttgcgaagaagagaaaatgctctgatgggactataagaaaaaagttgcaagctgcattgggatttattgatgcag

SEQ ID NO: 67431 - DNA, 75 bp, synthetic construct
  source 1..75: mol_type = other DNA
atatcggtgttgccacctgaagtccgcgctgaactgctggccgcacgtggcctgattgaaacatcatccgggctg

SEQ ID NO: 67432 - DNA, 75 bp, synthetic construct
  source 1..75: mol_type = other DNA
cacggttcgctgtgcgaaatacggatgagtttctggggagcggagtttgcggcgttcttacagtgtaagcagtaa

SEQ ID NO: 67433 - DNA, 75 bp, synthetic construct
  source 1..75: mol_type = other DNA
ttgcgaagaagcgaaaatgttcggacggtacgattagaaaggaattgcaaactgctttaggttttattgaagggt

SEQ ID NO: 67434 - DNA, 75 bp, synthetic construct
  source 1..75: mol_type = other DNA
accttagacttctcgactgcaaagacgtatgtagattcgctgaatgtcattcgctctgcaataggtactccatta

SEQ ID NO: 67435 - DNA, 75 bp, synthetic construct
  source 1..75: mol_type = other DNA
atcgcactgacggtcaggtcgcctatggtaagagcaaattcaatgcctccggcaaaaatgcggaagtatgggctg

SEQ ID NO: 67436 - DNA, 75 bp, synthetic construct
  source 1..75: mol_type = other DNA
cacagtcgcaaaattattggctggcgtgctgatttgtcggagaacagtgacagcatccgtttatccctgatggat

SEQ ID NO: 67437 - DNA, 75 bp, synthetic construct
  source 1..75: mol_type = other DNA
ccgctgcctggcaggcactacagaaacacttcgatgaaatgaaagacgttacgatcgccgatctttttgctaaag

SEQ ID NO: 67438 - DNA, 75 bp, synthetic construct
  source 1..75: mol_type = other DNA
cgttatgaaaaatggcgatttgtctcttattcaacttggtcttgataaagaaaaacgcgaaataactgagtctgt

SEQ ID NO: 67439 - DNA, 75 bp, synthetic construct
  source 1..75: mol_type = other DNA
acaccaaagttcacccggcgtaccgcacgctgctggagaaacgtcaggcgctggaagaagagaaagccaaactta

SEQ ID NO: 67440 - DNA, 75 bp, synthetic construct
  source 1..75: mol_type = other DNA
ctccgtggatgaactgacgaaattaacgacagaaatcgccagctattgcgctgatgaatttaaaaaactgaacga

SEQ ID NO: 67441 - DNA, 75 bp, synthetic construct
  source 1..75: mol_type = other DNA
ttgttgacccggcaatcacccagcctggtgtgctgaaaccgaagaaagggctgattatcctcggcgcaattatcc

SEQ ID NO: 67442 - DNA, 75 bp, synthetic construct
  source 1..75: mol_type = other DNA
gcaatgggcgcgacgctggtaatgcttacgcgcaatattgatgtttcagtgggttcgattaccggaatgtgcgca

SEQ ID NO: 67443 - DNA, 75 bp, synthetic construct
  source 1..75: mol_type = other DNA
ccgatgactttaataaattgatggtcgaagccgatacgtgtctgtatcgctcgaagaaagatgggcgcaaccgta

SEQ ID NO: 67444 - DNA, 75 bp, synthetic construct
  source 1..75: mol_type = other DNA
tgcgtttaacccggaggaactcagcgcgttaactccgcggcctacgctggcgattgtctctggactgtatgagct

SEQ ID NO: 67445 - DNA, 75 bp, synthetic construct
  source 1..75: mol_type = other DNA
agcgcaccgtggcatatcttcatgcgatggagtggatcaatggcgacggttaccagcacaacgtgtttgtccgtt

SEQ ID NO: 67446 - DNA, 75 bp, synthetic construct
  source 1..75: mol_type = other DNA
atgaaccgtgcagaatatcgtctctcgcaggtactctttcctgcgggagctatggctgtgaaactgtctgatata

SEQ ID NO: 67447 - DNA, 75 bp, synthetic construct
  source 1..75: mol_type = other DNA
cctgaatggacttaatcatattgcggagttaagggcgaaagtttttggtcttaatattgagtcagagcttgaacg

SEQ ID NO: 67448 - DNA, 75 bp, synthetic construct
  source 1..75: mol_type = other DNA
acccctgctggtggatgtgccagtggtatttccgcgcggcggaggctgtacgttgacttttccagttaaagccgg

SEQ ID NO: 67449 - DNA, 75 bp, synthetic construct
  source 1..75: mol_type = other DNA
tcgtgctcggtctgtcttgtgtttcccgagtgaagggctctcgcggccagggggagcatgatgtggtcgcgctac

SEQ ID NO: 67450 - DNA, 75 bp, synthetic construct
  source 1..75: mol_type = other DNA
ggaatgtgatggtgttcgctggatttataacacaacagaacaatggctggaacagttcccgttctggtcagagtc

SEQ ID NO: 67451 - DNA, 75 bp, synthetic construct
  source 1..75: mol_type = other DNA
atcctgcgtcatcaggaattcctgacgctaaaagatttaaaaaacgcaactcagcgagaaaacgccagaacccac

SEQ ID NO: 67452 - DNA, 75 bp, synthetic construct
  source 1..75: mol_type = other DNA
cactggttataaacacacagcttgcgatgaagattggcttaaatgaagccattgtgttgcagcaattgcattact

SEQ ID NO: 67453 - DNA, 75 bp, synthetic construct
  source 1..75: mol_type = other DNA
cgtctgtcgctgtatgccgatgagcgcatattaagtgcggcaatcgccactcgtactgagcggcgcagtggtctg

SEQ ID NO: 67454 - DNA, 75 bp, synthetic construct
  source 1..75: mol_type = other DNA
ctggtttacgagcacactgcgaaaggtgatgttgcggcgctgaacgttgacgcactgactgaagatcagaaagct

SEQ ID NO: 67455 - DNA, 75 bp, synthetic construct
  source 1..75: mol_type = other DNA
ggttatccgcctggagcgttcgtctgtacagcgttgtgtgaatcatatttctgagccggataccgaaattccgcc

SEQ ID NO: 67456 - DNA, 75 bp, synthetic construct
  source 1..75: mol_type = other DNA
gtgagcttatcgatatcgccgacaaaaagttagcaccattaataaatgatagtttcagctatacacgagatttct

SEQ ID NO: 67457 - DNA, 75 bp, synthetic construct
  source 1..75: mol_type = other DNA
caggcgtgcttcaaattcgaacatgtgattaccggtgaacgttatgaactgaatgtttcatccgatgagttcaaa

SEQ ID NO: 67458 - DNA, 75 bp, synthetic construct
  source 1..75: mol_type = other DNA
tatcatcttgctggtgtaaataggccaaaggaagaacatgagtttcaggagggaaatactgatcttacaaaatta

SEQ ID NO: 67459 - DNA, 75 bp, synthetic construct
  source 1..75: mol_type = other DNA
ttctacgcttgtcacagaagctgtggggacgggaatgacccgagcgctatattcgacgtggttaagttacttacc

SEQ ID NO: 67460 - DNA, 75 bp, synthetic construct
  source 1..75: mol_type = other DNA
atggctttatcggacgtaacttgtgcttacgccttcaggaagcagggtatgttgaccttgttaagattgaccgtg

SEQ ID NO: 67461 - DNA, 75 bp, synthetic construct
  source 1..75: mol_type = other DNA
caaacgctgcgccagattttgcaggatgtcaaagccgccaacgctgaaccattgttaatgcaaatacgtctgcct

SEQ ID NO: 67462 - DNA, 75 bp, synthetic construct
  source 1..75: mol_type = other DNA
cattcgttattatctggttttatccgctcacggataaaaaattcaaagaaatcgtggttgaaattgataatcgta

SEQ ID NO: 67463 - DNA, 75 bp, synthetic construct
  source 1..75: mol_type = other DNA
ccgcctatttttggcttgttgttttatgaacaggaaaggttaacaggaggtgtttttcgttatgtgttgataaag

SEQ ID NO: 67464 - DNA, 75 bp, synthetic construct
  source 1..75: mol_type = other DNA
acacagaattttccattggtggtactgaactgctgctgtttaagcaaatgggcaaagccactgtggatggcatcc

SEQ ID NO: 67465 - DNA, 75 bp, synthetic construct
  source 1..75: mol_type = other DNA
aacgtcacaccgccgccggaagcctgcaccacctggaaagcgatgtataacggtattaatgaactgattgatgac

SEQ ID NO: 67466 - DNA, 75 bp, synthetic construct
  source 1..75: mol_type = other DNA
aactgatacataatacattgggaataactgaaacagaaaaactcgtcaatctatataattcattttttactgata

SEQ ID NO: 67467 - DNA, 75 bp, synthetic construct
  source 1..75: mol_type = other DNA
tttgttggcgcggtgacggcggcatatcagcagctgtgcgaacgcggtgcgcgcgagtgtgtggctgcgctgtaa

SEQ ID NO: 67468 - DNA, 75 bp, synthetic construct
  source 1..75: mol_type = other DNA
ttgccgatagttgccggaaagcctgccacggtacggcatgtgattgaggttatggcgcgtcatggacgtgatgaa

SEQ ID NO: 67469 - DNA, 75 bp, synthetic construct
  source 1..75: mol_type = other DNA
tgcttattcagggcggtgattttgttctgaataccggatatgaacctgaactgtgtaataaccgtaaaagtatcg

SEQ ID NO: 67470 - DNA, 75 bp, synthetic construct
  source 1..75: mol_type = other DNA
tggccttgatgcttcaagaattgttccaactgcaaacgaaaaccgtcctcgtaacattgcctttaattatatcgt

SEQ ID NO: 67471 - DNA, 75 bp, synthetic construct
  source 1..75: mol_type = other DNA
gcgacgctgctgatcgagcgtttcagcaacccgtctctgcgtcaccgtacctggcagattgcgatggacggcagc

SEQ ID NO: 67472 - DNA, 75 bp, synthetic construct
  source 1..75: mol_type = other DNA
cgcacgcttacagcgttccccgtctatcgccgttgatgcggcccatttcgagtcgacctccggcgcaacctctaa

SEQ ID NO: 67473 - DNA, 75 bp, synthetic construct
  source 1..75: mol_type = other DNA
acattaacagtaccggtggattttctgaaagcaacagtacgaaaaaaacagcacttgcatgggctgctggtgcac

SEQ ID NO: 67474 - DNA, 75 bp, synthetic construct
  source 1..75: mol_type = other DNA
aggccgcagtaagtgcgcagatctcgttgattgctctgctgaatggccaaataacgtcatcaataacagtaatgc

SEQ ID NO: 67475 - DNA, 75 bp, synthetic construct
  source 1..75: mol_type = other DNA
ggttaccagcggcggcaccattccggatcgtggcatgtatagcgtgttattacccgaaggtgaagaacaggccgg

SEQ ID NO: 67476 - DNA, 75 bp, synthetic construct
  source 1..75: mol_type = other DNA
tcaccgaagaaaccctttcgaggttgtatatcacggcggaaacctacgatttcggccctgtcagtacagaggtta

SEQ ID NO: 67477 - DNA, 75 bp, synthetic construct
  source 1..75: mol_type = other DNA
gaacgccagtgagcatattattatttttaattgtacaggatggcctgatttgaataatgaatctgccgtcatgca

SEQ ID NO: 67478 - DNA, 75 bp, synthetic construct
  source 1..75: mol_type = other DNA
ggataacaattcagatatcgaggattttgcagatattctctcgccacgcctcggcagcgatattaggggagcata

SEQ ID NO: 67479 - DNA, 75 bp, synthetic construct
  source 1..75: mol_type = other DNA
ccacagatagtcagcttcgactgccagcaaagcctgctcgtatcagtctggaaaagaaactggaaacccgatctc

SEQ ID NO: 67480 - DNA, 75 bp, synthetic construct
  source 1..75: mol_type = other DNA
tgcgccggtaaagtttctcgccaaaattgcttccgacatgaataaacccaacggtcagtttgtgattactccggc

SEQ ID NO: 67481 - DNA, 75 bp, synthetic construct
  source 1..75: mol_type = other DNA
gtcaccgaacagggcgacagttatgatttacagattcggggcttgagtatagatcaacttgttaaaattacaggg

SEQ ID NO: 67482 - DNA, 75 bp, synthetic construct
  source 1..75: mol_type = other DNA
gtgcatggcctggcaacgattttgaactttacagcgtcatcgagaatcttgctctgagtagtgataatgggcgca

SEQ ID NO: 67483 - DNA, 75 bp, synthetic construct
  source 1..75: mol_type = other DNA
tggttggcgcggcaggggccgcattatcccccctcgcggcgttactccatcgcgaattgataagccgtccggtgg

SEQ ID NO: 67484 - DNA, 75 bp, synthetic construct
  source 1..75: mol_type = other DNA
gtgctgataggcgcgccgacgggggttgcctgctcggtgtgtcctaaaaaaaggacagtccaaattatggcaacc

SEQ ID NO: 67485 - DNA, 75 bp, synthetic construct
  source 1..75: mol_type = other DNA
gcatggagaaagctcttttaacgctgaccgcaaaatcggtcatcgtccggatctgggggactggcaaattcgtga

SEQ ID NO: 67486 - DNA, 75 bp, synthetic construct
  source 1..75: mol_type = other DNA
aagcgctgaatgacgccgtccctcagatcctgaataaccccgagatgatgcgcatctttgccgatgaggggaata

SEQ ID NO: 67487 - DNA, 75 bp, synthetic construct
  source 1..75: mol_type = other DNA
attcggtaatgatgcgtctgctggaaatcctcaactccttcccattcatgttcttcgtcattttgctggtgacct

SEQ ID NO: 67488 - DNA, 75 bp, synthetic construct
  source 1..75: mol_type = other DNA
ggctgctatactttcagatatgaaagtgaatttatgcgcaagtgaagcatatagtccgaatcatatatgggctat

SEQ ID NO: 67489 - DNA, 75 bp, synthetic construct
  source 1..75: mol_type = other DNA
aaccatcgtcagggatactgttgccaaatggcgtaaaggctggaacccaccggttactactgccgcaagacttcc

SEQ ID NO: 67490 - DNA, 75 bp, synthetic construct
  source 1..75: mol_type = other DNA
cagcagtatgataaggagtcggggctgtactacaaccggaaccggtactacgatccgttgcaggggcggtatatc

SEQ ID NO: 67491 - DNA, 75 bp, synthetic construct
  source 1..75: mol_type = other DNA
cgccgcagcctggcggatgcccttcagcagtccggcggcgaagacggtggcagtgtggtgttcccgccggtgctg

SEQ ID NO: 67492 - DNA, 75 bp, synthetic construct
  source 1..75: mol_type = other DNA
gtcgaacaggcgcgaaaagagcaacgagagctggtggacatggcgaataagctgtggaatgccgccgttaaaaag

SEQ ID NO: 67493 - DNA, 75 bp, synthetic construct
  source 1..75: mol_type = other DNA
ctggttcactcgagtccacgaaagcggttcagcagaacttcggcgcgtggctgcggggatggaagctgatgctgc

SEQ ID NO: 67494 - DNA, 75 bp, synthetic construct
  source 1..75: mol_type = other DNA
aatctatgacaggaaggttaaagtttcaccgacacttgatgtcccgttacctgaaaatattccaagaaaatattc

SEQ ID NO: 67495 - DNA, 75 bp, synthetic construct
  source 1..75: mol_type = other DNA
atggaacttaaaaaattgatggaacatatttctattacccccgattacagacaagcctggaaagtggtgcataaa

SEQ ID NO: 67496 - DNA, 75 bp, synthetic construct
  source 1..75: mol_type = other DNA
ttttcacggtgtacatcgatggcgaaaacaagctggggcgggtgacgtccttcacgtcgcctaaactgacccgaa

SEQ ID NO: 67497 - DNA, 75 bp, synthetic construct
  source 1..75: mol_type = other DNA
cccaaaataaatcacagctaagcagttggttcaatcgagtccacgaaagcggttcagcagaatttcggcgcgtgg

SEQ ID NO: 67498 - DNA, 75 bp, synthetic construct
  source 1..75: mol_type = other DNA
ccgcaaaaaacggcatcagcgttggacagaggttatggccctgcataacaagggatgtagtttcagggaaatatc

SEQ ID NO: 67499 - DNA, 75 bp, synthetic construct
  source 1..75: mol_type = other DNA
gcgggaaaatccggaaggatgagaagggaaattccatagtcacccttccttcaggggaatatgcacttaacaagc

SEQ ID NO: 67500 - DNA, 75 bp, synthetic construct
  source 1..75: mol_type = other DNA
tggagggagtggttaaaagagcaacgagaaagtggtaattataacgccagccggatatggcgggaaatggtggcc

SEQ ID NO: 67501 - DNA, 75 bp, synthetic construct
  source 1..75: mol_type = other DNA
cgcgacgtaaataataaacagaatgagcgggcactggcagccattttttatatggcaaaaattccggcagaacgt

SEQ ID NO: 67502 - DNA, 75 bp, synthetic construct
  source 1..75: mol_type = other DNA
tcaaaaaaatgcaaaaatttccactgaagagaggcaaagggtcttttctcttgtgagccagagatatcaactaac

SEQ ID NO: 67503 - DNA, 75 bp, synthetic construct
  source 1..75: mol_type = other DNA
catgctgaagcgatatactcatctgcgggcgtatcagctggtcagcaagcttgatgcaaagcgtaaacagacctg

SEQ ID NO: 67504 - DNA, 75 bp, synthetic construct
  source 1..75: mol_type = other DNA
atgtttcaaaaaaacaaaactcgcaaaatgtccctcagccgggcactggacaaatacctgaagactgtttccgtc

SEQ ID NO: 67505 - DNA, 75 bp, synthetic construct
  source 1..75: mol_type = other DNA
gtaccggacgggtgacgctgcaggaggtcgctaactttgcaggtgtcggaaccatgaccgtttcccgcgcgctga

SEQ ID NO: 67506 - DNA, 75 bp, synthetic construct
  source 1..75: mol_type = other DNA
gcaaatcgtaaaatatgacgatgcctgtgacccgaaacaggcggttgcggtggcgaacaaagtcgttaacgacgg

SEQ ID NO: 67507 - DNA, 75 bp, synthetic construct
  source 1..75: mol_type = other DNA
cgcaaatctggtaatgaggcctttatcaggcgcaggaaggagaaaagcatgacccgttctgatgatacccatgaa

SEQ ID NO: 67508 - DNA, 75 bp, synthetic construct
  source 1..75: mol_type = other DNA
gcaggtaaacaaccgctggacaatacgcttaccaatttgagtggaaaggatgtggctggtcttctcgcatacctt

SEQ ID NO: 67509 - DNA, 75 bp, synthetic construct
  source 1..75: mol_type = other DNA
gtttgcacacatgcgataaaacttctcacaggagaggttcatagcggatataaaggcgttgtgccggtttactca

SEQ ID NO: 67510 - DNA, 75 bp, synthetic construct
  source 1..75: mol_type = other DNA
aaacggcctacgtattgcttatggtaattacggattctttattcgtaatgatggttcaaatacatacttcatgtt

SEQ ID NO: 67511 - DNA, 75 bp, synthetic construct
  source 1..75: mol_type = other DNA
gcgtggactggtgattgtggatgaggcggatcatcttggtattgacggtctggagcaactccgggcaattcagga

SEQ ID NO: 67512 - DNA, 75 bp, synthetic construct
  source 1..75: mol_type = other DNA
gtgcaactcgatattctcggactctggattggacgtagccgtatagtcagccagcccattagtggcgtttatttc

SEQ ID NO: 67513 - DNA, 75 bp, synthetic construct
  source 1..75: mol_type = other DNA
atgacagagcagaagcgaccggtactgacactgaagcggaaaacggaaggagagacgcctgtccgcagccggaaa

SEQ ID NO: 67514 - DNA, 75 bp, synthetic construct
  source 1..75: mol_type = other DNA
atgacagacattacagccaatgttgtggtaagcatgccttcgcaactcttcactatggcgcgttcttttaaagcc

SEQ ID NO: 67515 - DNA, 75 bp, synthetic construct
  source 1..75: mol_type = other DNA
aaaaaaattagctcaggcagccgcgccagatggtaagcctgtccgcctgactcatatggccgtgggcgacggtgg

SEQ ID NO: 67516 - DNA, 75 bp, synthetic construct
  source 1..75: mol_type = other DNA
agttgtgtgcgaaaaaagcttatcagttaggtatatctgaaattgtatttattgatccctacccaggtatagctc

SEQ ID NO: 67517 - DNA, 75 bp, synthetic construct
  source 1..75: mol_type = other DNA
tttcaacacaagctctctcgtacaattgttgacgaaaaccaagcggtaattgtcgagacgctgaaaacagccaac

SEQ ID NO: 67518 - DNA, 75 bp, synthetic construct
  source 1..75: mol_type = other DNA
ctggaaaccgcaatgcgtcagggcgaaattctcgcattacgctgggagcacctcgatttacagcacggcgtggca

SEQ ID NO: 67519 - DNA, 75 bp, synthetic construct
  source 1..75: mol_type = other DNA
atggcggcattagtcattattcagaaggtcgctaatgtgcccccctcaaaagcgaaagttgcaaactttgttgct

SEQ ID NO: 67520 - DNA, 75 bp, synthetic construct
  source 1..75: mol_type = other DNA
agactttcgacaactggtttgatgcccagactgttgcgctgaaagaagatttacttgctgcaatgctgattcttg

SEQ ID NO: 67521 - DNA, 75 bp, synthetic construct
  source 1..75: mol_type = other DNA
atgtgccgctctggcttcttcagacggatgccctgaaagaccgggtgaataacgcgttatggcgtgactcgccag

SEQ ID NO: 67522 - DNA, 75 bp, synthetic construct
  source 1..75: mol_type = other DNA
atgcccgccgaaagatccacgatgtgcacgtccgcactgacggaagaagccctggagcagatcggtcagttgtac

SEQ ID NO: 67523 - DNA, 75 bp, synthetic construct
  source 1..75: mol_type = other DNA
aatctccggcatctcagcaaggacgctggccaacaccatgcacaccatggctgcacgtggatatgagtacaagga

SEQ ID NO: 67524 - DNA, 75 bp, synthetic construct
  source 1..75: mol_type = other DNA
gaattatcatgagctgacagactatgcccgccgttgcgcgggcaggttaatcgagtgcggggttcagcccggcga

SEQ ID NO: 67525 - DNA, 75 bp, synthetic construct
  source 1..75: mol_type = other DNA
cttgctttagggaaataccctgaagtgtccctggctgatgccagggctcgtcgtgacgaagctcgtaagctctta

SEQ ID NO: 67526 - DNA, 75 bp, synthetic construct
  source 1..75: mol_type = other DNA
gtccttgacgtcatagccgactggccgataaaccgggtcggcgaactgctcccctggcgcgtagcactgccgact

SEQ ID NO: 67527 - DNA, 75 bp, synthetic construct
  source 1..75: mol_type = other DNA
gttcggctaagcctgaattaaaagcctataaacttactgacggcgacggcatggttttgctggttcacccgaatg

SEQ ID NO: 67528 - DNA, 75 bp, synthetic construct
  source 1..75: mol_type = other DNA
gctgggcattaataattctcccattactctggctatatctgagaaccagagcgaaaaaaaagaaagtccagcagg

SEQ ID NO: 67529 - DNA, 75 bp, synthetic construct
  source 1..75: mol_type = other DNA
atgcagcgatgcctgcaggtcgtaacagtagcgacatcggggttatcatgaagccagaaggctccatgaaaatat

SEQ ID NO: 67530 - DNA, 75 bp, synthetic construct
  source 1..75: mol_type = other DNA
ggtaacaatgtcacagtcaaaagcggtgtgtatatttgggatggcgttaaaatagaggataatgtttttattggt

SEQ ID NO: 67531 - DNA, 75 bp, synthetic construct
  source 1..75: mol_type = other DNA
gactgccaccgctgtgctgtcggctgaagatatcgcggccgccaaactgctgggtaaaaccgaagccgagttcct

SEQ ID NO: 67532 - DNA, 75 bp, synthetic construct
  source 1..75: mol_type = other DNA
cgctgtggcactgcaacagattaaagagcgtggcgctttgacgatgattgatcgcggcgatattcgtcaggcaat

SEQ ID NO: 67533 - DNA, 75 bp, synthetic construct
  source 1..75: mol_type = other DNA
tgatcggcacctgccgtctgaacggtatcgatccggaagcgtatctgcgccatatcctgagcttactgccggaat

SEQ ID NO: 67534 - DNA, 75 bp, synthetic construct
  source 1..75: mol_type = other DNA
agtatgaacataaaatcggtgacctgattgcccgatttaaagaggctggtggggtggtaaatgaagttgagctat

SEQ ID NO: 67535 - DNA, 75 bp, synthetic construct
  source 1..75: mol_type = other DNA
ggtgatggtggatttcaccagcagaatcatgtcggtgctggcggatggggtgctggtctgcggcattatggtatt

SEQ ID NO: 67536 - DNA, 75 bp, synthetic construct
  source 1..75: mol_type = other DNA
tctcgtggagtagggaaggtaaagagcgaactgacccaggatgaagcgcagaagttaaataacagtcagtctaaa

SEQ ID NO: 67537 - DNA, 75 bp, synthetic construct
  source 1..75: mol_type = other DNA
gcatctcagataacaaaagacgtgtggggcagttcatctaccagagcagacggatcatctacaggtggttcaacc

SEQ ID NO: 67538 - DNA, 75 bp, synthetic construct
  source 1..75: mol_type = other DNA
gtggaattgttgtctgaatatggtttgtttttggcgaaaatcgttaccgttgtgctagcgattgccgccattatt

SEQ ID NO: 67539 - DNA, 75 bp, synthetic construct
  source 1..75: mol_type = other DNA
tcaaatcaacagcagccggtcgctaccagcttctttcacgctggtgggatgcctaccgcaagcaacttggcctga

SEQ ID NO: 67540 - DNA, 75 bp, synthetic construct
  source 1..75: mol_type = other DNA
tccgattacgttagcgttgccgacttcgacggcgaaaccatcctgaaagtggaaccagaagccctgaccctgctg

SEQ ID NO: 67541 - DNA, 75 bp, synthetic construct
  source 1..75: mol_type = other DNA
tattacactctgccacacttcgtccaggagttttatcgtggtagccagctggtaggtttcagtggtgattacatc

SEQ ID NO: 67542 - DNA, 75 bp, synthetic construct
  source 1..75: mol_type = other DNA
tgcaacagtcactgaaagaccttgagcgggcttacaaaaacttcttccagaatcgggctgcttttccccgattca

SEQ ID NO: 67543 - DNA, 75 bp, synthetic construct
  source 1..75: mol_type = other DNA
aacgggatgagtgttccgccagtgcgacgacaactggaaggggcgaaacacccgcaagggccaacgccaattgaa

SEQ ID NO: 67544 - DNA, 75 bp, synthetic construct
  source 1..75: mol_type = other DNA
gattgcaaaactaatgaacgaggcaaaaactcaagctgaagtaaatgcggctattggtgaactgaactcaaagct

SEQ ID NO: 67545 - DNA, 75 bp, synthetic construct
  source 1..75: mol_type = other DNA
tggcagcaaactgctatccaggctgcattgcgtgcgaactggatcagacaggccgcccagcgaactatttatcgg

SEQ ID NO: 67546 - DNA, 75 bp, synthetic construct
  source 1..75: mol_type = other DNA
gaagcgtatctgcgccatatcctgagcgtactgccggaatggccttccaaccgagttgacgaactcctgccatgg

SEQ ID NO: 67547 - DNA, 75 bp, synthetic construct
  source 1..75: mol_type = other DNA
acactgagcggtacaaaatccggcacctaccccgtgacagttagcgtgaacaattatggtgtcagtgatacgaaa

SEQ ID NO: 67548 - DNA, 75 bp, synthetic construct
  source 1..75: mol_type = other DNA
ggaaatcaaaagcgctggttggctcggaagatttgccggtgctggatgaaaacacgttcaacagtcacgcccctg

SEQ ID NO: 67549 - DNA, 75 bp, synthetic construct
  source 1..75: mol_type = other DNA
cgtcgcggcttcgaaatggactttgctgaactgttgctggaagactacaaagcctccctgaaatatctcagcgat

SEQ ID NO: 67550 - DNA, 75 bp, synthetic construct
  source 1..75: mol_type = other DNA
gcagctggataaactccgccggatgaacttcggcagtcgttccgaaaaagtctcccgcgtatcgcacaaatggaa

SEQ ID NO: 67551 - DNA, 75 bp, synthetic construct
  source 1..75: mol_type = other DNA
atgagcaaagtacgcgttatttttgaatttaagcatgtttcgcatgacgaaaaaccggcaggcaatgactgtgtt

SEQ ID NO: 67552 - DNA, 75 bp, synthetic construct
  source 1..75: mol_type = other DNA
atatcgcggcctttctcgacatgctggcagtgtccgaagggacggcgaatcatccgctgacgaaaaaccggggct

SEQ ID NO: 67553 - DNA, 75 bp, synthetic construct
  source 1..75: mol_type = other DNA
tggaatttgtgcaatcaggtactaacgtgccctatatgaaaattagcgcaattgattacagtcaaaatatcaacg

SEQ ID NO: 67554 - DNA, 75 bp, synthetic construct
  source 1..75: mol_type = other DNA
gtgggtaaaaacatgggctggctgggtgctgtttcactggatgccacccgtgcgaatgcccggttaccggatgaa

SEQ ID NO: 67555 - DNA, 75 bp, synthetic construct
  source 1..75: mol_type = other DNA
gccttgtgcaggacacgctgagaacgaacaatacggcgcgaacttcaataacgccgatatccgccagttcgtgga

SEQ ID NO: 67556 - DNA, 75 bp, synthetic construct
  source 1..75: mol_type = other DNA
ttaacacaattcttgagcttatcagacgtggagacgtgactgaaattgttcatgctggcgaccctgatgaagaag

SEQ ID NO: 67557 - DNA, 75 bp, synthetic construct
  source 1..75: mol_type = other DNA
gattcactggcggaagccgggatccccgatgagagtgtggtggggataagccagggctggaagctgggcggggcc

SEQ ID NO: 67558 - DNA, 75 bp, synthetic construct
  source 1..75: mol_type = other DNA
aaatgaacgtatagccagggctcaggtcgttggctttcgcaatggaaagacattattaaaccttataggcagctc

SEQ ID NO: 67559 - DNA, 75 bp, synthetic construct
  source 1..75: mol_type = other DNA
gtaaagcgcgttctgattaacgacaacacgcttccggcagtgaaaaaggcactggcaaatcttaaagataatcgt

SEQ ID NO: 67560 - DNA, 75 bp, synthetic construct
  source 1..75: mol_type = other DNA
ggatgatgcaggagcgaaaaagttcggttctgtcctcgccggtacaactgcaaatgtcatcaaaatggggctggc

SEQ ID NO: 67561 - DNA, 75 bp, synthetic construct
  source 1..75: mol_type = other DNA
cacggaaaccacaaacgaggatgaatcagataatgatgattccgcttttgaacagctttgtaaaattcgcactgg

SEQ ID NO: 67562 - DNA, 75 bp, synthetic construct
  source 1..75: mol_type = other DNA
atgaataccccagtttcactgatggctgaccagatggtcgacatggcatttatcactcaactgaccggcctgacc

SEQ ID NO: 67563 - DNA, 75 bp, synthetic construct
  source 1..75: mol_type = other DNA
tatgcccgtgccaggaaaactacagacagcggatttgaagcgtttcttggtgtggaaaatgccggggacgatgaa

SEQ ID NO: 67564 - DNA, 75 bp, synthetic construct
  source 1..75: mol_type = other DNA
caaactgggccgtagctcccgctggctgaaaagcgaagtggaagcctggctgcaggcgcgtattgcacagtcccg

SEQ ID NO: 67565 - DNA, 75 bp, synthetic construct
  source 1..75: mol_type = other DNA
ttataactgtggtatgtgcaacgtccagcgttatggctgctgatgataatgctatcacggatggctcagtaacat

SEQ ID NO: 67566 - DNA, 75 bp, synthetic construct
  source 1..75: mol_type = other DNA
ccgggcgctggcgcgtctgtgtctttctggctctaacccttccggcaacattacggaaacggtggaagagcattt

SEQ ID NO: 67567 - DNA, 75 bp, synthetic construct
  source 1..75: mol_type = other DNA
ttggcgctttatacctgctggatacgggaatattttccctgcgaaatctgtattacgcgcccgaaaggcggattt

SEQ ID NO: 67568 - DNA, 75 bp, synthetic construct
  source 1..75: mol_type = other DNA
atgctgaaacagcaggatatgaccgaaaccgccagagtggtttttaatgaattaagtgccaccgaaccggcgact

SEQ ID NO: 67569 - DNA, 75 bp, synthetic construct
  source 1..75: mol_type = other DNA
acagtgacttttaaagttgattatatcgctacgggtaaagcgacttcaggtaatgttaatgcggtaacggatttt

SEQ ID NO: 67570 - DNA, 75 bp, synthetic construct
  source 1..75: mol_type = other DNA
ccggtcatagcgaactgatttgctcgactagtattgaacgtatagtgacaggccgcgatacagcactaaaacaga

SEQ ID NO: 67571 - DNA, 75 bp, synthetic construct
  source 1..75: mol_type = other DNA
caaagagttttcggctaaggttaagctgatggataaggcaaccggaaagttggggtttgagtttattcccaaaaa

SEQ ID NO: 67572 - DNA, 75 bp, synthetic construct
  source 1..75: mol_type = other DNA
ttttaaatggaatgaaacgcaaatacctgttcgccagatattggcactgaccgacagaaaacctgttatcggtca

SEQ ID NO: 67573 - DNA, 75 bp, synthetic construct
  source 1..75: mol_type = other DNA
gtgagcgaatcggcaaccattcttgatatgtcctgtggcagtcgtatgttctggttcgataagaatgacgaccgg

SEQ ID NO: 67574 - DNA, 75 bp, synthetic construct
  source 1..75: mol_type = other DNA
agttcaaaactcgttaacaccagaaaattttgttcagaaaatttcacttagtgatgagcttaaaacaaaatatgc

SEQ ID NO: 67575 - DNA, 75 bp, synthetic construct
  source 1..75: mol_type = other DNA
ataagtttggtcgtttccgtcgcggtgtaccgccgaagactaaaggggattacgcttttatctcgcatatgatcg

SEQ ID NO: 67576 - DNA, 75 bp, synthetic construct
  source 1..75: mol_type = other DNA
ctggcagtgcgagtagagcgtgagcaattgaaggtggaactaacgaaactggaagtggagatggcagggtatttg

SEQ ID NO: 67577 - DNA, 75 bp, synthetic construct
  source 1..75: mol_type = other DNA
ggcgtaatgatgacctggaaggagctgtcatcggtgcgttttttctgcgtggggctgatccggaagtgatggata

SEQ ID NO: 67578 - DNA, 75 bp, synthetic construct
  source 1..75: mol_type = other DNA
gcaagtgactcctcaggataaaatatatcaatgtaagttttctgttaatacagagagcctccagtgtccctctga

SEQ ID NO: 67579 - DNA, 75 bp, synthetic construct
  source 1..75: mol_type = other DNA
accgatgaacaggccagcgcggccctgagtgcgcttgatgcgctcgaaacagatgccggaaaagtggcgtcgtta

SEQ ID NO: 67580 - DNA, 75 bp, synthetic construct
  source 1..75: mol_type = other DNA
ttcggattaccgtcgtgtggcgctgacggattatgaccgtttccctgaaaacgtggacggggaaggggatgcctt

SEQ ID NO: 67581 - DNA, 75 bp, synthetic construct
  source 1..75: mol_type = other DNA
aatcgacctgtcacgtttttatcccaaaaacaacgttatggaaatgcagtgtgacaggacgctggagccagttca

SEQ ID NO: 67582 - DNA, 75 bp, synthetic construct
  source 1..75: mol_type = other DNA
cgatggtgcaccgcaggtgttattaagtgcgccgaccggggccgggaaatcaacctggctgccgctgcaactgct

SEQ ID NO: 67583 - DNA, 75 bp, synthetic construct
  source 1..75: mol_type = other DNA
ctacgtaaggacaaaggattacccccggaacaactcgtcgcggctggctggtttaacgccgatgaaatgcagtgg

SEQ ID NO: 67584 - DNA, 75 bp, synthetic construct
  source 1..75: mol_type = other DNA
cacgttcatttaatcttgggctggaggttgttcgtgcccgaattgtagccaatgagcgcggagatattacagtcg

SEQ ID NO: 67585 - DNA, 75 bp, synthetic construct
  source 1..75: mol_type = other DNA
gcgtaattattctgaatgtcaccaccgcccgctctccgtcagggcatccggtggagacggtgacggagggagcta

SEQ ID NO: 67586 - DNA, 75 bp, synthetic construct
  source 1..75: mol_type = other DNA
atgcttgaacaggggaaagccagttatctgtataccggtcatgaccacaggggacatttccgtcagggcgttttc

SEQ ID NO: 67587 - DNA, 75 bp, synthetic construct
  source 1..75: mol_type = other DNA
gggatggaagctgatgctgcggctatatgtgaggcaatcagcagtcgctggagtaatggtgttgtcgaaggtcat

SEQ ID NO: 67588 - DNA, 75 bp, synthetic construct
  source 1..75: mol_type = other DNA
taatactggtcctcgagcccttggtgagagaatgctaagtatgctttcggactcaggtgaagcacaatcgcaaga

SEQ ID NO: 67589 - DNA, 75 bp, synthetic construct
  source 1..75: mol_type = other DNA
ggtgcggaaaccgcgcagacaacagtaagagtctggatgcgatttcggcgcgatgtgacggccgcctcacgtctg

SEQ ID NO: 67590 - DNA, 75 bp, synthetic construct
  source 1..75: mol_type = other DNA
tgcgccaaaaggtactaacaatactcagatcgcaagcacggcttatgttatggctgcgatcgctgccctcgtgga

SEQ ID NO: 67591 - DNA, 75 bp, synthetic construct
  source 1..75: mol_type = other DNA
tgaagatccaggatacaccctgtacgacctctctgaacgtctgcgtctgcgcggctggcaggttccggccttcac

SEQ ID NO: 67592 - DNA, 75 bp, synthetic construct
  source 1..75: mol_type = other DNA
atcaagaataatctcgacgcgtttcttgctctgccaccagaaacaaaagaagaacggaagtaccgacgcgatata

SEQ ID NO: 67593 - DNA, 75 bp, synthetic construct
  source 1..75: mol_type = other DNA
gaacagccaagccaatggataagcagtacaaactgaccgatggcagcggtatgcacctgcttgtccatcctaatg

SEQ ID NO: 67594 - DNA, 75 bp, synthetic construct
  source 1..75: mol_type = other DNA
ctgccagtgtcgcccgttcgtccatccgggtaaaaaataccagtaatgtcattatctgtttttccacagcagttc

SEQ ID NO: 67595 - DNA, 75 bp, synthetic construct
  source 1..75: mol_type = other DNA
agcataacgatgattatcgtatttcgctggaacaaggtacgccgggctttgagccaccgctggaaggtgaaacac

SEQ ID NO: 67596 - DNA, 75 bp, synthetic construct
  source 1..75: mol_type = other DNA
gctcccctgattacttgttgaaaggagaagatagtctttcaaacattgcctatcacagcaggcatgatccaagag

SEQ ID NO: 67597 - DNA, 75 bp, synthetic construct
  source 1..75: mol_type = other DNA
gcgaaggcgttcgcgtacgcacttaaccagtggccggcactgacgtactatgcgaacgatggctgggtggaaatc

SEQ ID NO: 67598 - DNA, 75 bp, synthetic construct
  source 1..75: mol_type = other DNA
gaagacatatcgagtattgttgcatcgtgttgatacaacagtagcagcagatattgagtggccagtcgccccaca

SEQ ID NO: 67599 - DNA, 75 bp, synthetic construct
  source 1..75: mol_type = other DNA
tttttctgggaagtctgcgtgagaatttacagctgtcacgtttaccgggaagcctgtcggatgtggatatgatta

SEQ ID NO: 67600 - DNA, 75 bp, synthetic construct
  source 1..75: mol_type = other DNA
gtctttcaggcgaactatccggcaatgctgctacagcaacaaagctgaaaacggcaaggacaattaacggcgtaa

SEQ ID NO: 67601 - DNA, 75 bp, synthetic construct
  source 1..75: mol_type = other DNA
caaagaattattaatatatttggttcttgctggcatatatggaatgatgacaggtatgcttatggcattttacat

SEQ ID NO: 67602 - DNA, 75 bp, synthetic construct
  source 1..75: mol_type = other DNA
ttttgagcgcgtctacgccgggagcacatggaccgaatggcgagaagtgtataactccttttcgttgcccctgaa

SEQ ID NO: 67603 - DNA, 75 bp, synthetic construct
  source 1..75: mol_type = other DNA
tctgtcgctctgtatccggcccggagagcgggtggggattattggctcaataggttgtggtaaatcgacgctgct

SEQ ID NO: 67604 - DNA, 75 bp, synthetic construct
  source 1..75: mol_type = other DNA
atgcggggcttttttatatctggagatgatgatggaaaaacagaaaacaaaccgattgtaatcggcgttgctgct

SEQ ID NO: 67605 - DNA, 75 bp, synthetic construct
  source 1..75: mol_type = other DNA
cacagtacggcatctgatgacctggggaataccaccactaacccgaagacgcgcgggctgctggctcactctgtc

SEQ ID NO: 67606 - DNA, 75 bp, synthetic construct
  source 1..75: mol_type = other DNA
atggttcttctggatgtagatgcacttcggaacgtctgtgaggagttcaccgcggctaattcggagttactgagt

SEQ ID NO: 67607 - DNA, 75 bp, synthetic construct
  source 1..75: mol_type = other DNA
ttgatccactacaaagcagctgatggtcgcgccacgacggagtggtttggtgagtcaatgctggaagcaacagaa

SEQ ID NO: 67608 - DNA, 75 bp, synthetic construct
  source 1..75: mol_type = other DNA
cttgctgaacgtcagcgaaaaacgaaaccgctgttgaaatccctggaaagctggttgcgtgaaaagatgaaaacc

SEQ ID NO: 67609 - DNA, 75 bp, synthetic construct
  source 1..75: mol_type = other DNA
caaaaaagctacgtcaaatacgcaaggctgaagggctaacgcaaaaggaatttgcggatattacggggttgtctt

SEQ ID NO: 67610 - DNA, 75 bp, synthetic construct
  source 1..75: mol_type = other DNA
cctatataaggcaacaaccattggcaatgcagcaacgatttaatttattatttcctgattttgttgaccacatac

SEQ ID NO: 67611 - DNA, 75 bp, synthetic construct
  source 1..75: mol_type = other DNA
tctctcttgatggctcttctcagtcggagggcgatcaggcttcaaccgacgctatccaaaaatcaccccgatcag

SEQ ID NO: 67612 - DNA, 75 bp, synthetic construct
  source 1..75: mol_type = other DNA
caggtgcaacccttaaaggtcgcacgtttgagcgcgtttataccggcagctcgtggagcgaatggcgggaagttt

SEQ ID NO: 67613 - DNA, 75 bp, synthetic construct
  source 1..75: mol_type = other DNA
tcacgatgattaccaaacggtaatggcatacaaagtttctgaagtcatcgctgcaatccgcgccgctggcattcg

SEQ ID NO: 67614 - DNA, 75 bp, synthetic construct
  source 1..75: mol_type = other DNA
tgatttgagatttgttgattttattggtttaaggttacagaaatctatttttttatccagtcacttccgtgattg

SEQ ID NO: 67615 - DNA, 75 bp, synthetic construct
  source 1..75: mol_type = other DNA
tggttatatcaatgattttggtggcttaagtttttatgaaataaactgcccaacagtgaataattcttgtaatgt

SEQ ID NO: 67616 - DNA, 75 bp, synthetic construct
  source 1..75: mol_type = other DNA
gaacgccagcttatgaaagagcgttaagcaaagctgcaaatgccatcagaccgctgcttgccactgaggcaacac

SEQ ID NO: 67617 - DNA, 75 bp, synthetic construct
  source 1..75: mol_type = other DNA
atggatataacagaaaaaagaatcacacaacgacacctcaatgaaggtgaattatcaggtgtaaattattataat

SEQ ID NO: 67618 - DNA, 75 bp, synthetic construct
  source 1..75: mol_type = other DNA
atggggtgcggccataccacaggcaagccgctatgactcccgtgttcagcaggttatctataaccctcagaacgt

SEQ ID NO: 67619 - DNA, 75 bp, synthetic construct
  source 1..75: mol_type = other DNA
ggatttggcaaggtacacgccgccgatggttccaccgtatcccggcaggtggaaagagtggaaaaaccggaatcc

SEQ ID NO: 67620 - DNA, 75 bp, synthetic construct
  source 1..75: mol_type = other DNA
aagatgttaactctttaacctctctttcaaaatcagaaaataatcacaattatcaaactgaaatgttgcttcgat

SEQ ID NO: 67621 - DNA, 75 bp, synthetic construct
  source 1..75: mol_type = other DNA
cccgccgaaaaatccacgatgttcacgtccgtaccccgtcagccctgacggaggaggcgctgaaacggatcggcg

SEQ ID NO: 67622 - DNA, 75 bp, synthetic construct
  source 1..75: mol_type = other DNA
attggcgttgaattattacctgtggagatgacgctggatgagcggccttaccccgtttttacgcgaggtaattat

SEQ ID NO: 67623 - DNA, 75 bp, synthetic construct
  source 1..75: mol_type = other DNA
catcactttaggtgaaaaagttgatcttattcaggcaacaggagcagtgatcatcattgctggctgtatttttgc

SEQ ID NO: 67624 - DNA, 75 bp, synthetic construct
  source 1..75: mol_type = other DNA
ccagccacacaactcacaggccccctgccgccacctgcctctcctcttgttcaggaagccgcatcactggattcc

SEQ ID NO: 67625 - DNA, 75 bp, synthetic construct
  source 1..75: mol_type = other DNA
gtttgatgaaattaatattgtgcgcggtcagctcgttcctggggggcggctgggcgtgaagatttacaaaattga

SEQ ID NO: 67626 - DNA, 75 bp, synthetic construct
  source 1..75: mol_type = other DNA
tacaaaatgtgactgtattgttgaagcaccggcgccgtcccgcccgatagagcgtggtatcgcgggccccggatt

SEQ ID NO: 67627 - DNA, 75 bp, synthetic construct
  source 1..75: mol_type = other DNA
ggacctgtgggcgcgttatcaggatttccagctccgtatccgtaacgccattatcaaacgccagtcccttgattt

SEQ ID NO: 67628 - DNA, 75 bp, synthetic construct
  source 1..75: mol_type = other DNA
atgcgtagcgccttccgggttatccggacggtacgggaaaaacatgcctgtactcagtgcgatgccatcgtgcag

SEQ ID NO: 67629 - DNA, 75 bp, synthetic construct
  source 1..75: mol_type = other DNA
ctgcgttacgtcattgagcatatccaggactggccggcaaaccgggtacgcgatctgttgccctggaaagttgat

SEQ ID NO: 67630 - DNA, 75 bp, synthetic construct
  source 1..75: mol_type = other DNA
tgttgtcttgttcgttgttcttatcgcctgcctggggatgtaagctttcatctgtggatcccaatgagtatcagc

SEQ ID NO: 67631 - DNA, 75 bp, synthetic construct
  source 1..75: mol_type = other DNA
gtggtacagggggctccggatatcacccgggaaatccagcaggatattgcccggcgaatgagggcggaaccatga

SEQ ID NO: 67632 - DNA, 75 bp, synthetic construct
  source 1..75: mol_type = other DNA
aaagtgacggaaaacggcggacacgtctatttcgccaaaaccaaagaagatgccactcgctacattttgcaggtc

SEQ ID NO: 67633 - DNA, 75 bp, synthetic construct
  source 1..75: mol_type = other DNA
tactatgcgaacgatggctgggctgaggcggacaataacatcgctgaaaatgcgttgcggatggtcagtctgggc

SEQ ID NO: 67634 - DNA, 75 bp, synthetic construct
  source 1..75: mol_type = other DNA
tgaccttgttcattcgtcagaagatccgtgaggatttcctcagtgccgaaatcggtattaccggctgtaactttg

SEQ ID NO: 67635 - DNA, 75 bp, synthetic construct
  source 1..75: mol_type = other DNA
aataaaagaatggactgaagccagagaccttccatcacctgatggagagtgcttccgtagttggttcaagaaaca

SEQ ID NO: 67636 - DNA, 75 bp, synthetic construct
  source 1..75: mol_type = other DNA
atgcgcattatgtgtcgtcgcggcttcgaaatggactttgctgaactgttgctggaagactacaaagcctccctg

SEQ ID NO: 67637 - DNA, 75 bp, synthetic construct
  source 1..75: mol_type = other DNA
tcgcatgtggttgtgccggcaatacataaagatcgccatcaaatccgcagagttttacatgaacatctggggtat

SEQ ID NO: 67638 - DNA, 75 bp, synthetic construct
  source 1..75: mol_type = other DNA
cacatattgctgttatgggtatggagcgaattgcgccaacattccaggaggtggatgttcttatcaccatgctgg

SEQ ID NO: 67639 - DNA, 75 bp, synthetic construct
  source 1..75: mol_type = other DNA
agatcactattctggcagaccgttaactcgactggcggttgaactcactttattggttttcatccgttcgagcga

SEQ ID NO: 67640 - DNA, 75 bp, synthetic construct
  source 1..75: mol_type = other DNA
gataacacttcagactacagcaaaaatggtgcaggcatagaaaactataacttcatcactactgctggtcttaag

SEQ ID NO: 67641 - DNA, 75 bp, synthetic construct
  source 1..75: mol_type = other DNA
gggtatgacacaaccaaggaagtctgtggccatggattccgggcgatggcgtgcagtgcattgattgaatccggc

SEQ ID NO: 67642 - DNA, 75 bp, synthetic construct
  source 1..75: mol_type = other DNA
agggtatccgtcgggcatatcgcgacacactggcgacaagtccgtactcctcataccgcaatcctgtccgcagac

SEQ ID NO: 67643 - DNA, 75 bp, synthetic construct
  source 1..75: mol_type = other DNA
ccatcacaatttttatcagtatgttgagtgcctgtgcccgtacggccccagtgcaacagataagcaccactgtca

SEQ ID NO: 67644 - DNA, 75 bp, synthetic construct
  source 1..75: mol_type = other DNA
taccgtgggtggatcacactcgcgtcgcggcctttggtttccgtttcggcgctaacgttgccgtgcgtctggcat

SEQ ID NO: 67645 - DNA, 75 bp, synthetic construct
  source 1..75: mol_type = other DNA
atgagttcaacgcagaaacccgccgacgtcacggcagaacgacgccgccactggtggtggacggtgccgggatgc

SEQ ID NO: 67646 - DNA, 75 bp, synthetic construct
  source 1..75: mol_type = other DNA
tacgccgccgcgcgaaggcatcatcaaacgctggacctggcctgccggggaaaacgacggttctgtggcgctgct

SEQ ID NO: 67647 - DNA, 75 bp, synthetic construct
  source 1..75: mol_type = other DNA
tggatgacgttatcgcccaggtgaaacagattgtgggtgatatgccggtttacctgacctttgatatcgactgcc

SEQ ID NO: 67648 - DNA, 75 bp, synthetic construct
  source 1..75: mol_type = other DNA
gcgaaagaaaaaaacgccaggaaggttgttaaatccaaatcaatggtgactgaggaaattggcatgaacgccgtt

SEQ ID NO: 67649 - DNA, 75 bp, synthetic construct
  source 1..75: mol_type = other DNA
ggaacggcacagcctgggtgaaagatgcagaagcagaaaaactgttccggatccgagaggcggaagaaataaaaa

SEQ ID NO: 67650 - DNA, 75 bp, synthetic construct
  source 1..75: mol_type = other DNA
cgtgacctacaccggtaactatgagttcccgcagccgctgcacgatgcgctggataaattccaggccgacaccgg

SEQ ID NO: 67651 - DNA, 75 bp, synthetic construct
  source 1..75: mol_type = other DNA
taacgctagccgacgctcgtgaaaaacgcagcgaagccagaaaaatcctcgctgctggaggcgatccaggggtgg

SEQ ID NO: 67652 - DNA, 75 bp, synthetic construct
  source 1..75: mol_type = other DNA
tccttctgctgaaacaacgccttgccgaacaggaagcgctgaaccgtgccctgctggaaaaactggccgatcgtg

SEQ ID NO: 67653 - DNA, 75 bp, synthetic construct
  source 1..75: mol_type = other DNA
cgcgctcgaagcctggatgagtctgcaaatgatgcgcgaaggttggtttgcgcctacgctaaacctgaataaacc

SEQ ID NO: 67654 - DNA, 75 bp, synthetic construct
  source 1..75: mol_type = other DNA
gaaaaagtatcgggtattgctgaaccgtgttgatacatcaactgcacctgatattgagtggcctgtaaatcctgt

SEQ ID NO: 67655 - DNA, 75 bp, synthetic construct
  source 1..75: mol_type = other DNA
cgccatattggcggtcatggatatggctctatttatccagggccaattggtgcggtgatttccccgttacttggc

SEQ ID NO: 67656 - DNA, 75 bp, synthetic construct
  source 1..75: mol_type = other DNA
acgtattgcagggtggcgcaagtctgattaatgcaatcagtcaggggcttggtgggccaaaagttttggatgatg

SEQ ID NO: 67657 - DNA, 75 bp, synthetic construct
  source 1..75: mol_type = other DNA
aacgtgcaaaaccacaagacaaaccatacacattgaacgatggacaaggtctgtcattgcttatcaatcctgatg

SEQ ID NO: 67658 - DNA, 75 bp, synthetic construct
  source 1..75: mol_type = other DNA
ggctgggttatctggcgtgatgaagaagcgctgccgcaggaactggtgttcaacgttgactacctcggcggtcag

SEQ ID NO: 67659 - DNA, 75 bp, synthetic construct
  source 1..75: mol_type = other DNA
gacccggcccggaaaactgaagaagaaattatggagaccacgcctccactttcatcttcacctcagtcagtacaa

SEQ ID NO: 67660 - DNA, 75 bp, synthetic construct
  source 1..75: mol_type = other DNA
gaaaaagtatcgggtgttgctgaaccgtgttgatacatcaattgcaccggatattgagtggcctgcaagccctgt

SEQ ID NO: 67661 - DNA, 75 bp, synthetic construct
  source 1..75: mol_type = other DNA
acgcaaacctaaagataaaccaaaagcagaaaacggcgtcctcatcgtcgaacgatggcttcttgcccgcatccg

SEQ ID NO: 67662 - DNA, 75 bp, synthetic construct
  source 1..75: mol_type = other DNA
agcccggacagaaaaggcatccatccgcagactcatcttgcctgcttcagcggtgtgctgcaagcggatgcgtac

SEQ ID NO: 67663 - DNA, 75 bp, synthetic construct
  source 1..75: mol_type = other DNA
tcgaagagcttatcgccgaaatgggcagtgcctttctgtgcgctcaactgggtgtcaccggaaatgtgcagcatg

SEQ ID NO: 67664 - DNA, 75 bp, synthetic construct
  source 1..75: mol_type = other DNA
tttcgcgcctgccggcaggcacgtgaagcatcagagtatttactgacgcggcgaacttcgcaggagtgcgcagca

SEQ ID NO: 67665 - DNA, 75 bp, synthetic construct
  source 1..75: mol_type = other DNA
ctgttcagtgcatgtcgacaggccagagaggcaacggaataccttctttccgtacacgatacgccggcagaaaaa

SEQ ID NO: 67666 - DNA, 75 bp, synthetic construct
  source 1..75: mol_type = other DNA
gcatagtctggtcctcggacagatcaagacggatgagaaatccaatgagattacagccattcctgaacttcttaa

SEQ ID NO: 67667 - DNA, 75 bp, synthetic construct
  source 1..75: mol_type = other DNA
ggtagagatttatcaacatttgatccaaacgatgacatcgaagagtacgcagaaatcagcgaaggtactacaaat

SEQ ID NO: 67668 - DNA, 75 bp, synthetic construct
  source 1..75: mol_type = other DNA
acataaaaaataaaaaaggtttctcacttttagaactattacttgttcttgggatcatcgcagcattagtagtag

SEQ ID NO: 67669 - DNA, 75 bp, synthetic construct
  source 1..75: mol_type = other DNA
ccactgttacaggcggcggagagggtatcgcaacgctgatccctgtattgaatggtgttcatcaagctggtctga

SEQ ID NO: 67670 - DNA, 75 bp, synthetic construct
  source 1..75: mol_type = other DNA
cggtgctgctgctggacgaaatcgagaaagcgcatccggacgtgttcaatattctgttgcaggtgatggacaacg

SEQ ID NO: 67671 - DNA, 75 bp, synthetic construct
  source 1..75: mol_type = other DNA
agactggaaagaaaccgcagatggcgtctataaggcaacctataccgcctataccaaaggcagtgggcttactgc

SEQ ID NO: 67672 - DNA, 75 bp, synthetic construct
  source 1..75: mol_type = other DNA
atggataagaagcaagtaacggatttaaggtcggaactactcgattcacgttttggcgctaagtctatttctact

SEQ ID NO: 67673 - DNA, 75 bp, synthetic construct
  source 1..75: mol_type = other DNA
agccgcgattgatgaagataggtcgccaaagtcagttgagtcatttgctcagcaagaagctgacaaattcaaaga

SEQ ID NO: 67674 - DNA, 75 bp, synthetic construct
  source 1..75: mol_type = other DNA
gaaagcgcatccggacgtattcaacattctgttgcaggtgatggacaacggcacgctgaccgataacaacggacg

SEQ ID NO: 67675 - DNA, 75 bp, synthetic construct
  source 1..75: mol_type = other DNA
ggcttgggtatgacgtgaaaaatatgcggcgatggttagccaaactggaaaaagacgccgtgatttacattgatg

SEQ ID NO: 67676 - DNA, 75 bp, synthetic construct
  source 1..75: mol_type = other DNA
gtaaggcagaaatccttgtgacaagcaccattgctggaacgaaagtagttacagctaatttggcaatcgcaccta

SEQ ID NO: 67677 - DNA, 75 bp, synthetic construct
  source 1..75: mol_type = other DNA
atatattgggagttcgaaattggaggtcatacctatcgttcggttatcgagtgtaaggactattcctccccggta

SEQ ID NO: 67678 - DNA, 75 bp, synthetic construct
  source 1..75: mol_type = other DNA
aagaacttgtcagagatatacaatattctttgtttaaagccgaaaatattcctagccttaaaaacattaatatcg

SEQ ID NO: 67679 - DNA, 75 bp, synthetic construct
  source 1..75: mol_type = other DNA
atgacaatgaacattaccagcaaacaaatggaaattactccggccatccgccaacatgtcgcagaccgtctcgcc

SEQ ID NO: 67680 - DNA, 75 bp, synthetic construct
  source 1..75: mol_type = other DNA
ctgttgcgcttaaagtcaggtatattatctgttccagtccatcacgggcatggagagttaaagatatcagtaatt

SEQ ID NO: 67681 - DNA, 75 bp, synthetic construct
  source 1..75: mol_type = other DNA
acataaaaagtaaaaaaggtttctcacttttagaactattacttgttcttggtattatcgcagcgttagtggtag

SEQ ID NO: 67682 - DNA, 75 bp, synthetic construct
  source 1..75: mol_type = other DNA
atgagcgaatatttcagaatacttcaggggctgcctgacggctcctttacccgcgaacaggcggaagccgttgcc

SEQ ID NO: 67683 - DNA, 75 bp, synthetic construct
  source 1..75: mol_type = other DNA
agaagagcaaccgaagctgatggtaattgactccatccaggtgatgcatatggcggatgtacaatcatcgcctgg

SEQ ID NO: 67684 - DNA, 75 bp, synthetic construct
  source 1..75: mol_type = other DNA
ctctgaacgtctgcgtctgcgcggctggcaggttccggccttcactctcggcggtgaagccaccgacatcgtggt

SEQ ID NO: 67685 - DNA, 75 bp, synthetic construct
  source 1..75: mol_type = other DNA
acgtctgcaggcaggacgctggtttgcgccagcgtatgccattcatctgttttttattggctttctggtcagagt

SEQ ID NO: 67686 - DNA, 75 bp, synthetic construct
  source 1..75: mol_type = other DNA
cacactatctgctgcgccatcgcaacccacggttgctttttgagtcgctgctcacgttagccatcacactgacgt

SEQ ID NO: 67687 - DNA, 75 bp, synthetic construct
  source 1..75: mol_type = other DNA
agttgaagtgaccgaaatcctggtgaaagttggcgataaagttgaagctgaacagtcgctgatcaccgtagaagg

SEQ ID NO: 67688 - DNA, 75 bp, synthetic construct
  source 1..75: mol_type = other DNA
tggccgaagaagtacgcgtggaactccccggcggtcgtcttgatatcgcctggaaaggtccgggtcacccgttat

SEQ ID NO: 67689 - DNA, 75 bp, synthetic construct
  source 1..75: mol_type = other DNA
atgcaaaatcttgatgagccgattaaaggtgtcggcatccctgaagttgcgaaggcttgtggagttagcgaaagg

SEQ ID NO: 67690 - DNA, 75 bp, synthetic construct
  source 1..75: mol_type = other DNA
aatttacgagtggatggcaaagaagctggcagctataaaccagcttcgtgaagtgctgtcttatcgacaggaaac

SEQ ID NO: 67691 - DNA, 75 bp, synthetic construct
  source 1..75: mol_type = other DNA
tttcaatgtgccgccttttgttaccccaaacagtgaaattaaagcattgataaaaaatattcacgaaacctgggc

SEQ ID NO: 67692 - DNA, 75 bp, synthetic construct
  source 1..75: mol_type = other DNA
tccagattatcaggctgccgtagcgcgtggcgaagcggctttgccaaccattacgccgaccgacttgcgccacaa

SEQ ID NO: 67693 - DNA, 75 bp, synthetic construct
  source 1..75: mol_type = other DNA
tgatgcccggttatgagtttgcgcagaaaaactcagaattacaggctgtgctcggcgtggcaaaagactccgccg

SEQ ID NO: 67694 - DNA, 75 bp, synthetic construct
  source 1..75: mol_type = other DNA
gccaaccggtgaaaccacagcgctgattctggagatgtcccgcgccctgatgtaccgccgtctgcgtgccgcgac

SEQ ID NO: 67695 - DNA, 75 bp, synthetic construct
  source 1..75: mol_type = other DNA
tatttaccctgctcacgctgaccgctgttccggctcatgccgatattatcgatgacaccattggcaatattcagc

SEQ ID NO: 67696 - DNA, 75 bp, synthetic construct
  source 1..75: mol_type = other DNA
acatgcaggggatgcgtaaggcagatatcatcaggcgtctggaaaatgaactgggggaaacggcagaggatgtgt

SEQ ID NO: 67697 - DNA, 75 bp, synthetic construct
  source 1..75: mol_type = other DNA
gctgaagtgattggtgaagcgtgggaaagccgcgaatttggtaaagcagtgcgcgaaatcatggcgctggctgat

SEQ ID NO: 67698 - DNA, 75 bp, synthetic construct
  source 1..75: mol_type = other DNA
ctctatgcagtacatctttgtgtactcaaaaaaataagctctcatatacaacattatttataataattatatctt

SEQ ID NO: 67699 - DNA, 75 bp, synthetic construct
  source 1..75: mol_type = other DNA
gcagtgaagatggtattgacccggtttcgctggcggccctgacgcgtaaagtcggacgcaaagtgcgttacgtca

SEQ ID NO: 67700 - DNA, 75 bp, synthetic construct
  source 1..75: mol_type = other DNA
tcatcatcgtgctggtagtgctttacatgtctgtctttgtcgtcaaagaaggtgagcgcggtattacgctgcgtt

SEQ ID NO: 67701 - DNA, 75 bp, synthetic construct
  source 1..75: mol_type = other DNA
tgcagcaccagcgcggactgagccgccaccagcgtggctatggctcaaaatggacggtgattcgtgcccgtattc

SEQ ID NO: 67702 - DNA, 75 bp, synthetic construct
  source 1..75: mol_type = other DNA
tcatcccgaaagcgcatggcggaacagacgcagacagcaacctgcagagtctgtgctggccctgccataaagcga

SEQ ID NO: 67703 - DNA, 75 bp, synthetic construct
  source 1..75: mol_type = other DNA
tggagtatggccagaagatggcgagttaagcgaattaacgtggtgcagccacaatcagcaccatgatgacacgct

SEQ ID NO: 67704 - DNA, 75 bp, synthetic construct
  source 1..75: mol_type = other DNA
gccaacgcgctggcaattacggatattaccggaaatgcggcaacttaccctgtgctgattgaaagtcttactgtt

SEQ ID NO: 67705 - DNA, 75 bp, synthetic construct
  source 1..75: mol_type = other DNA
atgtctgctttattatcgcctttatctcttcaggcagcggatgtccggcgtagcggagatgaagcatttatcatt

SEQ ID NO: 67706 - DNA, 75 bp, synthetic construct
  source 1..75: mol_type = other DNA
aagggtttcttcgcgggaaatgtgtaccgcgagatctgaaagtgaatgaaacaaatgctgagtacctggtacgta

SEQ ID NO: 67707 - DNA, 75 bp, synthetic construct
  source 1..75: mol_type = other DNA
cataaatcagtttaagcggctgaaggatgatcctgtaaatgccgcgaaggctctggacaatgagctgcattttct

SEQ ID NO: 67708 - DNA, 75 bp, synthetic construct
  source 1..75: mol_type = other DNA
atgtctgttttattatcgcctttatctcttcaggccgcggatatccggcgtagtggagatgaagcatttatcatt

SEQ ID NO: 67709 - DNA, 75 bp, synthetic construct
  source 1..75: mol_type = other DNA
ctgaaaatgttcgggctggggctgccggtgatgctgaaggaatacggactgaattacgagaagcgccataccaaa

SEQ ID NO: 67710 - DNA, 75 bp, synthetic construct
  source 1..75: mol_type = other DNA
atatcatctatttcctgcaacatggctgctggaacgtaactgaacatagtcctcagatagaaaaaatatggtttt

SEQ ID NO: 67711 - DNA, 75 bp, synthetic construct
  source 1..75: mol_type = other DNA
agcagttacgcggcataaaacacaaagaaacagaagtcattatttttgcgggtagtgatgcctggtcacacgcaa

SEQ ID NO: 67712 - DNA, 75 bp, synthetic construct
  source 1..75: mol_type = other DNA
taccccacccactgacccgggaaccaataacggcatcaataattgtaaaacatgaagaatgcgcatttatgacga

SEQ ID NO: 67713 - DNA, 75 bp, synthetic construct
  source 1..75: mol_type = other DNA
ccagtgtcaactgaactgccaccagcaaatgaaagtgttttgttattcgatgctaacggagaaggctggctaatt

SEQ ID NO: 67714 - DNA, 75 bp, synthetic construct
  source 1..75: mol_type = other DNA
gtgtcaccttgaggcggcattaaacattaagccggggcatacacttggcattattgatgcactattggttcataa

SEQ ID NO: 67715 - DNA, 75 bp, synthetic construct
  source 1..75: mol_type = other DNA
cctagtgaggtgttgtccgcaatcctgaaggttgccaagattcgtgccgatttcgatgattttgacggtgacagg

SEQ ID NO: 67716 - DNA, 75 bp, synthetic construct
  source 1..75: mol_type = other DNA
atgaccactttaaccgacaaagaactgattaaagaaatcagagagcgaatcggcagcctggacgtccgagacaat

SEQ ID NO: 67717 - DNA, 75 bp, synthetic construct
  source 1..75: mol_type = other DNA
gtcagcgggtggggatttccttttatggcgtgtcagatattcacgagccggagttgctgtcggtggatgaggaga

SEQ ID NO: 67718 - DNA, 75 bp, synthetic construct
  source 1..75: mol_type = other DNA
gcctcggatcgctgaatgatgtttccctgtccgatgccagagaacgacggaatgaatacaggtcactcatagcga

SEQ ID NO: 67719 - DNA, 75 bp, synthetic construct
  source 1..75: mol_type = other DNA
aagcaccaactctgagttagcgttaggtgcacaggaaggaagtgctgcgaaggctgcagggattattgatgccga

SEQ ID NO: 67720 - DNA, 75 bp, synthetic construct
  source 1..75: mol_type = other DNA
tccattttttggtaaatgggttggtgtaacattatccgctgaaaataaacgtcaattatggatccctgaagggtt

SEQ ID NO: 67721 - DNA, 75 bp, synthetic construct
  source 1..75: mol_type = other DNA
attgcgaaaactggttctgatcaagctggctgataatgccagcgatcagggtgagtgctggcccagctaccagca

SEQ ID NO: 67722 - DNA, 75 bp, synthetic construct
  source 1..75: mol_type = other DNA
aatattttgtttgtcgggatcaacccacaggcaattgcggccatcaccacaccttcttctgtttcgccagaaagt

SEQ ID NO: 67723 - DNA, 75 bp, synthetic construct
  source 1..75: mol_type = other DNA
cgaacaattattacagtcaacaagcagagcgaagcataatttttgatgataaagacttagggattgcttggccat

SEQ ID NO: 67724 - DNA, 75 bp, synthetic construct
  source 1..75: mol_type = other DNA
atgggaagcaggtggtggcgcaaaagaatccattcgtcataagcaccgttactccgatgagcaaaaacaggttgc

SEQ ID NO: 67725 - DNA, 75 bp, synthetic construct
  source 1..75: mol_type = other DNA
aggaagccggattactggcatcaacaggaagtacaggcgactcgtatgacaacgcgatggcggagagcatcaatg

SEQ ID NO: 67726 - DNA, 75 bp, synthetic construct
  source 1..75: mol_type = other DNA
gatgatcctgtaaatgccgcgaaggctctggacaatgagctgcattttcttactgccactcagcttgagcagata

SEQ ID NO: 67727 - DNA, 75 bp, synthetic construct
  source 1..75: mol_type = other DNA
aaatgacgaacggcggccaagccgtgacgaacgaacagggtaaagctaccgtcacttataccaatacccgctcct

SEQ ID NO: 67728 - DNA, 75 bp, synthetic construct
  source 1..75: mol_type = other DNA
gtttatccgtggttgtgacgaactgaaacggcgcacaggggccacggtgctggtggttcaccattccggcaagga

SEQ ID NO: 67729 - DNA, 75 bp, synthetic construct
  source 1..75: mol_type = other DNA
atgctctcttccggaagtaaaaaagaatactatggttttagcataattagaacaggagagcgtattttaagactt

SEQ ID NO: 67730 - DNA, 75 bp, synthetic construct
  source 1..75: mol_type = other DNA
actaggatacgaaacaccaagtacatgtctgtcatttttacctcaagtttttgaatctgtagatgaggtccattt

SEQ ID NO: 67731 - DNA, 75 bp, synthetic construct
  source 1..75: mol_type = other DNA
tgctaacggagaaggctggctgattggctggcgttctctctggtacacctggggacaaaaagaaaccggagaatg

SEQ ID NO: 67732 - DNA, 75 bp, synthetic construct
  source 1..75: mol_type = other DNA
gctgcccggatcgccatgtcagcgctggcagaggaaaccggtaaacgcacatctgatattgataataatctcaat

SEQ ID NO: 67733 - DNA, 75 bp, synthetic construct
  source 1..75: mol_type = other DNA
aagttatggctattggtcaaattaatatttccggcaatgttacacctgcgacctggtggaaatatattcgactac

SEQ ID NO: 67734 - DNA, 75 bp, synthetic construct
  source 1..75: mol_type = other DNA
ggaacaggtcccgtaactgttggagcgtctgctctgagctggggagcagagtaaaaggaaaaaagtcccgggctg

SEQ ID NO: 67735 - DNA, 75 bp, synthetic construct
  source 1..75: mol_type = other DNA
gactggtccggcagttatgaaaccgcgcactatatgctgggtaccgcagctggcccgcatccttacccgaccatt

SEQ ID NO: 67736 - DNA, 75 bp, synthetic construct
  source 1..75: mol_type = other DNA
gcagtggacatttcaagtcggggaccttgaaaacgtcaatattactcactgggcagtaataccgaaagcaccgga

SEQ ID NO: 67737 - DNA, 75 bp, synthetic construct
  source 1..75: mol_type = other DNA
gaacactaattttaaccagatcttaatgcaattgagaatgagcaaggcagcgttattactacttgaaaactcata

SEQ ID NO: 67738 - DNA, 75 bp, synthetic construct
  source 1..75: mol_type = other DNA
ttgctgataaccgggtatgtcaggtactcacctgtcttcctgaaaaatttgtggttgatttcgcaaacggtattg

SEQ ID NO: 67739 - DNA, 75 bp, synthetic construct
  source 1..75: mol_type = other DNA
cctgcggatcaacgccacctgccacggtaccgtgcgtgaagccaccggcacctccggcgtggataatgcaaccgg

SEQ ID NO: 67740 - DNA, 75 bp, synthetic construct
  source 1..75: mol_type = other DNA
tgatgtcacatttaatacgggcgacagcgaacaagggattgttccctgcctgacacgcgcgcaactcgccagtat

SEQ ID NO: 67741 - DNA, 75 bp, synthetic construct
  source 1..75: mol_type = other DNA
atcgcagcctattctgctgcttatacggtcatgcaaccggtagcaggttatgtactggatgtgctgggtacgaaa

SEQ ID NO: 67742 - DNA, 75 bp, synthetic construct
  source 1..75: mol_type = other DNA
ggtatatgatcgcactggtgacgctcggcaccgtgcttggttacctgacgcgtaacactgtggcggcagctgcgc

SEQ ID NO: 67743 - DNA, 75 bp, synthetic construct
  source 1..75: mol_type = other DNA
taccgtgataacgccatcgcctacaaagaacagcgtgataaaaaagtcagtgagctgaagcaggcgaccgccacc

SEQ ID NO: 67744 - DNA, 75 bp, synthetic construct
  source 1..75: mol_type = other DNA
cgatccgctggaagtagcgctgtggctgcaggcctgtcacgatgcaggaatggaggttcgtgtgcagataaatga

SEQ ID NO: 67745 - DNA, 75 bp, synthetic construct
  source 1..75: mol_type = other DNA
caggcctggtctgtcaactggaaagcacagcgcgtagcctgcgctccacatttgacctgccggacgagccaacag

SEQ ID NO: 67746 - DNA, 75 bp, synthetic construct
  source 1..75: mol_type = other DNA
gagttatgggatcctggtattaatgccggattgctcaattataatttcagcggaaatagtgtacagaatcggatt

SEQ ID NO: 67747 - DNA, 75 bp, synthetic construct
  source 1..75: mol_type = other DNA
tgatgtcacatttaatacgggcgacagtgaacaagggattgttccctgcctgacacgcgcgcaacttgccagtat

SEQ ID NO: 67748 - DNA, 75 bp, synthetic construct
  source 1..75: mol_type = other DNA
cgggattatttcaccctcagagagcggttgatgacaatgcagaagcaactggaaggggcgcaggactatatccgc

SEQ ID NO: 67749 - DNA, 75 bp, synthetic construct
  source 1..75: mol_type = other DNA
gccaatattgagttgctatccgggagcaggcgtgagtcactgatagacagaattaaaggcgctgacgcaatcact

SEQ ID NO: 67750 - DNA, 75 bp, synthetic construct
  source 1..75: mol_type = other DNA
gcgatgttgctgcgctcgatgcaaaatactcgagggaattagccgatgcgagagctgaaaatgaaactctgcgtg

SEQ ID NO: 67751 - DNA, 75 bp, synthetic construct
  source 1..75: mol_type = other DNA
cacagacagtgaggaacctgttcaggaagccccgagaaagcgtttaagcatttctgaaaaagcaatatcactcgg

SEQ ID NO: 67752 - DNA, 75 bp, synthetic construct
  source 1..75: mol_type = other DNA
caacatttgcaggaaatgccaaaactcgccgtcatgagcggcgcagaaagctggccatcgagcgtgattccatct

SEQ ID NO: 67753 - DNA, 75 bp, synthetic construct
  source 1..75: mol_type = other DNA
aggatgccggctggctgcgtaccctgcgcgctccgaacctgcagctggcagtggagctgacggacgccggccggg

SEQ ID NO: 67754 - DNA, 75 bp, synthetic construct
  source 1..75: mol_type = other DNA
cgggattatttcatcctcagagaacggttgatgacaatgcagaagcagctggaaggggtacaggactatatccgc

SEQ ID NO: 67755 - DNA, 75 bp, synthetic construct
  source 1..75: mol_type = other DNA
cgggattatttcactctcagagagcggttgatgctgacgcagaagcagctggaagtggcgcaggaatatatccgc

SEQ ID NO: 67756 - DNA, 75 bp, synthetic construct
  source 1..75: mol_type = other DNA
cctgcggatcaacgccacctgtccaggctccgtgcgtgaagccaccgccaccgcccgcgtgggcaatgatgccag

SEQ ID NO: 67757 - DNA, 75 bp, synthetic construct
  source 1..75: mol_type = other DNA
acgggattatttcgttctcagagagcgcatcgaaaccataactaaccaattgaatggcctgcaagaatatgtgag

SEQ ID NO: 67758 - DNA, 75 bp, synthetic construct
  source 1..75: mol_type = other DNA
gcagcggggatgtgtatacagtctgcagaatgacttatccggcgtgccggattgtttcagctacagtcttgcgac

SEQ ID NO: 67759 - DNA, 75 bp, synthetic construct
  source 1..75: mol_type = other DNA
agatgcgattacccagattgttgccagtctggaggtcggtaaaggtagtggctctgcagaggaagcggtcaccaa

SEQ ID NO: 67760 - DNA, 75 bp, synthetic construct
  source 1..75: mol_type = other DNA
gcatggaaatccggtcatcagaaatcaccaccagcggagccagtacgctgacgggttacgttgttcgctggaata

SEQ ID NO: 67761 - DNA, 75 bp, synthetic construct
  source 1..75: mol_type = other DNA
aaggctatttctcttcatacatccgaaagtgcagatcagctctggcatgaacagactttactccctctttttgcc

SEQ ID NO: 67762 - DNA, 75 bp, synthetic construct
  source 1..75: mol_type = other DNA
tgccgttctctggattgggcgggcattgctgatgaatcccattggtcttgctatcaccgccgtcgcggcggcggc

SEQ ID NO: 67763 - DNA, 75 bp, synthetic construct
  source 1..75: mol_type = other DNA
tacagaagcgcctggcggcgacggcgacctgaaagtgggtacgccgcttacagcaggcaaccctggtgattttac

SEQ ID NO: 67764 - DNA, 75 bp, synthetic construct
  source 1..75: mol_type = other DNA
agagagtgggcgatttgtgcagaatgaagtggtcagacataaacgatggtcatcttcacattggacagagtaaaa

SEQ ID NO: 67765 - DNA, 75 bp, synthetic construct
  source 1..75: mol_type = other DNA
atgggttatgtagttattgatattgaagccgacgaagacgttgccgaaaaagcgctgcaggcaatgaaagctatt

SEQ ID NO: 67766 - DNA, 75 bp, synthetic construct
  source 1..75: mol_type = other DNA
aggtgacgcccgcgtgaaaagtgtcagagtggatcaacccggcgtcagactcagtgcgcaggctggcgtcaccag

SEQ ID NO: 67767 - DNA, 75 bp, synthetic construct
  source 1..75: mol_type = other DNA
gcgcggcggcgtggcgaaactggatgaaggtcaccggctggccgcactctggcaggcgctgccggaagagcttcg

SEQ ID NO: 67768 - DNA, 75 bp, synthetic construct
  source 1..75: mol_type = other DNA
cgacgctgtttacgttaagtgatatcggcgtttcagctcaccgttatcacaatcgtctggatatctttacccaaa

SEQ ID NO: 67769 - DNA, 75 bp, synthetic construct
  source 1..75: mol_type = other DNA
ctctcggacaaggcggttccgccattactgatatcaacggcaaggctgaagttacactgagcggtacaaaatccg

SEQ ID NO: 67770 - DNA, 75 bp, synthetic construct
  source 1..75: mol_type = other DNA
gaggcttctcatccttccccgcatgggcagaatatttaatcgcggattcgtttgagagttcacggacttttgaaa

SEQ ID NO: 67771 - DNA, 75 bp, synthetic construct
  source 1..75: mol_type = other DNA
cgattgtattgggtgataatgacacgggctttaaacaaaatggcgatggtaatctggatgtttatgctaataacg

SEQ ID NO: 67772 - DNA, 75 bp, synthetic construct
  source 1..75: mol_type = other DNA
atgcgttatccctggaacgggagcgtcagctggaaatacaggagcgcacactggatggcccttcgctgggatggt

SEQ ID NO: 67773 - DNA, 75 bp, synthetic construct
  source 1..75: mol_type = other DNA
aagtcagccggtgacgaatttttacgttatttgcatcgcccggatgagtcgcacctgcaaaacgccgcgcaggtg

SEQ ID NO: 67774 - DNA, 75 bp, synthetic construct
  source 1..75: mol_type = other DNA
tttactcatccgttgcttcttcctattgattataatttatggcttgaatctattgataaggaaggattagatacg

SEQ ID NO: 67775 - DNA, 75 bp, synthetic construct
  source 1..75: mol_type = other DNA
acactccgtacgagggggacgagtccttcctggctggcgctactgaagcgaccaccaccctgtgggacaaagtaa

SEQ ID NO: 67776 - DNA, 75 bp, synthetic construct
  source 1..75: mol_type = other DNA
ctttaatgaaagtaatatccgcccagcaggcgataagtgctctcaaatatatggttgatggtgagatttatttct

SEQ ID NO: 67777 - DNA, 75 bp, synthetic construct
  source 1..75: mol_type = other DNA
ctcaaatagcgttagacaacctgatttttactcctaccaaacgcaccaaatcccgcaagaaaccaatccccacag

SEQ ID NO: 67778 - DNA, 75 bp, synthetic construct
  source 1..75: mol_type = other DNA
ggtggcgaaaaatgccggggtcagcatcgaagaaacagccgcaatggtcggcgcactgcatgacgccaaaattac

SEQ ID NO: 67779 - DNA, 75 bp, synthetic construct
  source 1..75: mol_type = other DNA
tcaggcggcgctaattcagatatcacgatccgcacatttgaagcggtgcgtaaatcgaaggaagcgttagacctg

SEQ ID NO: 67780 - DNA, 75 bp, synthetic construct
  source 1..75: mol_type = other DNA
tgaaatacctggaagacgggtctgtttcctgtgaagtgttgtttgaagggcgggctgattatattccttatcgtg

SEQ ID NO: 67781 - DNA, 75 bp, synthetic construct
  source 1..75: mol_type = other DNA
tcgaatgattggcgagaaaaaaccgctcgctgacgtccaggcgcgcattgactggctgaaagccgcactgcgcga

SEQ ID NO: 67782 - DNA, 75 bp, synthetic construct
  source 1..75: mol_type = other DNA
gccgcaacagcaacctgctcagcaagagcagaaagacagcgacggtgtagccggttggattaaagatatgtttgg

SEQ ID NO: 67783 - DNA, 75 bp, synthetic construct
  source 1..75: mol_type = other DNA
atgaaggtgatactggcaacccggaaccgctatctggaatatggcctgcaggcgttactgaaggaacacagtgtg

SEQ ID NO: 67784 - DNA, 75 bp, synthetic construct
  source 1..75: mol_type = other DNA
taatggttgccctacctgatatcaatgaccgcattgataatattacaggatatatacttattgttgcaggtgtac

SEQ ID NO: 67785 - DNA, 75 bp, synthetic construct
  source 1..75: mol_type = other DNA
cgaggacaacttcagcgtaactatgtctggcgctttctggaactttgtaatgcaggactgtcagttgaggatatc

SEQ ID NO: 67786 - DNA, 75 bp, synthetic construct
  source 1..75: mol_type = other DNA
acatgaattaccgcgagcaccgtcattaacggcaaacctcggcgcgaaatatatgctgatgcccggactggaatt

SEQ ID NO: 67787 - DNA, 75 bp, synthetic construct
  source 1..75: mol_type = other DNA
ttgagaataacagtctttttattaacgttcctttcctttttatctgatttatgggcagttgatattccaatcaac

SEQ ID NO: 67788 - DNA, 75 bp, synthetic construct
  source 1..75: mol_type = other DNA
cgatggaaaagttgtgagctggtctctcagtacacgtcccgacgcagaactggttaacaccatgctggataacgc

SEQ ID NO: 67789 - DNA, 75 bp, synthetic construct
  source 1..75: mol_type = other DNA
tatctctattaaaaatcacttgggacagctaaatttattaaactcctcaaatataggaactttgcaaataaatac

SEQ ID NO: 67790 - DNA, 75 bp, synthetic construct
  source 1..75: mol_type = other DNA
tagaggctaagcctcgactacaaaaaataagagtacgcgttgccaattctattggtcagaaaagcatccagatga

SEQ ID NO: 67791 - DNA, 75 bp, synthetic construct
  source 1..75: mol_type = other DNA
cgccattatttcgttctttgatcaggtatttgatcagggactgaatcctgcggtgccttggagcgcctactggac

SEQ ID NO: 67792 - DNA, 75 bp, synthetic construct
  source 1..75: mol_type = other DNA
cactggcgctcatcctgttggggtacacggtggcaattccggccgtccaggctgaagggtacgaatactactcta

SEQ ID NO: 67793 - DNA, 75 bp, synthetic construct
  source 1..75: mol_type = other DNA
ataaagttgttaagtgcgcagagcataaaaaggctttagatgcaatatctctcaaacttaagaataacattattg

SEQ ID NO: 67794 - DNA, 75 bp, synthetic construct
  source 1..75: mol_type = other DNA
agaagcggtccagatatatgggggaatccgttctatcatcaatatctttgtgtcccagatggtaaaggggactat

SEQ ID NO: 67795 - DNA, 75 bp, synthetic construct
  source 1..75: mol_type = other DNA
aagagagcaaaatcctgttcacagattaaatgaagcattgccaagaaagataaaaggaccaaaaagtaagaaaaa

SEQ ID NO: 67796 - DNA, 75 bp, synthetic construct
  source 1..75: mol_type = other DNA
cccgtataccaaagaaagatactttgagtacgcccatgacggcaaactgatgggtcgactgctgataccctcaaa

SEQ ID NO: 67797 - DNA, 75 bp, synthetic construct
  source 1..75: mol_type = other DNA
ttttcaaaagaaaacacagactaccagtcaatcggatattgatttagccaaacgacgctataaagaacttgttca

SEQ ID NO: 67798 - DNA, 75 bp, synthetic construct
  source 1..75: mol_type = other DNA
agaactgactgacattcgcgacacactgaatacggcaattgataaggagttgtcccgtacaaccagtgatgcgct

SEQ ID NO: 67799 - DNA, 75 bp, synthetic construct
  source 1..75: mol_type = other DNA
ccggcgacggaatgcattctgagcagggactcgcccgggtgcgtatgctgaaaacggcgcatatgccagcctgtg

SEQ ID NO: 67800 - DNA, 75 bp, synthetic construct
  source 1..75: mol_type = other DNA
atgacaaaagagcagatgacggaacgccttcaggcgctggcagtgattctggggcgtgaagcagatatttcaggt

SEQ ID NO: 67801 - DNA, 75 bp, synthetic construct
  source 1..75: mol_type = other DNA
gaatgcagtggaagtatttgcctgccaaacgtagccatttacgcggcaggctaccggaaatcaaaacaactgacg

SEQ ID NO: 67802 - DNA, 75 bp, synthetic construct
  source 1..75: mol_type = other DNA
ggatgcaggcaccggaagtattcgggctgtgatattcgacctggaaggcaatcaaatagcagtgggacaggcgga

SEQ ID NO: 67803 - DNA, 75 bp, synthetic construct
  source 1..75: mol_type = other DNA
cagcatgctgcagatgcggccggaagagcagacactgagacggcatctggccagcgtctggtagcccacacaagc

SEQ ID NO: 67804 - DNA, 75 bp, synthetic construct
  source 1..75: mol_type = other DNA
gtacaggtgggcgatatttttgctgtggcactgaccgatattgcaaaaggcgaaattggggacggcatgactgaa

SEQ ID NO: 67805 - DNA, 75 bp, synthetic construct
  source 1..75: mol_type = other DNA
atttgatggattgttgcggtatcacttacaaccaggctgtgcaggctttacgcagcaacgactgggatctctggc

SEQ ID NO: 67806 - DNA, 75 bp, synthetic construct
  source 1..75: mol_type = other DNA
ttgaacagtatcccttacccattgccgaacagttgcgccactgggcggcccgttatgcctcgcgaattgccgtcg

SEQ ID NO: 67807 - DNA, 75 bp, synthetic construct
  source 1..75: mol_type = other DNA
ttctggtggagactggctaatgaaatgtatattaatggcaataaattacataagaaagcagccagaaagttaaac

SEQ ID NO: 67808 - DNA, 75 bp, synthetic construct
  source 1..75: mol_type = other DNA
atgttatgttacttaatagctattcactttgtcatcttcgggaattcaaaagctctattgagctactggatggct

SEQ ID NO: 67809 - DNA, 75 bp, synthetic construct
  source 1..75: mol_type = other DNA
gccctgcagcatgtcgggccagccctgtttagtgtgaagcatgaggcagcagactctgttcatgatccatcccgt

SEQ ID NO: 67810 - DNA, 75 bp, synthetic construct
  source 1..75: mol_type = other DNA
taaggttgaagaagaaagtgcgggaaccggtcgccgtgtggaaacacatgaatacccgaaccgcgacaagcccta

SEQ ID NO: 67811 - DNA, 75 bp, synthetic construct
  source 1..75: mol_type = other DNA
ggtctggcgcgagcggtgcaggacggcctgaagaaaggcaatgctaacgtggtgttctttgatggtatcaccgcc

SEQ ID NO: 67812 - DNA, 75 bp, synthetic construct
  source 1..75: mol_type = other DNA
tcgctgataaagactttgatgcatccgtccggggcgactaacggcatgcgggttatcgtttgggacatccgtttg

SEQ ID NO: 67813 - DNA, 75 bp, synthetic construct
  source 1..75: mol_type = other DNA
tcgcggattaaagaacctgaaacagtcagactgtatcttggattttacaaactcttattcggggattttagcccc

SEQ ID NO: 67814 - DNA, 75 bp, synthetic construct
  source 1..75: mol_type = other DNA
atcagctgatcctgcgcaccaccggcctggactccgaccaggggccgacggcggcgaaatatattcttgagaaag

SEQ ID NO: 67815 - DNA, 75 bp, synthetic construct
  source 1..75: mol_type = other DNA
ttgcaacagtgccgcgacatctgggtcaagggctcgcggcagttccgcgacttcgacgactacctgctgccggcc

SEQ ID NO: 67816 - DNA, 75 bp, synthetic construct
  source 1..75: mol_type = other DNA
ggtattacttcaataagaatatgaacgtatataccgcttatcagatcaacctgcttgataagagtgattatgttc

SEQ ID NO: 67817 - DNA, 75 bp, synthetic construct
  source 1..75: mol_type = other DNA
agtctggaaaccctaaaactgtcgaacaataccagctaacaaagaattttgatgttatctggttatggtccgaag

SEQ ID NO: 67818 - DNA, 75 bp, synthetic construct
  source 1..75: mol_type = other DNA
ggttgttttccagcccggagcgcgatattgctgccagtcacggaaaccccgtattcatataccatgttgatgatg

SEQ ID NO: 67819 - DNA, 75 bp, synthetic construct
  source 1..75: mol_type = other DNA
gttaagtggcgattatacattgattctggtcgatggacgacgtcagagtggtcgggaatccagaccaaacggcag

SEQ ID NO: 67820 - DNA, 75 bp, synthetic construct
  source 1..75: mol_type = other DNA
atggtaaccattgtctggaaagaatccaaaggtacggcaaaaagccgctacaaagctcgcagagcagaacttatt

SEQ ID NO: 67821 - DNA, 75 bp, synthetic construct
  source 1..75: mol_type = other DNA
gcccgccagcggtcgcccgttctccgtcattcgtaccctgagcggctaccagccggagcttgtcagccacaccgt

SEQ ID NO: 67822 - DNA, 75 bp, synthetic construct
  source 1..75: mol_type = other DNA
tattctcgacgtcgccagcgggaagaagaaaaccttctcggatcaatgggggctgcataaccagctggcggtgtt

SEQ ID NO: 67823 - DNA, 75 bp, synthetic construct
  source 1..75: mol_type = other DNA
ggctggggttgctggtaaaaaatgccgttctggatggtgaaacgataaagaccattgagcgtctttatcaccagt

SEQ ID NO: 67824 - DNA, 75 bp, synthetic construct
  source 1..75: mol_type = other DNA
atatgaagatatccgggctgccggaagtgatgaacgtcgtgagctgacacacgccgtgatgcgggaactggatgc

SEQ ID NO: 67825 - DNA, 75 bp, synthetic construct
  source 1..75: mol_type = other DNA
acggatgaagcgcttaccgagcgtctggaagagtggatctgcggcgaaggtgccagcgcgcagatcgacacgcag

SEQ ID NO: 67826 - DNA, 75 bp, synthetic construct
  source 1..75: mol_type = other DNA
gatttatataagagatgagtgtattgatgagcggaaattacgaggtgaatcacctgaaactgtaatagcaatttt

SEQ ID NO: 67827 - DNA, 75 bp, synthetic construct
  source 1..75: mol_type = other DNA
atgtagaattcgaatggattagtgatctagaagaacagggttgtttttcaaaagtatatctggctcatgacagac

SEQ ID NO: 67828 - DNA, 75 bp, synthetic construct
  source 1..75: mol_type = other DNA
caggggaaagcatggcccctgattgaaggcagtggcacgatttacggtatgtatgtgattgagggactgaatcag

SEQ ID NO: 67829 - DNA, 75 bp, synthetic construct
  source 1..75: mol_type = other DNA
gcctggcggatattgcacgggatctggagacgctcagcagggcagaaaacaataaggttctgcgcgatgccaccc

SEQ ID NO: 67830 - DNA, 75 bp, synthetic construct
  source 1..75: mol_type = other DNA
gccgggcagacgctgactgtcacgctcaataacaacacgtaccagactaccgtccaggccgatggcacctggagt

SEQ ID NO: 67831 - DNA, 75 bp, synthetic construct
  source 1..75: mol_type = other DNA
ttattacctgtagagataacgccggatgagcagaaagaatcggtggctcccattgcgccgtctttatccacttcc

SEQ ID NO: 67832 - DNA, 75 bp, synthetic construct
  source 1..75: mol_type = other DNA
atgtttctgaaaacagaacaatttgaatataacggtgtgtccgtcacgctttctgaactgtctgcgctgcagcgt

SEQ ID NO: 67833 - DNA, 75 bp, synthetic construct
  source 1..75: mol_type = other DNA
atactgttaccgtcactgatggtgcatataacacgactatttcactgggggcgggagatgatgtatttgattcca

SEQ ID NO: 67834 - DNA, 75 bp, synthetic construct
  source 1..75: mol_type = other DNA
cccggtaccgatgcagattgccaatcagcagagctacattgagagtgtgacgacggataccaccgccaatgtcgg

SEQ ID NO: 67835 - DNA, 75 bp, synthetic construct
  source 1..75: mol_type = other DNA
ggattagcgcccgtggagctgaccgctcagactaccgcaattgaaagcattgcgccgtatcttgataccgtcgct

SEQ ID NO: 67836 - DNA, 75 bp, synthetic construct
  source 1..75: mol_type = other DNA
ccgtaaccctgaccgtcaacgggaaaagccatacagcaaccgtcggtagcgacggaacctggcaagtgacgctgc

SEQ ID NO: 67837 - DNA, 75 bp, synthetic construct
  source 1..75: mol_type = other DNA
tgaccgtattgatgaactggataattttctgcctgaagacaaagctgccgcacgagattttctccttgaaatcaa

SEQ ID NO: 67838 - DNA, 75 bp, synthetic construct
  source 1..75: mol_type = other DNA
gctatcaacaccatcgctcaggacaacattgtcagcgcctcagaacataacgccgcgctggtagtgagcggcact

SEQ ID NO: 67839 - DNA, 75 bp, synthetic construct
  source 1..75: mol_type = other DNA
cgtggcacgtattatacgagcaaaaaaaccggcaatttttgtgctggaaaatgtcaaaaatctgaagagccatga

SEQ ID NO: 67840 - DNA, 75 bp, synthetic construct
  source 1..75: mol_type = other DNA
accgggtgctgacgggcgtggtggacggcttcgggcggacgctggcctttcaccgggcggcggagggtgatgtgg

SEQ ID NO: 67841 - DNA, 75 bp, synthetic construct
  source 1..75: mol_type = other DNA
gtttattaatgcgttacaccggaacaggaagcaatcagcaactttctttaaaggcgtacatggaaaggaactgga

SEQ ID NO: 67842 - DNA, 75 bp, synthetic construct
  source 1..75: mol_type = other DNA
acagcatgccgccagtgccgtttccggtggcggaactgccgggaacggggaaaaagaactgctgatgagtatgcc

SEQ ID NO: 67843 - DNA, 75 bp, synthetic construct
  source 1..75: mol_type = other DNA
aggagcaggttgcaagaattttcaacgaaatgtttgtccagttacaggctgcatttccaggcagcatcgctgcta

SEQ ID NO: 67844 - DNA, 75 bp, synthetic construct
  source 1..75: mol_type = other DNA
attgcatatgatgaaaataatgtcatatgcgacgtgcaaacggatgtaactgcaatttgcccggaaggaaaaagt

SEQ ID NO: 67845 - DNA, 75 bp, synthetic construct
  source 1..75: mol_type = other DNA
gtggcttattacagcattggtgatgttgctgaacgttgcgggattaatcctgtcactctccgggcctggcaacgc

SEQ ID NO: 67846 - DNA, 75 bp, synthetic construct
  source 1..75: mol_type = other DNA
acatgtcagcagagaggcttgttgatgcccttttcaaacagctgaaacaactgtttccggcggcagtggtaacca

SEQ ID NO: 67847 - DNA, 75 bp, synthetic construct
  source 1..75: mol_type = other DNA
atgccgatgaactgaaggatggtttgcaggcagaggtcacgttgccggcaggcacggcagaaggtgcggttatta

SEQ ID NO: 67848 - DNA, 75 bp, synthetic construct
  source 1..75: mol_type = other DNA
cgatcctgtttcactacaccaatcttgccgaagggatgacagagcggcgactggaaacggatatttatgtgccgt

SEQ ID NO: 67849 - DNA, 75 bp, synthetic construct
  source 1..75: mol_type = other DNA
ccgtaacctggccgccgggcaaaaaggtctttccgttgcgtttgaccttgccacccaccgtggctacgactccga

SEQ ID NO: 67850 - DNA, 75 bp, synthetic construct
  source 1..75: mol_type = other DNA
gttcaatagtcgccattttaggctatcaggcgggcagtaatggccaggttgtcgttgaaaagggcggtgagtggc

SEQ ID NO: 67851 - DNA, 75 bp, synthetic construct
  source 1..75: mol_type = other DNA
aaaaatctatccgttgtctggaagcggcgatggaccatgataaaaaaattatgctggtcgcgcagaaagaagctt

SEQ ID NO: 67852 - DNA, 75 bp, synthetic construct
  source 1..75: mol_type = other DNA
gcatctcgtggggaccggtaatctttttttgtgccttggtaaagcgttacgctatgttgcagttgcagcagctac

SEQ ID NO: 67853 - DNA, 75 bp, synthetic construct
  source 1..75: mol_type = other DNA
cgctgtccccgagccagaccaggtatggtgtggagatattacctatatctgggccggaaattgctggtgctatct

SEQ ID NO: 67854 - DNA, 75 bp, synthetic construct
  source 1..75: mol_type = other DNA
agccgttaccgtgccgggcggctgatgaaacatctgaatctgagcagttgtcagcccggaaaacatcagtacaaa

SEQ ID NO: 67855 - DNA, 75 bp, synthetic construct
  source 1..75: mol_type = other DNA
tctacaagggcgattaaaagaagttaattcttgggtgggcgaaaaaattatttcattcacccaatacactttaga

SEQ ID NO: 67856 - DNA, 75 bp, synthetic construct
  source 1..75: mol_type = other DNA
gatgtggcaaaggttcaggggcaactggcaggtatcagccaggtgttttgcgatccacacgtaggcgtttccctg

SEQ ID NO: 67857 - DNA, 75 bp, synthetic construct
  source 1..75: mol_type = other DNA
tctgtccgaaatttgtcacgtcacttgccggtttttccccgaaacagacacccgccattaataaagattccgtcc

SEQ ID NO: 67858 - DNA, 75 bp, synthetic construct
  source 1..75: mol_type = other DNA
tttgtgcttcgtgtgttgcgctgagtgcctgttctgcacaggaaattgcagagctgaacaggcagataagtgacg

SEQ ID NO: 67859 - DNA, 75 bp, synthetic construct
  source 1..75: mol_type = other DNA
gaggagctgaaggcgctgggtgttgagggtgacacgccggaagacaccctgcgcacgcttatcgggcgtctcaat

SEQ ID NO: 67860 - DNA, 75 bp, synthetic construct
  source 1..75: mol_type = other DNA
atctgttattcatcaggcaggggcagggtaaaagcgccagtggtaaaccactaccggttatcactatcacacgta

SEQ ID NO: 67861 - DNA, 75 bp, synthetic construct
  source 1..75: mol_type = other DNA
aaggcagcggagaaaacaaccgaccagacattgattcgaaagttaccagacggagaaatacgccgctacgacaga

SEQ ID NO: 67862 - DNA, 75 bp, synthetic construct
  source 1..75: mol_type = other DNA
aataattcagccatttatttcaatacctcccagcctataaatgatctgcagggttcgttggccgcagaggtgaaa

SEQ ID NO: 67863 - DNA, 75 bp, synthetic construct
  source 1..75: mol_type = other DNA
gaaaactggctgtgccactccctgtatctgccagagtcggaatccatgacgcgccgaagcgtcaacatggaaccg

SEQ ID NO: 67864 - DNA, 75 bp, synthetic construct
  source 1..75: mol_type = other DNA
tatcaccggtgacagcgcgacggtggataacaagggcaccatgaccgtcaccgatccggagtccatgggtatcca

SEQ ID NO: 67865 - DNA, 75 bp, synthetic construct
  source 1..75: mol_type = other DNA
aactcgaatgcggtgatgtgcttccccatgacatggtcgaatcctctgctgctgcatggcgggatgaaatgagca

SEQ ID NO: 67866 - DNA, 75 bp, synthetic construct
  source 1..75: mol_type = other DNA
aataacgaaggcgagagcaccatcaccaacggtggcaccggcacgcagattaacggtgatgacgccacggcaaac

SEQ ID NO: 67867 - DNA, 75 bp, synthetic construct
  source 1..75: mol_type = other DNA
acctgtccggcttcagaactggttgtcggcatgcagtgcggtggcagcgatgcgttttctggcgtaacggcaaac

SEQ ID NO: 67868 - DNA, 75 bp, synthetic construct
  source 1..75: mol_type = other DNA
ttgacggactggcgcgcaccttccgcgccgccgtgcatcacagttcaccaattgcggtgaaatgcaacattctga

SEQ ID NO: 67869 - DNA, 75 bp, synthetic construct
  source 1..75: mol_type = other DNA
gctcagccagcaggctttttcgcgttttgtgcaggactatttggtttttggtaacgcctacttggagaaacgcac

SEQ ID NO: 67870 - DNA, 75 bp, synthetic construct
  source 1..75: mol_type = other DNA
atgattttgaacaactccagtcactggctgaccgtcgactttatctcgctaaacaggccgggcgtaatcgggtat

SEQ ID NO: 67871 - DNA, 75 bp, synthetic construct
  source 1..75: mol_type = other DNA
gacacaaaggcggcataggaaaaagcaccgtgctttgttccttatgtgtatgtgtcataaagaaagggaaaacag

SEQ ID NO: 67872 - DNA, 75 bp, synthetic construct
  source 1..75: mol_type = other DNA
tgtacggggaaatgcgcgtggggtcgcgggtggcttctcaggagatcagcacggcagacgagggggacggtggtc

SEQ ID NO: 67873 - DNA, 75 bp, synthetic construct
  source 1..75: mol_type = other DNA
tggaatttttatcagtatccgttgaatccagttacgaatacagatcctctggggttagaagtttttcctagacca

SEQ ID NO: 67874 - DNA, 75 bp, synthetic construct
  source 1..75: mol_type = other DNA
atgattacaaaatcaaaggaagggcagttactaacggtggaggaaagggattatctccaggaaatcgtccgtatt

SEQ ID NO: 67875 - DNA, 75 bp, synthetic construct
  source 1..75: mol_type = other DNA
atgacagaagccgaaatactgcgattaatccgccgcgttaccggaatcagccagcaggctgacgaacaggccacg

SEQ ID NO: 67876 - DNA, 75 bp, synthetic construct
  source 1..75: mol_type = other DNA
aacgcataacacggttgcccttgaagggataagcgcagatggtgcaacgaagtggcaatataatcacaacggtga

SEQ ID NO: 67877 - DNA, 75 bp, synthetic construct
  source 1..75: mol_type = other DNA
acggccacgatgataacgatgtgaccgataaggtccgtaagacgccagaaaaggaaaccgatcctgataaattca

SEQ ID NO: 67878 - DNA, 75 bp, synthetic construct
  source 1..75: mol_type = other DNA
gcctgcgtcggttggcgaatttgttaattgacccagcgacactggaagattgggaggaaataccgccgttaaccg

SEQ ID NO: 67879 - DNA, 75 bp, synthetic construct
  source 1..75: mol_type = other DNA
gtaaggggctgtggctttaccatgttctggagccggaaacctgggccaggatgtgtgagcgggtgtcaggcgctg

SEQ ID NO: 67880 - DNA, 75 bp, synthetic construct
  source 1..75: mol_type = other DNA
ataggtggtatagatcgaccagataaggggagaatacttactgatcaaaccatttcatggccagtaggtttagct

SEQ ID NO: 67881 - DNA, 75 bp, synthetic construct
  source 1..75: mol_type = other DNA
ggtgatcccggcagacagaacatggcgaccacagccgttgctgaaaccgctggtcgacggcccgcagagcgctgt

SEQ ID NO: 67882 - DNA, 75 bp, synthetic construct
  source 1..75: mol_type = other DNA
gttacaaaaaagaatgatggaaataaataaattggtaagtgagaacattgttaaatttgatagttataaactagc

SEQ ID NO: 67883 - DNA, 75 bp, synthetic construct
  source 1..75: mol_type = other DNA
aatcatatcgtacacctaaaggaagacattatgtttttaaagatttaaatattgaattacccacaggaaaaagtg

SEQ ID NO: 67884 - DNA, 75 bp, synthetic construct
  source 1..75: mol_type = other DNA
ttctggaccgccgagaactgctggattatgtggaatgcgtacagatggaccgttggtatgagccgcccgtcagct

SEQ ID NO: 67885 - DNA, 75 bp, synthetic construct
  source 1..75: mol_type = other DNA
ggcagattgataaaagggccgctgagagaatcagcgccagtcagtcagccggaagcaaacccgaagatccgctca

SEQ ID NO: 67886 - DNA, 75 bp, synthetic construct
  source 1..75: mol_type = other DNA
tgtttttagcgaactatcccgcctgggcgaatggtcgtatccgaacccactggagaacatgcgaaaattcaccat

SEQ ID NO: 67887 - DNA, 75 bp, synthetic construct
  source 1..75: mol_type = other DNA
ggcatatgaaaccatttatagcggatataaaaaccgggcttccgagaacattcactttgttccactgatgcacga

SEQ ID NO: 67888 - DNA, 75 bp, synthetic construct
  source 1..75: mol_type = other DNA
caggagtacgcggaatagaccagttactggcgaatgcatcacaactgggcaaaggcttgggaaccaagctggttc

SEQ ID NO: 67889 - DNA, 75 bp, synthetic construct
  source 1..75: mol_type = other DNA
tgactgtgaaccgggaacaacagtacctcgaagctgttttcaatgagctgaagcgcttgggtgagtggagtctgc

SEQ ID NO: 67890 - DNA, 75 bp, synthetic construct
  source 1..75: mol_type = other DNA
ggataagacttctattgtgcttccacgcggtcagctaacacacgttctgcgtcatacgttcgcagcacactttat

SEQ ID NO: 67891 - DNA, 75 bp, synthetic construct
  source 1..75: mol_type = other DNA
gttcggtgaaatgcgcgtggggtcacgtgtggcatctcaggaaatcagtacagctgatgaaggtgatggtggtga

SEQ ID NO: 67892 - DNA, 75 bp, synthetic construct
  source 1..75: mol_type = other DNA
gagaagcaatcaatcttacccgctcacaggtcaccaagtaccgaatcacctttgtgagaacgaaggggaagaaaa

SEQ ID NO: 67893 - DNA, 75 bp, synthetic construct
  source 1..75: mol_type = other DNA
cttccccgacagatgacgatgagctgccggaagtcaccggacctgcgtggatagtcgacaatgtggcgcattatg

SEQ ID NO: 67894 - DNA, 75 bp, synthetic construct
  source 1..75: mol_type = other DNA
caattcacgcgcgttgttataaaaaacatatcaggtttatcaagtagttacagtataagaatatacgagttcctc

SEQ ID NO: 67895 - DNA, 75 bp, synthetic construct
  source 1..75: mol_type = other DNA
aatagcgttggtgcgcactgggaaggcaatcaggtctggttgatcctcgcaggtggggcattatttgccgcctgg

SEQ ID NO: 67896 - DNA, 75 bp, synthetic construct
  source 1..75: mol_type = other DNA
atggataacttgcgcttctcttctgcgccaacagcagattccattgatgcatcgatcgttcaacactacccggac

SEQ ID NO: 67897 - DNA, 75 bp, synthetic construct
  source 1..75: mol_type = other DNA
tgcccgtcttaatgagccgctggcaaatggtgccgtgatccacatcgttccgcgtctggagggggccaaaagtgg

SEQ ID NO: 67898 - DNA, 75 bp, synthetic construct
  source 1..75: mol_type = other DNA
atggcagaagagaaaaaaggcggggtgacagtttacataagcccagacatcgtggaggcgctcaaggaacgccac

SEQ ID NO: 67899 - DNA, 75 bp, synthetic construct
  source 1..75: mol_type = other DNA
ctgacagcaggtgatttcacaaaatatcgggaagccagattaaagggggaggtccaaaatgaagacggctcgttc

SEQ ID NO: 67900 - DNA, 75 bp, synthetic construct
  source 1..75: mol_type = other DNA
tctgaagcacaatacttggaaggtcgccagaatctactcaagctgatgcaggaaatcccggtaatgactccaact

SEQ ID NO: 67901 - DNA, 75 bp, synthetic construct
  source 1..75: mol_type = other DNA
aggggctggcacattaccttgaacatatgagtctgatggggtcgaaaaagtacccgcaggctgacagtctggccg

SEQ ID NO: 67902 - DNA, 75 bp, synthetic construct
  source 1..75: mol_type = other DNA
ctgtgatcccggctgctgttctgatgatgttcttcccgcaactggcgatggccgctggcagtagtggtcaggacc

SEQ ID NO: 67903 - DNA, 75 bp, synthetic construct
  source 1..75: mol_type = other DNA
tgccggaaaataaagcgcagctggttgaaatgaagctttccggtaatcaggatgaagctctgtaccgtgaactgc

SEQ ID NO: 67904 - DNA, 75 bp, synthetic construct
  source 1..75: mol_type = other DNA
cgtacagcatgaactggctggactgttttgagaatccggcgcttgcggctaaaatatacacaaagccgtttccgc

SEQ ID NO: 67905 - DNA, 75 bp, synthetic construct
  source 1..75: mol_type = other DNA
gcgaagttgatggcgacgatccggcagtattcagaccaatacaaaagttaattaacggaacgtggtacaacgtgt

SEQ ID NO: 67906 - DNA, 75 bp, synthetic construct
  source 1..75: mol_type = other DNA
ttctcgtgttgtcaggatttatcgtcggaaatgtctggagcgacagaggatggcaaaaaaaatgggcggaacgtg

SEQ ID NO: 67907 - DNA, 75 bp, synthetic construct
  source 1..75: mol_type = other DNA
gcccgtcttaatgagccgctggcaaatggtgccgtgatccatatcgtgccgcgtctggcgggagctaaaagtggc

SEQ ID NO: 67908 - DNA, 75 bp, synthetic construct
  source 1..75: mol_type = other DNA
agccagcggttttcttcaacgctttgaccctttaatgtttgttgtggatttcaaccgttctactgagctttttgt

SEQ ID NO: 67909 - DNA, 75 bp, synthetic construct
  source 1..75: mol_type = other DNA
atcaccaatatgcagctcgatgttgcagctgcaagacgatgtttcatggcccagttgggtaaacctttaacgtcc

SEQ ID NO: 67910 - DNA, 75 bp, synthetic construct
  source 1..75: mol_type = other DNA
tggctcaagggcgttgaccggacgctcttctatgcccttcaccgggcaaacaccacaaaaggcttcatcgaaggg

SEQ ID NO: 67911 - DNA, 75 bp, synthetic construct
  source 1..75: mol_type = other DNA
cggtgtgtcggtgccccatacccgattctgggctttgttactagctgtcgccatgacatctaccggcgtggccgc

SEQ ID NO: 67912 - DNA, 75 bp, synthetic construct
  source 1..75: mol_type = other DNA
gctggggtcattcggcgcatttgataacgaatggcatacgctgggcttccgttttgccggtaacaacagtattga

SEQ ID NO: 67913 - DNA, 75 bp, synthetic construct
  source 1..75: mol_type = other DNA
ctcccgcccctgttacgccactgatgccgctgccggacatcacgcaggagcgttttttacgtctgccggaagtga

SEQ ID NO: 67914 - DNA, 75 bp, synthetic construct
  source 1..75: mol_type = other DNA
gctgctggcggtcaggacctcatgcagtccgggaatgacaccgtcaaagccacctttggtaaggactccagtatt

SEQ ID NO: 67915 - DNA, 75 bp, synthetic construct
  source 1..75: mol_type = other DNA
atgcaagctgttttttcttccccgtctcccgcccctgttacgccactgatgccgctgccggacatcacgcaggag

SEQ ID NO: 67916 - DNA, 75 bp, synthetic construct
  source 1..75: mol_type = other DNA
ggctcgacgctggaaattgaatccggcagtaatgatccaatggcggtctttctgacgattaccctgattgcgatg

SEQ ID NO: 67917 - DNA, 75 bp, synthetic construct
  source 1..75: mol_type = other DNA
gagacgtcgatcatgtccacatgctgatcgaatacccaccaacagtgcagctttcggtactggttaactcactga

SEQ ID NO: 67918 - DNA, 75 bp, synthetic construct
  source 1..75: mol_type = other DNA
gtgaagtcgatggtgatgaccccgcagtattcagaccaatacaaaaatacatcaatggcacatggtataacgtcg

SEQ ID NO: 67919 - DNA, 75 bp, synthetic construct
  source 1..75: mol_type = other DNA
gcgctggtacaactgggtaacgtcgctgaattgtatattacctttttcgcgctgctgaaactgggcgttgcgccg

SEQ ID NO: 67920 - DNA, 75 bp, synthetic construct
  source 1..75: mol_type = other DNA
aaaagaggatgaccctcgtaatcaggttaattttctttatgagccatcggaaagaccatattgtcatcacgcctc

SEQ ID NO: 67921 - DNA, 75 bp, synthetic construct
  source 1..75: mol_type = other DNA
cggctgccacacctgttcagttacctgtaaaaacgtctggcccagccgtgaaggcgtggaatacgcgtggttcaa

SEQ ID NO: 67922 - DNA, 75 bp, synthetic construct
  source 1..75: mol_type = other DNA
gaaaaccggcaacatttttgtgctcgatcgtcgtaacggcgaactggtggttccggccccggaaaaaccggttcc

SEQ ID NO: 67923 - DNA, 75 bp, synthetic construct
  source 1..75: mol_type = other DNA
atggtggttcaggagatgaacaacagcccggagcggcagctggcgttccgcatctgggcaaaaaacatcatgaaa

SEQ ID NO: 67924 - DNA, 75 bp, synthetic construct
  source 1..75: mol_type = other DNA
ttcatatctgaaacgttatcaggacgtgaattactaccgctcatcaccgtgctttaacagtaatgttgaatgtac

SEQ ID NO: 67925 - DNA, 75 bp, synthetic construct
  source 1..75: mol_type = other DNA
atgaggagtcggggctgtactataaccggaaccggtactacgatccgttgcagggacgctatatcacccaggatc

SEQ ID NO: 67926 - DNA, 75 bp, synthetic construct
  source 1..75: mol_type = other DNA
tggctggcgtttgtgcattagcggttgtccgtacaaaaaaatctacttcaactggaaaagcggcaagtcagaaaa

SEQ ID NO: 67927 - DNA, 75 bp, synthetic construct
  source 1..75: mol_type = other DNA
atcttgccgaattacaaactcaggcaagcggcgcacaagggcaaatggaagctattcaggcggcaaaccagcttg

SEQ ID NO: 67928 - DNA, 75 bp, synthetic construct
  source 1..75: mol_type = other DNA
gtggctggattatctggacgcactggagctggtcgatacttccagtgcaccagatattgaatggcctactcctcc

SEQ ID NO: 67929 - DNA, 75 bp, synthetic construct
  source 1..75: mol_type = other DNA
attggtgcacgtccgtatatgggctttgatcaggtggcagagcaggagatcatggacgaaatcagaaaacgcttt

SEQ ID NO: 67930 - DNA, 75 bp, synthetic construct
  source 1..75: mol_type = other DNA
cgcccggctcttccatttgaacgcattacagagcttctcagccgtattgagagctatagaggaagacagctaacc

SEQ ID NO: 67931 - DNA, 75 bp, synthetic construct
  source 1..75: mol_type = other DNA
gccgctactgaaaccggtggtcgaacactttggtatcgatccggtacatttcggtatcatcatgatcttcaacct

SEQ ID NO: 67932 - DNA, 75 bp, synthetic construct
  source 1..75: mol_type = other DNA
attgcgctcactattggcgtcgtttttagcctcggttttggtatcctggcggataagttcgacaagaaacgctat

SEQ ID NO: 67933 - DNA, 75 bp, synthetic construct
  source 1..75: mol_type = other DNA
accaatgaagccggaccagaagaggttaaataaagaatatttagcctactacctgcgttcaaagccatttgtcga

SEQ ID NO: 67934 - DNA, 75 bp, synthetic construct
  source 1..75: mol_type = other DNA
ataaaattgaatcaattttttatagaaaagataagcatgaagatctttttgcttcaatttctaataaattaatcc

SEQ ID NO: 67935 - DNA, 75 bp, synthetic construct
  source 1..75: mol_type = other DNA
cgcgtggcgctggtcgatgccacgccgccggtggtaaccattaatccggtggcgaccgataacgtcatcaacacg

SEQ ID NO: 67936 - DNA, 75 bp, synthetic construct
  source 1..75: mol_type = other DNA
gctcacatttcaaatggttataaacatatttatatagcgattaattcgccagagatatttctgctggtttgtttt

SEQ ID NO: 67937 - DNA, 75 bp, synthetic construct
  source 1..75: mol_type = other DNA
attccatgttgatgagggccacccgcatatcattctggcggcaaatcccgatatcaatgaattccgtaaattaat

SEQ ID NO: 67938 - DNA, 75 bp, synthetic construct
  source 1..75: mol_type = other DNA
acgtccatttaaattacgcctcagcattatcactggcgatcgtcctgtactggttctgcgcattattcagctgga

SEQ ID NO: 67939 - DNA, 75 bp, synthetic construct
  source 1..75: mol_type = other DNA
atggctctcaccgatatcaaagttaggactaccaagccctccgacaaacctttcaaactcacagatgggcagggt

SEQ ID NO: 67940 - DNA, 75 bp, synthetic construct
  source 1..75: mol_type = other DNA
ctggaaaatatcgcgttcacccgctggctgacacacctgcagaacggtgtactgctggatgagcaaaactgcctg

SEQ ID NO: 67941 - DNA, 75 bp, synthetic construct
  source 1..75: mol_type = other DNA
acaggcgacccaggcacggcaaagcctgacgctggaagagctttatcagatgttccgcgatggcgcggacggcgt

SEQ ID NO: 67942 - DNA, 75 bp, synthetic construct
  source 1..75: mol_type = other DNA
agaaataaatggggaacgtttgctaagaaatttctcaaaatatctgaggcgatatctattagaatagctgatatt

SEQ ID NO: 67943 - DNA, 75 bp, synthetic construct
  source 1..75: mol_type = other DNA
ttgaagcgatgcattttaatattcctatttttgctttcgattgtgactttaatcgttacacaactaataatttag

SEQ ID NO: 67944 - DNA, 75 bp, synthetic construct
  source 1..75: mol_type = other DNA
atgccaaactggtgcgccaatcgtatgtatttttctgccgaaccggcacagattgctgagattaaacgactggcc

SEQ ID NO: 67945 - DNA, 75 bp, synthetic construct
  source 1..75: mol_type = other DNA
cgcgtgggaacaggacgtgaattattcagcgccttgcgtgaaaaactgtccggtgccgaacagggcgcaacctgt

SEQ ID NO: 67946 - DNA, 75 bp, synthetic construct
  source 1..75: mol_type = other DNA
gccacttggtgtattattggaccggtgtttcaaaattgcgttagttactgatggacgactctccggcgcttcagg

SEQ ID NO: 67947 - DNA, 75 bp, synthetic construct
  source 1..75: mol_type = other DNA
acattctgaccggggaaacccgcaacctgtccggcagtgttccggctgatggtggttatacggttatcccggaac

SEQ ID NO: 67948 - DNA, 75 bp, synthetic construct
  source 1..75: mol_type = other DNA
actgcgtgcaaaagccgattccctcgacacagaaatttcccgcctcgagtctgtggctgatgaagaacgtaacca

SEQ ID NO: 67949 - DNA, 75 bp, synthetic construct
  source 1..75: mol_type = other DNA
tgattacatctggcgcgatcgtttacaggctggtgatcctgattctctgctggggcttccggttgaatatctgga

SEQ ID NO: 67950 - DNA, 75 bp, synthetic construct
  source 1..75: mol_type = other DNA
actattaagtgataacgagcaatatgaaggaggtaaagctctctggcagcatatagcgcgtcgttcaacgaatct

SEQ ID NO: 67951 - DNA, 75 bp, synthetic construct
  source 1..75: mol_type = other DNA
tgatgctgttgaaaaaattcaggcgttgttaccagcgatcgaaaaggcaatgccacctttgctggtggcccgaat

SEQ ID NO: 67952 - DNA, 75 bp, synthetic construct
  source 1..75: mol_type = other DNA
acatgggggtttattttaaagaagaacccatccgtgaacttcatcgcgcgcttgaacgtctgaacttccagattg

SEQ ID NO: 67953 - DNA, 75 bp, synthetic construct
  source 1..75: mol_type = other DNA
gctactggatgaacaaaactgcctgatgctgcatgaactctggctgcagagcggtactggacagcgtcgctggga

SEQ ID NO: 67954 - DNA, 75 bp, synthetic construct
  source 1..75: mol_type = other DNA
ggcttcgatgatgatcttgccgcacagacaacgcaggccagctaccgtatccgcggccttctgacccagatacat

SEQ ID NO: 67955 - DNA, 75 bp, synthetic construct
  source 1..75: mol_type = other DNA
tgctgttcggcaagctcgcggaagtggcaggtgaatatctgcgcaagggcgcgcaggtctacatcgaggggcaac

SEQ ID NO: 67956 - DNA, 75 bp, synthetic construct
  source 1..75: mol_type = other DNA
aatatgctgaaaggcggaatttcaggtcgcagcgctaaaggaaaacgtatccatacccgtgccattcacagcatt

SEQ ID NO: 67957 - DNA, 75 bp, synthetic construct
  source 1..75: mol_type = other DNA
cgcacggtgccgtattctgcggagtccgtcagcgaactggctgagtccattaagggcgttggcctgctgcagaat

SEQ ID NO: 67958 - DNA, 75 bp, synthetic construct
  source 1..75: mol_type = other DNA
tcaccgcgccgccatgcttcaggctggaaactttcgggaaaataagggttcgtcaaccaataattttcggataat

SEQ ID NO: 67959 - DNA, 75 bp, synthetic construct
  source 1..75: mol_type = other DNA
caggtaatccaaaaactgttgaacaatatgaattgacgcgacaatttggtgttgtctggttgtattctgaagacg

SEQ ID NO: 67960 - DNA, 75 bp, synthetic construct
  source 1..75: mol_type = other DNA
atgagcaagaaatttacaaagactattctttcatctgctgttgccggtctgttgttggtgagtggtggggttgtt

SEQ ID NO: 67961 - DNA, 75 bp, synthetic construct
  source 1..75: mol_type = other DNA
gcgcaggtctacatcgaggggcaactccgtacccgtagctgggacgacaacggcatcacccgctacatcactgaa

SEQ ID NO: 67962 - DNA, 75 bp, synthetic construct
  source 1..75: mol_type = other DNA
tgaaactggttcagggaaaacaacattcatgaaaatgttgatacagtatatccctgtccatttacgcataacgac

SEQ ID NO: 67963 - DNA, 75 bp, synthetic construct
  source 1..75: mol_type = other DNA
aaaccacccgcaaagcaagccttaaatctgtaaaaacgcaggaaacagtcctgtctgccctgctggcgcagacgg

SEQ ID NO: 67964 - DNA, 75 bp, synthetic construct
  source 1..75: mol_type = other DNA
gaatggcacgtcactggacctgcaggccggactggaagcccgtgtccgggaaaatatcaccctgggcgttcaggc

SEQ ID NO: 67965 - DNA, 75 bp, synthetic construct
  source 1..75: mol_type = other DNA
attatcagcaacgtgagcgaaaaccgccaggtgaccgtcccggctgaactgctggcgtccctgattcagaccgcc

SEQ ID NO: 67966 - DNA, 75 bp, synthetic construct
  source 1..75: mol_type = other DNA
aacctaccgccgtgaaggttacgaatatgattgcgtgatgcctgtttatcagttccggcgtgatttttctctggt

SEQ ID NO: 67967 - DNA, 75 bp, synthetic construct
  source 1..75: mol_type = other DNA
accatcctcgaaagcctgcagtgtgaaggctttgagccgttctttgcctgccagacaaaggttcgcgaccagagc

SEQ ID NO: 67968 - DNA, 75 bp, synthetic construct
  source 1..75: mol_type = other DNA
cccactccaatagtttcacaaataggtttgcctgatgaaagattttttattttctatgatgatcttgattatgca

SEQ ID NO: 67969 - DNA, 75 bp, synthetic construct
  source 1..75: mol_type = other DNA
tggtgaaagagcggtccgggattctgctgcccggggaagtatcagaaaggcatttctggttattgattgaaatat

SEQ ID NO: 67970 - DNA, 75 bp, synthetic construct
  source 1..75: mol_type = other DNA
gcggtgtactgctggccgattccggggccgctgtcagtggtacccggagcgacggaacggcattccgtatcggag

SEQ ID NO: 67971 - DNA, 75 bp, synthetic construct
  source 1..75: mol_type = other DNA
atcttcaaaaaatattttgcaggaatcctaaaaccaaaacagtaaaagaagtgatttcaacagttatttctgata

SEQ ID NO: 67972 - DNA, 75 bp, synthetic construct
  source 1..75: mol_type = other DNA
agatgtccgccgtatgaatgacatttatttccgcccggcccatcgcaatcaatattttgaggagatgaaagcatg

SEQ ID NO: 67973 - DNA, 75 bp, synthetic construct
  source 1..75: mol_type = other DNA
tgagtctgctggcatccggcgaagacctggcatcacagggctggcgctattatcacaaaccggcgggcggagaca

SEQ ID NO: 67974 - DNA, 75 bp, synthetic construct
  source 1..75: mol_type = other DNA
ctgacaggcatatcaaaggcggcgacatatacgctgctgattgacagtgtgaaggtggaagtgaacaacgcggat

SEQ ID NO: 67975 - DNA, 75 bp, synthetic construct
  source 1..75: mol_type = other DNA
gcggtgctcctcgatctgatgctaccgaatgttgatggcctagagatttgccgccgtatccgtcaaatggcgggc

SEQ ID NO: 67976 - DNA, 75 bp, synthetic construct
  source 1..75: mol_type = other DNA
tgtttttccctctttgccagattaacgataaccactctgtcacaagtccatcacatacaaagaaaacaaaatcag

SEQ ID NO: 67977 - DNA, 75 bp, synthetic construct
  source 1..75: mol_type = other DNA
aatgaaaagattttatgatagtttaccatcaggaaaaatcacgaaagaaacggacaggaaaatacataaatattt

SEQ ID NO: 67978 - DNA, 75 bp, synthetic construct
  source 1..75: mol_type = other DNA
gggagcgaagacggtcacggtgtggtgttcccggctgaactggtggggctgctggacaggctggagggggaaatc

SEQ ID NO: 67979 - DNA, 75 bp, synthetic construct
  source 1..75: mol_type = other DNA
atgctgccgggttacttcaggttcgtctgccagaacgggtgcgtctgtggtcagtctctgggggaagtgcgtgtt

SEQ ID NO: 67980 - DNA, 75 bp, synthetic construct
  source 1..75: mol_type = other DNA
tcggtgatttgctgggctattcaccccgccacgttcagcgaatgctgaaactggcagaccttgcgcctgtcatcc

SEQ ID NO: 67981 - DNA, 75 bp, synthetic construct
  source 1..75: mol_type = other DNA
cgccgggaatacaccaaacacatgttgcgtctgcggcgggccggagagataaacggacaacatgtccctgaaatt

SEQ ID NO: 67982 - DNA, 75 bp, synthetic construct
  source 1..75: mol_type = other DNA
ccagttataagaaagacgccttcacaatactgaatcttgaaaaaagagtaaacatactatacggccaaaatggtt

SEQ ID NO: 67983 - DNA, 75 bp, synthetic construct
  source 1..75: mol_type = other DNA
atcgctataaacaacgtttttttagtgaatacctggaattaccaggactgacagaaatagctgttaatcgtccag

SEQ ID NO: 67984 - DNA, 75 bp, synthetic construct
  source 1..75: mol_type = other DNA
gctgacattctgacaccacgacgcagggaggattacggtaaagacctgtggagcgcatatcagaccatccaggag

SEQ ID NO: 67985 - DNA, 75 bp, synthetic construct
  source 1..75: mol_type = other DNA
ttctgacgctgcgggaagtgatcatgtcggatacgcagagcatcactgttacggataaggccaacatgcaggagg

SEQ ID NO: 67986 - DNA, 75 bp, synthetic construct
  source 1..75: mol_type = other DNA
ccagacccgcgtacgtgacccgggccgccggggatacacaaaacacatgctgcgcctgcgccgtaacggggagat

SEQ ID NO: 67987 - DNA, 75 bp, synthetic construct
  source 1..75: mol_type = other DNA
ggattgccagctttttgttctcactgattattggcgttactgctgacaaaataggctttaacccgctatttatcg

SEQ ID NO: 67988 - DNA, 75 bp, synthetic construct
  source 1..75: mol_type = other DNA
aagcgcgccagcgaggtcactatggagtgcgggtttgccggcggcgggtcggtactcgacctggtaaatctgtcc

SEQ ID NO: 67989 - DNA, 75 bp, synthetic construct
  source 1..75: mol_type = other DNA
cggcggggctgaatgctgacctgaaaacataccgtgtgacgctttccgtgacccgggaggaggcccggcatctgg

SEQ ID NO: 67990 - DNA, 75 bp, synthetic construct
  source 1..75: mol_type = other DNA
gcagtttgttgttgccgtttaacgccagcgcgggtcgaataacgatgagtaacccagatcaatcggtgatggaaa

SEQ ID NO: 67991 - DNA, 75 bp, synthetic construct
  source 1..75: mol_type = other DNA
gactgattaacggacggggcggcaatgccgcccctgtaaaggagacgagaacatgtactgttaaagaaattatcc

SEQ ID NO: 67992 - DNA, 75 bp, synthetic construct
  source 1..75: mol_type = other DNA
cagccaacaaaacgactgtcaccagtggtggtcttcagagagtgaaccccggtggaagtgtctcagacacggtta

SEQ ID NO: 67993 - DNA, 75 bp, synthetic construct
  source 1..75: mol_type = other DNA
cgatctaatcggttatgcgatgacaattgcgctcactattggcgtcgtttttagcctcggttttggtatcctggc

SEQ ID NO: 67994 - DNA, 75 bp, synthetic construct
  source 1..75: mol_type = other DNA
cctcaatcagttgaatatggcacgtatgaatctaattcaactgcggcagcaagtttgcctttagttagttggacc

SEQ ID NO: 67995 - DNA, 75 bp, synthetic construct
  source 1..75: mol_type = other DNA
tttcgtgctttacagggagctgctggcgcatccatgatccctttagttttcacgacggcgtttatttattaccag

SEQ ID NO: 67996 - DNA, 75 bp, synthetic construct
  source 1..75: mol_type = other DNA
tgctgaaaggcgggatttccggtcgcagtgccagaggaaaacgtatccatacccgtaccattcacagcatcgaca

SEQ ID NO: 67997 - DNA, 75 bp, synthetic construct
  source 1..75: mol_type = other DNA
gatctgctggcgcgggtgaaattaagtcacgataagctgaaagatttacgtgagcgcaaagccagtctggaagct

SEQ ID NO: 67998 - DNA, 75 bp, synthetic construct
  source 1..75: mol_type = other DNA
agcatcgacaccgatattaagctcaaccgcgcattgtgggtgatggcagaaacgctgctggagagcctgcgctga

SEQ ID NO: 67999 - DNA, 75 bp, synthetic construct
  source 1..75: mol_type = other DNA
aagtgtgaatggcattaacgtgtgttttgaaaaaaatgaaatgatagattggattaaaaaagaaatccctttgct

SEQ ID NO: 68000 - DNA, 75 bp, synthetic construct
  source 1..75: mol_type = other DNA
gataatcatctttcccggcgggctccggaagatattccttcacttgcggttcctgtgcttcttttactgaatgca

SEQ ID NO: 68001 - DNA, 75 bp, synthetic construct
  source 1..75: mol_type = other DNA
tatagctgattgcgaaatacaagctaaagatcatgattgttttactattttcgctaagggtactattttttccgc

SEQ ID NO: 68002 - DNA, 75 bp, synthetic construct
  source 1..75: mol_type = other DNA
gtttcccggcgaatgtcagttacaacgagtatcagtatgccattgtgcaggctcgcgctgccgggtttatcgaca

SEQ ID NO: 68003 - DNA, 75 bp, synthetic construct
  source 1..75: mol_type = other DNA
gaagctgaataatgccgttaactgggttcagcgtcgctgggatagatatacagccagtgtcgcccgctcgtccat

SEQ ID NO: 68004 - DNA, 75 bp, synthetic construct
  source 1..75: mol_type = other DNA
cgaactggtcagcatggtgcgcagcggtcagaaagtttacacctcgatggagatccgccctaacttcgccaacag

SEQ ID NO: 68005 - DNA, 75 bp, synthetic construct
  source 1..75: mol_type = other DNA
caggaagcgttgcagtatgcgaatcaggcgcaggtgacaaagccgcagattcagcagacacaggacgtgacccag

SEQ ID NO: 68006 - DNA, 75 bp, synthetic construct
  source 1..75: mol_type = other DNA
ggtggtgaacccatcaccccgcgtctgtttatcgggcgcatgttgctcggtggttttgtctcgatggttgccggt

SEQ ID NO: 68007 - DNA, 75 bp, synthetic construct
  source 1..75: mol_type = other DNA
tatttattttcaatttatcaggctgtggatataacgatattcaaacctatgatgagcaggttaacgcctcctggt

SEQ ID NO: 68008 - DNA, 75 bp, synthetic construct
  source 1..75: mol_type = other DNA
ggtgaagttcgctaacctcaccaccggcgaggtgcaatggcgaaaccgtccgccatcagtcagtatccgtggagc

SEQ ID NO: 68009 - DNA, 75 bp, synthetic construct
  source 1..75: mol_type = other DNA
cagaaggtgtatgacgctacggtgtcgtttgccttcaacgtgggaactagcaatgcctgcagttccacactggtg

SEQ ID NO: 68010 - DNA, 75 bp, synthetic construct
  source 1..75: mol_type = other DNA
gctagcaaccttgttcagtctatagttagcggtatcgctattgcatttatgatatctatttttgttaataggaga

SEQ ID NO: 68011 - DNA, 75 bp, synthetic construct
  source 1..75: mol_type = other DNA
caaatagcctcagtaaaagtgcagtatcttgataaacagaaaaagctggctgtaatgaacatcgaatataactaa

SEQ ID NO: 68012 - DNA, 75 bp, synthetic construct
  source 1..75: mol_type = other DNA
ctgatggcagaaaaagcccgtcttgcagccctgttaccggagggatgggcacgggatatgacgacgttcctgtca

SEQ ID NO: 68013 - DNA, 75 bp, synthetic construct
  source 1..75: mol_type = other DNA
gagaggtgcgggtaccacataaaggtaatgtcgttgagaaggtaattgaaggggcttacgaagttctcggggtat

SEQ ID NO: 68014 - DNA, 75 bp, synthetic construct
  source 1..75: mol_type = other DNA
aggcttttattgaagagcaaaaaaaatggttcgaacagcacctgtctgctgattttgcccaaacatggaatgatc

SEQ ID NO: 68015 - DNA, 75 bp, synthetic construct
  source 1..75: mol_type = other DNA
tggaaggcgctgaacatccacacaaggagaaccctggcggcaatcagcatcacgccagcgataataaaactggcg

SEQ ID NO: 68016 - DNA, 75 bp, synthetic construct
  source 1..75: mol_type = other DNA
agggtcatagaaggtgcttacgaagtggtgggcgtgtttgacctgattgaggaaaagcgtgatgccatgcagtcg

SEQ ID NO: 68017 - DNA, 75 bp, synthetic construct
  source 1..75: mol_type = other DNA
tgagctggaatttgaagacctgcctgaaaccgtgttcaccgccctgaccgaaaaggtgaagtccatttttggccg

SEQ ID NO: 68018 - DNA, 75 bp, synthetic construct
  source 1..75: mol_type = other DNA
tagcaacgataacaccgaccgattaccctttgccctttagtggttggtgggctttgttagtctgggcgatagtac

SEQ ID NO: 68019 - DNA, 75 bp, synthetic construct
  source 1..75: mol_type = other DNA
gtgaaggtgaaagtgctggaagtggatcttcagcgtaaacgtatcgccctgactatgcgtctggacgagcagcct

SEQ ID NO: 68020 - DNA, 75 bp, synthetic construct
  source 1..75: mol_type = other DNA
gtggtgatgcggatgggaaatgtcccgctggtgccttattaccgaccgggcgataaacgcatcgcacaggatctg

SEQ ID NO: 68021 - DNA, 75 bp, synthetic construct
  source 1..75: mol_type = other DNA
ccccttaactcgtgaagaactgatgcaggtcgtccccagcgtattcggggaagaaaaacacacatccagaagcga

SEQ ID NO: 68022 - DNA, 75 bp, synthetic construct
  source 1..75: mol_type = other DNA
cggccagtctcgtacgccgcgaccgcccactgacccgtgatgaactggcacactatgtgcccagcgtattcagtg

SEQ ID NO: 68023 - DNA, 75 bp, synthetic construct
  source 1..75: mol_type = other DNA
ccattcgtcgtctggtgaccgaaagtgaagtggcggtggcggggaacagtaaattccgcttcgtgggggctgatg

SEQ ID NO: 68024 - DNA, 75 bp, synthetic construct
  source 1..75: mol_type = other DNA
gaaccactgcgtacttatcatccgaaaatgtcacgccaggaagttcgcgagcgcgtgaaggcgatgatgctgaaa

SEQ ID NO: 68025 - DNA, 75 bp, synthetic construct
  source 1..75: mol_type = other DNA
acactgcttgataatctgcagcgggaaggcttccagccgttctttgcctgccagacccgcgttcgcgacctgaat

SEQ ID NO: 68026 - DNA, 75 bp, synthetic construct
  source 1..75: mol_type = other DNA
tgtagctgatcaaggcaaagatacagggatgttgacattatcactaacaggtgataatccgcttttaattgagcg

SEQ ID NO: 68027 - DNA, 75 bp, synthetic construct
  source 1..75: mol_type = other DNA
atggctatgtcagacgaggcgatgtttgccccgccgcaaggaataacaattgaagcggtaaacggaatgctcgcg

SEQ ID NO: 68028 - DNA, 75 bp, synthetic construct
  source 1..75: mol_type = other DNA
tgataacgccattgatttcatcttaaccgacccaccatatctcgtcggttttcgtgaccgttccgggcgcaccat

SEQ ID NO: 68029 - DNA, 75 bp, synthetic construct
  source 1..75: mol_type = other DNA
gatggttttctgaacggcacggtctgtacctgtacagtttacggagacacacaacgttttcactggcgggtggat

SEQ ID NO: 68030 - DNA, 75 bp, synthetic construct
  source 1..75: mol_type = other DNA
gggggtacaggggccgcggggtgaaaccggacccgtgggaccgcaaggagtgccgggtattcaggggcctgctgg

SEQ ID NO: 68031 - DNA, 75 bp, synthetic construct
  source 1..75: mol_type = other DNA
ttcttgccgtggctgaacatggcagcttcacccgtgccgccagtgcgttgcacgtctcccaacctgcgctttccc

SEQ ID NO: 68032 - DNA, 75 bp, synthetic construct
  source 1..75: mol_type = other DNA
tggcctgctcggtgtgtcccacaggggaagccacgccgaaatatggcaatccggtaaacccgctgctgggagcga

SEQ ID NO: 68033 - DNA, 75 bp, synthetic construct
  source 1..75: mol_type = other DNA
cattctcggtggccacaccccgcccggctgccgccgccgtatctggctgacccgcgaggtgtttatcggtgaagt

SEQ ID NO: 68034 - DNA, 75 bp, synthetic construct
  source 1..75: mol_type = other DNA
gctttaaaactcccgttttaaatgattttactggtgaatgttttaagcgtcagataaaagattttggtgatgagc

SEQ ID NO: 68035 - DNA, 75 bp, synthetic construct
  source 1..75: mol_type = other DNA
gttcagggttgtcggacttgcgccagttgccagcaagatctggagcttatccgcaaacaaagggggattaagtga

SEQ ID NO: 68036 - DNA, 75 bp, synthetic construct
  source 1..75: mol_type = other DNA
gccgggtccagcctgcacgccggcgtggcggccagggccgatgaacgcaagaagctcgaacggctgtgccggtac

SEQ ID NO: 68037 - DNA, 75 bp, synthetic construct
  source 1..75: mol_type = other DNA
gctcacccagctgacgcacaccatcgcccaccgggtgggtcgctatctggaacggcaaggcctgctggaacggga

SEQ ID NO: 68038 - DNA, 75 bp, synthetic construct
  source 1..75: mol_type = other DNA
catttttcccggcttgggcgacgttcctgtcaaagagatccgccccaaaatgctcaagcagcatctagacccaat

SEQ ID NO: 68039 - DNA, 75 bp, synthetic construct
  source 1..75: mol_type = other DNA
tggtcgtagccacttcaggccccaccatcgacggtcgggaaattgatccaaagtggctgacggatgccgccgagg

SEQ ID NO: 68040 - DNA, 75 bp, synthetic construct
  source 1..75: mol_type = other DNA
ggagcgtgatgaagtaaccggtcgtttgcggcaatggggcagtattgaggtaagtgaggatgatggtaagcttat

SEQ ID NO: 68041 - DNA, 75 bp, synthetic construct
  source 1..75: mol_type = other DNA
tccggatggcgtgccttcaccaataactacggccttgttgatgccctgaaagtcgaaaaatttggtgacaaggtg

SEQ ID NO: 68042 - DNA, 75 bp, synthetic construct
  source 1..75: mol_type = other DNA
gctatcgccacgaatgcgcctacatcctggcaaaaggtcgtccacatctgccacaaaacccgctacccgacgtgc

SEQ ID NO: 68043 - DNA, 75 bp, synthetic construct
  source 1..75: mol_type = other DNA
ccctgatatggctgtgctggtatgatctgatgtgcgcccactccatgcagccctggactgaagagttaaagcata

SEQ ID NO: 68044 - DNA, 75 bp, synthetic construct
  source 1..75: mol_type = other DNA
atgtccgaaaaacctttaacgaaaaccgattatttaatgcgtttacgtcgttgccagacaattgacacgctggag

SEQ ID NO: 68045 - DNA, 75 bp, synthetic construct
  source 1..75: mol_type = other DNA
cttatcggtatcggtgtacttggtgaatatataggaagaatttatgtggaagtaaaatgcagaccacgatatatt

SEQ ID NO: 68046 - DNA, 75 bp, synthetic construct
  source 1..75: mol_type = other DNA
atgacgcgtccggtgcagcgcccggtggaaattacccagtgggatcaggtgctggatatgctggaggcgcatagc

SEQ ID NO: 68047 - DNA, 75 bp, synthetic construct
  source 1..75: mol_type = other DNA
caaggggctaggaaatacctggatcagatgaaagatgttagggaacgtgccgcaaaatcctatagtgaagctgaa

SEQ ID NO: 68048 - DNA, 75 bp, synthetic construct
  source 1..75: mol_type = other DNA
ccagaggattgtatgcaagtggtgctgtcagttacatcgaagtgctggatgcagaacgttccctcttcgctaccc

SEQ ID NO: 68049 - DNA, 75 bp, synthetic construct
  source 1..75: mol_type = other DNA
aaactttacttgacctgaattatgcccgtcaggttaacgaaatttctttatataccgccttagggggcggttggc

SEQ ID NO: 68050 - DNA, 75 bp, synthetic construct
  source 1..75: mol_type = other DNA
gaaactggtggaatcgctggcgctgtcgatttttaaggccaacggggtggatttgcataccgccacctactatac

SEQ ID NO: 68051 - DNA, 75 bp, synthetic construct
  source 1..75: mol_type = other DNA
tcacgtacaccagatggctgaacactacggtgttccggtgatcctgcatactgaccactgcgcgaagaaactgct

SEQ ID NO: 68052 - DNA, 75 bp, synthetic construct
  source 1..75: mol_type = other DNA
ccgggggaactgaagtcgctcgggattgagggggataccccggctgatacgctgcggacgctgattggcaccatg

SEQ ID NO: 68053 - DNA, 75 bp, synthetic construct
  source 1..75: mol_type = other DNA
ccagccttgctgccaacgggatgccggcggatatcaatgccctggagccaacgctcgctctggcgcaaacctgcg

SEQ ID NO: 68054 - DNA, 75 bp, synthetic construct
  source 1..75: mol_type = other DNA
tgtgagtattttcaggggaaaccatatatccgtctgtccggcggaacaggtcagctttccggtgcgcctgataat

SEQ ID NO: 68055 - DNA, 75 bp, synthetic construct
  source 1..75: mol_type = other DNA
caacccgggaacgccaccgttcattcctgccattcaggaagggttaatgaccagcattcagacccatgaaatcat

SEQ ID NO: 68056 - DNA, 75 bp, synthetic construct
  source 1..75: mol_type = other DNA
cccggcgagcgcacgattttgtgtatctcgcacagccacaacacctttgataaagactttattctcggggccagc

SEQ ID NO: 68057 - DNA, 75 bp, synthetic construct
  source 1..75: mol_type = other DNA
acagaatcgccggctggaagaggcacccggcaagctcttcgaactgccggaagtcctggcaaccgcgggaagcca

SEQ ID NO: 68058 - DNA, 75 bp, synthetic construct
  source 1..75: mol_type = other DNA
cggcttcgggcggacgctggcctttcaccgggcagctaagggtgacgtggcgggcgcggtgacgggggtgacgga

SEQ ID NO: 68059 - DNA, 75 bp, synthetic construct
  source 1..75: mol_type = other DNA
ccacaatggactcacctgtgaagccgatacactaggctcctgtggttatgtctacattgctatctatcctgagca

SEQ ID NO: 68060 - DNA, 75 bp, synthetic construct
  source 1..75: mol_type = other DNA
aacaagattatgaggccgcactgcgtgcggtcgaaccgatgttcgataacgaaccggaaatgaacaccccggaag

SEQ ID NO: 68061 - DNA, 75 bp, synthetic construct
  source 1..75: mol_type = other DNA
tccgcttgagaagtattacccgcctgatacaaccgctgccatcttctggcttaagaaccgacagaaggataaatg

SEQ ID NO: 68062 - DNA, 75 bp, synthetic construct
  source 1..75: mol_type = other DNA
gcttcacacatccgaacgcgattgtgctggacccgtttgcaggcagcggctcaacctgcgtggccgcccttcagt

SEQ ID NO: 68063 - DNA, 75 bp, synthetic construct
  source 1..75: mol_type = other DNA
atggacgatggggagaatgatctcatttaacacatcttcgccttacgccaacgctaatggaagattaagaaagtg

SEQ ID NO: 68064 - DNA, 75 bp, synthetic construct
  source 1..75: mol_type = other DNA
gttacatgacaaaccatcacgacagcagcgggaacataaaggccgaatatcggtgaaggaaagcgaccagcgttg

SEQ ID NO: 68065 - DNA, 75 bp, synthetic construct
  source 1..75: mol_type = other DNA
gctcactgcttgccggtgaggaaaacgcaaggctgcgtgcaacccactggttacatgagaggggcctgaaagcat

SEQ ID NO: 68066 - DNA, 75 bp, synthetic construct
  source 1..75: mol_type = other DNA
aaataatcagacaccaaaaaaacaaagaccccgcatatccctttcaggagcatttgttgatgcaactctgtattc

SEQ ID NO: 68067 - DNA, 75 bp, synthetic construct
  source 1..75: mol_type = other DNA
ctatatcttgatgcagatattgcttgcaagggtagtattaaagaactcttagattatcaattttctactaatgaa

SEQ ID NO: 68068 - DNA, 75 bp, synthetic construct
  source 1..75: mol_type = other DNA
gtccggtggccatcacgccttataccctgatgcaggccattgcggcggaaggtgatgtcaccacacctgtggtgg

SEQ ID NO: 68069 - DNA, 75 bp, synthetic construct
  source 1..75: mol_type = other DNA
ggcgtaccgggctgaactgggtaaaaacacactccagcaccactacaccacggaagcgaacatgctggcgcgtat

SEQ ID NO: 68070 - DNA, 75 bp, synthetic construct
  source 1..75: mol_type = other DNA
atcactgaacagcgtgcggaagtacgtatttttgccggtaatgatccggctcataccgccacaggcagcagcggg

SEQ ID NO: 68071 - DNA, 75 bp, synthetic construct
  source 1..75: mol_type = other DNA
gaaatgaaagaaactattcttgatcgcgcggcgcatctaagctgcgcttcacggttgaaagagcatcttcagcgg

SEQ ID NO: 68072 - DNA, 75 bp, synthetic construct
  source 1..75: mol_type = other DNA
atatcaccctgggcgttcaggccggttatgcccacagcgtcagcggcagcagcgctgaaggttataacggtcagg

SEQ ID NO: 68073 - DNA, 75 bp, synthetic construct
  source 1..75: mol_type = other DNA
ccaagcgattcaatatctggtgtcagggggctacgccgtggatgggtaacggtgcatgggcggagtgcgccggaa

SEQ ID NO: 68074 - DNA, 75 bp, synthetic construct
  source 1..75: mol_type = other DNA
atttcagctcatgggcgcgtcgtggcattattcccgatcgtatggcaactgctattctgaacgtagccgggcgca

SEQ ID NO: 68075 - DNA, 75 bp, synthetic construct
  source 1..75: mol_type = other DNA
ggctggatacgcacaacgcctggcgactgcattgattacgaccggatcagagatgacatcatgcaggacgcggag

SEQ ID NO: 68076 - DNA, 75 bp, synthetic construct
  source 1..75: mol_type = other DNA
atcgttgctctctgcatgcaccagagaaaattcattaaaggagaatcaaaataaaagaagtggcgaatcccaagc

SEQ ID NO: 68077 - DNA, 75 bp, synthetic construct
  source 1..75: mol_type = other DNA
atggctaaatcagcagcagagcgcaaagccgctcagagagccagacaagctgcatctggtgtgcgtaagctggaa

SEQ ID NO: 68078 - DNA, 75 bp, synthetic construct
  source 1..75: mol_type = other DNA
ccggcaaagactatctgttaagtgtcggaatggcgaaagaactggcaatgatcgaacgcaatgatcagggtcgcg

SEQ ID NO: 68079 - DNA, 75 bp, synthetic construct
  source 1..75: mol_type = other DNA
ggttttcgcggtagatacctatcactttgacaaacacacgaatagttacaaggtcgatcatccgaagtaccaaga

SEQ ID NO: 68080 - DNA, 75 bp, synthetic construct
  source 1..75: mol_type = other DNA
ggccagccaggattcggcgcgctggggggtgggtaaaccgttatatcaggacctgattgcgcgcactaaagctgc

SEQ ID NO: 68081 - DNA, 75 bp, synthetic construct
  source 1..75: mol_type = other DNA
atgagtgtttctgtaacacgcacctttgttcgcagcgaagtcatcaatgccggacggcagttgttgatgatttgt

SEQ ID NO: 68082 - DNA, 75 bp, synthetic construct
  source 1..75: mol_type = other DNA
atgaaaaatatcgtattagcatctttgctgggctttggtttaatttcatcggcctgggccactgaaaccgtgaat

SEQ ID NO: 68083 - DNA, 75 bp, synthetic construct
  source 1..75: mol_type = other DNA
accaatgtaaccttctaccaggttctttctgttcacggtaaaaaaaccgtcaccgttcgcgagattcgcgccaat

SEQ ID NO: 68084 - DNA, 75 bp, synthetic construct
  source 1..75: mol_type = other DNA
agacggtaacggcgtcaataccgccactaacgcaccggcagaagatccggatattccggcatcaggatattacgg

SEQ ID NO: 68085 - DNA, 75 bp, synthetic construct
  source 1..75: mol_type = other DNA
gcattggcaatgtgtaatggagaatcaattaacgagaataaagaatatggtggactaatatgtaagaagcaaggt

SEQ ID NO: 68086 - DNA, 75 bp, synthetic construct
  source 1..75: mol_type = other DNA
agcgtgcggaagtacgtatttttgccggtaatgatccggctcataccgccacaggcagcagcgggatttcctcgc

SEQ ID NO: 68087 - DNA, 75 bp, synthetic construct
  source 1..75: mol_type = other DNA
atgaaatctttcgctatgctgccacggaagagcttatagagttcaatcctgccgacaatctcgctcagcgtttca

SEQ ID NO: 68088 - DNA, 75 bp, synthetic construct
  source 1..75: mol_type = other DNA
tgataacgccattgatctcatacttaccgacccgccttacctggtggggttccgtgaccgttcagggcgtaccat

SEQ ID NO: 68089 - DNA, 75 bp, synthetic construct
  source 1..75: mol_type = other DNA
gctgttctgactcatgcagggcgaaccacagtaaaagccgatgttccatcttctgaaactgaagcaccagtgccg

SEQ ID NO: 68090 - DNA, 75 bp, synthetic construct
  source 1..75: mol_type = other DNA
gacggtacacggagaggcacataacacccgactggaggggggtaaccagtatgtacacaacggtggcacggcaac

SEQ ID NO: 68091 - DNA, 75 bp, synthetic construct
  source 1..75: mol_type = other DNA
tgtaacatcccgggctgaactggttattatatatggtgataaatatgctgctgtttattaccgcgagggtgaacg

SEQ ID NO: 68092 - DNA, 75 bp, synthetic construct
  source 1..75: mol_type = other DNA
tttgttagtcctgtgtacatcttctttgtttaaaaaagaagtaaaatcagaagtgtctttgtggaagtggggggc

SEQ ID NO: 68093 - DNA, 75 bp, synthetic construct
  source 1..75: mol_type = other DNA
aacttatccgcagcgaggatgagggtctggtcacccactggcactatgacgaagcagaccgcctcacgcaccgca

SEQ ID NO: 68094 - DNA, 75 bp, synthetic construct
  source 1..75: mol_type = other DNA
agtaaatggtggttacgatttttcacaccttagcctgaaaggtatcgtgattaaagatgaagatttatccaattc

SEQ ID NO: 68095 - DNA, 75 bp, synthetic construct
  source 1..75: mol_type = other DNA
ttcagcaagctcgaaaaatctgtaagcaaggctgtgacctcaaacgagacgaaaatcaaagacgctatagccctg

SEQ ID NO: 68096 - DNA, 75 bp, synthetic construct
  source 1..75: mol_type = other DNA
tgagcgagcaggatggctacctggcagaatcgatcaataaagatatcgaagagtgcaacgccatcattgagcagt

SEQ ID NO: 68097 - DNA, 75 bp, synthetic construct
  source 1..75: mol_type = other DNA
caatctcgctggtgatctggaccactacgccgtggactctgcctgcgaaccgcgcaatctctattgcacctgatt

SEQ ID NO: 68098 - DNA, 75 bp, synthetic construct
  source 1..75: mol_type = other DNA
actttgcctatcagtgagttctacacgaaagagtgtcaaaaaaatgaactcaacattcagcgtaaaattgagaat

SEQ ID NO: 68099 - DNA, 75 bp, synthetic construct
  source 1..75: mol_type = other DNA
aagaagtgatcacccgaacagtgaaagttaccaacgtgggcaaaccctccgtggcggaagaacgcagcgaaatta

SEQ ID NO: 68100 - DNA, 75 bp, synthetic construct
  source 1..75: mol_type = other DNA
tcccggatgaaattggcagtttctacaactttaatggcaatttcccacaaaccgactggtcaccacagagcctgg

SEQ ID NO: 68101 - DNA, 75 bp, synthetic construct
  source 1..75: mol_type = other DNA
ggcgcgaggacaaatcgaaagtacccgcgccgaaatagccaaacgagaaggcgatctggctcaggcaaacaatgc

SEQ ID NO: 68102 - DNA, 75 bp, synthetic construct
  source 1..75: mol_type = other DNA
gtatacctactgccttgagtgagttatttaaaaatgctcatgatgcctatgctgataatgtcgaagttgattttt

SEQ ID NO: 68103 - DNA, 75 bp, synthetic construct
  source 1..75: mol_type = other DNA
cgaaattactgcgtttccttaatgatggcactttccgtcgggttggcgaagaccatgaggtgcatgtcgatgtgc

SEQ ID NO: 68104 - DNA, 75 bp, synthetic construct
  source 1..75: mol_type = other DNA
gcttatgcaaacccgttgtcagacgatggctggcagcgactggctaaggtgaaggatctgacgccgggcgagatg

SEQ ID NO: 68105 - DNA, 75 bp, synthetic construct
  source 1..75: mol_type = other DNA
tgatcatgcttaatgcgctgtcgaaacggatctaccaacgttacccgcaggcgaccatcaaattacgtaactggg

SEQ ID NO: 68106 - DNA, 75 bp, synthetic construct
  source 1..75: mol_type = other DNA
tcgcagaggctggtatggcagccagagaggccggtcatgctgttcgtgagatggagcggtggatggtgccgaaca

SEQ ID NO: 68107 - DNA, 75 bp, synthetic construct
  source 1..75: mol_type = other DNA
aaggacgattggcgcaactgcgactcttggcgtatcaatggggcttgaggctggtttcggtgcaatgatgcgctt

SEQ ID NO: 68108 - DNA, 75 bp, synthetic construct
  source 1..75: mol_type = other DNA
aggtgttgcggccggtaaagcgcagatccctgttgtcaccggcaatggtgagtttgcggcggtggcggagatcac

SEQ ID NO: 68109 - DNA, 75 bp, synthetic construct
  source 1..75: mol_type = other DNA
gcatcgattttcgagatctgatttttgtggcaaacaacgatccggttacagattcttttatggtggcaaaagcat

SEQ ID NO: 68110 - DNA, 75 bp, synthetic construct
  source 1..75: mol_type = other DNA
aacgcgactttttcgccgcctgccgtgcccttcaccaggatgaaaccgacccggaactgatgtttcaggattatg

SEQ ID NO: 68111 - DNA, 75 bp, synthetic construct
  source 1..75: mol_type = other DNA
acggcagaatcctacgatgataactatctggatgatgaggatgctgactgggtatccaccgggcaggggcagaaa

SEQ ID NO: 68112 - DNA, 75 bp, synthetic construct
  source 1..75: mol_type = other DNA
gccactttcgctatggttggttactacatggctgccgaaattgagaagttgcgtgttgagctggagaccgttaaa

SEQ ID NO: 68113 - DNA, 75 bp, synthetic construct
  source 1..75: mol_type = other DNA
gaagagagaaatgccgtaatgctggagtacatgaaagagaaggatgttgccagcatgtcaggtcgcctgcttaat

SEQ ID NO: 68114 - DNA, 75 bp, synthetic construct
  source 1..75: mol_type = other DNA
tcagcaaattcaggatgaaaaggataaatggattgatgatcgggcgcaggagcttatcagcatgttccccgataa

SEQ ID NO: 68115 - DNA, 75 bp, synthetic construct
  source 1..75: mol_type = other DNA
gagacaaagtgttaattatttgccgactttctgcaacgcgatatttggcggaaaacaatccctggccccaaatat

SEQ ID NO: 68116 - DNA, 75 bp, synthetic construct
  source 1..75: mol_type = other DNA
cgcataaccctgcattcgccgcaatggggcgagattgaacgcatctggttgttacgcgggccgcaattatcatga

SEQ ID NO: 68117 - DNA, 75 bp, synthetic construct
  source 1..75: mol_type = other DNA
ggtaaactggtgccgcaggacccgaacgatgaaccggcgtcggagctgctgaagcgtattgcggcagaaaaagca

SEQ ID NO: 68118 - DNA, 75 bp, synthetic construct
  source 1..75: mol_type = other DNA
aaatggatatgcatttaagagtagcgagtttcagaattctggagttggtatagtcaaaataggtgatatcgacag

SEQ ID NO: 68119 - DNA, 75 bp, synthetic construct
  source 1..75: mol_type = other DNA
cgttactggaaatgctggtggcaattgccatttttgcctcgctggcactgatggcgcagcaggtgactaacggcg

SEQ ID NO: 68120 - DNA, 75 bp, synthetic construct
  source 1..75: mol_type = other DNA
aaggatgatgttaattagacctaaggaaaatatttcttccgagtatcttgagtttgtattaaatagccctttaat

SEQ ID NO: 68121 - DNA, 75 bp, synthetic construct
  source 1..75: mol_type = other DNA
ccggtttatccccgctggcgcggggaacacttcagcaatctgaaaccagttggctcgctgttcggtttatccccg

SEQ ID NO: 68122 - DNA, 75 bp, synthetic construct
  source 1..75: mol_type = other DNA
ggaattccagccactgcgcactatggctcgcgcaggcattcaaccgatcccgggacgcctcgcattcttcccgaa

SEQ ID NO: 68123 - DNA, 75 bp, synthetic construct
  source 1..75: mol_type = other DNA
tgccactcatatctactaaatttgatggctcgcatgaatttgaaataaaaaaatggaaagatgttaaaaaaggtt

SEQ ID NO: 68124 - DNA, 75 bp, synthetic construct
  source 1..75: mol_type = other DNA
ggtaaactggtgccgcaagacccgaacgatgaaccggcgtcggagctgctgaagcgtattgcggcggaaaaagca

SEQ ID NO: 68125 - DNA, 75 bp, synthetic construct
  source 1..75: mol_type = other DNA
atggcaaactaccaactgaatgaacaattactggagggatgcaggccctggattgttatttttgatgacgttctt

SEQ ID NO: 68126 - DNA, 75 bp, synthetic construct
  source 1..75: mol_type = other DNA
tagctaaatttgatttttcctggtttatcccctctgttgtgaaatacaggaggattttacttgaggtgttaactg

SEQ ID NO: 68127 - DNA, 75 bp, synthetic construct
  source 1..75: mol_type = other DNA
caacagatgattcaggtcttcaggtcagtggtgacaattctgtcacggtgctggcagaagtgcgttgcagtcgtt

SEQ ID NO: 68128 - DNA, 75 bp, synthetic construct
  source 1..75: mol_type = other DNA
ctacaaccaggaaaccaatggccaaactatatatggcatgatgatataggtgatattgtaccgtttcctctaccc

SEQ ID NO: 68129 - DNA, 75 bp, synthetic construct
  source 1..75: mol_type = other DNA
gcaaactggcaaaacgtctcggcgtttcacataccgcgattgccaataagttgcgggaatatggcttaagccaga

SEQ ID NO: 68130 - DNA, 75 bp, synthetic construct
  source 1..75: mol_type = other DNA
tcaatctgtcaatgcaacacccctttcaattatctctttcggtgttttgaacttcagtgtctttctcggtctgtt

SEQ ID NO: 68131 - DNA, 75 bp, synthetic construct
  source 1..75: mol_type = other DNA
cagttagttaccatgtgccgctgtgtggtgtgtttatctgcgatgaaactctccgtgatggaatcatcatcaacg

SEQ ID NO: 68132 - DNA, 75 bp, synthetic construct
  source 1..75: mol_type = other DNA
tggaagtggacggcctgccaccggatgcttttgcggtggtttcctttcatctgaaccagtcactctcttcgcttt

SEQ ID NO: 68133 - DNA, 75 bp, synthetic construct
  source 1..75: mol_type = other DNA
gggatgcggttgccaaatggcgtaaaggctggaacccaccggttactactgccgtcagacttccttcagtgtccc

SEQ ID NO: 68134 - DNA, 75 bp, synthetic construct
  source 1..75: mol_type = other DNA
tgagtggcagtggattaagtaacaacctcctttgccgttgtgctttttcgcgctgtcgctcaagtatggataatg

SEQ ID NO: 68135 - DNA, 75 bp, synthetic construct
  source 1..75: mol_type = other DNA
aaaaactccaggctgtcgcagagttccttcgggaagccgaaggctgggaatggtgcgccggacgcatggagcctg

SEQ ID NO: 68136 - DNA, 75 bp, synthetic construct
  source 1..75: mol_type = other DNA
aattacaggcgctgtttgcccgggtggcagaagagaagcatcagcggggtgaactggaaaagccccaccaccagc

SEQ ID NO: 68137 - DNA, 75 bp, synthetic construct
  source 1..75: mol_type = other DNA
tcaccacatcgccaataccattattgagcaccgtcacgatgaagcctggctgcgccagcacattcacaatgacgc

SEQ ID NO: 68138 - DNA, 75 bp, synthetic construct
  source 1..75: mol_type = other DNA
ggtgccgcaggcgctgccaccggcgagatggtgggaatgattgccacacagatgtacgataaaccggtgagtgaa

SEQ ID NO: 68139 - DNA, 75 bp, synthetic construct
  source 1..75: mol_type = other DNA
ttcttgaacgtatccgcagactggccccgccacatgtaaccgccccattcagaacggtagcggagtggcgagagt

SEQ ID NO: 68140 - DNA, 75 bp, synthetic construct
  source 1..75: mol_type = other DNA
tccggtcgcgccggtacatcactgtcctcccgcacaggatatccacacaggcaacgtatctgccgtgtcacgccg

SEQ ID NO: 68141 - DNA, 75 bp, synthetic construct
  source 1..75: mol_type = other DNA
cgtcagttgcgggtggaaaaaattctgaatcgctccggcatccagccgttgcaccgcaagtgctcgtttgcgaat

SEQ ID NO: 68142 - DNA, 75 bp, synthetic construct
  source 1..75: mol_type = other DNA
cctgacggcactggagcagtccggtgagatgggccggaaaatggatgcctttaaggagcgggtgatccgtaacag

SEQ ID NO: 68143 - DNA, 75 bp, synthetic construct
  source 1..75: mol_type = other DNA
tgcattgtacttaggaaaaaataatcagatatggtattttaattctattaatgacgcaattaaaaactatattaa

SEQ ID NO: 68144 - DNA, 75 bp, synthetic construct
  source 1..75: mol_type = other DNA
cctggaatttatgcggtcgttacccgaaaattctgttgacctgatagtcacggacccgccgtacttcaaagtgaa

SEQ ID NO: 68145 - DNA, 75 bp, synthetic construct
  source 1..75: mol_type = other DNA
aaccagctccgttatccgggaaagtaccgggttgtggaaaacctgcccgacgtttccccgtggagtgaacactga

SEQ ID NO: 68146 - DNA, 75 bp, synthetic construct
  source 1..75: mol_type = other DNA
tatgccgcccagagtctgtatgcgccgttaagaaccgtggagccggtgcccggtgtgcagacgttatcgctgaac

SEQ ID NO: 68147 - DNA, 75 bp, synthetic construct
  source 1..75: mol_type = other DNA
tgctgtgtgcgttgaaaatggaaatattgttagtcattaccgcattgtgtgtttgcaaaaaaatggggctgcgtt

SEQ ID NO: 68148 - DNA, 75 bp, synthetic construct
  source 1..75: mol_type = other DNA
caggaaagaaaaacatggtgtcgcactggttcagtgccagtcagtggcagctgccgaacgaaagcgattatctga

SEQ ID NO: 68149 - DNA, 75 bp, synthetic construct
  source 1..75: mol_type = other DNA
tggatgaggccgagcaagaacttatcgttaccattaacgaatacgccagtcagatcgcagtagaagcgacacagg

SEQ ID NO: 68150 - DNA, 75 bp, synthetic construct
  source 1..75: mol_type = other DNA
ccggcagtatgcggaactgcagagtgaatataagcatctgcggcggtattttggcgtgacggcgcaggtgccgta

SEQ ID NO: 68151 - DNA, 75 bp, synthetic construct
  source 1..75: mol_type = other DNA
ggcaacttgctgaaggacgaaaacgcagcgaggagattaaccgccagaatcgccagttgcgggtggaaaaaatcc

SEQ ID NO: 68152 - DNA, 75 bp, synthetic construct
  source 1..75: mol_type = other DNA
agaggagggcatatggcgcgaacgtcgtcgtaagtttgcccgaatttatcagcgccggatgcggcgcccatccta

SEQ ID NO: 68153 - DNA, 75 bp, synthetic construct
  source 1..75: mol_type = other DNA
ataattccttttctactgaattcagagcaacagtaatttcactcctcaaaggccgttacgctgattttggaccta

SEQ ID NO: 68154 - DNA, 75 bp, synthetic construct
  source 1..75: mol_type = other DNA
cttcagcctccaggcgaagcgcgttctctccaaaaatctcactttccagtacaaaagcagtgcgtttcagattcg

SEQ ID NO: 68155 - DNA, 75 bp, synthetic construct
  source 1..75: mol_type = other DNA
ggggccccaaatgcacactgatagtctttatcgatgatgctaccagcgctctgatggcgctacgattcgctcctg

SEQ ID NO: 68156 - DNA, 75 bp, synthetic construct
  source 1..75: mol_type = other DNA
tggtgacggtggcggatgtgatgctggcgttacacggcaactacgacaacaaaaactcgggcgaaaaatttttgc

SEQ ID NO: 68157 - DNA, 75 bp, synthetic construct
  source 1..75: mol_type = other DNA
agtaggaatgaattatcaattatatgtccgcaattacagtcgtaacaccaactacgagatcgttgctacggttga

SEQ ID NO: 68158 - DNA, 75 bp, synthetic construct
  source 1..75: mol_type = other DNA
tagagaaggcacttagcctgggggtaactaaactggtcgagcgatggatttctgtctctggtgtggctgatgatc

SEQ ID NO: 68159 - DNA, 75 bp, synthetic construct
  source 1..75: mol_type = other DNA
gccgacaggtacggttgaaaaagggaaaacaaccaccctgaccgttactgtggaaccggaaaatgcaacggataa

SEQ ID NO: 68160 - DNA, 75 bp, synthetic construct
  source 1..75: mol_type = other DNA
atttccgggacatggtggttgtttctggtgatcgcgtgatcacaacctcccgcaaggtagcagcttacttcgaca

SEQ ID NO: 68161 - DNA, 75 bp, synthetic construct
  source 1..75: mol_type = other DNA
ggtgatggaccgtatgaccatgaatggtggtcgttgggtgaattttaactgggagagctggcggtcaaacgttgg

SEQ ID NO: 68162 - DNA, 75 bp, synthetic construct
  source 1..75: mol_type = other DNA
ttgtcaggggtttatcaacctgatgaaggcgaaataatttttgaagataaaccagtctccttttctgatccgtta

SEQ ID NO: 68163 - DNA, 75 bp, synthetic construct
  source 1..75: mol_type = other DNA
tgaaggggttgtcgcgaccaacaaagtctcggaagcactccaagaagaatacggtttggatgaagttcaggcggg

SEQ ID NO: 68164 - DNA, 75 bp, synthetic construct
  source 1..75: mol_type = other DNA
cgatcaaaccagatactctggttgccgaccttactgtagctcagcagcagatggtagaaattgccaaggccattt

SEQ ID NO: 68165 - DNA, 75 bp, synthetic construct
  source 1..75: mol_type = other DNA
tggcgaatttaccgtgcaggccaacagcattgagatgatccgccgtccgtttgatttcccggacagtaaagaagg

SEQ ID NO: 68166 - DNA, 75 bp, synthetic construct
  source 1..75: mol_type = other DNA
tattttggcattatctactgaattaggcttacctgatgcaatgcgtaagagtttagaacgcctggatatggggat

SEQ ID NO: 68167 - DNA, 75 bp, synthetic construct
  source 1..75: mol_type = other DNA
tagaacatgcaattgaggagaacgatactgatagcgagttatttataactgatattcagtcaacgcttatacctg

SEQ ID NO: 68168 - DNA, 75 bp, synthetic construct
  source 1..75: mol_type = other DNA
aaaagtcttgattggcgtgaacggggggcagttaagaaaggaaaagtgtctgctgctgtgttggctgaggtcagg

SEQ ID NO: 68169 - DNA, 75 bp, synthetic construct
  source 1..75: mol_type = other DNA
gtgttatttatgatggtaatgccatttcattacgtaatctggacggtgattttacactgaaatattcactatcat

SEQ ID NO: 68170 - DNA, 75 bp, synthetic construct
  source 1..75: mol_type = other DNA
atggcccgcctggctgatttcagtaatgacgaaggtgtgtgctggccatcaattgaaaccattgcccgtcagatt

SEQ ID NO: 68171 - DNA, 75 bp, synthetic construct
  source 1..75: mol_type = other DNA
tggcaatggagtcggaacatattgctcaggttaccgcaatcgctcccgaggtccgcgggaagacaatgctgtttg

SEQ ID NO: 68172 - DNA, 75 bp, synthetic construct
  source 1..75: mol_type = other DNA
gtttctggcagcgaaatcgacctgcaactgcgctgtagctacacgccggatcaaggttccacgcgcattgaacgc

SEQ ID NO: 68173 - DNA, 75 bp, synthetic construct
  source 1..75: mol_type = other DNA
ttttgatgtgcaaagttagcgacatgaatcttgaaggtaacgagaaattcattttttcgacaaaaaatacaattt

SEQ ID NO: 68174 - DNA, 75 bp, synthetic construct
  source 1..75: mol_type = other DNA
ttcccacccccgaaaaacctgatgcggcgttatgcctcaagattgaacgcgccaggcgtaatgccctgaaaggac

SEQ ID NO: 68175 - DNA, 75 bp, synthetic construct
  source 1..75: mol_type = other DNA
catcattaacgtgggtaacggtgaatatcgtctgtcagtcacatcaaatgacaccggccttgataatgcgatgac

SEQ ID NO: 68176 - DNA, 75 bp, synthetic construct
  source 1..75: mol_type = other DNA
atggcaagtatttcatcgctgggagtcgggtcaggtctggatttaagttcaatccttgatagcctcaccgccgcg

SEQ ID NO: 68177 - DNA, 75 bp, synthetic construct
  source 1..75: mol_type = other DNA
agaagcggcgcttatcctggcgcacaggttgatagctgcggggaaagctcaggggctgttttttggtctgccaac

SEQ ID NO: 68178 - DNA, 75 bp, synthetic construct
  source 1..75: mol_type = other DNA
cccgcattctgggatgatgatgagggcattgaacttataaaacacctttcctggtatatctctgcaaccgtcgtg

SEQ ID NO: 68179 - DNA, 75 bp, synthetic construct
  source 1..75: mol_type = other DNA
agatagtcaatattgcgcccgatgccagcaacgcgcaggtcaccctgaacatccctgcacaacaggtggtgacga

SEQ ID NO: 68180 - DNA, 75 bp, synthetic construct
  source 1..75: mol_type = other DNA
gcacgccggacacagaactgtttttactacccgctatggctaaccgtcacggactgattactggcgcaacgggga

SEQ ID NO: 68181 - DNA, 75 bp, synthetic construct
  source 1..75: mol_type = other DNA
tgaatattgagtataaatacctgcagcaatggcagagtcagaatcttcgaccggaggagcttttttctcacaaat

SEQ ID NO: 68182 - DNA, 75 bp, synthetic construct
  source 1..75: mol_type = other DNA
ttcaaaacaaacagtgttccccagggcgtccgcgaccgggcattcgaagaatgggagcagatcatcatagataac

SEQ ID NO: 68183 - DNA, 75 bp, synthetic construct
  source 1..75: mol_type = other DNA
ggttacattctcaccgagcaggaatactgcgtagtggtggggacaatcaatatggatattcgcgggatggcggat

SEQ ID NO: 68184 - DNA, 75 bp, synthetic construct
  source 1..75: mol_type = other DNA
tcatgcccagtatctcgatggtcgccgtgaaatgatgcaatggtacgcagattacattgattcgctttccaggca

SEQ ID NO: 68185 - DNA, 75 bp, synthetic construct
  source 1..75: mol_type = other DNA
atttcattactcgatacggtaatcgtcgaattaaataaagcgatcgaaattcacgataaaaaaataaacgcggaa

SEQ ID NO: 68186 - DNA, 75 bp, synthetic construct
  source 1..75: mol_type = other DNA
catcaggtgggtacgacggttttccgtattgcgatataggtggttcagaccgacgaataaatgaaaatgccgggc

SEQ ID NO: 68187 - DNA, 75 bp, synthetic construct
  source 1..75: mol_type = other DNA
aaggcgattcaggaactgggcaccggcgaggcgttaatctcgtttctcgatgcgaaaggaagtccttcagtggtg

SEQ ID NO: 68188 - DNA, 75 bp, synthetic construct
  source 1..75: mol_type = other DNA
tgtttttcctgccgatggcggtgtcagccggcataaccctttataccgattctcaacaccttccggtcaatccgc

SEQ ID NO: 68189 - DNA, 75 bp, synthetic construct
  source 1..75: mol_type = other DNA
gcacggctgcggcgctcggcggggcgacggtattcgggctgtttaccggaacggatttcgggattgtgtttggcg

SEQ ID NO: 68190 - DNA, 75 bp, synthetic construct
  source 1..75: mol_type = other DNA
taataaaaaggaaaatgccgcactcaatgatgttcaggtggaagttaattacgcgattaaacttgatgatcaatg

SEQ ID NO: 68191 - DNA, 75 bp, synthetic construct
  source 1..75: mol_type = other DNA
gccataaagggcctgaaatgttattcaggcactatggacaatacttgaaagagtatgatgggagggcaagtatca

SEQ ID NO: 68192 - DNA, 75 bp, synthetic construct
  source 1..75: mol_type = other DNA
caacttgtcgctgaaggcaagagccagaccatgaacagccgtcaccttactggcgatgccgttgatgtcgtggct

SEQ ID NO: 68193 - DNA, 75 bp, synthetic construct
  source 1..75: mol_type = other DNA
ccgccccggactgggccatgaaacaggattttcgctgcggatgctggctcatggagaaacctgaaacggcaatga

SEQ ID NO: 68194 - DNA, 75 bp, synthetic construct
  source 1..75: mol_type = other DNA
aatctggatatccgcatcccgtatgccacagacccggcaggtaaccgcctgcccgacccggagctgcacccggac

SEQ ID NO: 68195 - DNA, 75 bp, synthetic construct
  source 1..75: mol_type = other DNA
cgcctggtcaccgacgaaggtgaaaaaaacgtgccgctggcagatgttcagccaggtatgttactgcgcctgacg

SEQ ID NO: 68196 - DNA, 75 bp, synthetic construct
  source 1..75: mol_type = other DNA
tcagcacacatcacgttcaggaaaccagaactggttgacagacttaatgagattattgcgaaacactatcctgga

SEQ ID NO: 68197 - DNA, 75 bp, synthetic construct
  source 1..75: mol_type = other DNA
acagaacagcgaacggaagagagccgtcagtggttcagccgcgtcatggcactcatcagcaaaacacgcacagcg

SEQ ID NO: 68198 - DNA, 75 bp, synthetic construct
  source 1..75: mol_type = other DNA
cagctggttgcggaagggaaaagccagaccatgaacagccgccacctgaccggtgatgcggtggatgttgtggcc

SEQ ID NO: 68199 - DNA, 75 bp, synthetic construct
  source 1..75: mol_type = other DNA
atgccgcagcattgtatggcgacaacgccgcatacgtattggctaataagcaaactttccagcaaattgaggagt

SEQ ID NO: 68200 - DNA, 75 bp, synthetic construct
  source 1..75: mol_type = other DNA
agaccgcaaagccaaaagacaaaacctacaaaatggccgatggcggcggtttgtatcttgaggtttcggccaagg

SEQ ID NO: 68201 - DNA, 75 bp, synthetic construct
  source 1..75: mol_type = other DNA
acccgcgagccacggttaattatgataaccaacggccaggtcgaaagcagtatggacgataaacatctcggcctt

SEQ ID NO: 68202 - DNA, 75 bp, synthetic construct
  source 1..75: mol_type = other DNA
gtttctatctgaagcccgccgtcgtcaagagcgaacgggaggcgtgcagttacctcgacagcctgccagcctccg

SEQ ID NO: 68203 - DNA, 75 bp, synthetic construct
  source 1..75: mol_type = other DNA
cgacaaagtcaaaagaaagtgcggaagccagtgcgaagagtgcatctgacagtgcaaagacggcaaccagcaggg

SEQ ID NO: 68204 - DNA, 75 bp, synthetic construct
  source 1..75: mol_type = other DNA
tgcgtagcgaaaattccagttctgctctgggttggtactgggcggtatattcagtagggatcggtgttgctggca

SEQ ID NO: 68205 - DNA, 75 bp, synthetic construct
  source 1..75: mol_type = other DNA
cccctgtaaatttggcagtaaaattatcgtcaacaacctggtgagatgggacagatggggatttcatcttatcag

SEQ ID NO: 68206 - DNA, 75 bp, synthetic construct
  source 1..75: mol_type = other DNA
tcgggcgggatattcttgcgaaatcgaccgttgccgctgttatcgaatacctcggtttacaggaaacggtaaaca

SEQ ID NO: 68207 - DNA, 75 bp, synthetic construct
  source 1..75: mol_type = other DNA
ccaataattttcgggaaatcgcggaaacgtcaaccaactatccggcaattcctagtgaggtgttgtccgcaatcc

SEQ ID NO: 68208 - DNA, 75 bp, synthetic construct
  source 1..75: mol_type = other DNA
gttctaccgtattctgaaaacccaaaataaatcactgctaagcagttggttcactcgagtccacgaaagcggttc

SEQ ID NO: 68209 - DNA, 75 bp, synthetic construct
  source 1..75: mol_type = other DNA
tgggcttcggctacaaaattatgtatgacgaagtaccgccaggcacgaaacctttcgatgaagcgaataaattag

SEQ ID NO: 68210 - DNA, 75 bp, synthetic construct
  source 1..75: mol_type = other DNA
cgatgattaccaaacggtaatggcatacaaagtttctgaagtcatcgctgcaatccgcgccgctggcattcgcat

SEQ ID NO: 68211 - DNA, 75 bp, synthetic construct
  source 1..75: mol_type = other DNA
gagcggcgcggggcgtaccggcacgctgtttgcgatggagcagatgggcgtggcgccggatctcaccacctttgc

SEQ ID NO: 68212 - DNA, 75 bp, synthetic construct
  source 1..75: mol_type = other DNA
cacgcttaaaatataccccacaccttacatttacgaagatagttcattagggtattggcccagtttttcctcact

SEQ ID NO: 68213 - DNA, 75 bp, synthetic construct
  source 1..75: mol_type = other DNA
gaaagagcgattgtgatattctcgccagtctattcaaaacatgaagacggcgggtttattgatagcgataacagc

SEQ ID NO: 68214 - DNA, 75 bp, synthetic construct
  source 1..75: mol_type = other DNA
aggtgctgttatccctgctcagtttctgcaccgcatgcagccttaacggtgtccagacccgtgagtgtggtcaca

SEQ ID NO: 68215 - DNA, 75 bp, synthetic construct
  source 1..75: mol_type = other DNA
tgaaaaatcgtggcagggatggagagctggtaatgctgaccgcactgaactgtacgcagggtgaccgctatctgg

SEQ ID NO: 68216 - DNA, 75 bp, synthetic construct
  source 1..75: mol_type = other DNA
atggcgttggggctggcgcaagcgggctgtgacattgttggcattaacatcgttgaaccgactgaaaccatcaag

SEQ ID NO: 68217 - DNA, 75 bp, synthetic construct
  source 1..75: mol_type = other DNA
attcttgtcgacggtaaacgcgttaactcccgcaatgccgtcttccgccacaatgatttcgatctgaactggatc

SEQ ID NO: 68218 - DNA, 75 bp, synthetic construct
  source 1..75: mol_type = other DNA
acggcggggaaggcagtgataccctggttctgacaggtaccatttctgtcaatctagcggccggtaaaaatgaag

SEQ ID NO: 68219 - DNA, 75 bp, synthetic construct
  source 1..75: mol_type = other DNA
tgcagcgaaaaccggtacagaatctgaaggatgtcctcaaagaagtgcctggcgtacaactgacgaacgaagggg

SEQ ID NO: 68220 - DNA, 75 bp, synthetic construct
  source 1..75: mol_type = other DNA
agctgccgtagacaggatcctgtcgcagttcggcggttctgctcgtttcctcggtaagttcggtaaaagtatcga

SEQ ID NO: 68221 - DNA, 75 bp, synthetic construct
  source 1..75: mol_type = other DNA
gacgaaattttactataacgacgggaaccagctgacggcggtggtgtacccggacgggctggagagccgccggga

SEQ ID NO: 68222 - DNA, 75 bp, synthetic construct
  source 1..75: mol_type = other DNA
tgaaaacatgcaacttgacgatgaacagaaatttatcgctcagttaggagacagtgtacaacgttcaatggtgca

SEQ ID NO: 68223 - DNA, 75 bp, synthetic construct
  source 1..75: mol_type = other DNA
ggttttgccgcactggcgatcaccacaatggtattacccttactggcgtgggcctgtaacggcacagtgcgcaaa

SEQ ID NO: 68224 - DNA, 75 bp, synthetic construct
  source 1..75: mol_type = other DNA
gcagaagaccgccgtcgtttcgacgtagcgatgaagaaaattggtctggaaaccgcgcgttccggtatcgcacac

SEQ ID NO: 68225 - DNA, 75 bp, synthetic construct
  source 1..75: mol_type = other DNA
ggattatctggacgcactggagctagtcgatactaccggtgcgccagatattgaatggcctacgcctccggcagt

SEQ ID NO: 68226 - DNA, 75 bp, synthetic construct
  source 1..75: mol_type = other DNA
agtattgaccatctcgcttatatggctggcgtatcaaagagaacagcaatcagagccattgagacacttgagaaa

SEQ ID NO: 68227 - DNA, 75 bp, synthetic construct
  source 1..75: mol_type = other DNA
cactcctgacccggaatcgtctgtgcgaaatacggctgaaggacggatacagggaggttacggcaagcatggctt

SEQ ID NO: 68228 - DNA, 75 bp, synthetic construct
  source 1..75: mol_type = other DNA
ggaagcgcgtcagcaatctcctgatggctgcgtgatggtattcgctgcccgtattcgccagggggtaggccatgt

SEQ ID NO: 68229 - DNA, 75 bp, synthetic construct
  source 1..75: mol_type = other DNA
ggcaagttggctggttcaagccggagtcccgttgtcagtgttacaggaaatgggaggctgggagtctatcgaaat

SEQ ID NO: 68230 - DNA, 75 bp, synthetic construct
  source 1..75: mol_type = other DNA
accggtgggggtttcatctgaacaacggcccacaggcagatcgacttgccgatctggaaagaatgctacacctgt

SEQ ID NO: 68231 - DNA, 75 bp, synthetic construct
  source 1..75: mol_type = other DNA
gatggttttggatgtgatggtataattaccattacctaccagtgcgacaacagtgggacacatgaggcatggtta

SEQ ID NO: 68232 - DNA, 75 bp, synthetic construct
  source 1..75: mol_type = other DNA
atgtctgaaatcacagccccccgtccggaagtggtcaacgggcatacggacgttatctgctcaaccagtatccgc

SEQ ID NO: 68233 - DNA, 75 bp, synthetic construct
  source 1..75: mol_type = other DNA
gcgggcctaaaacgccggatctggaatcttatttctccacgccgacccggaaaactgatacccggacaccggata

SEQ ID NO: 68234 - DNA, 75 bp, synthetic construct
  source 1..75: mol_type = other DNA
ggagaaagcgtcagtggaggaaatcagtctgccactgctgacgaaaatgtcctcagagcgcacgctggcagtcca

SEQ ID NO: 68235 - DNA, 75 bp, synthetic construct
  source 1..75: mol_type = other DNA
agaaggactctcattacgatagacttcttgatgctttttttaaaaaacataatgaaaatattcataataaaatac

SEQ ID NO: 68236 - DNA, 75 bp, synthetic construct
  source 1..75: mol_type = other DNA
ttgacgaagttggacaggcaagagctgctgatgccatcggcgttcaccagaccgcaattagtaaagctatccggg

SEQ ID NO: 68237 - DNA, 75 bp, synthetic construct
  source 1..75: mol_type = other DNA
gccgaacgtcaaactgccgtctgcgccgaatccgaaggacaaaaatctggcgctcagcactgcgggcaacgacct

SEQ ID NO: 68238 - DNA, 75 bp, synthetic construct
  source 1..75: mol_type = other DNA
aggtgaatcaaaatattgtcagtgagtttatggctgaaccgccacaaggaaaagtccgtattgccggagaggatg

SEQ ID NO: 68239 - DNA, 75 bp, synthetic construct
  source 1..75: mol_type = other DNA
tcccggcgtacctgatgccagtggcgcgttgaaagccctgtcagaaactcgttggctgaaggaaaaggagaaaac

SEQ ID NO: 68240 - DNA, 75 bp, synthetic construct
  source 1..75: mol_type = other DNA
cgtgacaagctgtctccgtatgacaccgaagagatgcttgaggctatgcgtatttttctggaagaacaggaaggt

SEQ ID NO: 68241 - DNA, 75 bp, synthetic construct
  source 1..75: mol_type = other DNA
gcgacattatgttgatggcagaacactttgccatccagatgtgtcgggaaatcaagctgcctctgttcccggggt

SEQ ID NO: 68242 - DNA, 75 bp, synthetic construct
  source 1..75: mol_type = other DNA
caacgtgcctgagctgctcccgataacacttgatgccgaagatgttgtccctacaacctcccccggtcacaacct

SEQ ID NO: 68243 - DNA, 75 bp, synthetic construct
  source 1..75: mol_type = other DNA
atggaatctgtataaatatccattaaaccctgttcggtttatagattctttgggtttaaaattccatgttaacgg

SEQ ID NO: 68244 - DNA, 75 bp, synthetic construct
  source 1..75: mol_type = other DNA
attatgctcagtaaacagctggccgttgcggatggttaaaggaactgttgtggggacaactgacacattgcgtga

SEQ ID NO: 68245 - DNA, 75 bp, synthetic construct
  source 1..75: mol_type = other DNA
tcaggcattacgcaggactggagcatcgccgatgggcaatgggtgattttttcgggtatggccaataatgccagc

SEQ ID NO: 68246 - DNA, 75 bp, synthetic construct
  source 1..75: mol_type = other DNA
tcccagttctggcaaatggtcgcgatgggcgtcgttgtggtcgctgccgtttacctcgatacattacgcaaaaag

SEQ ID NO: 68247 - DNA, 75 bp, synthetic construct
  source 1..75: mol_type = other DNA
ccagctatatggcgtattacaacgtccagcaggcgctgagtattgcccgccagtttggctgtagcgacgacgcgt

SEQ ID NO: 68248 - DNA, 75 bp, synthetic construct
  source 1..75: mol_type = other DNA
aatggtgccgtgatccacattgtgccgcgtctggcgggtgccaaaagtggcggtgtttttcaggcagtgctgggt

SEQ ID NO: 68249 - DNA, 75 bp, synthetic construct
  source 1..75: mol_type = other DNA
ggcatcgatctttcattgggctccgtggtggctttttctggtgtcgccgtggggatttgcgccacactgggcctg

SEQ ID NO: 68250 - DNA, 75 bp, synthetic construct
  source 1..75: mol_type = other DNA
ggcttaggtattccggcaataaccaggagtaaaaacattgctgacagttggttatcaaagggctggtatgttcag

SEQ ID NO: 68251 - DNA, 75 bp, synthetic construct
  source 1..75: mol_type = other DNA
tgattatcaacgatgccctacaccacagcgaaactccagctaccgatgcttttctggctgaaattcgtgcggaag

SEQ ID NO: 68252 - DNA, 75 bp, synthetic construct
  source 1..75: mol_type = other DNA
cagggttcagcatcacaaccaacagtgggaaggtttcgctggcaggcagtatgcaggttggcgatttctcgaccg

SEQ ID NO: 68253 - DNA, 75 bp, synthetic construct
  source 1..75: mol_type = other DNA
tgttttaccgacctgctggtattgctccggtaaataaaacgacttttaaaaaattacgagtgagtcgtagcggta

SEQ ID NO: 68254 - DNA, 75 bp, synthetic construct
  source 1..75: mol_type = other DNA
atggctatggaaacgcaggacattatcaaaaggtccgcaactaactccatcacgccgccttctcaggtgcgtgat

SEQ ID NO: 68255 - DNA, 75 bp, synthetic construct
  source 1..75: mol_type = other DNA
gactgggcgagatgaaaaactcgctgtgcaaaagcggctatctgcggctggtgcaaaagtattgtccccggcttt

SEQ ID NO: 68256 - DNA, 75 bp, synthetic construct
  source 1..75: mol_type = other DNA
ggcgtggccagcgctgtttctgatttttgccgtagtcggcggcattcgggcgaatatcttcaccccgacggaagc

SEQ ID NO: 68257 - DNA, 75 bp, synthetic construct
  source 1..75: mol_type = other DNA
agttcgacttcggtctgcgtccgtccctggcttacctgcagtctaaaggtaaaaacctgggtcgtggctacgacg

SEQ ID NO: 68258 - DNA, 75 bp, synthetic construct
  source 1..75: mol_type = other DNA
cggctgcgccggaacgaactctgattttgagtgtgatgccaccacgtcagatacctgcatgacaatggaacaggc

SEQ ID NO: 68259 - DNA, 75 bp, synthetic construct
  source 1..75: mol_type = other DNA
gatcgaagcgacctctgactgcggcgcttatgttatggttcacggcgcgctgaaacgcctggctgtgaagatgtc

SEQ ID NO: 68260 - DNA, 75 bp, synthetic construct
  source 1..75: mol_type = other DNA
gagagtacccagtagatcaattgattaatcatgtttaccttcctgttcgccagcgtctcgtgcttgatcacaaca

SEQ ID NO: 68261 - DNA, 75 bp, synthetic construct
  source 1..75: mol_type = other DNA
aataaggttctgcgcgatgccacccgtgccggtgctgaagttatgcgggatgcagttgttgaacgtgcgccggag

SEQ ID NO: 68262 - DNA, 75 bp, synthetic construct
  source 1..75: mol_type = other DNA
aagaatccggggacggaccatatcatctggcaggcgtgggtggcaaaaaaagcggggcagatagttgggcgtatt

SEQ ID NO: 68263 - DNA, 75 bp, synthetic construct
  source 1..75: mol_type = other DNA
tcatcattatgaatatgaaaaagccgaatgcggcgactaccacatttatccccggggctatggacgcagcaactt

SEQ ID NO: 68264 - DNA, 75 bp, synthetic construct
  source 1..75: mol_type = other DNA
tgtggaaatgcgctgcggctgggcgttaccggtacacccggcgcggggaaaagtacctttcttgaagtcttcggc

SEQ ID NO: 68265 - DNA, 75 bp, synthetic construct
  source 1..75: mol_type = other DNA
ctatgtgaacaatattgctgacctctatattcgctatgccggaaaggtggtcagtgaacagatgccggaactgga

SEQ ID NO: 68266 - DNA, 75 bp, synthetic construct
  source 1..75: mol_type = other DNA
attatctggagacgcacaagagcttctgtacgccggacgttgctgcgacaacaggtgtgacattaaccagcataa

SEQ ID NO: 68267 - DNA, 75 bp, synthetic construct
  source 1..75: mol_type = other DNA
tgatttgtccgttatttttcgctcttcccgctaaggctgccgccacaaacacatcactgaatagctgctttattc

SEQ ID NO: 68268 - DNA, 75 bp, synthetic construct
  source 1..75: mol_type = other DNA
aacctcgtaaaaactattcgaatgaattcaaacttcgtatggtggaactggcatcacaacccggagcttgtgttg

SEQ ID NO: 68269 - DNA, 75 bp, synthetic construct
  source 1..75: mol_type = other DNA
tttaaggagtgtcgccagagtgccgcgatgaaacgggtactgagggtatataaaagaacatcaatgggaacacaa

SEQ ID NO: 68270 - DNA, 75 bp, synthetic construct
  source 1..75: mol_type = other DNA
ccgatggttaaagcgaaagacgagcgccgcgagcgtcgcgatgatttcgcaaacgaaaccgcagatgatgcagat

SEQ ID NO: 68271 - DNA, 75 bp, synthetic construct
  source 1..75: mol_type = other DNA
tggtccatcctgaccagagcgaacaggttccgggcatgatcgagcgctacacagctgccatcactggtgcagaag

SEQ ID NO: 68272 - DNA, 75 bp, synthetic construct
  source 1..75: mol_type = other DNA
aacatgacgctggaaaatccttcaccagagctgctcacggtgttgatccgcgaactgagtgggaggggaagatga

SEQ ID NO: 68273 - DNA, 75 bp, synthetic construct
  source 1..75: mol_type = other DNA
acgttctgatgaacgttgaagctccgcaggaagtgatcgatgagctggaaactaccttccgcttcaacgatgccg

SEQ ID NO: 68274 - DNA, 75 bp, synthetic construct
  source 1..75: mol_type = other DNA
tattatgcaatggttaatcttgataccgtaacatttcttgatccagcaagtctatataacaagctggaactggat

SEQ ID NO: 68275 - DNA, 75 bp, synthetic construct
  source 1..75: mol_type = other DNA
gttttcttttgcgcgctcgggcgcgagatgggggcagcaagtctttcggtaccacaacagcaggtacagtttgat

SEQ ID NO: 68276 - DNA, 75 bp, synthetic construct
  source 1..75: mol_type = other DNA
gtcattcagttatgccaacgctgaagatgagcaaaaaacgcattacagcgatacccgctggcatgaggattccgt

SEQ ID NO: 68277 - DNA, 75 bp, synthetic construct
  source 1..75: mol_type = other DNA
cggctgcaccactggcggatgccgggccctcacttcgtgatcagatcatggccctggatgaggcaaaaggggcag

SEQ ID NO: 68278 - DNA, 75 bp, synthetic construct
  source 1..75: mol_type = other DNA
attctggccgcggcggcaccgcagcagccggtggcatccacgcagagtgaagccgatcgcattatggcgtgtgaa

SEQ ID NO: 68279 - DNA, 75 bp, synthetic construct
  source 1..75: mol_type = other DNA
caaacgaatgggtttcagaggacttgctgatggcagtcacagggatgaaacgtggaaccattacacgggcccgca

SEQ ID NO: 68280 - DNA, 75 bp, synthetic construct
  source 1..75: mol_type = other DNA
atgtctgacaacatcaggatagcctcttaccgcgctttgcgcaaggagaagaaggccatgaaactaccacgaagt

SEQ ID NO: 68281 - DNA, 75 bp, synthetic construct
  source 1..75: mol_type = other DNA
ggctggtttgcgaagtgagcggactgtcattcctctacatgcacctgttggtggcgctgattacgctggtggtgt

SEQ ID NO: 68282 - DNA, 75 bp, synthetic construct
  source 1..75: mol_type = other DNA
aataacatccaatggttgttccgttataagaataagcataaaagcgccaatactttgacgctagtgctgggcaag

SEQ ID NO: 68283 - DNA, 75 bp, synthetic construct
  source 1..75: mol_type = other DNA
cgttacggtcagtttgattatccgttatcgacccttccccgccgcgaacggctggtaaaacgcgcccgtgagcag

SEQ ID NO: 68284 - DNA, 75 bp, synthetic construct
  source 1..75: mol_type = other DNA
ctaaattggtcgaaagcttcaatgactctcatgttgaaagagatgtccaaccttatcaatgatgagggaattaaa

SEQ ID NO: 68285 - DNA, 75 bp, synthetic construct
  source 1..75: mol_type = other DNA
caagtctgaactactggatgccgcacttaaagacattcaggaagagatgacccccatcggcgttcaggtaatgag

SEQ ID NO: 68286 - DNA, 75 bp, synthetic construct
  source 1..75: mol_type = other DNA
cgacgtgctgaccggaagtgatgacggtcgccacagcaacacgtctctggcgtggggggctggcgtgcagtttaa

SEQ ID NO: 68287 - DNA, 75 bp, synthetic construct
  source 1..75: mol_type = other DNA
ttcttagagtttgtggattattacttataatgcttgcgcatgttaatccgcctaatcttattttccagataagaa

SEQ ID NO: 68288 - DNA, 75 bp, synthetic construct
  source 1..75: mol_type = other DNA
tgttggtgatgctgtgctttttgctggcgggttactggctgtgggtcggtattgatggctttgtactgctcgccc

SEQ ID NO: 68289 - DNA, 75 bp, synthetic construct
  source 1..75: mol_type = other DNA
tgcccgtcttaatgagccgctggcaaatggtgccgtgatccacatcgtaccgcgtctggcgggagctaaaagtgg

SEQ ID NO: 68290 - DNA, 75 bp, synthetic construct
  source 1..75: mol_type = other DNA
gccggactggagcgggtaacgacgggcgatatctggatcgaccgcaagcgtgtcaccgaaatggagccgaaagat

SEQ ID NO: 68291 - DNA, 75 bp, synthetic construct
  source 1..75: mol_type = other DNA
tgatgaattaatgccgctcgccaaagagattgaccctaataataaccccagctatggcgtactatgtggaatgtc

SEQ ID NO: 68292 - DNA, 75 bp, synthetic construct
  source 1..75: mol_type = other DNA
attgatggctttgtcctgctcgcccaggatgctaacggtccttccaatccgttaatgaaattggtgacagtgcta

SEQ ID NO: 68293 - DNA, 75 bp, synthetic construct
  source 1..75: mol_type = other DNA
atgttattgtgccagcaggggcagggtaaggtgctgtatcgatatgctttggcaattgcgcgtgccgcagaggga

SEQ ID NO: 68294 - DNA, 75 bp, synthetic construct
  source 1..75: mol_type = other DNA
gtgtttgttgcgggttaattcataaagaaatgtatttggagtgttggctggatgagtcgctggtagatgttattg

SEQ ID NO: 68295 - DNA, 75 bp, synthetic construct
  source 1..75: mol_type = other DNA
gctccgcattatgtgtctcaggcaattaatcaggcaatcctaaatttctgtcctcctgaatatcaagccgccgta

SEQ ID NO: 68296 - DNA, 75 bp, synthetic construct
  source 1..75: mol_type = other DNA
agccgggcgaaagtaaataccgccggaccggatgatgttgatccgctggcagagcttttaaaagcgagagactga

SEQ ID NO: 68297 - DNA, 75 bp, synthetic construct
  source 1..75: mol_type = other DNA
tgggcggcctccatttgtgcggtctgtgcaccgtccctgtcaacagatccggcccgaccattacagacactggcg

SEQ ID NO: 68298 - DNA, 75 bp, synthetic construct
  source 1..75: mol_type = other DNA
agaactcagagtgtttattcctgctgcgttaaaagcgcaattgcaggagatgtgtgaagctgagggtgttactca

SEQ ID NO: 68299 - DNA, 75 bp, synthetic construct
  source 1..75: mol_type = other DNA
ggttgccctgaacaaaacccgcccttataccgccagcgagacgctgctgctggaagtgtcccgcgccatctaccc

SEQ ID NO: 68300 - DNA, 75 bp, synthetic construct
  source 1..75: mol_type = other DNA
cgcgaactggattatctggctgaccgtaaaatggttgagctggagaaaaaaccttctggcgactggtttgctgac

SEQ ID NO: 68301 - DNA, 75 bp, synthetic construct
  source 1..75: mol_type = other DNA
ggacgccgtgcatcctgatcagcaactggaaatgttctggcgcatctggacgcgcaaagaagccatcgttaaaca

SEQ ID NO: 68302 - DNA, 75 bp, synthetic construct
  source 1..75: mol_type = other DNA
cgttcctgcctctgaacttgctgctgccatgaagcagattaaagaactccagcgcctgctcggcaaaaaaacgat

SEQ ID NO: 68303 - DNA, 75 bp, synthetic construct
  source 1..75: mol_type = other DNA
cggctatctggcaggacagcaaaggtttcggctacgcgacgctggatatcagttccgggcgttttcgcctgagcg

SEQ ID NO: 68304 - DNA, 75 bp, synthetic construct
  source 1..75: mol_type = other DNA
cgcttgaaagaaaagttaagtgagcttgctgatgaagacgggatcactcaggcacagatgcttgagtggctgata

SEQ ID NO: 68305 - DNA, 75 bp, synthetic construct
  source 1..75: mol_type = other DNA
cacttggtttagctattcagattggtaagttagcatctgatcaaagtgtattgaaattctttgagcttattgatt

SEQ ID NO: 68306 - DNA, 75 bp, synthetic construct
  source 1..75: mol_type = other DNA
ccttcgaacaacctttctctcatcatggtgggacaaaagtgttaagcggtaacctgggccgtgcggttatgaaaa

SEQ ID NO: 68307 - DNA, 75 bp, synthetic construct
  source 1..75: mol_type = other DNA
gtcataaggaactccaccgacttcagattattcaggagtcaattaatcgacatattactcaggaacaagctgcgg

SEQ ID NO: 68308 - DNA, 75 bp, synthetic construct
  source 1..75: mol_type = other DNA
cattctgaccgaccgtgaaaatggtgaaaaaggcgataattctcaagatacctcttatgcccgtgtaggcgtgaa

SEQ ID NO: 68309 - DNA, 75 bp, synthetic construct
  source 1..75: mol_type = other DNA
cttggaacatctattaaaattatcatcgccttttttaccccccccttttattataagggatatatttgtaacaaa

SEQ ID NO: 68310 - DNA, 75 bp, synthetic construct
  source 1..75: mol_type = other DNA
tgtttgccgtcatgattgccgatctcatccactgggcacaggagcacggctatcgcctgaccttcggcgaggcat

SEQ ID NO: 68311 - DNA, 75 bp, synthetic construct
  source 1..75: mol_type = other DNA
cccatgtgctggcgctaatttgcagtgccgggctttgtgccgcctctgccgggctatatataaaaagccgcacag

SEQ ID NO: 68312 - DNA, 75 bp, synthetic construct
  source 1..75: mol_type = other DNA
tgtacggtgaaatgcgcgtggggtcacgtgtggcatctcaggagatcagcacggcagatgaaggggacggtggtc

SEQ ID NO: 68313 - DNA, 75 bp, synthetic construct
  source 1..75: mol_type = other DNA
ctttctgatgttgtaccgctgatggcacgtctctacccgaacggtccggccgatattaaccacttccaggcggca

SEQ ID NO: 68314 - DNA, 75 bp, synthetic construct
  source 1..75: mol_type = other DNA
ttttcctcagttatagatatgcctgccggacaggggacgctgacactgacattcaccgtatcttcatcaggagcg

SEQ ID NO: 68315 - DNA, 75 bp, synthetic construct
  source 1..75: mol_type = other DNA
catcgctgacgaactgatgaccgggggcacgaattttgtgttcagcggtaagccgggtaccggaaagaaccacct

SEQ ID NO: 68316 - DNA, 75 bp, synthetic construct
  source 1..75: mol_type = other DNA
atcaaacggctggtcagtccggctaacctgacgatttctcaggggggagaagtgtatcggggatatggtggtaat

SEQ ID NO: 68317 - DNA, 75 bp, synthetic construct
  source 1..75: mol_type = other DNA
acccgttacgtcaccgaaatccttgttaaaaccacgggcaccatgcagatgctggggagtgcaccacagcagaac

SEQ ID NO: 68318 - DNA, 75 bp, synthetic construct
  source 1..75: mol_type = other DNA
gggatggtcacgggacatgacgacattcctgtcactcagtcaggaggtgctgttatccctgctcagtttctgcac

SEQ ID NO: 68319 - DNA, 75 bp, synthetic construct
  source 1..75: mol_type = other DNA
aaacgcagcctggaagacagctaccagcgcgtcgttctgactctgagtcagagtatgacctttcggatcgatgaa

SEQ ID NO: 68320 - DNA, 75 bp, synthetic construct
  source 1..75: mol_type = other DNA
cgctatcggctttcacatgcgtgactggtggcagccgacaaaagcaaacttcttcggacacctgaaaaagccgca

SEQ ID NO: 68321 - DNA, 75 bp, synthetic construct
  source 1..75: mol_type = other DNA
ctgacactgaaatcaaaagcaccaaacctgccgaaaaagaggttaacctttttgacggcgatggtttgctgttgc

SEQ ID NO: 68322 - DNA, 75 bp, synthetic construct
  source 1..75: mol_type = other DNA
tattatctcataatgtcatcactctgtttattttatattgctccatttactttactgttttaaccatgacatatg

SEQ ID NO: 68323 - DNA, 75 bp, synthetic construct
  source 1..75: mol_type = other DNA
gggtatatacaaatccctccagtgacaactttccgcgccgacggaccagaaactcccgaagaagaaaagggttac

SEQ ID NO: 68324 - DNA, 75 bp, synthetic construct
  source 1..75: mol_type = other DNA
ggctgcttttcatggtgaggttgtcagacctgcctgtactctggcgatggaagacgcctggcagattatcgatat

SEQ ID NO: 68325 - DNA, 75 bp, synthetic construct
  source 1..75: mol_type = other DNA
ttcgcacccgtagctgggaagataacggtatcacccgttacgtcaccgaaattcttgttaagaccacgggcacca

SEQ ID NO: 68326 - DNA, 75 bp, synthetic construct
  source 1..75: mol_type = other DNA
atgaaaccacagtatcagacccgttacgaatcgctgcacgaaagctaccagaaatggctgaccggcttcacccgg

SEQ ID NO: 68327 - DNA, 75 bp, synthetic construct
  source 1..75: mol_type = other DNA
tgcgccttatcaccaacctgatccgcacaggggtagtcaccgaagtggacagggaaaactggctttgccgggtga

SEQ ID NO: 68328 - DNA, 75 bp, synthetic construct
  source 1..75: mol_type = other DNA
aggctctgaggacggcaacgtgacggaatacccggacggcggctggtttgaatacgaacccgccaccgggcgctg

SEQ ID NO: 68329 - DNA, 75 bp, synthetic construct
  source 1..75: mol_type = other DNA
gatgcgccgtgacggtattgagcttaacggcgtggatatgcgcaacatacgaacaagagtccttgagttgctggc

SEQ ID NO: 68330 - DNA, 75 bp, synthetic construct
  source 1..75: mol_type = other DNA
cagccggacagcgtgaccgccgaaaattatgcgcgtgtggttgctgaggtgatgcgccgtgatggtatccagctt

SEQ ID NO: 68331 - DNA, 75 bp, synthetic construct
  source 1..75: mol_type = other DNA
ggtgggttgaaacctacctttctgaaatatgtagtaaaccacaatatggttatacaactaagtcgagccctacag

SEQ ID NO: 68332 - DNA, 75 bp, synthetic construct
  source 1..75: mol_type = other DNA
cagccagctttgtcatggtttgcactaaaatcagcactcagcaataaccaaattgctgactggttacagattgcc

SEQ ID NO: 68333 - DNA, 75 bp, synthetic construct
  source 1..75: mol_type = other DNA
tgggtgcctggctggatgtgtgcaccacgtccacagacggatgccactgaacacaccgctaacctggctgatgcc

SEQ ID NO: 68334 - DNA, 75 bp, synthetic construct
  source 1..75: mol_type = other DNA
ggtaagcgaagtggatattgtttgcacacttcctctgacagagtattacgacagaaataaccaacccaatacgga

SEQ ID NO: 68335 - DNA, 75 bp, synthetic construct
  source 1..75: mol_type = other DNA
ccgtggtatcgatcaggttggcttagcggttgctgagatggaccgggtaactcaacagaacgccgcgctggtgga

SEQ ID NO: 68336 - DNA, 75 bp, synthetic construct
  source 1..75: mol_type = other DNA
caggctatcggcgttgaactcgaggaggacaggtttagccagacggtggaggaaataagggcgttaacaggggaa

SEQ ID NO: 68337 - DNA, 75 bp, synthetic construct
  source 1..75: mol_type = other DNA
catgctcaggcgtttgaactggctcgccaggagtttgattatctttctgcagaagagattgcagatgaaatacgc

SEQ ID NO: 68338 - DNA, 75 bp, synthetic construct
  source 1..75: mol_type = other DNA
atgagaaaagtaaaaacagacaacagtgatttaatcgaatacataaatacaatcaaagaactaaaaaaccatatt

SEQ ID NO: 68339 - DNA, 75 bp, synthetic construct
  source 1..75: mol_type = other DNA
tctttatgggatccggttccacaataaaagcagcaatggcgctggggcgtcgggcgttaggtgttgaacttgagt

SEQ ID NO: 68340 - DNA, 75 bp, synthetic construct
  source 1..75: mol_type = other DNA
accatgaatggtggtcgttgggtgaattttaactgggagagctggcggtcaaacgttggacgtcagggtatgtga

SEQ ID NO: 68341 - DNA, 75 bp, synthetic construct
  source 1..75: mol_type = other DNA
atgaaaaatattgcgacaggcggcgttctggagcgtatccgcagactgaccccaccacatgtaaccgccccattc

SEQ ID NO: 68342 - DNA, 75 bp, synthetic construct
  source 1..75: mol_type = other DNA
aatgcggttggtttttatgaagatgttcatgaggggataaaatcataccaaataaatgaaaatacaactatttag

SEQ ID NO: 68343 - DNA, 75 bp, synthetic construct
  source 1..75: mol_type = other DNA
aaccagcacaaatcagcctggaatgtaaacattattcgctgaccagcgatgcgccatcggggaaggacggtgccg

SEQ ID NO: 68344 - DNA, 75 bp, synthetic construct
  source 1..75: mol_type = other DNA
ttttcataaacgttggtttgggagaattatctctggctggcactgcatcgggtgtcattggtctgaatgggtatg

SEQ ID NO: 68345 - DNA, 75 bp, synthetic construct
  source 1..75: mol_type = other DNA
ctgatttttgaaaaaacctccacccgtacccgctgtgctttcgaagtggctgcgttcgaccaaggggcgcaggtg

SEQ ID NO: 68346 - DNA, 75 bp, synthetic construct
  source 1..75: mol_type = other DNA
ccgacaaaagcaaacttcttcggacacctgaaaaagccgcagattatcgatgccctgaatgatgccggactgtcc

SEQ ID NO: 68347 - DNA, 75 bp, synthetic construct
  source 1..75: mol_type = other DNA
ttgtatcgtgagatcagtgatggaaaaagtattacgtacatgatcgccgggttaaataaagaatatggcgatgtg

SEQ ID NO: 68348 - DNA, 75 bp, synthetic construct
  source 1..75: mol_type = other DNA
atgatcggggaagacccaaaaataaacagtgttgatttaatcaacgctgattgcctgcattttattcagtccctg

SEQ ID NO: 68349 - DNA, 75 bp, synthetic construct
  source 1..75: mol_type = other DNA
gaagggcgcaaatcagtgtgcgcgggcaggggataaattaccggatttgctggatgaatatatcagagcaacaac

SEQ ID NO: 68350 - DNA, 75 bp, synthetic construct
  source 1..75: mol_type = other DNA
ttggtgagtgccgtgaagatgcccgggcataccgcaacctgccgcagccggaagcagtgctgacggaggcggaag

SEQ ID NO: 68351 - DNA, 75 bp, synthetic construct
  source 1..75: mol_type = other DNA
aatacgtggagttgagcgacggcactttatcgtggttagggaacgccttgtactggatgcctctaccggaaccgc

SEQ ID NO: 68352 - DNA, 75 bp, synthetic construct
  source 1..75: mol_type = other DNA
agaagtaaaaacgatgtgcctgatggcgatagcgaagacgactatgaagaaaagttactcattgccagatggaag

SEQ ID NO: 68353 - DNA, 75 bp, synthetic construct
  source 1..75: mol_type = other DNA
atggcgactcccttttttcacgttgatgttcagcagcccgcggagatgcgctttaaccgcgcccgtgtccggcgg

SEQ ID NO: 68354 - DNA, 75 bp, synthetic construct
  source 1..75: mol_type = other DNA
cgatttgtctggctacacctgcgcctgtagccgtgctccccgccatgaaccagcagatgtaccgtgccgctgcca

SEQ ID NO: 68355 - DNA, 75 bp, synthetic construct
  source 1..75: mol_type = other DNA
tgcaaataacgagtaccaattttgcaaagtttggtacaacagcagagaaaatgtttgatccatgcgaaaatctta

SEQ ID NO: 68356 - DNA, 75 bp, synthetic construct
  source 1..75: mol_type = other DNA
ggtcaagatgttattgatatccgtactctcggttcaaaaggtgtgttcacctttgacccaggcttcacttcaacc

SEQ ID NO: 68357 - DNA, 75 bp, synthetic construct
  source 1..75: mol_type = other DNA
gacaaaaatggaaatgcagttggtacgcttgatgtgccaatgattgacttcagcagcgtgtcacggcggggctca

SEQ ID NO: 68358 - DNA, 75 bp, synthetic construct
  source 1..75: mol_type = other DNA
gatgagaaattttccagcgccatttacaacggaagaatatttacaatgaaacgtttacatacccttatgttattt

SEQ ID NO: 68359 - DNA, 75 bp, synthetic construct
  source 1..75: mol_type = other DNA
acaatacggatttggtgacgctttaacctctaatcaactgggggtcttaaatggcaaaaagtggatatttgatgc

SEQ ID NO: 68360 - DNA, 75 bp, synthetic construct
  source 1..75: mol_type = other DNA
aaaaaaagtcacccggaaaggtgaaaaaggtaactcaagtaatatctatctccttcatctggatggtgcaggaga

SEQ ID NO: 68361 - DNA, 75 bp, synthetic construct
  source 1..75: mol_type = other DNA
tgagccttatatctctggtcagcgttattgcacgtgccgggaaatataaaaattacatccgggatgaaataaaat

SEQ ID NO: 68362 - DNA, 75 bp, synthetic construct
  source 1..75: mol_type = other DNA
ccagaacggtctggccgtggccttgcgcgaactgggccggattgagcgcacactgttcatcctcgactggctgca

SEQ ID NO: 68363 - DNA, 75 bp, synthetic construct
  source 1..75: mol_type = other DNA
atcaagatcaccgaactgctgatggacgtggacgactggacgggcttcagccgccacttcacccacttgaaggac

SEQ ID NO: 68364 - DNA, 75 bp, synthetic construct
  source 1..75: mol_type = other DNA
tgtccgcagtagtctggctggttgccgctggtatgccagcgagcgcagcagagcatcagtccacactaagcgccg

SEQ ID NO: 68365 - DNA, 75 bp, synthetic construct
  source 1..75: mol_type = other DNA
cgcactgttcagttctctaaccgtgaccgagaacgtggcattaccattaatagaaaacgccggattaccccggtc

SEQ ID NO: 68366 - DNA, 75 bp, synthetic construct
  source 1..75: mol_type = other DNA
cgctcacggaggtgggcgacagcgacaggtcgatgtcctggctggcctgggagccatgtctgacaaattcggtaa

SEQ ID NO: 68367 - DNA, 75 bp, synthetic construct
  source 1..75: mol_type = other DNA
gtgccaaaaatcactggcgaaaggtagctcccgatcgttttgagattttaggaaccgttgaacatattcattatg

SEQ ID NO: 68368 - DNA, 75 bp, synthetic construct
  source 1..75: mol_type = other DNA
atgctgaggcactagaatatgatcttctcctcacaccgcatcattgttcatggcattcactttcctatgatagct

SEQ ID NO: 68369 - DNA, 75 bp, synthetic construct
  source 1..75: mol_type = other DNA
ccaaatttatttaacattctaggcacacttgcagataaaaaatcagcagcaaatgatgacattgttacccaaaag

SEQ ID NO: 68370 - DNA, 75 bp, synthetic construct
  source 1..75: mol_type = other DNA
cctttggctccatgaccggctcaggttacatcgctgcctcccgggataagatgaagagccgctttgactccgttg

SEQ ID NO: 68371 - DNA, 75 bp, synthetic construct
  source 1..75: mol_type = other DNA
gtgtgtccagcgtggtgtgcagttgcgcagtgaagatgacgtgactgacgacgctgaccgcacggaacaggtgca

SEQ ID NO: 68372 - DNA, 75 bp, synthetic construct
  source 1..75: mol_type = other DNA
cgcagtgaggatgacgtggctgacgacgctgaccgtacggaacaggtgcaggagaaagcgtcagtggaggaaata

SEQ ID NO: 68373 - DNA, 75 bp, synthetic construct
  source 1..75: mol_type = other DNA
tgctggcgcagacggaggaagtgagcgtgccgctggcctcactgattaaatcaccgctgaatgtgcgcacggtgc

SEQ ID NO: 68374 - DNA, 75 bp, synthetic construct
  source 1..75: mol_type = other DNA
cttagccaggaggtgctgttatccctgctcagtttctgtaccgcgtgcagtcttaacggtgtccagacccgcgag

SEQ ID NO: 68375 - DNA, 75 bp, synthetic construct
  source 1..75: mol_type = other DNA
gtgccggctcagccggcaacgttctcgctacccgtctgactgaagatccgaatacctccgtgctgctgcttgaag

SEQ ID NO: 68376 - DNA, 75 bp, synthetic construct
  source 1..75: mol_type = other DNA
gtcgggatatgcaccctgccgaacagattgccggattccgcgcaatggcgcaggaaggcaaaacacctgcgcaaa

SEQ ID NO: 68377 - DNA, 75 bp, synthetic construct
  source 1..75: mol_type = other DNA
gcacaacagttcagcggtcagcctcagcaggaacctcagccggaacctcaggtggaggccggtacgaaaaaagga

SEQ ID NO: 68378 - DNA, 75 bp, synthetic construct
  source 1..75: mol_type = other DNA
ttacggcgaggcgctcgcggtcgatgccaacggccagcttctgtcccgttatgaaaatggtgtctggaaggtgct

SEQ ID NO: 68379 - DNA, 75 bp, synthetic construct
  source 1..75: mol_type = other DNA
caattacatcaaatcagttccgcggtttttcaagcatagcgactgctgcaaacgctgtattaggtcgttatatcg

SEQ ID NO: 68380 - DNA, 75 bp, synthetic construct
  source 1..75: mol_type = other DNA
ctatgaaagactgccatcaacggaggcatttaatgccatatgcaaagtgacgagtgctatcacgcttgatacgtg

SEQ ID NO: 68381 - DNA, 75 bp, synthetic construct
  source 1..75: mol_type = other DNA
cacaggctctgacctggcgcagatgaaatacctgatggacagcgcggcagcacaacagaaagcgctcggactgac

SEQ ID NO: 68382 - DNA, 75 bp, synthetic construct
  source 1..75: mol_type = other DNA
agatattgtgattgccggaagccagcttaaggccggtggtaacacaagcctggatgccgcgaatgatattctgtt

SEQ ID NO: 68383 - DNA, 75 bp, synthetic construct
  source 1..75: mol_type = other DNA
gtagcgcggcgagcaaaaaacagtgcccttgctgtcacggaaaaaaatttattgaaagcgaggtttttacaaaca

SEQ ID NO: 68384 - DNA, 75 bp, synthetic construct
  source 1..75: mol_type = other DNA
tcactcggttaacaagattctgaaagacattatcattaagtccaaagggctttctggatatgactcgccgtatgt

SEQ ID NO: 68385 - DNA, 75 bp, synthetic construct
  source 1..75: mol_type = other DNA
acggaagtggccggcaaagcggcgaatgtgatggttgccaacccgtatggtatcacctgtgacggctgtggcttt

SEQ ID NO: 68386 - DNA, 75 bp, synthetic construct
  source 1..75: mol_type = other DNA
accgttacggtgtcgccgcaggtggtcgccgactggcagcactcaacatgctggcagagcgtgacatcattccgg

SEQ ID NO: 68387 - DNA, 75 bp, synthetic construct
  source 1..75: mol_type = other DNA
actattccccaaaatcgccaggcctgactgatgcatccgtctcgacgtcaaaagatgcgctgagcatcactgatg

SEQ ID NO: 68388 - DNA, 75 bp, synthetic construct
  source 1..75: mol_type = other DNA
gttgaggcatccggtgccagtctggagaaggcgcggcacgaccagctgcttaccgcgcttcgtgctctgctgtta

SEQ ID NO: 68389 - DNA, 75 bp, synthetic construct
  source 1..75: mol_type = other DNA
caccaaatatccgggcaaaggcagtttcaacattgttcccgattttgcttacgacgatggccgctttacgttcgt

SEQ ID NO: 68390 - DNA, 75 bp, synthetic construct
  source 1..75: mol_type = other DNA
catacgaagcagagcaggccgttctgggcggtctgatgctggagaatgaacgctgggatgaagtggtgctgatgc

SEQ ID NO: 68391 - DNA, 75 bp, synthetic construct
  source 1..75: mol_type = other DNA
ttcttgaacgcatccgtaagctggccccgcagcatgtagccgcgccgtaccggacagtggacgagtggcgagagt

SEQ ID NO: 68392 - DNA, 75 bp, synthetic construct
  source 1..75: mol_type = other DNA
ttggcggcggcgcagacttcagcgatatttttggtgacgttttcggcgatatttttggcggcggacgtggtcgtc

SEQ ID NO: 68393 - DNA, 75 bp, synthetic construct
  source 1..75: mol_type = other DNA
agtatcggtaaatttggtcttgcatataaaagtaatattcagcgtaaactcgataaccaatactacaccgaagcc

SEQ ID NO: 68394 - DNA, 75 bp, synthetic construct
  source 1..75: mol_type = other DNA
aacgccttcagttgcagaaagacctggttaggcatggattttatcgaaaccgtcagtgcgctgatgaatgcaacc

SEQ ID NO: 68395 - DNA, 75 bp, synthetic construct
  source 1..75: mol_type = other DNA
atgacggctgaattgttagtaaacgtaacgccttcggaaacgcgagtggcgtatattgatggcggtattctgcag

SEQ ID NO: 68396 - DNA, 75 bp, synthetic construct
  source 1..75: mol_type = other DNA
tgcaagacgctgaaagagatggcacagagctgccgttatttctacgaagattttgctgagttcgatgccgatgcg

SEQ ID NO: 68397 - DNA, 75 bp, synthetic construct
  source 1..75: mol_type = other DNA
attatgtcgacacccaaatctggcgagctatatggcgatggtgtgtaagaaggcacccccgaaaaggattgcggt

SEQ ID NO: 68398 - DNA, 75 bp, synthetic construct
  source 1..75: mol_type = other DNA
acttaataaaatggggtcaactggtgatgctgctaaatctcaacaagaagaactgatagcagggaaagattttgt

SEQ ID NO: 68399 - DNA, 75 bp, synthetic construct
  source 1..75: mol_type = other DNA
cgtcagttgcgggtggaaaaaattctgaatcgctctggcatccagccattgcaccgcaaatgctcgtttgcgaat

SEQ ID NO: 68400 - DNA, 75 bp, synthetic construct
  source 1..75: mol_type = other DNA
agaaggtttcctgatagttacagctgcagctgacaaaggactggttgatattcacgacagacgaccactggtact

SEQ ID NO: 68401 - DNA, 75 bp, synthetic construct
  source 1..75: mol_type = other DNA
ggcacccccgcaacacctaaggagctgagcgatcatagtggtattctgctaggaacatcccgctcagcacccata

SEQ ID NO: 68402 - DNA, 75 bp, synthetic construct
  source 1..75: mol_type = other DNA
gtgcggggcagtctccggcactggatgttaccgttcacgcaatcggtaagacccgcagtatcgagcgtatcaaca

SEQ ID NO: 68403 - DNA, 75 bp, synthetic construct
  source 1..75: mol_type = other DNA
ataaaagcaaattatcagagagtttgctaagaaaacattgtgttagcgtcaggctaaataatgatgaattgcagc

SEQ ID NO: 68404 - DNA, 75 bp, synthetic construct
  source 1..75: mol_type = other DNA
cgttcagtgatttcgcccgcgatcgtcgtggtgtgcgcgatccggaagcccgttacctcgccggcaatcccggtt

SEQ ID NO: 68405 - DNA, 75 bp, synthetic construct
  source 1..75: mol_type = other DNA
cgtgcactgcgcgaacgagagcatctgtctcaacctgtttttgccagatacctcaacgtcagtaaaaacctgata

SEQ ID NO: 68406 - DNA, 75 bp, synthetic construct
  source 1..75: mol_type = other DNA
caggggaggtatatcactcaggatccgattgggctgaaggggggatggaatttttatcagtatccgctgaatccg

SEQ ID NO: 68407 - DNA, 75 bp, synthetic construct
  source 1..75: mol_type = other DNA
gcacctgctgaatactactcttggggctacctgagcgagcgcggcgatgcttaccacgttatgcacgaaaacagc

SEQ ID NO: 68408 - DNA, 75 bp, synthetic construct
  source 1..75: mol_type = other DNA
atggtggatttacgtaaagcggcaaaaggtcagatgtgtacagtcagaattcctggctactgcaatcacaatccc

SEQ ID NO: 68409 - DNA, 75 bp, synthetic construct
  source 1..75: mol_type = other DNA
gatccgtatgagaaccgtttttgaacaggctattgatcaacgttcttcaaccggtgcctggcgtaatgccctctc

SEQ ID NO: 68410 - DNA, 75 bp, synthetic construct
  source 1..75: mol_type = other DNA
tctccttcctttctatcttggggaaaaggacgatgtcacttatgcaataaagcctacttgctggcctgggcttga

SEQ ID NO: 68411 - DNA, 75 bp, synthetic construct
  source 1..75: mol_type = other DNA
tggctgggcgcgagcgttgaccgccgcaccttaagcgagttgttagatacctggtggctgctatatggacagact

SEQ ID NO: 68412 - DNA, 75 bp, synthetic construct
  source 1..75: mol_type = other DNA
cactgtatcttctcaactatattgatgatgaggactatcgccgcaggatcctaacacagcttaaccggggcgaag

SEQ ID NO: 68413 - DNA, 75 bp, synthetic construct
  source 1..75: mol_type = other DNA
agcagaaatactggtttgcctgcgccacgtttgataactgggagggctggaatgagcaacaggtacagtttttac

SEQ ID NO: 68414 - DNA, 75 bp, synthetic construct
  source 1..75: mol_type = other DNA
gcggtgatcctcgactccacatttgcctcttatgcaaccatcgccaaccagatgatccccggcagtggctactta

SEQ ID NO: 68415 - DNA, 75 bp, synthetic construct
  source 1..75: mol_type = other DNA
agaaaacgttaccgcgaggggcaggaagatcagttgggtgcgctgggtctggtgacaaacgcagtggtgctgtgg

SEQ ID NO: 68416 - DNA, 75 bp, synthetic construct
  source 1..75: mol_type = other DNA
agggccagaagatgaacatatcgcgcggctttcgcctctgatgcatggtcatatcaacatgctgggacattatac

SEQ ID NO: 68417 - DNA, 75 bp, synthetic construct
  source 1..75: mol_type = other DNA
ttcagatgatatcccctcaggctacagggctggccagcaaacagagctcagataaccgcgcctcatacgcgttcg

SEQ ID NO: 68418 - DNA, 75 bp, synthetic construct
  source 1..75: mol_type = other DNA
tttttacgttgtttgtggatggtgaaaacgaagtgggtaaagtgacatccgtcacgccgcccaaactgacgcgca

SEQ ID NO: 68419 - DNA, 75 bp, synthetic construct
  source 1..75: mol_type = other DNA
ggtgctggataacgaaaatcgcagtggcaaagagaagagtatccggtttcaacgtcaggatctgcgtgagcaatt

SEQ ID NO: 68420 - DNA, 75 bp, synthetic construct
  source 1..75: mol_type = other DNA
acagcctgatttcaataacgctaaagagggcggaaccgtcgcctgggtattcgactgcggcaagattgaccagct

SEQ ID NO: 68421 - DNA, 75 bp, synthetic construct
  source 1..75: mol_type = other DNA
cattattccttcctgtctggctctgcaccgtattgaaactgagttaatgggcaaatttgatgaaggtaaactgcc

SEQ ID NO: 68422 - DNA, 75 bp, synthetic construct
  source 1..75: mol_type = other DNA
tttgttgattggccagcagtagatggtggcgatgaggacgacgatgattttggtgatcatgtagaccagatcgta

SEQ ID NO: 68423 - DNA, 75 bp, synthetic construct
  source 1..75: mol_type = other DNA
cctgcagctacgtggggtgacacgcggcaaaagtgtcagaaccacccgcagcaacaaagccgaaacaccgcagga

SEQ ID NO: 68424 - DNA, 75 bp, synthetic construct
  source 1..75: mol_type = other DNA
ctggggaatcaatggtcgttacctggggccgactatccgcgtctggaagggcgatgatgttaagctgatctacag

SEQ ID NO: 68425 - DNA, 75 bp, synthetic construct
  source 1..75: mol_type = other DNA
gaatcagtacctttacattagtgacaacatcgcccggttgcccgttttaacgtgggaacaggctggttattggga

SEQ ID NO: 68426 - DNA, 75 bp, synthetic construct
  source 1..75: mol_type = other DNA
gaagttcctgctgatcagatagtaccactggccagtgcgcttaattgtgacctgatgtggttgttaacgggaaaa

SEQ ID NO: 68427 - DNA, 75 bp, synthetic construct
  source 1..75: mol_type = other DNA
aacattaaggacgacctggaaaaccaggaaaccgtagctcaggaacaaaaagacctgcgtatcaagcagatcact

SEQ ID NO: 68428 - DNA, 75 bp, synthetic construct
  source 1..75: mol_type = other DNA
gctaccgttatgataatccacacagtgacctcccctgcgcaacggacgatgccaccggcagccggaaaaccatga

SEQ ID NO: 68429 - DNA, 75 bp, synthetic construct
  source 1..75: mol_type = other DNA
tctctgccaatggctcctggacttacaatggcgttgttcgttcatatgatgataaatacgattttaacgccagca

SEQ ID NO: 68430 - DNA, 75 bp, synthetic construct
  source 1..75: mol_type = other DNA
tgctctacacgccagctatgacgacgggcaatcaggcgaaaaatttttgcgggaactgtgccaagtggatctgct

SEQ ID NO: 68431 - DNA, 75 bp, synthetic construct
  source 1..75: mol_type = other DNA
aatgtggtggtgaccgatttcacggatgatatcgagctgttactcgtcccgattcaggcgtggctacgcatacat

SEQ ID NO: 68432 - DNA, 75 bp, synthetic construct
  source 1..75: mol_type = other DNA
cgcgatccgcacggtgaaattacagctcacagactgtggtgaaacccggggacgctgggtgattgaaggcgacct

SEQ ID NO: 68433 - DNA, 75 bp, synthetic construct
  source 1..75: mol_type = other DNA
gatcattcagctatttattttgaagtgtctggtgattcatcaagcccttatctttatgatcctaatggaagctat

SEQ ID NO: 68434 - DNA, 75 bp, synthetic construct
  source 1..75: mol_type = other DNA
agaggcggccctcccgggccatctgaaggtaaccggagtgaattccggccggttaggcattgcactgctggacac

SEQ ID NO: 68435 - DNA, 75 bp, synthetic construct
  source 1..75: mol_type = other DNA
gtggctgaccgtctgacggttcgcagtgcagaaatcatcccgtaccgcgtggaagctaccatttttctctatccg

SEQ ID NO: 68436 - DNA, 75 bp, synthetic construct
  source 1..75: mol_type = other DNA
gtggctaaggagaaatggacctcgatagctatcgttacacaacccgatgctggccagcttgccagctacaataat

SEQ ID NO: 68437 - DNA, 75 bp, synthetic construct
  source 1..75: mol_type = other DNA
atccgttcctgaacgcactgcgtcgggaacgtgttccagtttctatttatttggtgaatggtattaagctgcaag

SEQ ID NO: 68438 - DNA, 75 bp, synthetic construct
  source 1..75: mol_type = other DNA
ctcaggaagtggttgcgcaggagcagaaagatctgcgtatccgtcagattcaggaagcgttgcagtatgcgaatc

SEQ ID NO: 68439 - DNA, 75 bp, synthetic construct
  source 1..75: mol_type = other DNA
gcactggaacggcaatgacgtgcagtaccagtacatgcgtcctgaaacgctcttcggtccgaaaaaatttgaagg

SEQ ID NO: 68440 - DNA, 75 bp, synthetic construct
  source 1..75: mol_type = other DNA
ccaacattagtagtatcaacccctgttctacagagagcctaatagccgtgacgggaaatgatggagagacgcata

SEQ ID NO: 68441 - DNA, 75 bp, synthetic construct
  source 1..75: mol_type = other DNA
tgcggaaattggtcggaagattgcccggcagaatgctgtaaacaaaatctggatgcttgaaggttacttgctgaa

SEQ ID NO: 68442 - DNA, 75 bp, synthetic construct
  source 1..75: mol_type = other DNA
gcagcgggtatgagcgtgagccggagcagatcgaccttatcgatttgttgatgcaactctggcgtggcaagttga

SEQ ID NO: 68443 - DNA, 75 bp, synthetic construct
  source 1..75: mol_type = other DNA
actctcctgctgccctaattgaaaagcttaaaggggtcgactcatttactatggcaggctggattgaacgttaca

SEQ ID NO: 68444 - DNA, 75 bp, synthetic construct
  source 1..75: mol_type = other DNA
cacgagcaaaagccgaaggtaagaaattgggcagacctcctaaaatcgcgtcagaagcccgtagagagattttag

SEQ ID NO: 68445 - DNA, 75 bp, synthetic construct
  source 1..75: mol_type = other DNA
atgccgcgtcacgtcttgacccggagacgtataaaaaagtgcatgatgccggttttcgctgggcacccaaacagg

SEQ ID NO: 68446 - DNA, 75 bp, synthetic construct
  source 1..75: mol_type = other DNA
acgagaagcagaaacagctgctgcaagagctgcaagaaagcttcggtggcccaaccggcgagcacaacagcccgc

SEQ ID NO: 68447 - DNA, 75 bp, synthetic construct
  source 1..75: mol_type = other DNA
atgaaaaatattgcggcaggcggcattcttgaacgtatccgcagactggccccgccacatgtaaccgccccattc

SEQ ID NO: 68448 - DNA, 75 bp, synthetic construct
  source 1..75: mol_type = other DNA
taatggtgacggaagctatacccagatcctgaccacaggagcgatgtctggcacgctgacgctgatgccacagct

SEQ ID NO: 68449 - DNA, 75 bp, synthetic construct
  source 1..75: mol_type = other DNA
atggcagccgctgtcagctacacggctcgcagaagtgctgaaacaaagtgcggttccccccgcgctccccggcca

SEQ ID NO: 68450 - DNA, 75 bp, synthetic construct
  source 1..75: mol_type = other DNA
ttattccctgtatggacggtttatgcttaatgcctgcattaatagcaaatagctcagtgactcgctctctaatgt

SEQ ID NO: 68451 - DNA, 75 bp, synthetic construct
  source 1..75: mol_type = other DNA
ctggtgctggcgggcgcgggcagtggtaagacgcgcgtactggtgcatcgtatcgcctggctgatgagcgtggaa

SEQ ID NO: 68452 - DNA, 75 bp, synthetic construct
  source 1..75: mol_type = other DNA
gttgacggacaagtggagctgcttgtttatttcggtcagccttcctgggcgcacttcccgttctacttcaacagt

SEQ ID NO: 68453 - DNA, 75 bp, synthetic construct
  source 1..75: mol_type = other DNA
cgtatttttcgtcactggacaacatgattgcccaggggaacccgatgccggtgccttacggtgaaatgctggttg

SEQ ID NO: 68454 - DNA, 75 bp, synthetic construct
  source 1..75: mol_type = other DNA
ggtgatggaccgcatgtccatgaacggaggtcgctgggtgacgtttaactgggagagctggcgtccgaacgtcag

SEQ ID NO: 68455 - DNA, 75 bp, synthetic construct
  source 1..75: mol_type = other DNA
ccgcgctgtcgcgctatggtgcgcgacctctcggtacgtttaccgaaggaaacgcggtgttttcgtcgcaactgg

SEQ ID NO: 68456 - DNA, 75 bp, synthetic construct
  source 1..75: mol_type = other DNA
tgctcggcaaacttgctgacgtcagcgcgcagctgttagagcgcctctggttgcgctggaacccggcttatcatt

SEQ ID NO: 68457 - DNA, 75 bp, synthetic construct
  source 1..75: mol_type = other DNA
acatctttatcactgtgaccaccggggcctgccgctggcgcttatcagtgaagacggcaatacggcgtggagcgc

SEQ ID NO: 68458 - DNA, 75 bp, synthetic construct
  source 1..75: mol_type = other DNA
attgagcatctcgccctgctgaaacgacaggcagaacaggcgggatccagtctcaatcgacaggtgagcgtggaa

SEQ ID NO: 68459 - DNA, 75 bp, synthetic construct
  source 1..75: mol_type = other DNA
atggtggatttacgtaaagcggcgcgggggcagatgtgcaccgtcagaattcctggctactgcaatcacaatccc

SEQ ID NO: 68460 - DNA, 75 bp, synthetic construct
  source 1..75: mol_type = other DNA
tattccggtcgaaccagaatccgatccgatgaacgtcaattttgacaagctgtcccttgaagtacagaacgcggt

SEQ ID NO: 68461 - DNA, 75 bp, synthetic construct
  source 1..75: mol_type = other DNA
tttctgctgatgtattctgggatctgcaggacccggcaactgatgcgggactgcttaaccagaacgatgttacca

SEQ ID NO: 68462 - DNA, 75 bp, synthetic construct
  source 1..75: mol_type = other DNA
caccattgatgagctgtggcgggatatgcgctgggcagtggcgcgaatccaggacaagccgcgctgcattgtgag

SEQ ID NO: 68463 - DNA, 75 bp, synthetic construct
  source 1..75: mol_type = other DNA
gcaattagagaaagggctgacacgggaggagttgcaaaaaattctccctgccggcgcagcacgtaatgcgctgga

SEQ ID NO: 68464 - DNA, 75 bp, synthetic construct
  source 1..75: mol_type = other DNA
ccgtcttccgggcgtcgatatcacccaaaacggcggttcaggtcagctctcatctatttttattcgcggtacaaa

SEQ ID NO: 68465 - DNA, 75 bp, synthetic construct
  source 1..75: mol_type = other DNA
ttgtcagtggagaattgcggcaaggcgctgtacgcttttctcttgcttttaacagcaaaggagaaattgttctgc

SEQ ID NO: 68466 - DNA, 75 bp, synthetic construct
  source 1..75: mol_type = other DNA
ggggtgatttattcagtggcggaagacgtatcccgtctttatcccgtgggttttaccatcgtggaagtggatgcg

SEQ ID NO: 68467 - DNA, 75 bp, synthetic construct
  source 1..75: mol_type = other DNA
gcaaatgggcttacagggcgattcgtcagggctggccagcgttctcacagtggcttgaagcggtgatccagcgtg

SEQ ID NO: 68468 - DNA, 75 bp, synthetic construct
  source 1..75: mol_type = other DNA
aagaaaatttaccccaccgtccctatcacacggatgatctcgcttttggccttcgtatctccggcaaagggcgcg

SEQ ID NO: 68469 - DNA, 75 bp, synthetic construct
  source 1..75: mol_type = other DNA
tcgtcgtgcctgccggattggtttgtgacaatatcaacaccggcatctttatccctcccggtaaaacgttacaca

SEQ ID NO: 68470 - DNA, 75 bp, synthetic construct
  source 1..75: mol_type = other DNA
gctgacaatgcagctcagttagtcaagttaacggcatcggatgtattgggtataaatgacaattcaacgatttat

SEQ ID NO: 68471 - DNA, 75 bp, synthetic construct
  source 1..75: mol_type = other DNA
gtaccgaaacgggagataccaaagaaatcgcagttccgggtgattatcctgaaaatacaaccactatcgccccgt

SEQ ID NO: 68472 - DNA, 75 bp, synthetic construct
  source 1..75: mol_type = other DNA
ccagtcctcaccctggatgaaggtatcgagaaaactgccgcctggctacgcgaccacggaaaactgccgcgctaa

SEQ ID NO: 68473 - DNA, 75 bp, synthetic construct
  source 1..75: mol_type = other DNA
tttaaattcatgggaatatgtgccagaccatcgcggtgaaatcgtctataacaccgaaacgggagatgccaaaga

SEQ ID NO: 68474 - DNA, 75 bp, synthetic construct
  source 1..75: mol_type = other DNA
acgtgaagttcagctaatcggggcagacgctattacaaagctgttgatgctaataaccgagccaacagaatggcg

SEQ ID NO: 68475 - DNA, 75 bp, synthetic construct
  source 1..75: mol_type = other DNA
acgaagaaaatggcggtgatgatagtaacgagatcagcggcaacgggacggtcggggttaacctggggccgtggc

SEQ ID NO: 68476 - DNA, 75 bp, synthetic construct
  source 1..75: mol_type = other DNA
ttgtgcattgtgggatctggcggcgcgaaaacagcagcaatcgctggctgatttgatcggcataacgcttcccga

SEQ ID NO: 68477 - DNA, 75 bp, synthetic construct
  source 1..75: mol_type = other DNA
ggcgtggatgccagtgcgaaaggcgacaagaaggctgacagcattgacagcaccattgatgagctgtggcgggat

SEQ ID NO: 68478 - DNA, 75 bp, synthetic construct
  source 1..75: mol_type = other DNA
tatgggatcgccaggcttttccggacaccacaatccttgagatccgtccccggaaaaggctgaaatatgcaggtg

SEQ ID NO: 68479 - DNA, 75 bp, synthetic construct
  source 1..75: mol_type = other DNA
gcaggcccgtttacaggctaacccggcgatggcgagtgcagttgataccatgactggccttggtgcttcattcgg

SEQ ID NO: 68480 - DNA, 75 bp, synthetic construct
  source 1..75: mol_type = other DNA
tatgccaccgctcgtgcgctcggtctgcgcgccaaaattgatgagcagactggatggcacaaaagcctgtccaac

SEQ ID NO: 68481 - DNA, 75 bp, synthetic construct
  source 1..75: mol_type = other DNA
ggatatggctttgagtaagggcctgccgttccgcgccgccacggacggcgagagcgtcagcggcaagtttaccgg

SEQ ID NO: 68482 - DNA, 75 bp, synthetic construct
  source 1..75: mol_type = other DNA
tgagttgctgagcgtggcgcaaagcctgcgtggatttgcttacctgtcagcgtatggctgcaagacagtgcagga

SEQ ID NO: 68483 - DNA, 75 bp, synthetic construct
  source 1..75: mol_type = other DNA
acaggctcgcctccaggctaacccggcaatgtcgagcgtcgtcgacaccatgaccggcattggcgcaacattcgg

SEQ ID NO: 68484 - DNA, 75 bp, synthetic construct
  source 1..75: mol_type = other DNA
aaaccgcgcattctcggcgtgccggggcacgataataaagccgttgctactgagttgctgggcgtggcgcaaagc

SEQ ID NO: 68485 - DNA, 75 bp, synthetic construct
  source 1..75: mol_type = other DNA
gtagagattcagaccctgagtcaaaatggaaatcacgaaaaagagtttactgtgaatatgcagtgtccttataat

SEQ ID NO: 68486 - DNA, 75 bp, synthetic construct
  source 1..75: mol_type = other DNA
acatcagagtgcagggctcagtaccggtggcagtgttgccggaaatttcctggggaacatggcaaacaatctgct

SEQ ID NO: 68487 - DNA, 75 bp, synthetic construct
  source 1..75: mol_type = other DNA
gtgggtgcgcgaagcagtgtttttaaatcgcttccggcaaatgtggtttgccgggggaatcccgcagtggtgata

SEQ ID NO: 68488 - DNA, 75 bp, synthetic construct
  source 1..75: mol_type = other DNA
cgtttttctgcgttattaaattatcctattgttgttagcaaacaagctgcaaaaaagagaatatctggggagttt

SEQ ID NO: 68489 - DNA, 75 bp, synthetic construct
  source 1..75: mol_type = other DNA
ccacacaagacgcaccaaccgaagtttggggcacacattttaccgcgcgaattgcaccagacgcgatcaacaaat

SEQ ID NO: 68490 - DNA, 75 bp, synthetic construct
  source 1..75: mol_type = other DNA
tgtggatttgggcggaaccacgctggatgtggcaaaggttcaggggcaactggcaggtatcagccaggtgttttg

SEQ ID NO: 68491 - DNA, 75 bp, synthetic construct
  source 1..75: mol_type = other DNA
gcgccgcagtagaagcggcagaagcacagcgccagtcactgattgatgcagcaatggcttccatcagtctgattc

SEQ ID NO: 68492 - DNA, 75 bp, synthetic construct
  source 1..75: mol_type = other DNA
gctctatctgaggcgttgtatttactgcggacgttgtgaagaagtgtgcccgaccagagccatcagcttaccaat

SEQ ID NO: 68493 - DNA, 75 bp, synthetic construct
  source 1..75: mol_type = other DNA
cagatactgctttttatgcctgggatgcccgagggcatggaaaaagttcggggccgcgtggttatagcctatctc

SEQ ID NO: 68494 - DNA, 75 bp, synthetic construct
  source 1..75: mol_type = other DNA
tccttcacgccttccggcatcacccgtgaagaagtgaccggctcgcgggtttatggctggaaaggtaaaccacgt

SEQ ID NO: 68495 - DNA, 75 bp, synthetic construct
  source 1..75: mol_type = other DNA
cgggctattggcaagagtattgcgaaatacacgcacaggaacttcacgccggaaactttcgcacagtatgtggct

SEQ ID NO: 68496 - DNA, 75 bp, synthetic construct
  source 1..75: mol_type = other DNA
atgacgacacaatccagtcctgttattactgatatgaaagtcattccggtcgccgggcacgatagcatgttgctt

SEQ ID NO: 68497 - DNA, 75 bp, synthetic construct
  source 1..75: mol_type = other DNA
tcgactgtggtgctgatgttccttgaggctaaaaccatcccagggctgattgccaatatgcaacgttgcactaaa

SEQ ID NO: 68498 - DNA, 75 bp, synthetic construct
  source 1..75: mol_type = other DNA
taaattgcactaatagcatcatcatttctgacgtcaagattcatatggattcagagggtcgttactcgcttaatg

SEQ ID NO: 68499 - DNA, 75 bp, synthetic construct
  source 1..75: mol_type = other DNA
gtcgcagtgaaaaaaatctggagggcgttaaaccacagctggttgctgtcgttcgccgtgcgctggagctgacgg

SEQ ID NO: 68500 - DNA, 75 bp, synthetic construct
  source 1..75: mol_type = other DNA
taccgtcagcatcatgctgacagcaactggtatgaaaacgtgtatgaggacttcagggaggtctgtgacattttc

SEQ ID NO: 68501 - DNA, 75 bp, synthetic construct
  source 1..75: mol_type = other DNA
gcaccttacatgtgctcgcaaaaagtggacgtattgtgcacgtccgcgatgcatctggtcgcgttacctctgttg

SEQ ID NO: 68502 - DNA, 75 bp, synthetic construct
  source 1..75: mol_type = other DNA
gcaaaattgatgacgcagcagccgaaaagctcagtaaaacagcacaggcaccatcatccccaaacgacccgaccc

SEQ ID NO: 68503 - DNA, 75 bp, synthetic construct
  source 1..75: mol_type = other DNA
atcaggtcgaactggtgacaccagtgctgaaggtagtggcagaaaacgaatgggcaaactgtacggcgatcactc

SEQ ID NO: 68504 - DNA, 75 bp, synthetic construct
  source 1..75: mol_type = other DNA
gcactgacccggtcagaggcggtattgcagaaaagccaggatataacggaagaggcagattcggcactgaaaaac

SEQ ID NO: 68505 - DNA, 75 bp, synthetic construct
  source 1..75: mol_type = other DNA
agcagcattcagacaggccagccgggaactgaatattccggtggaatggggcggcgactggaagaccctgaaaga

SEQ ID NO: 68506 - DNA, 75 bp, synthetic construct
  source 1..75: mol_type = other DNA
attgatgatatcagattaacatcctgtaactcagccaacatattaaaaaacaaagacttctctcctgatgaaata

SEQ ID NO: 68507 - DNA, 75 bp, synthetic construct
  source 1..75: mol_type = other DNA
cgatcgcgccgaacgcgagctggtcgcggcctttaacgccgtgcgtaaggtgaaaacaccgggcggctttatcac

SEQ ID NO: 68508 - DNA, 75 bp, synthetic construct
  source 1..75: mol_type = other DNA
atgcaaattatcgttttgaatgctgcaataggtgaatataactggaagatggtttctgaccatcttaaagccatt

SEQ ID NO: 68509 - DNA, 75 bp, synthetic construct
  source 1..75: mol_type = other DNA
tgacaaaaatgactttactaaagctcttggtgtaaacactgacgatatcgttgctgtaggtatggtataccagtt

SEQ ID NO: 68510 - DNA, 75 bp, synthetic construct
  source 1..75: mol_type = other DNA
atacctgccgtcagctggagcgcgaaggttttgaagtcacctacctggcaccgcagcgtaacggcattatcgacc

SEQ ID NO: 68511 - DNA, 75 bp, synthetic construct
  source 1..75: mol_type = other DNA
gattgatactgcaatggcttccattagtctgattcaactgaaattgcaggccgggcggaagctgatgcaggcaga

SEQ ID NO: 68512 - DNA, 75 bp, synthetic construct
  source 1..75: mol_type = other DNA
aactgaggcggtggacgtattccgtctgaacaaacattctgtgtcggcagaacctcgcggagcgggtgaaccagt

SEQ ID NO: 68513 - DNA, 75 bp, synthetic construct
  source 1..75: mol_type = other DNA
gtgagtaaaggaaaaaaatatgtcatctgccacgccgattatccttgtgataaatacgagtttggaaagccagtt

SEQ ID NO: 68514 - DNA, 75 bp, synthetic construct
  source 1..75: mol_type = other DNA
aagcgtttttccagccaggggtatgttgagcccggaaaatacaatttacaggttcaactaaataaacagccattg

SEQ ID NO: 68515 - DNA, 75 bp, synthetic construct
  source 1..75: mol_type = other DNA
gctgttaattatgcactcaaatatgccagtgaacataatgaacgtctgatagacagagataatcttaagtcggca

SEQ ID NO: 68516 - DNA, 75 bp, synthetic construct
  source 1..75: mol_type = other DNA
ggctggctacagtgccgggtgatatgcgttgttattattatgatgcagtaacgtctgaatatacgggctggtctg

SEQ ID NO: 68517 - DNA, 75 bp, synthetic construct
  source 1..75: mol_type = other DNA
aatcaacgggttcgacaatccgatgactcagccgttgttgtcagatgagcccctgacagcgctgatggatcatta

SEQ ID NO: 68518 - DNA, 75 bp, synthetic construct
  source 1..75: mol_type = other DNA
accccacggaagggggaatgcaggatattatcgactgcattcgtgctgaactgggtaccggaactacaaaaaact

SEQ ID NO: 68519 - DNA, 75 bp, synthetic construct
  source 1..75: mol_type = other DNA
gaaaatacaactactatcgccccgttaacgccattcgataaatgggatggtgagaaatgggtgaccgatactgag

SEQ ID NO: 68520 - DNA, 75 bp, synthetic construct
  source 1..75: mol_type = other DNA
tgacgagcttatagaaaaagccattgctttcaagcgtgcgtatcgtcagcaatatcaacaaaaagtcggatggaa

SEQ ID NO: 68521 - DNA, 75 bp, synthetic construct
  source 1..75: mol_type = other DNA
gagataccgccgtggctacggtgcagattactgtcagcagaaaatgcattactcaggaagaaatggatgaattat

SEQ ID NO: 68522 - DNA, 75 bp, synthetic construct
  source 1..75: mol_type = other DNA
gcactgaaacaggagaatcaaaagaaatcacagctccgggtgattaccctgaaaatacaaccactatcgccccgt

SEQ ID NO: 68523 - DNA, 75 bp, synthetic construct
  source 1..75: mol_type = other DNA
aactgactcaggcagaaacaacccgacttaacgccgtgctggattacattgacgcggtgacggcaacagatacca

SEQ ID NO: 68524 - DNA, 75 bp, synthetic construct
  source 1..75: mol_type = other DNA
ggtatgtatcacctgaagggaatgatgcagtaattatttttgatgcccctgaaattcaggagcataaaaatagat

SEQ ID NO: 68525 - DNA, 75 bp, synthetic construct
  source 1..75: mol_type = other DNA
tggtgatgggcattgtggcatctgcatccgtacaggccgcagaaatatataacaaagacggtaataaactggatg

SEQ ID NO: 68526 - DNA, 75 bp, synthetic construct
  source 1..75: mol_type = other DNA
atgaccacaccaaatccactggcaaagacgaaaggtgcggggacgacgttctggatgtataccggcaagggcgat

SEQ ID NO: 68527 - DNA, 75 bp, synthetic construct
  source 1..75: mol_type = other DNA
tgacgagcttatagaaaaagctattgctttcaagcatgcgtatcgtcagcaataccaacattactttgcagataa

SEQ ID NO: 68528 - DNA, 75 bp, synthetic construct
  source 1..75: mol_type = other DNA
atgacgcatattcggatcgaaaaaggaacgggtggctggggcggcccgcttgagctgaaagccacgccgggaaaa

SEQ ID NO: 68529 - DNA, 75 bp, synthetic construct
  source 1..75: mol_type = other DNA
actgtgagcgagaagggataacacaggctcagttcattgagaaaattatcaaagatgaactgcagagactggata

SEQ ID NO: 68530 - DNA, 75 bp, synthetic construct
  source 1..75: mol_type = other DNA
cttcctcatcaggtacaaagcgagcatacagaaagggtaatcctttgacgcttgcagaacgtcagcaggcgtccc

SEQ ID NO: 68531 - DNA, 75 bp, synthetic construct
  source 1..75: mol_type = other DNA
cagaaaattatatttcagcaaaaaaccagcatcccgcctggatactccttgccactcgccgtgctccactggtat

SEQ ID NO: 68532 - DNA, 75 bp, synthetic construct
  source 1..75: mol_type = other DNA
gaggaagctattcagtctctttccagtattctcattgagcatgtgagtcaggaacagtatgacattaatcaggac

SEQ ID NO: 68533 - DNA, 75 bp, synthetic construct
  source 1..75: mol_type = other DNA
gtattgaagcaataatcggactttcctacagaaaagataaaagggttttatctgttttatgcgatgagttaaaaa

SEQ ID NO: 68534 - DNA, 75 bp, synthetic construct
  source 1..75: mol_type = other DNA
agattccaccgtgcttttccatcttgtggctgatgtggcccgcaggaaaagacgtcgtttctctgtactgttcat

SEQ ID NO: 68535 - DNA, 75 bp, synthetic construct
  source 1..75: mol_type = other DNA
atggcagacataaggccattttgttactatcaagccccttttcactacaaagaagtaatgcctactatgacccaa

SEQ ID NO: 68536 - DNA, 75 bp, synthetic construct
  source 1..75: mol_type = other DNA
atggcccatacttattcccatttgtacggattgcccgcaaccgggttgcgtttctttaccgtgtacggcccctgg

SEQ ID NO: 68537 - DNA, 75 bp, synthetic construct
  source 1..75: mol_type = other DNA
tgaactgcaaagactcagggttgaactactctctggtcactaccagccgtcccccgccagacgggtttacatccc

SEQ ID NO: 68538 - DNA, 75 bp, synthetic construct
  source 1..75: mol_type = other DNA
tcgtaaccgctggttcagcgtgatggtggggccgtctgtgcgcgtgaatgaatggttcagcgcgtatgcgatggc

SEQ ID NO: 68539 - DNA, 75 bp, synthetic construct
  source 1..75: mol_type = other DNA
gatacctgttaacccggacactcttgaaatctggggcgttgtcacctttgcgttgaatcagtttcctcatgtaca

SEQ ID NO: 68540 - DNA, 75 bp, synthetic construct
  source 1..75: mol_type = other DNA
atacccgctggcatgaagattcagtgcgtaaccgctggttcagcatgatggcggggccatctgtacgcgtgaatg

SEQ ID NO: 68541 - DNA, 75 bp, synthetic construct
  source 1..75: mol_type = other DNA
ggtaaaaatgcccgctccctcatcctctggacagaacgaggcgcagcccgtcacgcaaaaatgctcgaaaccgat

SEQ ID NO: 68542 - DNA, 75 bp, synthetic construct
  source 1..75: mol_type = other DNA
ggcgatgtaattatatctgtagatccaaggtattttaggcctgcagaagttgaaaccttgcttggcgatcctact

SEQ ID NO: 68543 - DNA, 75 bp, synthetic construct
  source 1..75: mol_type = other DNA
gcgcacctggggcgtaccgatgtcactgttcgtgcacaaagacacggaagagctgcatccgcgtaccctcgaact

SEQ ID NO: 68544 - DNA, 75 bp, synthetic construct
  source 1..75: mol_type = other DNA
aattctttagaatgattacaagaaactggttagacaaaccagaaaatcagaaatctctccagtatttttacaatg

SEQ ID NO: 68545 - DNA, 75 bp, synthetic construct
  source 1..75: mol_type = other DNA
tgtttgcactttccactccgatggaaatacgcaatgaatgctgtttaccttcgcattcatcacccaaaatgtatt

SEQ ID NO: 68546 - DNA, 75 bp, synthetic construct
  source 1..75: mol_type = other DNA
tccggcctgctgcgatgatgacggacttatcattgaaaactgtcttgctcgtctgaagcagaaaaaacctgagga

SEQ ID NO: 68547 - DNA, 75 bp, synthetic construct
  source 1..75: mol_type = other DNA
gagaaagacacccgcccgacttttgtggtgacgccgtctttctttaaggtgaaaccgaatggtcagcagacgctg

SEQ ID NO: 68548 - DNA, 75 bp, synthetic construct
  source 1..75: mol_type = other DNA
ctgctgtgctgttttggttcatcggtgccgaatcatgccgccatttactgtggtgatggcgagctgctgcaccat

SEQ ID NO: 68549 - DNA, 75 bp, synthetic construct
  source 1..75: mol_type = other DNA
gatatcctgcttggtggacattatattacgcccttagatttatatatttcataagcataccagtgttatccattt

SEQ ID NO: 68550 - DNA, 75 bp, synthetic construct
  source 1..75: mol_type = other DNA
gcaggcgaggaaatcttctgcgacgaacatggtcgcgtgcgggtgaagttcaactgggaccgctataacccgtca

SEQ ID NO: 68551 - DNA, 75 bp, synthetic construct
  source 1..75: mol_type = other DNA
acgaacaccggcggctgctcgagcggtgcgacggcaagcagctggcggcgtggatgcgtcagacctgcctcgatg

SEQ ID NO: 68552 - DNA, 75 bp, synthetic construct
  source 1..75: mol_type = other DNA
ctgaccacggtaaacggtgtatcgcagtttcagccggagtggatatgctgggaacctggtgtgatgtgggttcgc

SEQ ID NO: 68553 - DNA, 75 bp, synthetic construct
  source 1..75: mol_type = other DNA
aaaaggagcgcgctgatgaggctgtacgaaatgctgaatcagcaacagccattacccgtaacgtcctgcaatcac

SEQ ID NO: 68554 - DNA, 75 bp, synthetic construct
  source 1..75: mol_type = other DNA
caacgcttccggaaaactgctggcgttagatagccagttaaccaatgatttttcagaaaaaagcagctatttcca

SEQ ID NO: 68555 - DNA, 75 bp, synthetic construct
  source 1..75: mol_type = other DNA
tacggaaagtacatgggtggcccaagggtaattgctgttggggtaatcctgacgataagccatttactggaaata

SEQ ID NO: 68556 - DNA, 75 bp, synthetic construct
  source 1..75: mol_type = other DNA
ttcagtccttaccccattttcgctttatccagcagtcactgcttacgtttgttccggccgacagcccaccagaat

SEQ ID NO: 68557 - DNA, 75 bp, synthetic construct
  source 1..75: mol_type = other DNA
tccccgctggcgcggggaacactggcaaaacaaacatcggggtacgcgtggtgccggtttatccccgctggcgcg

SEQ ID NO: 68558 - DNA, 75 bp, synthetic construct
  source 1..75: mol_type = other DNA
cggtactatgacccgctacaggggaggtatattacacaagaccccattgggctggcggggggatggaacctgtat

SEQ ID NO: 68559 - DNA, 75 bp, synthetic construct
  source 1..75: mol_type = other DNA
tcgctgctttccttttaactgtcgtctgttctttcatctggtcaaccaaccactactacagcaaatatcagcacg

SEQ ID NO: 68560 - DNA, 75 bp, synthetic construct
  source 1..75: mol_type = other DNA
atgactaaaaatactcgtttttcccctgaagtccgtcaacgggcagcccgtatggttctggaaagtcagggcgaa

SEQ ID NO: 68561 - DNA, 75 bp, synthetic construct
  source 1..75: mol_type = other DNA
tcacaggacggtttttactacacgatgtaccctctgtatgactggaaaacccgggatatatggatatacaacggg

SEQ ID NO: 68562 - DNA, 75 bp, synthetic construct
  source 1..75: mol_type = other DNA
acacgctggggctgattacgtccttcagttatgccaatgctgaagatgagaaaaaaacgcactacagcgataccc

SEQ ID NO: 68563 - DNA, 75 bp, synthetic construct
  source 1..75: mol_type = other DNA
ccagcatcctggcagggtactctcagtctaatttgttgtccgattattttgttgaacaatggcgcgaaaagcaca

SEQ ID NO: 68564 - DNA, 75 bp, synthetic construct
  source 1..75: mol_type = other DNA
tgagtcagtggctggcttatcatcttcatgactacctgctggcgacggtgtatgtgacggtggtgacgatggtca

SEQ ID NO: 68565 - DNA, 75 bp, synthetic construct
  source 1..75: mol_type = other DNA
acacgctggggctgattacgtcattcagttatgccaacgctgaagatgagcaaaaaacgcattacagcgataccc

SEQ ID NO: 68566 - DNA, 75 bp, synthetic construct
  source 1..75: mol_type = other DNA
acatgacgtattttcccttttaccggtatgccatgacgtttgaagaatttgttccggcattttcttcctggtttg

SEQ ID NO: 68567 - DNA, 75 bp, synthetic construct
  source 1..75: mol_type = other DNA
agaggtattcagagaaatggcaacgacgaacgcattctgtctggcgtcaccgccactggtccgcatctgccttca

SEQ ID NO: 68568 - DNA, 75 bp, synthetic construct
  source 1..75: mol_type = other DNA
gaaagagctgaagcgggttaccgacgaacgggacatattaaaaaaagccgttgtagattcaattggtcaacgcaa

SEQ ID NO: 68569 - DNA, 75 bp, synthetic construct
  source 1..75: mol_type = other DNA
ttcccggatgacattcccgatgaacaggagaatgacctgggctgccgggatatcccgtcctggcgacgtatctgt

SEQ ID NO: 68570 - DNA, 75 bp, synthetic construct
  source 1..75: mol_type = other DNA
taacgggcggcggtggcggaggggggggctgccaggctatatccagtaacgaaacgtttttcggtgctggcggtg

SEQ ID NO: 68571 - DNA, 75 bp, synthetic construct
  source 1..75: mol_type = other DNA
aattgtcgaagacgttgtttgagcagatgaagcaggcggaagaactggatcgtgcgattcgccagaatctggagg

SEQ ID NO: 68572 - DNA, 75 bp, synthetic construct
  source 1..75: mol_type = other DNA
cgacactctggaaaactggcgtgaccagaagcagattatttcggtcatctgtaaagacggaattaaaattgatga

SEQ ID NO: 68573 - DNA, 75 bp, synthetic construct
  source 1..75: mol_type = other DNA
tcctggcagcgatgaactgaacgggattaacgtgaaataccgttatgagtttacggacacactggggatggtgac

SEQ ID NO: 68574 - DNA, 75 bp, synthetic construct
  source 1..75: mol_type = other DNA
accctgactaacgttggacggaatattctggataaagcaagcacacaggcggttattcaatatcttggtctgagc

SEQ ID NO: 68575 - DNA, 75 bp, synthetic construct
  source 1..75: mol_type = other DNA
ccgcctgccggggtgttcagacagaaactgcagtacgcccgggatgtgcgcgacggcaaaattcatgatccgcac

SEQ ID NO: 68576 - DNA, 75 bp, synthetic construct
  source 1..75: mol_type = other DNA
ggtcagactgatatctcggctgcgaccggaaggacttctaccacaagtgatggtggtgctaccagtaaaaagaat

SEQ ID NO: 68577 - DNA, 75 bp, synthetic construct
  source 1..75: mol_type = other DNA
cggttatcgctggactcaggcggtgctggtggtgctgatgaccttaccgcgcacactggtcgaactttcgccgtt

SEQ ID NO: 68578 - DNA, 75 bp, synthetic construct
  source 1..75: mol_type = other DNA
taatggtgacggaagctatacccagatcctgaccacaggtgcgacgtctggcacgctgacgcttatgccacagct

SEQ ID NO: 68579 - DNA, 75 bp, synthetic construct
  source 1..75: mol_type = other DNA
tatcggctggcttattatcatcgtctttaactgccaggcgggtacgccaggcgaaaaccgctttggaccagatcc

SEQ ID NO: 68580 - DNA, 75 bp, synthetic construct
  source 1..75: mol_type = other DNA
atctttgtcatggacttcacgcaggatctcgatgaactgatggtgccgctgatgcgctggctgtaccgcaatcag

SEQ ID NO: 68581 - DNA, 75 bp, synthetic construct
  source 1..75: mol_type = other DNA
ccacctctgaatggttgcaggtctgggcggcatttttctttaccactattttctctaatattttttgggggattg

SEQ ID NO: 68582 - DNA, 75 bp, synthetic construct
  source 1..75: mol_type = other DNA
gccggtgcaggtcttgccagccttttgggaacatcaacaccttggggcgctggcattggtgctggtatcggattg

SEQ ID NO: 68583 - DNA, 75 bp, synthetic construct
  source 1..75: mol_type = other DNA
gacaaaaaagctctttactccaaagtaatgaatatcccaggcatgcaacaacttacatcaaccaaatcctttgtt

SEQ ID NO: 68584 - DNA, 75 bp, synthetic construct
  source 1..75: mol_type = other DNA
tcccttgtgtgaatatctctgcagagccggaggcgtattttcgtatcgcaccggaagactggctgcgggcagaga

SEQ ID NO: 68585 - DNA, 75 bp, synthetic construct
  source 1..75: mol_type = other DNA
gcatcgataaagccttcccgggcgtaaaagccctctcgggcgcagcgttaaatgtctatccgggccgcgtgatgg

SEQ ID NO: 68586 - DNA, 75 bp, synthetic construct
  source 1..75: mol_type = other DNA
ggagcacagcttggcagcattgttcccggtattggtactggtattggtgccgctgttggcggcggtcttggtctt

SEQ ID NO: 68587 - DNA, 75 bp, synthetic construct
  source 1..75: mol_type = other DNA
tgttctgtttctggtctttggattaggacaggcaaactatgggttaatcctgctgttttacgggattcgtggttt

SEQ ID NO: 68588 - DNA, 75 bp, synthetic construct
  source 1..75: mol_type = other DNA
aacctttacctggacaatatggaggcaacgggcttttaccgggtgcccctgtcctctgcactgccgggcgatatc

SEQ ID NO: 68589 - DNA, 75 bp, synthetic construct
  source 1..75: mol_type = other DNA
gtgtcaaaacctataacggcgcgctgggcgtcgatattcacgaaaaagatcacccaacgattctggaaatggcaa

SEQ ID NO: 68590 - DNA, 75 bp, synthetic construct
  source 1..75: mol_type = other DNA
cagtgggagctgcactattgcttgttatgccagtagccgtatggatttctggctggcgttggcaacctggagaac

SEQ ID NO: 68591 - DNA, 75 bp, synthetic construct
  source 1..75: mol_type = other DNA
acttcagaagtgatagcggtaatttctatacagcaagtggagcatttacactgggtggctctgcgccagcccatg

SEQ ID NO: 68592 - DNA, 75 bp, synthetic construct
  source 1..75: mol_type = other DNA
agtcttgagcaactttctaacatttcgtcagagttcgaaccatcaagtcaactacgacgaaaaatggccctataa

SEQ ID NO: 68593 - DNA, 75 bp, synthetic construct
  source 1..75: mol_type = other DNA
cgtaaaaacacctgaagcagtaaggaaattaacgcgcgaccgggcgctggcaattgcccgcagccatggaattgc

SEQ ID NO: 68594 - DNA, 75 bp, synthetic construct
  source 1..75: mol_type = other DNA
aagaaaaacaatcacttccagctaaaccagttttatatcttggattatcgcgactattcccgattggtgaaacta

SEQ ID NO: 68595 - DNA, 75 bp, synthetic construct
  source 1..75: mol_type = other DNA
gagcaggaccgcatcaccgtcacggacagcctgaaccggcgtgaggtgctgcatacagaaggcggggccgggctg

SEQ ID NO: 68596 - DNA, 75 bp, synthetic construct
  source 1..75: mol_type = other DNA
gaggaaggaaaattaggcgctgagaatttactcaagcggatgagtgacaccgaaaagaaaaatacgctgctggtg

SEQ ID NO: 68597 - DNA, 75 bp, synthetic construct
  source 1..75: mol_type = other DNA
cgagtgggtcaggaggtgattgtggacttcctcaacggcgacccggaccagccgattattatggggcgtacctac

SEQ ID NO: 68598 - DNA, 75 bp, synthetic construct
  source 1..75: mol_type = other DNA
tttcttgccttaacagctactgaacagatggactatgactcaccgatgatggtgacaactcaggctatgcaatcg

SEQ ID NO: 68599 - DNA, 75 bp, synthetic construct
  source 1..75: mol_type = other DNA
tggtggtcgatgcctgcccggacaacttgttgcgcctgtcatttaatgttgattttacccaccgtcagggctggg

SEQ ID NO: 68600 - DNA, 75 bp, synthetic construct
  source 1..75: mol_type = other DNA
cagtggtgtggttgtggttggtgaatccggtagtatccttatctcaagagataataagctggtggaaaacttcat

SEQ ID NO: 68601 - DNA, 75 bp, synthetic construct
  source 1..75: mol_type = other DNA
ttgaatttcatattaataaagtgaacgagcattatcatgtgcctttgttactcagccaatatgggtattcaacct

SEQ ID NO: 68602 - DNA, 75 bp, synthetic construct
  source 1..75: mol_type = other DNA
catagtttttgcgccaaaataccgaagacaggtgttctacagagagaagcgtagagcaacaggcagtattttgag

SEQ ID NO: 68603 - DNA, 75 bp, synthetic construct
  source 1..75: mol_type = other DNA
aaagctggctaaagaccagaacggcgcagatattcctgagcctgcgctgtttgtcaaaaaccttggtttggggga

SEQ ID NO: 68604 - DNA, 75 bp, synthetic construct
  source 1..75: mol_type = other DNA
ccacagtcatcccggtggtctgccctggctgagcgaggcggaccggcggctgcagataaagagtgccctgccctg

SEQ ID NO: 68605 - DNA, 75 bp, synthetic construct
  source 1..75: mol_type = other DNA
atgacacagactgaatcagcgattctggcacatgcccggcggtgtgcgcctgcggagtcgtgcggcttcgtgata

SEQ ID NO: 68606 - DNA, 75 bp, synthetic construct
  source 1..75: mol_type = other DNA
gtgccggaagcggatgaggtgctgcctgcgccgctgccgccgtaccgggtactgaccgggctggtggaccgcttc

SEQ ID NO: 68607 - DNA, 75 bp, synthetic construct
  source 1..75: mol_type = other DNA
gtgagaaatcagggcagagctttacaggggtatacaactcagccgcccctggcaggaacgcaatcgcgctcctga

SEQ ID NO: 68608 - DNA, 75 bp, synthetic construct
  source 1..75: mol_type = other DNA
cgaatgttacccttatcgcctgatctttaagggggttatcgtggctgttcatttgcttattgtcgatgcactgaa

SEQ ID NO: 68609 - DNA, 75 bp, synthetic construct
  source 1..75: mol_type = other DNA
gacaggaatattattgctgattgtcatttcgggcagtttattttccgcttgtcaatttgcttataaagatgcaaa

SEQ ID NO: 68610 - DNA, 75 bp, synthetic construct
  source 1..75: mol_type = other DNA
ggcaataacactgggccgcgctttaagtctgagttgattaacccgcgcaaaggaacgccaacaagctacatcgcg

SEQ ID NO: 68611 - DNA, 75 bp, synthetic construct
  source 1..75: mol_type = other DNA
gcgatcgcgcgacgcgtgaaaaactgtttactgcgggctggacgcgagcggaaaaaaatgatgccaatgataccc

SEQ ID NO: 68612 - DNA, 75 bp, synthetic construct
  source 1..75: mol_type = other DNA
tatggtcattctggcggacgttaatgcccagccttcccatatcagcaagccactgatgcaacgtattgaatactt

SEQ ID NO: 68613 - DNA, 75 bp, synthetic construct
  source 1..75: mol_type = other DNA
gagtttcggtatcgccctgttcctgaccgagcttgcgcctggctggctgaaacgcccgctgggtatcgccattga

SEQ ID NO: 68614 - DNA, 75 bp, synthetic construct
  source 1..75: mol_type = other DNA
gctatgacgataaaggccgcctgaccggcgaatgccagacggtggagaacccggagacgggggaactgctgtggc

SEQ ID NO: 68615 - DNA, 75 bp, synthetic construct
  source 1..75: mol_type = other DNA
cgggtgaaaacatggatgcccgttcgtgggcttactggacacaattatggatggcacaggcacaccgcgcagtca

SEQ ID NO: 68616 - DNA, 75 bp, synthetic construct
  source 1..75: mol_type = other DNA
ggattcgtcaatccaagcgtggtgatgattgcagggtttatggtggtcatggcggcgctacaaaaaacccggctt

SEQ ID NO: 68617 - DNA, 75 bp, synthetic construct
  source 1..75: mol_type = other DNA
tgctgtctgccttgtcagcaaaaaagcatctccctatgtcagctatgaagccgtgttgcataaacgtgagcagcg

SEQ ID NO: 68618 - DNA, 75 bp, synthetic construct
  source 1..75: mol_type = other DNA
agccaacactactgtttaatggttacgccgaccaggtggcatcgctgtatcgtggcctggatttgcgggagaatt

SEQ ID NO: 68619 - DNA, 75 bp, synthetic construct
  source 1..75: mol_type = other DNA
ctgttaccggcgatcgaaaaggcgatgccgcctttgctggtggcccgtatgcgcagccacagttctgaatattac

SEQ ID NO: 68620 - DNA, 75 bp, synthetic construct
  source 1..75: mol_type = other DNA
ggcaataacacggggccgcgctttaagtctgagctgattaacccgcgcaaaggaacgccgacaagctacatagcg

SEQ ID NO: 68621 - DNA, 75 bp, synthetic construct
  source 1..75: mol_type = other DNA
tcgatggtggtgccgtggattggttttccgctacacaaattgctggcgcttgccgaacccaccagcaatgcgaag

SEQ ID NO: 68622 - DNA, 75 bp, synthetic construct
  source 1..75: mol_type = other DNA
gaaatgtatgtcgatattaccgggatgcgtaccgataccggtgcgtcagtttcaaccactgtttcactgagttaa

SEQ ID NO: 68623 - DNA, 75 bp, synthetic construct
  source 1..75: mol_type = other DNA
gaggcaacacgaaggacgctaaacgctatggttcgtgataagttgctggagcgtgtgaaagtccgtgagccacgt

SEQ ID NO: 68624 - DNA, 75 bp, synthetic construct
  source 1..75: mol_type = other DNA
atgacggtgcgttatctgggaatgaacagccagaccggcctcagtatttctgaagttgagcacatcaggcaaagc

SEQ ID NO: 68625 - DNA, 75 bp, synthetic construct
  source 1..75: mol_type = other DNA
atatggctcgctgttgtctgcactgattgaccagccgcagaccccggcgctgcgtctgcagattatggccgcgtg

SEQ ID NO: 68626 - DNA, 75 bp, synthetic construct
  source 1..75: mol_type = other DNA
ttaccggaacggaacgccacgctaaccgtttcgctaccagtgcatcacgtagtaactcccgctacagcctgagcg

SEQ ID NO: 68627 - DNA, 75 bp, synthetic construct
  source 1..75: mol_type = other DNA
aggcacgattaacatagtgaacggaacaccaattcacgaacgttcccgaaatatcgataacagacgctctctggg

SEQ ID NO: 68628 - DNA, 75 bp, synthetic construct
  source 1..75: mol_type = other DNA
cttgaacatgttgaaatttcgattcgtgatgaagaactgattgccggtaaccgcaccgtaaaaccgcgcgccggg

SEQ ID NO: 68629 - DNA, 75 bp, synthetic construct
  source 1..75: mol_type = other DNA
tctggctgaagaactcagcaacgtatcaaaagcctgtaaaatcatgggcgtttcgcgtgatacgttttatcgtta

SEQ ID NO: 68630 - DNA, 75 bp, synthetic construct
  source 1..75: mol_type = other DNA
gcgggaagagatatttacgcatgggtacagggaggattgctcgatttcaatagtggttattattccaatattatt

SEQ ID NO: 68631 - DNA, 75 bp, synthetic construct
  source 1..75: mol_type = other DNA
ccagagaactacggcagcctggcggtggatgtggatacattcctggaaaccatcagcgaaggtgtcgccatgttc

SEQ ID NO: 68632 - DNA, 75 bp, synthetic construct
  source 1..75: mol_type = other DNA
agcaacgctgggttaaccactatcagaaccgcctgatctatgagcgtgccatgctggacgaaagcggcggcgtgg

SEQ ID NO: 68633 - DNA, 75 bp, synthetic construct
  source 1..75: mol_type = other DNA
attgatgcgctggagaatgccgtttcagggatggggattgtgcaggatatcagtgcctttacggccagttttact

SEQ ID NO: 68634 - DNA, 75 bp, synthetic construct
  source 1..75: mol_type = other DNA
ggtgaggttgtcagacctgcctgtactctggcgatggaagacgcctggcagattattgatatgggggaaaccccg

SEQ ID NO: 68635 - DNA, 75 bp, synthetic construct
  source 1..75: mol_type = other DNA
cctggcttacctgcagtctaaaggtaaaaacctgggtcgtggctacgacgacgaagatatcctgaaatatgttga

SEQ ID NO: 68636 - DNA, 75 bp, synthetic construct
  source 1..75: mol_type = other DNA
gcgtttatcgcgtggggtatcatcaccgcgttatttattccaacagggtggttaccgaacgagacgctggcgaag

SEQ ID NO: 68637 - DNA, 75 bp, synthetic construct
  source 1..75: mol_type = other DNA
cctgtccaccctggtagctgcgcatatgagcatgtgccttgatgcagcttgtggcgatttgtatgccaccgatga

SEQ ID NO: 68638 - DNA, 75 bp, synthetic construct
  source 1..75: mol_type = other DNA
gaagaaagtcatggatgcagggaaaagaataccgccattacgctgtagaaggtgatcctgggcattacagtgaat

SEQ ID NO: 68639 - DNA, 75 bp, synthetic construct
  source 1..75: mol_type = other DNA
atgttttctacaaacttaatacagagtaattatggtgatttaaatattaaaagtctggcttttgactcttttaaa

SEQ ID NO: 68640 - DNA, 75 bp, synthetic construct
  source 1..75: mol_type = other DNA
tggtgtggctcagatgctggccccgaaggctaaagtaccggagtacaaaagcacggataacggcagacagaacac

SEQ ID NO: 68641 - DNA, 75 bp, synthetic construct
  source 1..75: mol_type = other DNA
gccggaggcgtattttcgtattgcgccggaagactggctgcaggcagagatgcagggggagattgtggcactggt

SEQ ID NO: 68642 - DNA, 75 bp, synthetic construct
  source 1..75: mol_type = other DNA
ttgtccggtggacttacttttgaaaacgactcaatccttgcctggattcgaaatactgactgggcgaagattggt

SEQ ID NO: 68643 - DNA, 75 bp, synthetic construct
  source 1..75: mol_type = other DNA
ggctggtgaaggatgtcgatgattttgttgcgtcagcggttgttttgtatgaccagatgaatcgggcggcccggc

SEQ ID NO: 68644 - DNA, 75 bp, synthetic construct
  source 1..75: mol_type = other DNA
tgcgggaaggcgaacgggcagcggcggatggcagtatcaccggaaccccccgaaattccagaatagcaagttttt

SEQ ID NO: 68645 - DNA, 75 bp, synthetic construct
  source 1..75: mol_type = other DNA
atgacagagacagaatcagcgattctggcgcatgcccggcggtgtgcgcctgcggagtcttgcggcttcgtgata

SEQ ID NO: 68646 - DNA, 75 bp, synthetic construct
  source 1..75: mol_type = other DNA
agccattcatcgtgaagagtcagaaaaacggggtatgcctgttatcagggactgccagcgttgtggcggtcgtgg

SEQ ID NO: 68647 - DNA, 75 bp, synthetic construct
  source 1..75: mol_type = other DNA
gctatccgcaacgcgaactgctgggattcagtgaagccgacagacagaaagtgacggaaatcattatcaacaacc

SEQ ID NO: 68648 - DNA, 75 bp, synthetic construct
  source 1..75: mol_type = other DNA
agataaacgagaaaacccccttgtttgctaagtaccgtattgatgattcagggaagtttttgttctcaatactcg

SEQ ID NO: 68649 - DNA, 75 bp, synthetic construct
  source 1..75: mol_type = other DNA
atgactaaaaatactcgtttttcccctgaagtccgtcaacgggcagttcgtatggttctggaaagtcagggcgaa

SEQ ID NO: 68650 - DNA, 75 bp, synthetic construct
  source 1..75: mol_type = other DNA
atgggaagaggttattttctggtcaggggcgataagaccacctgcggcggcaaaattattgaaggggcggacgac

SEQ ID NO: 68651 - DNA, 75 bp, synthetic construct
  source 1..75: mol_type = other DNA
aaagacacccctgatgctgttgaaaaaatgcaggctctgttaccggcgatcgaaaaggcgatgccgcctttgctg

SEQ ID NO: 68652 - DNA, 75 bp, synthetic construct
  source 1..75: mol_type = other DNA
ggcgtgtatccgtcttactgggaagaatggaaaaaagtccgggaagtggtaaaagttgcctgtcctgaatgcggg

SEQ ID NO: 68653 - DNA, 75 bp, synthetic construct
  source 1..75: mol_type = other DNA
ccacgggcgcgcaagatggttatatcgtgaccattgtgaattcaaaaacaagctcttaagccgcgccaatgggta

SEQ ID NO: 68654 - DNA, 75 bp, synthetic construct
  source 1..75: mol_type = other DNA
tacaccggagactctgcgtgtctgggtacgccagcatgagcgggataccggaggcggtgatggagggctcaccac

SEQ ID NO: 68655 - DNA, 75 bp, synthetic construct
  source 1..75: mol_type = other DNA
gctgaacgtcagcgtctgaaagagctggaacgtgaaaatcgtgaactgcaccgcagtaacaatatccttcgccag

SEQ ID NO: 68656 - DNA, 75 bp, synthetic construct
  source 1..75: mol_type = other DNA
aacaagcggattttgagcgtttggcggcgttctacccataccgtaatgaacatgggctaccggtacttgaagaaa

SEQ ID NO: 68657 - DNA, 75 bp, synthetic construct
  source 1..75: mol_type = other DNA
tggttccttcatctggtctgccgggcattactacagcaaatatcagcacgaaaaggagcgtgctgatgaggctgt

SEQ ID NO: 68658 - DNA, 75 bp, synthetic construct
  source 1..75: mol_type = other DNA
attttcgccatcgacaaatcggcgagctttccggtggacaaaagaaacgcgtctttctggcgagagcgattgcac

SEQ ID NO: 68659 - DNA, 75 bp, synthetic construct
  source 1..75: mol_type = other DNA
gggtagtgcaggagattcacccagaaccagtcactcttttgaaccagtcaaagaaccagtcaatgaaccaatagc

SEQ ID NO: 68660 - DNA, 75 bp, synthetic construct
  source 1..75: mol_type = other DNA
cggccccatgatcaccggttacgacacggagcgccggggaatacgctcgttccacaaagccgatattgaagaata

SEQ ID NO: 68661 - DNA, 75 bp, synthetic construct
  source 1..75: mol_type = other DNA
gcgtctgcaccagcgcgttctgcccgacaggaatattcaccggaatttgaacaggcatggcaggaatatcccaaa

SEQ ID NO: 68662 - DNA, 75 bp, synthetic construct
  source 1..75: mol_type = other DNA
aatactctccggagtttgagcaggcatggctggcctatcccaaacgtgctggtggcaattcaaaatctgcagcct

SEQ ID NO: 68663 - DNA, 75 bp, synthetic construct
  source 1..75: mol_type = other DNA
tcgcccgaacagcatactcaaagccggtcagcatcgttatcagcgggcattcatccagcgactgaataatgggcg

SEQ ID NO: 68664 - DNA, 75 bp, synthetic construct
  source 1..75: mol_type = other DNA
tcgtccggacagcatactcaaagccggtcagcatcgttatcagcgggcatttattcagcgattaaaaaatggtcg

SEQ ID NO: 68665 - DNA, 75 bp, synthetic construct
  source 1..75: mol_type = other DNA
atgtgatgcagcgtatgccgtgggcatcatcatccaccggcgcggacagcaaagggaggccgaaacgccaccgtc

SEQ ID NO: 68666 - DNA, 75 bp, synthetic construct
  source 1..75: mol_type = other DNA
cggcattgttgccaacaacacctatccggcggatttcatctaccagaacatgatgattgagagcaacatcattca

SEQ ID NO: 68667 - DNA, 75 bp, synthetic construct
  source 1..75: mol_type = other DNA
accggtggcaaactgatgacctaccgcctgatggcggaatgggctactgacgcggtgtgtcgcaagctgggcaac

SEQ ID NO: 68668 - DNA, 75 bp, synthetic construct
  source 1..75: mol_type = other DNA
tatccggcgtgaacgcctgcccggagaactggcatccgcgctgaaacaacaactgaggattgcgataaaacgatg

SEQ ID NO: 68669 - DNA, 75 bp, synthetic construct
  source 1..75: mol_type = other DNA
cgattgataatctgagccgggttcgtaaaaacgccattccggctgcttctgcaatgaccattaaccgcgtggcca

SEQ ID NO: 68670 - DNA, 75 bp, synthetic construct
  source 1..75: mol_type = other DNA
atggtttacaccggagacgggcgcgtggtgtgggtcggtaaggatgtgacaggcattgaaccccgtaacgccagt

SEQ ID NO: 68671 - DNA, 75 bp, synthetic construct
  source 1..75: mol_type = other DNA
ctaatgcaaaggttttgggactgtatgaggttgaattacccgaaagaaaaattcaagaccacattgctgatattg

SEQ ID NO: 68672 - DNA, 75 bp, synthetic construct
  source 1..75: mol_type = other DNA
tctggccccaacggattcattggtcgaaatgaaccgcaaagggcagaaggtttatacctcggtggaagtcgatcc

SEQ ID NO: 68673 - DNA, 75 bp, synthetic construct
  source 1..75: mol_type = other DNA
gcgcagtcacagttctgagtattaccgggatattgtcgaacggcgggacaggcttgttaaggatgtggatgactt

SEQ ID NO: 68674 - DNA, 75 bp, synthetic construct
  source 1..75: mol_type = other DNA
gcagcgcagcgagtaaaaagcagtgcccttgttgctatggggaaaaatttattgaaagcatagtttttacaaaca

SEQ ID NO: 68675 - DNA, 75 bp, synthetic construct
  source 1..75: mol_type = other DNA
gtaaagactgccgtgggcgcggtattgccgttcatcgtgaagagtcggaaaaacgggggatgccggttatcaggg

SEQ ID NO: 68676 - DNA, 75 bp, synthetic construct
  source 1..75: mol_type = other DNA
atcgtgaactgcgccgcagtaacgatatccttcgccaggcttccgcttattttgcgaaggcggagttcgaccgcc

SEQ ID NO: 68677 - DNA, 75 bp, synthetic construct
  source 1..75: mol_type = other DNA
cagggcaagagcggtgagaatgacactcgctttggcctggaagttaactaccgaattggcgaacctttggcgaaa

SEQ ID NO: 68678 - DNA, 75 bp, synthetic construct
  source 1..75: mol_type = other DNA
cattaagagtaatcgttgtcttggggatgttattcctgccgataatgattgcgggcggtatgtgccgttcttttc

SEQ ID NO: 68679 - DNA, 75 bp, synthetic construct
  source 1..75: mol_type = other DNA
ttttttatatttctgatggtacggcaataactgcggaggtattaggacacgcagtaatgtcacaatttcccgtca

SEQ ID NO: 68680 - DNA, 75 bp, synthetic construct
  source 1..75: mol_type = other DNA
tttgatcacatgctggatcagatcgccacccacggcggtttccgtatggaaatcaacgttaaaggcgacctctat

SEQ ID NO: 68681 - DNA, 75 bp, synthetic construct
  source 1..75: mol_type = other DNA
cccgtgcgctgggtctgcgcgctaaaatcgaccaggagcagggctggcataaaacgctgtccaacgtcggggtga

SEQ ID NO: 68682 - DNA, 75 bp, synthetic construct
  source 1..75: mol_type = other DNA
ggggtttaactatggaaggataactgttattaatgaaaatccgacagcacaaggatatcaggcaattgctgtaaa

SEQ ID NO: 68683 - DNA, 75 bp, synthetic construct
  source 1..75: mol_type = other DNA
gcggatcatcttggtattgacggtctggagcaactccgggcaattcaggacgccacggggatcgggatggtgctt

SEQ ID NO: 68684 - DNA, 75 bp, synthetic construct
  source 1..75: mol_type = other DNA
acccacgcaccaaagctggtcgcatgactctccgttaccgtggttatcggactgaagtcctcctaaaagagcttg

SEQ ID NO: 68685 - DNA, 75 bp, synthetic construct
  source 1..75: mol_type = other DNA
gaaacaatattcaccgattaccattcagtgctcttgttgaagttaataaaaactgggatatccctcccagcaaat

SEQ ID NO: 68686 - DNA, 75 bp, synthetic construct
  source 1..75: mol_type = other DNA
aatttcagcatgaaactgttcagcttgtgccagtcagtgatgtcaggcggtccttttctgtcgtggtgaaagcga

SEQ ID NO: 68687 - DNA, 75 bp, synthetic construct
  source 1..75: mol_type = other DNA
ggggcaaaaaatagcaaccatgggtagcaccggaaccagttcaacacgattgcattttgaaattcgttacaaggg

SEQ ID NO: 68688 - DNA, 75 bp, synthetic construct
  source 1..75: mol_type = other DNA
gatgtgataaacaaccatgccgaaaaaataggtaacaaccaggcgatcaccgttaccaataaccagatccagaac

SEQ ID NO: 68689 - DNA, 75 bp, synthetic construct
  source 1..75: mol_type = other DNA
tacgtgatcattgccacgccgaccgattacgatcccaagactaaccacttcaacacctctacggtggaagcggtt

SEQ ID NO: 68690 - DNA, 75 bp, synthetic construct
  source 1..75: mol_type = other DNA
gttatgctggtttatcgaacggtgtcctaattgcgcaaaaccacgaagtgattatcttggatatcgtacaggcca

SEQ ID NO: 68691 - DNA, 75 bp, synthetic construct
  source 1..75: mol_type = other DNA
tctcggcgcgatgatgcgcaagctggcacaggtggcgtatggagtgctgaagtcaggcgtgccgttcgatgcgtc

SEQ ID NO: 68692 - DNA, 75 bp, synthetic construct
  source 1..75: mol_type = other DNA
actacaaaggcgttttgtggagtcctggctattttgccagtagctgcggaggtgcgccaatatccgtcatccgcc

SEQ ID NO: 68693 - DNA, 75 bp, synthetic construct
  source 1..75: mol_type = other DNA
acccggctggcggtggtgctgacgctgcacctgttcatccgttccagcgaactgcgtttcgcccgctggagcgag

SEQ ID NO: 68694 - DNA, 75 bp, synthetic construct
  source 1..75: mol_type = other DNA
tatttcttttcccgccccctacccgccgaagaaattccaggctggatgagcagcgtgttaccgctgaaaatctga

SEQ ID NO: 68695 - DNA, 75 bp, synthetic construct
  source 1..75: mol_type = other DNA
tatcttaaggttgcgtcaaatggttctgacattgcaaacagaagtgcctttatcgataacctcggtttacgggaa

SEQ ID NO: 68696 - DNA, 75 bp, synthetic construct
  source 1..75: mol_type = other DNA
tttatcagggcgtgcagcaggatgattttaccgccgctaaccgtgcgcgcgtgtcacaatcgcagggtgatgata

SEQ ID NO: 68697 - DNA, 75 bp, synthetic construct
  source 1..75: mol_type = other DNA
gaattaaccagtacttcaaaggccaggacgaaatggaccgggcatttggctggggatttcgctggagcgccggtt

SEQ ID NO: 68698 - DNA, 75 bp, synthetic construct
  source 1..75: mol_type = other DNA
gggtatcaagctgcggttagctgacaacacgttctatacgcccgatttcgctgtgatgctcgccaccggcgagat

SEQ ID NO: 68699 - DNA, 75 bp, synthetic construct
  source 1..75: mol_type = other DNA
caggtcgtgactgcgtactggtcgatgatatgatcgacactggcggtacgctgtgtaaagctgctgaagctctga

SEQ ID NO: 68700 - DNA, 75 bp, synthetic construct
  source 1..75: mol_type = other DNA
aaatggctttaataccgcttggattgaaatgcaacttgctcatgtagataaaaactctataagaggaacatataa

SEQ ID NO: 68701 - DNA, 75 bp, synthetic construct
  source 1..75: mol_type = other DNA
agagaagaaatccgtcttcatattgtttgcgatgtccctgatgaacttattgatttcacgtttgaatggaaaggg

SEQ ID NO: 68702 - DNA, 75 bp, synthetic construct
  source 1..75: mol_type = other DNA
aaggcgaaaggcgttgaagtgatcatctacgagccggtgatgaaagaagactcattcttcaactctcgcctggaa

SEQ ID NO: 68703 - DNA, 75 bp, synthetic construct
  source 1..75: mol_type = other DNA
gaaaatgcgcagacctcatattgtacctctatctactcaggtgattgccctttttaaacagctcaagcctattag

SEQ ID NO: 68704 - DNA, 75 bp, synthetic construct
  source 1..75: mol_type = other DNA
atcatcactaaaaatgcgacaaaaatagtcatgttaactggcgtaagaactcaggaaatgcgctttgccacgtgg

SEQ ID NO: 68705 - DNA, 75 bp, synthetic construct
  source 1..75: mol_type = other DNA
ggcgatatttcaccttctgcagatgtggtggatgtcagcgaggatgatgttgcattaatgatggcttcagcgggg

SEQ ID NO: 68706 - DNA, 75 bp, synthetic construct
  source 1..75: mol_type = other DNA
tggtggatgtcagcgaagatgatgttgcattaatgatggcttcagcggggatttccggaggtgtgagatatgtcc

SEQ ID NO: 68707 - DNA, 75 bp, synthetic construct
  source 1..75: mol_type = other DNA
caacttttgccttaccgctttcgccgccaccaccatttccggattgcttttgcaacttcccactttcagcaatac

SEQ ID NO: 68708 - DNA, 75 bp, synthetic construct
  source 1..75: mol_type = other DNA
atcatcaccaaaaatgctacgaagatagtcatgctgactggtgtaagaacgcaggagatgcgctttgctacgtgg

SEQ ID NO: 68709 - DNA, 75 bp, synthetic construct
  source 1..75: mol_type = other DNA
agctaaaaacctgcacgttagccctttgtaggccagataagacgcgtcagcgtcgcatctggcataaacaaagcg

SEQ ID NO: 68710 - DNA, 75 bp, synthetic construct
  source 1..75: mol_type = other DNA
gtttacgctgcaatcattgaccgacctgatgtttaattcagtgtttgccagcgtaaataatctctaccatcgacc

SEQ ID NO: 68711 - DNA, 75 bp, synthetic construct
  source 1..75: mol_type = other DNA
gaacatggtcgcgtgcgggtgaagttcaactgggaccgttataacccggcagaccaagacagttcgtgctggatc

SEQ ID NO: 68712 - DNA, 75 bp, synthetic construct
  source 1..75: mol_type = other DNA
tactgtacgttataccgccagtaatgctgctcgttttgccggactatgggaaagaaataatctcataaacgaaaa

SEQ ID NO: 68713 - DNA, 75 bp, synthetic construct
  source 1..75: mol_type = other DNA
aacaatagcgaaggtgaatacgccattattcccgccagcgttgccgataaaattgctcagcgtgatgccagcagt

SEQ ID NO: 68714 - DNA, 75 bp, synthetic construct
  source 1..75: mol_type = other DNA
acgcgatacggctcgtaagcaggtagcaaacggcatagacccagttgaagaacgtaaagcccaaaagctggcaca

SEQ ID NO: 68715 - DNA, 75 bp, synthetic construct
  source 1..75: mol_type = other DNA
aaaagagatgcgctttgctacatgggatgagattgaccttgagaaggggatatgggaaatcccagccgaaaggat

SEQ ID NO: 68716 - DNA, 75 bp, synthetic construct
  source 1..75: mol_type = other DNA
acattcgagcaagatgtcttcccgttcattggtaaacgtcctatcagtgaaatcaaaccattagaactgcttgaa

SEQ ID NO: 68717 - DNA, 75 bp, synthetic construct
  source 1..75: mol_type = other DNA
aaaagagaatatggctggcagagccgacccggttgagcgttcacgtctcagggcccccctgagaggtatcgtaaa

SEQ ID NO: 68718 - DNA, 75 bp, synthetic construct
  source 1..75: mol_type = other DNA
aagcgtcgtcagaggtggtcaggcagtcagacctggcgctgttgacagatgtacaggcagcccttcagcaggaaa

SEQ ID NO: 68719 - DNA, 75 bp, synthetic construct
  source 1..75: mol_type = other DNA
cagtcatagtgctgtgtttgacggtactgggatttacgcttctggtcggagactcgctgtgtgagttcaccgtaa

SEQ ID NO: 68720 - DNA, 75 bp, synthetic construct
  source 1..75: mol_type = other DNA
atagcagatgcttttaataaaggttcaatccgtgatgttaccgtagttaatgagctggtaacggcttacaagcaa

SEQ ID NO: 68721 - DNA, 75 bp, synthetic construct
  source 1..75: mol_type = other DNA
tcgccggactttttacaggacgcgatcaactttaatccgctggctgaaagtgtccataaactgtccatcgattag

SEQ ID NO: 68722 - DNA, 75 bp, synthetic construct
  source 1..75: mol_type = other DNA
cgtggacgcaacaaagctgacaaggtggacatcgacctgtcccacagcaatttggcccccggcctgctgtgcgca

SEQ ID NO: 68723 - DNA, 75 bp, synthetic construct
  source 1..75: mol_type = other DNA
ccccgtccacgctggcgcacgacgcctacccgttctggtcgggtgaactgtttaaccggggacgcgccagcgccg

SEQ ID NO: 68724 - DNA, 75 bp, synthetic construct
  source 1..75: mol_type = other DNA
tcgaaaagctggagcagattttctttgagcagtctttcgaatatcagttgcactggtatcgcgccgggcttgagc

SEQ ID NO: 68725 - DNA, 75 bp, synthetic construct
  source 1..75: mol_type = other DNA
ctcgcgtccgtgttcccgctcagcgaactacaggcgtgcatggtggacagttgggaagtctggaccgactttcat

SEQ ID NO: 68726 - DNA, 75 bp, synthetic construct
  source 1..75: mol_type = other DNA
ctttgatgccgatccgctgctgcagacgctggagatgacagacggtctggatatgccggatcagtcacgggcgcg

SEQ ID NO: 68727 - DNA, 75 bp, synthetic construct
  source 1..75: mol_type = other DNA
ttcctgaactgaaaaaactgggcgtcattaaaaacaaggatgaactgcttaaaaagccctgcctgaatattcata

SEQ ID NO: 68728 - DNA, 75 bp, synthetic construct
  source 1..75: mol_type = other DNA
gttatgaagctgggctctatagccagaagctcactcttgagcgcgatgctgaaatgctgaaagccatgcaagctg

SEQ ID NO: 68729 - DNA, 75 bp, synthetic construct
  source 1..75: mol_type = other DNA
atgtcgattaagcaactcaaagacggacgttatcaggtcgatgtcagaccgcagggggcggaaggaaagcggatt

SEQ ID NO: 68730 - DNA, 75 bp, synthetic construct
  source 1..75: mol_type = other DNA
gacggcatcgcgccgatttcccgcgttgaaagcagccttgaggctaggctgattcagctcatcgccaagccgcaa

SEQ ID NO: 68731 - DNA, 75 bp, synthetic construct
  source 1..75: mol_type = other DNA
aaggtattcatgtggttatgaataattatctttatggcacccggcagatcatttctaaaaaacctatccgcacag

SEQ ID NO: 68732 - DNA, 75 bp, synthetic construct
  source 1..75: mol_type = other DNA
agattgatccggagatccgtgccctggtggccgcgatgaacattcacggcttccgcacatatgcttcctgtcagg

SEQ ID NO: 68733 - DNA, 75 bp, synthetic construct
  source 1..75: mol_type = other DNA
actgacaggcatatcaaaggcggcgacatatacgctgctgattgacagtgtgaaggtggaagtgaacaacgcgga

SEQ ID NO: 68734 - DNA, 75 bp, synthetic construct
  source 1..75: mol_type = other DNA
gtcacacaccggcgacagtgccgggtgcgtcgtactcgcaccgccggtggtctcgggtggcaagttccgcatgct

SEQ ID NO: 68735 - DNA, 75 bp, synthetic construct
  source 1..75: mol_type = other DNA
gcttcagcctgaaggccctcatcactggtatcaccggtactgtcgtcgctcactgcgtgcagacttcaggacgct

SEQ ID NO: 68736 - DNA, 75 bp, synthetic construct
  source 1..75: mol_type = other DNA
accggccagatcagtcgaatacaaaatctattcaagacattactaaccaagaacaagagagactacgcggacaat

SEQ ID NO: 68737 - DNA, 75 bp, synthetic construct
  source 1..75: mol_type = other DNA
atgacctaaaagttctagcgaacgcgcgcaatatacctcaatcaaaattagaagaagaaatgatgtcacaagcca

SEQ ID NO: 68738 - DNA, 75 bp, synthetic construct
  source 1..75: mol_type = other DNA
tcagaagtggccgtccaggcggtcaccgaactcgataataaagcggctcattgccatacgccagtcccgcagtgg

SEQ ID NO: 68739 - DNA, 75 bp, synthetic construct
  source 1..75: mol_type = other DNA
ggaattaatggatatcattgataaggggtttggcttgttaatgaaaaagaaagggattcggatagaaccccttaa

SEQ ID NO: 68740 - DNA, 75 bp, synthetic construct
  source 1..75: mol_type = other DNA
cattccaggaaatggcagcgaatatagttcgttctcaattggctactcttgacctgagtaccgtagaaaaagaaa

SEQ ID NO: 68741 - DNA, 75 bp, synthetic construct
  source 1..75: mol_type = other DNA
gcagaaagcagcctatgagcagcaggtgaaggggtacagcaatgagcagcaggcggccaccacgcaggccgtgta

SEQ ID NO: 68742 - DNA, 75 bp, synthetic construct
  source 1..75: mol_type = other DNA
cgctggatttaggttttaccacgttaaaaaaccgcgtgttgatgggctcaatgcacaccgggctggaggaatacc

SEQ ID NO: 68743 - DNA, 75 bp, synthetic construct
  source 1..75: mol_type = other DNA
gctttatcatggtgacctcggcgtcaatgcccatagggcaacgcttaaccaacgatccgttcttcttcgcgaagc

SEQ ID NO: 68744 - DNA, 75 bp, synthetic construct
  source 1..75: mol_type = other DNA
tatttaagcagcttgaaccaatctcaaaacatcatcccctagtctttatcggtagaaatgatccccgcaaaccaa

SEQ ID NO: 68745 - DNA, 75 bp, synthetic construct
  source 1..75: mol_type = other DNA
ggcgctcgggcagtatgttgcgggtatgggcttctcgaatgttgggttagggttggtgcatggtatggcgcatcc

SEQ ID NO: 68746 - DNA, 75 bp, synthetic construct
  source 1..75: mol_type = other DNA
gaagagaagcagctctctgataaccaggatttacatgaaaaatacttcctggatctaatggacatcattaataag

SEQ ID NO: 68747 - DNA, 75 bp, synthetic construct
  source 1..75: mol_type = other DNA
tcatgcccagtatctggatggtcgccgtgaaatgatgcagtggtatgctgactacattgattcactttctgagca

SEQ ID NO: 68748 - DNA, 75 bp, synthetic construct
  source 1..75: mol_type = other DNA
acaatgcacgcactgtttaacgaaccgctgcagggcgaatccgccaataccagcaatattgtggagattttttga

SEQ ID NO: 68749 - DNA, 75 bp, synthetic construct
  source 1..75: mol_type = other DNA
tgcttaccggacgtaaccagatttttctttccgccagcaaggcacaggcccacgtcttcaaacagtacatcatcg

SEQ ID NO: 68750 - DNA, 75 bp, synthetic construct
  source 1..75: mol_type = other DNA
tgagcgtcaccagtggcgcggaatggactttcgcgcccaggctgacgccatcaaaaaactgactgaacagtacaa

SEQ ID NO: 68751 - DNA, 75 bp, synthetic construct
  source 1..75: mol_type = other DNA
ctgggtacgttgaacgagcaggatctgctggcactgaacaatgcgctgagcaaaccggtttccactaatccggaa

SEQ ID NO: 68752 - DNA, 75 bp, synthetic construct
  source 1..75: mol_type = other DNA
cgctcatgctgctgtccctgcaggcgatggccgccgtacaggagagtacgcagcagggaacgcgcacctcctcat

SEQ ID NO: 68753 - DNA, 75 bp, synthetic construct
  source 1..75: mol_type = other DNA
accatgacggcggtcgctggctgcggtttggggaggggagaatgccggtggtacttcagcagggggctgacggat

SEQ ID NO: 68754 - DNA, 75 bp, synthetic construct
  source 1..75: mol_type = other DNA
atgataatgccagagtacttgataaagatgggttctatcaggacgctgagcggttgagttcagagataatgagtc

SEQ ID NO: 68755 - DNA, 75 bp, synthetic construct
  source 1..75: mol_type = other DNA
gcactgcgtaaaatggaaaaacggggggctctggagaaaatgcgcaaggtccgtcagcgctgtggcgaggtgttc

SEQ ID NO: 68756 - DNA, 75 bp, synthetic construct
  source 1..75: mol_type = other DNA
taatgacttagtatctgaagttttcgataacctaagaaatttaaatcttgcagttggagattcagtttcacaagc

SEQ ID NO: 68757 - DNA, 75 bp, synthetic construct
  source 1..75: mol_type = other DNA
ctgctcttaaaggactggcagcaggtaatcgtctcatcccggaaagtttcagtggtgaaatcatctggatgcatc

SEQ ID NO: 68758 - DNA, 75 bp, synthetic construct
  source 1..75: mol_type = other DNA
ccggaaagcagcggcagctatggcttcgtccgtctggagggtgacctgctgagaacagaggttgccggtatgtct

SEQ ID NO: 68759 - DNA, 75 bp, synthetic construct
  source 1..75: mol_type = other DNA
agttaaatcatattggtcgttataattctcagagtgatttttctttaaacaatattttgattgagaattgtgctc

SEQ ID NO: 68760 - DNA, 75 bp, synthetic construct
  source 1..75: mol_type = other DNA
gtttaatgcataagaaagaagcaggatacgaaataagtcatggttttgtagagtctcaagcaagccttgtgaaaa

SEQ ID NO: 68761 - DNA, 75 bp, synthetic construct
  source 1..75: mol_type = other DNA
ctgtactgaccactgaatcaaaggtcacgatacgcggacaaacaactatccccgcgccagtgcgtgaggccttaa

SEQ ID NO: 68762 - DNA, 75 bp, synthetic construct
  source 1..75: mol_type = other DNA
ggtgccaccacagaagaaggtgcgtttgccctgagtcgcccgcttcaggccggcgcctttaactacaccctgaac

SEQ ID NO: 68763 - DNA, 75 bp, synthetic construct
  source 1..75: mol_type = other DNA
gtggcgctgcccttcgctgctgacgcctgtctggtcgcctcatcttttgaagcagacgcagatgatgccgatgac

SEQ ID NO: 68764 - DNA, 75 bp, synthetic construct
  source 1..75: mol_type = other DNA
ggggctcgctggttgttgggttcagagctgttacgcaccggcgatcatgagcgagccttcagtgtactgaaagag

SEQ ID NO: 68765 - DNA, 75 bp, synthetic construct
  source 1..75: mol_type = other DNA
gggcaatgggtacaggatggcggcacagccagtaataccaccatcagcagcggcgggctccagtttgtaggtgcc

SEQ ID NO: 68766 - DNA, 75 bp, synthetic construct
  source 1..75: mol_type = other DNA
gaccgaagtatctaacatgtctcgtgcacagatcctgcaacaggcaggtacttctgttctggcgcaggctaacca

SEQ ID NO: 68767 - DNA, 75 bp, synthetic construct
  source 1..75: mol_type = other DNA
acgtgttcgccagattcaggttgaaggcctgcgccgtttgcgcgaaatcctgcaaacgcaggggctgaatatcga

SEQ ID NO: 68768 - DNA, 75 bp, synthetic construct
  source 1..75: mol_type = other DNA
atgagtcttctttttgctgaacgcccactggttattaacacgcagctggcgatgaaaattggtctgaacgaagcc

SEQ ID NO: 68769 - DNA, 75 bp, synthetic construct
  source 1..75: mol_type = other DNA
cgggaaccgattttattgacgcgaccggtaaagatgtccatgtgggtggtggacgtgtaatggctgcaaatgata

SEQ ID NO: 68770 - DNA, 75 bp, synthetic construct
  source 1..75: mol_type = other DNA
cactgcgaccatcgcggcctgccgctggcgctcatcagcacggaaggggcaacagcgtggtgcgcagaatatgat

SEQ ID NO: 68771 - DNA, 75 bp, synthetic construct
  source 1..75: mol_type = other DNA
ccatcagtaccggtctggagtatgggccggataacgaggccaataccggcgggcaatggatacaaaatggcggta

SEQ ID NO: 68772 - DNA, 75 bp, synthetic construct
  source 1..75: mol_type = other DNA
gctttttgaggactctgcagcggcagcactttttgatgcttcagtggcctttgctgatgccgttcctgcgctgga

SEQ ID NO: 68773 - DNA, 75 bp, synthetic construct
  source 1..75: mol_type = other DNA
gtatccggaacagctgatggcgtgactgtcagtaccgggcttgagctggggccggacagtgacgaaaacaccggc

SEQ ID NO: 68774 - DNA, 75 bp, synthetic construct
  source 1..75: mol_type = other DNA
cagtttccgatgccgccgtgatggaggcaatccgggaggcgcttgagggggccgatccacgcactgccggactga

SEQ ID NO: 68775 - DNA, 75 bp, synthetic construct
  source 1..75: mol_type = other DNA
cactgcactggctgaaagtagtgttgtgttttatcccaaagacggagagtttgacgagatcaaacggccctggct

SEQ ID NO: 68776 - DNA, 75 bp, synthetic construct
  source 1..75: mol_type = other DNA
gaagctcagccaaacgaagaagggctgaagttctacgatgatatgttcgatgaactgctgaaatacaacatcgaa

SEQ ID NO: 68777 - DNA, 75 bp, synthetic construct
  source 1..75: mol_type = other DNA
cactcaaccctcttcacaacaggagcaaagaagtgatgaagagacaaaaaaaaacgcgatgaagttaataaactg

SEQ ID NO: 68778 - DNA, 75 bp, synthetic construct
  source 1..75: mol_type = other DNA
tacgtcaccacaagctggtcagatcgcgccggctctcgcacacattgggcaaaaaccaacagaatcagaccgctc

SEQ ID NO: 68779 - DNA, 75 bp, synthetic construct
  source 1..75: mol_type = other DNA
ctgtcagtaccgggcttgagctggggccggacagtgacgaaaacaccggcgggcaatggataaaagcgggtggca

SEQ ID NO: 68780 - DNA, 75 bp, synthetic construct
  source 1..75: mol_type = other DNA
ggattctggcaggctcccgcagccatcagagcggtgtaagcggtgaaaataacagcgtccgtctcagcattcagg

SEQ ID NO: 68781 - DNA, 75 bp, synthetic construct
  source 1..75: mol_type = other DNA
taaccattggtatatttctattagctgggttgtcgttctctgcatacgcgaagaattgcaagaaaggtataccgt

SEQ ID NO: 68782 - DNA, 75 bp, synthetic construct
  source 1..75: mol_type = other DNA
gaacgcccccgcgccgaacatcaccgtaaaaaatcctgtgaacggccatgctcacctgctctacgcactcaatat

SEQ ID NO: 68783 - DNA, 75 bp, synthetic construct
  source 1..75: mol_type = other DNA
ccgcagtggatggcggcctgaagccacacagtgatattgatttgctggttacggtgaccgtaaggcttgatgaaa

SEQ ID NO: 68784 - DNA, 75 bp, synthetic construct
  source 1..75: mol_type = other DNA
tcggcttcggcgctcagatacgctgccgctattgagcgtgcgttgtgtgaaaaactgggcgcggatgtgaattac

SEQ ID NO: 68785 - DNA, 75 bp, synthetic construct
  source 1..75: mol_type = other DNA
gacgagcgaaaccaacgcaaagtccagccagacggcagcgaagaccagcgaaacgaatgccaaagccagtgaaac

SEQ ID NO: 68786 - DNA, 75 bp, synthetic construct
  source 1..75: mol_type = other DNA
cgggagaaaccgtgaacgacggaacactgacaaatcatgacaaccagattgtcctcggtacggccaacggaatga

SEQ ID NO: 68787 - DNA, 75 bp, synthetic construct
  source 1..75: mol_type = other DNA
agtgaaaggtccatattccgtactgtacggttcacaggcaattggcggtattgttaacttcatcaccaaaaaggg

SEQ ID NO: 68788 - DNA, 75 bp, synthetic construct
  source 1..75: mol_type = other DNA
agtggctttgccagccttcgttgtggctgttgaagcggatgatgcggcgctttctgccgattttccggcggcggt

SEQ ID NO: 68789 - DNA, 75 bp, synthetic construct
  source 1..75: mol_type = other DNA
ttatcggagagctgcccacatatggttatcgtcgggtatgggcgctgcttcgcagacaggccgaacttgatggta

SEQ ID NO: 68790 - DNA, 75 bp, synthetic construct
  source 1..75: mol_type = other DNA
aacgtgaaataccgttatgagttcactgactcggtaggtcttgtgagttcgttcagttatgcaaatgtgcagcac

SEQ ID NO: 68791 - DNA, 75 bp, synthetic construct
  source 1..75: mol_type = other DNA
tatgtgctctggcggcgctgtttttgggcggaatggcgatggcctcaggaccacagacaacgctgagtgcgggat

SEQ ID NO: 68792 - DNA, 75 bp, synthetic construct
  source 1..75: mol_type = other DNA
tgtcagatgagggtaaaaagcaggatcacctgactgattcggccagcggacatcgtagccatacatcactggcat

SEQ ID NO: 68793 - DNA, 75 bp, synthetic construct
  source 1..75: mol_type = other DNA
tcatcgcgggttcagtgttatggcgggaccgtcactgcgcatgactgaatggttcagtgcttatgtgctggcagg

SEQ ID NO: 68794 - DNA, 75 bp, synthetic construct
  source 1..75: mol_type = other DNA
tgaactggtgggtacagccttccgttatccgcaccttcagctcccggggtgatatgcgtgtggggacctccaccg

SEQ ID NO: 68795 - DNA, 75 bp, synthetic construct
  source 1..75: mol_type = other DNA
atgaaaaaaataacagggattattttattgcttcttgcagccattattcttgctgcatgtcaggcaaactatatc

SEQ ID NO: 68796 - DNA, 75 bp, synthetic construct
  source 1..75: mol_type = other DNA
ttttgttgtgcagatcaccggatacggagagcagggggaacgctggattgttgatcgctacaacatccggcattc

SEQ ID NO: 68797 - DNA, 75 bp, synthetic construct
  source 1..75: mol_type = other DNA
cgatgtcaggacggcgcagatcgcggtgctggaagtgacgcaggattacgccgtggcagatggttcgacggcgaa

SEQ ID NO: 68798 - DNA, 75 bp, synthetic construct
  source 1..75: mol_type = other DNA
aaattaccggtactctcggttacttcagaagtgatagcggtaatttctatacagcaagtggagcatttacactgg

SEQ ID NO: 68799 - DNA, 75 bp, synthetic construct
  source 1..75: mol_type = other DNA
tacgtcactggacctgcaggccggactggaagcccgtgtccgggaaaatatcaccctgggcgttcaggccggtta

SEQ ID NO: 68800 - DNA, 75 bp, synthetic construct
  source 1..75: mol_type = other DNA
tttccccggtcgatctgaacaaacagatcggatcggacggcgcgacctggctggaccggcggctgatccacggcg

SEQ ID NO: 68801 - DNA, 75 bp, synthetic construct
  source 1..75: mol_type = other DNA
ttttagtaaaaaatggactcagtatgagttagatagcttgattaaccgagcagtaaatgacgaaaataaagttct

SEQ ID NO: 68802 - DNA, 75 bp, synthetic construct
  source 1..75: mol_type = other DNA
gcagccaaaaaatcagaaaccaacgcgaaaaatagcgagacagccgcaaagacgagcgaaaccaacgcaaagtcc

SEQ ID NO: 68803 - DNA, 75 bp, synthetic construct
  source 1..75: mol_type = other DNA
gttaaaacacttcacgaaggtgtcaaaaaaatgagcctggtgcatatcggaaagaatctgcccgcagaaaaaaaa

SEQ ID NO: 68804 - DNA, 75 bp, synthetic construct
  source 1..75: mol_type = other DNA
gcgaactgactgcacgcgctattgctatgttacctattttgacgggcaatgtcggcatcagcggcggaaatagtg

SEQ ID NO: 68805 - DNA, 75 bp, synthetic construct
  source 1..75: mol_type = other DNA
tcttcccgatttacgcggtgagtttatccgtggatgggacgacgggcgcaagattgacgaggggcgtaagttgct

SEQ ID NO: 68806 - DNA, 75 bp, synthetic construct
  source 1..75: mol_type = other DNA
atgagcgaatcagagcttggggggttcattcaggtagcaccatatccacttgaagcggtgccatatcaactattc

SEQ ID NO: 68807 - DNA, 75 bp, synthetic construct
  source 1..75: mol_type = other DNA
tcgcaggtagatttttatcggagtatggagtggctgtacggctggaaagaagacaactgtctgcaaccaagataa

SEQ ID NO: 68808 - DNA, 75 bp, synthetic construct
  source 1..75: mol_type = other DNA
attaacagcagcagcctgatccggaacgtaacgtttgtcgcggatgtcaggacggcgcagatagcgagtctggag

SEQ ID NO: 68809 - DNA, 75 bp, synthetic construct
  source 1..75: mol_type = other DNA
cgaggagatgaaaacgaccgggatctttaagaaaaaatgcccggaagaacactacgtcgctttccgcgcattccg

SEQ ID NO: 68810 - DNA, 75 bp, synthetic construct
  source 1..75: mol_type = other DNA
gttaaaacacttaacgaaggcgtcaaaaaaatgtgcctagtgcatatcggaaagaatctgcccgcagaaaaaaaa

SEQ ID NO: 68811 - DNA, 75 bp, synthetic construct
  source 1..75: mol_type = other DNA
gcggtgtggcggttgcactgtctcttgccgcagtcacgtcactcccggtgctggctgctgacatcgttgtgcacc

SEQ ID NO: 68812 - DNA, 75 bp, synthetic construct
  source 1..75: mol_type = other DNA
gtgaaaagctcaataaatcaaagcgcgatatgaccaatttctacacgatcaactacgggagcgagcttttagatg

SEQ ID NO: 68813 - DNA, 75 bp, synthetic construct
  source 1..75: mol_type = other DNA
acagacaaatttgcgaaatgtttggtcgggtacagcgagatccattctgggtaaaaaacatcatgagcccgtcaa

SEQ ID NO: 68814 - DNA, 75 bp, synthetic construct
  source 1..75: mol_type = other DNA
ggcggaagtgaaccgcttatctgtgcgtatggaactccaggccgactgttttgccggtgtctgggggcatagtat

SEQ ID NO: 68815 - DNA, 75 bp, synthetic construct
  source 1..75: mol_type = other DNA
catgtgcgtgccggcttccgtctgggcagccacaacgatatgacctttggtgaaggcacctcatcccgtgacacc

SEQ ID NO: 68816 - DNA, 75 bp, synthetic construct
  source 1..75: mol_type = other DNA
gtgacagcctcaggcaccgggctgggctatggcgaaggcgacgagtcctatggctatgacagttgtggctacctg

SEQ ID NO: 68817 - DNA, 75 bp, synthetic construct
  source 1..75: mol_type = other DNA
taacagtactaaatatgcggtcgttgattctgcaaccggtaaatacatggaagccactgtagccattaccggtac

SEQ ID NO: 68818 - DNA, 75 bp, synthetic construct
  source 1..75: mol_type = other DNA
agcgcagatcatccagcaggccggtaactccgtgctggcaaaagccaaccaggtaccgcagcaggttctgtctct

SEQ ID NO: 68819 - DNA, 75 bp, synthetic construct
  source 1..75: mol_type = other DNA
aagaaataaccgatgcttttaataactttaaaaaagactctagacaagtaccaatgaacttgcatttatcaaatg

SEQ ID NO: 68820 - DNA, 75 bp, synthetic construct
  source 1..75: mol_type = other DNA
tgtagtgatgaagagaaggggctggccctgcagtgggtttctgaactgacagatgaactcatggcaaaaatcaga

SEQ ID NO: 68821 - DNA, 75 bp, synthetic construct
  source 1..75: mol_type = other DNA
cgtgaactggcagcgttctctcagtttgcatctgaccttgacgatgcaacacgtaagcagcttgaccacggtcag

SEQ ID NO: 68822 - DNA, 75 bp, synthetic construct
  source 1..75: mol_type = other DNA
gcgcgaatgtgattgccaccagcggacgtgcagttgaagcggcaggtgacgttgacgttctgctactggataaaa

SEQ ID NO: 68823 - DNA, 75 bp, synthetic construct
  source 1..75: mol_type = other DNA
gcactgagacgtataccggtcgtgaagtacaggatattcccggtgtgctggccgtgtttgctgaacgccgtaagg

SEQ ID NO: 68824 - DNA, 75 bp, synthetic construct
  source 1..75: mol_type = other DNA
acagaactgcaccattgtgctgaaggccagacggaccagcagcacggtggtggtgaacacggtggcctctgaaaa

SEQ ID NO: 68825 - DNA, 75 bp, synthetic construct
  source 1..75: mol_type = other DNA
tgcggaagagctgaaaacggagccgggcggttgcatcggttacaaagtgcgtttcagcgatcacgtaagtgataa

SEQ ID NO: 68826 - DNA, 75 bp, synthetic construct
  source 1..75: mol_type = other DNA
actggaaaatggcggacgtctggatgtgctgagcggacacacagccactaatacccgcgtggatgatggcggaac

SEQ ID NO: 68827 - DNA, 75 bp, synthetic construct
  source 1..75: mol_type = other DNA
acaacacgaaggctgatgccgttagtgcctggacggaagaaagtgagggaatttacaaagcaagctatacggccc

SEQ ID NO: 68828 - DNA, 75 bp, synthetic construct
  source 1..75: mol_type = other DNA
cggataacgcccaactggaactgaaatataaaaaaggcaaaacaccactcagtcatcgcaaatggccgggcgaac

SEQ ID NO: 68829 - DNA, 75 bp, synthetic construct
  source 1..75: mol_type = other DNA
atggacaaggaattaccgtggctggcggataacgcccaactggaactgaaatataaaaaaggcaaaacaccactc

SEQ ID NO: 68830 - DNA, 75 bp, synthetic construct
  source 1..75: mol_type = other DNA
tccagagcatgacagttacgcaattagtgaaaagagtcacggcagagaagaaatccgtcttcatattgtttgcga

SEQ ID NO: 68831 - DNA, 75 bp, synthetic construct
  source 1..75: mol_type = other DNA
ggaccagccgatcattatggggcgcacctaccaccaggaaaaccgcacccccggcagcctgccgggaacaaagac

SEQ ID NO: 68832 - DNA, 75 bp, synthetic construct
  source 1..75: mol_type = other DNA
ttatcggatattctactgttgactatttgtgccgttatttcgggtgcagaaggctgggaagatatagaggatttt

SEQ ID NO: 68833 - DNA, 75 bp, synthetic construct
  source 1..75: mol_type = other DNA
attcaaggcagggttaagacgtaagatgcgaaaagcagccatggacagaaactatctggcgtcagtccttgcggg

SEQ ID NO: 68834 - DNA, 75 bp, synthetic construct
  source 1..75: mol_type = other DNA
tttgatgcctgtattgattcgtggaaagcggacccggaattaaataattcgacttatatgtggaacatcctgatg

SEQ ID NO: 68835 - DNA, 75 bp, synthetic construct
  source 1..75: mol_type = other DNA
atgatcgaccttgaaaccatgggaaaaaatcctgatgccccgatcatctcaataggtgcaatatttttcgatccg

SEQ ID NO: 68836 - DNA, 75 bp, synthetic construct
  source 1..75: mol_type = other DNA
atcgcgccggaggtgtcagcaagcgacgtagggaccgtgcgggaagttgacgcggcggacgtgggccagagagat

SEQ ID NO: 68837 - DNA, 75 bp, synthetic construct
  source 1..75: mol_type = other DNA
gcaacaccatgacgcatctcaacaagtttgccccttatctcgcgaagctcttctgcggaagaaccaataccaatg

SEQ ID NO: 68838 - DNA, 75 bp, synthetic construct
  source 1..75: mol_type = other DNA
agttagtcgccagaggattgctggatataagaatagcagcagattctggtaatgtgaaagcttgtcatatgttat

SEQ ID NO: 68839 - DNA, 75 bp, synthetic construct
  source 1..75: mol_type = other DNA
aggcggatgtgatcatctctaaccgtatggcggaagagctggcggatgtcgaagataaggtttatacccgcgatc

SEQ ID NO: 68840 - DNA, 75 bp, synthetic construct
  source 1..75: mol_type = other DNA
gttcagataacttccgcgcgtcttccattcaggggattatgaaacgtatcaaggcgaaaggcgttgaagtgatca

SEQ ID NO: 68841 - DNA, 75 bp, synthetic construct
  source 1..75: mol_type = other DNA
ggcgcgtaagccgaaagtggtcggtatctatcgcctgattatgaaaagcggctccgataatttccgtgcatcctc

SEQ ID NO: 68842 - DNA, 75 bp, synthetic construct
  source 1..75: mol_type = other DNA
tcaacgctgatgcgtctacggcacatctcaccttgctacaggcactttttgatacagtctccgcaggcgacacta

SEQ ID NO: 68843 - DNA, 75 bp, synthetic construct
  source 1..75: mol_type = other DNA
atgttaatggcgaacgataacgcatatgcagaagaagatctcattttgagtgacttcatagggaagcgtgaacgc

SEQ ID NO: 68844 - DNA, 75 bp, synthetic construct
  source 1..75: mol_type = other DNA
taagcgcagtcacgaccgctggtggaatgcaaacagtagatataacgctggtggcaggcccggcagacgcctcgc

SEQ ID NO: 68845 - DNA, 75 bp, synthetic construct
  source 1..75: mol_type = other DNA
gagcgcatcgacaatgtgctggtctgcccgaacagcaactgtatcagccatgccgaaccggtttcatccagcttt

SEQ ID NO: 68846 - DNA, 75 bp, synthetic construct
  source 1..75: mol_type = other DNA
agggctggatcggttgtgaatataaacctcgtggcctcaccgaagaagggcttggctggtttgacgcctggcgct

SEQ ID NO: 68847 - DNA, 75 bp, synthetic construct
  source 1..75: mol_type = other DNA
ttcgctgtaaaaggaaatcaggggcggcttaataaagcctttgaggaaaaattcccactgaaagaattaaataat

SEQ ID NO: 68848 - DNA, 75 bp, synthetic construct
  source 1..75: mol_type = other DNA
atggttaaactggatttgcaaccagtagcctctgttgcccgtattgcccggggacacgatatcaatgataacctc

SEQ ID NO: 68849 - DNA, 75 bp, synthetic construct
  source 1..75: mol_type = other DNA
ctgctgagcgcaacagtctgatggccttcccgactactgatgacgaactcatccagcattacaccttgaccgaac

SEQ ID NO: 68850 - DNA, 75 bp, synthetic construct
  source 1..75: mol_type = other DNA
tcttttataccgatatttttggcattcctgccggatttgtcggaaccatgtttttggtcgctcgtgcactggatg

SEQ ID NO: 68851 - DNA, 75 bp, synthetic construct
  source 1..75: mol_type = other DNA
tgaatctcttttcgctgctggcgctggtgctggtgcttggcatcggcatcaattacacgctgtttttcagtaatc

SEQ ID NO: 68852 - DNA, 75 bp, synthetic construct
  source 1..75: mol_type = other DNA
aggattacgccgctggacaatgccgtgccggatgaggccaaagagttaatgcaacaggcgtatagcttgctgcca

SEQ ID NO: 68853 - DNA, 75 bp, synthetic construct
  source 1..75: mol_type = other DNA
atacctaaaccagttaacgtcaacgttgaggtaaacatagttcttttcccgccagataacagacggcgggatctg

SEQ ID NO: 68854 - DNA, 75 bp, synthetic construct
  source 1..75: mol_type = other DNA
tcagcatgccaccacagagatgcaggtgacggcagcacagatgcagaagcagtatgaggaaatccgtcgtgagct

SEQ ID NO: 68855 - DNA, 75 bp, synthetic construct
  source 1..75: mol_type = other DNA
tattatatcagttctgctgatttaaccgcagagaagttcgccacagcaatccgaaaccactggcacgtggagaat

SEQ ID NO: 68856 - DNA, 75 bp, synthetic construct
  source 1..75: mol_type = other DNA
cgccgcagggcagcgttgctgttccaccgccgacggcgttttatcccgggaatggtgtcacgccaccaccgcagg

SEQ ID NO: 68857 - DNA, 75 bp, synthetic construct
  source 1..75: mol_type = other DNA
aagcgaaagtcacgctgaaaggtacaaaagcaggcgctcatactgttacagcatcgatggctggcggtaagagtg

SEQ ID NO: 68858 - DNA, 75 bp, synthetic construct
  source 1..75: mol_type = other DNA
atattgaggtgaaggataattacggcaacggtgtaccccagcaggaggtaaccctcagcgtttcaccaagtgaag

SEQ ID NO: 68859 - DNA, 75 bp, synthetic construct
  source 1..75: mol_type = other DNA
tggtgcttaaaccgtggcgtgagaaacgcagtctttcccagaatgcactcagccacatgtggtacagcgaaatca

SEQ ID NO: 68860 - DNA, 75 bp, synthetic construct
  source 1..75: mol_type = other DNA
ggcatcgggtcactgtacagtgaatggggagatatggggcattacacgactgaggctggttttcaatcaaatatg

SEQ ID NO: 68861 - DNA, 75 bp, synthetic construct
  source 1..75: mol_type = other DNA
aattgcatcgcggtaacttcaccgctatcggtcagcagatccagccttatctggaggacggcaaatgctttcgca

SEQ ID NO: 68862 - DNA, 75 bp, synthetic construct
  source 1..75: mol_type = other DNA
tttcctgataccgtgtttcctcgtggccgcgcgatttactcatccagccgcaacgtgatggataatattgctgcg

SEQ ID NO: 68863 - DNA, 75 bp, synthetic construct
  source 1..75: mol_type = other DNA
ttatccactccttcacagagcacagccagtgccagttcctgtaaagtggagttccgtcacggtaaaatgacgctg

SEQ ID NO: 68864 - DNA, 75 bp, synthetic construct
  source 1..75: mol_type = other DNA
ccgctattctgaacgtagccggtcgcaccttagccttcatcagtggtaaggcaccggaaatcaaaccctcgcccg

SEQ ID NO: 68865 - DNA, 75 bp, synthetic construct
  source 1..75: mol_type = other DNA
agcgcaacaggaaccggaaaaagtctgcaccgcctgcggtcaaagcggtggcggcaactgccctgattgtggcgc

SEQ ID NO: 68866 - DNA, 75 bp, synthetic construct
  source 1..75: mol_type = other DNA
cgatggtagcggagttaatacaccgacaaacaacccgtcagaagatcctgatattgccgggtctggttattacgg

SEQ ID NO: 68867 - DNA, 75 bp, synthetic construct
  source 1..75: mol_type = other DNA
ggatttgcaggcatccggcaccgatgctgatctgctcaacgaggccggggtcacgacactggtgcgtaaggatgg

SEQ ID NO: 68868 - DNA, 75 bp, synthetic construct
  source 1..75: mol_type = other DNA
ggttgtctggtggaaaaaattaaggtcggtgatttctccacactggctaaagcgaccgcagagccgggagcgtaa

SEQ ID NO: 68869 - DNA, 75 bp, synthetic construct
  source 1..75: mol_type = other DNA
atgcgctgcctgtattgtcataaccgcgacacctgggacacgcatggcggtaaagaagttaccgttgaagattta

SEQ ID NO: 68870 - DNA, 75 bp, synthetic construct
  source 1..75: mol_type = other DNA
atcggcgcagtgactgctgaaggtaaaaaaacaggtatgaaagccctgttatctgcccagtcccagctcggcgtt

SEQ ID NO: 68871 - DNA, 75 bp, synthetic construct
  source 1..75: mol_type = other DNA
caggcgattggtgttgaattgtttaaccgccaggtaacgccgctgcaactctcagaacaagggaaaatcttccat

SEQ ID NO: 68872 - DNA, 75 bp, synthetic construct
  source 1..75: mol_type = other DNA
gcgtgaatacagaaacggttggcctcttgcgtatagtgattatgctgaaggctggaacgactgccgcgaagccat

SEQ ID NO: 68873 - DNA, 75 bp, synthetic construct
  source 1..75: mol_type = other DNA
aagtgtgccgcagcttattgataatttgctgtcggtgcgtaccaatatttccactatttttattcgcaccgcgtt

SEQ ID NO: 68874 - DNA, 75 bp, synthetic construct
  source 1..75: mol_type = other DNA
ggcacaaccagatattgaattatccgaagaagagcgtgcagatctcttttacagccatctggaaagtgagaatta

SEQ ID NO: 68875 - DNA, 75 bp, synthetic construct
  source 1..75: mol_type = other DNA
ctggcgaacgtattatcgctctcgatgattttcgctcaatgcttgatatagagcataaatatcaaacatataaat

SEQ ID NO: 68876 - DNA, 75 bp, synthetic construct
  source 1..75: mol_type = other DNA
ggctggatggtcatcccgatgggcaggtctcagaaacagaagcacagagtgctgttcaaagactggcgataatag

SEQ ID NO: 68877 - DNA, 75 bp, synthetic construct
  source 1..75: mol_type = other DNA
caccaagcagagcaataaaacctggtccctgacgcatccggtggatgacgcaattaccctgctgacacagggcgg

SEQ ID NO: 68878 - DNA, 75 bp, synthetic construct
  source 1..75: mol_type = other DNA
cccggtgcctcctctcgaaaacctgaccctgcgccagcgtattacttccagatacctggcaagtctggttacctc

SEQ ID NO: 68879 - DNA, 75 bp, synthetic construct
  source 1..75: mol_type = other DNA
tctaccgtgcggttatcgattgtgccgatatgccggaagatttgcgcattaacgcaccggtactgtgggcggggc

SEQ ID NO: 68880 - DNA, 75 bp, synthetic construct
  source 1..75: mol_type = other DNA
atgacggcgcgctatcagggtatgaaccgaaataccggcctcggcatcagcgacactgagcacatcagccagagc

SEQ ID NO: 68881 - DNA, 75 bp, synthetic construct
  source 1..75: mol_type = other DNA
gacgggccgacgaaccttctggcatgggaaaggcttaagaacaaagagttgccgccttcactgcatcgctactga

SEQ ID NO: 68882 - DNA, 75 bp, synthetic construct
  source 1..75: mol_type = other DNA
aaagcaggctgaagaagccgcaaaacaggccgagttaaagcagaagcaagcggaagaggcggcagcgaaagcggc

SEQ ID NO: 68883 - DNA, 75 bp, synthetic construct
  source 1..75: mol_type = other DNA
gacgctgtcatggttgattcaggtgcggtagttgagcagtacaaacgtatgcaaagccaggaatcaagcgcgaag

SEQ ID NO: 68884 - DNA, 75 bp, synthetic construct
  source 1..75: mol_type = other DNA
gaatctctgtcactaaaaacactgtcagatgaatttggcgttacagaacgtactttacagcgcgattttcatcag

SEQ ID NO: 68885 - DNA, 75 bp, synthetic construct
  source 1..75: mol_type = other DNA
accggtgttcgtgattatatacatgtaatggatttagcggaagggcatgtggctgctttatcttaccttttccgt

SEQ ID NO: 68886 - DNA, 75 bp, synthetic construct
  source 1..75: mol_type = other DNA
aggtattttaaccctgtgggtgctcatttctctggagagattggtgaggatccaaatggtattccaaataatctt

SEQ ID NO: 68887 - DNA, 75 bp, synthetic construct
  source 1..75: mol_type = other DNA
atatattcaatttaggcacgggtaaaggatattctgttttagaattaatttcttgctttgaaaagatatcaggca

SEQ ID NO: 68888 - DNA, 75 bp, synthetic construct
  source 1..75: mol_type = other DNA
aaagctatactatatgagttagatataaataatgaaaatggcgtttcagaaataataaaaaagcataaaattgaa

SEQ ID NO: 68889 - DNA, 75 bp, synthetic construct
  source 1..75: mol_type = other DNA
accggattgccagtgtggtggtcatgccttcggaaaatgaagcgtttggtatggtactggctgaagcgtcagtct

SEQ ID NO: 68890 - DNA, 75 bp, synthetic construct
  source 1..75: mol_type = other DNA
aactggtcgaggagtgcgaaattcctgctggcggatctctggtcgagtacgttgacgatatgcgcgagaagctgg

SEQ ID NO: 68891 - DNA, 75 bp, synthetic construct
  source 1..75: mol_type = other DNA
tccaaccgtatggcagaagagcttaaggatgtggcagacaaagtctacacccgcgatctctttggcagcgactaa

SEQ ID NO: 68892 - DNA, 75 bp, synthetic construct
  source 1..75: mol_type = other DNA
catccaccagcagagtgtggactcacctgtcggtcgaccttgaaacgatgggaacaaatcctgatgcaccaatca

SEQ ID NO: 68893 - DNA, 75 bp, synthetic construct
  source 1..75: mol_type = other DNA
ccctcttaagtattatgaagtcaatatagcaggaagtttgcatctagttgaagagatgattacgcacaatataag

SEQ ID NO: 68894 - DNA, 75 bp, synthetic construct
  source 1..75: mol_type = other DNA
aggaatcagagtttttaggcattctttcacgtaatattatacctgattattccgtttttcccaaaatacgactca

SEQ ID NO: 68895 - DNA, 75 bp, synthetic construct
  source 1..75: mol_type = other DNA
gatatccagaacaacccgcaaaaaactcgtccattcaacattcaacattcaacaaggaaagaaacttgtcgctgg

SEQ ID NO: 68896 - DNA, 75 bp, synthetic construct
  source 1..75: mol_type = other DNA
attatcgggtatggtttactgatggctgtcaccggtgctctgattgatgaaacgcttgtggaaaaagcgaataag

SEQ ID NO: 68897 - DNA, 75 bp, synthetic construct
  source 1..75: mol_type = other DNA
ggttacgatgaaaaaacgctgcccgccaacgcaccacgtaacgcgcattataaagcctatattctgggcgaaggg

SEQ ID NO: 68898 - DNA, 75 bp, synthetic construct
  source 1..75: mol_type = other DNA
cattcgacattcaacaaggaaagaaacttgtcgctggcatggacgtcaacattgatgatgagattggcgacgacg

SEQ ID NO: 68899 - DNA, 75 bp, synthetic construct
  source 1..75: mol_type = other DNA
tctggcatgagtgacagcattgatcctgacatggacgaactgcgcagcctgggcgattccatcgctgttacggct

SEQ ID NO: 68900 - DNA, 75 bp, synthetic construct
  source 1..75: mol_type = other DNA
agataccgctgaagattcagaacaaccagagccgataaaagttaccgctgacgaagtaaacaaaattatgcaggc

SEQ ID NO: 68901 - DNA, 75 bp, synthetic construct
  source 1..75: mol_type = other DNA
gcacgcccaccagcaactacagacagattcggagatttaagacaggcagttaagcggactcattcggctcttggt

SEQ ID NO: 68902 - DNA, 75 bp, synthetic construct
  source 1..75: mol_type = other DNA
cgacccgaatgatccgaaatgggtgaaggggattgaaacccgcgattcagtgaatcagaaccagcaagaaacgga

SEQ ID NO: 68903 - DNA, 75 bp, synthetic construct
  source 1..75: mol_type = other DNA
cgcgtgacatcaccgcgactggatgaagtgacgatcaaaaaaatggcatcccgtgactttattcagttatgtgtg

SEQ ID NO: 68904 - DNA, 75 bp, synthetic construct
  source 1..75: mol_type = other DNA
actgagccaaaccgaagtgaatagccacgacgggatcgccacagctacgctgaccagtttgaaaaatggtgatta

SEQ ID NO: 68905 - DNA, 75 bp, synthetic construct
  source 1..75: mol_type = other DNA
ataccactattttgcttatcagccatgacttacaaatgcttagccaatgggcggataaaattaacgtgctttact

SEQ ID NO: 68906 - DNA, 75 bp, synthetic construct
  source 1..75: mol_type = other DNA
attgcccaggggaacccgatgccggtgccttacggtgaaatgctggttggctcccgccgtatatcccaggacatc

SEQ ID NO: 68907 - DNA, 75 bp, synthetic construct
  source 1..75: mol_type = other DNA
ttgagcgacggcactttatcgtggttagggagcgccttattctggatgccgctgccagaaccgccgaaggaggta

SEQ ID NO: 68908 - DNA, 75 bp, synthetic construct
  source 1..75: mol_type = other DNA
atatcggccccaaacccgtgaaaaaggatacccttaccgggagtcgtacactgttcccgcgtcttgagccggtgc

SEQ ID NO: 68909 - DNA, 75 bp, synthetic construct
  source 1..75: mol_type = other DNA
gcgcaggataaaggtttgcaggtcggtcagcgtgtcgggattggctggacggcgcgtagctgtggtcactgcgac

SEQ ID NO: 68910 - DNA, 75 bp, synthetic construct
  source 1..75: mol_type = other DNA
cgcaggcgattgtcagttatcgcgaagagtacggtccgtttaaaacggtggaggatctaaagcaggtgccgggga

SEQ ID NO: 68911 - DNA, 75 bp, synthetic construct
  source 1..75: mol_type = other DNA
attttcataagcggatatggactatacccgcagaaagaatgaaagccaggatacagcatcgtgttcctttatccc

SEQ ID NO: 68912 - DNA, 75 bp, synthetic construct
  source 1..75: mol_type = other DNA
gcagaacaaaagaaagagccagaaatgacggtcagatattatatcagttctgctgatttaaccgcagagaagttc

SEQ ID NO: 68913 - DNA, 75 bp, synthetic construct
  source 1..75: mol_type = other DNA
gttaacctgaaatttgaagaagcgaagcctgtactggaagaccagctggctaaatccatcgcgaacatcctgtaa

SEQ ID NO: 68914 - DNA, 75 bp, synthetic construct
  source 1..75: mol_type = other DNA
cggctatacgccactggcagcaatccttaacgctgctaaacgcgcatatgaagaatcagcaagcgccgctggcat

SEQ ID NO: 68915 - DNA, 75 bp, synthetic construct
  source 1..75: mol_type = other DNA
tagcgggcagtaaacgtggtgcgcatctggcgttaagtctggagcggctcgatgcgctgctccacacctcagcac

SEQ ID NO: 68916 - DNA, 75 bp, synthetic construct
  source 1..75: mol_type = other DNA
ctgagcgaaagcaacccggcctccgccctgaaccaccttacccatgcgctgcaactcgatccccgctgtggcgtg

SEQ ID NO: 68917 - DNA, 75 bp, synthetic construct
  source 1..75: mol_type = other DNA
gcctctgtgagctctggttctcaggctaatcaacaggtgatttttatcggtgatcaaagtactgctgccctgacc

SEQ ID NO: 68918 - DNA, 75 bp, synthetic construct
  source 1..75: mol_type = other DNA
tactggcaacccaagcacagcacatgttgctagttttatcgctgatccgtcgactctcacggccaacaacagtga

SEQ ID NO: 68919 - DNA, 75 bp, synthetic construct
  source 1..75: mol_type = other DNA
tgctgctgcaactggcggaagaccgtcgccgtctcaagggcgttcagtccacggtaaaaaaagcggaaatcaagg

SEQ ID NO: 68920 - DNA, 75 bp, synthetic construct
  source 1..75: mol_type = other DNA
cgacgtctgatcatgtattacgctgtatgtttcttcgggaggggtaactacggacagacacatcaaaagataatg

SEQ ID NO: 68921 - DNA, 75 bp, synthetic construct
  source 1..75: mol_type = other DNA
atgtccgatccgatttccggcacagggttagctgctggagtcctgacaggcgctagtgtttatggactgctgacc

SEQ ID NO: 68922 - DNA, 75 bp, synthetic construct
  source 1..75: mol_type = other DNA
acaatgcacgcactgtttaacgaaccgctgcagggcgagtccgccaatgccagcaatattgtggagattttttga

SEQ ID NO: 68923 - DNA, 75 bp, synthetic construct
  source 1..75: mol_type = other DNA
taaagcatgagccggattcattaaataaggtttgcattgtttcaatgatggcccgttcacgcctgatgcaaaaag

SEQ ID NO: 68924 - DNA, 75 bp, synthetic construct
  source 1..75: mol_type = other DNA
gtaatcaggacatcaaattttctgccgttattaatgacgatgacagcgccgacatcctgtttacactgcccctgc

SEQ ID NO: 68925 - DNA, 75 bp, synthetic construct
  source 1..75: mol_type = other DNA
gcgctgacgtatggcggtaatttccatacggtcggtgcggttctcacgccgctgtctgttccggcctttacgtta

SEQ ID NO: 68926 - DNA, 75 bp, synthetic construct
  source 1..75: mol_type = other DNA
aggcccgcgccgtcagccggaaaaaaatgtcttcaccgatgaacagattgagaagctagaagaaatcttccattc

SEQ ID NO: 68927 - DNA, 75 bp, synthetic construct
  source 1..75: mol_type = other DNA
agcaatgtctgaaatgttatgggctaaaagaagacacactgtcactttttgtggataaaacaaaatcgaatgaca

SEQ ID NO: 68928 - DNA, 75 bp, synthetic construct
  source 1..75: mol_type = other DNA
ccggagagaactctggaaagccctgcttggatggatgccggatccgcaggggggcgagattgtttatgccggtgg

SEQ ID NO: 68929 - DNA, 75 bp, synthetic construct
  source 1..75: mol_type = other DNA
ttcaaccggggacgcgccagcgccgccgaacgcgtggaaatcgacgtcagtcataacgcccttgccggtgggctt

SEQ ID NO: 68930 - DNA, 75 bp, synthetic construct
  source 1..75: mol_type = other DNA
tgccttacggtgaaatgctggttggttcacgacggatatcccaggacatcagcacccgtgatgagggcgggggcg

SEQ ID NO: 68931 - DNA, 75 bp, synthetic construct
  source 1..75: mol_type = other DNA
ctcatcaggactctgggatcctggcggcctgatgccagtgaataccgcaatgttaccaacgtttatcgtatttca

SEQ ID NO: 68932 - DNA, 75 bp, synthetic construct
  source 1..75: mol_type = other DNA
taatgtcctttttgcaatattttatctgggggagctggctggttaccctcggttcttacatgattaatacccttc

SEQ ID NO: 68933 - DNA, 75 bp, synthetic construct
  source 1..75: mol_type = other DNA
cgggcgcagcgccacctacgaggccagccgcaccgaggaagccagtcacgccgatatcgcatgggcgaccatgca

SEQ ID NO: 68934 - DNA, 75 bp, synthetic construct
  source 1..75: mol_type = other DNA
taagttcccgccagtagcgaatgatgatgtttatatgggggactggcgcaagcagagaactttaagaaaaatcac

SEQ ID NO: 68935 - DNA, 75 bp, synthetic construct
  source 1..75: mol_type = other DNA
tttgtaaaaaaggtaatttgatgaaaacaaaaaaattaatgatggttgcactggtcagttccactctggcccttt

SEQ ID NO: 68936 - DNA, 75 bp, synthetic construct
  source 1..75: mol_type = other DNA
gccgcttcccctatatctgtatccttgacgaagtcggtgcctactacacagaccgcattgctgtggaggccaccc

SEQ ID NO: 68937 - DNA, 75 bp, synthetic construct
  source 1..75: mol_type = other DNA
aatgttgatgagaacaactactggctgcgccgtgaagcagcgggtgatatccggcgcgtgaataaaaaggtgaac

SEQ ID NO: 68938 - DNA, 75 bp, synthetic construct
  source 1..75: mol_type = other DNA
aacctcgtaaaaagtattcgaatgaattcaaactccgtatggtggaactggcattacaacccggtgcttgtgtgg

SEQ ID NO: 68939 - DNA, 75 bp, synthetic construct
  source 1..75: mol_type = other DNA
acagcaatcaagaagcgtaatcttgaagttaaaactcagatgagtgaaaccatctggctggagccttccagtgaa

SEQ ID NO: 68940 - DNA, 75 bp, synthetic construct
  source 1..75: mol_type = other DNA
atgatcatgctgattctcgcgcctctggtgggcgtgctgggtgcgcttttgctggcgtatggtgcctggctgatt

SEQ ID NO: 68941 - DNA, 75 bp, synthetic construct
  source 1..75: mol_type = other DNA
gggctgaaatttgcagattacggttctttcgattacggacgtaattatggcgtaatgtacgacatcgaaggctgg

SEQ ID NO: 68942 - DNA, 75 bp, synthetic construct
  source 1..75: mol_type = other DNA
ctccatcaaggagcagttgccggtactcaaacggggtcatctgtggattatgagcctgctgtatctggcaacctt

SEQ ID NO: 68943 - DNA, 75 bp, synthetic construct
  source 1..75: mol_type = other DNA
ctgttacatctgtgtgggaaaagaacgctgagatttgtgcctcgttgatggcgcaggcggcggaaaacgacgtat

SEQ ID NO: 68944 - DNA, 75 bp, synthetic construct
  source 1..75: mol_type = other DNA
gtctgaaatcactggccgggtcaatgtctggtatgggcggactggccggtggtattggtaactggttgtccggcg

SEQ ID NO: 68945 - DNA, 75 bp, synthetic construct
  source 1..75: mol_type = other DNA
cagttgctgggatatggtgaaggctcacggatgcgtgaacgactccaggaaatgtggagtatccggcatgagttt

SEQ ID NO: 68946 - DNA, 75 bp, synthetic construct
  source 1..75: mol_type = other DNA
tgaatgcgctgacgctgacggatgttacaaaaaatgcagcgtatggcgttgagatagaaagtctggtgctggaga

SEQ ID NO: 68947 - DNA, 75 bp, synthetic construct
  source 1..75: mol_type = other DNA
aatggacggtctggtgaataatataaccgaagccctgtcaggtaaccttgtggcatggcgtgactgggcggcggc

SEQ ID NO: 68948 - DNA, 75 bp, synthetic construct
  source 1..75: mol_type = other DNA
tcggactcggtggtggcgtggacagtgcggatgacgacaccattctggttgtgctgatcacaccgcacgtaatct

SEQ ID NO: 68949 - DNA, 75 bp, synthetic construct
  source 1..75: mol_type = other DNA
gagcagaacttgcccgtcagggacgccctgtcgggccatttgatcaaatgatcgcaggtcatgcccgcagtcggg

SEQ ID NO: 68950 - DNA, 75 bp, synthetic construct
  source 1..75: mol_type = other DNA
atgattgtgatttcccgacatgttgctatccctgatggcgagtttgagatcaccgccattcgtgcgcagggcgcg

SEQ ID NO: 68951 - DNA, 75 bp, synthetic construct
  source 1..75: mol_type = other DNA
tattgccagagttgtatcctgtatcagtcctgcaaaatttcacgagtgctttattaactggatgcgtgattgcca

SEQ ID NO: 68952 - DNA, 75 bp, synthetic construct
  source 1..75: mol_type = other DNA
aagctcagcttatctgccaacaaaagggattccatgccgcctccaatacgccagttgcgggtaatcgtgctctgg

SEQ ID NO: 68953 - DNA, 75 bp, synthetic construct
  source 1..75: mol_type = other DNA
gttgctgattttgacaagagcgaatttaacccttcggattctgataggaaaatatggactgggataagaaagctt

SEQ ID NO: 68954 - DNA, 75 bp, synthetic construct
  source 1..75: mol_type = other DNA
tggcggcgggagcgtgacctgacggggtggatgtcgctgtcgcgtaaaccggagatgacgtggtacgggtgggac

SEQ ID NO: 68955 - DNA, 75 bp, synthetic construct
  source 1..75: mol_type = other DNA
cgttcttatctcatatccgacaggcacccttggtgatatcctggcatggttccattcggctgaaaattttcgcat

SEQ ID NO: 68956 - DNA, 75 bp, synthetic construct
  source 1..75: mol_type = other DNA
aagtggaggctcgcaggatagaaagctggttacacagccagatagctgaactgggaaccacgaatatcgccaaag

SEQ ID NO: 68957 - DNA, 75 bp, synthetic construct
  source 1..75: mol_type = other DNA
gtgctttatgtggcgttcacccgggcaacccgtgaattactggtgacctgttaccgtgaaaacagtatcagtcgt

SEQ ID NO: 68958 - DNA, 75 bp, synthetic construct
  source 1..75: mol_type = other DNA
cccgacaaatccggaatatagatttgctgggcatacagatattttcattacctggatttataaacttacattgaa

SEQ ID NO: 68959 - DNA, 75 bp, synthetic construct
  source 1..75: mol_type = other DNA
cggcgaatacggtgacgcatatcagggcgctcgtgaagacctgtccatctggaaacggcgagcgcttgaagctga

SEQ ID NO: 68960 - DNA, 75 bp, synthetic construct
  source 1..75: mol_type = other DNA
tattgaagctcgcaagggtaatactcagccagctttgtcatggtttgcactaaaatcagcactcagcaataacca

SEQ ID NO: 68961 - DNA, 75 bp, synthetic construct
  source 1..75: mol_type = other DNA
atgcgtttatctctccctcgcctgaaaatgccgcgcctgccaggattcagtatcctggtctggatctccacggcg

SEQ ID NO: 68962 - DNA, 75 bp, synthetic construct
  source 1..75: mol_type = other DNA
agcgtgaccatgaaagacaaggacttcaatccagtgattggtcgtgccggtgtggatgtgggtaaatcgttctcc

SEQ ID NO: 68963 - DNA, 75 bp, synthetic construct
  source 1..75: mol_type = other DNA
ttatgggatttgacttctatcgaataaatagatttggtagattggaaaagtattattatatacaactaagaggcg

SEQ ID NO: 68964 - DNA, 75 bp, synthetic construct
  source 1..75: mol_type = other DNA
aaaaaagcgcatagcagaactggaagccgaacctgtaagccaaacttgcaagttgaacgatccatcgggcaactc

SEQ ID NO: 68965 - DNA, 75 bp, synthetic construct
  source 1..75: mol_type = other DNA
cgcctgcgtaaagcactggagcccggcgggcatgaccgcatggtgcagaccgtgcgcggtacaggatatcgtttt

SEQ ID NO: 68966 - DNA, 75 bp, synthetic construct
  source 1..75: mol_type = other DNA
agcttcagctccgtctggatgatgatttctctgatgaagatgagttgcttgaactgcttggtaaggccgctcaga

SEQ ID NO: 68967 - DNA, 75 bp, synthetic construct
  source 1..75: mol_type = other DNA
atgaagttaaaattcatctccatggctgtattttcagctctgaccctgggtgttgcgacaaatgcgtctgctgtc

SEQ ID NO: 68968 - DNA, 75 bp, synthetic construct
  source 1..75: mol_type = other DNA
atttcagcgatattaaaaaagccgctgatcgtgtttatgctgaaatgggattagataaattaaagggggaaacat

SEQ ID NO: 68969 - DNA, 75 bp, synthetic construct
  source 1..75: mol_type = other DNA
atcgccgaactgaaagcgcaacgcaatgatcttgttggtattaatgcagaatatgtacttaatcgccttattgaa

SEQ ID NO: 68970 - DNA, 75 bp, synthetic construct
  source 1..75: mol_type = other DNA
gttggctctggtggctgatgtgcaataccacgaaccatatctgtcagccgcgctaaaccgaaaattcaggggaat

SEQ ID NO: 68971 - DNA, 75 bp, synthetic construct
  source 1..75: mol_type = other DNA
ccgcaaagcgaactggtgatgaacaggttgaagatccatgagccaaaactggatgtgcgtgacgtgctacccctt

SEQ ID NO: 68972 - DNA, 75 bp, synthetic construct
  source 1..75: mol_type = other DNA
gagtaatagtcacagatatattaatgataatcactatcaccatatcgtcacgcctgaagccatcagtctggcgtt

SEQ ID NO: 68973 - DNA, 75 bp, synthetic construct
  source 1..75: mol_type = other DNA
gcgtcgcagtcatcggatgaattttcgtcatcacagaaagtgctgatggacatcagccagcggacaggcaccgca

SEQ ID NO: 68974 - DNA, 75 bp, synthetic construct
  source 1..75: mol_type = other DNA
ggttggtggtgcgaacgaggcaagcggagtgacgaagacgctctccggtgtgctgaatggtattgcaggcaatat

SEQ ID NO: 68975 - DNA, 75 bp, synthetic construct
  source 1..75: mol_type = other DNA
agtcctgcaaaatttcacgagtgctttattaactggatgcgtgattgccattcatcaaatgataaagacgtcatt

SEQ ID NO: 68976 - DNA, 75 bp, synthetic construct
  source 1..75: mol_type = other DNA
gccagcagccggctcaccggtataggcgaggtggtcatgagcacgctgccatcccaaatcaccttgagcgacagt

SEQ ID NO: 68977 - DNA, 75 bp, synthetic construct
  source 1..75: mol_type = other DNA
acgtgagctgaggaaaaagctacaacgcattgaaatggagaatgaaatattaaaaaaggctaccgcgctcttgat

SEQ ID NO: 68978 - DNA, 75 bp, synthetic construct
  source 1..75: mol_type = other DNA
ctggatacccttcaattcttgtatcaatattgtttcttggcggcgtacaactaattggtattggtgtacttggag

SEQ ID NO: 68979 - DNA, 75 bp, synthetic construct
  source 1..75: mol_type = other DNA
tcgcgggtggtatctcaggagatcagcacagcagatgaaggtgatggtggtcaggttgtggtgattggtcgctga

SEQ ID NO: 68980 - DNA, 75 bp, synthetic construct
  source 1..75: mol_type = other DNA
cagtcacgcgaagcacaatcctccattctgaccgatgaaatcacgttggatgatgcactgctgcaattccgggaa

SEQ ID NO: 68981 - DNA, 75 bp, synthetic construct
  source 1..75: mol_type = other DNA
ctgaagttcaggaaaatgatccggaggaaatggaaggcactgcgcatcagcacaaggagaacactggcggcaatc

SEQ ID NO: 68982 - DNA, 75 bp, synthetic construct
  source 1..75: mol_type = other DNA
aaaacgaggcaaacatgacgccggaagagatgaagaatgagctacgttatcttcgcgcagaaaatgcatatctga

SEQ ID NO: 68983 - DNA, 75 bp, synthetic construct
  source 1..75: mol_type = other DNA
ggcgctgctggaactgaaaaacttccgcctgccgggacaggtatttctgaccggcaggagtatgaaggatgcgga

SEQ ID NO: 68984 - DNA, 75 bp, synthetic construct
  source 1..75: mol_type = other DNA
taattgatgtaccgggcaaagccgatcccctgatgaaaatcacgcacgatgtggggtattccccttttcgttttc

SEQ ID NO: 68985 - DNA, 75 bp, synthetic construct
  source 1..75: mol_type = other DNA
ccgaaaaaactggcggcggatatgcagaaagacgcccgtggggccatgctgcacgtactggattctctggcgaaa

SEQ ID NO: 68986 - DNA, 75 bp, synthetic construct
  source 1..75: mol_type = other DNA
ggcgagttctcccagctcggcgccgaagagcgtaaagccattgcccgctttgctatcgatcatgtcgatcgtcgc

SEQ ID NO: 68987 - DNA, 75 bp, synthetic construct
  source 1..75: mol_type = other DNA
ctttaaactcgaactcagtcataaaacggtacatgtgcatcgcgccaatgtgctgggaaaactgaactgccatag

SEQ ID NO: 68988 - DNA, 75 bp, synthetic construct
  source 1..75: mol_type = other DNA
gtgtggtgcggtgatgtgacctatatctggacaggtaagcgctgggcgtacctcgccgttgttctcgacctgttc

SEQ ID NO: 68989 - DNA, 75 bp, synthetic construct
  source 1..75: mol_type = other DNA
gttacagccacggattttacccggccgctgccttttggtccgtggctcgccttgagcggagtatgccattttttg

SEQ ID NO: 68990 - DNA, 75 bp, synthetic construct
  source 1..75: mol_type = other DNA
agctgcggcactgggagcatggatggggtggcaggtattaccctccgtgcttctgtttgcctcagtcagcggatt

SEQ ID NO: 68991 - DNA, 75 bp, synthetic construct
  source 1..75: mol_type = other DNA
ggcctggcgatattaatgccggaaacattgacggcagcatccatcgctgggcaaaaaatgaagttatcgacaaag

SEQ ID NO: 68992 - DNA, 75 bp, synthetic construct
  source 1..75: mol_type = other DNA
gcagcaccaccacgggcggtgaaaccactccgggcgcggtgaaagtcgggaaaggtggcgaatatgccaacctgg

SEQ ID NO: 68993 - DNA, 75 bp, synthetic construct
  source 1..75: mol_type = other DNA
gccataacggactatatcgttggatattacagcgcactaagaccgcacgaatataatggtgggttacccccaaac

SEQ ID NO: 68994 - DNA, 75 bp, synthetic construct
  source 1..75: mol_type = other DNA
gattgcctaacagtcgaattgctttagaaagtaagaataataagatcgaatgtaaaattgatgaaattaacatca

SEQ ID NO: 68995 - DNA, 75 bp, synthetic construct
  source 1..75: mol_type = other DNA
ttgtgataagacggttcgaaaagaaaacatccgaaatgagttcaatataaatccaaataaggggggtaaggcagc

SEQ ID NO: 68996 - DNA, 75 bp, synthetic construct
  source 1..75: mol_type = other DNA
caacgatcgcgatgtacgcacaatcgttgagctggggaaagccatagacttcgatgccagaactgctatcccatt

SEQ ID NO: 68997 - DNA, 75 bp, synthetic construct
  source 1..75: mol_type = other DNA
caaagttgatacggggcgttcattgctaagtggtcaggctgcaacatttattcgtacagctttgcaggattatta

SEQ ID NO: 68998 - DNA, 75 bp, synthetic construct
  source 1..75: mol_type = other DNA
gtgcctgcgctgatgtatgccagctataaggcgagtgattatgtggaggagaaacagaaccagcttgagtcatgg

SEQ ID NO: 68999 - DNA, 75 bp, synthetic construct
  source 1..75: mol_type = other DNA
ttgaataacggggatgttatccatctggtgccccggacggagggggcaaaaaacggcggtgttcttcaggtggtg

SEQ ID NO: 69000 - DNA, 75 bp, synthetic construct
  source 1..75: mol_type = other DNA
ctgcggcatattttgaccggaccgcatcatcagaggcccgcacccgtggtcacatgagccagcgggagtttgagg

SEQ ID NO: 69001 - DNA, 75 bp, synthetic construct
  source 1..75: mol_type = other DNA
tcaagaaaccttcttgacttttgactctaagttgttagaaggaacctttctgcaacctttagcagtattcattga

SEQ ID NO: 69002 - DNA, 75 bp, synthetic construct
  source 1..75: mol_type = other DNA
taggcactaacgcaagttttgaatgcttacttactgacattatcgttttggcaaaatgtaaaagagtttttacta

SEQ ID NO: 69003 - DNA, 75 bp, synthetic construct
  source 1..75: mol_type = other DNA
gatcgccacacacctcggtgctgacgttatcttcaccccgcatctgggcaatttcccgcgcggcattctcgaaac

SEQ ID NO: 69004 - DNA, 75 bp, synthetic construct
  source 1..75: mol_type = other DNA
tttttggccttgtccgtgagcgtccgatcgacattcacaaagatcccgtggcactgaacaaatacatcactgaat

SEQ ID NO: 69005 - DNA, 75 bp, synthetic construct
  source 1..75: mol_type = other DNA
ttacaacgatttggccgccgcatcgaccttcgagtgaaaacggggtccgaagccatccgggcgctggccatgcag

SEQ ID NO: 69006 - DNA, 75 bp, synthetic construct
  source 1..75: mol_type = other DNA
gccataatgcacttgatgacgcccgttaccaggcaaaatacgtttcagttatctggcaaaaactgatcccgagtc

SEQ ID NO: 69007 - DNA, 75 bp, synthetic construct
  source 1..75: mol_type = other DNA
acccgcgctaccgtcgcgccagactggatgtccattccttgtgggtttatggctggcgatgcgcaacgggttatc

SEQ ID NO: 69008 - DNA, 75 bp, synthetic construct
  source 1..75: mol_type = other DNA
atataaaaaaggcaaaacgccgctcagtcatcgtcgctggccgggcgaaccagtgtccgttatcactggaagtct

SEQ ID NO: 69009 - DNA, 75 bp, synthetic construct
  source 1..75: mol_type = other DNA
gcctgtattacaaccgccaccgctattatgacccgctgcaggggcggtatatcactcaggatccgattgggctga

SEQ ID NO: 69010 - DNA, 75 bp, synthetic construct
  source 1..75: mol_type = other DNA
ggtgatgtggtcgtcagtggtgcaactgagccggactggttctacgtggttgtgcttgccggacagtccaacggc

SEQ ID NO: 69011 - DNA, 75 bp, synthetic construct
  source 1..75: mol_type = other DNA
acaaatcccactgtgaaaatgttggaaagtatcggggcattgaaatcagtggggtagtgtcatcagtcgaaataa

SEQ ID NO: 69012 - DNA, 75 bp, synthetic construct
  source 1..75: mol_type = other DNA
gctgaaaaatgaaagcctgagccactatcgttttaagagccgggatatttcgtcagcatacgggaaaactgattg

SEQ ID NO: 69013 - DNA, 75 bp, synthetic construct
  source 1..75: mol_type = other DNA
tgatttaatgaccggaaactgccttgacgactggacggagaatctgaaacggaaatcagaaaaagagctggagga

SEQ ID NO: 69014 - DNA, 75 bp, synthetic construct
  source 1..75: mol_type = other DNA
tggcaaggctcaaatcgtggatgatgccggagccagcgggggtaaggcaatgaaactgaccaaggaaacaggaag

SEQ ID NO: 69015 - DNA, 75 bp, synthetic construct
  source 1..75: mol_type = other DNA
tacaaaatcaacttaattgacgatagtaagtttaccaaaacagctggtattgataccgacgacatcgtcgctgta

SEQ ID NO: 69016 - DNA, 75 bp, synthetic construct
  source 1..75: mol_type = other DNA
tccgtctgttgtcggcactgttgccccccggtccggcgtggtcagccagcgatccggcgattgccggtgcggcac

SEQ ID NO: 69017 - DNA, 75 bp, synthetic construct
  source 1..75: mol_type = other DNA
ttttatcttgcacagcttgctgccctgggcagaccagacgctaccatcacgcgatacgacaaaagcacgttcacc

SEQ ID NO: 69018 - DNA, 75 bp, synthetic construct
  source 1..75: mol_type = other DNA
agccagccagttatttctctggcgtaagcaataccaggaaggaagtcttactgctgtggccgccggagaacaggt

SEQ ID NO: 69019 - DNA, 75 bp, synthetic construct
  source 1..75: mol_type = other DNA
ctggttgcgctggcagtggaacggggcgtgacgttatggagcgtcagcgaacaggtggcgcaaagccgcacccag

SEQ ID NO: 69020 - DNA, 75 bp, synthetic construct
  source 1..75: mol_type = other DNA
atgtggttaacaatagtaaaaaaagcaaagctggtttattgcatacagaaaaatcttgccagatattatatacat

SEQ ID NO: 69021 - DNA, 75 bp, synthetic construct
  source 1..75: mol_type = other DNA
cggtggtggacgccatcgaagcccgctttaaagccctcggcgcacctgtggaattaatcaaagtgcacaacacgc

SEQ ID NO: 69022 - DNA, 75 bp, synthetic construct
  source 1..75: mol_type = other DNA
atattttcagagaggttaaggccagaaattttgatatctgctcatggctcaaaaaatatattcaggaaaagacga

SEQ ID NO: 69023 - DNA, 75 bp, synthetic construct
  source 1..75: mol_type = other DNA
ccgaagtgaagtctttacgtatgcaaccgtgtattaacggtatttactttgaaaaaaactggccagactttttaa

SEQ ID NO: 69024 - DNA, 75 bp, synthetic construct
  source 1..75: mol_type = other DNA
cggccttatggctacaacccttaccccctcacaccctgaatttgtctttgtgtttgcggctgtccgtcgcgcaga

SEQ ID NO: 69025 - DNA, 75 bp, synthetic construct
  source 1..75: mol_type = other DNA
cccgggacaacgcatcccgacaacaaccgcccctggtgggggctaccctgcaccgtgatgccctgtttcggcgcc

SEQ ID NO: 69026 - DNA, 75 bp, synthetic construct
  source 1..75: mol_type = other DNA
taagctgctcgccatcgggtgggttaaacataaatgtaagccgggtgcaaaatggcctgagatccagacagaatt

SEQ ID NO: 69027 - DNA, 75 bp, synthetic construct
  source 1..75: mol_type = other DNA
tgcacatcaatatgctgcatgaacgcagtcacgcactatcgaacagctattccgcctctgttttcagctatctgg

SEQ ID NO: 69028 - DNA, 75 bp, synthetic construct
  source 1..75: mol_type = other DNA
gatgctgaatatatgcaggaaaaccgctgggatgaggattctgcttcttttgtcccggttgagactgaatccgat

SEQ ID NO: 69029 - DNA, 75 bp, synthetic construct
  source 1..75: mol_type = other DNA
cattgacggcagcatccatcgctgggcaaaaaatgaagttatcgacaaagatcgcgaagactggaagcgtatctc

SEQ ID NO: 69030 - DNA, 75 bp, synthetic construct
  source 1..75: mol_type = other DNA
tctccattttgcgctatcacatttcgggtccgctggacgatccgcaaatcaacgaagtgttgcgccaaccgcgta

SEQ ID NO: 69031 - DNA, 75 bp, synthetic construct
  source 1..75: mol_type = other DNA
caacacggtgtggcagccagccagttatttctctggcgcaagcaataccaggagggaagtcttactgctgtggcc

SEQ ID NO: 69032 - DNA, 75 bp, synthetic construct
  source 1..75: mol_type = other DNA
acataacacaaacaacacaaataagttatagtgttttcattattgggctttttttcataaacctgatgattttta

SEQ ID NO: 69033 - DNA, 75 bp, synthetic construct
  source 1..75: mol_type = other DNA
cgccgttcatatgaacggcaggggatcccctgcccgtggcgttacaccaatgatcgcgatgtaagaacgatggtt

SEQ ID NO: 69034 - DNA, 75 bp, synthetic construct
  source 1..75: mol_type = other DNA
tagagcgtgaaggaccattttatttcgtctttaccgataagggcggggaaaaatacggcagggcaaacaaacttt

SEQ ID NO: 69035 - DNA, 75 bp, synthetic construct
  source 1..75: mol_type = other DNA
gcctgcggaagtataaaccagaagaatatgagctgatcattgctcattttgtgattggtatctcattacgcacca

SEQ ID NO: 69036 - DNA, 75 bp, synthetic construct
  source 1..75: mol_type = other DNA
tccacaaggcaaatgcctaccacaaactcgtcgcggcgcaaaagaagaatggcgttttcgctctgaacgtgctga

SEQ ID NO: 69037 - DNA, 75 bp, synthetic construct
  source 1..75: mol_type = other DNA
catggcatatggtgaaggccttccgctgccggagacatatgaccgtccggacccgcgcattaagcagctggcgcg

SEQ ID NO: 69038 - DNA, 75 bp, synthetic construct
  source 1..75: mol_type = other DNA
ctggctcgcaatacccagaaaattttccgctgggtggagaaagacactcctgatgcggttaaaaaaattcaggcg

SEQ ID NO: 69039 - DNA, 75 bp, synthetic construct
  source 1..75: mol_type = other DNA
cgccgttcgcgcgctactggatgttggggtgatctttgagggacctaaagttggcagatcaaaaacataccggct

SEQ ID NO: 69040 - DNA, 75 bp, synthetic construct
  source 1..75: mol_type = other DNA
aattcaaacgtgaatccgctcagttggttgtcgatcaaaattacactgtttctgacgctgctaaggctatggatg

SEQ ID NO: 69041 - DNA, 75 bp, synthetic construct
  source 1..75: mol_type = other DNA
acagatatatcagcaagctggacgcttggtgcgattgctctacagttgcatatgagtgagagtttgttaaagaca

SEQ ID NO: 69042 - DNA, 75 bp, synthetic construct
  source 1..75: mol_type = other DNA
gatgaaggctatatacacgctgaaaagaaggggttacaaacctcttccgctacggcgtatatatatcccaaaatc

SEQ ID NO: 69043 - DNA, 75 bp, synthetic construct
  source 1..75: mol_type = other DNA
ccagttcgcaatttgcgaaagaccgtgatgatgttgtagcgcgcgcttttgacgcgggagttaatgggctactca

SEQ ID NO: 69044 - DNA, 75 bp, synthetic construct
  source 1..75: mol_type = other DNA
gaaacggtagtttcaccacaagccgttttcgacgcgccacaactcaccacggtcgccaaagaatggccgctgttt

SEQ ID NO: 69045 - DNA, 75 bp, synthetic construct
  source 1..75: mol_type = other DNA
aacgacagagcacgttctgacgttgttatgctgcttcgcaacggaatacaacaacgttgcaagctccgactacat

SEQ ID NO: 69046 - DNA, 75 bp, synthetic construct
  source 1..75: mol_type = other DNA
tattcgtaacctgaccacaaaaacatgcattactgaccgcatgattaaagtcttcctcggtcgtgatggtttacc

SEQ ID NO: 69047 - DNA, 75 bp, synthetic construct
  source 1..75: mol_type = other DNA
acgtcttgctgcccgctactggcgctttgcaggcgtccagctgctgcgcggcgatgacggcaaaccactggccag

SEQ ID NO: 69048 - DNA, 75 bp, synthetic construct
  source 1..75: mol_type = other DNA
gcagcccggtcctcagggacctgctggcgaaaccggacccgcgggtgaacccgggccaagaggtgagcccggtcc

SEQ ID NO: 69049 - DNA, 75 bp, synthetic construct
  source 1..75: mol_type = other DNA
agggagagcgcggacctcagggcataccgggccagaaaggtgatacaggagaacggggacctcagggagtacagg

SEQ ID NO: 69050 - DNA, 75 bp, synthetic construct
  source 1..75: mol_type = other DNA
tatcagcactgacgggcggagttatgttgttatcggcgccggttatggcagtggatgtccctataaaaataaccg

SEQ ID NO: 69051 - DNA, 75 bp, synthetic construct
  source 1..75: mol_type = other DNA
aaagcggctgctgaaaaggcagcagctgataagaaagcagcggcagaaaaagccgccgcagacaaaaaagcggca

SEQ ID NO: 69052 - DNA, 75 bp, synthetic construct
  source 1..75: mol_type = other DNA
cgtttacggcagtgccagtgaaatatggttcaggtgcactgatagcaggaacgttcaatgcaacggcaacaatga

SEQ ID NO: 69053 - DNA, 75 bp, synthetic construct
  source 1..75: mol_type = other DNA
caggataccggcgttcgtctgagcaatatccattttgaattaaacggcggtactttcagttattcctcagaaggt

SEQ ID NO: 69054 - DNA, 75 bp, synthetic construct
  source 1..75: mol_type = other DNA
gcagaatcattctgttcgccaccgatgattgtttatgacattgaacctgttacaggagcgaagactaaagctcag

SEQ ID NO: 69055 - DNA, 75 bp, synthetic construct
  source 1..75: mol_type = other DNA
ctgtacggtgaaatgcgtgtggggtcgcgagtggtatctcaggagatcagcacggcagatgaaggtgatggtggt

SEQ ID NO: 69056 - DNA, 75 bp, synthetic construct
  source 1..75: mol_type = other DNA
atgcaatatgcattgtttgatgggtttgaacgaaaattcttactggatgctcttgaatttggtgtcctgaaggac

SEQ ID NO: 69057 - DNA, 75 bp, synthetic construct
  source 1..75: mol_type = other DNA
tccggacggcgaaaaagtaccggctgcgaaaattaccaaagcgtatttcgagctgggaatgacgttcccggaact

SEQ ID NO: 69058 - DNA, 75 bp, synthetic construct
  source 1..75: mol_type = other DNA
aagaaatatgcaattgtgctgaagggaagatacctccttggagaggatacctatcaggttaataccgcgtcacat

SEQ ID NO: 69059 - DNA, 75 bp, synthetic construct
  source 1..75: mol_type = other DNA
gcaggccacatcaggccatcaaatattaatgccattgcgcacaagctggcggcggcgggtgtaactgatgcgaat

SEQ ID NO: 69060 - DNA, 75 bp, synthetic construct
  source 1..75: mol_type = other DNA
caggtttgtggtcccgcgatgctgttgaacgtcagatgagccatcaggaacgtaacggtgtacgtgctgcttaca

SEQ ID NO: 69061 - DNA, 75 bp, synthetic construct
  source 1..75: mol_type = other DNA
aaaggccatgatgcagtggtggtcggattatctggatgtgtgccgcgaggggtatgttgcgccgtacatttatgc

SEQ ID NO: 69062 - DNA, 75 bp, synthetic construct
  source 1..75: mol_type = other DNA
tgttgacccgggattttatgccggtttcttacctaagcctggcggtgggatgaacctgttaatcacctctgtgga

SEQ ID NO: 69063 - DNA, 75 bp, synthetic construct
  source 1..75: mol_type = other DNA
gtggtgaatgtgaaaccagtaacgctatacgatgtcgcagagtatgccggtgtctcttatcagaccgtttcccgc

SEQ ID NO: 69064 - DNA, 75 bp, synthetic construct
  source 1..75: mol_type = other DNA
tcaggtgctggatatgctggaagcgcatagcgacagttccattgttccgttaagcaaaagcacgccggatgtcga

SEQ ID NO: 69065 - DNA, 75 bp, synthetic construct
  source 1..75: mol_type = other DNA
tcagttgctgcggctactgaaaaatggaaccggagagcaggagatgaagcaaacctttctgcttcgcaacgaagc

SEQ ID NO: 69066 - DNA, 75 bp, synthetic construct
  source 1..75: mol_type = other DNA
agagaaaaaacatcatcttctggaatactggaaagcagaagttatcatgagggataagtttgtttttcaccgact

SEQ ID NO: 69067 - DNA, 75 bp, synthetic construct
  source 1..75: mol_type = other DNA
ctgatacagccagttggtcagagtgggcgcaggtctacacatcgaaggattccatccctggtgtaaataccacgg

SEQ ID NO: 69068 - DNA, 75 bp, synthetic construct
  source 1..75: mol_type = other DNA
tgatgcggttaaaaaaattcaggcgttgttaccagcgatcgaaaaagcgatgccgcctccgctggtggcccgaat

SEQ ID NO: 69069 - DNA, 75 bp, synthetic construct
  source 1..75: mol_type = other DNA
tccggacggtgaaaaagttccggcagctgaaataacccgggcttattttgagcttggtatgacgttcccggaatt

SEQ ID NO: 69070 - DNA, 75 bp, synthetic construct
  source 1..75: mol_type = other DNA
tgtcgcggtggcgattgcctggggcaccatgactaacagtggtggtcagccaggtaatgctgttgtggtgcatta

SEQ ID NO: 69071 - DNA, 75 bp, synthetic construct
  source 1..75: mol_type = other DNA
cagtggtgccatcatcacgcttgtcatcatcatccgcttctcactcagtcgctataccggcccgggacgcaggct

SEQ ID NO: 69072 - DNA, 75 bp, synthetic construct
  source 1..75: mol_type = other DNA
cagggcaaaaatgaccgaaatgaagtaactgaagctaatggcgatggtttcggtttctcaactacttatgagtat

SEQ ID NO: 69073 - DNA, 75 bp, synthetic construct
  source 1..75: mol_type = other DNA
ccatgatgagctatgttgatcgaaaaactcttaacctggacgtttctgtgctcttcgacatgccaagcccaacta

SEQ ID NO: 69074 - DNA, 75 bp, synthetic construct
  source 1..75: mol_type = other DNA
cgaaaaaggccgccagatccgccgatacttcatcgagtgcgaaaagaaacttcgccagagccttttacctgcacc

SEQ ID NO: 69075 - DNA, 75 bp, synthetic construct
  source 1..75: mol_type = other DNA
atctgacggaagaaatgcgccgtaaattgctggatatttcccgcacatcggaaaagtcttcccgctttggtttca

SEQ ID NO: 69076 - DNA, 75 bp, synthetic construct
  source 1..75: mol_type = other DNA
gcagtagcacaatatcagtttgacttcggtctgcgcccatctgttgcttaccttcagtcaaaaggtaaagacctt

SEQ ID NO: 69077 - DNA, 75 bp, synthetic construct
  source 1..75: mol_type = other DNA
gacttcccttgtgattaaccgtcagttgtggctgtaccacgacagcggtgatgcggggctgactcagctttaccg

SEQ ID NO: 69078 - DNA, 75 bp, synthetic construct
  source 1..75: mol_type = other DNA
actgataagcgcattcatgaccacgacggcggcaaactttgccacgctgacagaacgggagattgccgaagcgga

SEQ ID NO: 69079 - DNA, 75 bp, synthetic construct
  source 1..75: mol_type = other DNA
tgaatgttgaagagtgcgaccgtctctcctttctgccttacctgtttggcaacgattttctgtatgccgaggcgt

SEQ ID NO: 69080 - DNA, 75 bp, synthetic construct
  source 1..75: mol_type = other DNA
gggtgatgttccacagcgatcaaggcagtcattatacgagcaggcagttccggcagttactgtggagataccgga

SEQ ID NO: 69081 - DNA, 75 bp, synthetic construct
  source 1..75: mol_type = other DNA
ccagggcgatgagatccagatcggacggctgatggtgagggttcatctgaaccggggagatattccccattacga

SEQ ID NO: 69082 - DNA, 75 bp, synthetic construct
  source 1..75: mol_type = other DNA
gaccgtaatggctctcagttaatccgggattttatgcgtcagaccgttgaacggcagcataatacctggttccgt

SEQ ID NO: 69083 - DNA, 75 bp, synthetic construct
  source 1..75: mol_type = other DNA
gatgttccacagcgatcagggtagtcattatacgagcaggcagttccggcagttattgtggcgataccagatcac

SEQ ID NO: 69084 - DNA, 75 bp, synthetic construct
  source 1..75: mol_type = other DNA
tttgcttctgaataactgtaacgcagatactcagcatgaattaagcaatctgctgctgaaacgcccacaacttcg

SEQ ID NO: 69085 - DNA, 75 bp, synthetic construct
  source 1..75: mol_type = other DNA
ttgaatatattgatgtaggtgcaacctattacttcaacaaaaatatgtccacttttgttgattacaaaatcaacc

SEQ ID NO: 69086 - DNA, 75 bp, synthetic construct
  source 1..75: mol_type = other DNA
tgactgtttttggtaataaccatattgccaacaaagcacaaaacttcgaagtagttgcacaatatcagttcgact

SEQ ID NO: 69087 - DNA, 75 bp, synthetic construct
  source 1..75: mol_type = other DNA
cccttaatttgagtcaacctgcgctctctaagacattgaatgaactggagcagctgacgggcgctcgcttgtttg

SEQ ID NO: 69088 - DNA, 75 bp, synthetic construct
  source 1..75: mol_type = other DNA
ctgcattaccggttggggtgcctgttccgtggccttcagccactccgccaacaggctggctgaaatgcaatggtg

SEQ ID NO: 69089 - DNA, 75 bp, synthetic construct
  source 1..75: mol_type = other DNA
accacctattctgaaacccagaacatgactgtttttggtaataaccatattgccaacaaagcacaaaacttcgaa

SEQ ID NO: 69090 - DNA, 75 bp, synthetic construct
  source 1..75: mol_type = other DNA
gtgtggttatcctgtccattgcttatactgcagataaatatggctgccatttgttatcacgtattggtgcttatt

SEQ ID NO: 69091 - DNA, 75 bp, synthetic construct
  source 1..75: mol_type = other DNA
ttcagccctggcagccggtggtttttctgccaccacgatgctgttttcactgggggccagcatgatactgggtgg

SEQ ID NO: 69092 - DNA, 75 bp, synthetic construct
  source 1..75: mol_type = other DNA
gggcgctgtccacacaggtcccggcgtttcgtcagaaactgaatgacggctggtatcaggtgcgcattgccgggc

SEQ ID NO: 69093 - DNA, 75 bp, synthetic construct
  source 1..75: mol_type = other DNA
acgacacgccgggattatctctggctcaaatcgtcagcgaaagccgtcgaatcaagcgagaaaaaggatgtgttg

SEQ ID NO: 69094 - DNA, 75 bp, synthetic construct
  source 1..75: mol_type = other DNA
aacgcgaaaaacagcgagacagccgcaaagacgagcgaaaccaacgcaaagtccagccagacggcagcgaaaacc

SEQ ID NO: 69095 - DNA, 75 bp, synthetic construct
  source 1..75: mol_type = other DNA
tgcagcagccgaaagcgagagcgcggcagccggttctgcgacttcagcagctggatcagcaactgctgcggctaa

SEQ ID NO: 69096 - DNA, 75 bp, synthetic construct
  source 1..75: mol_type = other DNA
aacgtaatatcgctgagttaaaaactcgagatttattagcacctattgttcctttaaccatccgcaatggccaac

SEQ ID NO: 69097 - DNA, 75 bp, synthetic construct
  source 1..75: mol_type = other DNA
cgcggctgtatcgggtatgtatgcggcaggggccagtatgatcctgggcggtgtggcgcagatgctggcaccgaa

SEQ ID NO: 69098 - DNA, 75 bp, synthetic construct
  source 1..75: mol_type = other DNA
acaccagtagagtttaaatttcttctgcttttagctggagaacaccctgattatgtactttgtaaaaggaataaa

SEQ ID NO: 69099 - DNA, 75 bp, synthetic construct
  source 1..75: mol_type = other DNA
cggtgtagcctggttcgatgctttaagtgaatcagatcaggccagcgtgttgcgacagactgatgcactagccag

SEQ ID NO: 69100 - DNA, 75 bp, synthetic construct
  source 1..75: mol_type = other DNA
acgcccgtcgcctgaccgaacttgccggtgcggtactggagcgcagcaaacgctacccgcaacgctttgcactga

SEQ ID NO: 69101 - DNA, 75 bp, synthetic construct
  source 1..75: mol_type = other DNA
gctataaagagctgcaccgcgacgtctgccgcttcgccaataccctgctcgagctgggcattaaaaaaggtgacg

SEQ ID NO: 69102 - DNA, 75 bp, synthetic construct
  source 1..75: mol_type = other DNA
gccctgcaactgaataaaccggaaaaccacatctggtttctggagcatgatgcagccggacagggagtggagtta

SEQ ID NO: 69103 - DNA, 75 bp, synthetic construct
  source 1..75: mol_type = other DNA
tgaacaattgcgagtggcgtatctgttcctgcggcgtctggaaaacctgctgcaaagcattaacgacgaacaaac

SEQ ID NO: 69104 - DNA, 75 bp, synthetic construct
  source 1..75: mol_type = other DNA
gaatccggctggtcacggctggagcgcgagttcctggagttccgcgccgatatgccgctgaactatgtgcggcgt

SEQ ID NO: 69105 - DNA, 75 bp, synthetic construct
  source 1..75: mol_type = other DNA
tgaacgttgaagagtgtgaccgtctctcctttctgccttacctgtttggcaacgattttctgtatgccgaggcgt

SEQ ID NO: 69106 - DNA, 75 bp, synthetic construct
  source 1..75: mol_type = other DNA
ggagacttgattttataggtcaaaaaagcatcgcaaaaatgtatgccacacctgatggaggggttgcagtcacat

SEQ ID NO: 69107 - DNA, 75 bp, synthetic construct
  source 1..75: mol_type = other DNA
taacgaactacaggacaaatttgccagttggtatcccggttgtacgatagacgctcagagtagagggacgttatc

SEQ ID NO: 69108 - DNA, 75 bp, synthetic construct
  source 1..75: mol_type = other DNA
ttttccggggcgcatcatgctggctaatacctgcacctggacctatcgcggtgatgagtgcggttatcacggtcc

SEQ ID NO: 69109 - DNA, 75 bp, synthetic construct
  source 1..75: mol_type = other DNA
atgaatgagctgataaatagcaatgccatcaaaatgacaagcattgaaatcgctgagttggtgggaagccgtcat

SEQ ID NO: 69110 - DNA, 75 bp, synthetic construct
  source 1..75: mol_type = other DNA
ttgcccggcagcaaatggaacaaatgctcagtctgcaggagaaaattattagtgataccggcggttcatcaaccg

SEQ ID NO: 69111 - DNA, 75 bp, synthetic construct
  source 1..75: mol_type = other DNA
tgggagccacgctgaacttcgccttcgacggtgaaagtgatacggcggttaacccgtatcacgcccagtacatcc

SEQ ID NO: 69112 - DNA, 75 bp, synthetic construct
  source 1..75: mol_type = other DNA
gtttttcctggcatcgtgcttgcctggattctggggttacctctggctacaggggcattcgtcgccggagtattc

SEQ ID NO: 69113 - DNA, 75 bp, synthetic construct
  source 1..75: mol_type = other DNA
cgctggcgctgccggaattctgaacccgatgccggaaaggtgcttaatacgcggctcgccagtgacggtcctcta

SEQ ID NO: 69114 - DNA, 75 bp, synthetic construct
  source 1..75: mol_type = other DNA
atttctaaaacgcagggttatgatcctgactcccgtctgagcagagccacgcttgaatttcaggtaatagcctga

SEQ ID NO: 69115 - DNA, 75 bp, synthetic construct
  source 1..75: mol_type = other DNA
tcatcatgacgtttaccgttaccagcatcaacgcacgcacaaagggaaacgcccatacacaggatctgttatcac

SEQ ID NO: 69116 - DNA, 75 bp, synthetic construct
  source 1..75: mol_type = other DNA
attgaaagagttctttgattattaccgcatgccgcgtggtttccatgcgcgttcggtcaactcaaccagtgcctg

SEQ ID NO: 69117 - DNA, 75 bp, synthetic construct
  source 1..75: mol_type = other DNA
atgaacacgtcaccgtggaacaaagaccgtatcatcggccaaaaaagaccacttcagatatctcatatctggggg

SEQ ID NO: 69118 - DNA, 75 bp, synthetic construct
  source 1..75: mol_type = other DNA
tttttaactggtggaacagtaggcaccccatggtattcaggaaataatttaatatcaagctctccaggtgacacc

SEQ ID NO: 69119 - DNA, 75 bp, synthetic construct
  source 1..75: mol_type = other DNA
aactgtaccaggagttcgtcagcttcagggatctctttctaaaaaaagctgttgcacgcgcccaacacgttgatg

SEQ ID NO: 69120 - DNA, 75 bp, synthetic construct
  source 1..75: mol_type = other DNA
acctgcgtgaagtcgcgcaggcggcaatcgccttaattgagcagcccaataccacgctcgaccagttactggata

SEQ ID NO: 69121 - DNA, 75 bp, synthetic construct
  source 1..75: mol_type = other DNA
ggcgatgtctgctcaggcagctgaaatttataataaagacagtaacaagctggatctgtacgggaaagttaatgc

SEQ ID NO: 69122 - DNA, 75 bp, synthetic construct
  source 1..75: mol_type = other DNA
acatactccagacgggcaccattgccttatttatactgctgattaccggaattaaatggcgtgatttcctgcttt

SEQ ID NO: 69123 - DNA, 75 bp, synthetic construct
  source 1..75: mol_type = other DNA
acgcagctaaacccagagagaaagcctataagctggcagatggtgctggtttgtatcttgaggttgttccctctg

SEQ ID NO: 69124 - DNA, 75 bp, synthetic construct
  source 1..75: mol_type = other DNA
cagcggatggatattctttcagtcaacctataaatctgattcatcacaaaatatatatgcccgaatagaaatgta

SEQ ID NO: 69125 - DNA, 75 bp, synthetic construct
  source 1..75: mol_type = other DNA
tagataaagacgtattcccagcaataggcgcgatacctgttcaggagattaaggccagaacgatagttgaagcat

SEQ ID NO: 69126 - DNA, 75 bp, synthetic construct
  source 1..75: mol_type = other DNA
gcgcagctctggcactggcgggatgtggtgagaaaggtgagtttgagaaagcgattaatgccaagattgggcagg

SEQ ID NO: 69127 - DNA, 75 bp, synthetic construct
  source 1..75: mol_type = other DNA
tccgggcttggcgtcaagggcagttcactgctgcaaaatggtacagggcggctgtacagtgcaggcaacctgctg

SEQ ID NO: 69128 - DNA, 75 bp, synthetic construct
  source 1..75: mol_type = other DNA
catgacggaggatgatgcccgtccggaggcactgcgccgttttgagctgatggtgaatgaagtggcacgtcatgc

SEQ ID NO: 69129 - DNA, 75 bp, synthetic construct
  source 1..75: mol_type = other DNA
gtcgttttcgcatgttcaatgtcgttgatgattttaaccgtgaggcattgtcgattgaaatcgatctgaatctgc

SEQ ID NO: 69130 - DNA, 75 bp, synthetic construct
  source 1..75: mol_type = other DNA
gcgggtttctcaacatcggtaagagccgcgccaaggtgttcgtggaaaagaacaccggtgtgacgttcgccgatg

SEQ ID NO: 69131 - DNA, 75 bp, synthetic construct
  source 1..75: mol_type = other DNA
tcaccgccagcgccgtctgcagcgtgaccgacacgccgcccacattactggtgtgcctgaatcgtggggcgtccg

SEQ ID NO: 69132 - DNA, 75 bp, synthetic construct
  source 1..75: mol_type = other DNA
cgctggcggtgctggaattttgaatccgatgccggcaaacaacttaatacgcggctcgccagtgaagggcttctc

SEQ ID NO: 69133 - DNA, 75 bp, synthetic construct
  source 1..75: mol_type = other DNA
cagggacaatcagaagcagaatctggcgaacctgagccgtgaccctgcgcacgctaatgacagtatcagcccgat

SEQ ID NO: 69134 - DNA, 75 bp, synthetic construct
  source 1..75: mol_type = other DNA
atgccatctgaatatgatgaacaactggattcgactgatacgcagcttcccggcgaatatgacctttttgattta

SEQ ID NO: 69135 - DNA, 75 bp, synthetic construct
  source 1..75: mol_type = other DNA
tcctgctgattgacgatcacccgatgctgcgaactggcgtaaaacagcttatcagtatggcaccagatatcaccg

SEQ ID NO: 69136 - DNA, 75 bp, synthetic construct
  source 1..75: mol_type = other DNA
gacaacgcagagtcagagtgccagcaccatcggctccactgccggtaatgtcagtattaccgcgggcaaacaggc

SEQ ID NO: 69137 - DNA, 75 bp, synthetic construct
  source 1..75: mol_type = other DNA
attttcacttccagtcttagtatatagtttcatatataatcatcattccggtttttactatgttttagctgcttt

SEQ ID NO: 69138 - DNA, 75 bp, synthetic construct
  source 1..75: mol_type = other DNA
gaggaaaatattggcgcttcaagtatcgtgtagctggtaaagagaagctgttagcactaggtgtgtatcctgaag

SEQ ID NO: 69139 - DNA, 75 bp, synthetic construct
  source 1..75: mol_type = other DNA
atcgacctgacggtgcagggtggtgagcggtattttttctgtaatgagctgaatgaaaaaggggagccggtcacc

SEQ ID NO: 69140 - DNA, 75 bp, synthetic construct
  source 1..75: mol_type = other DNA
atcaacggacaaacagtcatggtcccgaaactgtatctgtcgccggaagatatcaccctgcataacggcagcgtt

SEQ ID NO: 69141 - DNA, 75 bp, synthetic construct
  source 1..75: mol_type = other DNA
atgagaaatcataccacacacccgcaagggcgggacttgcacaacctgaataaattcacctggcgttttatcgcc

SEQ ID NO: 69142 - DNA, 75 bp, synthetic construct
  source 1..75: mol_type = other DNA
ccagctgatgagcgacacctgtcctgaaatcaccctggacaatgtactggggggaaccgcagaattcggaaaaaa

SEQ ID NO: 69143 - DNA, 75 bp, synthetic construct
  source 1..75: mol_type = other DNA
gtggtgcctactggcggctgcgatgtttctgctcgtgatgtcaccgttactctgccggactaccctggttcagtg

SEQ ID NO: 69144 - DNA, 75 bp, synthetic construct
  source 1..75: mol_type = other DNA
ttccgggaccgtaaaatatagtggcagtagctatccatttcctaccaccagcgaaacgccgcgcgttgtttataa

SEQ ID NO: 69145 - DNA, 75 bp, synthetic construct
  source 1..75: mol_type = other DNA
caaagtattgttcgaggactatgccagagcgtatttcagttgaagaaatcaatgaggttaaaatttatccagagt

SEQ ID NO: 69146 - DNA, 75 bp, synthetic construct
  source 1..75: mol_type = other DNA
gacgcgactcctgaggaaatagaaaacgaggcaattgatgttttctttaatcactgcaattactcaatttacgaa

SEQ ID NO: 69147 - DNA, 75 bp, synthetic construct
  source 1..75: mol_type = other DNA
tcgatgacgatagttccatccgttgggtgcttgaacgtgcgctcgctggagcgggtttaacctgtacgacatttg

SEQ ID NO: 69148 - DNA, 75 bp, synthetic construct
  source 1..75: mol_type = other DNA
cgccagacgaagaactgaaaaaattgcgggcggaagtgacggcattagcggttgaggccgaatcggctatcgccg

SEQ ID NO: 69149 - DNA, 75 bp, synthetic construct
  source 1..75: mol_type = other DNA
ctacttaaactactccatgtatgtgatcatggaccgtgcgttgccgtttattggtgatggtctgaaacctgttca

SEQ ID NO: 69150 - DNA, 75 bp, synthetic construct
  source 1..75: mol_type = other DNA
tggcgttgggcggcaacgcattattgaagcgcggcgaaccactggaagcagaaatccagcgccagaacattgagt

SEQ ID NO: 69151 - DNA, 75 bp, synthetic construct
  source 1..75: mol_type = other DNA
acccgccaacggtgaacacctactggcgacgtcgtgacaacacatattttgtatcaaaagccggtgagcgttatc

SEQ ID NO: 69152 - DNA, 75 bp, synthetic construct
  source 1..75: mol_type = other DNA
gttatcgccgtgatgtggcgctaattgttcgccagcagcggctgaaattaaacctgtccggaaggctggcgataa

SEQ ID NO: 69153 - DNA, 75 bp, synthetic construct
  source 1..75: mol_type = other DNA
aagatcaggctcgccgtgcacgcattacccgcctgcccggtgagcataatgagcattcgagggagaaaaacgcat

SEQ ID NO: 69154 - DNA, 75 bp, synthetic construct
  source 1..75: mol_type = other DNA
ttaccattgaggccaccagcgaacaggaagcacgccagcaatctcctgatggctgcgtgatggtattcgctgccc

SEQ ID NO: 69155 - DNA, 75 bp, synthetic construct
  source 1..75: mol_type = other DNA
cggggttgttaatggacgatgagcagtttgatgaaatcaatattgtacgtggcaagccagtatctggtggacggc

SEQ ID NO: 69156 - DNA, 75 bp, synthetic construct
  source 1..75: mol_type = other DNA
tccggaaggctggtgataaagattattgccgagccgccggataagcgtcgtcgtgacctggacaatatcctgaaa

SEQ ID NO: 69157 - DNA, 75 bp, synthetic construct
  source 1..75: mol_type = other DNA
cgagcagtttgatgaaatcaatattgtgcgcggtcagcgcgttcctgggggggcggctgggcgtgaagatttaca

SEQ ID NO: 69158 - DNA, 75 bp, synthetic construct
  source 1..75: mol_type = other DNA
atgaccgagcgcatagaatttgttttgccttacccgccgacggtgaacacttactggcgacgccgtggcagcaca

SEQ ID NO: 69159 - DNA, 75 bp, synthetic construct
  source 1..75: mol_type = other DNA
ttcgcttcgaaactcagcctggataccagctccagcacgactggggcgaagttgaggtggaggttgccgggcaac

SEQ ID NO: 69160 - DNA, 75 bp, synthetic construct
  source 1..75: mol_type = other DNA
acgttgccgacgcgccgtttaaacagtggaccgacggtaacgccgccagggtgctggataacctgaaaaaactcg

SEQ ID NO: 69161 - DNA, 75 bp, synthetic construct
  source 1..75: mol_type = other DNA
tggccgagggacctttctcatacgggcaggcggttgctgtcataacagcttaccgcaatgtgtttattgaagatg

SEQ ID NO: 69162 - DNA, 75 bp, synthetic construct
  source 1..75: mol_type = other DNA
cttgctggtctaacaattgcccctgcgttactgtcacttttgggttgcaaacaggaagatattgatagcggcaca

SEQ ID NO: 69163 - DNA, 75 bp, synthetic construct
  source 1..75: mol_type = other DNA
atgtactacccgaagtctgcatctgctttttatcccttttagcagaacaagaatctcctcattttcaggacttgt

SEQ ID NO: 69164 - DNA, 75 bp, synthetic construct
  source 1..75: mol_type = other DNA
gagttacgggcagagattgcatttgctcagaagggcgaaaagccatggccttatcgttcctgcctgatgcgtgaa

SEQ ID NO: 69165 - DNA, 75 bp, synthetic construct
  source 1..75: mol_type = other DNA
tatcatcgatgaggttggtgtgcagttcggtacgcctgcggagataaccatcctgcaggaaatcataaatgcgcg

SEQ ID NO: 69166 - DNA, 75 bp, synthetic construct
  source 1..75: mol_type = other DNA
gaaagccagttactgacaggcgctctgacctgggggttaggcatcgtagggccaaaacactctggcaaagtgatg

SEQ ID NO: 69167 - DNA, 75 bp, synthetic construct
  source 1..75: mol_type = other DNA
cggaaggacagatgcagtaaatgcatgcgcgggtgtgagatgcgcggcatggcggtcaattttggcggtttcctt

SEQ ID NO: 69168 - DNA, 75 bp, synthetic construct
  source 1..75: mol_type = other DNA
cgtgactgattccgttcgtcgcatggataaaccggaagaagcgaaaaggaatatcacccgtcttgccgaccggaa

SEQ ID NO: 69169 - DNA, 75 bp, synthetic construct
  source 1..75: mol_type = other DNA
cagcaatcgtagcgttattgatcggcattgaagcttatgcagctgaagaaacctttgatacccatttcatgatag

SEQ ID NO: 69170 - DNA, 75 bp, synthetic construct
  source 1..75: mol_type = other DNA
gataaggcgcgccagcttttcgatacagcttctcaggtctgtgaaattgttgatagtgtccggcagtgtatgcag

SEQ ID NO: 69171 - DNA, 75 bp, synthetic construct
  source 1..75: mol_type = other DNA
ttgttccagttcaatggtaaccatcagcttctgctcagtaatgtactcagaaagacccgccacaaaatggttaag

SEQ ID NO: 69172 - DNA, 75 bp, synthetic construct
  source 1..75: mol_type = other DNA
ggcaccgtactacgctcacgtagcgaagacatcgggcagtccagtgttaacaccctcagcagtaatctgagctat

SEQ ID NO: 69173 - DNA, 75 bp, synthetic construct
  source 1..75: mol_type = other DNA
tcccttctggaattacaacttgggttattggctgaatatacgcttttgttctgcgccatatgttgcgttggttgg

SEQ ID NO: 69174 - DNA, 75 bp, synthetic construct
  source 1..75: mol_type = other DNA
caatttcacatgagaatgttgtgcgaaataattttgaaattcatgaacatattggattccagaacgttgagttgg

SEQ ID NO: 69175 - DNA, 75 bp, synthetic construct
  source 1..75: mol_type = other DNA
atgaaaatatactcaatcctcacagttattcttacctcatttcttctaaccgcatgtaacagtgaaccatcgcaa

SEQ ID NO: 69176 - DNA, 75 bp, synthetic construct
  source 1..75: mol_type = other DNA
gagataacttattgacaaaaacaagaactcccagagataattttgaggaaggaataaaacatcctgaacatgcaa

SEQ ID NO: 69177 - DNA, 75 bp, synthetic construct
  source 1..75: mol_type = other DNA
tgtccgaactggtacgtcaggatcgtctgatcgttgtcgagaagttctctgtagaagcgccgaaaactaagctgc

SEQ ID NO: 69178 - DNA, 75 bp, synthetic construct
  source 1..75: mol_type = other DNA
aacgcttttctttcagcaccgcgcttttcgggatgctggttctgaccttaggtatgggattaggtcgcttccttt

SEQ ID NO: 69179 - DNA, 75 bp, synthetic construct
  source 1..75: mol_type = other DNA
ttcaatgccatgaacggtaaccgcgcagaaatgagcccggaagccgccggtattgccgcctgtctgatgacgtac

SEQ ID NO: 69180 - DNA, 75 bp, synthetic construct
  source 1..75: mol_type = other DNA
tcacttcacgaccacgccgacgagctttaccgcagctgcctcgcacgcttcggggatgacggtgaaaacctctga

SEQ ID NO: 69181 - DNA, 75 bp, synthetic construct
  source 1..75: mol_type = other DNA
acgagctgctccacgaaagctaccagaaatggctgaccggcttcacccggcacgccgtatcatggggcgtgtgtc

SEQ ID NO: 69182 - DNA, 75 bp, synthetic construct
  source 1..75: mol_type = other DNA
agtcattcttatcgactggagtggttaccattctgcagattttcagcttctgagagccagccttgtctgcgatgg

SEQ ID NO: 69183 - DNA, 75 bp, synthetic construct
  source 1..75: mol_type = other DNA
accgaggagaaagaaaaggatcatatccattcaatagcccttgccctaatggtactgagaaagtatcagcttatc

SEQ ID NO: 69184 - DNA, 75 bp, synthetic construct
  source 1..75: mol_type = other DNA
cggtcacgcaggctcctgcacctacggccttgttgcaccatggattactgcgtcaggcagcactgacgccacagg

SEQ ID NO: 69185 - DNA, 75 bp, synthetic construct
  source 1..75: mol_type = other DNA
gggttgtgtattgcatcacaggcgtaatactggcatctgcgttcctcgaaggaaaaagaacccgttttccggctg

SEQ ID NO: 69186 - DNA, 75 bp, synthetic construct
  source 1..75: mol_type = other DNA
aacgcagacggcgtaccacacaggaaaagatcgcaattgttcagcagagctttgaaccgggaatgacggtctccc

SEQ ID NO: 69187 - DNA, 75 bp, synthetic construct
  source 1..75: mol_type = other DNA
ggagaagtgcgtaatctggcccagcgtagcgctcaggcggctcgtgaaattaaaagcctgattgaagactcggtg

SEQ ID NO: 69188 - DNA, 75 bp, synthetic construct
  source 1..75: mol_type = other DNA
cgagatgttgatattaatgagccagacggaccaacgaatctttccgcatggatgagacttaagaataaagaatta

SEQ ID NO: 69189 - DNA, 75 bp, synthetic construct
  source 1..75: mol_type = other DNA
tttccgcaccgcccgtaacgcccgccgtcgtcaaatccgcattcagcactgcacaaatcgatcaatgggttgcgc

SEQ ID NO: 69190 - DNA, 75 bp, synthetic construct
  source 1..75: mol_type = other DNA
ccccctcccaggagcaggttcgtgtaaaaactatgcttaatagcaccatttcgatgagttacccggatgttgtaa

SEQ ID NO: 69191 - DNA, 75 bp, synthetic construct
  source 1..75: mol_type = other DNA
atgggttcgctcaggagatgacgggaagacctggacaacgccggaatggcttacagatttacatgaaaactatcc

SEQ ID NO: 69192 - DNA, 75 bp, synthetic construct
  source 1..75: mol_type = other DNA
gctactttgctggcaatacatgaaaataatgagtggcgtaaagcgcttgtcaaactgattaccgccacgccagag

SEQ ID NO: 69193 - DNA, 75 bp, synthetic construct
  source 1..75: mol_type = other DNA
cgggtacacagtagttatattaataattcgctaatccctttgctatgcagaaaggcaggtatacctgagcaggat

SEQ ID NO: 69194 - DNA, 75 bp, synthetic construct
  source 1..75: mol_type = other DNA
gtgaccaaacaggaaaaaaccgccctgaacatggcccgcttcatcagaagccagacattaaccctgctggagaag

SEQ ID NO: 69195 - DNA, 75 bp, synthetic construct
  source 1..75: mol_type = other DNA
ggtaaagatgagaaaatagttaaaagtaaagataacaatatcaagtcattttatttaggtacgcccagtggtaat

SEQ ID NO: 69196 - DNA, 75 bp, synthetic construct
  source 1..75: mol_type = other DNA
gaccgatgaaatcccgttagatgatgcactgttacaattgcgggaatttatcgacgaaaactccggtgaattttt

SEQ ID NO: 69197 - DNA, 75 bp, synthetic construct
  source 1..75: mol_type = other DNA
tcatcaaaatgacaagcattgaaatcgctgagttagtgggaagtcgtccagataacgtaaaaatatcaatagagc

SEQ ID NO: 69198 - DNA, 75 bp, synthetic construct
  source 1..75: mol_type = other DNA
cccgaatgatccgaaatgggtgaaggggattgaaacccgcgattctgtgaaccagaaccagcaagaaacggaaca

SEQ ID NO: 69199 - DNA, 75 bp, synthetic construct
  source 1..75: mol_type = other DNA
tgtaaaaacagcggcaacagcaacattttctggtactgcaaccaacgatccgctggcacttttagacaaagctat

SEQ ID NO: 69200 - DNA, 75 bp, synthetic construct
  source 1..75: mol_type = other DNA
ttttgaaagggcaatgtggacaatcccggcggaacgagaagctatagaaggtgttaagcattcgcaacgtggttc

SEQ ID NO: 69201 - DNA, 75 bp, synthetic construct
  source 1..75: mol_type = other DNA
aagaactgaagaaatattaccagacctggctgacgggttatacccgactggcggtctgccagggaatgtgccatc

SEQ ID NO: 69202 - DNA, 75 bp, synthetic construct
  source 1..75: mol_type = other DNA
ggagaaggcgacgttattgcgattgttccccggtgtcttcaccggattatttatggcagagccgcagccccacta

SEQ ID NO: 69203 - DNA, 75 bp, synthetic construct
  source 1..75: mol_type = other DNA
gcacagatcctgcaacaggcaggtacttctgttctggcgcaggctaaccagacaactcagaacgtactgtctctt

SEQ ID NO: 69204 - DNA, 75 bp, synthetic construct
  source 1..75: mol_type = other DNA
gctaaccgctttacttcaaacattaagggcctgacccaggcatctcgtaatgccaatgatgggatttctgtagct

SEQ ID NO: 69205 - DNA, 75 bp, synthetic construct
  source 1..75: mol_type = other DNA
gacagctttggtttttacgcggcactaagccagttattgctggtgttagtggagtgcgaccaccaaaacagataa

SEQ ID NO: 69206 - DNA, 75 bp, synthetic construct
  source 1..75: mol_type = other DNA
gactcggatgcgccgatgagcgctgccacacttaaccaggtgctgacgctgacttacaaggcggcgcagaaagat

SEQ ID NO: 69207 - DNA, 75 bp, synthetic construct
  source 1..75: mol_type = other DNA
cctctctggaagaggctgttgagattaaacaaggtttaaaagaacctgcacgggtgacccgctacgaaattgcgg

SEQ ID NO: 69208 - DNA, 75 bp, synthetic construct
  source 1..75: mol_type = other DNA
agctgtttataacaaggcagaatatcgtgagcagagggctgagatgctacaagattgggcgaatatgattgatga

SEQ ID NO: 69209 - DNA, 75 bp, synthetic construct
  source 1..75: mol_type = other DNA
cacgctgttgcatgaggccggctacaacaccgactggatcgagaagtgcctggcgcacgagcagaagggcgtgag

SEQ ID NO: 69210 - DNA, 75 bp, synthetic construct
  source 1..75: mol_type = other DNA
tctgcccgtagccgtatcgaagatgctgactacgcgaccgaagtgtctaacatgtctcgtgcgcagatcctgcaa

SEQ ID NO: 69211 - DNA, 75 bp, synthetic construct
  source 1..75: mol_type = other DNA
gtatgcaaaagggctgacctgcaaagccgataccctcagcagttgtggttacgtttatatggctgtttatccgac

SEQ ID NO: 69212 - DNA, 75 bp, synthetic construct
  source 1..75: mol_type = other DNA
ggtgaaagatgcagagacgttcggtgcctgggcggagaagtggctgcgtggctaccagatggccgactccacccg

SEQ ID NO: 69213 - DNA, 75 bp, synthetic construct
  source 1..75: mol_type = other DNA
tctgctggttcatcatccgatgctggaaggcattctgctgtctgaatgtgaacgtctgaagcaacattctctggc

SEQ ID NO: 69214 - DNA, 75 bp, synthetic construct
  source 1..75: mol_type = other DNA
cgccagtggggtagcagggaggatttggcgtgtgcgcagtggatttgggggcggatcgtgaacctttacgaacag

SEQ ID NO: 69215 - DNA, 75 bp, synthetic construct
  source 1..75: mol_type = other DNA
aaatgaaacgttccattggttcaaaacggcccaatgtcatcaggtcaaaatggcccgatgatcctacagagaata

SEQ ID NO: 69216 - DNA, 75 bp, synthetic construct
  source 1..75: mol_type = other DNA
cgctggagtaatggtgttgtcgaaggtcatgtaaatcgcctgaagatgctgaaacgccagatgtatggtcgagca

SEQ ID NO: 69217 - DNA, 75 bp, synthetic construct
  source 1..75: mol_type = other DNA
agaccgtcgctgacggtgtccaatctgtttggtctggtcaccgggatggcggaggacctgcagagcctggtgggg

SEQ ID NO: 69218 - DNA, 75 bp, synthetic construct
  source 1..75: mol_type = other DNA
aaccgtgaaggcggtaaagcgcgtgtcgaggggatgagtcgggagctgcagctggagaaaaaagacggcagtaaa

SEQ ID NO: 69219 - DNA, 75 bp, synthetic construct
  source 1..75: mol_type = other DNA
atgcctgaagctcatcgacagcatgccacctggacgccagagcgtcttctggaatgggcggggcacataggcagt

SEQ ID NO: 69220 - DNA, 75 bp, synthetic construct
  source 1..75: mol_type = other DNA
aataatgcatatatgtggtatgaatgttcgtaccccaatctccagcaaacctgtacgaattctggaaatatctcg

SEQ ID NO: 69221 - DNA, 75 bp, synthetic construct
  source 1..75: mol_type = other DNA
gccgataccctgggctcctgtggttacgtttatctggctgtttatccgacgccggcacccgcaaccacctcataa

SEQ ID NO: 69222 - DNA, 75 bp, synthetic construct
  source 1..75: mol_type = other DNA
aaaagctgaaagagcagttgcaggagttgctggataaaagtttgttaaatcgagaaaaagatactgtagaagaat

SEQ ID NO: 69223 - DNA, 75 bp, synthetic construct
  source 1..75: mol_type = other DNA
attttttaacccgacaccctgacgcggttgtgttcagtgcgaaaaaacgccagtggggaagtcaggaagatttgg

SEQ ID NO: 69224 - DNA, 75 bp, synthetic construct
  source 1..75: mol_type = other DNA
tcaggtctttaagcgtattggatatgctggccgagttactggccatggtttcagacacacaatgagcactatttt

SEQ ID NO: 69225 - DNA, 75 bp, synthetic construct
  source 1..75: mol_type = other DNA
gtctccgttgcagtgctgatactcttcttcgcagggttatcaataccccggagacgaaacagtcaggcgcgcctc

SEQ ID NO: 69226 - DNA, 75 bp, synthetic construct
  source 1..75: mol_type = other DNA
aattcattgaaagcaatcctggatgtacgaccggtgatattgcgaacgcgtttgcatactttccacgtccccgtg

SEQ ID NO: 69227 - DNA, 75 bp, synthetic construct
  source 1..75: mol_type = other DNA
attattagtgacatctctggtgataactataaacgagaagtgccttatagcgttgaatgtgactctgagaatacc

SEQ ID NO: 69228 - DNA, 75 bp, synthetic construct
  source 1..75: mol_type = other DNA
ccttcggacaaggaatagctccggtaagccgtgttctgggcgtgtcgcgtgcgcagctaacattacggatgaagg

SEQ ID NO: 69229 - DNA, 75 bp, synthetic construct
  source 1..75: mol_type = other DNA
gggcatgtgacggacggatttatgttgcgtgaagatgaatttgtcacatcattacggacattaaaagaaattgga

SEQ ID NO: 69230 - DNA, 75 bp, synthetic construct
  source 1..75: mol_type = other DNA
gatgaactggttatccgcctggggcgttcgcctgcgcagcgttgcgtgaatcacatttctgaaccggacactgaa

SEQ ID NO: 69231 - DNA, 75 bp, synthetic construct
  source 1..75: mol_type = other DNA
cacacgagatgttgatattaatgagccagacggaccaacgaatctttccgcatggatgagacttaagaataaaga

SEQ ID NO: 69232 - DNA, 75 bp, synthetic construct
  source 1..75: mol_type = other DNA
agctggtgctggtgaatgccccggatatttatctggcggatgacggcggcgtggcagtggatatgtcccgcgagg

SEQ ID NO: 69233 - DNA, 75 bp, synthetic construct
  source 1..75: mol_type = other DNA
attcctaaattcgccaaaaatttcctcgccgaaacgggcgacatccgcgcggctgtgcggcagtatatggctgaa

SEQ ID NO: 69234 - DNA, 75 bp, synthetic construct
  source 1..75: mol_type = other DNA
ttcaattactggcaaacaggaaagccaatacctaaaaacaggctggcaaaaattgcccgtctgactaacgagcga

SEQ ID NO: 69235 - DNA, 75 bp, synthetic construct
  source 1..75: mol_type = other DNA
acagaaaggaagcagatgttaaaacaaaacacgagagaaatttaacaggtgttcaaacagatgttggagtggtgt

SEQ ID NO: 69236 - DNA, 75 bp, synthetic construct
  source 1..75: mol_type = other DNA
aggaagaatgctttactgtgctgcatgactactggacaaagggaaaggcagaaaatgcacgtaagaaaacatctg

SEQ ID NO: 69237 - DNA, 75 bp, synthetic construct
  source 1..75: mol_type = other DNA
tcagggcggcgtcgccgtcagaccttgctgaacgactgactcaaaaactgagggaggggtggcagccatttggca

SEQ ID NO: 69238 - DNA, 75 bp, synthetic construct
  source 1..75: mol_type = other DNA
gccaggagggcgcgtctgacggtaataaggccataagcgaaacagagcgtgatgcggtgaaggcgatgttcaggg

SEQ ID NO: 69239 - DNA, 75 bp, synthetic construct
  source 1..75: mol_type = other DNA
accagtgatacgaacattgttctctcagaaccttataccggcgaaactcagtctgaagttccgtgccgaatcatt

SEQ ID NO: 69240 - DNA, 75 bp, synthetic construct
  source 1..75: mol_type = other DNA
ctgatatttactcctcatgccgtctgatagtgcggaaaaacggtgctgaaatttataaccgtaccgcgctggata

SEQ ID NO: 69241 - DNA, 75 bp, synthetic construct
  source 1..75: mol_type = other DNA
acatgctgcgcaccaaactgccgcgcggtattccgctgtgtatccatctgatgtccagccagctggttggcgagc

SEQ ID NO: 69242 - DNA, 75 bp, synthetic construct
  source 1..75: mol_type = other DNA
gccgcagtgggcttcgcaaattaccggtatcccggtggaccgtatcatcaaactggcgcgtgaaattggcacagc

SEQ ID NO: 69243 - DNA, 75 bp, synthetic construct
  source 1..75: mol_type = other DNA
ttttatgcttatttggcatggtcgcgtgggttcaggcaacacccaatgtgacggctgaaattacttatgatttgg

SEQ ID NO: 69244 - DNA, 75 bp, synthetic construct
  source 1..75: mol_type = other DNA
ggtggtcagtgatgcgggggctacgggaggtaaggctctgcaactgaacaaaccggaaaaccacatctggtttct

SEQ ID NO: 69245 - DNA, 75 bp, synthetic construct
  source 1..75: mol_type = other DNA
ttcgaacgcaaaccgatttactggatcctgagtgaagtcgcgaaacgtcttggacctgacgtctatcaaaagttc

SEQ ID NO: 69246 - DNA, 75 bp, synthetic construct
  source 1..75: mol_type = other DNA
cggatacagcatggcgagccactggtcgagagccgctacctctacgacccgctgggacggcgaatggcgaaacgg

SEQ ID NO: 69247 - DNA, 75 bp, synthetic construct
  source 1..75: mol_type = other DNA
cccctggtgggggctgccctgcaccgtgacgccctgtttcggggcccgactggtacaggagggtaaccgcctgca

SEQ ID NO: 69248 - DNA, 75 bp, synthetic construct
  source 1..75: mol_type = other DNA
gccacggtggtccgccgccgggtgtatgcccgttttctggatgcggtgaattttgtggcgggcaatccggaagcg

SEQ ID NO: 69249 - DNA, 75 bp, synthetic construct
  source 1..75: mol_type = other DNA
cgcatcctgacgacaatcacgaccgcccctggtggggactcccctgcacagtgacgccctgtttcggggcacgtc

SEQ ID NO: 69250 - DNA, 75 bp, synthetic construct
  source 1..75: mol_type = other DNA
gggctgtatggttcggtgctgataaaaccacgttacgggctggggttggtacaggaagcaaggcacaggccgatt

SEQ ID NO: 69251 - DNA, 75 bp, synthetic construct
  source 1..75: mol_type = other DNA
cctggcctccgagcaataatcgctattaccgccataatcgcgggcgcacacacatcagcgcagaagggcaggcat

SEQ ID NO: 69252 - DNA, 75 bp, synthetic construct
  source 1..75: mol_type = other DNA
atccctaaaagggatcagccgcgatgagtctctgcggcgcattctgcaacacgggggcaaagagggcgactttaa

SEQ ID NO: 69253 - DNA, 75 bp, synthetic construct
  source 1..75: mol_type = other DNA
caagcatccttcaggttatacgataataaataacaccgcctttacaaataacactgccgaaggttatggcggggc

SEQ ID NO: 69254 - DNA, 75 bp, synthetic construct
  source 1..75: mol_type = other DNA
gcgggcagcagaaatgttggagtgcatgacgctgtcgtattgggaaaggcacttggcatatctcctcctgagctc

SEQ ID NO: 69255 - DNA, 75 bp, synthetic construct
  source 1..75: mol_type = other DNA
tatgattactccgccacgcaacagtgctccacgcgtacaggatgatggacctgcagcctcccggacgccagtgca

SEQ ID NO: 69256 - DNA, 75 bp, synthetic construct
  source 1..75: mol_type = other DNA
tttcaaaaagcttccttcaagcaggaggcgtatccaaaccaatgaatttagatattgaattggttaattgtgata

SEQ ID NO: 69257 - DNA, 75 bp, synthetic construct
  source 1..75: mol_type = other DNA
aaaatattaccctgttgttgttatgcgttctgctggctcagtaagcgaactggcatcaagggtcattatcaccac

SEQ ID NO: 69258 - DNA, 75 bp, synthetic construct
  source 1..75: mol_type = other DNA
tataaaaatagcacttgaagaagtgcaggaaggtaaaccggtaatcattacaagcggaaatttgagcggttgtac

SEQ ID NO: 69259 - DNA, 75 bp, synthetic construct
  source 1..75: mol_type = other DNA
gcgaatacccctgttctgggtacaaccgcgacagcgaataaccgtgtcgttgaggatatccgtcagcaattgggt

SEQ ID NO: 69260 - DNA, 75 bp, synthetic construct
  source 1..75: mol_type = other DNA
cgatatgccattgctaccggaagagcagagtttaatcctgccgcagatctatccagtgctctcgaagtacataaa

SEQ ID NO: 69261 - DNA, 75 bp, synthetic construct
  source 1..75: mol_type = other DNA
atgaacaccgaggtgctgaataaccgcaccactgatgtgataaacaaccatgccgaaaaaataggtaacaaccag

SEQ ID NO: 69262 - DNA, 75 bp, synthetic construct
  source 1..75: mol_type = other DNA
cgctatgccatcgtgacaggcagagccgagtataatcccgctcctgatctcaccagtgccatgcaggggcatgaa

SEQ ID NO: 69263 - DNA, 75 bp, synthetic construct
  source 1..75: mol_type = other DNA
attacagcgacattcctgcgtctggtagcgaagcatgggctgacgccacacgcggcaattttttgccagatccag

SEQ ID NO: 69264 - DNA, 75 bp, synthetic construct
  source 1..75: mol_type = other DNA
aaactgcgaaacccaaagagaagccctacaaactggccgatggtggtgggctttacctgctggttaatcccaacg

SEQ ID NO: 69265 - DNA, 75 bp, synthetic construct
  source 1..75: mol_type = other DNA
gagactgattacgatttcctgtgccggatggcggcggaggaaggcatcttcttttatgaggagcatgcttacaaa

SEQ ID NO: 69266 - DNA, 75 bp, synthetic construct
  source 1..75: mol_type = other DNA
ggtttaaaccgttcgatactggatcagggctggtatgaaatgcgccgccagcttgagtacaagcagctctggcgt

SEQ ID NO: 69267 - DNA, 75 bp, synthetic construct
  source 1..75: mol_type = other DNA
gatgaaatcgatctcaacaaggctatctgggagatacctgcttcacggatgaaaatgcgtcgccctcatgtggtg

SEQ ID NO: 69268 - DNA, 75 bp, synthetic construct
  source 1..75: mol_type = other DNA
tttgagaacaaaccctttatcacgctcagtgaacctgcctgtggtgccggcagtatgattctggcaatggctgac

SEQ ID NO: 69269 - DNA, 75 bp, synthetic construct
  source 1..75: mol_type = other DNA
gcgtttgatattcgccggtttgattctgctgacgctgtcatttgttcatggcgataaaatcttttctattattaa

SEQ ID NO: 69270 - DNA, 75 bp, synthetic construct
  source 1..75: mol_type = other DNA
atgccttacacggcgaaacgatatcagacagaaaacggtgaggttccatacaccgactggatgaaaaaattaaga

SEQ ID NO: 69271 - DNA, 75 bp, synthetic construct
  source 1..75: mol_type = other DNA
gacccggcagaactccgcaactacatcctgacaggtgaaacccgcgcattaagtacaggcgttcccgctgatggt

SEQ ID NO: 69272 - DNA, 75 bp, synthetic construct
  source 1..75: mol_type = other DNA
taacaaccaggcatatacatcaacaagttacagtgatggcgatggcggggcaatcgatgttaccgataataatag

SEQ ID NO: 69273 - DNA, 75 bp, synthetic construct
  source 1..75: mol_type = other DNA
cgtgaccattgaccttgcttatgaaggttccggtagtggcgactggcgaacggatgcatttattgttggtatcgg

SEQ ID NO: 69274 - DNA, 75 bp, synthetic construct
  source 1..75: mol_type = other DNA
tgtcgcttatgaaggctccggcagcggtgactggcgtaccaacagtttcatcgttggtgtcggttataaattctg

SEQ ID NO: 69275 - DNA, 75 bp, synthetic construct
  source 1..75: mol_type = other DNA
atgattaagtcggttattgccggtgcggtagctatggcagtggtgtcttttggtgtaaatgctgctgctccaact

SEQ ID NO: 69276 - DNA, 75 bp, synthetic construct
  source 1..75: mol_type = other DNA
aggtacatccaagccaatggatttagatattgagttagtaaattgcgatattacagcttttaaacaaggtcaacc

SEQ ID NO: 69277 - DNA, 75 bp, synthetic construct
  source 1..75: mol_type = other DNA
tttcggtgtacataagccccgaaatcgtggaggtgctcaagcagcgccacaaaaaaactatgaagctggcgttgc

SEQ ID NO: 69278 - DNA, 75 bp, synthetic construct
  source 1..75: mol_type = other DNA
gcgttacagtgcatgggttcagaaagcatcgactgcttccagtgttactgagggggcattcactgccgttgctaa

SEQ ID NO: 69279 - DNA, 75 bp, synthetic construct
  source 1..75: mol_type = other DNA
gtcgttcagctatgcaggagacaagaatcgccagctgacccattacagcgatacccgctggcatgaagattccgt

SEQ ID NO: 69280 - DNA, 75 bp, synthetic construct
  source 1..75: mol_type = other DNA
atgtgtcgggtacctggtgtatccaggagcggttattacgaccgggtacagcatgccccctcagacagaaaacaa

SEQ ID NO: 69281 - DNA, 75 bp, synthetic construct
  source 1..75: mol_type = other DNA
aagcgttgaccgtatccaaacaaagcggaaaaacctggacgcttacccatggaactgatgcagccggtgaacttc

SEQ ID NO: 69282 - DNA, 75 bp, synthetic construct
  source 1..75: mol_type = other DNA
cgattgttaagaagtcgtcagccaataatgcccaagtcactgagggtgctttttctgcagtcgcaaccggtgatg

SEQ ID NO: 69283 - DNA, 75 bp, synthetic construct
  source 1..75: mol_type = other DNA
acgaactggtggagtcggctcccgcatcggttacaggagatgagggggatttgccgcagggcgttaatctcaaca

SEQ ID NO: 69284 - DNA, 75 bp, synthetic construct
  source 1..75: mol_type = other DNA
aagtgtcactttcgatggcacacctgttgcaggtcatgttgatgaacttggtactgctggtgatactggtactgc

SEQ ID NO: 69285 - DNA, 75 bp, synthetic construct
  source 1..75: mol_type = other DNA
ccacacgtaactcgccatacatgggcttatttgatcttaaagagaatttatgctgctaaatatcagtctgttatg

SEQ ID NO: 69286 - DNA, 75 bp, synthetic construct
  source 1..75: mol_type = other DNA
atgattcggcaacgtcgtcgtgcgttaacgccggaacaacagcaggaaatgggtcaacaagccgctacccggatg

SEQ ID NO: 69287 - DNA, 75 bp, synthetic construct
  source 1..75: mol_type = other DNA
ctgaagaaaaggatggtcagggtgtccagtgtgctttttgcaagggatccccgaatggggtttgagccggaaggt

SEQ ID NO: 69288 - DNA, 75 bp, synthetic construct
  source 1..75: mol_type = other DNA
gtcaacgatgccaaagtaaggccggaagccgcggtacaggcggcgcagaaggaagctgacgcgctaatgaaaccc

SEQ ID NO: 69289 - DNA, 75 bp, synthetic construct
  source 1..75: mol_type = other DNA
atgtttaaacccctcaccgccctgacggttgggctcagccttgccctgagcggcgcggcgctggcgaaagagaaa

SEQ ID NO: 69290 - DNA, 75 bp, synthetic construct
  source 1..75: mol_type = other DNA
ggaaacgggctgcggggattcagcggagaaggccgggtaaaaggcagcgaggatgcgcagtttgtggccctgcag

SEQ ID NO: 69291 - DNA, 75 bp, synthetic construct
  source 1..75: mol_type = other DNA
gcctggctggctggcggcctgtggttgctatggcagaaagcgattcgctggcatattcccctcagcttcttagta

SEQ ID NO: 69292 - DNA, 75 bp, synthetic construct
  source 1..75: mol_type = other DNA
tccgaccaccgagctgttccctatgtcgcaaattaacgaagcgttgaaacacgttcgcgaaggcaaagcccgcta

SEQ ID NO: 69293 - DNA, 75 bp, synthetic construct
  source 1..75: mol_type = other DNA
ctgtgatgccgtcgtggatcgggggaatgaccatcttccggggaatatcgacccctggaaagactacaacctctg

SEQ ID NO: 69294 - DNA, 75 bp, synthetic construct
  source 1..75: mol_type = other DNA
ctgtcggtggaagaggagaatgatgcctcagacggaatcgctatcgctttatttaatgaaagcggagagctggta

SEQ ID NO: 69295 - DNA, 75 bp, synthetic construct
  source 1..75: mol_type = other DNA
cgcggtcaactgacacacgttctgcgccatacgtttgcagcacacttcatgatgtcgggtggaaacatcctggcc

SEQ ID NO: 69296 - DNA, 75 bp, synthetic construct
  source 1..75: mol_type = other DNA
ttgccagttgatgatgatttgttaactgaacaggaacttaaggattacggtgtggatattgatgcgctcaacgcc

SEQ ID NO: 69297 - DNA, 75 bp, synthetic construct
  source 1..75: mol_type = other DNA
gagaagcaataaatcttacccgttcacaggtgactaaataccgaattacctttgtcagaacgaaggggaagaaaa

SEQ ID NO: 69298 - DNA, 75 bp, synthetic construct
  source 1..75: mol_type = other DNA
caacagaaaagcatatccggggggaatgacacatcttatactccagttcaggataatgagtggacgccaccatca

SEQ ID NO: 69299 - DNA, 75 bp, synthetic construct
  source 1..75: mol_type = other DNA
gacggacagcagacccgggtgattcgccccggccaggagcgggcagagcaacatattgacctggcctatgccatc

SEQ ID NO: 69300 - DNA, 75 bp, synthetic construct
  source 1..75: mol_type = other DNA
gcggaaattctgcttttctcgctggaatttattcttatcaacttagtggtggatgtgctttacgccgccattaac

SEQ ID NO: 69301 - DNA, 75 bp, synthetic construct
  source 1..75: mol_type = other DNA
tgcgcttctggcaggatctgatctacaaagacaaggtgatgccgtccggggtgctgaactcgaaacagatcagcg

SEQ ID NO: 69302 - DNA, 75 bp, synthetic construct
  source 1..75: mol_type = other DNA
tgaattatagtggctttgtctactataacaacacaaacggtgatttcgataccacctttaatggtgacactgtta

SEQ ID NO: 69303 - DNA, 75 bp, synthetic construct
  source 1..75: mol_type = other DNA
tctgatgtggaacgtcgatccctatttacagacgcagtggcagctgagcgaaaaactgtcgctggatgctggcgt

SEQ ID NO: 69304 - DNA, 75 bp, synthetic construct
  source 1..75: mol_type = other DNA
tgatcaggagatctgctcaagagacaggtcaaagatgggggacaacgtctggtgttgtataacagcacaggcctc

SEQ ID NO: 69305 - DNA, 75 bp, synthetic construct
  source 1..75: mol_type = other DNA
tgaatcacagctctacaactggcgcagtaaacagcaaaatcagcagacgtcttctgaacgtgaactggagatgtc

SEQ ID NO: 69306 - DNA, 75 bp, synthetic construct
  source 1..75: mol_type = other DNA
atggaaaaacgctccggcactcttatgacaagagtcgccgcaagggagcgattcatgtcattagtgcgttctcaa

SEQ ID NO: 69307 - DNA, 75 bp, synthetic construct
  source 1..75: mol_type = other DNA
gacagttgggtattcgattattcaggcagccgctgctatgcccacttccgacgggataaaatcagcaaccaatta

SEQ ID NO: 69308 - DNA, 75 bp, synthetic construct
  source 1..75: mol_type = other DNA
aaaattatgttggtttctctggtcgcgcacgtcgtaaagagtactggatgtttactctgattaacgccatcgtcg

SEQ ID NO: 69309 - DNA, 75 bp, synthetic construct
  source 1..75: mol_type = other DNA
tgaccgcagcggcgaagcgtacccttgcatccctgccagcccggctaagatggaggcacggcacagcccgcacac

SEQ ID NO: 69310 - DNA, 75 bp, synthetic construct
  source 1..75: mol_type = other DNA
gccggaagccgggccgttattctggaagtcagtggacgctggatggaagcggcagaagcatggcgacgggctgcc

SEQ ID NO: 69311 - DNA, 75 bp, synthetic construct
  source 1..75: mol_type = other DNA
cagcgcacgcagtatgaagtgtatgactaccccggacgtttcaagggtgctcacgggcagaactttgcccgctgg

SEQ ID NO: 69312 - DNA, 75 bp, synthetic construct
  source 1..75: mol_type = other DNA
cgacctgggaaggaattcgcgcggcagaagagctggaaaaagaaggtattaactgcaacctgacgctgctgtttt

SEQ ID NO: 69313 - DNA, 75 bp, synthetic construct
  source 1..75: mol_type = other DNA
aaacgcttgattaccaaagcccgttgaccaccacgcgctatacgctgccggagctgttagacaattcccagcagt

SEQ ID NO: 69314 - DNA, 75 bp, synthetic construct
  source 1..75: mol_type = other DNA
tcagcagttacagcaaaacaaaagctggcggcatgtgaaaaatgaacgcgttaaccgctcagcaagctggcagta

SEQ ID NO: 69315 - DNA, 75 bp, synthetic construct
  source 1..75: mol_type = other DNA
gtcgctgctgaccacgcaggcgtatacaggacgcccctggcctctgattgatggcgtcgggcagatttacggcat

SEQ ID NO: 69316 - DNA, 75 bp, synthetic construct
  source 1..75: mol_type = other DNA
gggatgttcccgctggttcccttctggggataccggaaggataaaaccggggagccttacgggctgatttcccgg

SEQ ID NO: 69317 - DNA, 75 bp, synthetic construct
  source 1..75: mol_type = other DNA
caatatcgcgcagggggccgccattggcctgcagcggaccactccgcttgcagctctggccgggcagcgaatggc

SEQ ID NO: 69318 - DNA, 75 bp, synthetic construct
  source 1..75: mol_type = other DNA
aggctcgtcccgcatgattgaaatcagcaaacgcgaacaattctatcagcaggaatattgtggttgcgtgtattc

SEQ ID NO: 69319 - DNA, 75 bp, synthetic construct
  source 1..75: mol_type = other DNA
gcttgatgctgcaggtacaactggaaatgcagcagacatgagtgcccgtatcacaggtgccggagacctggcttt

SEQ ID NO: 69320 - DNA, 75 bp, synthetic construct
  source 1..75: mol_type = other DNA
ctaccaaatggtattgaggcatattttgctaagaaacatcccaaagtatatgaagactttgatattccattttaa

SEQ ID NO: 69321 - DNA, 75 bp, synthetic construct
  source 1..75: mol_type = other DNA
gaaaaagtggcgtgtgccgccgatgcgcggcgtatcgtcagccactacgaacgacgctggctgatagaggaatat

SEQ ID NO: 69322 - DNA, 75 bp, synthetic construct
  source 1..75: mol_type = other DNA
atatggatggcacccttctgctgcccgatcacaccatttcacccgccgttaaaaatgcgattgccgcagctcgcg

SEQ ID NO: 69323 - DNA, 75 bp, synthetic construct
  source 1..75: mol_type = other DNA
ttttctgccaccacgatgctgttttcactgggggccagcatgatactgggtggtgtggctcagatgcttgccccg

SEQ ID NO: 69324 - DNA, 75 bp, synthetic construct
  source 1..75: mol_type = other DNA
gttccaccgacgaagcagccaataattttaaaaactttcttaccaaaatttttgcccgcgatactcagaaacagt

SEQ ID NO: 69325 - DNA, 75 bp, synthetic construct
  source 1..75: mol_type = other DNA
atccagaaagctaccttcgccatgtgcctggcgtcatagcagactggccggtcaaccgggtcagcgaactgcttc

SEQ ID NO: 69326 - DNA, 75 bp, synthetic construct
  source 1..75: mol_type = other DNA
gcactgacgtagccggactttacgaaaaatttgatcgcagaactggcagagtttactaccagtataaaaaccctg

SEQ ID NO: 69327 - DNA, 75 bp, synthetic construct
  source 1..75: mol_type = other DNA
tgtccgcagccatttgtctggccgtatccggtgcgcctgcatgggcatctgaacatcagtccacgctaagcgccg

SEQ ID NO: 69328 - DNA, 75 bp, synthetic construct
  source 1..75: mol_type = other DNA
atagatgcattacatttggctaaagaaaaaataaataacgatattcaattatcagataaactcaaacaggaattt

SEQ ID NO: 69329 - DNA, 75 bp, synthetic construct
  source 1..75: mol_type = other DNA
aatggggtattgttaatattgaactcttgattgtgtttgtttggcaaaatggttttgttgttgaaaaagctgaac

SEQ ID NO: 69330 - DNA, 75 bp, synthetic construct
  source 1..75: mol_type = other DNA
tcctttgcctttacgctctatggcctggcggcagcgctttccgcctgggtttccggcgtagttgccgaaattatt

SEQ ID NO: 69331 - DNA, 75 bp, synthetic construct
  source 1..75: mol_type = other DNA
atgaatccatcaatcgttaaacgctgccttgtcggggccgtgctggctattgcagctacgttgccgggttttcag

SEQ ID NO: 69332 - DNA, 75 bp, synthetic construct
  source 1..75: mol_type = other DNA
tcaagtcatggattaaggcaggagaacgcttcgaggggcgctctgacggcaacgggctataccttcgctatcgag

SEQ ID NO: 69333 - DNA, 75 bp, synthetic construct
  source 1..75: mol_type = other DNA
ggcgttgagggtatctataaccgtcaccaatactttgacgagcgccgggctgcgttaacacagtgggcgggcttg

SEQ ID NO: 69334 - DNA, 75 bp, synthetic construct
  source 1..75: mol_type = other DNA
agcggctgctatagaaaagatggagcgggagaaaaacgcgcttcgcgtgtcagagctagcaaccgagtatttcga

SEQ ID NO: 69335 - DNA, 75 bp, synthetic construct
  source 1..75: mol_type = other DNA
aaagccgtattgatgcagccgatggatctgctgatggcaagtacatcaaaaaacacgtaaacacttatactgatg

SEQ ID NO: 69336 - DNA, 75 bp, synthetic construct
  source 1..75: mol_type = other DNA
aaacggttgagctgggtcaggttcgttcttctcgcctggctaaagcgggtgacctcagctccgccgttggcttca

SEQ ID NO: 69337 - DNA, 75 bp, synthetic construct
  source 1..75: mol_type = other DNA
tacaaatgaagttagcaattaataaacttgattctgaattaaataaacttgagccttcattgtcagcgaaaaatc

SEQ ID NO: 69338 - DNA, 75 bp, synthetic construct
  source 1..75: mol_type = other DNA
atgtctgaatatcgtcgttattacatcaaggggggaacctggtttttcacggtgaatttacgcaatcgtcgaagc

SEQ ID NO: 69339 - DNA, 75 bp, synthetic construct
  source 1..75: mol_type = other DNA
cgatatgcgtaaatccttcaacggtctgggagagcagatacagcacgtgctggatgagaaccccttctccggtca

SEQ ID NO: 69340 - DNA, 75 bp, synthetic construct
  source 1..75: mol_type = other DNA
aacacgtctctggcgtggggagctggcgtgcagtttaacccgaccgaatccgtggccattgatattgcttatgaa

SEQ ID NO: 69341 - DNA, 75 bp, synthetic construct
  source 1..75: mol_type = other DNA
cgtaaccgctggttcagcgtaatggcggggccgtctgtgcgcgtgaatgaatggttcagcgcgtatgcgatggcg

SEQ ID NO: 69342 - DNA, 75 bp, synthetic construct
  source 1..75: mol_type = other DNA
ccgaccgaatccgtggccattgatattgcttatgaaggctccggcagtggtgactggcgcactgacggtttcatc

SEQ ID NO: 69343 - DNA, 75 bp, synthetic construct
  source 1..75: mol_type = other DNA
ggttgctgcaaccggtccgggcgttgacacccctgcatgtcttgcaaaagtacgcgctctgatggcacaggaact

SEQ ID NO: 69344 - DNA, 75 bp, synthetic construct
  source 1..75: mol_type = other DNA
aacggtattgcggtactgccggtgaccggcacgctggtgcaccggctggggggggatgcggccattttccggaat

SEQ ID NO: 69345 - DNA, 75 bp, synthetic construct
  source 1..75: mol_type = other DNA
attttcgtggctacgccggaacgctggcatccggtcgcgtggaagtcgggcaacgtgtcaaagtgctgccctctg

SEQ ID NO: 69346 - DNA, 75 bp, synthetic construct
  source 1..75: mol_type = other DNA
gaatgcggcgactaccacatttatccccggggctatggacgcagcaactttgcagggcgcaatcgaaaaagctcg

SEQ ID NO: 69347 - DNA, 75 bp, synthetic construct
  source 1..75: mol_type = other DNA
gctacgggtctgcacgtctatcagaatttcggtgctgaagcctatcgtaagtaccacaacaacctgatggctgtg

SEQ ID NO: 69348 - DNA, 75 bp, synthetic construct
  source 1..75: mol_type = other DNA
tgctgcgccatctgaattcagtgcattcgaactggaattgaatgccctggttcgccgccatttcccgcattgggg

SEQ ID NO: 69349 - DNA, 75 bp, synthetic construct
  source 1..75: mol_type = other DNA
tatggcgttacctttgacccggttcaccaccatcattaccgaccggcatctttccgatgccgccgccagtcatat

SEQ ID NO: 69350 - DNA, 75 bp, synthetic construct
  source 1..75: mol_type = other DNA
agagagttttggaaaaggattcgaggatatctgcgatgctctagcaattattgctcgtagttataaggatataca

SEQ ID NO: 69351 - DNA, 75 bp, synthetic construct
  source 1..75: mol_type = other DNA
acgccagaatgccttaactcgtgcaactgaacgttatggccagttaggctcttcccggatgcagcgcctcaacag

SEQ ID NO: 69352 - DNA, 75 bp, synthetic construct
  source 1..75: mol_type = other DNA
aaaaaattctggtcgctgacagcgaaaggctgcatgttcggcaagaacatcaccagtcctgcaaatccgcgcgag

SEQ ID NO: 69353 - DNA, 75 bp, synthetic construct
  source 1..75: mol_type = other DNA
acagctgccttactggtgggcttatagctgtgtcagaattaagtaagaaagtttcgggaaaaaccggaagaagat

SEQ ID NO: 69354 - DNA, 75 bp, synthetic construct
  source 1..75: mol_type = other DNA
tgcagggggagattgtggcactggtccacagtcatcccggtggtctgccctggctgagcgaggctgaccggcggc

SEQ ID NO: 69355 - DNA, 75 bp, synthetic construct
  source 1..75: mol_type = other DNA
attgcttatgaaggttctggcagtggtgactggcgcactgacgggttcatcgtgggtgttggttataaattctga

SEQ ID NO: 69356 - DNA, 75 bp, synthetic construct
  source 1..75: mol_type = other DNA
gctaatggagtcatttggtctggcagaagtcttcactgatattcagaccgttaaccatttactgtcaatgcgtca

SEQ ID NO: 69357 - DNA, 75 bp, synthetic construct
  source 1..75: mol_type = other DNA
accctgtgggattatatgtctacgcccgaccagattaagcggatgcaggacgtcattagcaacccaaaacgactg

SEQ ID NO: 69358 - DNA, 75 bp, synthetic construct
  source 1..75: mol_type = other DNA
aatatgagcctgcatgaactggagaaaatgctggagcgtctgctggctcagaaacaacgtcgggggtacgaataa

SEQ ID NO: 69359 - DNA, 75 bp, synthetic construct
  source 1..75: mol_type = other DNA
gaattgaagcgagagcatcttggtgaggcaaagagtcaacttgtaaggtcaggattacaaactggtgctgtagcg

SEQ ID NO: 69360 - DNA, 75 bp, synthetic construct
  source 1..75: mol_type = other DNA
ttgtttcttatgtcataaccctaatgtccctttgcgaccaactggaacagcaatccctgaccagtctggacgcac

SEQ ID NO: 69361 - DNA, 75 bp, synthetic construct
  source 1..75: mol_type = other DNA
cgctgtgtcagttaccaggtggcagaagatacgcggcgtatccgggcggcgctgaccacaaccggtcagacgtta

SEQ ID NO: 69362 - DNA, 75 bp, synthetic construct
  source 1..75: mol_type = other DNA
cagcttgctggtacgctataccccgctatcactggcggttggatctcacttaaggctgtagaggtgatggccaat

SEQ ID NO: 69363 - DNA, 75 bp, synthetic construct
  source 1..75: mol_type = other DNA
gctgctgggctttgatccggtaagccgccgccgtaacccggtagaaacggaagaggaggacgagcttgaccgtct

SEQ ID NO: 69364 - DNA, 75 bp, synthetic construct
  source 1..75: mol_type = other DNA
cgagggcgcacaatagcacatccatatgcacatactttaggctctgtggatatcaaagatcccacaaatctttaa

SEQ ID NO: 69365 - DNA, 75 bp, synthetic construct
  source 1..75: mol_type = other DNA
ttgactcaataaggcagatgtgggacgcagcgataaaacgtgccggactccgccatcgaaaatcatatcagtcga

SEQ ID NO: 69366 - DNA, 75 bp, synthetic construct
  source 1..75: mol_type = other DNA
gccgatgtcattgtcgtgggtttgattggtgaacgtgggcgcgaagtaaaagattttattgagaatatcctcggt

SEQ ID NO: 69367 - DNA, 75 bp, synthetic construct
  source 1..75: mol_type = other DNA
tatcccccggcgggttttgttgttgccggggcgctgtgtctgtgctggtcgtggctggttgcgcgttatctcgat

SEQ ID NO: 69368 - DNA, 75 bp, synthetic construct
  source 1..75: mol_type = other DNA
atgagtaacgcatcatacccgacaggcgttgaaaaccatggcggatcactccgcatatggtttcactataacggc

SEQ ID NO: 69369 - DNA, 75 bp, synthetic construct
  source 1..75: mol_type = other DNA
atgcacgggaattttttgaaaaataatctggcgaaaaaaataagcatggcaagaccaccgaaagcccccgcctac

SEQ ID NO: 69370 - DNA, 75 bp, synthetic construct
  source 1..75: mol_type = other DNA
tgcggatgaggcagcacagacacagacgggcgataacactgcggcaccgacgccggatgccagtgctgagcagac

SEQ ID NO: 69371 - DNA, 75 bp, synthetic construct
  source 1..75: mol_type = other DNA
atgaacaaaacgctgaatgcactggtttgtcgccacgcccgtaacctgctgctggcgcagggctggccggaagag

SEQ ID NO: 69372 - DNA, 75 bp, synthetic construct
  source 1..75: mol_type = other DNA
ggatgcgcaaaaaggcgcatttgctaaggaagacggcgagaaagtcgttgatgaaacaggtaagcgattgaaata

SEQ ID NO: 69373 - DNA, 75 bp, synthetic construct
  source 1..75: mol_type = other DNA
aatgacaagacttggccctcagtatcaaattgacgtcaagcttcgggagttcggtcgcaccgcacgccatgaatg

SEQ ID NO: 69374 - DNA, 75 bp, synthetic construct
  source 1..75: mol_type = other DNA
atgttttcgcaatcgctggtgaggccgtcagagggggtgggggtggttttcaggacgaaaccgtccctgccggac

SEQ ID NO: 69375 - DNA, 75 bp, synthetic construct
  source 1..75: mol_type = other DNA
attcgttcggttgaaaccgacaacgacggcaaccgcgtaaccaaaaattacccgctgctggtggatgtgccggtg

SEQ ID NO: 69376 - DNA, 75 bp, synthetic construct
  source 1..75: mol_type = other DNA
agagccgcgaggacattcatatggcctttcgcctgatgcgctattccatggcggtgatgcagcgccatatagagc

SEQ ID NO: 69377 - DNA, 75 bp, synthetic construct
  source 1..75: mol_type = other DNA
gcaatacacccgtggtaaccagacccgtgctgcgctgatgatgggcatcaaccgtggtacgctgcgtaaaaaatt

SEQ ID NO: 69378 - DNA, 75 bp, synthetic construct
  source 1..75: mol_type = other DNA
ggaagaactgtcagcggcacacctgcggctttccagaacggtgatagaacacatggactggcaacagtgcattga

SEQ ID NO: 69379 - DNA, 75 bp, synthetic construct
  source 1..75: mol_type = other DNA
ggaagttacagcgttagcggttgaggcggaatctgccatcgccgttcgactgtccagcgcctttgagaccctgtg

SEQ ID NO: 69380 - DNA, 75 bp, synthetic construct
  source 1..75: mol_type = other DNA
gcggggccgtctgttcgcgtgaatgaatggttcagcgcgtatgcgatggcgggtatggcttacagccgtgtgtcg

SEQ ID NO: 69381 - DNA, 75 bp, synthetic construct
  source 1..75: mol_type = other DNA
ggtcttgaggaggctaagccgaagcaaaacagtcgacttgctcaagagattctggataaaggtggtgcatggatt

SEQ ID NO: 69382 - DNA, 75 bp, synthetic construct
  source 1..75: mol_type = other DNA
gtgaacacggcagcggaagccatccgtgccctgtcgctgcaggtgccgggattccgccgccagatgaacgaaggc

SEQ ID NO: 69383 - DNA, 75 bp, synthetic construct
  source 1..75: mol_type = other DNA
gttttgcgctgctggggtgggttggggcagaaatggccagcgggcttgacccattctggcgtcctgatgtggtgc

SEQ ID NO: 69384 - DNA, 75 bp, synthetic construct
  source 1..75: mol_type = other DNA
tggatgagacccccttctccggtcacctgttcatcttccgtggccgacggagtgacatgattaaaatcctctggg

SEQ ID NO: 69385 - DNA, 75 bp, synthetic construct
  source 1..75: mol_type = other DNA
tggatgtatgtctgccgggtgccgggagcgcaatactacaaaattaatgaggaatgggaaaagcctcctgcacat

SEQ ID NO: 69386 - DNA, 75 bp, synthetic construct
  source 1..75: mol_type = other DNA
atgcggggggctgagtacgtcatcatcagtaagggaacgctgcatggccgcgatgcgctggaactggtatttgaa

SEQ ID NO: 69387 - DNA, 75 bp, synthetic construct
  source 1..75: mol_type = other DNA
aatacgacgactggcgaaccagatatttgccccgcgtggcaaggctggctgaccttggcgagaacaacagcctga

SEQ ID NO: 69388 - DNA, 75 bp, synthetic construct
  source 1..75: mol_type = other DNA
accagagcagtactatcgatccatatctaattacctctgttcgccagactctggcagaacaaggcgcagcattac

SEQ ID NO: 69389 - DNA, 75 bp, synthetic construct
  source 1..75: mol_type = other DNA
tttatggattgaagtacggtacgctgccgttagtgcggcgcaccggtgggcttgctgatacggtttctgactgtt

SEQ ID NO: 69390 - DNA, 75 bp, synthetic construct
  source 1..75: mol_type = other DNA
ccgtggagcgcggacattttctgacggtgatcccgcattttgcctggcgactggtgaatccggcaacgctgaaat

SEQ ID NO: 69391 - DNA, 75 bp, synthetic construct
  source 1..75: mol_type = other DNA
gctaacggaggatcattagaacaaactgaaaatacatctgggttacgagtggttacactgttgattaatggtgat

SEQ ID NO: 69392 - DNA, 75 bp, synthetic construct
  source 1..75: mol_type = other DNA
gcagatcaccccggaagaaacactgacggatatccagcgtgcggcacggttctactaccttcagaagcaggcgtt

SEQ ID NO: 69393 - DNA, 75 bp, synthetic construct
  source 1..75: mol_type = other DNA
acatggactggcaacagtgcattgagcgttatgatcgtccgcacacgctgttctactgcgacccaccgtacctgg

SEQ ID NO: 69394 - DNA, 75 bp, synthetic construct
  source 1..75: mol_type = other DNA
cgggcatgaagttgtcgaaggaaaaatgcgaccaggttaacgccattgagcgtgataaagcgctggcgtgggtgg

SEQ ID NO: 69395 - DNA, 75 bp, synthetic construct
  source 1..75: mol_type = other DNA
atctgccgcggtgccacaatggtggatggtaaacctgttattccgggcatgaaactgtcgaaggaaaaatgcgac

SEQ ID NO: 69396 - DNA, 75 bp, synthetic construct
  source 1..75: mol_type = other DNA
ggaatcagtcagcccgctgtaactcaactggaacagcgcggaaatgatttgaagctggcaacgttaaagcgttac

SEQ ID NO: 69397 - DNA, 75 bp, synthetic construct
  source 1..75: mol_type = other DNA
cggctcaatcacctgaaagtcaggcgatcatcaaagctatggctgatgagatgattctggaaacagggctgcaaa

SEQ ID NO: 69398 - DNA, 75 bp, synthetic construct
  source 1..75: mol_type = other DNA
aaggtcggtatcagaattgtgatgtttggtattgtgcgccatcggttttctctgctggcgcagcaggtgccagtt

SEQ ID NO: 69399 - DNA, 75 bp, synthetic construct
  source 1..75: mol_type = other DNA
gtgaatcaaatcgcaatacgttgcggttatgccagcacaccgtattttatcagcgttttcagagaatattttggt

SEQ ID NO: 69400 - DNA, 75 bp, synthetic construct
  source 1..75: mol_type = other DNA
ccgtgtcacagaacagtgccgatgcctcttatttacagcagatggcgctgtcatttattgccctccgtctgaatg

SEQ ID NO: 69401 - DNA, 75 bp, synthetic construct
  source 1..75: mol_type = other DNA
ccggacgtgatgcagaccttcttcccgaatatcccggtggccacaccgaccaccttcctggtcaacgtcaacacg

SEQ ID NO: 69402 - DNA, 75 bp, synthetic construct
  source 1..75: mol_type = other DNA
acgcattaaaaaagataacgtgaactcagcctttttccagaccagtgtccgtgtatggcctcagtatggccgtgt

SEQ ID NO: 69403 - DNA, 75 bp, synthetic construct
  source 1..75: mol_type = other DNA
ttccgccagagcctcggtggcctgatcgaagcctatgaagccgtcgcccgccgcctgggtgtacagctggactga

SEQ ID NO: 69404 - DNA, 75 bp, synthetic construct
  source 1..75: mol_type = other DNA
catccgattctgatatcagaacggcgatgatatctgctaaaattgataacgcgaactatcttgcacagtatgagc

SEQ ID NO: 69405 - DNA, 75 bp, synthetic construct
  source 1..75: mol_type = other DNA
aatggtgagcttctatggctggaatcgcgtcgatcgctttatgtctgcctggaaaaatgcgggattcagcgttgt

SEQ ID NO: 69406 - DNA, 75 bp, synthetic construct
  source 1..75: mol_type = other DNA
ccgctggcgcggggaacactttgccgctgtcagcattgctggcgcgtaatacggtttatccccgctggcgcgggg

SEQ ID NO: 69407 - DNA, 75 bp, synthetic construct
  source 1..75: mol_type = other DNA
tgcaggaagcagggcggtcagactggagctcagggaacaatggatggaagccgctgaagcatggcgaagggcggc

SEQ ID NO: 69408 - DNA, 75 bp, synthetic construct
  source 1..75: mol_type = other DNA
cgtattcgttcaaacaactgttacggtcaggtatcccgtcgtgaccaggagagcgcgctggcgtgctggggtatc

SEQ ID NO: 69409 - DNA, 75 bp, synthetic construct
  source 1..75: mol_type = other DNA
aatggctgaccgaagacgaaatcagggcagttcttgatgcagtgcgcgatgcggtacgcagtgtcagttgccggg

SEQ ID NO: 69410 - DNA, 75 bp, synthetic construct
  source 1..75: mol_type = other DNA
cggtcaggtctggcgttaccagagtgccggaagccgggccgttattctggaagcggcagaagcatggcgacgggc

SEQ ID NO: 69411 - DNA, 75 bp, synthetic construct
  source 1..75: mol_type = other DNA
tcaacctgcgtggccgcccttcagtccggacgccggtatatcggtatcgagctgcttgaacagtatcaccgtgcc

SEQ ID NO: 69412 - DNA, 75 bp, synthetic construct
  source 1..75: mol_type = other DNA
cctcgctcacttgaaggattcgctaaccaagaagctgacaaattcaaagaggcgctgcttgagacgctaaagacc

SEQ ID NO: 69413 - DNA, 75 bp, synthetic construct
  source 1..75: mol_type = other DNA
aaaacagactttgttgtcatccatattcccgatcagattggcgatgctatggccatctttccagttattcgggcg

SEQ ID NO: 69414 - DNA, 75 bp, synthetic construct
  source 1..75: mol_type = other DNA
cgacgtgttagtcgtctgcggcggctggcatgctccggcactggcaaagatgtggcgcgaatacacgcaggaaat

SEQ ID NO: 69415 - DNA, 75 bp, synthetic construct
  source 1..75: mol_type = other DNA
gtcggcctgcgcgactcaacctacgtgctcgacggcctgctgtaccacgaatccgacctgcggatcgaggagcac

SEQ ID NO: 69416 - DNA, 75 bp, synthetic construct
  source 1..75: mol_type = other DNA
tcagcgcctgggaatgggcggtggtttttatgatcggaccttacaaaactggcagcactataaaatgcaaccggt

SEQ ID NO: 69417 - DNA, 75 bp, synthetic construct
  source 1..75: mol_type = other DNA
caggaccgtccgccggtggcgatcatttcgggtcagggcggggcggccggccagcgtgagcgcgtggcggagctg

SEQ ID NO: 69418 - DNA, 75 bp, synthetic construct
  source 1..75: mol_type = other DNA
ttgatgattatctcatcccgactgctgagtttgagaaatcccgacataatgaccagttacagttggccgttcaga

SEQ ID NO: 69419 - DNA, 75 bp, synthetic construct
  source 1..75: mol_type = other DNA
cccgcgtatgctgtcagcattgcagttcatggcgacacctgcggcgcaggcgctcagcgatgcgctggacaccat

SEQ ID NO: 69420 - DNA, 75 bp, synthetic construct
  source 1..75: mol_type = other DNA
aagccctgaaattattagaattacaagggattgccaacaccacgctggagatggttgctgaacgtgtggattatc

SEQ ID NO: 69421 - DNA, 75 bp, synthetic construct
  source 1..75: mol_type = other DNA
ctgcagctgctggtctcacgccagtcgtacaacgctgaaaaaagcattatccgccacgtccttgagggaaaggag

SEQ ID NO: 69422 - DNA, 75 bp, synthetic construct
  source 1..75: mol_type = other DNA
actggcttaaggcgcaacaactggatgcagtgcttctctcctcacggcagaacaaacagccgcatctggggatct

SEQ ID NO: 69423 - DNA, 75 bp, synthetic construct
  source 1..75: mol_type = other DNA
ggaaattggtttcagtgacctcgcacaacttccttacattatgggattaattcgtcaggcatttgaaaaacagat

SEQ ID NO: 69424 - DNA, 75 bp, synthetic construct
  source 1..75: mol_type = other DNA
cgcacaccggaaacgaacgcctacatctttgaggtgtatacccgaaccgcacaggtgctggctgattcaattgcg

SEQ ID NO: 69425 - DNA, 75 bp, synthetic construct
  source 1..75: mol_type = other DNA
ggttcgggatggttcaggctaccaggtggatatattgttcagtttggcactttttcaggaaacacgacccgcttt

SEQ ID NO: 69426 - DNA, 75 bp, synthetic construct
  source 1..75: mol_type = other DNA
tctgcttttttccagaccagtgtccgtgtctggccacaatatggtcgtgtggaaatccgtggaattcggaaaaca

SEQ ID NO: 69427 - DNA, 75 bp, synthetic construct
  source 1..75: mol_type = other DNA
cgtatccgctcaaataactgttatggtcaggtatcccgtcgtgaccaggagagcgcgctggcgtgctggggtatc

SEQ ID NO: 69428 - DNA, 75 bp, synthetic construct
  source 1..75: mol_type = other DNA
ggaagacattcgtattatgaaacagaatggtattatctggccacttgctttagcgtataaaaatatatccaaact

SEQ ID NO: 69429 - DNA, 75 bp, synthetic construct
  source 1..75: mol_type = other DNA
tgccggtgacgttaacgatgactggctgcaacctgccagtaatgagatgtaccgcgtactcaaaaaagacgcgct

SEQ ID NO: 69430 - DNA, 75 bp, synthetic construct
  source 1..75: mol_type = other DNA
gatcagatggtcaggattttgaaacgtgatgatattaaagttatttatgttcctcaagtatttgtaaagatgaga

SEQ ID NO: 69431 - DNA, 75 bp, synthetic construct
  source 1..75: mol_type = other DNA
ggttcaaagatgcggactccccatcttgttcctttgtcgcggcaggctctggctattttggaaaagatcaaaagc

SEQ ID NO: 69432 - DNA, 75 bp, synthetic construct
  source 1..75: mol_type = other DNA
gccaatgagtgagaatacgcttaataaggccttgcgagtaatgggctatgacacgaaaacggaagtgtgtgggca

SEQ ID NO: 69433 - DNA, 75 bp, synthetic construct
  source 1..75: mol_type = other DNA
ccagcaggagtaccagcaggcgctgtggtacagcgccagtgcagaaagcctggcgctgagcgcactcagtctgag

SEQ ID NO: 69434 - DNA, 75 bp, synthetic construct
  source 1..75: mol_type = other DNA
tgtgcctttcaaccagacgctgtatttcatcaacggcgatgatccggcgcaggtggcatggatgaaacgccagac

SEQ ID NO: 69435 - DNA, 75 bp, synthetic construct
  source 1..75: mol_type = other DNA
ctgtgctgcgcattccgcagaatattatccgcttgcaaccgttgcatttttcttacgaaaaaggccgcagagttt

SEQ ID NO: 69436 - DNA, 75 bp, synthetic construct
  source 1..75: mol_type = other DNA
ctgacgcgtctgcgcagtattgaaccgggtgacatccctaccccgttgatggcggaatactatcgccaacgtgcc

SEQ ID NO: 69437 - DNA, 75 bp, synthetic construct
  source 1..75: mol_type = other DNA
cccgtcaggggtggggcagattctggattcactggcggaagccgggatccccgacggaattgtggtggggataag

SEQ ID NO: 69438 - DNA, 75 bp, synthetic construct
  source 1..75: mol_type = other DNA
gtatatgcggggaaaacccttcgcatgactattggcaacattaacgactggaagattgatgatgcgagagccgag

SEQ ID NO: 69439 - DNA, 75 bp, synthetic construct
  source 1..75: mol_type = other DNA
tggcaggatgtatcgcgctggcattcagcaatatggctctggcagaagatattaaagtcgcggtcgtgggcgcaa

SEQ ID NO: 69440 - DNA, 75 bp, synthetic construct
  source 1..75: mol_type = other DNA
gtctggtgctcagccactctccttcaatgtggtggacgccagaaagaaccagtcgaccaggcttgttcagcgaaa

SEQ ID NO: 69441 - DNA, 75 bp, synthetic construct
  source 1..75: mol_type = other DNA
tggcgtatgcgcggcaattgacgccgccataaataatgggcgcatcgtgcccgtggctgtactgggcattgacaa

SEQ ID NO: 69442 - DNA, 75 bp, synthetic construct
  source 1..75: mol_type = other DNA
tcatcaacacgccggaacacacccaggcgcaaatcatcagtggcacggttactggcgcgcaggcgggcgatattg

SEQ ID NO: 69443 - DNA, 75 bp, synthetic construct
  source 1..75: mol_type = other DNA
acgttccggtgagcgatgttgtgaacctggcgaacaccaattacaccgtcactgccagcgctaccgatgttatcg

SEQ ID NO: 69444 - DNA, 75 bp, synthetic construct
  source 1..75: mol_type = other DNA
cggctctctctcttgatggatcttctcagtcggagggcgatctggcttcaatcgacgttacccaaaaatcatccc

SEQ ID NO: 69445 - DNA, 75 bp, synthetic construct
  source 1..75: mol_type = other DNA
cgggaaagctgctgcggcaatcaaggagagctatatcgcagcattcaactggatggcagaacaactgagccgccg

SEQ ID NO: 69446 - DNA, 75 bp, synthetic construct
  source 1..75: mol_type = other DNA
ttcgaacgtctgatggaaggcgctaaactgctgaaatgttcagagtttggtgatgcgatcatcaagaacatgtaa

SEQ ID NO: 69447 - DNA, 75 bp, synthetic construct
  source 1..75: mol_type = other DNA
gggatatggtacgacgggacgatgatctggatgacctctgtcaggtgcagacacatatccggaccatcacccacc

SEQ ID NO: 69448 - DNA, 75 bp, synthetic construct
  source 1..75: mol_type = other DNA
ctgatcgttgaagagtggcaccggataggtggcgaaggtatcgactttccggcagatcacagccgtgcccggcag

SEQ ID NO: 69449 - DNA, 75 bp, synthetic construct
  source 1..75: mol_type = other DNA
caggcgacggtgataactacacaggctttcaacttcaatcggtttaaccagatagcagagaacgccaaccgcctt

SEQ ID NO: 69450 - DNA, 75 bp, synthetic construct
  source 1..75: mol_type = other DNA
ctcacccgcctcgggcatgaattcgccccggaaaacagtaccctggcagtacagaaagacaaagaaagcacgatg

SEQ ID NO: 69451 - DNA, 75 bp, synthetic construct
  source 1..75: mol_type = other DNA
atgtcccgttttatcctgggtgactgcgtgcgagttatggccacgtttccggacaatgctgtcgatttcatcctc

SEQ ID NO: 69452 - DNA, 75 bp, synthetic construct
  source 1..75: mol_type = other DNA
accgcaaagcgattgttagtaaaggtataccacccgctctattaaataggctcaccaattcggatgttcgtaagc

SEQ ID NO: 69453 - DNA, 75 bp, synthetic construct
  source 1..75: mol_type = other DNA
agtacggtctgaccatgccgggtaaacaccgccgcaccccgccgtacatgttcaccgaggaggtggcgcttgcgg

SEQ ID NO: 69454 - DNA, 75 bp, synthetic construct
  source 1..75: mol_type = other DNA
cgtaccgtcacgaatgcgcctatatcctggcaaaaggccgtccggcgctgcctcagaagccattacccgacgtgc

SEQ ID NO: 69455 - DNA, 75 bp, synthetic construct
  source 1..75: mol_type = other DNA
ccccgctggcgcggggaacacgcagatttcaaacaggcgcgtaatcccgcgtttcggtttatccccgctggcgcg

SEQ ID NO: 69456 - DNA, 75 bp, synthetic construct
  source 1..75: mol_type = other DNA
accgcgtactcaaaaaagacgcgctgatggtcagcttctacggctggcaccgtattgaccgctttatggcggcct

SEQ ID NO: 69457 - DNA, 75 bp, synthetic construct
  source 1..75: mol_type = other DNA
cacattaacaaaaacggagatctttgcagttaagcgtcagatctcagagcttcgctcatgccttaccgcttcaag

SEQ ID NO: 69458 - DNA, 75 bp, synthetic construct
  source 1..75: mol_type = other DNA
cgaagaacattgcgggccgcaaggccatcattccgccgtttatgccgggcaaacgtatggtggtgaccatgctgc

SEQ ID NO: 69459 - DNA, 75 bp, synthetic construct
  source 1..75: mol_type = other DNA
atggcacgagaaaattgagacatggatcttaaatgaagcaggtattaccataaaaaacaacgttgatatgcgttg

SEQ ID NO: 69460 - DNA, 75 bp, synthetic construct
  source 1..75: mol_type = other DNA
ccgtcatttcattgacctgctgaaaaggatcgaggaaaaaggtctgctggaagttgcgtcccgcacgcggcagca

SEQ ID NO: 69461 - DNA, 75 bp, synthetic construct
  source 1..75: mol_type = other DNA
ctcctgaaatggtggaaagcggggctcacctgctgatggaaaacctcgccatggttaacccgaatctcggttatt

SEQ ID NO: 69462 - DNA, 75 bp, synthetic construct
  source 1..75: mol_type = other DNA
cgaatgcttcaaaggtcgaaagttgactaaattggcagtgaaactcactctactggtattcatacgttcaagtga

SEQ ID NO: 69463 - DNA, 75 bp, synthetic construct
  source 1..75: mol_type = other DNA
cttcgaacgtctgatggaaggcgctaaactgctgaaatgttcagagtttggtgacgcgatcatcaagaatatgta

SEQ ID NO: 69464 - DNA, 75 bp, synthetic construct
  source 1..75: mol_type = other DNA
acctgtacggtggaaaatgctttgtggatggtgccgccgcaatatgcggtttggataccgggcggggtggaacat

SEQ ID NO: 69465 - DNA, 75 bp, synthetic construct
  source 1..75: mol_type = other DNA
ctggcctgcctgttactgatgagtgccattgcagcactgtgtgcctcaaaagccctgattgcgtcataccgcctc

SEQ ID NO: 69466 - DNA, 75 bp, synthetic construct
  source 1..75: mol_type = other DNA
atcctccatcgccagccgaaatatctcgggccatcggtcatgattgggccgtttagtgagcatggctgtccggca

SEQ ID NO: 69467 - DNA, 75 bp, synthetic construct
  source 1..75: mol_type = other DNA
ggcccgctgaccactccggttggtggcggtattcgctctctgaacgttgccctgcgccaggaactggatctctac

SEQ ID NO: 69468 - DNA, 75 bp, synthetic construct
  source 1..75: mol_type = other DNA
ctgtgggcctttgatccgggcgcgaaagatccgaacgcgatcccgtctgacgaacacacctttacctttaactcg

SEQ ID NO: 69469 - DNA, 75 bp, synthetic construct
  source 1..75: mol_type = other DNA
gtactggcaatatttgccgctctccgattggggagcggtatttgcgaaatttattacctgacaaaaaaatcgatt

SEQ ID NO: 69470 - DNA, 75 bp, synthetic construct
  source 1..75: mol_type = other DNA
aaagcccgtacgctagtcgaagctcttgagccaatcaaagctcgtggggctcttgaaactgtacgtcgactgata

SEQ ID NO: 69471 - DNA, 75 bp, synthetic construct
  source 1..75: mol_type = other DNA
gcgccagccggtgcgttttatccagagtattcaggtggcgcatcagctcggcgcccgcgtttttctggagatggg

SEQ ID NO: 69472 - DNA, 75 bp, synthetic construct
  source 1..75: mol_type = other DNA
gttattgatcatttgatcaagtttcctgatttttataactcggagatattcagggaggtgaccgaagagagcgag

SEQ ID NO: 69473 - DNA, 75 bp, synthetic construct
  source 1..75: mol_type = other DNA
ccaacacagaagtactgcgcgctaaagcgttagaaaaggatctaacgttgcatgatggcgatggtctttttctac

SEQ ID NO: 69474 - DNA, 75 bp, synthetic construct
  source 1..75: mol_type = other DNA
agtattgtcattatttttaggtaagcataggtataaagaaaaattaattgaaaaatgtactagtgagtcttatga

SEQ ID NO: 69475 - DNA, 75 bp, synthetic construct
  source 1..75: mol_type = other DNA
caaccattttttagttatccacgggttttaggccatgaaatatgtggggagattgttgggctgggtaaaaatatt

SEQ ID NO: 69476 - DNA, 75 bp, synthetic construct
  source 1..75: mol_type = other DNA
caggatggtgtccggattgcccgtgataatcctgacagcggtgtggtggtgagaattgccggtgaaggtcgtccg

SEQ ID NO: 69477 - DNA, 75 bp, synthetic construct
  source 1..75: mol_type = other DNA
gcgctctctttcccccagcaggcgggctatcgctaccagcccggaatgattttctctcccgatggccactgtcgt

SEQ ID NO: 69478 - DNA, 75 bp, synthetic construct
  source 1..75: mol_type = other DNA
agaattgcacaagctaacggtatttcgttagccgatcatagtggacagcaatttactccatctatggcaagaaaa

SEQ ID NO: 69479 - DNA, 75 bp, synthetic construct
  source 1..75: mol_type = other DNA
cgtattcgctcaaataactgttatggtcaggtctcacggcgtgaccaggagagcgcgctggcgtgctggggaatt

SEQ ID NO: 69480 - DNA, 75 bp, synthetic construct
  source 1..75: mol_type = other DNA
tgggcgctggcaatttcagaacatcgacgcttcttcgcaaaataaaccagggcgatatcaaaggcgcatgtgatc

SEQ ID NO: 69481 - DNA, 75 bp, synthetic construct
  source 1..75: mol_type = other DNA
tcagcagtgtcctgcgtgtaaaagtggtcgcaccaactgctgtgaaagaatttcagtcattggtgtgcatcagga

SEQ ID NO: 69482 - DNA, 75 bp, synthetic construct
  source 1..75: mol_type = other DNA
tcgtaaaagtgatgaagcatttgagttagtatatcaattaattgaccaaagctgtaaaagttgggtcgcaaaatt

SEQ ID NO: 69483 - DNA, 75 bp, synthetic construct
  source 1..75: mol_type = other DNA
ttaacagcaggttttgaagtcatggcggcaggacaaatattgccgtcagtccgtaaaggacgcgcccgtaaggcg

SEQ ID NO: 69484 - DNA, 75 bp, synthetic construct
  source 1..75: mol_type = other DNA
aaagttgcgcttaaccatgggttttcattagatgggcacgtcgcgaagcagtttacttcttctttaagtcgtcaa

SEQ ID NO: 69485 - DNA, 75 bp, synthetic construct
  source 1..75: mol_type = other DNA
taaaaaaagcgaagaggctttcgtttcagtatttaatatcatccaacagtcagcagaaggttgggtaagtaaatt

SEQ ID NO: 69486 - DNA, 75 bp, synthetic construct
  source 1..75: mol_type = other DNA
agccgggggccggaaatggcgaaccggtcacggcagaggtactggcacagcggcaggctgaagaggccatccgcc

SEQ ID NO: 69487 - DNA, 75 bp, synthetic construct
  source 1..75: mol_type = other DNA
ccgcgaaaccgtaaaaaatgaccagacggtcacgatccaggaaggtaaccgccttcttacggtggaaaaaggcca

SEQ ID NO: 69488 - DNA, 75 bp, synthetic construct
  source 1..75: mol_type = other DNA
atggttgccgtaaatcatataccacaccttgtacacacacaaacggcctttgtgtggcgttttctggccctgaat

SEQ ID NO: 69489 - DNA, 75 bp, synthetic construct
  source 1..75: mol_type = other DNA
tctggctgaacgtttgttagaaactgaagagagcgtgcgccgcgacgtggcgcgtgagctgcacgatgatatcgg

SEQ ID NO: 69490 - DNA, 75 bp, synthetic construct
  source 1..75: mol_type = other DNA
cggcttcgggcggacgctggcctttcaccgggcggcggagggtgatgtggcgggcgcggtgacgggggtgacgga

SEQ ID NO: 69491 - DNA, 75 bp, synthetic construct
  source 1..75: mol_type = other DNA
agcgcgaggggcatatccaacaacaaatggggggaataaatgcccgcgcaaaagttgctggcctgatgatgcgcc

SEQ ID NO: 69492 - DNA, 75 bp, synthetic construct
  source 1..75: mol_type = other DNA
tcgaaaagcacctcgtcgctgaagtgaaaaaagctggcggagtggcctttaagtttgtatctcccggtcaccgct

SEQ ID NO: 69493 - DNA, 75 bp, synthetic construct
  source 1..75: mol_type = other DNA
gtggataaacaaaccttgcaggaaacagtgagccagattctggatgagatgcgtgagcgccctatccctctgggt

SEQ ID NO: 69494 - DNA, 75 bp, synthetic construct
  source 1..75: mol_type = other DNA
ctgggatttgctggcggaagagaagatgactgggagtcggacctggtatactgggggcctgacaacaagcctctt

SEQ ID NO: 69495 - DNA, 75 bp, synthetic construct
  source 1..75: mol_type = other DNA
gaacactgaaagacgtggttgagctatggttcaaactacatggtaaatcactgactgctgggcagcatgtctatg

SEQ ID NO: 69496 - DNA, 75 bp, synthetic construct
  source 1..75: mol_type = other DNA
aggtctgatcctgccgaagttcctcggcaatcttgagcgcccaacgccatcattcctgaaagcagatcaaccggt

SEQ ID NO: 69497 - DNA, 75 bp, synthetic construct
  source 1..75: mol_type = other DNA
gatagcacctgaagcacgtggtaaaactatgctgtttggacactggcttgatagtaaagaaatcccagacccata

SEQ ID NO: 69498 - DNA, 75 bp, synthetic construct
  source 1..75: mol_type = other DNA
gagcgggagagttagtcctcaatgccgacaataatgcgtttaccggcgagatgagtatccagaatggcgaggtga

SEQ ID NO: 69499 - DNA, 75 bp, synthetic construct
  source 1..75: mol_type = other DNA
taacttacagcaggagccaaaagatgtaacttcgttacctcatcatatatcagaaaataacaatagaaatttaac

SEQ ID NO: 69500 - DNA, 75 bp, synthetic construct
  source 1..75: mol_type = other DNA
gatccgattcacgcatcgaccagcgcaataggcctggatgcaggtataacgaagctggcaacactttcagacggc

SEQ ID NO: 69501 - DNA, 75 bp, synthetic construct
  source 1..75: mol_type = other DNA
atgcccagcagatgatcatttacgcctttgctgccgaactgacggaagcactgcgtgatgaggggcttaaacagc

SEQ ID NO: 69502 - DNA, 75 bp, synthetic construct
  source 1..75: mol_type = other DNA
tgggacacgaaatttgacgttacctatgattcgtcgtttacatgcccagtttggtattccactggaaagtctggt

SEQ ID NO: 69503 - DNA, 75 bp, synthetic construct
  source 1..75: mol_type = other DNA
acaaagtgaaaacagtaataatcagccggaaattaacggttctggtagtaccgaactaatttcttggcctataaa

SEQ ID NO: 69504 - DNA, 75 bp, synthetic construct
  source 1..75: mol_type = other DNA
atgcaggatggcagtaataagcatcgtcccggctacgacctgaccttctccgcccccaaaagtgtctccatgatg

SEQ ID NO: 69505 - DNA, 75 bp, synthetic construct
  source 1..75: mol_type = other DNA
atgacggacggacagtcagaaacggtgctgaccggtaatctggtgatggcgctttttaatcacgacaccagtcgc

SEQ ID NO: 69506 - DNA, 75 bp, synthetic construct
  source 1..75: mol_type = other DNA
ctatgcccgctcgggtctgctgatgaacgatgccgcatccggcagcaaaagtggtccgtatctgacgcctgccgg

SEQ ID NO: 69507 - DNA, 75 bp, synthetic construct
  source 1..75: mol_type = other DNA
gctgcttgaacagtatcaccgtgccggacagcaacgtctggctgccgtacagcgggccatgcagcagggggccgc

SEQ ID NO: 69508 - DNA, 75 bp, synthetic construct
  source 1..75: mol_type = other DNA
agccgggagccggaaatggcgaaccggtcacggcagaggtgctggcacagcggcaggctgaagaggccatccgcc

SEQ ID NO: 69509 - DNA, 75 bp, synthetic construct
  source 1..75: mol_type = other DNA
ctggagtcaagttcagaaagtgccagggtgcagccgtggcacaatcagtagcgcaataaaacgtaaatccgggct

SEQ ID NO: 69510 - DNA, 75 bp, synthetic construct
  source 1..75: mol_type = other DNA
taaccgacagcgggcagcgaaccggtacaggcagtgcgctgatggccatgaaggatgccggggtgaacacatatc

SEQ ID NO: 69511 - DNA, 75 bp, synthetic construct
  source 1..75: mol_type = other DNA
ataccttgcagggatttgaagaactgaaagaactggttaaaggaagtaaggtaaaacttattgtctggataaatg

SEQ ID NO: 69512 - DNA, 75 bp, synthetic construct
  source 1..75: mol_type = other DNA
agctacgtcgctggacatacgctggtggtaagcaatggaaaggtctcatgactcgccgtgagattgagcgtgaag

SEQ ID NO: 69513 - DNA, 75 bp, synthetic construct
  source 1..75: mol_type = other DNA
cctttacggtggtttctgagcagataaaggcgcgtgccggtgagacattgctggaaaccgctatcagtctgcaga

SEQ ID NO: 69514 - DNA, 75 bp, synthetic construct
  source 1..75: mol_type = other DNA
gagcagccgcaggcggtgccgggacgcagtggttcaggtaccacgctgaataaccactttgcggtaataccggca

SEQ ID NO: 69515 - DNA, 75 bp, synthetic construct
  source 1..75: mol_type = other DNA
tttgagcggtgcggatatgtggggagccaccatgtttgaccagctggtgtgccgcgtgatgttccaccagatgcg

SEQ ID NO: 69516 - DNA, 75 bp, synthetic construct
  source 1..75: mol_type = other DNA
aaggatgccggggtgaacacatatcgctggcaggggggagaacagcgaccggccaccatcatcagtgaaccggac

SEQ ID NO: 69517 - DNA, 75 bp, synthetic construct
  source 1..75: mol_type = other DNA
caccgaaaccgatgcgccggagtccggcgagttccgggtgcgcgcgcggacggcaacgtttggcggcgctaacgg

SEQ ID NO: 69518 - DNA, 75 bp, synthetic construct
  source 1..75: mol_type = other DNA
aatccctggggggctgattttgattatgccaccagatttcaacagctggatatggaggctctgaaaaaagatatc

SEQ ID NO: 69519 - DNA, 75 bp, synthetic construct
  source 1..75: mol_type = other DNA
gtccggctgtattcctcactggatgaaacccgtactgcggaaaaacttgcccgccatccctcctttacggtggtt

SEQ ID NO: 69520 - DNA, 75 bp, synthetic construct
  source 1..75: mol_type = other DNA
gtcagaaaataaagagtttagtctggaaaatccgggaaaggccggtggcaggcgacgatgaagcattaattaaaa

SEQ ID NO: 69521 - DNA, 75 bp, synthetic construct
  source 1..75: mol_type = other DNA
aaagtaaaaagattaaatgctgatttaatacaaatcactgaaaacagcaaagtagtccaatctaaattcgatcca

SEQ ID NO: 69522 - DNA, 75 bp, synthetic construct
  source 1..75: mol_type = other DNA
atggtgtatgaaatttacggtatgtggattgatgacatgaacgacgaacagatagccatgttgaatgcgcggtta

SEQ ID NO: 69523 - DNA, 75 bp, synthetic construct
  source 1..75: mol_type = other DNA
tgtgcgaaaccttcgccaataaaggcgtgctcaatctgcaaagcaatatgccggacaccaaaccgggtctgtatg

SEQ ID NO: 69524 - DNA, 75 bp, synthetic construct
  source 1..75: mol_type = other DNA
tggcagacgatgcgcggcgtatccgggcggcgctgaccaccaccggtcagacgttgctgacccgccagacgcgcc

SEQ ID NO: 69525 - DNA, 75 bp, synthetic construct
  source 1..75: mol_type = other DNA
tagctaatgaatcgcatccgattgatggcctgtccggtgaatatgcagagaaatcccttgaagaatgggcggaac

SEQ ID NO: 69526 - DNA, 75 bp, synthetic construct
  source 1..75: mol_type = other DNA
atatctatgccgcaggtaatagtggtgacttgcaggtaacgatcaaagaggctgacggcagcacgcagattttta

SEQ ID NO: 69527 - DNA, 75 bp, synthetic construct
  source 1..75: mol_type = other DNA
cttgatgaaaatatcccgctgatgatgtccgattatctgatggaaacaaccggaaacgtaccggagaaattacgg

SEQ ID NO: 69528 - DNA, 75 bp, synthetic construct
  source 1..75: mol_type = other DNA
acggatgccgccggttttatggcgcggatggataccgttctgcagatgtacggagggaaaaaaggtgcgaaataa

SEQ ID NO: 69529 - DNA, 75 bp, synthetic construct
  source 1..75: mol_type = other DNA
tggcctgtccggtgaatatgcagagaaatcccttgaagaatgggcggaacggcttcgcaaaggaggcagccagtg

SEQ ID NO: 69530 - DNA, 75 bp, synthetic construct
  source 1..75: mol_type = other DNA
atgaacgaaaaaataaaatacggcctgtcggctgccgttctggcgctgattggtgcaggtgcttctgcgcctgaa

SEQ ID NO: 69531 - DNA, 75 bp, synthetic construct
  source 1..75: mol_type = other DNA
aggggcgggaggtgcagattatcgccgctgaccgtcgctcgcagatgaacctgaagcaggatgaacggctgtccg

SEQ ID NO: 69532 - DNA, 75 bp, synthetic construct
  source 1..75: mol_type = other DNA
gcgaggacgaacagggcacattccccgattacctgcaggcccggcacggctggaaacaggccacatggctggcca

SEQ ID NO: 69533 - DNA, 75 bp, synthetic construct
  source 1..75: mol_type = other DNA
gttgctgacaacctcccacagatactggctgattatctgatggaaagtacaggaaacgtaccggataagttgcag

SEQ ID NO: 69534 - DNA, 75 bp, synthetic construct
  source 1..75: mol_type = other DNA
ccgataaccgtcagggctggacggatgccattaacaatgccgtacagaaaggaactgcccacgatgtgtttgagc

SEQ ID NO: 69535 - DNA, 75 bp, synthetic construct
  source 1..75: mol_type = other DNA
gcgacgttacttatcagccgccatgatggcgtgctgccgccggtcctggcgtctgccatgcaaaaactgaccgga

SEQ ID NO: 69536 - DNA, 75 bp, synthetic construct
  source 1..75: mol_type = other DNA
catgaaggtatgcccaccgctgtggcgcacagggctgcgccagaacttccgtatcttccagaatgaggacatcga

SEQ ID NO: 69537 - DNA, 75 bp, synthetic construct
  source 1..75: mol_type = other DNA
tgtggctggattatctggacgcactggaactggttgatacctccagtgcgccagatattgaatggcctacgcctc

SEQ ID NO: 69538 - DNA, 75 bp, synthetic construct
  source 1..75: mol_type = other DNA
atgaacgcaaaaatcagatacggcctgtcggctgccgttctggcgctgattgccgctggtgcgcctgcgcctgac

SEQ ID NO: 69539 - DNA, 75 bp, synthetic construct
  source 1..75: mol_type = other DNA
aacaatgtgttgatgatgaccggggttagcccgtcaattggtaaaacctttgtctgcgccaacctggcggcggtg

SEQ ID NO: 69540 - DNA, 75 bp, synthetic construct
  source 1..75: mol_type = other DNA
cttcaaccagcctgcaatgaaatgtaccgcgtgctcaaaaaagacgcgctgatggtcagcttctacggctggaac

SEQ ID NO: 69541 - DNA, 75 bp, synthetic construct
  source 1..75: mol_type = other DNA
tcaatcgcgaatgattttgggaaaaacagtagatgatctaaatcttcaagctagagtgaaagagaagtattttcc

SEQ ID NO: 69542 - DNA, 75 bp, synthetic construct
  source 1..75: mol_type = other DNA
cgtcgaaagatgctgagggtattgatttaggtcatcttattggtgagtttatagatcatcgaaagctgattatat

SEQ ID NO: 69543 - DNA, 75 bp, synthetic construct
  source 1..75: mol_type = other DNA
gactgtagatggcaaccaaaaagtggatgaacgaggtacaacaaataacactcatattatcaaccatggccagca

SEQ ID NO: 69544 - DNA, 75 bp, synthetic construct
  source 1..75: mol_type = other DNA
cgtcaacaagtgccgggcaggcctcagccagtgccaccgccgccggaaaatcggcagaaagcgccgcatcatccg

SEQ ID NO: 69545 - DNA, 75 bp, synthetic construct
  source 1..75: mol_type = other DNA
ttatctctggttgaaagaaaataacatctatgacactgttatttcttgtgagtggcaggcagatctttattacac

SEQ ID NO: 69546 - DNA, 75 bp, synthetic construct
  source 1..75: mol_type = other DNA
ggctgatcggggtcgatgctattcgtggtgcggcaatgagagtaatcggtaacaagtttggtagctcgaaggagt

SEQ ID NO: 69547 - DNA, 75 bp, synthetic construct
  source 1..75: mol_type = other DNA
ctgatcggtgtcgatgctattcgtggggctgcaatgcgagtaatcggtaacaaatttggtggctctaaggagtaa

SEQ ID NO: 69548 - DNA, 75 bp, synthetic construct
  source 1..75: mol_type = other DNA
tgaaaacgggcttactcgtggcgaacaaatggaactagcacgaattgcactggcatcactggaacgcgaacagat

SEQ ID NO: 69549 - DNA, 75 bp, synthetic construct
  source 1..75: mol_type = other DNA
atgactattgcagaacgtcttatacagaaaggtttcgacgaaggttttaaagaaagttttaaagaaggctttaaa

SEQ ID NO: 69550 - DNA, 75 bp, synthetic construct
  source 1..75: mol_type = other DNA
atgacgattgcagaacgtcttatacagaaaggtttcgacgaaggttttaagaaaggtgcgcttgaagtggcgcgg

SEQ ID NO: 69551 - DNA, 75 bp, synthetic construct
  source 1..75: mol_type = other DNA
gcacgcccacccgttatggcggataacttcggggcgctgaaagaggctgtaaaccgcactcatgcggtgatgggg

SEQ ID NO: 69552 - DNA, 75 bp, synthetic construct
  source 1..75: mol_type = other DNA
ccccttttaacgtgtctgacggaacaggaacaaagcaaattagtcactcttgccgaacgttttttacagcaaaag

SEQ ID NO: 69553 - DNA, 75 bp, synthetic construct
  source 1..75: mol_type = other DNA
accgccagtcagagatataccgccgtcagggtgtggagctgagccgtgccacactggggcgctggactggtgccg

SEQ ID NO: 69554 - DNA, 75 bp, synthetic construct
  source 1..75: mol_type = other DNA
ctgtccggtgaaataaccggctatgcccgcgagatcggctcactcagggcgctggtcgctaaactacagagaatg

SEQ ID NO: 69555 - DNA, 75 bp, synthetic construct
  source 1..75: mol_type = other DNA
tattaagaagtctatgtaaagcatatatacacgggcacagtgctggtggtactaatccctctttagttgaagcaa

SEQ ID NO: 69556 - DNA, 75 bp, synthetic construct
  source 1..75: mol_type = other DNA
atgtgggtcagcatcgttaaagattatgtcgtgccgatcctttcggcgacagcaaccgctggcgggatattcatg

SEQ ID NO: 69557 - DNA, 75 bp, synthetic construct
  source 1..75: mol_type = other DNA
gcgctgatgcgcaaaacctttgtcccccgcgaggcctttgaaaaactctccgaccgggttgagcgggtggagagc

SEQ ID NO: 69558 - DNA, 75 bp, synthetic construct
  source 1..75: mol_type = other DNA
agtccgatgttgctcatatcaaacgagacgttgatgaacttaaaacagacgttaaagctatcgacaaaaatatga

SEQ ID NO: 69559 - DNA, 75 bp, synthetic construct
  source 1..75: mol_type = other DNA
cataatggcgaccgcgaaggaatgcgggtatgccttaatttgtcccgagtcgaagtattaaatcagcgttatttt

SEQ ID NO: 69560 - DNA, 75 bp, synthetic construct
  source 1..75: mol_type = other DNA
cgcgaaaaagtgatgatcaacatagcagccatgaccgttgatgcgctttcagaatgcaatctaaaccttaattag

SEQ ID NO: 69561 - DNA, 75 bp, synthetic construct
  source 1..75: mol_type = other DNA
ttgaaaaagcgatactacacagtaaagcatgggacgctacgagcattacaagagtttgctgacaagcataacgtt

SEQ ID NO: 69562 - DNA, 75 bp, synthetic construct
  source 1..75: mol_type = other DNA
cgaaaccaccgaaaccaccgaaaccaccgaaaccaccgaaaaacagcatcccgccgacaaggaaaaagaacaatg

SEQ ID NO: 69563 - DNA, 75 bp, synthetic construct
  source 1..75: mol_type = other DNA
gctcttgttttttggcaattggtggacggcgaacctcctctatgtcggtctggccttgatgatcggggtgtcgat

SEQ ID NO: 69564 - DNA, 75 bp, synthetic construct
  source 1..75: mol_type = other DNA
gtccattattaccggttgcgggattacgccctgcagcatccggaatgcagcgccattatgcgcatcatcgactga

SEQ ID NO: 69565 - DNA, 75 bp, synthetic construct
  source 1..75: mol_type = other DNA
gcctggtcagtatcggtcagggacaacactctgtttctgcgtccaaaagcagaagaaccggatacaaacgttacc

SEQ ID NO: 69566 - DNA, 75 bp, synthetic construct
  source 1..75: mol_type = other DNA
cccgtcgcagggaatgttgtccagttttgtcccgacggatagccagattatcggtcaggtttataagtgcccgaa

SEQ ID NO: 69567 - DNA, 75 bp, synthetic construct
  source 1..75: mol_type = other DNA
gagttgctgcttatcatactcacggtgcagatagtcatggcgattatgttgatgaatttttttcaagtagcgata

SEQ ID NO: 69568 - DNA, 75 bp, synthetic construct
  source 1..75: mol_type = other DNA
cggctcactggtaaccggtcccggaaccggaagtgctttacttcctgaccgtaagctatccggctgtgaccatct

SEQ ID NO: 69569 - DNA, 75 bp, synthetic construct
  source 1..75: mol_type = other DNA
gtggagccggaatacacaccggcgcgaaaagctcatctttatcactgcgaccaccggggactgccgctggcgctt

SEQ ID NO: 69570 - DNA, 75 bp, synthetic construct
  source 1..75: mol_type = other DNA
acgccgtgttgtccctggtgaaagacggcgcaactgatggtgttcagatcgacccgacgctgttttcacagtacg

SEQ ID NO: 69571 - DNA, 75 bp, synthetic construct
  source 1..75: mol_type = other DNA
gccgaattgcatgggggaagtgctacgtatcactattttaataagcataatgtgttccgaattacgttaccgcaa

SEQ ID NO: 69572 - DNA, 75 bp, synthetic construct
  source 1..75: mol_type = other DNA
acgaagcgcaggccagcaccctgaaaagtaccgtcgacaccctgaatatcatcagcgccggggtacaggatatgc

SEQ ID NO: 69573 - DNA, 75 bp, synthetic construct
  source 1..75: mol_type = other DNA
tgactgaacagcgcggttttgacggccggacgcaacgttaccactatgacctgaccagaaaactcacacagagtg

SEQ ID NO: 69574 - DNA, 75 bp, synthetic construct
  source 1..75: mol_type = other DNA
ttatcctgcgccatttgtggtcgatgatgaatgggaagacgatatcggtctggtgcataaccaacgtattgttca

SEQ ID NO: 69575 - DNA, 75 bp, synthetic construct
  source 1..75: mol_type = other DNA
tcgctttccttctgattgccggatggggaacatccatgcgtctgtcgtggtcgctgggccgggagaacgccagaa

SEQ ID NO: 69576 - DNA, 75 bp, synthetic construct
  source 1..75: mol_type = other DNA
gcacggtcgcacacgccagaaccagcgcctatgaagctccatcggttaaacgctcatggtatcagtgccagaatc

SEQ ID NO: 69577 - DNA, 75 bp, synthetic construct
  source 1..75: mol_type = other DNA
aagcactgggttgcgttgtgcaacttctgtgatgacggtctggcggaggcggacaataacacagcggaaagagcg

SEQ ID NO: 69578 - DNA, 75 bp, synthetic construct
  source 1..75: mol_type = other DNA
tacgatccgttgcaggggcggtatatcacccaggatccgatagggttgaaggggggaataaatctatacacgtat

SEQ ID NO: 69579 - DNA, 75 bp, synthetic construct
  source 1..75: mol_type = other DNA
ttcccaagctgactcgctgattaaaatttcgcggatctgggccgatttttttcccgcaaacacatcgaatcagcc

SEQ ID NO: 69580 - DNA, 75 bp, synthetic construct
  source 1..75: mol_type = other DNA
cccgggaatgacggcgctgtgggagcaggctctggatgatattgcacagggcagaatgtcactggatacctttat

SEQ ID NO: 69581 - DNA, 75 bp, synthetic construct
  source 1..75: mol_type = other DNA
gcgagaggttcatgctgcagagtctttgctggccccaggagcaaaattcagcgacaggcttggacactccggaga

SEQ ID NO: 69582 - DNA, 75 bp, synthetic construct
  source 1..75: mol_type = other DNA
taagcaaaagcacgccggatgtcgaaacgcccagcctgaaaccgctctggcgggagctaagccgggtggtgcagc

SEQ ID NO: 69583 - DNA, 75 bp, synthetic construct
  source 1..75: mol_type = other DNA
ttatgtattgatcagttgatgccaagagtgttggaagttctaactaaagagccgttagcgggtgaatattacgat

SEQ ID NO: 69584 - DNA, 75 bp, synthetic construct
  source 1..75: mol_type = other DNA
accagtacccggcaccgggtattccgggggcgtttgccagtgctaaccctcatgcctcgtatgtggcgggagatg

SEQ ID NO: 69585 - DNA, 75 bp, synthetic construct
  source 1..75: mol_type = other DNA
ttattttccctcaagcagtcgtaaagctgaggcagccaaaaaatatcaaactgaagatttcttcaaccaggttga

SEQ ID NO: 69586 - DNA, 75 bp, synthetic construct
  source 1..75: mol_type = other DNA
tggcaaaatacctctttgagtcagagaagaatgcgctctcttttgattataaagagcgtaaggatttaaaaacct

SEQ ID NO: 69587 - DNA, 75 bp, synthetic construct
  source 1..75: mol_type = other DNA
ccatgttcgtgatggctatgtgttcaatatgccacgctaatagcggtgttggacgtacatattcattcgattcaa

SEQ ID NO: 69588 - DNA, 75 bp, synthetic construct
  source 1..75: mol_type = other DNA
tagcattgatgcgccagggttaaccagttgggctgatgattggcacggcatcacgctgaaagatggcgttgaagt

SEQ ID NO: 69589 - DNA, 75 bp, synthetic construct
  source 1..75: mol_type = other DNA
aacgcttccagtattgatgttagccgctatagcgatggcaacccgactttgcctggtgtttacgatgttagcatc

SEQ ID NO: 69590 - DNA, 75 bp, synthetic construct
  source 1..75: mol_type = other DNA
aggacgaaaaagacaaggatttgccggagaaggtcgcggctgaaatccccgtaattatacgccgcttgctggcta

SEQ ID NO: 69591 - DNA, 75 bp, synthetic construct
  source 1..75: mol_type = other DNA
gatgcaaatttttatcctgagggtatgcacggccaggaggtgcagaactggcgcgaatatctggcccgtgaacgc

SEQ ID NO: 69592 - DNA, 75 bp, synthetic construct
  source 1..75: mol_type = other DNA
gtttggcggtgaaataaaacccgtcaataaagatattgttgatgggttaatgaagatttacccggaccctgtgct

SEQ ID NO: 69593 - DNA, 75 bp, synthetic construct
  source 1..75: mol_type = other DNA
ctgcgtctggattaacccctatatcgggcaaaaatcccctgtctttaaagagttacaagagaaaggctatttact

SEQ ID NO: 69594 - DNA, 75 bp, synthetic construct
  source 1..75: mol_type = other DNA
tattgccgaaccaatgggcgagccgtccggcgatttgctgccgttcgccaatggtgcgcttgacctgaaaacggg

SEQ ID NO: 69595 - DNA, 75 bp, synthetic construct
  source 1..75: mol_type = other DNA
tacagagctcctgagaatctttagagaacaaagaagcgctgaagaaccaaagcttactattgaagagtctacctc

SEQ ID NO: 69596 - DNA, 75 bp, synthetic construct
  source 1..75: mol_type = other DNA
ttaacgatgcccgcaatgaagtgaaaaacagcgtactggtcgataacggcgatttgattcaggggagtccactgg

SEQ ID NO: 69597 - DNA, 75 bp, synthetic construct
  source 1..75: mol_type = other DNA
cttttgcttagagcacaatgagctattaaataataggtttttatatttcgcactgattggttatcaaagtttgct

SEQ ID NO: 69598 - DNA, 75 bp, synthetic construct
  source 1..75: mol_type = other DNA
atgaaactgaaagctattatattggccaccggtcttattaactgtattgcgttttcagcacaggcagtggatacg

SEQ ID NO: 69599 - DNA, 75 bp, synthetic construct
  source 1..75: mol_type = other DNA
ggttacgccggatgatggcggaagctgtcatctctggcttggacggggcgtgccgcctgtccttaatcgtcgccg

SEQ ID NO: 69600 - DNA, 75 bp, synthetic construct
  source 1..75: mol_type = other DNA
tagggattacccagcgttatctgcacacattcccactttccaccgtttgttatgtgatcgatggtctttgttggg

SEQ ID NO: 69601 - DNA, 75 bp, synthetic construct
  source 1..75: mol_type = other DNA
ttcacctaccagctgcagatgggcgaccagattgaaattatcacccagaaacagccgaaccccagccgtgactgg

SEQ ID NO: 69602 - DNA, 75 bp, synthetic construct
  source 1..75: mol_type = other DNA
cgttatagttcaggcagcgtggtttgtgaaagcatcactggaagcgttgcctgaactgtcgcaggaggtgaatca

SEQ ID NO: 69603 - DNA, 75 bp, synthetic construct
  source 1..75: mol_type = other DNA
caattataggcactgtcggtatccctgcatgttatggtggctttgaatctctggttcaaaatcttatagacaatc

SEQ ID NO: 69604 - DNA, 75 bp, synthetic construct
  source 1..75: mol_type = other DNA
gcatttaaatttgtctgacttctctggcatatggaaagttattctatatttattaatatcaaaacaagtattaga

SEQ ID NO: 69605 - DNA, 75 bp, synthetic construct
  source 1..75: mol_type = other DNA
ttccttattcgtttttgatgctgccgttcagcacggtgttaaacgcgcgattcagatcctccaggcggcagcagg

SEQ ID NO: 69606 - DNA, 75 bp, synthetic construct
  source 1..75: mol_type = other DNA
gtacaccgatagacgatgatcaaaaaaaagatggttattatttggggctttgtaggatagagcctgagaataata

SEQ ID NO: 69607 - DNA, 75 bp, synthetic construct
  source 1..75: mol_type = other DNA
ttcagcatttgttaattcagctttaaataaaatatcaattgctgcatctacaggaaatccaaatgaaattgcaaa

SEQ ID NO: 69608 - DNA, 75 bp, synthetic construct
  source 1..75: mol_type = other DNA
agatccattaggattagaaacactaaaatgcattaagccactgcattcaatgggcggaactggtgaaagaagcgg

SEQ ID NO: 69609 - DNA, 75 bp, synthetic construct
  source 1..75: mol_type = other DNA
tgccttttcgtgaaggtgagcgtcgtcgtcagaaaaccacgctgacagagcagaaatacagccgccagcgggaac

SEQ ID NO: 69610 - DNA, 75 bp, synthetic construct
  source 1..75: mol_type = other DNA
cgcaaaataatcttgggtggatgtacagaaatggcaacggagtcgcaaaagactatgcgctggcatttttctggt

SEQ ID NO: 69611 - DNA, 75 bp, synthetic construct
  source 1..75: mol_type = other DNA
tggagtggtgttttaatcaaagtatgcaatattctgatgatactacaaagataaagcatgcccgctccgtgatcg

SEQ ID NO: 69612 - DNA, 75 bp, synthetic construct
  source 1..75: mol_type = other DNA
tggcaatcaaaatcgaagattttgaaactgcatataaaactcttccagaggaaaaacatcgtttttcatcttact

SEQ ID NO: 69613 - DNA, 75 bp, synthetic construct
  source 1..75: mol_type = other DNA
cacggcggcgagcgtggagcactgctgtacgggctgatcggcacctgccgtctgaacggtatcgatccggaagcg

SEQ ID NO: 69614 - DNA, 75 bp, synthetic construct
  source 1..75: mol_type = other DNA
cggggcgtcatgtatcgctatcaggatgtgatgaaattctttaaatcaattggactactttctgacagcgatacc

SEQ ID NO: 69615 - DNA, 75 bp, synthetic construct
  source 1..75: mol_type = other DNA
gcgatacggcatcaggacggcgatgcggcagagcaggcggcgcttaccatgatcgccagctcgacacgaaggtta

SEQ ID NO: 69616 - DNA, 75 bp, synthetic construct
  source 1..75: mol_type = other DNA
attcgcggcaatcttcatctgaagcaggcgctggaaaaggtggtggggaagggcgagtgcagggatgaggcgcaa

SEQ ID NO: 69617 - DNA, 75 bp, synthetic construct
  source 1..75: mol_type = other DNA
aatggcggcagcagatgctgttcttaatgcggattactctgagctggcgcagtcaccgaaatttcagcagacgtt

SEQ ID NO: 69618 - DNA, 75 bp, synthetic construct
  source 1..75: mol_type = other DNA
ggggcgcgctgctgggtgggatttgatccttcgcgtggcgtggatagttctgccgtgtacggagtgcgtgcatga

SEQ ID NO: 69619 - DNA, 75 bp, synthetic construct
  source 1..75: mol_type = other DNA
tcggggctttgaagcagaccagcttgatctggagctggacgatgccgacgggaaaatcgtgctgccgcgccgtgg

SEQ ID NO: 69620 - DNA, 75 bp, synthetic construct
  source 1..75: mol_type = other DNA
ccgtgaaaaatcgtggcacaagaccaccattggggaagtggtgaaggagatagccgcgcggcacaagctgaagat

SEQ ID NO: 69621 - DNA, 75 bp, synthetic construct
  source 1..75: mol_type = other DNA
ggcactgggtaaagacctgtcagataaacccgtggagcatatagaccagactaatgagagtgacggcagttttct

SEQ ID NO: 69622 - DNA, 75 bp, synthetic construct
  source 1..75: mol_type = other DNA
ttgtccgttataaacgatcagtttggcgcaccgacgggagcggaattgctagcagattgtacggcacatgctatt

SEQ ID NO: 69623 - DNA, 75 bp, synthetic construct
  source 1..75: mol_type = other DNA
atgcgtcagtgggtgttgagcttcccgtttcagctgcgtttcctgtttgccagccggcccgagatcatggggtgg

SEQ ID NO: 69624 - DNA, 75 bp, synthetic construct
  source 1..75: mol_type = other DNA
ttgatgtctggtgacctggtgattgtcacccagggcgacgtgatgagtaccgtgggttctactaataccacgcgt

SEQ ID NO: 69625 - DNA, 75 bp, synthetic construct
  source 1..75: mol_type = other DNA
atgagcaccatcctgaaatgggcgggaaataaaaccgccattatgccagaactgaaaaaataccttcctgctggc

SEQ ID NO: 69626 - DNA, 75 bp, synthetic construct
  source 1..75: mol_type = other DNA
gtgagaccctcatgattggggatgaggtcaccgtgacagttttaggggtaaagggcaaccaggtacgtattggcg

SEQ ID NO: 69627 - DNA, 75 bp, synthetic construct
  source 1..75: mol_type = other DNA
gggtacggatgaaaacgtgttggtacttaatcgcacctatgccaaccggggcaacgccgagcgggcagcgaaaat

SEQ ID NO: 69628 - DNA, 75 bp, synthetic construct
  source 1..75: mol_type = other DNA
ttgcgacaatgagtaaccctatgattctggcgggtttaaaaaccggggaaatcgatatcggcattggtcggatgt

SEQ ID NO: 69629 - DNA, 75 bp, synthetic construct
  source 1..75: mol_type = other DNA
caaacaggccagcgatgacgcccgtctgaatgacgtgcatgaagcggtgaccgctgttgctgaacatgtgcagga

SEQ ID NO: 69630 - DNA, 75 bp, synthetic construct
  source 1..75: mol_type = other DNA
gagcggtatcgcgctgttagtggttggcgtggtcattgcagtcagagcaaaaccggaaaaacctttaactgaatc

SEQ ID NO: 69631 - DNA, 75 bp, synthetic construct
  source 1..75: mol_type = other DNA
ggaaatgccagtgaaagttagtggctttaaacaaccgatagatgatgcggaatggaccattacgactctgacgca

SEQ ID NO: 69632 - DNA, 75 bp, synthetic construct
  source 1..75: mol_type = other DNA
accgaaagtctgacccagcagcgccgcagtaaagccaccggcggtggcggtgacgccctgatgacgaactgctga

SEQ ID NO: 69633 - DNA, 75 bp, synthetic construct
  source 1..75: mol_type = other DNA
gaaaaagcccagcgggcaacatttatctgcgccagcttcgatgaaacgctggcaatgttgcacgcgggagatgtg

SEQ ID NO: 69634 - DNA, 75 bp, synthetic construct
  source 1..75: mol_type = other DNA
aaattcagccgaactttgccaacaccggcaaatgttatctggtgggtctggccgtcaccgatgacccggcaagcc

SEQ ID NO: 69635 - DNA, 75 bp, synthetic construct
  source 1..75: mol_type = other DNA
cactttgcaaactctgccgaccagtggtgatccgttcggtgacgggattggcaaggtagccgggtccagcctgca

SEQ ID NO: 69636 - DNA, 75 bp, synthetic construct
  source 1..75: mol_type = other DNA
acagaagttgcgtgctgggcccatgcccgcaggggcttcgccgacctgtataaaatcagtaaagatccacgggct

SEQ ID NO: 69637 - DNA, 75 bp, synthetic construct
  source 1..75: mol_type = other DNA
cagtagccgccccgtggaaaaaatccgccagtggcgacagcgttatgcccgtccgatactggaagatctgtggtc

SEQ ID NO: 69638 - DNA, 75 bp, synthetic construct
  source 1..75: mol_type = other DNA
gtcgggagtatcggcagcgccattggaggtgctaccggtggcggctcatcagcgtcaggtggtgcagccattcag

SEQ ID NO: 69639 - DNA, 75 bp, synthetic construct
  source 1..75: mol_type = other DNA
tgaaaaagaaattcgcgcatttgcagagaaagcccagcgggcaacgtttatctgcgcgagctttgatgaaacgct

SEQ ID NO: 69640 - DNA, 75 bp, synthetic construct
  source 1..75: mol_type = other DNA
tacagaaaagtttcagcagaactttgcgcttgtcttgcctgactggcaggtgggtgtgaaacgaatgctcaacga

SEQ ID NO: 69641 - DNA, 75 bp, synthetic construct
  source 1..75: mol_type = other DNA
cttgggttgtctggtgagacactggttcttggttctgccacaacagtaacaggaacaaaatttgggggggcgtta

SEQ ID NO: 69642 - DNA, 75 bp, synthetic construct
  source 1..75: mol_type = other DNA
tgcctatctcgccagcctgaaggagattcaggataacgattacaacctcaatattccgcgctatgtcgatacttt

SEQ ID NO: 69643 - DNA, 75 bp, synthetic construct
  source 1..75: mol_type = other DNA
atgagcaccatcctgaaatgggcgggaaataaaaccgccattatgtccgaactgaaaaaacaccttcctgctggc

SEQ ID NO: 69644 - DNA, 75 bp, synthetic construct
  source 1..75: mol_type = other DNA
ttctattatggattagttgtcacattcagaaaccaaaaaaagaactgtaagtcgcaatttgttgatggtaaattc

SEQ ID NO: 69645 - DNA, 75 bp, synthetic construct
  source 1..75: mol_type = other DNA
gcgtcctgatcttgctaaactaacagacagtgagttgttagagtctgttattaatcctaagtctggtgatcgagt

SEQ ID NO: 69646 - DNA, 75 bp, synthetic construct
  source 1..75: mol_type = other DNA
atggcaactccctgcaccacttgccgatcatcaataccggttgcagcaggcaattgatcaacatgcgcacaacac

SEQ ID NO: 69647 - DNA, 75 bp, synthetic construct
  source 1..75: mol_type = other DNA
gcaggttcgagatctgatgaccaaatatcctggtcaattagagaaaattcagtctggtatgaagtgggcagacga

SEQ ID NO: 69648 - DNA, 75 bp, synthetic construct
  source 1..75: mol_type = other DNA
gataacgataccgggtttaaacaaaatggtgatggggtgctggatgcttatgctaatggtgtgcatgtattccgc

SEQ ID NO: 69649 - DNA, 75 bp, synthetic construct
  source 1..75: mol_type = other DNA
cttcgtgatgcggtggctgatgaggttctggaaaacttattgcaggtttctccttcgcgctttgaagtcattgtt

SEQ ID NO: 69650 - DNA, 75 bp, synthetic construct
  source 1..75: mol_type = other DNA
attactaccttaatcggtggtttgcagataaaaactactacttcacgcagatctacggcgagcataaaaatacag

SEQ ID NO: 69651 - DNA, 75 bp, synthetic construct
  source 1..75: mol_type = other DNA
accagctgggtctatgcaggtaaaggaaataacttcgccaaaacaatgttgcgtctggcaaaagagcgtgaagaa

SEQ ID NO: 69652 - DNA, 75 bp, synthetic construct
  source 1..75: mol_type = other DNA
ctgaaaatgaaattaacaccatggctgaaaagctcggtgatgaatatcaccaaaaattcatgatgacgcttaacg

SEQ ID NO: 69653 - DNA, 75 bp, synthetic construct
  source 1..75: mol_type = other DNA
ttcgcggtgcagctctgctacctgcgctttcccggcgtcatccttggcgctgatgagccaccgttcccgccattg

SEQ ID NO: 69654 - DNA, 75 bp, synthetic construct
  source 1..75: mol_type = other DNA
gacacaacaaatgatataagcctgcgcaatacacaactgtccatgcagggacatgccactgaacatgccatttat

SEQ ID NO: 69655 - DNA, 75 bp, synthetic construct
  source 1..75: mol_type = other DNA
gcgtcaaagtgacccagcttgatgaagagttaggccatgttggactggcgcagccaggttcgcctaagcttatca

SEQ ID NO: 69656 - DNA, 75 bp, synthetic construct
  source 1..75: mol_type = other DNA
atgtgccgattgccatattccaaagtcagggatggattatttatttgctaaattaaaagcatctaaagatattta

SEQ ID NO: 69657 - DNA, 75 bp, synthetic construct
  source 1..75: mol_type = other DNA
gacactggagacctgggcggataaaacagggaaggcgttcaaatcgatgtgggatgccattctggatatcggtcg

SEQ ID NO: 69658 - DNA, 75 bp, synthetic construct
  source 1..75: mol_type = other DNA
gtacgggcagcgtgagcagacccgacgcgagcacctggtcgagctgcaaacggtgttcggcttccagccgttcac

SEQ ID NO: 69659 - DNA, 75 bp, synthetic construct
  source 1..75: mol_type = other DNA
ttacagcacgcattcatggtatgccggtgcagaagcgggctatcgctatcatgtcactgaggatacctggattga

SEQ ID NO: 69660 - DNA, 75 bp, synthetic construct
  source 1..75: mol_type = other DNA
gcgccatcgccgccagtcgaaagcgtattacaaacccgcgaccgacctggtgatgatgccgcacccgcagcagtt

SEQ ID NO: 69661 - DNA, 75 bp, synthetic construct
  source 1..75: mol_type = other DNA
cgcctgccggggcagcagtatgatgaggagtccggcctgtattacaaccgccaccgctattatgacccgctgcag

SEQ ID NO: 69662 - DNA, 75 bp, synthetic construct
  source 1..75: mol_type = other DNA
tggacagaatttaagactcactctggtaccaggaaaattgcagggaagacacaggaacgcctgaaaaaattaatc

SEQ ID NO: 69663 - DNA, 75 bp, synthetic construct
  source 1..75: mol_type = other DNA
aagtttctggcggcagctacgaatacttcgaaggcatgggcttgccagagctgatcagtgaagtgaaaaaggtgg

SEQ ID NO: 69664 - DNA, 75 bp, synthetic construct
  source 1..75: mol_type = other DNA
gcagcttgccggtggtcagaatccctggctaattctgctgcaacagggcgggcagattaaggactcgttcggtgg

SEQ ID NO: 69665 - DNA, 75 bp, synthetic construct
  source 1..75: mol_type = other DNA
acagcgtcctttggggatcggtaatgatttacctgctcttcggcgcaggttgttggttcacttttcgcaccggat

SEQ ID NO: 69666 - DNA, 75 bp, synthetic construct
  source 1..75: mol_type = other DNA
tgtattgttgaagcaccggcgccgtcccgcccgatagagcgtggtatcgcgggccccggattacttgcccgcgtg

SEQ ID NO: 69667 - DNA, 75 bp, synthetic construct
  source 1..75: mol_type = other DNA
ggcgacaaagtagcgtttaattttgtccagcagggcaacctttctttattacaggatattaaagtcagccagtaa

SEQ ID NO: 69668 - DNA, 75 bp, synthetic construct
  source 1..75: mol_type = other DNA
tccaacggttgtccaacgcaaacaccagtaatggcgcggctctcagcggagattgtccaacggttgtccaacggt

SEQ ID NO: 69669 - DNA, 75 bp, synthetic construct
  source 1..75: mol_type = other DNA
gtggggcaaaacctggtcgtggatctttcgacgcaaatcttttgccataacgattacccggaaaccattacagat

SEQ ID NO: 69670 - DNA, 75 bp, synthetic construct
  source 1..75: mol_type = other DNA
cagctgactggcgctcgcttgtttgagcgtggtcgtcagggggcgcaacttaccttacccggcgaacaattttta

SEQ ID NO: 69671 - DNA, 75 bp, synthetic construct
  source 1..75: mol_type = other DNA
taaaaatccctcaaaagaagagatcggaataatgcttgagtattccagggaaaagtttggtggtgtactcaaact

SEQ ID NO: 69672 - DNA, 75 bp, synthetic construct
  source 1..75: mol_type = other DNA
aggacatgaagattattttacgcccggagcagtatcaacagatgatgctggaattaaaagcagaacttcagggta

SEQ ID NO: 69673 - DNA, 75 bp, synthetic construct
  source 1..75: mol_type = other DNA
atgacattaccaacgactatttattcatttcctgcatattcaccccgtttttcgtccaccgacaaaccagtaaaa

SEQ ID NO: 69674 - DNA, 75 bp, synthetic construct
  source 1..75: mol_type = other DNA
ggcagtgcatatgaaggcgacagataaacgtctggaaattaacaaggtggcatctgtttacggtacggaaaacgg

SEQ ID NO: 69675 - DNA, 75 bp, synthetic construct
  source 1..75: mol_type = other DNA
caaatggaactggcacggattgcgctggcatcgctggaagcagagccagttggtgatttttatgaatacaaaccg

SEQ ID NO: 69676 - DNA, 75 bp, synthetic construct
  source 1..75: mol_type = other DNA
acaacggcctatcccacaccagcccgtcgaccccataactctcgcctcaatacagaaaagtttcagcagaacttt

SEQ ID NO: 69677 - DNA, 75 bp, synthetic construct
  source 1..75: mol_type = other DNA
gctgaatgtgctttggaactacattctgcgtcgcaagttccactcgccggctgaggctgaaaacgccgccagtca

SEQ ID NO: 69678 - DNA, 75 bp, synthetic construct
  source 1..75: mol_type = other DNA
cgtctctacgacgccttggctgagccgctgacggacgtgcatcgccgtcgcctcgacgatctgctcaagcgccgc

SEQ ID NO: 69679 - DNA, 75 bp, synthetic construct
  source 1..75: mol_type = other DNA
gtaaaaaggttgatagcttcggagactggtcaccacagggtgaacatccgctacatactattcagcgtcaagagc

SEQ ID NO: 69680 - DNA, 75 bp, synthetic construct
  source 1..75: mol_type = other DNA
cccaatgtaccaaatcaccaaaaacggcttcgttttcctggtgatgggcttcactggcaaaaaagccgctgcatt

SEQ ID NO: 69681 - DNA, 75 bp, synthetic construct
  source 1..75: mol_type = other DNA
caaaaagctattgaatccttacattcagaggcaagggccaataaaaacacgcaaagagccgtaaaacgcggttat

SEQ ID NO: 69682 - DNA, 75 bp, synthetic construct
  source 1..75: mol_type = other DNA
gtaatggctgctggtcctggcgggaaagatatcttcctgttaagcccggatgctggtgctaaaccaggccatcag

SEQ ID NO: 69683 - DNA, 75 bp, synthetic construct
  source 1..75: mol_type = other DNA
caggtttgagcgtggcaagctgtataatgatctgcgagagatgagacgcgagttgaagttaataccacgtgaaca

SEQ ID NO: 69684 - DNA, 75 bp, synthetic construct
  source 1..75: mol_type = other DNA
ccgtttcgatgagcagatgagccgggtaaggcgtcatttttcaggactggatactgacgccagaaaaaccgccgc

SEQ ID NO: 69685 - DNA, 75 bp, synthetic construct
  source 1..75: mol_type = other DNA
ggaaaaaattccgcgtcgccgtctcgggcaccaccatcgacgggcgtgagatttcggggctgatgttgcgtcagg

SEQ ID NO: 69686 - DNA, 75 bp, synthetic construct
  source 1..75: mol_type = other DNA
acgacttccgcgcccggggctggggctggctgggctcactggaaaccggtctgcccttcagtatcactgacaacc

SEQ ID NO: 69687 - DNA, 75 bp, synthetic construct
  source 1..75: mol_type = other DNA
acaaaatgcccaaaccgcaattgaagtagaagaaactattcgtaaacagggcgcagtaccagccactatcgccat

SEQ ID NO: 69688 - DNA, 75 bp, synthetic construct
  source 1..75: mol_type = other DNA
gggcaatggatacagaatggcgggatagccggaaacaccactgtcaccacaaatggtcgtcaggtcgtgctggag

SEQ ID NO: 69689 - DNA, 75 bp, synthetic construct
  source 1..75: mol_type = other DNA
taccccggcgttaaggggaaatgaggtcagcatggatactatcgatcttggcaacagcgaatctctggtatgtgg

SEQ ID NO: 69690 - DNA, 75 bp, synthetic construct
  source 1..75: mol_type = other DNA
ccaatctcaaacagggtgctttaaataatcttgcaatgacaactccggcttataatttatctcctgtgtttaatc

SEQ ID NO: 69691 - DNA, 75 bp, synthetic construct
  source 1..75: mol_type = other DNA
atacacaccggcgcgaaaagttcatttttaccactgcgaccaccggggcctgccgctggcgctcatcagcgaaga

SEQ ID NO: 69692 - DNA, 75 bp, synthetic construct
  source 1..75: mol_type = other DNA
ccatctgacacaaaaaccgtgaaaaccggcggccccaccacgcccgatgacgtcatacatgtgcgtacagcattg

SEQ ID NO: 69693 - DNA, 75 bp, synthetic construct
  source 1..75: mol_type = other DNA
cttaagctggcacgctaacggtctgtattatggcgtcggcgtcgagattgacctctggctgcacgctggattcga

SEQ ID NO: 69694 - DNA, 75 bp, synthetic construct
  source 1..75: mol_type = other DNA
gccgctgtatgaatcacgcctgaagggaaagctgcacgttatcagcaagcgttacactcagcgcattgagcgaca

SEQ ID NO: 69695 - DNA, 75 bp, synthetic construct
  source 1..75: mol_type = other DNA
attgcttacacatcagatggagttattgtggctataaataaagacgtatctacaataaatccagaaggtttaagt

SEQ ID NO: 69696 - DNA, 75 bp, synthetic construct
  source 1..75: mol_type = other DNA
agaccctgaccatatttttgaaattttacttgaagctgaagttgatgttcgtgatgtaactgaagaagaaggtaa

SEQ ID NO: 69697 - DNA, 75 bp, synthetic construct
  source 1..75: mol_type = other DNA
gtgccgtgaataaaacgccggaacgtgacctgtatcaactggtgaccgacaggattgtgacggccattgaaaatg

SEQ ID NO: 69698 - DNA, 75 bp, synthetic construct
  source 1..75: mol_type = other DNA
catgataaatatcagaattcgccgggcatcaccaaccgactggatgaaattatcgagctactcgggaaatactgc

SEQ ID NO: 69699 - DNA, 75 bp, synthetic construct
  source 1..75: mol_type = other DNA
atatcatcgataaacctgagaaacacattggtgagaatataggcatcaatcaacccgggactgatggtgataagc

SEQ ID NO: 69700 - DNA, 75 bp, synthetic construct
  source 1..75: mol_type = other DNA
gctgtccggcgatatccgggtgctgtcccagcgggtgcagtcattttcccatcaactggagctgctgcttgaaaa

SEQ ID NO: 69701 - DNA, 75 bp, synthetic construct
  source 1..75: mol_type = other DNA
aaatcagaaagggtgaatgtgcaggagctggccgggcatgagcaaagcgaagtggcggtattgcggcataacctg

SEQ ID NO: 69702 - DNA, 75 bp, synthetic construct
  source 1..75: mol_type = other DNA
cagggcaggtaggttgggaactacagcgtgctctggcacctttgggtaatttgattgctcttgatgttcactcca

SEQ ID NO: 69703 - DNA, 75 bp, synthetic construct
  source 1..75: mol_type = other DNA
gactctctgttacctctttcacggttgaatgccacccgtctgattgttcgtttcccggacggaacgcttattgat

SEQ ID NO: 69704 - DNA, 75 bp, synthetic construct
  source 1..75: mol_type = other DNA
agcgcactcaattccgcctggctgaatgaatccgccaccctgtttcgtcgcaagtattaccagaatggcgcgcac

SEQ ID NO: 69705 - DNA, 75 bp, synthetic construct
  source 1..75: mol_type = other DNA
gaggcaaacagcactttagtaatcaaaatgatgatgagaaaaaacaattacaaagttggatatgccttttccatc

SEQ ID NO: 69706 - DNA, 75 bp, synthetic construct
  source 1..75: mol_type = other DNA
aggtgaactacgcctatacgcacagaatcagacttcaggatggcaacgtatctatactggtaatgaaatggatag

SEQ ID NO: 69707 - DNA, 75 bp, synthetic construct
  source 1..75: mol_type = other DNA
ccgccggtcaacttctctggtctggcaaaaagcctgcgcgccgccgttcatcacagctcgccgatttacgtgaaa

SEQ ID NO: 69708 - DNA, 75 bp, synthetic construct
  source 1..75: mol_type = other DNA
aaaccggctcagtgaggtcaatcattgggtaggagaatcagtaatatgttttaaaaattacaaacttagcgatga

SEQ ID NO: 69709 - DNA, 75 bp, synthetic construct
  source 1..75: mol_type = other DNA
aaggacgggcttcagatcatcccattgtcagaagtcgcggcgaaggatgaatttcttaatatcaagaacgtgagt

SEQ ID NO: 69710 - DNA, 75 bp, synthetic construct
  source 1..75: mol_type = other DNA
gcaaacagaacaccgtaagcgcagagatgacatcactcgatgatgcaggagggcgtgcgcaggttgtcgggagtc

SEQ ID NO: 69711 - DNA, 75 bp, synthetic construct
  source 1..75: mol_type = other DNA
cagcgcagcaggtttttagttccgctaccccggcgttaaggggaaatgaggtcaacatggatacgctcaatcttg

SEQ ID NO: 69712 - DNA, 75 bp, synthetic construct
  source 1..75: mol_type = other DNA
tccttgatcaatgcttatgacaatgccttgcttgccaccgatgatttcatcgctcaaagtatccagtggctgcag

SEQ ID NO: 69713 - DNA, 75 bp, synthetic construct
  source 1..75: mol_type = other DNA
acttccgcgtccggggctggggctggctgggttcgctggaaaccggtctgcccttcagtatcactgacaatctga

SEQ ID NO: 69714 - DNA, 75 bp, synthetic construct
  source 1..75: mol_type = other DNA
gcttccgggcgcgtgatgcgggtgtggagggtgagctgctgtcaccgtcaaaattcgtggtgccggcacaggatg

SEQ ID NO: 69715 - DNA, 75 bp, synthetic construct
  source 1..75: mol_type = other DNA
gaatatttttacaatgactggcaaaaaattcgcatggtactggctgataaccaaaaagaggaagcaccagatctt

SEQ ID NO: 69716 - DNA, 75 bp, synthetic construct
  source 1..75: mol_type = other DNA
tataccgaattaccactcggatttaggttgtaaaaatagatccagaaacccagaattagaaagtagcaattcttt

SEQ ID NO: 69717 - DNA, 75 bp, synthetic construct
  source 1..75: mol_type = other DNA
cgaccgagttcatcaagccgcgctggcagaagctggtcatgaccgacaccggcatcgaccggcgctactacgaac

SEQ ID NO: 69718 - DNA, 75 bp, synthetic construct
  source 1..75: mol_type = other DNA
tggatcctattccgtaaattctcttctccggaggaagtcgaaaatgtggctgcgcagctgctggagtttgcgtga

SEQ ID NO: 69719 - DNA, 75 bp, synthetic construct
  source 1..75: mol_type = other DNA
tcaagaagaattccagattacagtacactacgttgatgaaggtggtaatattgaaatcgttattctaaatggtac

SEQ ID NO: 69720 - DNA, 75 bp, synthetic construct
  source 1..75: mol_type = other DNA
cttgccccggcacgacctacgccaagctggcttggctgcaagcctggcacatccgcgacgaaacctacggggcgg

SEQ ID NO: 69721 - DNA, 75 bp, synthetic construct
  source 1..75: mol_type = other DNA
acgaatctctggtgtacggcgtgttccccaaccagggcggtacgttcaccgcgatgacatataccaaaagcaaaa

SEQ ID NO: 69722 - DNA, 75 bp, synthetic construct
  source 1..75: mol_type = other DNA
tgacgggggtgacggacggcgcgggccgccgttttcacctggtgctgaccacacaggcacagcgggcggaagtat

SEQ ID NO: 69723 - DNA, 75 bp, synthetic construct
  source 1..75: mol_type = other DNA
accgtcagaaattccgacacaggataataaaacccaacagagcacgaattatacatcggtccccattgttccagt

SEQ ID NO: 69724 - DNA, 75 bp, synthetic construct
  source 1..75: mol_type = other DNA
gccggtgatcatctaccccaccgccgttcagggcgatgacgcgccggggcaaattgttcgcgccattgaactggc

SEQ ID NO: 69725 - DNA, 75 bp, synthetic construct
  source 1..75: mol_type = other DNA
atccgtgggaatttatgttgcgtgagatgttctccaccaagctggaggatgcaggcgtacgctggctggaaccgg

SEQ ID NO: 69726 - DNA, 75 bp, synthetic construct
  source 1..75: mol_type = other DNA
cgttagcgctgttaaccacatttacactggcgagtgaaactgctctggcgtatgagcaggataaaacctacaaaa

SEQ ID NO: 69727 - DNA, 75 bp, synthetic construct
  source 1..75: mol_type = other DNA
acaacgccatcacaggcacgcacgaagaagtgagctataacgcaccgcttccggcgttgaacgtgctctatcacc

SEQ ID NO: 69728 - DNA, 75 bp, synthetic construct
  source 1..75: mol_type = other DNA
cagatctttatgatcggcccttccgcgcacgaagtgggcgtgggctatcgctatgtgaatgaatcaacgcatgaa

SEQ ID NO: 69729 - DNA, 75 bp, synthetic construct
  source 1..75: mol_type = other DNA
ctggcgtggaaaaaatccgggccggaaatggccgcgctggagcgctggcttcacgagcatgaagggaagaccatc

SEQ ID NO: 69730 - DNA, 75 bp, synthetic construct
  source 1..75: mol_type = other DNA
ccataccctggcaaccggtccggttaatgaccttgaactggccctgttcccggatgaacacggtgatttgagtat

SEQ ID NO: 69731 - DNA, 75 bp, synthetic construct
  source 1..75: mol_type = other DNA
tgctggatgctaaccctgcctccactattggtgaggtattcgaaaaacccagaacgcagcacatggcctccatcc

SEQ ID NO: 69732 - DNA, 75 bp, synthetic construct
  source 1..75: mol_type = other DNA
tcgcctgctccccgaaaacaaccagggagggggttttgttgtcaccgtctggacgcgtggcggtaaccagctccg

SEQ ID NO: 69733 - DNA, 75 bp, synthetic construct
  source 1..75: mol_type = other DNA
aatcgctgggatgatggcaccgaatatccggatccgcactcagttacgcactggcgtgaaatgccagcagcaccg

SEQ ID NO: 69734 - DNA, 75 bp, synthetic construct
  source 1..75: mol_type = other DNA
atgatggcaccgaatatccggatccgcactcagttacgcactggcgtgaaatgccagcagcgccgaaacaggagg

SEQ ID NO: 69735 - DNA, 75 bp, synthetic construct
  source 1..75: mol_type = other DNA
ccgcaagaagaacttcccgtttcttcctgcagaccagatcccggcattcaacaaagcactggcaacattttcagg

SEQ ID NO: 69736 - DNA, 75 bp, synthetic construct
  source 1..75: mol_type = other DNA
ctaagctgtttttagttatgggtaacgcaatgcactctcttaaaacacttctacagttaccttgcggatggcgat

SEQ ID NO: 69737 - DNA, 75 bp, synthetic construct
  source 1..75: mol_type = other DNA
gatattttctcgtcaacatacctcatggatagtcccacttgttatcggaattatcatctttattgtcgcaccata

SEQ ID NO: 69738 - DNA, 75 bp, synthetic construct
  source 1..75: mol_type = other DNA
cccagaagatggtaaacctgaaaacatcctgaaaatcgtcaaagaatggcggcgttcgcaaggattgcctttgtt

SEQ ID NO: 69739 - DNA, 75 bp, synthetic construct
  source 1..75: mol_type = other DNA
aactgacggaactcactccacaacaatatcagtcctggtcgctgatgcgccgtttacaccctcagccccgagcta

SEQ ID NO: 69740 - DNA, 75 bp, synthetic construct
  source 1..75: mol_type = other DNA
ctgtttttgccatagtatccttcttatgtgtatacaacatcaggttgagttactcgcttttttcgaaagatttat

SEQ ID NO: 69741 - DNA, 75 bp, synthetic construct
  source 1..75: mol_type = other DNA
gccgagcgccggcgcctgggcaatctgctggagcaagcgttggacgaatctgccaaggccgcgctgagccagctt

SEQ ID NO: 69742 - DNA, 75 bp, synthetic construct
  source 1..75: mol_type = other DNA
atgaaacccaacagcacaggcattgctgcccgcatgatgctctccattgacagggtccggatttgcgaagctctg

SEQ ID NO: 69743 - DNA, 75 bp, synthetic construct
  source 1..75: mol_type = other DNA
atagccgaactggaggctaatttagcggagctggccgaagaccaacagaaagcgattgagtcaattaagcaggct

SEQ ID NO: 69744 - DNA, 75 bp, synthetic construct
  source 1..75: mol_type = other DNA
tctgccgcacggcacgacaatagaactgcccgaaaccgacagcgccccgaaaactgaaacggtgaatttatggga

SEQ ID NO: 69745 - DNA, 75 bp, synthetic construct
  source 1..75: mol_type = other DNA
ctttatcattggcgaagagttcattggtaacgacagctgtgcgttagtgctgggcgataatattttctacggcca

SEQ ID NO: 69746 - DNA, 75 bp, synthetic construct
  source 1..75: mol_type = other DNA
cgttatcagcaagcgttacactcagcgcattgagcgacataatctgaatctgagacaacatctggcaaggctggg

SEQ ID NO: 69747 - DNA, 75 bp, synthetic construct
  source 1..75: mol_type = other DNA
ggggtcgttgctgactattttaggggggtggctgactcttaagctaacacaaaagcacgaattaaaaaaagaagc

SEQ ID NO: 69748 - DNA, 75 bp, synthetic construct
  source 1..75: mol_type = other DNA
ctatatttttatgataatagagttgttgatattgcaaaatctattaaaccatccttgagaggtgagcttgaaata

SEQ ID NO: 69749 - DNA, 75 bp, synthetic construct
  source 1..75: mol_type = other DNA
acaaaaggcaactttactttccgaagctgaatccgtgattttgccgctggagcgcgctgtcaggctgaatatggc

SEQ ID NO: 69750 - DNA, 75 bp, synthetic construct
  source 1..75: mol_type = other DNA
aacaggggcgtttatccgttgccatgatggggcgtggttatgcatggctggacacggggacacatcaaagtctta

SEQ ID NO: 69751 - DNA, 75 bp, synthetic construct
  source 1..75: mol_type = other DNA
gcggcgtcgaggggcaactcagccccacctcgtcgcaaaacaatccgaaagaaacccataacctactgattggcg

SEQ ID NO: 69752 - DNA, 75 bp, synthetic construct
  source 1..75: mol_type = other DNA
taaacgcgcgttaattttgagcctgactaatccgaaagccattttgttctatgtgtcgtttttcgtacagtttat

SEQ ID NO: 69753 - DNA, 75 bp, synthetic construct
  source 1..75: mol_type = other DNA
gcaggaggatagtgatttttttatcccattagaaacagcgcttcggttgtctctcagtaacgaaatagatagcgt

SEQ ID NO: 69754 - DNA, 75 bp, synthetic construct
  source 1..75: mol_type = other DNA
ttcaggtaggggagaatccatatgcaacgcaattaaaaaaaataacgggaattgaaagtaaagatatgttatttg

SEQ ID NO: 69755 - DNA, 75 bp, synthetic construct
  source 1..75: mol_type = other DNA
tggctggtggttccggcactcgtctttatcctgtgactatggctgtgagcaaacaactgctaccgatttatgata

SEQ ID NO: 69756 - DNA, 75 bp, synthetic construct
  source 1..75: mol_type = other DNA
acacccttgatgtgatttgcgcccggtattacgggcgcactgagggcgtcgttgaaacggtgctgtgggcgaatc

SEQ ID NO: 69757 - DNA, 75 bp, synthetic construct
  source 1..75: mol_type = other DNA
gtttcctgtcctgaagagattgcatttcgtaaaggttttattgatgttgagcaagtaagaaaattagctgtacca

SEQ ID NO: 69758 - DNA, 75 bp, synthetic construct
  source 1..75: mol_type = other DNA
tcagcagccgcaacaaccagttgcgccgcagccgcagtatcaacagccgcaacaaccggttgcaccgcagcagca

SEQ ID NO: 69759 - DNA, 75 bp, synthetic construct
  source 1..75: mol_type = other DNA
ccggttcaatttcaaagaaaaacccacttaatcccttccccgctggtgaaatccagctacgtaattttctgattt

SEQ ID NO: 69760 - DNA, 75 bp, synthetic construct
  source 1..75: mol_type = other DNA
tcgatgtttcgtgtggacccggatctggctggtccattgatggcgatggtcaccaccatgctgggggcaatatga

SEQ ID NO: 69761 - DNA, 75 bp, synthetic construct
  source 1..75: mol_type = other DNA
ggatacaatccttcgattgcaattagtgagattgaagcatttcttcattatcttgaatcaggaaagcttgtgttg

SEQ ID NO: 69762 - DNA, 75 bp, synthetic construct
  source 1..75: mol_type = other DNA
ctggatcggctggatgatcaaacctctcggtcgctggtcgttaatcatggaaatcgatgaaggctttgcggtagg

SEQ ID NO: 69763 - DNA, 75 bp, synthetic construct
  source 1..75: mol_type = other DNA
cagaagagattaaattccggattcaatatcttcaggatgaagaacaaaagagagttttaagtgaactggtaaatg

SEQ ID NO: 69764 - DNA, 75 bp, synthetic construct
  source 1..75: mol_type = other DNA
agtgaaggcattgtgtcgatgtttcgtgtggatcctgatctggctggtccattgatggcgatggttaccaccatg

SEQ ID NO: 69765 - DNA, 75 bp, synthetic construct
  source 1..75: mol_type = other DNA
cctggtggcgttccgcagagaccatgttgcttctggcaatgtggttgcctttctccggcaccagttacggcattg

SEQ ID NO: 69766 - DNA, 75 bp, synthetic construct
  source 1..75: mol_type = other DNA
tcgcctttatgttaaaaaagaaaacgtgaataatattgttgattttgttagagatttttctgaattgggcaaata

SEQ ID NO: 69767 - DNA, 75 bp, synthetic construct
  source 1..75: mol_type = other DNA
tttcgacaaagaagcgataggcgagaagatgctggagaagctgtttgcagaactgacgcagattcagcgcaaatt

SEQ ID NO: 69768 - DNA, 75 bp, synthetic construct
  source 1..75: mol_type = other DNA
ccgcgattacattgactcacttcgcgaaaacatggccaggtcgaaaggccgcaataactttaataatctgtttct

SEQ ID NO: 69769 - DNA, 75 bp, synthetic construct
  source 1..75: mol_type = other DNA
agcaaacagatatcttatttttgatctggagcaacgaaatccccgtgttctcgaacagtctgagtttgaggcgtt

SEQ ID NO: 69770 - DNA, 75 bp, synthetic construct
  source 1..75: mol_type = other DNA
atgagtaaatgtagttctcatagtagcttgtatacactgatattgcttgcacaatatcataatataactgtcaat

SEQ ID NO: 69771 - DNA, 75 bp, synthetic construct
  source 1..75: mol_type = other DNA
tttttgatagtctctcatagtcttaacttattaaaagaatattgcgatgaggccatttactttgggaggaataat

SEQ ID NO: 69772 - DNA, 75 bp, synthetic construct
  source 1..75: mol_type = other DNA
ctggagccggatattaatcaggagctgtacggcctgccggaatatctcagcgcccttaactctgcctggctgaat

SEQ ID NO: 69773 - DNA, 75 bp, synthetic construct
  source 1..75: mol_type = other DNA
cttacaggaaagaatcaaagaaattaatgagtgggtagaagatgacattattaaattcaatacatatagccttga

SEQ ID NO: 69774 - DNA, 75 bp, synthetic construct
  source 1..75: mol_type = other DNA
gatgatgaaaaaaaacgcttatgatggcgtatttgacaaggaaaaacagtgctatgtcctgactcgtaatcccca

SEQ ID NO: 69775 - DNA, 75 bp, synthetic construct
  source 1..75: mol_type = other DNA
gcatgttcctgccggaccgttttgtaaaaggcacctgcccgaaatgtaaatccccggatcaatacggcgataact

SEQ ID NO: 69776 - DNA, 75 bp, synthetic construct
  source 1..75: mol_type = other DNA
gctggggctctacaatcagtgagctgatgctaacactggctgatattccttatcagttcgttgatgtcagtggtt

SEQ ID NO: 69777 - DNA, 75 bp, synthetic construct
  source 1..75: mol_type = other DNA
ccgggcggaagacagagcggaacgtctggcgctggtcgcctgcctgctggctgttattccggcgcttaaccttgc

SEQ ID NO: 69778 - DNA, 75 bp, synthetic construct
  source 1..75: mol_type = other DNA
ttgacggactggcgcgaaccttccgcgctgccgtacatcatagctccccgattgcagtaaagtgcaacattctga

SEQ ID NO: 69779 - DNA, 75 bp, synthetic construct
  source 1..75: mol_type = other DNA
ttcaccgtgatgacgtataccaaaagcaaaacgtttaaaaccgaaaatggtgcccgtcgctggctggaaagaaac

SEQ ID NO: 69780 - DNA, 75 bp, synthetic construct
  source 1..75: mol_type = other DNA
actacaaaagcgattacaggagatgaatgattggcttggcaaggaggcgatacagtttaatacctactcgctaga

SEQ ID NO: 69781 - DNA, 75 bp, synthetic construct
  source 1..75: mol_type = other DNA
attgcagaaacgactgcaggaactgaatgattgggccggagatgaaattatttcattcgcaccatatgttttagg

SEQ ID NO: 69782 - DNA, 75 bp, synthetic construct
  source 1..75: mol_type = other DNA
gcgtttcactacggtaatcagggcggtggtgctggcgaccaataacaacccgatgatattcaccgaacgggccgg

SEQ ID NO: 69783 - DNA, 75 bp, synthetic construct
  source 1..75: mol_type = other DNA
ttgagcttccggtaaagcaaaaaatgcagctttcgcagatggcggacagtgagcgcgcgcaactgcttgtcgatc

SEQ ID NO: 69784 - DNA, 75 bp, synthetic construct
  source 1..75: mol_type = other DNA
gcgcgaatatctggcccgtgaacgccagaatctttctgatggtctggtcattgagcttccggtaaagcaaaaggc

SEQ ID NO: 69785 - DNA, 75 bp, synthetic construct
  source 1..75: mol_type = other DNA
gaatatcaagaacgtgagccgggacgacatgatggcagcacaccgagtgccgccgcaaatgatggggattatgcc

SEQ ID NO: 69786 - DNA, 75 bp, synthetic construct
  source 1..75: mol_type = other DNA
tcagcaggacaaagcacgaaagatgcattaaaaaaagcagcagagcaaacccgcaatgcgggaaacagactcatt

SEQ ID NO: 69787 - DNA, 75 bp, synthetic construct
  source 1..75: mol_type = other DNA
ggtgcagatagccatatttcttccgcgcagggcggtggcctcgtcaccagtggttcagacgcgacaatcaatttt

SEQ ID NO: 69788 - DNA, 75 bp, synthetic construct
  source 1..75: mol_type = other DNA
aagaccgcatcaccatcaccgacagcctgaaccgccgtgaagtgctgcacacgcagggcgaagccgggctgaagc

SEQ ID NO: 69789 - DNA, 75 bp, synthetic construct
  source 1..75: mol_type = other DNA
attaactgacaaggctgttgctgatattatcgctaaccccagactcgctgaagatctgatgtcggcggggagcta

SEQ ID NO: 69790 - DNA, 75 bp, synthetic construct
  source 1..75: mol_type = other DNA
gcctgatttcttacaacctgatcatcgttggcttgaattacaactgcgtatgctgctggagcaggttgaacagtt

SEQ ID NO: 69791 - DNA, 75 bp, synthetic construct
  source 1..75: mol_type = other DNA
accattaattgacggcgtgctgggaatgaaagcttacggcagcctggcaaaacgtgaaaaggatgacccgcaaaa

SEQ ID NO: 69792 - DNA, 75 bp, synthetic construct
  source 1..75: mol_type = other DNA
acgggcattggtacgggggcggctattggcgcatccgttggtggtcctgttggcgctgttgctggtgcagtaatt

SEQ ID NO: 69793 - DNA, 75 bp, synthetic construct
  source 1..75: mol_type = other DNA
aagaagagcaaaaagacgggctgtgtgcctacggctgcaatgaagttcctgaacgtcctgctgcagggcgtcctc

SEQ ID NO: 69794 - DNA, 75 bp, synthetic construct
  source 1..75: mol_type = other DNA
tgaaatactggccgccacaccgaaagcggtcaaggctgcatacgatctggcaaacggaaaacaaccggcagatgc

SEQ ID NO: 69795 - DNA, 75 bp, synthetic construct
  source 1..75: mol_type = other DNA
gtgagcaagcacatcatcaaatatgactatcgagagggagttaaacttgcaaagcatgaaatagaaacgtggtgc

SEQ ID NO: 69796 - DNA, 75 bp, synthetic construct
  source 1..75: mol_type = other DNA
ctgccaaaaagtgccagcttttatgcgctgtacgaacgccgccatgagccgggtaacggtgagcgtatcgatcag

SEQ ID NO: 69797 - DNA, 75 bp, synthetic construct
  source 1..75: mol_type = other DNA
agacaaatctctctatatgaccaccgttactgccgacaacatcctcgaaggtaagttgatcggtgactggctggt

SEQ ID NO: 69798 - DNA, 75 bp, synthetic construct
  source 1..75: mol_type = other DNA
atgattttcatcattgatgataaaaccatatctgatattatcagaaatcatgagcacacaaatcatgcgggatat

SEQ ID NO: 69799 - DNA, 75 bp, synthetic construct
  source 1..75: mol_type = other DNA
caacagatgattcaggccttcaggtcagtggtgacagtcctgtcacggtactggcagaagtgcgttgcagtcgta

SEQ ID NO: 69800 - DNA, 75 bp, synthetic construct
  source 1..75: mol_type = other DNA
ggtatcccttacatgcgcaagtaatactatgagaaagctggcctttgatgcttacaacgccgtatctgatgcctg

SEQ ID NO: 69801 - DNA, 75 bp, synthetic construct
  source 1..75: mol_type = other DNA
tcagaacagcactgacgtcgaagcgttgcgaaaggcgatgcgcgactcgaaagggctcggcaattttaagaatct

SEQ ID NO: 69802 - DNA, 75 bp, synthetic construct
  source 1..75: mol_type = other DNA
attgagaaagtggcaaaggtctttgtccgcaatgagcttatcccgttacaggacaggatccgcgagataaacggc

SEQ ID NO: 69803 - DNA, 75 bp, synthetic construct
  source 1..75: mol_type = other DNA
aagatctcttttatcgccttaacgttattcatttaatactgccgcctctgcgcgatcgccgggaagatatttccc

SEQ ID NO: 69804 - DNA, 75 bp, synthetic construct
  source 1..75: mol_type = other DNA
tccgcaatgaactcactccattacaggagagaataaagtcaataaatgaatggttagatatggaagtcataaaat

SEQ ID NO: 69805 - DNA, 75 bp, synthetic construct
  source 1..75: mol_type = other DNA
tcatcagatggacaaaatttcagaaccggcagctcaggccgctacgcagggcaggttaacccgaaatatgggcaa

SEQ ID NO: 69806 - DNA, 75 bp, synthetic construct
  source 1..75: mol_type = other DNA
atgaatgaacatcacactgtggcagcaacagatgattcaggtcttcgggtcagtggtgacaatcctgtcacggta

SEQ ID NO: 69807 - DNA, 75 bp, synthetic construct
  source 1..75: mol_type = other DNA
cgctgtatgaatcacgcctgaagggaaagctgcacgttatcagcaagcgttatactcagcgcattgagcggcata

SEQ ID NO: 69808 - DNA, 75 bp, synthetic construct
  source 1..75: mol_type = other DNA
cgtcaggatatcgaccgctggcagtcgacctcggtcaatgatgtgctgcgccgtcttccgggcgtcgatatcacc

SEQ ID NO: 69809 - DNA, 75 bp, synthetic construct
  source 1..75: mol_type = other DNA
tgccagtcatgtgttggtgttaattgatggcgtacgcctgaatctggcgggggtgagtggttctgccgaccttag

SEQ ID NO: 69810 - DNA, 75 bp, synthetic construct
  source 1..75: mol_type = other DNA
gcatcagcctgctggtactgaacaaacacgccgaacaggccattttgcatgaaaacgccgaaagccagaatgagc

SEQ ID NO: 69811 - DNA, 75 bp, synthetic construct
  source 1..75: mol_type = other DNA
gttttggattaagcatggcatttaaatttgattactacattgtggatgaagttactgctgttggtgatgccaagt

SEQ ID NO: 69812 - DNA, 75 bp, synthetic construct
  source 1..75: mol_type = other DNA
agccttattatttacaaaagataagcaagtaatttattatgatgatattaaaatagctattaacaagtatattga

SEQ ID NO: 69813 - DNA, 75 bp, synthetic construct
  source 1..75: mol_type = other DNA
ccattgaaaacgcaattgaatacattcgtagtatcgcttttcacatcgatgaagacgattaccacggcaaacata

SEQ ID NO: 69814 - DNA, 75 bp, synthetic construct
  source 1..75: mol_type = other DNA
attggaggtatagatcgtcctgacaaaggggaaataataactcaaaaaacaatatcgtggcctgttggcctttca

SEQ ID NO: 69815 - DNA, 75 bp, synthetic construct
  source 1..75: mol_type = other DNA
ggggatgtagaaaaagctagtaaggtatttgtgaaaaatgaattattaccattacaaaaaagaatgaaagaattt

SEQ ID NO: 69816 - DNA, 75 bp, synthetic construct
  source 1..75: mol_type = other DNA
gtttattggtgctggctctgtgcgcttctgggatacaggctgcgacaaagatcgccacactctatgtacccgcgg

SEQ ID NO: 69817 - DNA, 75 bp, synthetic construct
  source 1..75: mol_type = other DNA
ttcagctttggcgatcccgttcctgttctggaccgccgcgaactgctggactatgtagaatgcgtacagacagat

SEQ ID NO: 69818 - DNA, 75 bp, synthetic construct
  source 1..75: mol_type = other DNA
gcgaagtggttgcagagagtatcgaacggttaattatcgacggcgtactgaaggtcggtcagccgcttccctcgg

SEQ ID NO: 69819 - DNA, 75 bp, synthetic construct
  source 1..75: mol_type = other DNA
atagcccaggattcacctctctggatcatcggtgtattaacgctaacgggtattgcggtggggttggttatccgt

SEQ ID NO: 69820 - DNA, 75 bp, synthetic construct
  source 1..75: mol_type = other DNA
ttacgtcgagtgcatcagtaacggcagatggtatgagccaccggtcagctttaccggtctggcaaaaagcctgcg

SEQ ID NO: 69821 - DNA, 75 bp, synthetic construct
  source 1..75: mol_type = other DNA
gtgaaagccactgccgcgccagtaactggcccactggcagatgatccgattcaggaaaccatcacctttgacgac

SEQ ID NO: 69822 - DNA, 75 bp, synthetic construct
  source 1..75: mol_type = other DNA
agtggcgaaagtgtgctatgcacaaatggtgaaacagttcctgagtcgtgacccgttcgaatgcgtgctgtgtgg

SEQ ID NO: 69823 - DNA, 75 bp, synthetic construct
  source 1..75: mol_type = other DNA
ccgtggctttcccagcaggatttcagccgctttgtgctggattttctggtgttcggtaatgcgtttctggaaaag

SEQ ID NO: 69824 - DNA, 75 bp, synthetic construct
  source 1..75: mol_type = other DNA
aagatggggggttagtatcatttcgaaaggtaataataaatgtgaaatttattttgatgcttttggtgagtgtgg

SEQ ID NO: 69825 - DNA, 75 bp, synthetic construct
  source 1..75: mol_type = other DNA
tatgcctaataatgtcggggggtttggggatgtggagaaggcgagtaaagtgtttgttcgtaatgaacttcttcc

SEQ ID NO: 69826 - DNA, 75 bp, synthetic construct
  source 1..75: mol_type = other DNA
atgggtaatctgccagtgggaagtcgtggtttatataaaggtaaaaaacgcagcgccggtatgaatgaattacgt

SEQ ID NO: 69827 - DNA, 75 bp, synthetic construct
  source 1..75: mol_type = other DNA
ttatacgccgcagcgcgtggcactcccccgtcacctcgctgctgcagaatcccgacttctttggccctgccatca

SEQ ID NO: 69828 - DNA, 75 bp, synthetic construct
  source 1..75: mol_type = other DNA
cgcctccgggtatgcgggttatggaaacacgttctagtgacattgatattaatcacgatgttgggtacaccagat

SEQ ID NO: 69829 - DNA, 75 bp, synthetic construct
  source 1..75: mol_type = other DNA
gtgaaatctttgcccgccagggtgtcgaactgagccgtgccttactctccaactgggttgatgcgtgctgccagt

SEQ ID NO: 69830 - DNA, 75 bp, synthetic construct
  source 1..75: mol_type = other DNA
ggtttaagctgcgcgatgattatgcggatattattgctgatatccattgcgtggctttcacatattacccagccg

SEQ ID NO: 69831 - DNA, 75 bp, synthetic construct
  source 1..75: mol_type = other DNA
tagatggaaaatcagccttaaaatgtgtatttatcgagccagcgcattaggcttattgacccaggaacaggcaag

SEQ ID NO: 69832 - DNA, 75 bp, synthetic construct
  source 1..75: mol_type = other DNA
cccttccggctccgcaggacgggcgtgatgccacggcactggaagtgctccccgctattgacgatcaaaaatcct

SEQ ID NO: 69833 - DNA, 75 bp, synthetic construct
  source 1..75: mol_type = other DNA
ggattatggggcactcaaggatattttttcccttctgtgcctctatctgaaattaaacacataaatagtgcgtgg

SEQ ID NO: 69834 - DNA, 75 bp, synthetic construct
  source 1..75: mol_type = other DNA
atgaccggtgataagcccggtgaagcccattcatcaggctggaccctggctgccaaacgtggacgggatgcagga

SEQ ID NO: 69835 - DNA, 75 bp, synthetic construct
  source 1..75: mol_type = other DNA
aggcacaaacgtttgaagaaaaactggcttccctgtctgtggtattacagaagtgcgtgacgggcgatgatgtgc

SEQ ID NO: 69836 - DNA, 75 bp, synthetic construct
  source 1..75: mol_type = other DNA
attcagaaggttctttggtttgtaccttatttgattcggtttctttttctcatttggttcgcgacggtgggaagc

SEQ ID NO: 69837 - DNA, 75 bp, synthetic construct
  source 1..75: mol_type = other DNA
ggcggcgctggggcactgtctgactggctgttgcgtcatgtcaaatcctgccagtggcctcatggtgactatcat

SEQ ID NO: 69838 - DNA, 75 bp, synthetic construct
  source 1..75: mol_type = other DNA
catcacagcgaaaccgtcatacatcgttacggtaccggtgcaatgatgttgtgctggcactgcgacaaccagctg

SEQ ID NO: 69839 - DNA, 75 bp, synthetic construct
  source 1..75: mol_type = other DNA
agcgagccgtcaactacgcgctttgaacttgccatttgtgaagatggtgaggaagtctctggccttgggccagct

SEQ ID NO: 69840 - DNA, 75 bp, synthetic construct
  source 1..75: mol_type = other DNA
tcatgcagatccgcaggcgttcgaagaaaagcatggttctcaggttgatttaatttttcgttttcttgatcacgc

SEQ ID NO: 69841 - DNA, 75 bp, synthetic construct
  source 1..75: mol_type = other DNA
ggcgaccttaaagacgatgccctgctgtggaatggcaccgcgttcagcgccgcgcacggcaccgaagccaccagc

SEQ ID NO: 69842 - DNA, 75 bp, synthetic construct
  source 1..75: mol_type = other DNA
gggaactgtcgctggcagagttatgctggtgggcggtttgtcatcaggtggctgatgcgcttccggagtctgtat

SEQ ID NO: 69843 - DNA, 75 bp, synthetic construct
  source 1..75: mol_type = other DNA
gtgcgggtattacttcgacctgctctggtaccagaacttgggctggtggtccttaaaccagggcgtgaatccatg

SEQ ID NO: 69844 - DNA, 75 bp, synthetic construct
  source 1..75: mol_type = other DNA
tgattacgatccggaagtactgaagcaggcggttctggaggcggtgaatgcccttccggctccgcaggacgggcg

SEQ ID NO: 69845 - DNA, 75 bp, synthetic construct
  source 1..75: mol_type = other DNA
gccatcatcccggatcgtacccgtatcataatgaatgagtcagataaaggcgaagcattaaaacttactaatcaa

SEQ ID NO: 69846 - DNA, 75 bp, synthetic construct
  source 1..75: mol_type = other DNA
ccggttcaaaacttgctattccgcttaacctgaaatgcgatgctctgaatattacccttcgtgaagttatatctc

SEQ ID NO: 69847 - DNA, 75 bp, synthetic construct
  source 1..75: mol_type = other DNA
tccgatgcttgaacagatggtgaaggaggcggtaagccatatccctgttccgcgtgatggtcgtgactacgatcc

SEQ ID NO: 69848 - DNA, 75 bp, synthetic construct
  source 1..75: mol_type = other DNA
gtaattttcggacaaccctgtgcagggaaatcaaatctgatggctgaattcatttcttctgttgtggggagtaat

SEQ ID NO: 69849 - DNA, 75 bp, synthetic construct
  source 1..75: mol_type = other DNA
aggcgaaatgcgtgcgtggtcgaagtgcaattaccgaaaaaacagcgtctggttcgggtgattgaaaaagggtta

SEQ ID NO: 69850 - DNA, 75 bp, synthetic construct
  source 1..75: mol_type = other DNA
tgcccgccgctatcaacctgccgttaatgaataacgatgaacgcgccgccgttggcacctgctataaacagcaag

SEQ ID NO: 69851 - DNA, 75 bp, synthetic construct
  source 1..75: mol_type = other DNA
aatttctggtgttgccgtccggggtgaagggggaaaacaactggacggtggagaagaagaacgcagtaagactgg

SEQ ID NO: 69852 - DNA, 75 bp, synthetic construct
  source 1..75: mol_type = other DNA
gtaacaagcaagctgacgacccccaccacctgattggccacgggcagggtggaatgggtacaaaggcacacgacc

SEQ ID NO: 69853 - DNA, 75 bp, synthetic construct
  source 1..75: mol_type = other DNA
gtgagcggtcagcttgcggaaaacaaggatgcctgggatgcgtttaccgtgctgtttccgtcgattaccgcctca

SEQ ID NO: 69854 - DNA, 75 bp, synthetic construct
  source 1..75: mol_type = other DNA
atggctgatttgagaaaagcagcgcgtggtcgggaatgccaggtaagaatccctggcgtatgtaatggcaaccct

SEQ ID NO: 69855 - DNA, 75 bp, synthetic construct
  source 1..75: mol_type = other DNA
cagcgatgagcgggtgagccgtgctgcgggtggcgctggtgcactgtctgactggttattacgtcacgtgaaatc

SEQ ID NO: 69856 - DNA, 75 bp, synthetic construct
  source 1..75: mol_type = other DNA
gccacgcggtcgctgaatgacgctaaaaatattcttgttgcagattgtgaaaatgggggggggttatgcgtgatg

SEQ ID NO: 69857 - DNA, 75 bp, synthetic construct
  source 1..75: mol_type = other DNA
gtaggtattaccgataccgatctcagcgagtccgagcccaaactgcaagcatggctggacaaacaataccacggc

SEQ ID NO: 69858 - DNA, 75 bp, synthetic construct
  source 1..75: mol_type = other DNA
aatattcactgatagtatcagtaaatggcgaaaaaaaaggcaacattgctacgcgctttgatgaaaatggcgaca

SEQ ID NO: 69859 - DNA, 75 bp, synthetic construct
  source 1..75: mol_type = other DNA
aatgctgtggtggagtgtttctttggaaccttaaagtcggagtgtttttatcttgatgagttcagtaatataagc

SEQ ID NO: 69860 - DNA, 75 bp, synthetic construct
  source 1..75: mol_type = other DNA
atgaccggtgataaacccggagaagctcattcatcaggctggaccctggctgccaaacggggacgggatgctgga

SEQ ID NO: 69861 - DNA, 75 bp, synthetic construct
  source 1..75: mol_type = other DNA
catatccctgttccgcgtgacggtcgtgactacgatccggaagtactgcagaaggcggtgaatgatgcggtcgca

SEQ ID NO: 69862 - DNA, 75 bp, synthetic construct
  source 1..75: mol_type = other DNA
taaagcctatgacgaagactggtccggcgataaaagcggtataagcctgtataaagcagcggccaaatttaaata

SEQ ID NO: 69863 - DNA, 75 bp, synthetic construct
  source 1..75: mol_type = other DNA
catcacagcgaaacagtcattcaccgttacggtaccggcgcgatggtgttgtgctggcactgtgacaaccagctg

SEQ ID NO: 69864 - DNA, 75 bp, synthetic construct
  source 1..75: mol_type = other DNA
cacgacgagctgcatgcggataccgtggcatttgaagagaagtatggctcccagctggagctgatatttcgtttt

SEQ ID NO: 69865 - DNA, 75 bp, synthetic construct
  source 1..75: mol_type = other DNA
ccctgagtgtgcagcagcgtcatctacttcgtcatccactgtaaaaacggtttttgcatctgctggagtagttgg

SEQ ID NO: 69866 - DNA, 75 bp, synthetic construct
  source 1..75: mol_type = other DNA
cacctggcatctgttcttgaacatcggtcatcagaaggatatccggtcattatttctaacagtgacacatccctg

SEQ ID NO: 69867 - DNA, 75 bp, synthetic construct
  source 1..75: mol_type = other DNA
tagtactcctggcaggcatttttttactgcccggcgcactggcacaagatattaatgttgattttgttgccacaa

SEQ ID NO: 69868 - DNA, 75 bp, synthetic construct
  source 1..75: mol_type = other DNA
aataatacaacgcagcttgcgaccaccgcgtttgttcaggcggcactgacgaccctgattaatggtgcgccagcc

SEQ ID NO: 69869 - DNA, 75 bp, synthetic construct
  source 1..75: mol_type = other DNA
cacgcagctttttaaaaatgaaattttagacaagctaagacaaacaacagacagcattgagttattaactctgga

SEQ ID NO: 69870 - DNA, 75 bp, synthetic construct
  source 1..75: mol_type = other DNA
aaagccgtctggatgatttcaggagcctgttgcataaacaggcaattgcaaaacatgctgtacttgagcaggaga

SEQ ID NO: 69871 - DNA, 75 bp, synthetic construct
  source 1..75: mol_type = other DNA
cgtgccgcgctgccacatgaacgcctaatctattttccacttgaagacctcattaaaaataatggcaaaaaatca

SEQ ID NO: 69872 - DNA, 75 bp, synthetic construct
  source 1..75: mol_type = other DNA
ggaaaaaattcgctcagtataccgcgagagcgacatcgtgccgggagagcagactgccaccagcatgctgaagca

SEQ ID NO: 69873 - DNA, 75 bp, synthetic construct
  source 1..75: mol_type = other DNA
tttgattcacgctatgtaaaagatgttcgcctgggtacgcgtgttgttcaattgatggcgcgtggtggtcgttat

SEQ ID NO: 69874 - DNA, 75 bp, synthetic construct
  source 1..75: mol_type = other DNA
ggctggaatcgtatctgaaaagtcgtcgctatgaacctcatatccagtcacgaaaggatgagtcagaggccatca

SEQ ID NO: 69875 - DNA, 75 bp, synthetic construct
  source 1..75: mol_type = other DNA
ataccagtcttgacgatttacgcgcatttccagaatcgtctcgacaggaaattggctatcaactcgacaggatcc

SEQ ID NO: 69876 - DNA, 75 bp, synthetic construct
  source 1..75: mol_type = other DNA
aggtcggaaatttactgctgacggacagtttgctcgctgaaactaaccgtcatttaaatcaacttaatgccctgt

SEQ ID NO: 69877 - DNA, 75 bp, synthetic construct
  source 1..75: mol_type = other DNA
taggcgctggcggcggtattctggaagccaccacgttaattactgctcttgctgataaatataaacagactcaaa

SEQ ID NO: 69878 - DNA, 75 bp, synthetic construct
  source 1..75: mol_type = other DNA
tacaatcgtgcagaatatctgatagagcgacagagtttgatgcaatggtggagtgattacgttcaagctcaaaga

SEQ ID NO: 69879 - DNA, 75 bp, synthetic construct
  source 1..75: mol_type = other DNA
accggcctgatgacccgcgataactacagaacggtaaataacattacccaggggaaacatccggaggcgaaacaa

SEQ ID NO: 69880 - DNA, 75 bp, synthetic construct
  source 1..75: mol_type = other DNA
gaaaaatacgcgttaatcgaacaatggcgacaacaatttcccattgaagcgatgtgtcaggtatttggtgtatcc

SEQ ID NO: 69881 - DNA, 75 bp, synthetic construct
  source 1..75: mol_type = other DNA
cactatggcgcgttcttttaaagccgtagccaatggcaaaatttatatcggtaaaattgacactgacccggtaaa

SEQ ID NO: 69882 - DNA, 75 bp, synthetic construct
  source 1..75: mol_type = other DNA
ttttattggttagtttattaccaggtatagctcaatcacatttgttatcatggtatggcatactgagaggggact

SEQ ID NO: 69883 - DNA, 75 bp, synthetic construct
  source 1..75: mol_type = other DNA
gaaagagctgaaacgggttaccgacgaacgggacatattaaaaaaagccgttgtagattcaattggtcaacgcaa

SEQ ID NO: 69884 - DNA, 75 bp, synthetic construct
  source 1..75: mol_type = other DNA
cacaattggtatcgctcagaatgtgaaggctgttaatgttcagacggctattgctgcggtgagaagcgaatcatc

SEQ ID NO: 69885 - DNA, 75 bp, synthetic construct
  source 1..75: mol_type = other DNA
agcgacggtcacgttccggcgtcctatttgctggcgctggcgggcgtgctgtttaccgctatcagctacggcaaa

SEQ ID NO: 69886 - DNA, 75 bp, synthetic construct
  source 1..75: mol_type = other DNA
ccgggaaattggtgtatttgatgagcacggcgatttgatcgcggttggcaatacagccgaaagttacaagccaac

SEQ ID NO: 69887 - DNA, 75 bp, synthetic construct
  source 1..75: mol_type = other DNA
atcatggtgttgcagaatatcttgaaaatggaaggaaagcggagcgtgagtatgctcgtgatgagcttgatcaca

SEQ ID NO: 69888 - DNA, 75 bp, synthetic construct
  source 1..75: mol_type = other DNA
cgtaatgagttaaccactatggcagaaatcagaaagaaaattgatcctgaacgttttctttctgcgactgcccgt

SEQ ID NO: 69889 - DNA, 75 bp, synthetic construct
  source 1..75: mol_type = other DNA
tggcgctgttccctggtgctggttcccccgtgaatcttcctgcgtcccctccggtcagccggcactttgtcatcc

SEQ ID NO: 69890 - DNA, 75 bp, synthetic construct
  source 1..75: mol_type = other DNA
gagcattacttgctctgccgttttgctacgccttttctgcggcaggagaagaagcacgtccggcagaacatgacg

SEQ ID NO: 69891 - DNA, 75 bp, synthetic construct
  source 1..75: mol_type = other DNA
atgcgacggcagttggtactaacgcggaggcaaatggacttaatagtatcgcgttgggctccggcagtattgcag

SEQ ID NO: 69892 - DNA, 75 bp, synthetic construct
  source 1..75: mol_type = other DNA
ttgtcaatatggcagcaggtgatatcagcactaccagtactgatgccatcaatggatcacagctttatgctatca

SEQ ID NO: 69893 - DNA, 75 bp, synthetic construct
  source 1..75: mol_type = other DNA
cggctgtaggtactaaagcgaaagctcgaggcaaaaacagtcttgcattaggtgcaaacagtgattcaacaggtg

SEQ ID NO: 69894 - DNA, 75 bp, synthetic construct
  source 1..75: mol_type = other DNA
ctcggtgaagaacatcgcaagcagattgagaaagaagcggttgagattgttagcgaagttctgaaaaacgcgtaa

SEQ ID NO: 69895 - DNA, 75 bp, synthetic construct
  source 1..75: mol_type = other DNA
agaagtacgtgataagcagcaaaatattctggcgtcctggcattacacccgtaaggatccaggcgatactttcag

SEQ ID NO: 69896 - DNA, 75 bp, synthetic construct
  source 1..75: mol_type = other DNA
gattttgtgcctgacccgccaggctgaagaactggagtcaaggggcttataccgtcgtgctgcaaccgtgtggat

SEQ ID NO: 69897 - DNA, 75 bp, synthetic construct
  source 1..75: mol_type = other DNA
agcggcccgcgacagacgcgggaatacggctacagcgccacgggcaggctggagagcgtgcgcaccctcgcaccg

SEQ ID NO: 69898 - DNA, 75 bp, synthetic construct
  source 1..75: mol_type = other DNA
gaaagaggattacacgcaagctgactcatggccagatgatgctgttgaagttgatgagcaagtgtatattgagtt

SEQ ID NO: 69899 - DNA, 75 bp, synthetic construct
  source 1..75: mol_type = other DNA
aaccacgggaaaatatcgtttatcagtgctgggagcgtttttgccaggagctgggcaagcaaattccagtggcga

SEQ ID NO: 69900 - DNA, 75 bp, synthetic construct
  source 1..75: mol_type = other DNA
gactggggaatattatcgctccgttctttggtggtattaccgctacagctgccatcgcgcgttctgccgctaacg

SEQ ID NO: 69901 - DNA, 75 bp, synthetic construct
  source 1..75: mol_type = other DNA
atgcagaaacgagaacccgtcatcatcgctccagactataccgataatgaactttatgagtggatgcgccagaaa

SEQ ID NO: 69902 - DNA, 75 bp, synthetic construct
  source 1..75: mol_type = other DNA
cgcgtcgttctctgggattaccggcggaaaaaatccgctccgtataccgtgaaagcgacatcataccgggagaac

SEQ ID NO: 69903 - DNA, 75 bp, synthetic construct
  source 1..75: mol_type = other DNA
taaatacggggcagagtgtacttgatgcagcgagagaacgtatcgaatggatcttcgatacattttcatctgtct

SEQ ID NO: 69904 - DNA, 75 bp, synthetic construct
  source 1..75: mol_type = other DNA
tcaggacatttatgaacgttcttacaccggttttatttccgatgcaacggcgaatggtctgattctcatgaaact

SEQ ID NO: 69905 - DNA, 75 bp, synthetic construct
  source 1..75: mol_type = other DNA
tcggcatgatcggcctgcatttgcagtttcatctgcatcatgtcaactggatcggcgaaattcaggaactggtgg

SEQ ID NO: 69906 - DNA, 75 bp, synthetic construct
  source 1..75: mol_type = other DNA
gcagaagaagaagcccgccaggccggggccgaaatgaccgagctttccaccaacgtgaagcgccacgacgcgcac

SEQ ID NO: 69907 - DNA, 75 bp, synthetic construct
  source 1..75: mol_type = other DNA
cccacgttctcgaaacgatcgaacataacggcaaaacttggtttactgcggctaccctagctaccgcgctggaat

SEQ ID NO: 69908 - DNA, 75 bp, synthetic construct
  source 1..75: mol_type = other DNA
tggcgccacgtgagggaatgcaggtaacagaaaagccttccgttcttacagtgaaatttggtgatggttatgagc

SEQ ID NO: 69909 - DNA, 75 bp, synthetic construct
  source 1..75: mol_type = other DNA
agccgccagggtgtggaactgagccgaaacacgctggtccggtgggtggcgatgaccgcagaacgactcagtccc

SEQ ID NO: 69910 - DNA, 75 bp, synthetic construct
  source 1..75: mol_type = other DNA
caaaactgtgtggtataccttcaagccagtcatcacgcaggctgcgtgagcgcatcagcccttccctgaaacgca

SEQ ID NO: 69911 - DNA, 75 bp, synthetic construct
  source 1..75: mol_type = other DNA
acggcctcacgctgaatgacacaccgttcgctgatgaacgtgtgattgagcagcatattgaggcaggcatttcac

SEQ ID NO: 69912 - DNA, 75 bp, synthetic construct
  source 1..75: mol_type = other DNA
ggagcacgcttaatatcatcgggatccccttacctgatgcgaaaagaacccggctggaaattctggcaaaggtgg

SEQ ID NO: 69913 - DNA, 75 bp, synthetic construct
  source 1..75: mol_type = other DNA
ttaagtcactgaagaacagtaaaaaaaatacactgtcacgcaccgatgccacggaagaactgacgcgtctttctc

SEQ ID NO: 69914 - DNA, 75 bp, synthetic construct
  source 1..75: mol_type = other DNA
tgagctgaagcaggcgatcgccactatcgctgacatgcagcagcgtcagcgtgatgttgctgcactcgatgcaaa

SEQ ID NO: 69915 - DNA, 75 bp, synthetic construct
  source 1..75: mol_type = other DNA
gcttcctgccctgatacccgtgctgaaccgccccgggtttcctggagagtgttttatctgtgaactcaggctgcc

SEQ ID NO: 69916 - DNA, 75 bp, synthetic construct
  source 1..75: mol_type = other DNA
atggatcgtgaattaaaaaatctgcatctgaatatttcccaactggccgcattatccggtgctcatcgacagact

SEQ ID NO: 69917 - DNA, 75 bp, synthetic construct
  source 1..75: mol_type = other DNA
tgggagtgaaggaatacaactgcgataaacctgagtgcccccacgtcagatacgtcactaactcatgtggcagcc

SEQ ID NO: 69918 - DNA, 75 bp, synthetic construct
  source 1..75: mol_type = other DNA
ttgcaggggagcgtgatggcattgtttcctgcgatgttgaaggttctatcaataatttatgtaaattagtgttat

SEQ ID NO: 69919 - DNA, 75 bp, synthetic construct
  source 1..75: mol_type = other DNA
accgtggcatttgaagagaagtatggttcccaactggagctgatatttcgttttatcgatcgcgcgctggcgata

SEQ ID NO: 69920 - DNA, 75 bp, synthetic construct
  source 1..75: mol_type = other DNA
aacgacagaaattaatgccaacaccgtctgaagatgcgttaaaacagatggtggatgataagaaagaacgattga

SEQ ID NO: 69921 - DNA, 75 bp, synthetic construct
  source 1..75: mol_type = other DNA
aataatttatgtaaattagtgttatcgccaatgaggcaaacagataaagaaattatcagtataatgacacgtaaa

SEQ ID NO: 69922 - DNA, 75 bp, synthetic construct
  source 1..75: mol_type = other DNA
actccaatgtctgaaaaatagtcaggtagatgtcacctatatgccagcacatacggtacaaattgccttccctga

SEQ ID NO: 69923 - DNA, 75 bp, synthetic construct
  source 1..75: mol_type = other DNA
cacggattttaaagtctggctggggataattcgctccatgtcggagtatggggtaaaaagtgacaccctggaact

SEQ ID NO: 69924 - DNA, 75 bp, synthetic construct
  source 1..75: mol_type = other DNA
gtgccgcttcctcggcaacggcggcaggcaattccgcgaaggcggcaaagacgtctgagacaaacgccaggtctt

SEQ ID NO: 69925 - DNA, 75 bp, synthetic construct
  source 1..75: mol_type = other DNA
atgtctggttttttccagcgtctgtttggcaaggataataagcctgctatcgctcgcggtccgctgggtctgcat

SEQ ID NO: 69926 - DNA, 75 bp, synthetic construct
  source 1..75: mol_type = other DNA
atacatttacttatgacacgactgctacgacagctgagctgcagtcttacctgactccgaaagcgggcgacactg

SEQ ID NO: 69927 - DNA, 75 bp, synthetic construct
  source 1..75: mol_type = other DNA
aaggtctgactcaggctgcccgtaacgccaacgacggtatctccgttgcacagactactgaaggcgcactgtctg

SEQ ID NO: 69928 - DNA, 75 bp, synthetic construct
  source 1..75: mol_type = other DNA
aacggagggctgacgccggaagagtcagagaacagataccatttttactgtaaaaccgtggccagtattacttga

SEQ ID NO: 69929 - DNA, 75 bp, synthetic construct
  source 1..75: mol_type = other DNA
catttctaatgatttgcctgattggtttaaaaaagtcgctgggacagagattgagcaggccagaatgaaaaagaa

SEQ ID NO: 69930 - DNA, 75 bp, synthetic construct
  source 1..75: mol_type = other DNA
cccgcagggttatcggctggagcctgtcagcgaatgccgatactgcactgataagcagtgccttgcggatggcgt

SEQ ID NO: 69931 - DNA, 75 bp, synthetic construct
  source 1..75: mol_type = other DNA
ttggtatggagttgacgttgcaacctggtcattcactgcaaaaacagctcgatccagctgaagttgcagctcggc

SEQ ID NO: 69932 - DNA, 75 bp, synthetic construct
  source 1..75: mol_type = other DNA
tggatgtaaatagcgatggttcaatagatgacaaacagcagatcatcatgctcagaatagacgagtctaaaacct

SEQ ID NO: 69933 - DNA, 75 bp, synthetic construct
  source 1..75: mol_type = other DNA
taaggagctggtcgaaattgacaccatcaacatgattgaaaaggtgaacggcgtcgaccggctggagcaacaccg

SEQ ID NO: 69934 - DNA, 75 bp, synthetic construct
  source 1..75: mol_type = other DNA
ttatctatgtcagtattcgatagcaacaataaagaatggcagaataggttctttacgtgtgctgggaagtgctga

SEQ ID NO: 69935 - DNA, 75 bp, synthetic construct
  source 1..75: mol_type = other DNA
gcgtttgagaccatctacatggtgacgaagaacagagatgcgttactgagggaggtaacacgtctcgacatgtca

SEQ ID NO: 69936 - DNA, 75 bp, synthetic construct
  source 1..75: mol_type = other DNA
cgcaggaagtttgaaagaaaagctgaggctgtagcatttgagcgatacacaatcgccaatgccagtcagaaagaa

SEQ ID NO: 69937 - DNA, 75 bp, synthetic construct
  source 1..75: mol_type = other DNA
tagctacatgggcgttgttgaatccgtgacgctgccgaagctgacccgcaagctcgaaaactatcgcggcggcgg

SEQ ID NO: 69938 - DNA, 75 bp, synthetic construct
  source 1..75: mol_type = other DNA
atgttgctttattgttcttatcagaaggtgcttatgcatctgtaacagtattcattgctccaagttgggaaagga

SEQ ID NO: 69939 - DNA, 75 bp, synthetic construct
  source 1..75: mol_type = other DNA
acgcgcgctggcggcggcgacactttctaacctgatgagtgctactattgcaggattctttattggtttagcgta

SEQ ID NO: 69940 - DNA, 75 bp, synthetic construct
  source 1..75: mol_type = other DNA
tcctattgtccagggttcggcaggtgtaagaattggcgcgcccaccggcgtggcgtgctcggtgtgtccgggcgg

SEQ ID NO: 69941 - DNA, 75 bp, synthetic construct
  source 1..75: mol_type = other DNA
tcatgcggatccgctggcgttcgaagaaaagcatggttcccagattgatttaatttttcgttttcttgatcacgc

SEQ ID NO: 69942 - DNA, 75 bp, synthetic construct
  source 1..75: mol_type = other DNA
tggtgcgcagttttgtcaccaacggctggtgtgttcagatccgcgggcctcaggccggtggtgcggtgcaggatt

SEQ ID NO: 69943 - DNA, 75 bp, synthetic construct
  source 1..75: mol_type = other DNA
aaatgaatatgtgaatgcaaataatgcgtttaaagaaggattggttgcaaaaaatgaacttagcgacattggcaa

SEQ ID NO: 69944 - DNA, 75 bp, synthetic construct
  source 1..75: mol_type = other DNA
aaccggtaatcaggtcaaaattccgtcagaggtgatgatcccggaaacgcgggagtttgaattcgctaatctggg

SEQ ID NO: 69945 - DNA, 75 bp, synthetic construct
  source 1..75: mol_type = other DNA
catgatatcgatgccagggctacacaagactttaaagaggccagcgattactttaccagtcgcaaggtcagtgag

SEQ ID NO: 69946 - DNA, 75 bp, synthetic construct
  source 1..75: mol_type = other DNA
atgaacgctataaccaaagaacgtatcaaattattcattaaaaatccgcttgataacggacttactcgtggcgaa

SEQ ID NO: 69947 - DNA, 75 bp, synthetic construct
  source 1..75: mol_type = other DNA
ctggccacgacttcgtcgatggagaaacagcgtctggcacatgtctccattggtcatgtgctgatgcgaaacctg

SEQ ID NO: 69948 - DNA, 75 bp, synthetic construct
  source 1..75: mol_type = other DNA
gctattctgacaaataccagttcaccggagattgcagaacgccgtcgggcgatggcctggtcttttgtgcaggaa

SEQ ID NO: 69949 - DNA, 75 bp, synthetic construct
  source 1..75: mol_type = other DNA
aagtaaagacggaggtgcctgcacaggcagtggcatcagcagcgtgtgcgcatgaaaccggtgccggtgacgccg

SEQ ID NO: 69950 - DNA, 75 bp, synthetic construct
  source 1..75: mol_type = other DNA
acttacaacttgccacaaacgcactttgaacaggttgctgacctttacgaaatgcaatttgatgacggacgcact

SEQ ID NO: 69951 - DNA, 75 bp, synthetic construct
  source 1..75: mol_type = other DNA
tccgcgtgaaactctatgctgtaccacatttccaggtggaaggtatggacgtcagtctgtcactggtttcgcaga

SEQ ID NO: 69952 - DNA, 75 bp, synthetic construct
  source 1..75: mol_type = other DNA
ctgagaatgaagtcaggggtgaactgacgtttattgaaaaggctcagggtatccataaagcacggatgatttatg

SEQ ID NO: 69953 - DNA, 75 bp, synthetic construct
  source 1..75: mol_type = other DNA
atgctgaagcatattgatttttcgacggccagcccgactgtccggcaggcgcttcagaaggggaccggtgcagga

SEQ ID NO: 69954 - DNA, 75 bp, synthetic construct
  source 1..75: mol_type = other DNA
gttaagtcagcagaccggcggagacagtctgacacagacagcgctgcagcagtatgagccggtggtggttggctc

SEQ ID NO: 69955 - DNA, 75 bp, synthetic construct
  source 1..75: mol_type = other DNA
gatgaaggaacataactgcagcgaactggaggcggcgttccatgtggcgcgtaagctggacaggctgcgtggtct

SEQ ID NO: 69956 - DNA, 75 bp, synthetic construct
  source 1..75: mol_type = other DNA
aatacggcagactgacggagaagacggaccttatcccggcgggtgttatccggacggacgacgagcggacccacc

SEQ ID NO: 69957 - DNA, 75 bp, synthetic construct
  source 1..75: mol_type = other DNA
aagatccgcgaaggtaaagtacccggtgtaaccgatcccgcagaagcgtcccggctgattcgtcggggacatctg

SEQ ID NO: 69958 - DNA, 75 bp, synthetic construct
  source 1..75: mol_type = other DNA
atgaccactcagatttctgtcgaaactctttccccaattacacacaaccaaattcccgttatcactaccgagtta

SEQ ID NO: 69959 - DNA, 75 bp, synthetic construct
  source 1..75: mol_type = other DNA
ctggccaccacctcatcaatggagaaacagcgactggcgcacgtctctgtcggacatgtaataatgcgaaacctg

SEQ ID NO: 69960 - DNA, 75 bp, synthetic construct
  source 1..75: mol_type = other DNA
cgttctggtgtcggcgtcttgatgacggcgatgtgattgagattgaaaaaacagccggttctgcggatgcaccgg

SEQ ID NO: 69961 - DNA, 75 bp, synthetic construct
  source 1..75: mol_type = other DNA
atcgatattcagattcctgatatagatgggggcgatataaaccctcaaggaggcgtggagttgttgaataatgtt

SEQ ID NO: 69962 - DNA, 75 bp, synthetic construct
  source 1..75: mol_type = other DNA
ggagcgcgatcagtatctgggacgggatatcctgtttgtagtggatgaggcgcatattgtgacggcgaatccgtt

SEQ ID NO: 69963 - DNA, 75 bp, synthetic construct
  source 1..75: mol_type = other DNA
tcgcatggtcacaattgcacagagcagcatatataaagaactatgctgtttctataaataatgaatttattggag

SEQ ID NO: 69964 - DNA, 75 bp, synthetic construct
  source 1..75: mol_type = other DNA
aggataaatcattactgccatttttcagcgacgaacgagtgattcgtgctgctggtggcgctggcgcattgtctg

SEQ ID NO: 69965 - DNA, 75 bp, synthetic construct
  source 1..75: mol_type = other DNA
acaaaagaaaatgatgtttatgatagtctaaatttttcaagcaaagatttaacgaattcttatatgaatggaatg

SEQ ID NO: 69966 - DNA, 75 bp, synthetic construct
  source 1..75: mol_type = other DNA
gcttaacgccgtcggcacagcattcaaccgcatgtctccgggattaagtgcaatggccgccagaatactgacgag

SEQ ID NO: 69967 - DNA, 75 bp, synthetic construct
  source 1..75: mol_type = other DNA
caggtgcagcctggtgttgataatgcctggcgtgaatcccgtggggatattggtaaaggaatggagagcgtacct

SEQ ID NO: 69968 - DNA, 75 bp, synthetic construct
  source 1..75: mol_type = other DNA
cggtaccggaacttgggctggtggtccttaagccgggccgtgaatccatgcaggtatttcataaccctcgagtgc

SEQ ID NO: 69969 - DNA, 75 bp, synthetic construct
  source 1..75: mol_type = other DNA
ctgccagtggcctcatggtgactaccatcacagtgaaaccgtcatacatcgttacggtaccgacgcgatggtgtt

SEQ ID NO: 69970 - DNA, 75 bp, synthetic construct
  source 1..75: mol_type = other DNA
gataacagtggtcgtaaggcaacgattaatctttggcagattgatgaagcgaataatactgttgcccttgaaggt

SEQ ID NO: 69971 - DNA, 75 bp, synthetic construct
  source 1..75: mol_type = other DNA
aatgtagattcagaagaacatgtatcaaccagcaaagcggttgttgatgcctgggttgaagaatggaatcaggtt

SEQ ID NO: 69972 - DNA, 75 bp, synthetic construct
  source 1..75: mol_type = other DNA
tgttccagcttccgtgttgcagctgcatccttcgctgatggtaatcgctgataaagccgctgccgcagaattagc

SEQ ID NO: 69973 - DNA, 75 bp, synthetic construct
  source 1..75: mol_type = other DNA
cacactgggttattactcggcgaactgaaaaaagataccacggtggcgcaatatggacgaaatgcgcataagcgg

SEQ ID NO: 69974 - DNA, 75 bp, synthetic construct
  source 1..75: mol_type = other DNA
aactggccaatgtatcgctcatgacggtttcacgggtgctgaatgacccgaaacgcgtaaagcctgagactctgg

SEQ ID NO: 69975 - DNA, 75 bp, synthetic construct
  source 1..75: mol_type = other DNA
cctcaagtagcaattcgttcaccattgagaggagttgcttccgacctgatatgggaagacggaatatcaactttt

SEQ ID NO: 69976 - DNA, 75 bp, synthetic construct
  source 1..75: mol_type = other DNA
acagcgaactgcgcagcggcgtcctgctgcttactctgctgcattcaccgctgcgctatattccacccgctgctg

SEQ ID NO: 69977 - DNA, 75 bp, synthetic construct
  source 1..75: mol_type = other DNA
tcggatggtttcatgaagcgatacaaaccgccagtgaggtcagattcatcacggcaggacgactggcatttatta

SEQ ID NO: 69978 - DNA, 75 bp, synthetic construct
  source 1..75: mol_type = other DNA
catggttggtgacgctgtcagggcggaaatgaacagaatggcacgtgccggaaccggcagcttccgcgatcgcga

SEQ ID NO: 69979 - DNA, 75 bp, synthetic construct
  source 1..75: mol_type = other DNA
tgccaggtagttgagagcccagcaggttcacgcaaatggtacaaatacgagcataagacaggttgtattgcgtcg

SEQ ID NO: 69980 - DNA, 75 bp, synthetic construct
  source 1..75: mol_type = other DNA
tttccgcaggccatgagagaaagctatagaaatgcgcctgcaacgagaaaccgggagattgagcgcgacgtgaca

SEQ ID NO: 69981 - DNA, 75 bp, synthetic construct
  source 1..75: mol_type = other DNA
gctgcatgaatggatggtggagaagaatggcacgttgtcgaaaaaatccagactgggcgaagcgttcagctatgt

SEQ ID NO: 69982 - DNA, 75 bp, synthetic construct
  source 1..75: mol_type = other DNA
aggttccccgccagttgcgacaatcacgtcatcgtcgtccgttaccagcacatcttccccgtgaaatacaccgcc

SEQ ID NO: 69983 - DNA, 75 bp, synthetic construct
  source 1..75: mol_type = other DNA
tgctgcgcagaccttaatattccgttctttgtggatgcgggaaacaaaaagctggtcttctggtttgtacgtgtc

SEQ ID NO: 69984 - DNA, 75 bp, synthetic construct
  source 1..75: mol_type = other DNA
ttgttgataacgacaccgctatgatggtgcaaagcttcgttgattcctgtgtatcaattgactttgataaattac

SEQ ID NO: 69985 - DNA, 75 bp, synthetic construct
  source 1..75: mol_type = other DNA
actgcgccggatgttgttcggtacccgttctgaaaaactgaagcgtgaggttgaacaggctgaggcccaactgaa

SEQ ID NO: 69986 - DNA, 75 bp, synthetic construct
  source 1..75: mol_type = other DNA
gccatcagcaacggcggcaccggcacgcaggttaacggtgatgaagccaccgtaaacaataacggcagcaccacc

SEQ ID NO: 69987 - DNA, 75 bp, synthetic construct
  source 1..75: mol_type = other DNA
atgagcgaaaccaagaaaccaattccacgcacttacctacacgttgaccctgaaattttcaagattttatttgct

SEQ ID NO: 69988 - DNA, 75 bp, synthetic construct
  source 1..75: mol_type = other DNA
tatcggtgccatcaaaaacggttatgtcacgctttcaccgttaacgacatatgataaatgggatggtgagaaatg

SEQ ID NO: 69989 - DNA, 75 bp, synthetic construct
  source 1..75: mol_type = other DNA
aagtcgtgctgaaaattattgtaataacgagatcggcaacggttacgcgattcctggcgtgaatcttttaagcag

SEQ ID NO: 69990 - DNA, 75 bp, synthetic construct
  source 1..75: mol_type = other DNA
agcagaagcaaacgataagtacgctggcaaccgtgtcagcagggctggccggaggtcttaccggaaacagcactg

SEQ ID NO: 69991 - DNA, 75 bp, synthetic construct
  source 1..75: mol_type = other DNA
cattccacagtgggtgaccctggagccccgtatcttcggctggatggaccgtctgtgtgaagactactgcggtgg

SEQ ID NO: 69992 - DNA, 75 bp, synthetic construct
  source 1..75: mol_type = other DNA
acctcacgggagttaccacgatcaacggccccgcgacactcaatggtgatctggaaatcaacggaagcgcccatg

SEQ ID NO: 69993 - DNA, 75 bp, synthetic construct
  source 1..75: mol_type = other DNA
cgggcgaaaaagctcttcaggtaaattgcagtaagcatctaatttttcgtactagctgggtttatgcagttaacg

SEQ ID NO: 69994 - DNA, 75 bp, synthetic construct
  source 1..75: mol_type = other DNA
acagaatatgacggcgatgctgaccggtgcagaggcagactggcggggattcacccgttcggtgctgtccatgat

SEQ ID NO: 69995 - DNA, 75 bp, synthetic construct
  source 1..75: mol_type = other DNA
aagaaccagtcaatgaaccaatagctgttggtgcatcagttgatgagtccgtgcgagttcgttcaaaccgaccgg

SEQ ID NO: 69996 - DNA, 75 bp, synthetic construct
  source 1..75: mol_type = other DNA
gcatcagcttctggccgcagcattttggcctcattccacagtgggttaccctggagccccgtgtcttcggctgga

SEQ ID NO: 69997 - DNA, 75 bp, synthetic construct
  source 1..75: mol_type = other DNA
gcatcagcttctggccgcagcattttggcctcattccacagtgggtaaccctggatccccgtgtcttcggctgga

SEQ ID NO: 69998 - DNA, 75 bp, synthetic construct
  source 1..75: mol_type = other DNA
atcagcattaatgatgctggttatggcaaacggtgaaaaaattatcagctcgttcctggatgctggtattcctct

SEQ ID NO: 69999 - DNA, 75 bp, synthetic construct
  source 1..75: mol_type = other DNA
atgacaatagaaaaacacgaaagaagtactaaggatttggtgaaagcagcagtatcgggatggttgggcactgcg

SEQ ID NO: 70000 - DNA, 75 bp, synthetic construct
  source 1..75: mol_type = other DNA
gcactgtgcactggcatatgatggtctttgcacatccggacgagattgaaaccatcgtgtcccacgtctgcgata

SEQ ID NO: 70001 - DNA, 75 bp, synthetic construct
  source 1..75: mol_type = other DNA
tcgaggagcaggcaggggaagaggatctgctggctgaggcgaagaacgataaagataaggtgacgcaaaagctgg

SEQ ID NO: 70002 - DNA, 75 bp, synthetic construct
  source 1..75: mol_type = other DNA
ggccccccgccgccaggctgggcgatgaaattcagcacaagagttttttgggggcgctggcaggggccgtgctgg

SEQ ID NO: 70003 - DNA, 75 bp, synthetic construct
  source 1..75: mol_type = other DNA
tcaggtagcaacaaaccgttcttcgaaatcaaaaatggcgtaccgacggtaggagtcatcgacacatccggaaaa

SEQ ID NO: 70004 - DNA, 75 bp, synthetic construct
  source 1..75: mol_type = other DNA
tctccggtaacgtcccggacaccaccatctggcaacacggcgatgatcttctcgtgcgctcacgggccatgctgc

SEQ ID NO: 70005 - DNA, 75 bp, synthetic construct
  source 1..75: mol_type = other DNA
ttctgcgctgccgcgatgcagtcaataaaggttcagtcccgcacaaattccgcaagtgggtaacagcagaagttc

SEQ ID NO: 70006 - DNA, 75 bp, synthetic construct
  source 1..75: mol_type = other DNA
atgaaaagtatagcaaaggcacaaaacgatttcactatcttcaaattcggcgacagtgaaatccgcgtcatcaac

SEQ ID NO: 70007 - DNA, 75 bp, synthetic construct
  source 1..75: mol_type = other DNA
tattgcccgtgatcaccctgtcggttgcgccaacaactgaagtgatccgactgatgcgtatcagcactatcgaag

SEQ ID NO: 70008 - DNA, 75 bp, synthetic construct
  source 1..75: mol_type = other DNA
aaatttaatcagcaaaactcgcaaacagcagctctgttgccacgctacgatttacctgcaccaatgcttgaccga

SEQ ID NO: 70009 - DNA, 75 bp, synthetic construct
  source 1..75: mol_type = other DNA
tgagccttcaagtaacattgacttagctacacataatttaaaaaatactgctactccaactaaagcggataatgt

SEQ ID NO: 70010 - DNA, 75 bp, synthetic construct
  source 1..75: mol_type = other DNA
tgatgacgaaacatgggtactgtttaacgtcatgaacggtaaccgcgctgaaatgagcccggaagccgccggcat

SEQ ID NO: 70011 - DNA, 75 bp, synthetic construct
  source 1..75: mol_type = other DNA
gcctattcaggcttatatttatcgtatggatactcggctgaacaaaacggctgaacacttttggacgattttacg

SEQ ID NO: 70012 - DNA, 75 bp, synthetic construct
  source 1..75: mol_type = other DNA
aagagacggaggtcttcctgcgttctgcgctggcacgtgccgaagaaaagatcgaagaagatgagcgggaaatag

SEQ ID NO: 70013 - DNA, 75 bp, synthetic construct
  source 1..75: mol_type = other DNA
cagcacgacagcgatactgccgctgacggctcccgctgcggtgggcgttctgcggattcccgcccgggcggcggt

SEQ ID NO: 70014 - DNA, 75 bp, synthetic construct
  source 1..75: mol_type = other DNA
gtggagctgagccgtgccacactgggtcgctggaccggtgccgttgctgaactgctggagccgctgtatgacgtc

SEQ ID NO: 70015 - DNA, 75 bp, synthetic construct
  source 1..75: mol_type = other DNA
agatggcccgtaaaggtgcgcaggatgagctccggctgcagttgcgtgatggcggtctgttatcggggagcgggc

SEQ ID NO: 70016 - DNA, 75 bp, synthetic construct
  source 1..75: mol_type = other DNA
cagctgctgcacatctttctgacgctcaacgaggacctattgcgtcaccggatcgcgaaccagaccatgcatcct

SEQ ID NO: 70017 - DNA, 75 bp, synthetic construct
  source 1..75: mol_type = other DNA
ttcgtgagctaattgcacaaaatgccatagcgcgaaatctaggcgttacgccgcaagctgtgaaccaatggtttt

SEQ ID NO: 70018 - DNA, 75 bp, synthetic construct
  source 1..75: mol_type = other DNA
acggctgaactttcgtccattgcaggcacccccatcgaggctggccccttcgatacagtggtgctttttaagatt

SEQ ID NO: 70019 - DNA, 75 bp, synthetic construct
  source 1..75: mol_type = other DNA
acatcctcgaatatgccagacagcagaggcatactggtcagcattgtaaaattccaccaggggatatggttgaaa

SEQ ID NO: 70020 - DNA, 75 bp, synthetic construct
  source 1..75: mol_type = other DNA
gttcacaagtatggcgctcatatatttcatacgaatgataaaataatttgggattatgtcaattcattcgtggaa

SEQ ID NO: 70021 - DNA, 75 bp, synthetic construct
  source 1..75: mol_type = other DNA
gcccaacggtaactatgtcgatctaccttgacccacaaaccgatcttcttattttgaaggcgaaggacagaagtg

SEQ ID NO: 70022 - DNA, 75 bp, synthetic construct
  source 1..75: mol_type = other DNA
cgcttccaggacgaagaagtacagcgtgatgtttccatcatgccgttcaaaattattgctgctgataacggcgac

SEQ ID NO: 70023 - DNA, 75 bp, synthetic construct
  source 1..75: mol_type = other DNA
gaaagtttgtcgttgcaagatttaagccgggcgcaacggatggcgaggattctgaaaaaacgttatcaattataa

SEQ ID NO: 70024 - DNA, 75 bp, synthetic construct
  source 1..75: mol_type = other DNA
cgtctggagtctgaagaaagttgttgcccggaatgtggcggcgagctggattatctgggggaagtcagtactgag

SEQ ID NO: 70025 - DNA, 75 bp, synthetic construct
  source 1..75: mol_type = other DNA
tcatggggatattgactgtttatgtactgggggggacggaaatatataaaaaaaaaagaaaaaaagattattttt

SEQ ID NO: 70026 - DNA, 75 bp, synthetic construct
  source 1..75: mol_type = other DNA
tgccccctatcgcgtctacaatatcggcaatagttcaccggttgagctcatggactatatccaggctttggaaga

SEQ ID NO: 70027 - DNA, 75 bp, synthetic construct
  source 1..75: mol_type = other DNA
tgcactgaagaacacctggtctgcggaggagcagcttcgtggaagctggatggccgggatgaagtccggctgggg

SEQ ID NO: 70028 - DNA, 75 bp, synthetic construct
  source 1..75: mol_type = other DNA
tgctgttgagcaggggctgagccgccaggcgctggctgcacaaaaagccgggatttccgtcgggcagtataaagc

SEQ ID NO: 70029 - DNA, 75 bp, synthetic construct
  source 1..75: mol_type = other DNA
atgtcatctgtttacaccagacaaccagagccacaacagcgcattctgcgcatgagagagctgacgaagatagtt

SEQ ID NO: 70030 - DNA, 75 bp, synthetic construct
  source 1..75: mol_type = other DNA
atcaaggaatggtctccacgattacgtacggcgatccagttagcccgaaatgtatcttccggcacatgcgagtat

SEQ ID NO: 70031 - DNA, 75 bp, synthetic construct
  source 1..75: mol_type = other DNA
atgccatgacggtccactattaccgtctgcgggattacgccctgcagcatccggaatgcagtgccattatgcgta

SEQ ID NO: 70032 - DNA, 75 bp, synthetic construct
  source 1..75: mol_type = other DNA
gccctgcattgaacagggaggatatccataccctgcgccaactgcagcttctgcaacagaaccggtgagccttac

SEQ ID NO: 70033 - DNA, 75 bp, synthetic construct
  source 1..75: mol_type = other DNA
tacagactgcggtcatgctcggtagccagacgtttgtcgtgttgtgtgcctgcgcaatattacgctggcagctgg

SEQ ID NO: 70034 - DNA, 75 bp, synthetic construct
  source 1..75: mol_type = other DNA
cagtccggtgcggaaatggcgcaggcggaaatccgcatctgggtgcgcggtcagtccggccgggaaatcacggca

SEQ ID NO: 70035 - DNA, 75 bp, synthetic construct
  source 1..75: mol_type = other DNA
aatatgtcgttcgtctgcgccgtttggggaatcatctacacgagcaaaatatttccctcgatcagctgcaggacg

SEQ ID NO: 70036 - DNA, 75 bp, synthetic construct
  source 1..75: mol_type = other DNA
atctgcttgagtgcaggatcaaggaaagatcgtttcaactctgccaagttcttctgttgggattccggcaaaagg

SEQ ID NO: 70037 - DNA, 75 bp, synthetic construct
  source 1..75: mol_type = other DNA
acaacaggtggccgacattctgcgtgacccggaggccagcgaaaatgataaatatgtggcgctgcaattcctgcg

SEQ ID NO: 70038 - DNA, 75 bp, synthetic construct
  source 1..75: mol_type = other DNA
ttcggtagcgatcacggcggcgagcgtggtgcactgttgtacgggctgatcggcacctgccggttgaatggtatc

SEQ ID NO: 70039 - DNA, 75 bp, synthetic construct
  source 1..75: mol_type = other DNA
gatattttgttatttactggcgcagtcacccgggcgatgcgtatgcctgcacttcgggcgtatgagtctgccccc

SEQ ID NO: 70040 - DNA, 75 bp, synthetic construct
  source 1..75: mol_type = other DNA
ggagcatctgccccgcgaaataaatcgcctggagccagaagaaagctgttgcccggagtgtggcggtgagctgga

SEQ ID NO: 70041 - DNA, 75 bp, synthetic construct
  source 1..75: mol_type = other DNA
agattcaagccagattatttcgttacaggaagaataaaccagaataatgcagtgaacactttatacattgagttg

SEQ ID NO: 70042 - DNA, 75 bp, synthetic construct
  source 1..75: mol_type = other DNA
gtggataaaggtcgcgtggtgtgtaattaccacctgccagatgaagcaattgtcgcaacaagggaatcattacag

SEQ ID NO: 70043 - DNA, 75 bp, synthetic construct
  source 1..75: mol_type = other DNA
gatgtgcatgcaagagtgccaaccgacatcaccacggaagccctgcagcgtatcggtgaactgtatgtcatcgag

SEQ ID NO: 70044 - DNA, 75 bp, synthetic construct
  source 1..75: mol_type = other DNA
cggcgatatcgtccgtggttccgatctggtggtaaccgctattgccgaaggtcgtaaggcggcagacggtattat

SEQ ID NO: 70045 - DNA, 75 bp, synthetic construct
  source 1..75: mol_type = other DNA
ttcgcatcggcgtcgagggtgacacctgcgatggccgtgtcatcagcggtgatgacattcaggaaatggcggatt

SEQ ID NO: 70046 - DNA, 75 bp, synthetic construct
  source 1..75: mol_type = other DNA
atcaaacggctgatggagatcgtcgagcgggtggacaatgtcggcaatcgtagtgttgtcactgtaccgcttgca

SEQ ID NO: 70047 - DNA, 75 bp, synthetic construct
  source 1..75: mol_type = other DNA
cactggaagcatggtttgatgttgaacgctatgaggcgatagagaaactcaccttacagcagttttatgttgagg

SEQ ID NO: 70048 - DNA, 75 bp, synthetic construct
  source 1..75: mol_type = other DNA
ataaaacaggttcggcagcactgttgccctgtatcgaacaggccagggagggtatccgtaccctgcgccaacagt

SEQ ID NO: 70049 - DNA, 75 bp, synthetic construct
  source 1..75: mol_type = other DNA
ccaacgtgttgatttccctggcagatagccacggcaaaacggtgtatcactcccccggtgcgcctgatatccgcg

SEQ ID NO: 70050 - DNA, 75 bp, synthetic construct
  source 1..75: mol_type = other DNA
gggaagtctggttctgggctttttgacttatctgacaaatctgtacttcaaaatcagagaagacagaagaaaggc

SEQ ID NO: 70051 - DNA, 75 bp, synthetic construct
  source 1..75: mol_type = other DNA
ctgcagctgctggacaaagtctctccgtcccagtgggtggcaataggtgtgctgggaagtctgctgtttggcctg

SEQ ID NO: 70052 - DNA, 75 bp, synthetic construct
  source 1..75: mol_type = other DNA
tgtggcgttcaccacaggtaacgcggggctgcattttgagctgcgcccgggaactgctgccggtgtgatgcagac

SEQ ID NO: 70053 - DNA, 75 bp, synthetic construct
  source 1..75: mol_type = other DNA
gggtagcttggtatttggcctgctgacgtacctgacaaacctttatttcaagattaaagaagataagcgcaaggc

SEQ ID NO: 70054 - DNA, 75 bp, synthetic construct
  source 1..75: mol_type = other DNA
agatggaaaaaatcacaacaggtgtgtcatacaccacgtcagcggtggggacgggatactggttactgcagctgc

SEQ ID NO: 70055 - DNA, 75 bp, synthetic construct
  source 1..75: mol_type = other DNA
ggtgatgtgattagccacaaaaccgagaacagttacgtctacgccgaatccggcctcgtgaccacggtgggggtg

SEQ ID NO: 70056 - DNA, 75 bp, synthetic construct
  source 1..75: mol_type = other DNA
gcaacagatgcaggaccacaggcacacagggtaatcagccaccagcgggaggcgatgacccttacggtgacaata

SEQ ID NO: 70057 - DNA, 75 bp, synthetic construct
  source 1..75: mol_type = other DNA
ggggagtctgctgtttggtctgctgacgtacctgacgaacctgtatttcaaaatcagagaagaccggcgtaaggc

SEQ ID NO: 70058 - DNA, 75 bp, synthetic construct
  source 1..75: mol_type = other DNA
cccagcgattagttcgtactttgtgtccagattgtcgtcagccgtatctggtcgatgccagtctggcgaaagtca

SEQ ID NO: 70059 - DNA, 75 bp, synthetic construct
  source 1..75: mol_type = other DNA
ggtggggacgggatactggttactgcagctgctggacaaagtctctccgtcccagtgggtggcgataggtgtgct

SEQ ID NO: 70060 - DNA, 75 bp, synthetic construct
  source 1..75: mol_type = other DNA
tctttgttgctttcctgttcatgactatcgtacctgatagcgacgccgcattagtaaagcgtcctgagaaaggtc

SEQ ID NO: 70061 - DNA, 75 bp, synthetic construct
  source 1..75: mol_type = other DNA
ccggaaatgtgccttccattgctttactgatggcgtggaagaaaggggagatgaagccggcattacgcgatttca

SEQ ID NO: 70062 - DNA, 75 bp, synthetic construct
  source 1..75: mol_type = other DNA
gacaccgccgggcgctggcgcgaggcgtggtatccgggcaaaggcgatatgctgatgctgaagttgggctatcag

SEQ ID NO: 70063 - DNA, 75 bp, synthetic construct
  source 1..75: mol_type = other DNA
gccgctgtatgtctggtcactgcaggagagtccggatgagcgagggcgtattactcagcccgtgggatgccttct

SEQ ID NO: 70064 - DNA, 75 bp, synthetic construct
  source 1..75: mol_type = other DNA
ggggggctatccgcgcgacggtgaaggatggtcgctttgtggcggcaaaaccgttcgaactggataaatatccgt

SEQ ID NO: 70065 - DNA, 75 bp, synthetic construct
  source 1..75: mol_type = other DNA
aaaagcagccaggaatgccctgcaaacacaggaaatatcacagataagtgttttaatcatcgctgcattctggaa

SEQ ID NO: 70066 - DNA, 75 bp, synthetic construct
  source 1..75: mol_type = other DNA
attcagataacgtattgaaagaatgctttaataatcattgcattctgcaaatatgcccttacggactaaaacaac

SEQ ID NO: 70067 - DNA, 75 bp, synthetic construct
  source 1..75: mol_type = other DNA
aggaatacgttgccaaaaaattgagattaccattcgagatgataaccgaggcaagaaatggtgataggtactttg

SEQ ID NO: 70068 - DNA, 75 bp, synthetic construct
  source 1..75: mol_type = other DNA
acgtcacccggacgcctcgctgaccgcaaaaggctttgttcaacttagcagcgccactaacagcacatctgaaac

SEQ ID NO: 70069 - DNA, 75 bp, synthetic construct
  source 1..75: mol_type = other DNA
aaaaatcagcccaaatcgggaaccaactcccgtaatggctattccacgaaaaccgtcaccactaccgacgggccg

SEQ ID NO: 70070 - DNA, 75 bp, synthetic construct
  source 1..75: mol_type = other DNA
gcagcggaggaaatcgggcaactcgtagccgtcgctcgtgaagaactccagcggcgtaaagccaaagaatctgaa

SEQ ID NO: 70071 - DNA, 75 bp, synthetic construct
  source 1..75: mol_type = other DNA
cgcctggtgcacttaatgatcgaaaacgaagtaggggtttcttcacgtttgttgaaggtgccgaaactggatatg

SEQ ID NO: 70072 - DNA, 75 bp, synthetic construct
  source 1..75: mol_type = other DNA
tctgtgcagggggctgctttacgctctgctgtgagttcagccgattttagcgagcatagccgtgcacgtgatgtc

SEQ ID NO: 70073 - DNA, 75 bp, synthetic construct
  source 1..75: mol_type = other DNA
atgagcagaaaaacccaacgttactctaaagagttcaaagccgaagctgtcagaacggttcttgaaaatcaactt

SEQ ID NO: 70074 - DNA, 75 bp, synthetic construct
  source 1..75: mol_type = other DNA
taccacaccaggcccagggcgtgacatttgcttctatttatcggcgtaagaaagcgatgctgacgctcgggcagg

SEQ ID NO: 70075 - DNA, 75 bp, synthetic construct
  source 1..75: mol_type = other DNA
gccagcacctgaacagcctgctgtctgaccgcgattacacctggaacgacaacggcgaactcatccgcatcagca

SEQ ID NO: 70076 - DNA, 75 bp, synthetic construct
  source 1..75: mol_type = other DNA
ttctggcgcgtcgtgagcggtgcttacggaaaagcagcaagcgcgctgcatcgggtgaagagtggtatctgtcag

SEQ ID NO: 70077 - DNA, 75 bp, synthetic construct
  source 1..75: mol_type = other DNA
caccgccgagggcaacgtttgccacggcgatgtgattaatcacaaaactgaaaacagctatgtgtacgccgaatc

SEQ ID NO: 70078 - DNA, 75 bp, synthetic construct
  source 1..75: mol_type = other DNA
ttaatgcttacctgtcccgcgtggcggaactgaacggcgtcgacaccgacgatgtggcaaagaaattcaccgtcg

SEQ ID NO: 70079 - DNA, 75 bp, synthetic construct
  source 1..75: mol_type = other DNA
taaccgccactggctactgcctgcgtggaagaatatcgcggcagaaacagaagaaagttacggtcccggagacag

SEQ ID NO: 70080 - DNA, 75 bp, synthetic construct
  source 1..75: mol_type = other DNA
gtggcaccgagcgtcagccgaaggacttctcgaagctggcgtcaaacaagtacgaatgcgaccagattaacttcg

SEQ ID NO: 70081 - DNA, 75 bp, synthetic construct
  source 1..75: mol_type = other DNA
tgcgaggattagcttcgctgatggtttttttcgcgcatataacagctggttatagcttgcatataaataacttcc

SEQ ID NO: 70082 - DNA, 75 bp, synthetic construct
  source 1..75: mol_type = other DNA
cagcaacatgctccggaatgtggtgaaagaacggcactattgagtttgatacaagatgaaggtctgctctctggg

SEQ ID NO: 70083 - DNA, 75 bp, synthetic construct
  source 1..75: mol_type = other DNA
ggggagtctggttctgggcttcctgacttatctgacaaatctgtacttcaaaatcagagaagacagaagaaaggc

SEQ ID NO: 70084 - DNA, 75 bp, synthetic construct
  source 1..75: mol_type = other DNA
ggcatgctgacgtatctgacaaacctttatttcaagattaaagaagacaggcgtaaggctgcgagaggagagtaa

SEQ ID NO: 70085 - DNA, 75 bp, synthetic construct
  source 1..75: mol_type = other DNA
tacaaataatgcgcggtattgcagcattaattgttgttgcatttcacataagatacaacttatctgtttatgagc

SEQ ID NO: 70086 - DNA, 75 bp, synthetic construct
  source 1..75: mol_type = other DNA
cgttccggtccaggagccgggcagtggtaaaacaaggactgcccggctgtgggtctacgtccgtgatgaccgtaa

SEQ ID NO: 70087 - DNA, 75 bp, synthetic construct
  source 1..75: mol_type = other DNA
aactggctatgcacggacagactcaggttaacaaaatctacgacccggcagccggttccggttcgctgttgctgc

SEQ ID NO: 70088 - DNA, 75 bp, synthetic construct
  source 1..75: mol_type = other DNA
aaatgagcccggaagccgccggcattgccgcctgtctgatgacgtacaatcatcacgcctgtcgtacggagtgtt

SEQ ID NO: 70089 - DNA, 75 bp, synthetic construct
  source 1..75: mol_type = other DNA
tgaagtggatattctgcgcaatgacgtgtgtgatatcagcctgaatctgcagctgacagagcgcgtactggtcag

SEQ ID NO: 70090 - DNA, 75 bp, synthetic construct
  source 1..75: mol_type = other DNA
cagcaatatgctggtgcgagccatcgaggtgacaacggataaaaccagcgagaacgtgctgaactgcacgcttac

SEQ ID NO: 70091 - DNA, 75 bp, synthetic construct
  source 1..75: mol_type = other DNA
ctaactatgcggcaaatgccggtaagtcaggcggtgagttctttacaccgcagcacgtctctaagctgattgcac

SEQ ID NO: 70092 - DNA, 75 bp, synthetic construct
  source 1..75: mol_type = other DNA
tgtatgaggttttgagcagggataacgattcggctgagctggacgcctggtttgctgaaccaccgctgacacgac

SEQ ID NO: 70093 - DNA, 75 bp, synthetic construct
  source 1..75: mol_type = other DNA
cggtcctgaccagtatgcccggagtcggtgtcaggaccgcagccagactcctcaccgaggtcgcctgccgcgcct

SEQ ID NO: 70094 - DNA, 75 bp, synthetic construct
  source 1..75: mol_type = other DNA
tgaacaacgcgaaattcagcagcttaaagcgcagataaagcgccctgagatggaaaaagaaatactaaagcagac

SEQ ID NO: 70095 - DNA, 75 bp, synthetic construct
  source 1..75: mol_type = other DNA
atggctacttggcaaggaacaaacggcggattgttggctggtatcggcggcgtcaactcaaacgctccgagcgta

SEQ ID NO: 70096 - DNA, 75 bp, synthetic construct
  source 1..75: mol_type = other DNA
aatgccatgaacggcaaccgcgctgaaatgagcccggaagccgccggcattgccgcctgtctgatggcgtacagt

SEQ ID NO: 70097 - DNA, 75 bp, synthetic construct
  source 1..75: mol_type = other DNA
aaaagattgatgccatggcggctgaaaaaatcagtgccggtcagtcagcagagccaaagtccacgtccctcccgt

SEQ ID NO: 70098 - DNA, 75 bp, synthetic construct
  source 1..75: mol_type = other DNA
tgtattcacactggatgataagccggaattacttgtaagacctacatcacaggaagttgcagcatcagtaagaca

SEQ ID NO: 70099 - DNA, 75 bp, synthetic construct
  source 1..75: mol_type = other DNA
gtgaccctagagccccgtatcttcggctggatggaccgtctttgcgaagactactgcggtggtatctggaatctg

SEQ ID NO: 70100 - DNA, 75 bp, synthetic construct
  source 1..75: mol_type = other DNA
cacggtcagcaaaatcgaccagttgcgcaaagatattgatgcgattgtggctgaaattgaaggctgcgaggtgca

SEQ ID NO: 70101 - DNA, 75 bp, synthetic construct
  source 1..75: mol_type = other DNA
gtgcagtttccggcgcaaaccgtgcgcgccacggtgattggcgcgggtgcacataccctttcgctctctggcagc

SEQ ID NO: 70102 - DNA, 75 bp, synthetic construct
  source 1..75: mol_type = other DNA
actggtcatcactggcggggatgagcggccagcaccatgcggcggatgtttcgaaccgcagcgaagcgcaaaaac

SEQ ID NO: 70103 - DNA, 75 bp, synthetic construct
  source 1..75: mol_type = other DNA
caccaccattgccgttaacatactagtgttgtccaagcacaaaaccgacacaagtgttcagtttattgacgccag

SEQ ID NO: 70104 - DNA, 75 bp, synthetic construct
  source 1..75: mol_type = other DNA
tgcagtgggtcgagcagaataatggtgaatataccattgtctggacagcatgggttgccgaggaaaatctggttg

SEQ ID NO: 70105 - DNA, 75 bp, synthetic construct
  source 1..75: mol_type = other DNA
gtgactttatttttgacaacgggcgtcttgagaatatctatctgatagataaaaagaatctcatgcgcaacaaag

SEQ ID NO: 70106 - DNA, 75 bp, synthetic construct
  source 1..75: mol_type = other DNA
accgacataagctggcagcggggttcccagcgcctgatggcatcgacggattcgcgaaccacatgcggaatggcc

SEQ ID NO: 70107 - DNA, 75 bp, synthetic construct
  source 1..75: mol_type = other DNA
actgccggaaccgccgcagtttgtggaaacgcagacagttcaggagctgcgcgcactgtttcaggcggttcgcct

SEQ ID NO: 70108 - DNA, 75 bp, synthetic construct
  source 1..75: mol_type = other DNA
tttatacccgtaaaatcacagtcggcgatgctggccaacgttcgggaacagcttcagaacctcaatggtgtggtg

SEQ ID NO: 70109 - DNA, 75 bp, synthetic construct
  source 1..75: mol_type = other DNA
gagggtaaacgtcgcggtaaggtgaccttttatgttgatggtaaatactggcactatcgcgactatccactcgaa

SEQ ID NO: 70110 - DNA, 75 bp, synthetic construct
  source 1..75: mol_type = other DNA
aatggtaaccacattacgtttgtcagccacggtgagacgaccttactgagcgaaaagggcaaactgaaattgcag

SEQ ID NO: 70111 - DNA, 75 bp, synthetic construct
  source 1..75: mol_type = other DNA
gctttcaaccagatacatcgttacagtaaagagagttttaacagcgaaaattccctgtttaagtatctgcaactg

SEQ ID NO: 70112 - DNA, 75 bp, synthetic construct
  source 1..75: mol_type = other DNA
gtgtgcctgttatgccgcctgttgcggctgaattaagcaaaacaacgctttatttcaccgaaggcgggaacggta

SEQ ID NO: 70113 - DNA, 75 bp, synthetic construct
  source 1..75: mol_type = other DNA
gtgtctggggttcctgacatacctgacgaatctgtatttcaaaattaaagaggaccgtcgcaaggctgcccgggg

SEQ ID NO: 70114 - DNA, 75 bp, synthetic construct
  source 1..75: mol_type = other DNA
gaaaatccgtcagtatctggtcgataataactatgtcgaaaccgtgatttcactggcaccgaacctgttctttgg

SEQ ID NO: 70115 - DNA, 75 bp, synthetic construct
  source 1..75: mol_type = other DNA
cagcccgatgccatcaataacccggcgttacgggaaaagctattcacctttgaggtggatattctgcgcaacgat

SEQ ID NO: 70116 - DNA, 75 bp, synthetic construct
  source 1..75: mol_type = other DNA
aggctaaaaaacagtttgatgaccatatcatcgaagaaggtttttttggtcaggaaatcaaccatacgacctata

SEQ ID NO: 70117 - DNA, 75 bp, synthetic construct
  source 1..75: mol_type = other DNA
agttatctttattcgcagcatagacttattggtgccgtgggcgtaaaggatttggttgttgttgaaacgaaagat

SEQ ID NO: 70118 - DNA, 75 bp, synthetic construct
  source 1..75: mol_type = other DNA
gtcacagagaacccaggaagatatcaaagtggctgttgcggatgatgattgtgcttcacgtcctgtgcctgctgc

SEQ ID NO: 70119 - DNA, 75 bp, synthetic construct
  source 1..75: mol_type = other DNA
tacgattaccagaagttctcgaacgaactggctacggaaaagcctggatatatcgtctgatcaacgatggtaagt

SEQ ID NO: 70120 - DNA, 75 bp, synthetic construct
  source 1..75: mol_type = other DNA
atggctacttggcaacaaggaatcaactcaggcggttttctggctggcatcggtacgcaaaacgagaatgcgcca

SEQ ID NO: 70121 - DNA, 75 bp, synthetic construct
  source 1..75: mol_type = other DNA
acggctcggaaaataccgcaggtcttaaacgaaatctggataaggacgataacaaaattatcgtcaccactattc

SEQ ID NO: 70122 - DNA, 75 bp, synthetic construct
  source 1..75: mol_type = other DNA
aaaccacaaagcttgcgacgtcattaatcgatgagtacgccctgctgggctggcgcgccatgctgactgaagtca

SEQ ID NO: 70123 - DNA, 75 bp, synthetic construct
  source 1..75: mol_type = other DNA
cgaccggctgacgacggtacagaccgacaccacgcgtatccagacggtataccagccggggagcttcgcgccgct

SEQ ID NO: 70124 - DNA, 75 bp, synthetic construct
  source 1..75: mol_type = other DNA
aagtgagtatgcatatattagttttttaacagtcagtcagcgtcgcactttatttatgcacgcacgactgacaga

SEQ ID NO: 70125 - DNA, 75 bp, synthetic construct
  source 1..75: mol_type = other DNA
ccggataattggtaagcatctggccgtccctcgctggcaggagacatgcgattattataatcagatgatggaacg

SEQ ID NO: 70126 - DNA, 75 bp, synthetic construct
  source 1..75: mol_type = other DNA
ggtgccctgtacaaatatatgcgaaaaaaattccctgatgaactattccgagccatcagggtggatcccaaaact

SEQ ID NO: 70127 - DNA, 75 bp, synthetic construct
  source 1..75: mol_type = other DNA
gccctgataaataccctaacccgaccgacggtttacctgttggatgtaaggttaacagatcaaatgaaccggagt

SEQ ID NO: 70128 - DNA, 75 bp, synthetic construct
  source 1..75: mol_type = other DNA
ataagacaacgcatggtgggcaggttatatctgtgtcatcttcgatggttatcaatggaaaaaaagttgcgcttg

SEQ ID NO: 70129 - DNA, 75 bp, synthetic construct
  source 1..75: mol_type = other DNA
agatcgacagtaaaaagtcacattagggcactggaagagatggggcttttgaaaagggaattcagaagaaaagga

SEQ ID NO: 70130 - DNA, 75 bp, synthetic construct
  source 1..75: mol_type = other DNA
ggaggtatatcactcaggatccgattgggctgaaggggggatggaatttttatcagtatccgctgaatccggttc

SEQ ID NO: 70131 - DNA, 75 bp, synthetic construct
  source 1..75: mol_type = other DNA
ctttatgaccaaacgcgccagcggtctggcgacgtatcggaacaccgacttcttcggcgttatcgatggcctgaa

SEQ ID NO: 70132 - DNA, 75 bp, synthetic construct
  source 1..75: mol_type = other DNA
aagccgtattctgggcgtgtcgcgtgcgcaactggcacaacggatgaaaacatctggtaataagccgaataaacg

SEQ ID NO: 70133 - DNA, 75 bp, synthetic construct
  source 1..75: mol_type = other DNA
tggtgtgatcacctcaaaaaccggtgctgcgctacatgatattttgcatgtgttaaaacgtcgcgatccttctct

SEQ ID NO: 70134 - DNA, 75 bp, synthetic construct
  source 1..75: mol_type = other DNA
ctcagaatgcaacagatatcgacgcactggataccaggctaacagcggctgaaggaagcatttcgacgcttcaaa

SEQ ID NO: 70135 - DNA, 75 bp, synthetic construct
  source 1..75: mol_type = other DNA
acgccctcctgggtaaaaaatacggtatggtaccaaatttttccagaccgtttctgtaatggcagacctgaaatt

SEQ ID NO: 70136 - DNA, 75 bp, synthetic construct
  source 1..75: mol_type = other DNA
acgcagtgaagccaggaaactcctcgctgctggaggcgatccaggggaggcaaaaaaggaagaaaaaatcgcgca

SEQ ID NO: 70137 - DNA, 75 bp, synthetic construct
  source 1..75: mol_type = other DNA
ggtcatcgcagaacaggtaaagacgttatgtaccgtggccacctgacgcttgacgggattgccagaatgtatgcc

SEQ ID NO: 70138 - DNA, 75 bp, synthetic construct
  source 1..75: mol_type = other DNA
ttcccatgtattagtaatgaaaggggtctatggcggtacttatcggttgtttgaacgtctgcgtaaacaaacttc

SEQ ID NO: 70139 - DNA, 75 bp, synthetic construct
  source 1..75: mol_type = other DNA
ttgaaaaacagccagcagctatgcgccggataattggcaagcatcttgccgtccctcgctggcaggatacatgtg

SEQ ID NO: 70140 - DNA, 75 bp, synthetic construct
  source 1..75: mol_type = other DNA
tgtatctggagtacttaagcgtactgccggacgatcaggcgaaagaaggcttgctcaacgttgcgccgatcctcg

SEQ ID NO: 70141 - DNA, 75 bp, synthetic construct
  source 1..75: mol_type = other DNA
tcgctcttgagatcggacacgtacagaaattagctgatgagtgtgtagctgacatcctcaccgatctaccgaatg

SEQ ID NO: 70142 - DNA, 75 bp, synthetic construct
  source 1..75: mol_type = other DNA
gcgcagttaaaacaacgtcacgcaacgatgcgttttgaagaaatgaacgacgtcgaacgtgaacggctggtttgt

SEQ ID NO: 70143 - DNA, 75 bp, synthetic construct
  source 1..75: mol_type = other DNA
ttgaaaaacagccagcagctatgcgccggataattggtaagcatcttgccgttcctcgctggcaggatacatgtg

SEQ ID NO: 70144 - DNA, 75 bp, synthetic construct
  source 1..75: mol_type = other DNA
gaaatgagccctggtacggtgcgtgaatatgtcgttcgtctgcgccgtttggggaatcatctacacgagcaaaat

SEQ ID NO: 70145 - DNA, 75 bp, synthetic construct
  source 1..75: mol_type = other DNA
gattatctcaggagtgtggttttcaggtgtctccacatcgtttcagacatacactggcgagtatactgatgagca

SEQ ID NO: 70146 - DNA, 75 bp, synthetic construct
  source 1..75: mol_type = other DNA
atgagcgaaaaaacgacgttgacaaaggcatcaccagttgaattaaggcagtgtctggaaatcgcaaatcaactt

SEQ ID NO: 70147 - DNA, 75 bp, synthetic construct
  source 1..75: mol_type = other DNA
gggttaaaggctcgcagctggcaaaagatccggaggtgcttgcgtttatagcccgtaaacaatgcgagacggtgg

SEQ ID NO: 70148 - DNA, 75 bp, synthetic construct
  source 1..75: mol_type = other DNA
ccggcctgatacatcagagcaatacgttgccttaaaaactgctgttcagtccctgatgtcactggttattgcaac

SEQ ID NO: 70149 - DNA, 75 bp, synthetic construct
  source 1..75: mol_type = other DNA
tcgaaaaacagccagcagctatgcgccggataattggtaagcatctggccgtccctcgctggcaggagacatgtg

SEQ ID NO: 70150 - DNA, 75 bp, synthetic construct
  source 1..75: mol_type = other DNA
tgatttactgtcgttgttctcttctgctttttgctgcattagggttaacagtaacaaaccattcatttgctgctg

SEQ ID NO: 70151 - DNA, 75 bp, synthetic construct
  source 1..75: mol_type = other DNA
gccgaatattatcggctgcctgctgtggccaccgttttacttcctgccagggattctggcgggtgcggcgatcga

SEQ ID NO: 70152 - DNA, 75 bp, synthetic construct
  source 1..75: mol_type = other DNA
atgctgggagcagtggagcgccgctttggcagcgagcttccggcgtctccagtggagtggctgacggataatggt

SEQ ID NO: 70153 - DNA, 75 bp, synthetic construct
  source 1..75: mol_type = other DNA
cagcaatggaaagctgcaggagcaagaggcgatcaggaaggtcagcagaaactcatggagtcatttggtctggct

SEQ ID NO: 70154 - DNA, 75 bp, synthetic construct
  source 1..75: mol_type = other DNA
aaatttctgaccggaccagaaaccgtgctggcactactggatgaacgggaaagaaaccagcaatacatcaaacgc

SEQ ID NO: 70155 - DNA, 75 bp, synthetic construct
  source 1..75: mol_type = other DNA
tgaaaatatgaaatataattactatgaaatggagttttacgatgctcgtggggttttaaaagaattattaaacag

SEQ ID NO: 70156 - DNA, 75 bp, synthetic construct
  source 1..75: mol_type = other DNA
tcgtcttcaaatccaggagttattcctgaactggtcattccaacagtatctgtcagagaacgaattagcgcattt

SEQ ID NO: 70157 - DNA, 75 bp, synthetic construct
  source 1..75: mol_type = other DNA
ttgcccaccgggggtgacaattatgaacgtacgtcaggcacagccgctgggcttggggcattctattctctgcgc

SEQ ID NO: 70158 - DNA, 75 bp, synthetic construct
  source 1..75: mol_type = other DNA
acgaatctctggtatgcggtgtgttccctaaccaggacggcacgtttaccgcgatgacgtataccagaagcaaaa

SEQ ID NO: 70159 - DNA, 75 bp, synthetic construct
  source 1..75: mol_type = other DNA
ttacttggagccagagagcgtagtggaagaacgaaaacaaacgaagcattggtgaggttgcaggatcatttgcaa

SEQ ID NO: 70160 - DNA, 75 bp, synthetic construct
  source 1..75: mol_type = other DNA
aaaccgtcagttcgtggcagaacgacctgaccagctgtgggtggctgattttacttacgtcagcacatggcaggg

SEQ ID NO: 70161 - DNA, 75 bp, synthetic construct
  source 1..75: mol_type = other DNA
accgacctgcaagacgatagtcatatcgacaagcattacaaagtggttctggaacagttccgtggctttctgcgt

SEQ ID NO: 70162 - DNA, 75 bp, synthetic construct
  source 1..75: mol_type = other DNA
attatggagactattacgatgttgattattatgataacaatttgaaaaatgaagtttttgactggattggtaaat

SEQ ID NO: 70163 - DNA, 75 bp, synthetic construct
  source 1..75: mol_type = other DNA
gcagcaaatactgcaggacaaatatatccagtggtgcgccgaccaggtctggacggcctttattcttgctgccat

SEQ ID NO: 70164 - DNA, 75 bp, synthetic construct
  source 1..75: mol_type = other DNA
ggagggagagttgagtctgaaatctgtagcaaggatgtacggtatcagtccctgcacagtaagaaaatgggctta

SEQ ID NO: 70165 - DNA, 75 bp, synthetic construct
  source 1..75: mol_type = other DNA
gaggttgttgagttagttaatacgactatagactcgctaaatagaccgtttttgtatgccattcgtgaaatatta

SEQ ID NO: 70166 - DNA, 75 bp, synthetic construct
  source 1..75: mol_type = other DNA
atgagaaagaaaaaccaacgaaataaatggcaaacacttccgggaatggtcgcattgttgtgtggtctggccggt

SEQ ID NO: 70167 - DNA, 75 bp, synthetic construct
  source 1..75: mol_type = other DNA
cacaaaaaggaattgtccagctcagtagtgcaaccaacagcacatctgaaacgcttgctgcaacaccgaaagcag

SEQ ID NO: 70168 - DNA, 75 bp, synthetic construct
  source 1..75: mol_type = other DNA
tctcagtttggtgaacttaagcagagtgatattgatttaattcttttctatcgggacgaatatgaaaaatatttt

SEQ ID NO: 70169 - DNA, 75 bp, synthetic construct
  source 1..75: mol_type = other DNA
caaataatgcgttttatccggcctcgcttcgttcggtttatgaggctgccggaagctggccggaagacagtgttg

SEQ ID NO: 70170 - DNA, 75 bp, synthetic construct
  source 1..75: mol_type = other DNA
accagcctgcaccgtgaggctgaagcacagttccggcctgagctggagaaaatcgtcagcgggattgaaacaggt

SEQ ID NO: 70171 - DNA, 75 bp, synthetic construct
  source 1..75: mol_type = other DNA
atgttatttttctgtggttaccgtgcctgttactgttcttcttcttcttcctctttccgttcctctcctgtttat

SEQ ID NO: 70172 - DNA, 75 bp, synthetic construct
  source 1..75: mol_type = other DNA
atgcgtcatttcgaggtgtgccgtttaaggttgaagaagaaagtgcgggaaccggccgtcgtgtggaaacacacg

SEQ ID NO: 70173 - DNA, 75 bp, synthetic construct
  source 1..75: mol_type = other DNA
tggtgggagatgactgctttgaccagcgcgatcgcctgattgacgcgctgaataaacccggtcccggcacgcttg

SEQ ID NO: 70174 - DNA, 75 bp, synthetic construct
  source 1..75: mol_type = other DNA
caccctgactcctgacgataaaatcgactgccataaacatccctcctctctgacgcagttactcgcacaaaaaaa

SEQ ID NO: 70175 - DNA, 75 bp, synthetic construct
  source 1..75: mol_type = other DNA
gggaaacggactacttctatgacaccacggggcgcatcacggcgtgtcgctcggaggatgaggggtatctggcaa

SEQ ID NO: 70176 - DNA, 75 bp, synthetic construct
  source 1..75: mol_type = other DNA
aacgggtgaaatttgatggagccactgagaccggggcttcaaatctgattaatggcgataatacaattcatttta

SEQ ID NO: 70177 - DNA, 75 bp, synthetic construct
  source 1..75: mol_type = other DNA
tgccggcgatactgagggagcacgtcgcattgctcagatgctgtcttctggtgatcaatccactcaaaaccaatc

SEQ ID NO: 70178 - DNA, 75 bp, synthetic construct
  source 1..75: mol_type = other DNA
accatcgcggcctgccgctggcgctcatcagcacggaaggggcaacagcgtggtgcgcagaatatgatgaatggg

SEQ ID NO: 70179 - DNA, 75 bp, synthetic construct
  source 1..75: mol_type = other DNA
acggcgagattgttcgtagcctgaaaattcgccagatcgaacctgaattcttgaacctgatgtttgcggaggagg

SEQ ID NO: 70180 - DNA, 75 bp, synthetic construct
  source 1..75: mol_type = other DNA
ctcgatcttacctattcccgacaggttaacgaaattaatctgtttaccgcgctgggtggcggttgggtagagtaa

SEQ ID NO: 70181 - DNA, 75 bp, synthetic construct
  source 1..75: mol_type = other DNA
ctggcttgcggggatttatacatgtccggtaaatacggtgtttttgcgtcagagcaggcgtatcgcacatggcgt

SEQ ID NO: 70182 - DNA, 75 bp, synthetic construct
  source 1..75: mol_type = other DNA
cttcatcccgcctgatgctgaccatcgggctttgttttttggtcgctctgatggaagggctggatcttcaggcgg

SEQ ID NO: 70183 - DNA, 75 bp, synthetic construct
  source 1..75: mol_type = other DNA
atagcctctactggcatcaggataacgatgcggtcagtcatttaatgcgcgttgccagtgggcttgattctctcg

SEQ ID NO: 70184 - DNA, 75 bp, synthetic construct
  source 1..75: mol_type = other DNA
tatcaagggcaccggtgtcgttaaagacattgatatgaatagtaaaaagattaccatttcgcacgaagcaatccc

SEQ ID NO: 70185 - DNA, 75 bp, synthetic construct
  source 1..75: mol_type = other DNA
gaaactatagattttttatcaagctctgaagaaactataaatatagagtatattgaaggaaccaatgttagattt

SEQ ID NO: 70186 - DNA, 75 bp, synthetic construct
  source 1..75: mol_type = other DNA
ataaccttgcagtggcgatcgagcattacaatgaaaaccatccgcatagtgcgttgggttatcgctctccgcgag

SEQ ID NO: 70187 - DNA, 75 bp, synthetic construct
  source 1..75: mol_type = other DNA
ttcccggcaatcatctacggtggcaaagaagcgccgctggctatcgagctggatcacgacaaagtcatgaacatg

SEQ ID NO: 70188 - DNA, 75 bp, synthetic construct
  source 1..75: mol_type = other DNA
gggtctatgtccgtgatgaccgtaacgccggttcacagatgcccccggcggtctggttcgcgtacagcccggacc

SEQ ID NO: 70189 - DNA, 75 bp, synthetic construct
  source 1..75: mol_type = other DNA
tgccgaactggcgaaaaaacagtccgttgatgccatgctgatgaccggcgacagttacgactgcggtaaaaaaat

SEQ ID NO: 70190 - DNA, 75 bp, synthetic construct
  source 1..75: mol_type = other DNA
gtaatacctacgccatcccttattctggcgaagaagtgatgttgcactgggcaaataaggaccagtactacatta

SEQ ID NO: 70191 - DNA, 75 bp, synthetic construct
  source 1..75: mol_type = other DNA
aggatgctttagtgcagtccgctatttcaaaaattctggctgataaaacagtacaacagcattgggttgatcttg

SEQ ID NO: 70192 - DNA, 75 bp, synthetic construct
  source 1..75: mol_type = other DNA
cgggctggatgtcgctgtcacggaaaccgcaagtgacctggtacggctgggacggcgaccggctgaccacgatac

SEQ ID NO: 70193 - DNA, 75 bp, synthetic construct
  source 1..75: mol_type = other DNA
aaatgcagaagtgtttgctaatattgagaaacaactgcgcatgattcaatgtttgcgtgctgttgcgctggaact

SEQ ID NO: 70194 - DNA, 75 bp, synthetic construct
  source 1..75: mol_type = other DNA
catttaacaacatatacccaacgtaatacggctgactactttattcataaagatctcggtggctttttaacgaac

SEQ ID NO: 70195 - DNA, 75 bp, synthetic construct
  source 1..75: mol_type = other DNA
gcaactgatgctatcgttatatgtaatgaagctcaccgtttcgtggttgctgaacagctaaatcagattgataaa

SEQ ID NO: 70196 - DNA, 75 bp, synthetic construct
  source 1..75: mol_type = other DNA
ttggggtggtagcgatcggtattcttttggctggcgttgtcttttttatctggtgggtaagcaaaggaagattta

SEQ ID NO: 70197 - DNA, 75 bp, synthetic construct
  source 1..75: mol_type = other DNA
caaatttatgaaatcgccagtcgtctgcagcaaagaatatctgctgtaatgcgttatgccgtacagtctggcatc

SEQ ID NO: 70198 - DNA, 75 bp, synthetic construct
  source 1..75: mol_type = other DNA
gcggaaacgctgcgtgcttacaccatttcctccacgccaggcgtgagtgaatacatcaccctgaccgtgcggcgg

SEQ ID NO: 70199 - DNA, 75 bp, synthetic construct
  source 1..75: mol_type = other DNA
atcctatattagtccaagcgaatgtattatcagaggatcaaaaaaatattgcaccttttataattacacctccgt

SEQ ID NO: 70200 - DNA, 75 bp, synthetic construct
  source 1..75: mol_type = other DNA
gatattgacaatgccatgtggactattccagccgaacgcgaacctctgccaggcgtaaaattctcacaccggggc

SEQ ID NO: 70201 - DNA, 75 bp, synthetic construct
  source 1..75: mol_type = other DNA
gataaggtcagttataaggcattaatggggctggcctatgcgctgtgtaacataagtgggctggaagatgccctg

SEQ ID NO: 70202 - DNA, 75 bp, synthetic construct
  source 1..75: mol_type = other DNA
ggcggtacgactgccgggccgcgtgaccacctcccgcctgctgcataccgccaccggggccatagcacacgttac

SEQ ID NO: 70203 - DNA, 75 bp, synthetic construct
  source 1..75: mol_type = other DNA
atgaataactctcggttattccgtttgagcagaattgttattgcgttaactgccgccagcggcatgatggtaaat

SEQ ID NO: 70204 - DNA, 75 bp, synthetic construct
  source 1..75: mol_type = other DNA
atggcactgactgacgcaaaaatccgagctgcaaagccctctgacaaggcttataaactcactgacggggctggc

SEQ ID NO: 70205 - DNA, 75 bp, synthetic construct
  source 1..75: mol_type = other DNA
gagatatttattttgaaaaagccctgcgagagatatttggaatcgtaagcagtcgaatcagatatatagaagatg

SEQ ID NO: 70206 - DNA, 75 bp, synthetic construct
  source 1..75: mol_type = other DNA
gtatcggtagatgatgtggttgccgtcatgtataagctagcagaatctataacttcacccggagatatttataac

SEQ ID NO: 70207 - DNA, 75 bp, synthetic construct
  source 1..75: mol_type = other DNA
acggcagttatgcgccgcacctggcgttagagaaagagattgccgagtttttcaatcgccctaccgctatcgttt

SEQ ID NO: 70208 - DNA, 75 bp, synthetic construct
  source 1..75: mol_type = other DNA
gaaaaagcggctgctgaaaaggcagcagctgataagaaagcagcggcagaaaaagccgccgcagacaaaaaagcg

SEQ ID NO: 70209 - DNA, 75 bp, synthetic construct
  source 1..75: mol_type = other DNA
atctggaagaacgtcgactgatgctacagtggtgggccgattttctggatgcaaacagagaaagatttatcagtc

SEQ ID NO: 70210 - DNA, 75 bp, synthetic construct
  source 1..75: mol_type = other DNA
ctggtaaagcagttaacctggcaactgaggaaagcgaagccagactgcaaattaccggataaggcgatgagttat

SEQ ID NO: 70211 - DNA, 75 bp, synthetic construct
  source 1..75: mol_type = other DNA
tgattatctctggctttcggacgcgatgggggaatttacctgcgacgataaagcagaagataaattcctgttgct

SEQ ID NO: 70212 - DNA, 75 bp, synthetic construct
  source 1..75: mol_type = other DNA
tgatgtggttgaagtcgggagcactgaaaacacggcggatgataccgacgctacgccgaaaaaacggagtaaatc

SEQ ID NO: 70213 - DNA, 75 bp, synthetic construct
  source 1..75: mol_type = other DNA
cataaaaagaagaatactcattaatccagcgacacatcctgtcggcgtgagtgtgtcagaacagacgatcccaca

SEQ ID NO: 70214 - DNA, 75 bp, synthetic construct
  source 1..75: mol_type = other DNA
gctgccgcaggtgtaccgtgctctggggatggataaaccggaagcagtggcgaaagtgtgctatgcacaaatggt

SEQ ID NO: 70215 - DNA, 75 bp, synthetic construct
  source 1..75: mol_type = other DNA
ttgagccaggagatctcatcttcgttgatgtcagcatcaatcagtttgatggtgatggtatatatgtctttggtt

SEQ ID NO: 70216 - DNA, 75 bp, synthetic construct
  source 1..75: mol_type = other DNA
tttccaacaacaatgtcagaccctttatggtctgaatttgaaacgagtatgtcactgcttgataaagattcagtt

SEQ ID NO: 70217 - DNA, 75 bp, synthetic construct
  source 1..75: mol_type = other DNA
ttgatggtgagggtattttcatgcagaacatggtgatttcgccctcgatgcagttccaggaaaaggaccagtccg

SEQ ID NO: 70218 - DNA, 75 bp, synthetic construct
  source 1..75: mol_type = other DNA
tcctgccggctggcgacagggcggggatacctctgtattccacgcaccgtcgctgaatctgcagttattcaccac

SEQ ID NO: 70219 - DNA, 75 bp, synthetic construct
  source 1..75: mol_type = other DNA
attctcctgctcgacgaaccgaccaacaacctcgacatcgacaccattcgctggctggaacaggtgctgaacgag

SEQ ID NO: 70220 - DNA, 75 bp, synthetic construct
  source 1..75: mol_type = other DNA
tgacaacctcatgtcgttttaaaacagaactgcaggtaaggttgcgtatccggtttgataaatatgacggtagcg

SEQ ID NO: 70221 - DNA, 75 bp, synthetic construct
  source 1..75: mol_type = other DNA
gcaaagtaacgccttgataacggtttcgcaaaatggctataccatttaccaaaaagaggttcccccaggaccatt

SEQ ID NO: 70222 - DNA, 75 bp, synthetic construct
  source 1..75: mol_type = other DNA
ctacaggtcggggaatcgacggtaatcaggctgtcgaaggatggcatcaccatcgtgggcggttctgttttcatc

SEQ ID NO: 70223 - DNA, 75 bp, synthetic construct
  source 1..75: mol_type = other DNA
atggcggaaattggtatttttgtcggcaccatgtacgggaattcactgttagtggccgaagaagcggaagcgatt

SEQ ID NO: 70224 - DNA, 75 bp, synthetic construct
  source 1..75: mol_type = other DNA
ccggatcagaagcggcggcctgctgctgccggtattgctgcatatggaagcaaccgcgctgggtttactgtttgg

SEQ ID NO: 70225 - DNA, 75 bp, synthetic construct
  source 1..75: mol_type = other DNA
aaccgcagagtattttcagtaagtcaccggcaacgccgctgcaggataaaacggacacagcacacaaaatgaagg

SEQ ID NO: 70226 - DNA, 75 bp, synthetic construct
  source 1..75: mol_type = other DNA
atggcggaaattggtatttttgtcggcaccatgtacggaaattcgctgttagtggcggaagaagcagaagcaatt

SEQ ID NO: 70227 - DNA, 75 bp, synthetic construct
  source 1..75: mol_type = other DNA
gcattgaccacggtaaaacgccagcatcgccctgctcttgatctttcacgcctgcctgaacttatgtcgcgtatt

SEQ ID NO: 70228 - DNA, 75 bp, synthetic construct
  source 1..75: mol_type = other DNA
tgatttacagctctcttttgaacatattgcacgacgctggcatgccagtaataaacaatgggcgcaatcacacag

SEQ ID NO: 70229 - DNA, 75 bp, synthetic construct
  source 1..75: mol_type = other DNA
atggcgacaaaagaagagtttaaccattaccagccgctgggtaacagtgatccggctcatacagcaattgcgcct

SEQ ID NO: 70230 - DNA, 75 bp, synthetic construct
  source 1..75: mol_type = other DNA
atggggtatgacacaaccaaggaagtctgtggccatggattccgggcgatggcgtgcagtgcattgattgaatcc

SEQ ID NO: 70231 - DNA, 75 bp, synthetic construct
  source 1..75: mol_type = other DNA
gcgtggtcatcgtattgctgttgcttacgctcaattacatctgggtgatgctgttggttcgccgacgtggcaggc

SEQ ID NO: 70232 - DNA, 75 bp, synthetic construct
  source 1..75: mol_type = other DNA
ggtgctttcatcgacgataacgcgctacgcctggatctggcctttccgttgatactcaagcaactggagctgata

SEQ ID NO: 70233 - DNA, 75 bp, synthetic construct
  source 1..75: mol_type = other DNA
aagatgcggtgctgattgccgaccgtaacgcggtgcaggatgtgaaaaaagtggtcgagcagatcaaagccgatg

SEQ ID NO: 70234 - DNA, 75 bp, synthetic construct
  source 1..75: mol_type = other DNA
tttgaaaatagtaaagcagctattttttctggcttaaaaaacggcattggtgttggaacaacagaattacatgtt

SEQ ID NO: 70235 - DNA, 75 bp, synthetic construct
  source 1..75: mol_type = other DNA
atgagactgccagagaaagttctttttcctcctgtcactagtggcctgtcagggcaggaaaaacaaaaaaaaccg

SEQ ID NO: 70236 - DNA, 75 bp, synthetic construct
  source 1..75: mol_type = other DNA
ccgctcgatttaattgaagtgcgctccggctcttatctcgaagaggatgatgtggtgcgcttcgcggatcgctac

SEQ ID NO: 70237 - DNA, 75 bp, synthetic construct
  source 1..75: mol_type = other DNA
gaattagagaaagacgcaaacaggttggtttaagtcaaaacgatttaagcaaagctgctggtgtatctggctcat

SEQ ID NO: 70238 - DNA, 75 bp, synthetic construct
  source 1..75: mol_type = other DNA
aaaaaaatatcaacagtcttgtacaagtccacaaggaaagtaaagatgtttttcacacttattggatggtctcaa

SEQ ID NO: 70239 - DNA, 75 bp, synthetic construct
  source 1..75: mol_type = other DNA
gtttgtcagtgatgctattgctgtgtacgaccgtgacgatatcgatgaatccatccgcgccgctggaatcaaagt

SEQ ID NO: 70240 - DNA, 75 bp, synthetic construct
  source 1..75: mol_type = other DNA
ccctggttgctcccggtaagcggcacgaacaaccagcgttgtgtgaatcatatttctgaaccggataacgaaatt

SEQ ID NO: 70241 - DNA, 75 bp, synthetic construct
  source 1..75: mol_type = other DNA
atgacccgaagtggtggtgattttcagtcccgaccgctgaaacgcctgttcacaaccaaccagtgctggacatcc

SEQ ID NO: 70242 - DNA, 75 bp, synthetic construct
  source 1..75: mol_type = other DNA
ttggttggtggagcgctgactactaacgatcccaccggctccactccagcaacgatgtcttccctgtttaaggcc

SEQ ID NO: 70243 - DNA, 75 bp, synthetic construct
  source 1..75: mol_type = other DNA
tcgacaggttcagaagaatatttgtctgtattatgttgtcatcagcatggtcaggagtaatgtggttttttatta

SEQ ID NO: 70244 - DNA, 75 bp, synthetic construct
  source 1..75: mol_type = other DNA
agtaaatgtcataagtgtatgtatgctgccagataatttcttgtttctttgtggtgcggttatgaatcagtgtgc

SEQ ID NO: 70245 - DNA, 75 bp, synthetic construct
  source 1..75: mol_type = other DNA
gcaacaattacctataaatctggcgttcagacgtatcaggctgtatttgccgcaggtgacggtactgctagcgca

SEQ ID NO: 70246 - DNA, 75 bp, synthetic construct
  source 1..75: mol_type = other DNA
gtggtgcatttgcggctaaggtaagtattgagggaggcgctgctacagacattttggtagcaagtaatggaaaca

SEQ ID NO: 70247 - DNA, 75 bp, synthetic construct
  source 1..75: mol_type = other DNA
gcattcaaacggatgcccatcacgctggagccgtggcagctctttgtgatctgctgtgcgtttggctgggtcaat

SEQ ID NO: 70248 - DNA, 75 bp, synthetic construct
  source 1..75: mol_type = other DNA
gtaacagacgtagcttatagcactatacccccaattgctatggttcttgaatttgtctttatacaatttcataca

SEQ ID NO: 70249 - DNA, 75 bp, synthetic construct
  source 1..75: mol_type = other DNA
ctatgccgtatgcaacttctgggaagttagtaacatttggaattattccggacacggcaaatactggttatggat

SEQ ID NO: 70250 - DNA, 75 bp, synthetic construct
  source 1..75: mol_type = other DNA
ggataacgagcagctgcgcaggcggagcacggatgtgtccggtcaggtgaatgacgctgtggcaggggtgcagaa

SEQ ID NO: 70251 - DNA, 75 bp, synthetic construct
  source 1..75: mol_type = other DNA
gcgcactatgtttaccactatgatgaatacggcagactgacggagaagacggaccttatcccggcgggtgttatc

SEQ ID NO: 70252 - DNA, 75 bp, synthetic construct
  source 1..75: mol_type = other DNA
cgccccgctcttgatctttcacgtcttcctgaacttctgtcccgtattggcagttataaaggtcagcctgttacc

SEQ ID NO: 70253 - DNA, 75 bp, synthetic construct
  source 1..75: mol_type = other DNA
atgccgcaggttgactattcaagcccggaggctatgcagcagtcgattcgtgagattcaggaatacaccaacaat

SEQ ID NO: 70254 - DNA, 75 bp, synthetic construct
  source 1..75: mol_type = other DNA
tgccactcagcaaacaggctgtagccatactgacagaactacagacatgggctggtgaaaatggtctgatcttta

SEQ ID NO: 70255 - DNA, 75 bp, synthetic construct
  source 1..75: mol_type = other DNA
agtgatggcaaactcactgctaaggatggctctaagctttacattgatacaactggtaacttaactcagaatggt

SEQ ID NO: 70256 - DNA, 75 bp, synthetic construct
  source 1..75: mol_type = other DNA
ggcagcagctaaacttgcgaagatcccgaaaccaccaagccaggcagtatatgaagtgttcaaaaacgcgccatt

SEQ ID NO: 70257 - DNA, 75 bp, synthetic construct
  source 1..75: mol_type = other DNA
gaatcttgctaataatacaggtgtagaccagattgaaacattaagcagttttgctaagttttccgctggtgctgg

SEQ ID NO: 70258 - DNA, 75 bp, synthetic construct
  source 1..75: mol_type = other DNA
ggttatttgctgcaatggaaaataatcaccctttgtgtgtcacacggttcctctctaaagtttatgggatcgccg

SEQ ID NO: 70259 - DNA, 75 bp, synthetic construct
  source 1..75: mol_type = other DNA
atgttgcacaggggcaagagatgattgcccaacggggaatgtctgggcgggtgcgttttgaacagggcgatgcgt

SEQ ID NO: 70260 - DNA, 75 bp, synthetic construct
  source 1..75: mol_type = other DNA
cagggggctgacgggctgatgtgggtaagtccggccgatcagtctcaggatgatcccctgagcagcagtggttca

SEQ ID NO: 70261 - DNA, 75 bp, synthetic construct
  source 1..75: mol_type = other DNA
gcggataaaacacaagttttcccgttagatcaaaatgacagcatacggacgaggctgactcattctcacgaagta

SEQ ID NO: 70262 - DNA, 75 bp, synthetic construct
  source 1..75: mol_type = other DNA
ctgatcggtagctgcaaacttaacggaatcgagccggaaacgtggctacgccacgtgatcagtgtaatcaacacc

SEQ ID NO: 70263 - DNA, 75 bp, synthetic construct
  source 1..75: mol_type = other DNA
cggactacagaggtatcctgcagggcgatgcatatgcgggttacaatgctctttacgaaagcggtcaggtaaccg

SEQ ID NO: 70264 - DNA, 75 bp, synthetic construct
  source 1..75: mol_type = other DNA
tacgtcaatgaccacaaagcagggaccttcactgcggaccggaagaacgctgagaaagttctgtccactctcgga

SEQ ID NO: 70265 - DNA, 75 bp, synthetic construct
  source 1..75: mol_type = other DNA
gcgcaaaacaaatctgggaagatttcatgcagtcgcatggtaaggcgttaatccagactcttagtctgcttaaaa

SEQ ID NO: 70266 - DNA, 75 bp, synthetic construct
  source 1..75: mol_type = other DNA
ctggtttgcatcgggcaaattatcgcccctgcaaaagatgacgttgaatttcggcatcgcattatgaatccgctc

SEQ ID NO: 70267 - DNA, 75 bp, synthetic construct
  source 1..75: mol_type = other DNA
ggattatgattatgaacgcagggtttctgatatatattttgatctgttttttgtgttcgttgctgccggaacttt

SEQ ID NO: 70268 - DNA, 75 bp, synthetic construct
  source 1..75: mol_type = other DNA
aatgatccggacactgtgcttaaagaccttattcgtaaacatatcaccgaaccgtcactctctaacgatgcgatg

SEQ ID NO: 70269 - DNA, 75 bp, synthetic construct
  source 1..75: mol_type = other DNA
cgcccgcgatccttcgctgtatggacggatggattttgcctggtgtggcaatgcgccggtgaagctgctggagta

SEQ ID NO: 70270 - DNA, 75 bp, synthetic construct
  source 1..75: mol_type = other DNA
tcaatctcaagcgttttcagagtgaggtcaaggaaaaagcagaacttgcagcgaatgcggccgagaaaattgccc

SEQ ID NO: 70271 - DNA, 75 bp, synthetic construct
  source 1..75: mol_type = other DNA
actttactttctttgatgaacaaattgccaaactcggtgatgacttgatccccttatgtcgtgggttagcaaagt

SEQ ID NO: 70272 - DNA, 75 bp, synthetic construct
  source 1..75: mol_type = other DNA
gtggagccgtgatttctgacgattcgctaaaaggttcatcaggggcaagcaactacatcaatcgaaccggtgata

SEQ ID NO: 70273 - DNA, 75 bp, synthetic construct
  source 1..75: mol_type = other DNA
cggcgtggttaataaagtctatgctgcctttattcaggttgcaggtattagcgaatccagtaaagcagataccgc

SEQ ID NO: 70274 - DNA, 75 bp, synthetic construct
  source 1..75: mol_type = other DNA
gtatggaatccccaagcaaagatgccaccccgggcaacgtttacgctcaggctgactacaagattgcttacgagt

SEQ ID NO: 70275 - DNA, 75 bp, synthetic construct
  source 1..75: mol_type = other DNA
gtgatggttccttcgaaccacaactggtgaagaaaaatcagacccgcattaccggcatggacaaccagatcttgg

SEQ ID NO: 70276 - DNA, 75 bp, synthetic construct
  source 1..75: mol_type = other DNA
atgccgttctcacaaaaaaaccgcttgccatgccgcaatcagtcaggttacatttccgctgcacctcataaaacg

SEQ ID NO: 70277 - DNA, 75 bp, synthetic construct
  source 1..75: mol_type = other DNA
ataaaaactcaaactgtattgtcgagtacaagcttcctgaagtttctcctggtaccttactgaaccagcagacag

SEQ ID NO: 70278 - DNA, 75 bp, synthetic construct
  source 1..75: mol_type = other DNA
actgtggcaggcagtggtgaattacgtctgaacggcacgatgccggagcgctggcgggtgtcactgccggtaagt

SEQ ID NO: 70279 - DNA, 75 bp, synthetic construct
  source 1..75: mol_type = other DNA
taacccgtgggtatggaaagtcggacagggaaatgaaggcctggaggttaaacagagccgcggtgttcgtgacgg

SEQ ID NO: 70280 - DNA, 75 bp, synthetic construct
  source 1..75: mol_type = other DNA
actcagttaagcagcgcaaccaacagcacgtctgaaacactggccgcaacgccgagagcggtaaagatcgcgtat

SEQ ID NO: 70281 - DNA, 75 bp, synthetic construct
  source 1..75: mol_type = other DNA
atgttgaagataatacccggtgcaactggatactttaataaaacactcaattcaaatcaattcgataatgaagat

SEQ ID NO: 70282 - DNA, 75 bp, synthetic construct
  source 1..75: mol_type = other DNA
gacatttggtgcattcccagaggaagaacagggacaaatgcttcaggagatgaaagacaaaaaagagttaatgga

SEQ ID NO: 70283 - DNA, 75 bp, synthetic construct
  source 1..75: mol_type = other DNA
gtggtgtgctggcgtggttaatcctcggtagcatgatttccccggtggtcatggcggcaatcatggcggcggttg

SEQ ID NO: 70284 - DNA, 75 bp, synthetic construct
  source 1..75: mol_type = other DNA
ttagaattaagatgcttctattggcaaaaggctggagccaagcagaacttgcgcgcagaattggtattgctcaac

SEQ ID NO: 70285 - DNA, 75 bp, synthetic construct
  source 1..75: mol_type = other DNA
tctgaactggaaacgctggtggcgcaggccaaagaagcggataaaggcggtatgaatttctcgttcattaattcg

SEQ ID NO: 70286 - DNA, 75 bp, synthetic construct
  source 1..75: mol_type = other DNA
acctggagctgggctttggcatcgcactggccgttgcgttacacaatattcctgaaggtctggcggttgcaggcc

SEQ ID NO: 70287 - DNA, 75 bp, synthetic construct
  source 1..75: mol_type = other DNA
gtgtaaccggacaagacggttcttacctggcagagtttctgctggaaaaaggttacgaggtgcatggtattaagc

SEQ ID NO: 70288 - DNA, 75 bp, synthetic construct
  source 1..75: mol_type = other DNA
ataccagttatgacggcacagatcgccgcaacccgattaacgctgtcgacctgaagtcccgtcagtaccagtgtg

SEQ ID NO: 70289 - DNA, 75 bp, synthetic construct
  source 1..75: mol_type = other DNA
catcaagcgtgatgctgacccgacgtttgatttttgtggctatctggaaatgctgccgcagaccaacgggatgtt

SEQ ID NO: 70290 - DNA, 75 bp, synthetic construct
  source 1..75: mol_type = other DNA
gtctgagcgatctccagcaattgcatcaatattacaagatgcggtatcgcaaggggtgcgtggcggtaaatcaga

SEQ ID NO: 70291 - DNA, 75 bp, synthetic construct
  source 1..75: mol_type = other DNA
tacaaaaaaggcttgccagtggtgagctcgtcgcgccgtttggcgatatgacggtgaaatgccatcagcattatt

SEQ ID NO: 70292 - DNA, 75 bp, synthetic construct
  source 1..75: mol_type = other DNA
gcgacaaggagaacaaaccaccgaggatagcccagggcagcagcaacgtctttatcaacaatcagcccgccgcgc

SEQ ID NO: 70293 - DNA, 75 bp, synthetic construct
  source 1..75: mol_type = other DNA
cagcttgattttaatctgatagaagaacagctcaaaacccaccgtccaacgctgtggttcttctgctcgccacat

SEQ ID NO: 70294 - DNA, 75 bp, synthetic construct
  source 1..75: mol_type = other DNA
tctcttgagcaaggactgccaaaagctgtcatgacagttctcaatgcaataggcaattcaacatcaggggctatt

SEQ ID NO: 70295 - DNA, 75 bp, synthetic construct
  source 1..75: mol_type = other DNA
agaccgggtaccagcgtgtcattctccggacagtttgaactgcttgagcatgccaacaagaaactgaagctgatg

SEQ ID NO: 70296 - DNA, 75 bp, synthetic construct
  source 1..75: mol_type = other DNA
ccagcgcgagatgaaggaacaactgaataatctggatgatttgcgttcaatcagggaaatggtgattagcgataa

SEQ ID NO: 70297 - DNA, 75 bp, synthetic construct
  source 1..75: mol_type = other DNA
tgatttacgcaaataccagattttaggatttgaagattataatcactacgttggttatctcgccacaaatggcct

SEQ ID NO: 70298 - DNA, 75 bp, synthetic construct
  source 1..75: mol_type = other DNA
atgaccgtcgaaacgcaacttaatcccacacagcctgtcaatcagcagatttatcgtattcttcgtcgcgacatt

SEQ ID NO: 70299 - DNA, 75 bp, synthetic construct
  source 1..75: mol_type = other DNA
atgcgaaaatttaaaataattatcgagacgggaatagctggtggcgattttgaggacgtatttgaagtggatgat

SEQ ID NO: 70300 - DNA, 75 bp, synthetic construct
  source 1..75: mol_type = other DNA
aagaggggagaggagttaacagattatgagtatgattgcatcatatggtggttgcaatacatgggttttaagttg

SEQ ID NO: 70301 - DNA, 75 bp, synthetic construct
  source 1..75: mol_type = other DNA
atttgatagagcctgtttcttttcagccgtcagatgattggccgcagggagaagaaagttttaatgatattttta

SEQ ID NO: 70302 - DNA, 75 bp, synthetic construct
  source 1..75: mol_type = other DNA
tgacctcccgcaacatggacaacaccgtggcgcacgcgggtaagtatgcgaacgctgatgcactggtacaggacg

SEQ ID NO: 70303 - DNA, 75 bp, synthetic construct
  source 1..75: mol_type = other DNA
cctgaatggacttaatcatattgcggaattaagggcgaaagtatttggcctgaatattgagtcagagcttgagcg

SEQ ID NO: 70304 - DNA, 75 bp, synthetic construct
  source 1..75: mol_type = other DNA
cgaatggctgattcagaactaccgcagacgtgggtatgagtttaggaaagccctcagcctcgattatcgtcactg

SEQ ID NO: 70305 - DNA, 75 bp, synthetic construct
  source 1..75: mol_type = other DNA
gataatctccgtcgggcttccttactccgaacgcccaccgcgtctgtcccgcacattccagcaacgcatctggag

SEQ ID NO: 70306 - DNA, 75 bp, synthetic construct
  source 1..75: mol_type = other DNA
ggccgctggtgctgggtctttactgggaacgcgccaacgccaaaggcgcgctaagtgcgatgatcgttggcggcg

SEQ ID NO: 70307 - DNA, 75 bp, synthetic construct
  source 1..75: mol_type = other DNA
agcacgcaagctggaacagcaacaggctaatgccgagccagaacaacaggtcgatccgcgcaaagccgccgtcga

SEQ ID NO: 70308 - DNA, 75 bp, synthetic construct
  source 1..75: mol_type = other DNA
ggtgcaaatcagtaatggtgttccgttaggcactttaggtaacgcttatttgaatcaattgagccagcgatgcga

SEQ ID NO: 70309 - DNA, 75 bp, synthetic construct
  source 1..75: mol_type = other DNA
cgcggtatccaaatctctgccgggaatgccgtctcctttgtggcactgactaacattgaggtgaagcatgcgtcg

SEQ ID NO: 70310 - DNA, 75 bp, synthetic construct
  source 1..75: mol_type = other DNA
atgtcagatccgggcagggcagaggccattatcgggagagttcaggccagagttgcctacgaagagatcaccgac

SEQ ID NO: 70311 - DNA, 75 bp, synthetic construct
  source 1..75: mol_type = other DNA
ggcgcagtcaatatttccaataatggactaattaataacaaagaatattcattggtgggcgttgaagacggttcc

SEQ ID NO: 70312 - DNA, 75 bp, synthetic construct
  source 1..75: mol_type = other DNA
tggcaccacccgtgtcgggaaaacccggctggcggagttgctggtcacacaggatattcgtcggggagatgtcac

SEQ ID NO: 70313 - DNA, 75 bp, synthetic construct
  source 1..75: mol_type = other DNA
ggcatgatttcagataagatcctgaaatcgccgagtaaatatctatgctacacctttatcatcagtaccgctgcg

SEQ ID NO: 70314 - DNA, 75 bp, synthetic construct
  source 1..75: mol_type = other DNA
aatcgctataactactgcgcagatgcagttaagggcgtagaggatgcctgccacgctgccatgcttcagggaaaa

SEQ ID NO: 70315 - DNA, 75 bp, synthetic construct
  source 1..75: mol_type = other DNA
gggcggcatcctgaatattttcagtaacctctgggaactggtgaaacagtccttcagtgattcatggggctggat

SEQ ID NO: 70316 - DNA, 75 bp, synthetic construct
  source 1..75: mol_type = other DNA
gttctgtacccgtttatccagaaaagcaacgaaggcggtaaatcctttgttgcctggttacgtctgtatcccaat

SEQ ID NO: 70317 - DNA, 75 bp, synthetic construct
  source 1..75: mol_type = other DNA
caactgttgtcgccgcgaccttatcgatgagtgctttctctgtgtttgcagaagcaagcctgacaggtgcaggtg

SEQ ID NO: 70318 - DNA, 75 bp, synthetic construct
  source 1..75: mol_type = other DNA
tctggatgacctctgtcaggtgcagacacatatccggaccatcacccatcgggtgacggacaccaccctgaaggt

SEQ ID NO: 70319 - DNA, 75 bp, synthetic construct
  source 1..75: mol_type = other DNA
gcacaggaagtggcgaaggctccgtattaaccggcggcaaagccatcagtgcgggaccgggcggcattgcggcag

SEQ ID NO: 70320 - DNA, 75 bp, synthetic construct
  source 1..75: mol_type = other DNA
atagtacgagatgatggagccgtaacggggaaaatgcttgctgtacaaatcaaatgtggagcttcatttttttcg

SEQ ID NO: 70321 - DNA, 75 bp, synthetic construct
  source 1..75: mol_type = other DNA
ggatttcaaatatttttaactttttagtggaaggggtgaataaatcattggcatcgccaaaaaaatatgatttcg

SEQ ID NO: 70322 - DNA, 75 bp, synthetic construct
  source 1..75: mol_type = other DNA
atagataccaattatttaatagggagtactattggtccgaagcatttaagtcttttaaatcagattattatggtg

SEQ ID NO: 70323 - DNA, 75 bp, synthetic construct
  source 1..75: mol_type = other DNA
agattatgcgagagagattattgaatttgctaatcatcttggactggaacttgaaagtattgaattatccaagac

SEQ ID NO: 70324 - DNA, 75 bp, synthetic construct
  source 1..75: mol_type = other DNA
ttattgcaattcatgatgcgaatataagccgctacggcggcctgccaggcatgccagattcgggaagagctgagg

SEQ ID NO: 70325 - DNA, 75 bp, synthetic construct
  source 1..75: mol_type = other DNA
ccgaagtattaaccggccacacagacgttatttgctccaccagcattgagcgcatcgtcaccggacgtaatgcgg

SEQ ID NO: 70326 - DNA, 75 bp, synthetic construct
  source 1..75: mol_type = other DNA
gcaagcgcgggcaacttcaacgtgcccaggaacacctcgaaagacaggctgtgaattgcctggcaccgatgatca

SEQ ID NO: 70327 - DNA, 75 bp, synthetic construct
  source 1..75: mol_type = other DNA
ctgacccgcagtattggcggtaaaaccgctctggactgggccatgaagcaggaattccgccgtggttgctggttg

SEQ ID NO: 70328 - DNA, 75 bp, synthetic construct
  source 1..75: mol_type = other DNA
gattcctgaacaagcgagcaaggaagcggctaaataccaagctatttagggttcagccgtaccctaaaagcactc

SEQ ID NO: 70329 - DNA, 75 bp, synthetic construct
  source 1..75: mol_type = other DNA
tgttcgccaccatgtggaataccgggatccgtatcggtgaagcccggacactcaccccggaatccttcgacctgg

SEQ ID NO: 70330 - DNA, 75 bp, synthetic construct
  source 1..75: mol_type = other DNA
tcattattcggggtatattcgaaactgttaccgttcagaatggattttgcttaccgaaaaaacacattcagctac

SEQ ID NO: 70331 - DNA, 75 bp, synthetic construct
  source 1..75: mol_type = other DNA
ttattctgctgctgatctccccggtgctgtgctgtattgcgctggcggtaaaactcagttcaccagggccggtta

SEQ ID NO: 70332 - DNA, 75 bp, synthetic construct
  source 1..75: mol_type = other DNA
aagcgataacggcggtttttctgctcttcctctcttttcaggttggggcagtattaaaaggtggccagtggcaac

SEQ ID NO: 70333 - DNA, 75 bp, synthetic construct
  source 1..75: mol_type = other DNA
gggcagtgaagacaactgtcgtgcggtagccgcagcggtacgtgatgctggaggttgggtggcattaggctcgga

SEQ ID NO: 70334 - DNA, 75 bp, synthetic construct
  source 1..75: mol_type = other DNA
aaatttataccaaaacgctggtttccggtcatcaggataccgcagatgtcacgaccggccaggacttcacatcca

SEQ ID NO: 70335 - DNA, 75 bp, synthetic construct
  source 1..75: mol_type = other DNA
gaaggggaatacctatctgacgccgcagcaacaaacggcagaactgaccggaccggtgaacaaagcgatcatcga

SEQ ID NO: 70336 - DNA, 75 bp, synthetic construct
  source 1..75: mol_type = other DNA
tacgccgtaacggggtgcaggtatttgattcacctgaactggcagaccttaccgtaggggctgcgactggcgaga

SEQ ID NO: 70337 - DNA, 75 bp, synthetic construct
  source 1..75: mol_type = other DNA
ggctggcgctggccggaagctggcttcatcagcatgtcagcgaacgtcgcagtgtcgccatcagtctgttgctga

SEQ ID NO: 70338 - DNA, 75 bp, synthetic construct
  source 1..75: mol_type = other DNA
cgtgaacggataaagaaaaagatctacggaatgcgggaagaagcccgcagtgatatttttgattacatcgaaatg

SEQ ID NO: 70339 - DNA, 75 bp, synthetic construct
  source 1..75: mol_type = other DNA
atccatctggatctgcgtgacagcgggcaacagtgcggagtaaacagagtctggagactgatgaaacgtgtcgga

SEQ ID NO: 70340 - DNA, 75 bp, synthetic construct
  source 1..75: mol_type = other DNA
aacctacatcaggacccacgaaggctggctgtatcttgccgttgttgttgatctgttctcacgcaaaattatcgg

SEQ ID NO: 70341 - DNA, 75 bp, synthetic construct
  source 1..75: mol_type = other DNA
agccgattttatgtaaagacttcattatcgatccttaccagatctatctggcgcgctattaccaggccgatgcct

SEQ ID NO: 70342 - DNA, 75 bp, synthetic construct
  source 1..75: mol_type = other DNA
cgtcaaaaggcgtgatccgtgatgatttcgatccggcacgcattgccgccatttataaacattacgcttcggcaa

SEQ ID NO: 70343 - DNA, 75 bp, synthetic construct
  source 1..75: mol_type = other DNA
tatctggcgtggatagacgtaagcgcggatgagcgtagcgcaacgcagctaacccaacatttcgcacggcaggca

SEQ ID NO: 70344 - DNA, 75 bp, synthetic construct
  source 1..75: mol_type = other DNA
taatccctgatgacagtgaaatcttgcagtttgcacaaaccagtcaacatcgcaatcttcagcagcctgactact

SEQ ID NO: 70345 - DNA, 75 bp, synthetic construct
  source 1..75: mol_type = other DNA
atgcgcaatctcaccatcacgcggattaatatcagccaggctaactacggtattttacgccagggtttccataat

SEQ ID NO: 70346 - DNA, 75 bp, synthetic construct
  source 1..75: mol_type = other DNA
acgacttaatggaactattgcgttacgacactatgtttacatgccaccgtcaggatgtgttcaactctttggcaa

SEQ ID NO: 70347 - DNA, 75 bp, synthetic construct
  source 1..75: mol_type = other DNA
ccgcacaggccggttatacgttaccccttcaggttctcagcagcgtacgtggttattatattggtactcagtgtg

SEQ ID NO: 70348 - DNA, 75 bp, synthetic construct
  source 1..75: mol_type = other DNA
tgttggcagtggtgaagctttgaaaaatgcacgtatggcagcagaagatttcgctaaagcagtttttgatcgtat

SEQ ID NO: 70349 - DNA, 75 bp, synthetic construct
  source 1..75: mol_type = other DNA
ttattcattacgagcccgtgattggcattatgggtaaatccggcaccggcaaaagcagtctgtgtaatgccattt

SEQ ID NO: 70350 - DNA, 75 bp, synthetic construct
  source 1..75: mol_type = other DNA
tttaaaaccagatatccgtcagtccttgccacagatagatcggtgtattgatttcagttcccgacctgaaatgct

SEQ ID NO: 70351 - DNA, 75 bp, synthetic construct
  source 1..75: mol_type = other DNA
gtttcttcctgaagaaatacgccagaaaatccttgaacatctccacggtgttattcattacgagcccgtgattgg

SEQ ID NO: 70352 - DNA, 75 bp, synthetic construct
  source 1..75: mol_type = other DNA
ttgatgatactgcgaagaacgccgctgatattgcccggatgattcttacctctactgagtttatggccaatgcgc

SEQ ID NO: 70353 - DNA, 75 bp, synthetic construct
  source 1..75: mol_type = other DNA
ttcgagattttcaggtctggatttccttttcaattccattgaagtcagcacttccttctgaaatagaaaagactc

SEQ ID NO: 70354 - DNA, 75 bp, synthetic construct
  source 1..75: mol_type = other DNA
atgacggtggcagacaggccgtccgggaatacatcgtcataactgacgaactgcgtgatacgctctcccggcagt

SEQ ID NO: 70355 - DNA, 75 bp, synthetic construct
  source 1..75: mol_type = other DNA
cgttacccatccgccgcgatagtcctaaaagggcaatcaccttgattctggcggttctgctgggtggcatggttg

SEQ ID NO: 70356 - DNA, 75 bp, synthetic construct
  source 1..75: mol_type = other DNA
tccggcctggatgttacagcttctgcgtaaagcccgggcccgcattatccacctactggtcacactgtgggatca

SEQ ID NO: 70357 - DNA, 75 bp, synthetic construct
  source 1..75: mol_type = other DNA
ttccggtgagtctggtcggtgcaagagttaagtttatccgatctgagattatggaattctacaaaaacaaaggcg

SEQ ID NO: 70358 - DNA, 75 bp, synthetic construct
  source 1..75: mol_type = other DNA
atgtcattcagccattcttccctctccgcacaagtgaaatcatatctgacgtttcttcctgaagaaattcgtcag

SEQ ID NO: 70359 - DNA, 75 bp, synthetic construct
  source 1..75: mol_type = other DNA
aaattcagcaactacgttctaagtgtgtagacattcaaaatgattacttaatgcaagttttctttatgtcaatgc

SEQ ID NO: 70360 - DNA, 75 bp, synthetic construct
  source 1..75: mol_type = other DNA
ccactaatgtcgttcttttatgaacacccggaagactataaacagtatctgactcacgaaggcgaatacaaacca

SEQ ID NO: 70361 - DNA, 75 bp, synthetic construct
  source 1..75: mol_type = other DNA
cacgcagattctggtcgctctcaaaaaactgtttctgagtcgttccaatccatttggcgacattaaagcagatgg

SEQ ID NO: 70362 - DNA, 75 bp, synthetic construct
  source 1..75: mol_type = other DNA
atgaaaacggccagcggtctgtggatattgaccgtattgatcagcacgttgtcaatgtcgatgcgctgaatttta

SEQ ID NO: 70363 - DNA, 75 bp, synthetic construct
  source 1..75: mol_type = other DNA
cctcctgaatggaccaccttttttatgggccaaaatcctggcatagaacctgatttcttcggtatgaatagtagc

SEQ ID NO: 70364 - DNA, 75 bp, synthetic construct
  source 1..75: mol_type = other DNA
tatcaaggaggctgatgaacaagaagttgagatattggattcgcttttgattgatcggataaaggaaaaagactt

SEQ ID NO: 70365 - DNA, 75 bp, synthetic construct
  source 1..75: mol_type = other DNA
aggtcttgtccagctcagtagtgccaccaacagcgattctgaaacgcttgcggcaacgccaaaggcggtaaagac

SEQ ID NO: 70366 - DNA, 75 bp, synthetic construct
  source 1..75: mol_type = other DNA
ccaagccctatcattccgctaaattggtcgaaagcttcaatgactctcatgttgaaagagatgtccaaccttatc

SEQ ID NO: 70367 - DNA, 75 bp, synthetic construct
  source 1..75: mol_type = other DNA
ggcacttctcggttggttttacatcatgttcagtgcggggaagtgggcggcctctgtttttctaaagcagtgggg

SEQ ID NO: 70368 - DNA, 75 bp, synthetic construct
  source 1..75: mol_type = other DNA
gatgtactggagagccattcagcacagaataccctagtggatgacggcggtaccctggcagtgtctgccggcggt

SEQ ID NO: 70369 - DNA, 75 bp, synthetic construct
  source 1..75: mol_type = other DNA
atacagaatctgaccaacggtattatttactggtttgtccgggtgatgtcaccttttacggaaaaaatggtcagt

SEQ ID NO: 70370 - DNA, 75 bp, synthetic construct
  source 1..75: mol_type = other DNA
atggagcgccagacgctggtcagttattccgacattcagtctctgccggatctgacctgttatgtcaccctgccc

SEQ ID NO: 70371 - DNA, 75 bp, synthetic construct
  source 1..75: mol_type = other DNA
tccggggctgatcttccatccgcctctgctttatatggggtacgtgggtttctcggtggcgtttgcttttgccat

SEQ ID NO: 70372 - DNA, 75 bp, synthetic construct
  source 1..75: mol_type = other DNA
tccttccgtcagggaggtgcgctttggtgatggctattcccagcgtgcgcctgccgggctgaatgccgacctgaa

SEQ ID NO: 70373 - DNA, 75 bp, synthetic construct
  source 1..75: mol_type = other DNA
atgccaacaccaaccatcatcaaaacactcaacacccaccgcgaaaaaccgtttgtcagcgtcgtcacgccaacc

SEQ ID NO: 70374 - DNA, 75 bp, synthetic construct
  source 1..75: mol_type = other DNA
cgaagagtatttcagaaattatgagcaggcagtccgggctctggaaaacggcatctggactcagcgtgaatgtgt

SEQ ID NO: 70375 - DNA, 75 bp, synthetic construct
  source 1..75: mol_type = other DNA
cggttcagtaccacggaacgcagcaattgcgggagaagattgccagagcagtgaacaactcagtccgtaaaaaat

SEQ ID NO: 70376 - DNA, 75 bp, synthetic construct
  source 1..75: mol_type = other DNA
tcttaccgcgcgttacgcaaggagaagaaggccatgaaacagccgaaaaacgccctgacctggtgtttattaatc

SEQ ID NO: 70377 - DNA, 75 bp, synthetic construct
  source 1..75: mol_type = other DNA
gaaaaaggggagcagaaacgggcttcaataggcgcattgggaatggaagcaagaagacgagcatccctggaaaaa

SEQ ID NO: 70378 - DNA, 75 bp, synthetic construct
  source 1..75: mol_type = other DNA
ccgcttgcagtttctactgaatatggcatgagcctgcaaaatcgcgaatctatcggtcagttaataagcgtactg

SEQ ID NO: 70379 - DNA, 75 bp, synthetic construct
  source 1..75: mol_type = other DNA
cggcagggctgaatgctgacctgaaaacataccgggtgacgctttccgtgacccgggaggaggcccggcatctgg

SEQ ID NO: 70380 - DNA, 75 bp, synthetic construct
  source 1..75: mol_type = other DNA
ggcacaggtggcgtatggagtgctgaagtcaggcgtgccgttcgatgcgtcacggcataatccggtagcggcgta

SEQ ID NO: 70381 - DNA, 75 bp, synthetic construct
  source 1..75: mol_type = other DNA
ttacggtttcgcacctgcactggtttatatctccgccgtcgcgttgattggcgcgctctcttacatcctgctggt

SEQ ID NO: 70382 - DNA, 75 bp, synthetic construct
  source 1..75: mol_type = other DNA
ggctgccggacgtggtgctgtatcgccggaaaatatcgcgttcacccgctggctgacacacctgcagaacggtgt

SEQ ID NO: 70383 - DNA, 75 bp, synthetic construct
  source 1..75: mol_type = other DNA
gtactgccactgcatggcctgacgggcgtgggctggagcgactcctggagcgaatacgcctgggtgcgtgaacag

SEQ ID NO: 70384 - DNA, 75 bp, synthetic construct
  source 1..75: mol_type = other DNA
gcgcaaatgggctatgtattttcggccttcgcctggctttatacgctatgtcagatccccggcggttggttttta

SEQ ID NO: 70385 - DNA, 75 bp, synthetic construct
  source 1..75: mol_type = other DNA
aggattaccggatgatgtcagggaaaccatcactgtgcatttcaccgcaaaaagaggtgactggtgtgacatctg

SEQ ID NO: 70386 - DNA, 75 bp, synthetic construct
  source 1..75: mol_type = other DNA
gctatggcgaaggcgatgagtcctatggctatgacagttgtggctacctgaaggcgcagtctgcgggcgggcacc

SEQ ID NO: 70387 - DNA, 75 bp, synthetic construct
  source 1..75: mol_type = other DNA
tcaggctgaacagccgcaacagccgcaacagccgcaacagccgcaacagccgcaacagccgcaacagccgcaaca

SEQ ID NO: 70388 - DNA, 75 bp, synthetic construct
  source 1..75: mol_type = other DNA
gttatcgcatttggcaaacaggccgatttcctggctaaacatcaaaaaggcgatgttgccagcgtatccggcacg

SEQ ID NO: 70389 - DNA, 75 bp, synthetic construct
  source 1..75: mol_type = other DNA
gaatacgtggagttgagcgacggcactttatcgtggttagggaacgccttgttctggatgccgctaccagaaccg

SEQ ID NO: 70390 - DNA, 75 bp, synthetic construct
  source 1..75: mol_type = other DNA
ctgaccgtatagcacttgttccggtgctggcgtcagagcccgctggtattgaaaagctcagagagttgatgagtt

SEQ ID NO: 70391 - DNA, 75 bp, synthetic construct
  source 1..75: mol_type = other DNA
gggcagccaacgacaaagccattgcacagatgctggcagcaaagaagtccggcccacctgccgccaggctgggcg

SEQ ID NO: 70392 - DNA, 75 bp, synthetic construct
  source 1..75: mol_type = other DNA
cgcagtcgcggacaggtttttcatttttgccgggttttacaggcaaatcagacgagaataaccggacggatataa

SEQ ID NO: 70393 - DNA, 75 bp, synthetic construct
  source 1..75: mol_type = other DNA
tgacctatctggatatccagccggagttcccgccgtggcagagaatgatcctggggggaataacgatagccagct

SEQ ID NO: 70394 - DNA, 75 bp, synthetic construct
  source 1..75: mol_type = other DNA
tcgccaacgaggccgaagcacataatgacgggctgttacccctggatgaaataggccaggccggaaacgcacggg

SEQ ID NO: 70395 - DNA, 75 bp, synthetic construct
  source 1..75: mol_type = other DNA
tgcatatatttggaactcaggttgttccggcattttcaggcatcctgcctgtagagaaatggcagggcgcaggca

SEQ ID NO: 70396 - DNA, 75 bp, synthetic construct
  source 1..75: mol_type = other DNA
atgctgcatgaactctggctgcagagcggtactgaacagcgtcgctgggaaggattaccggacgatgtcagggat

SEQ ID NO: 70397 - DNA, 75 bp, synthetic construct
  source 1..75: mol_type = other DNA
aatacagcaacggtaaggaacatgctgacgcgttaaaggatgcctggacagcaaatcacggggcggcgggtcgtg

SEQ ID NO: 70398 - DNA, 75 bp, synthetic construct
  source 1..75: mol_type = other DNA
gcaggtccaccgcgtgggtgaacgtttcgccatactggaggccgcgcttgtgctttccggtcatgtaactggctg

SEQ ID NO: 70399 - DNA, 75 bp, synthetic construct
  source 1..75: mol_type = other DNA
agaaaattaatgagaagacgccattaaaggtaacatataccactgaagaagatggtcgcttgctgtttaattttc

SEQ ID NO: 70400 - DNA, 75 bp, synthetic construct
  source 1..75: mol_type = other DNA
atgagcggatttgcacaggggttacttgccggattcagcaccgttgaccaggcaatgacccgtcgtaaggagctt

SEQ ID NO: 70401 - DNA, 75 bp, synthetic construct
  source 1..75: mol_type = other DNA
gcgttaccgtcagatgggacagcagtatcgtcagttaatctggcttcaaaaggtcggctgaccgccctgacagat

SEQ ID NO: 70402 - DNA, 75 bp, synthetic construct
  source 1..75: mol_type = other DNA
atccagcagcagatgcagcgtcgtgaagaggtgaacattaatgtgcaccgggagcgcggggaggatgttgagccg

SEQ ID NO: 70403 - DNA, 75 bp, synthetic construct
  source 1..75: mol_type = other DNA
actgctggatgagcaaaactgcctgatgctgcatgaactctggctgcagagcggtactggccggcgtcgctggga

SEQ ID NO: 70404 - DNA, 75 bp, synthetic construct
  source 1..75: mol_type = other DNA
tctctttaaattacaaaagagtacgacagaatagtataactaattttcgtagttttgtttacagtattgagcaga

SEQ ID NO: 70405 - DNA, 75 bp, synthetic construct
  source 1..75: mol_type = other DNA
aacgtccgctacaaagcaatcactaataaacaggcaagtataccttcagttgtcacattctgccctcgcctgcgg

SEQ ID NO: 70406 - DNA, 75 bp, synthetic construct
  source 1..75: mol_type = other DNA
gtcaaaacctgctggatatcgaaagcttaaaggttgatgatcttgatattcatgcttaccgttatgtgatgaaac

SEQ ID NO: 70407 - DNA, 75 bp, synthetic construct
  source 1..75: mol_type = other DNA
ctaatcaataactatcttggagctggaccgcgatctaataacctcgttcattatcgctcaacatttaagcatttt

SEQ ID NO: 70408 - DNA, 75 bp, synthetic construct
  source 1..75: mol_type = other DNA
ggcagaatatatgctaattttgcagatggctcatccttaagaatttccgtcactaacagcgaacttgttgaagcc

SEQ ID NO: 70409 - DNA, 75 bp, synthetic construct
  source 1..75: mol_type = other DNA
actcttctttatgggtaaaatggcctggcaaaattgagcatgcgcaaaaaggaaattgcaacgaaaattactggt

SEQ ID NO: 70410 - DNA, 75 bp, synthetic construct
  source 1..75: mol_type = other DNA
ctgatgtttcaggtacgatgaaggtggaaaccaatggggtaaacccggttagtgataacgaacgttatggttcgc

SEQ ID NO: 70411 - DNA, 75 bp, synthetic construct
  source 1..75: mol_type = other DNA
ggactaacgagaatgtatcggtgtggtggaaccgtctatgtgacaacgtactggcggaaaaactatgccgtttta

SEQ ID NO: 70412 - DNA, 75 bp, synthetic construct
  source 1..75: mol_type = other DNA
agaaatgtaatgattcaacatacatcaactagaaatgctgtctttcgcaatgcggctctgatgaacgctattctt

SEQ ID NO: 70413 - DNA, 75 bp, synthetic construct
  source 1..75: mol_type = other DNA
tatggggaatgccagcatcatcccgcgtaattatcgtaaatatctctatcacgcgtatctggcctatatggaggc

SEQ ID NO: 70414 - DNA, 75 bp, synthetic construct
  source 1..75: mol_type = other DNA
tgaaaacgggcttactcgtggcgaacaaatggaactggcacgaattgcactggcatcactggaacgcgaactgat

SEQ ID NO: 70415 - DNA, 75 bp, synthetic construct
  source 1..75: mol_type = other DNA
ttctggtaaaatgattgagcagttacctgctgcattaaaaatactagaacgtacctggtctttatacaaaaatta

SEQ ID NO: 70416 - DNA, 75 bp, synthetic construct
  source 1..75: mol_type = other DNA
atttggtgatctgtcaaaagtggctgattccgatttgctgaaaagcgcctttggctccgatgaagctgtggccat

SEQ ID NO: 70417 - DNA, 75 bp, synthetic construct
  source 1..75: mol_type = other DNA
gttgccacgtcactggcagcacctttgattggccttgttggtgctgacggcttcggggtacatcttttcgaacag

SEQ ID NO: 70418 - DNA, 75 bp, synthetic construct
  source 1..75: mol_type = other DNA
ctccatgttgtatggattcgatgaaataatcgatatctttctgaatgcattaaccactccaatagcacaagagct

SEQ ID NO: 70419 - DNA, 75 bp, synthetic construct
  source 1..75: mol_type = other DNA
caggtctggacaactgcgcaatttatttcgtggctggagagtcagggggcatttaaccatccttactggatgtgc

SEQ ID NO: 70420 - DNA, 75 bp, synthetic construct
  source 1..75: mol_type = other DNA
gatgaaaacggtaatgagcagacttggacgggtcagggccgtactcctaaagcaatcgccgctgctatcgaagct

SEQ ID NO: 70421 - DNA, 75 bp, synthetic construct
  source 1..75: mol_type = other DNA
tgcgcctgagtcagaatatgtaaggcagtttgaagttgcacgccaaatggctgtagcatttgccggactgaaaac

SEQ ID NO: 70422 - DNA, 75 bp, synthetic construct
  source 1..75: mol_type = other DNA
cggcaaccgcccgacctatgaagctagccgcagcgaagaagccagccacgccgatctggcctgggcaacaatgca

SEQ ID NO: 70423 - DNA, 75 bp, synthetic construct
  source 1..75: mol_type = other DNA
cacccgaatggcaatatcggcagggcttgatcgtgaaggtgcgaaagaagcttacagcaatatttgtcgctttat

SEQ ID NO: 70424 - DNA, 75 bp, synthetic construct
  source 1..75: mol_type = other DNA
ccaccggcacgccaggcgctggcacaggcggcgctgacttaccgttatggtgacgaacatcagcccgtcaccacc

SEQ ID NO: 70425 - DNA, 75 bp, synthetic construct
  source 1..75: mol_type = other DNA
cgggaaacaccccccggattttattgtttttattcttttttgttgtttctgcaataaccacaattgcatgcggat

SEQ ID NO: 70426 - DNA, 75 bp, synthetic construct
  source 1..75: mol_type = other DNA
ggcttcaccgttacccgcaacgtaggcaatatcccaaatgcctttattgcttcgtttggtcaaggcaaaccggtt

SEQ ID NO: 70427 - DNA, 75 bp, synthetic construct
  source 1..75: mol_type = other DNA
catccagttatcagatgatccccggaatttttcgttttgtctgcacaaatggcctggtgtgcgggaataattttg

SEQ ID NO: 70428 - DNA, 75 bp, synthetic construct
  source 1..75: mol_type = other DNA
aaacagcggaaaggcccgcttacatggtgtggaatttgccggcacattgccgctgtggtcagaggatgtcactct

SEQ ID NO: 70429 - DNA, 75 bp, synthetic construct
  source 1..75: mol_type = other DNA
gatacgaaatatggtcgctatgtttttaaagtctttgctccgaaaacgaaaaggaatgaacgttttttaaaatct

SEQ ID NO: 70430 - DNA, 75 bp, synthetic construct
  source 1..75: mol_type = other DNA
aatagcaaagcacagcgcaaattagagcagcctgaatatttcaatttggtgcaagaaaagtttctgacagaaaac

SEQ ID NO: 70431 - DNA, 75 bp, synthetic construct
  source 1..75: mol_type = other DNA
aatactttccgaagcaccaagacatcaatcagtggagcgaagttgatattcaacaggtgatcaataaactgaatt

SEQ ID NO: 70432 - DNA, 75 bp, synthetic construct
  source 1..75: mol_type = other DNA
gtggtgaatatcattaccaaaaagaatgcagacaaatggcattcttccatcaacgcagggctgaatcagcaggaa

SEQ ID NO: 70433 - DNA, 75 bp, synthetic construct
  source 1..75: mol_type = other DNA
catgacggaggatgatgtccgaccggaggcactgcgccgctttgagcagatggtggaagaggtgtcacgtaacgc

SEQ ID NO: 70434 - DNA, 75 bp, synthetic construct
  source 1..75: mol_type = other DNA
ttatcgttcagcgcgtgatggttatggctttgaagctaactggtcagagttttacaccacaacacgcaaaccctc

SEQ ID NO: 70435 - DNA, 75 bp, synthetic construct
  source 1..75: mol_type = other DNA
ttgacggctgaaatgaaaaaaatatctttggtttcagaagtcaatacctacatcaatacccatcagtggcctggc

SEQ ID NO: 70436 - DNA, 75 bp, synthetic construct
  source 1..75: mol_type = other DNA
gatctaatgataatggactggctaaagttgtttacccaattgcactgcctaaactttcacgttttatcagtatcg

SEQ ID NO: 70437 - DNA, 75 bp, synthetic construct
  source 1..75: mol_type = other DNA
caggcgcatattaccagcctgctggcggatatccaggagattgaggaatgtcagaatcaggtgaccggtgatgtc

SEQ ID NO: 70438 - DNA, 75 bp, synthetic construct
  source 1..75: mol_type = other DNA
agctggatatcctgcgtcgcgtcgataaggttgcccgcgaagcggacaagcgcgtacaggaagtgactgccagcc

SEQ ID NO: 70439 - DNA, 75 bp, synthetic construct
  source 1..75: mol_type = other DNA
acctatctggaacttgagcgactgataagcgatgccaaaccatgtagccgtcacatgatcggcatgtccatcaac

SEQ ID NO: 70440 - DNA, 75 bp, synthetic construct
  source 1..75: mol_type = other DNA
tgccagcgccgccgcgctcggtgtgccgttaaaaattacccatatggcggtaggcgatggcggcggaacattacc

SEQ ID NO: 70441 - DNA, 75 bp, synthetic construct
  source 1..75: mol_type = other DNA
aaagcaatcagttaaagcttgaagagctaaaacagaaacaggcagatgttcggcaaaaggctgacatagcccgcg

SEQ ID NO: 70442 - DNA, 75 bp, synthetic construct
  source 1..75: mol_type = other DNA
cttgattctctcaacgagatagagcaaagccccggcctttcaaaagcagtaggaattcgctcagcgtttccgaca

SEQ ID NO: 70443 - DNA, 75 bp, synthetic construct
  source 1..75: mol_type = other DNA
cgcctggtcgctggggcttaaaaaataccctgcggtggtgttcgatgaccgggaagtggtgtacggcaccaccga

SEQ ID NO: 70444 - DNA, 75 bp, synthetic construct
  source 1..75: mol_type = other DNA
ggatacaaaagattaccggactttcgacagagcaaatgcaggcattagagcagcccttgcctgaaatcaagcgcg

SEQ ID NO: 70445 - DNA, 75 bp, synthetic construct
  source 1..75: mol_type = other DNA
cacgatggctgaggcgattacctaccgccagaaattcaacgaacgtgaggtgatgctcttatggccggacttcat

SEQ ID NO: 70446 - DNA, 75 bp, synthetic construct
  source 1..75: mol_type = other DNA
tcgttgatttcatcaattgataaagaattcctctttaaagataagatgaatgttaaaatttatgggaatggtgta

SEQ ID NO: 70447 - DNA, 75 bp, synthetic construct
  source 1..75: mol_type = other DNA
ttcagccacaccgccaacaggctggctgaaatgcaacggtgcggcattttctgctgaagaatacccggaactggc

SEQ ID NO: 70448 - DNA, 75 bp, synthetic construct
  source 1..75: mol_type = other DNA
agcaggcgcaggaacggcttaccgggcgacttcaggcattaaatgaaagggttcctgagctcattactgacagta

SEQ ID NO: 70449 - DNA, 75 bp, synthetic construct
  source 1..75: mol_type = other DNA
ggtctggtaagcaccaccatgcagaatgaagcccgtcgtctgcgtgccgaacgctggaaagcagaaaatcaggaa

SEQ ID NO: 70450 - DNA, 75 bp, synthetic construct
  source 1..75: mol_type = other DNA
gcatgacaggatgcgggactttgatccggacagccccgaaataaaattcagtgatcgcagggcagcccttgaact

SEQ ID NO: 70451 - DNA, 75 bp, synthetic construct
  source 1..75: mol_type = other DNA
agtaccctcacggcgtggccggataaccgcatcgcagaggatgcgcactatgtttaccactatgatgaatacggc

SEQ ID NO: 70452 - DNA, 75 bp, synthetic construct
  source 1..75: mol_type = other DNA
gtaacccaaagcattgatcttggggaagtgactaaacaacagatcacagatagagctacaaaaaaacaatccttt

SEQ ID NO: 70453 - DNA, 75 bp, synthetic construct
  source 1..75: mol_type = other DNA
cgaggtcatactttgctggctcctgcggaggtgcgtcgctggaagttgtgaagcaatatattcaacatcagcgag

SEQ ID NO: 70454 - DNA, 75 bp, synthetic construct
  source 1..75: mol_type = other DNA
cagtggtttctgctctgtttagtggcgcggctatggcaacaagtgccgctaatgattccagctacgcaaccttaa

SEQ ID NO: 70455 - DNA, 75 bp, synthetic construct
  source 1..75: mol_type = other DNA
ggttggttccaaaatttatatatgattactttccaacaaaattaagaggattagggaccggtcttatttataact

SEQ ID NO: 70456 - DNA, 75 bp, synthetic construct
  source 1..75: mol_type = other DNA
tgtttctccggatgacgggggcagctgttatctctggctcaaccgtgggcaaccacccgccgttaaccggcgacg

SEQ ID NO: 70457 - DNA, 75 bp, synthetic construct
  source 1..75: mol_type = other DNA
ttacccggtttatccccgctggcgcggggaacacttttgctgacaccggcaatactgaacggctggcggtttatc

SEQ ID NO: 70458 - DNA, 75 bp, synthetic construct
  source 1..75: mol_type = other DNA
cgcactgaagcctcttcctgaagccagttacagttacaccctggtgaagaaagtcagagttcatgccgattacca

SEQ ID NO: 70459 - DNA, 75 bp, synthetic construct
  source 1..75: mol_type = other DNA
ccttgagtgcggcgtaaaacccgcaaatcagaaaatgaccgaaattctgtctgatgagttttatgctgctgaaaa

SEQ ID NO: 70460 - DNA, 75 bp, synthetic construct
  source 1..75: mol_type = other DNA
taatttctttaagcaatctctgccactgctggtagccctgctgctgatgctgttgctggtcacatatatcccggc

SEQ ID NO: 70461 - DNA, 75 bp, synthetic construct
  source 1..75: mol_type = other DNA
cgttacggacacctatcggctgctttcgtggtgcgttagcgggtcattccgccgtggaacttggcagcctggtcg

SEQ ID NO: 70462 - DNA, 75 bp, synthetic construct
  source 1..75: mol_type = other DNA
ataacaaccgtattccgctgatacagattgaaattaataactcgatggccgtgaccggtacgccgccacagcggc

SEQ ID NO: 70463 - DNA, 75 bp, synthetic construct
  source 1..75: mol_type = other DNA
tattttaaaggactgcgttttacggataacaaatatccttttcatcgcgacttatggcgaaaaccgactgcgtcg

SEQ ID NO: 70464 - DNA, 75 bp, synthetic construct
  source 1..75: mol_type = other DNA
gcaggcaaaatgattgaagatggttcatatgtcttcgattcatcatttcttcctgcaaatctttcatcaccaatt

SEQ ID NO: 70465 - DNA, 75 bp, synthetic construct
  source 1..75: mol_type = other DNA
ttcaaatagatatgagttaacgagttttataaccaactcactaaataagaattatataagcaaacttaaattagg

SEQ ID NO: 70466 - DNA, 75 bp, synthetic construct
  source 1..75: mol_type = other DNA
aacaagtacggtgacagtgatccgtcttatctgaacgtgaataccatcgccacgctgagttatctgcgttattcg

SEQ ID NO: 70467 - DNA, 75 bp, synthetic construct
  source 1..75: mol_type = other DNA
aactgaatgaaaacctggtgcctttcactgccaggcagatcaagtcctcattaatctggtgtgcagaggatgtca

SEQ ID NO: 70468 - DNA, 75 bp, synthetic construct
  source 1..75: mol_type = other DNA
caataattacaaatcattagagcatctgcaaacacgagcagagaattatctgagacatcgcaaagcagaagagaa

SEQ ID NO: 70469 - DNA, 75 bp, synthetic construct
  source 1..75: mol_type = other DNA
tgaaagtcgtaaaattgaacgtaccataagccttgataaaacgctcttgcattggttgttaagtaaacccctgga

SEQ ID NO: 70470 - DNA, 75 bp, synthetic construct
  source 1..75: mol_type = other DNA
cctgtttgatgaaacaggtgcgctaattgctgtgggaaactgcccggagagctacaagccgaagctggcggaggg

SEQ ID NO: 70471 - DNA, 75 bp, synthetic construct
  source 1..75: mol_type = other DNA
tgctggcgaccacaatggccgttgccctgcatgcaccaatcacttttgctgctgaagctgcaaaacctgctacaa

SEQ ID NO: 70472 - DNA, 75 bp, synthetic construct
  source 1..75: mol_type = other DNA
aacaatacacagattgccactaccgcttttgtgaaatcggcaattgcagcaatggtgggttctgcacctgcggca

SEQ ID NO: 70473 - DNA, 75 bp, synthetic construct
  source 1..75: mol_type = other DNA
gtttttaacggagagaggaatgtaccggcagacagtctgaaaccgcagcctctgattcttccggtcaagggaaaa

SEQ ID NO: 70474 - DNA, 75 bp, synthetic construct
  source 1..75: mol_type = other DNA
aaaacaggaataaagctgatgacagagtatccctgcaaatgaatttctcagttaattcttgtatcaagcttatta

SEQ ID NO: 70475 - DNA, 75 bp, synthetic construct
  source 1..75: mol_type = other DNA
gcaatcacagcagcggggaatgcagaggaaagctcgacccgtgccggagagtctgaaaaagccgccggagctgat

SEQ ID NO: 70476 - DNA, 75 bp, synthetic construct
  source 1..75: mol_type = other DNA
cagacatctgcgcctcgccgtaaccggacttagccgcagcggcaaaacggcgtttatcactgcgatggtcaatca

SEQ ID NO: 70477 - DNA, 75 bp, synthetic construct
  source 1..75: mol_type = other DNA
tttatatcggtggtctcaacggcaataacgccaatggtgctgcgcgttttacggcgacagacctgacaatcgatg

SEQ ID NO: 70478 - DNA, 75 bp, synthetic construct
  source 1..75: mol_type = other DNA
tgctgtccggtaaaaaactgactggtcgggatgaaaaggatatccggcgtctctggcaggagaaagtggatgcaa

SEQ ID NO: 70479 - DNA, 75 bp, synthetic construct
  source 1..75: mol_type = other DNA
agactttggcgaatcggaatggattagctataccggctctggctatctgctccgtctgagtgcgtggtcatttcc

SEQ ID NO: 70480 - DNA, 75 bp, synthetic construct
  source 1..75: mol_type = other DNA
ttgcggatggttaaaggaaccgttgtggggacaactgacacattgcgtgaaatgcagcgttatgaacaactgagt

SEQ ID NO: 70481 - DNA, 75 bp, synthetic construct
  source 1..75: mol_type = other DNA
caacaggtgatcaataaactgaatttacgaccacgtaaatgtttaggttggaaaacaccttatgaagtttacttc

SEQ ID NO: 70482 - DNA, 75 bp, synthetic construct
  source 1..75: mol_type = other DNA
atggaaataaagacacggagagaaaccaggcagacgttagcgcagtggtttgaagagaagggattccagaaggcg

SEQ ID NO: 70483 - DNA, 75 bp, synthetic construct
  source 1..75: mol_type = other DNA
aagataatccttgtttatggattggttcaggtatagcggatatcgatatgttccgcggtaatttcagcattaaag

SEQ ID NO: 70484 - DNA, 75 bp, synthetic construct
  source 1..75: mol_type = other DNA
gccctgaatttatctggcgcttttactcctgccagaaacgtcactatcacttcgttattgcaccgacagaagatg

SEQ ID NO: 70485 - DNA, 75 bp, synthetic construct
  source 1..75: mol_type = other DNA
ttttattcagcaacaaatcacgcaccgctccttcgaaccgtttattcgtgcgatccaggcgcaaatttccccttg

SEQ ID NO: 70486 - DNA, 75 bp, synthetic construct
  source 1..75: mol_type = other DNA
gaagcctcgctataggtgcatcggcaacgtcaacgggtggattttcaatcgcacttggtcgttatgcgaactcag

SEQ ID NO: 70487 - DNA, 75 bp, synthetic construct
  source 1..75: mol_type = other DNA
atatggcggcaggtgaaatctcaacagacagtaaagaagccattaacggttcacaactttacgccattagtcggt

SEQ ID NO: 70488 - DNA, 75 bp, synthetic construct
  source 1..75: mol_type = other DNA
atgacctctgtaccgacgctcatccgccacgttcccggaaaaactgagccggtcctccatctggaacatattcag

SEQ ID NO: 70489 - DNA, 75 bp, synthetic construct
  source 1..75: mol_type = other DNA
ataaaggggatgtcttataaactgaagaaaagggatttcaataacgttggtgaagcactccagtaccttgacaat

SEQ ID NO: 70490 - DNA, 75 bp, synthetic construct
  source 1..75: mol_type = other DNA
aactgcgtgagcagtgaaagccgccagtggcttgcgcagtgcgggctgacggtggagcggctggcggcacagata

SEQ ID NO: 70491 - DNA, 75 bp, synthetic construct
  source 1..75: mol_type = other DNA
gaccaggtgagcacaaaggtgatcgtcgttcgcgtggctgaacacaaagaagaagacggaaagacgcaggatcaa

SEQ ID NO: 70492 - DNA, 75 bp, synthetic construct
  source 1..75: mol_type = other DNA
cgcgttggatattggcggattaacaaatgcattcagcaatgctccgctgtcaccaacagacaaccaggggcggga

SEQ ID NO: 70493 - DNA, 75 bp, synthetic construct
  source 1..75: mol_type = other DNA
atgagtaataacccacttgaggtcgtcactcaggcggtcaattcactgctgaccgcacttaaattaccggatgaa

SEQ ID NO: 70494 - DNA, 75 bp, synthetic construct
  source 1..75: mol_type = other DNA
tgcacgcaaaatatttcgaccttgtgctggaaggaaagaaacgcgcagagtttcggaaaaatgaccgtaattatg

SEQ ID NO: 70495 - DNA, 75 bp, synthetic construct
  source 1..75: mol_type = other DNA
agtcaataataagcacgccaccaccggccccggcgaaacccagtttgccagggccatgcgctgccttaatattac

SEQ ID NO: 70496 - DNA, 75 bp, synthetic construct
  source 1..75: mol_type = other DNA
gtgtacaacctaattttttttactaacatcctcagactgcttgaagaaagaggtatgacaaagcaggagctttcc

SEQ ID NO: 70497 - DNA, 75 bp, synthetic construct
  source 1..75: mol_type = other DNA
atggagttctggtttgccattatcaaagttatcgcggtggtagcgatgatcatcttcggcggctggctgctattc

SEQ ID NO: 70498 - DNA, 75 bp, synthetic construct
  source 1..75: mol_type = other DNA
agcaacaggctggcgtgacagccggaaaatcaaaactcgacctgacaaacactgactggatttacggggtggatt

SEQ ID NO: 70499 - DNA, 75 bp, synthetic construct
  source 1..75: mol_type = other DNA
caggctatgttgcagaacgtgagtcgtgaggaattactggaagattttatcgttccgtcagttatccctggcgtt

SEQ ID NO: 70500 - DNA, 75 bp, synthetic construct
  source 1..75: mol_type = other DNA
gatgccccgggcgcacataaagcgggctatgctatccgccgttcggagaatttaaattcatgggagtatacgcca

SEQ ID NO: 70501 - DNA, 75 bp, synthetic construct
  source 1..75: mol_type = other DNA
acctggcgtattgctcaggcgattattgagctgaatcaggccgatctcgacccgcatgcgttagcgcgtgaaaaa

SEQ ID NO: 70502 - DNA, 75 bp, synthetic construct
  source 1..75: mol_type = other DNA
atatgcgtgatgcccgtcggctggtgatgcgccgtgcgcggtcggcaccgggtgaaaaccccggttatcagaccg

SEQ ID NO: 70503 - DNA, 75 bp, synthetic construct
  source 1..75: mol_type = other DNA
accaaaagccgtcaaggctgcatacgaccttgcagccggcaaggcgcctgccagccacactcacccgtggagtca

SEQ ID NO: 70504 - DNA, 75 bp, synthetic construct
  source 1..75: mol_type = other DNA
caaaagtacgagcgtctgatgttcagcaactggttaaaatttatctggattcgaatggcgggggtaatgtcgtgg

SEQ ID NO: 70505 - DNA, 75 bp, synthetic construct
  source 1..75: mol_type = other DNA
gtgaggatacaaaactatccggggattgctaccgatccttttggctatgcagtggttccttatctcacaacttat

SEQ ID NO: 70506 - DNA, 75 bp, synthetic construct
  source 1..75: mol_type = other DNA
cagtacgccacacatttatgcggctggcgactgcaccgaccagcctcagttcgtctatgtggcggcagcggccgg

SEQ ID NO: 70507 - DNA, 75 bp, synthetic construct
  source 1..75: mol_type = other DNA
cctttgccgccgccattaccgctggcggttcgttagtcacgccaatcataccgccgggaattgccctgattattt

SEQ ID NO: 70508 - DNA, 75 bp, synthetic construct
  source 1..75: mol_type = other DNA
aaatcgttcgcgccattgagctggcgaatcttcgcaacgagtgcgacgtattaatcgtcgggcgtggcggtggct

SEQ ID NO: 70509 - DNA, 75 bp, synthetic construct
  source 1..75: mol_type = other DNA
agtctgggaaacaagcaaaattcattaaaacggttgtattaagcggagatatagaatctaaaacgttcgttgatg

SEQ ID NO: 70510 - DNA, 75 bp, synthetic construct
  source 1..75: mol_type = other DNA
gcagaagaattagcctgaaattaaaaggtctgagtccaattgaatatcgaacccagacctatgtgcctcgtgttt

SEQ ID NO: 70511 - DNA, 75 bp, synthetic construct
  source 1..75: mol_type = other DNA
tcagccatgagtcactccaggaattccgggagaaacgccagcgcacccgtgattttctcaaaagctgggacattg

SEQ ID NO: 70512 - DNA, 75 bp, synthetic construct
  source 1..75: mol_type = other DNA
catgtatcggcgctgttcgctggggtaatctgccggataatgccagggagatcatcaccacgctgatgagccgtc

SEQ ID NO: 70513 - DNA, 75 bp, synthetic construct
  source 1..75: mol_type = other DNA
gcgatcctgaacgtcataatgcgctgatgcaacgatatcagcagtttactgcgctgtatcacaacgacctgaact

SEQ ID NO: 70514 - DNA, 75 bp, synthetic construct
  source 1..75: mol_type = other DNA
gatgaagcggtggaaggcttacggcgggatatgctcagtctcggtcttatctgggatgaaccacaaccagatcgc

SEQ ID NO: 70515 - DNA, 75 bp, synthetic construct
  source 1..75: mol_type = other DNA
aacaaggtagctcgcggcctgacaaagggcagtaaggttgtgaaaataaaggcttcagaaccattcaccacagac

SEQ ID NO: 70516 - DNA, 75 bp, synthetic construct
  source 1..75: mol_type = other DNA
tccacatgctgagtgagcagtgcgatcgcctgctccccgaaaacaaccagggagggggttttgttgtcaccgtct

SEQ ID NO: 70517 - DNA, 75 bp, synthetic construct
  source 1..75: mol_type = other DNA
ttctggtaaccggtgttgccagcaaactgtccatcgcctacggtatcgctcaggcgatgcaccgcgaaggagctg

SEQ ID NO: 70518 - DNA, 75 bp, synthetic construct
  source 1..75: mol_type = other DNA
gcttaagcgtcgccgggtcggtgggagcctatcagtatcatggtcgcagtgccgacgggcgtgtcgcggatatct

SEQ ID NO: 70519 - DNA, 75 bp, synthetic construct
  source 1..75: mol_type = other DNA
cggcgatgatatggtccgtatagctcactggctggcaaaacagtcgcatattgatgcggttgtattgcagcaaac

SEQ ID NO: 70520 - DNA, 75 bp, synthetic construct
  source 1..75: mol_type = other DNA
aggcagacgtagtactgatgatcggaaaaatgtgccttattccgtatttatgacaccgcccctgtccagggttgg

SEQ ID NO: 70521 - DNA, 75 bp, synthetic construct
  source 1..75: mol_type = other DNA
gtgcagcggataacctggaggcggcgatcaaaggcaaaccactaactgatgtctggtttgccttcccgcagttaa

SEQ ID NO: 70522 - DNA, 75 bp, synthetic construct
  source 1..75: mol_type = other DNA
cgttgcggcgagtcttttgacactgttatttcagctaacccggcaacgtatgttggtagtgctgatgcattgaag

SEQ ID NO: 70523 - DNA, 75 bp, synthetic construct
  source 1..75: mol_type = other DNA
tcataatggggccgccgatgcaatgagacattgttacttgatgtgtcgaatgactaagacatttggatcaacaat

SEQ ID NO: 70524 - DNA, 75 bp, synthetic construct
  source 1..75: mol_type = other DNA
cggaagcgggcgaactgatccagacggccgcactggcgattcgcaaccggatgacggtgcaggaactggccgacc

SEQ ID NO: 70525 - DNA, 75 bp, synthetic construct
  source 1..75: mol_type = other DNA
cgcactctgcgggcctgcatctcggaatgagcaccggctttgattcaggcagttcgctggattatgtctatcaaa

SEQ ID NO: 70526 - DNA, 75 bp, synthetic construct
  source 1..75: mol_type = other DNA
gggaaaactggggaatctggcgagactcggcaaactgggaaacctgctggggaaaagcgggaagctgctgggcgc

SEQ ID NO: 70527 - DNA, 75 bp, synthetic construct
  source 1..75: mol_type = other DNA
catcggaagttaaggcgctggtcattgatgaaaacaatgaaattgttgccacccatagtgcgccgctgaccattc

SEQ ID NO: 70528 - DNA, 75 bp, synthetic construct
  source 1..75: mol_type = other DNA
tgggcaactttatgaaagatgctcgtctggagattgttaagccgtcattgctgaccaaagcggttgaggtgatca

SEQ ID NO: 70529 - DNA, 75 bp, synthetic construct
  source 1..75: mol_type = other DNA
accttgccagtgaccaggcggtaaacagtcttatcaaggccgagaccaatggcagtagtcagtctgtggaagtga

SEQ ID NO: 70530 - DNA, 75 bp, synthetic construct
  source 1..75: mol_type = other DNA
ttgcctactatttgtcgatttcatgcaaccactgcgaagatccggcttgtaccaaagtctgcccaagcggtgcga

SEQ ID NO: 70531 - DNA, 75 bp, synthetic construct
  source 1..75: mol_type = other DNA
gcacagctacagatgtccggctgggcgagcgctttgacttcaaatgattacagtattagtggcgatgccgccagc

SEQ ID NO: 70532 - DNA, 75 bp, synthetic construct
  source 1..75: mol_type = other DNA
cgcagaaggataagttcggcgcgggtaaaaacggttttacccgtggtaacccccagaccggcacacctgccaccg

SEQ ID NO: 70533 - DNA, 75 bp, synthetic construct
  source 1..75: mol_type = other DNA
aaaagtgatggtgatggctggtagtgaaatttatcgcctccatgctgtagggagcgagaacgggggcgacggtga

SEQ ID NO: 70534 - DNA, 75 bp, synthetic construct
  source 1..75: mol_type = other DNA
atcaggaattcagaagctaaaaatgtagtgctggaaaacgctggctcattaacagtcgtcactggttcccgggca

SEQ ID NO: 70535 - DNA, 75 bp, synthetic construct
  source 1..75: mol_type = other DNA
tgaatttgtccgttttgctgccagcgacagccaggtcggactggaagaggtggttgtgatcgcgcaaagcgtcgg

SEQ ID NO: 70536 - DNA, 75 bp, synthetic construct
  source 1..75: mol_type = other DNA
aagcaatggacgttgtgttacaggggcaggcggtggaggccgtctgtcagcccgcgcgaccccccctggcaggct

SEQ ID NO: 70537 - DNA, 75 bp, synthetic construct
  source 1..75: mol_type = other DNA
cggtctgtctgccgggatggttcgcccgcgctggcagaaagagcagccgccactgctaccggctgaaacgaactg

SEQ ID NO: 70538 - DNA, 75 bp, synthetic construct
  source 1..75: mol_type = other DNA
cgtgaactgggcgcaacgctgagttacaacatgcgtctggggaacggtatggaaattgagccgtggctgaaggcg

SEQ ID NO: 70539 - DNA, 75 bp, synthetic construct
  source 1..75: mol_type = other DNA
ccaaaataaaataccatgtataatgattacaggaagccatattccgttcgacagaaatggaatgaagttttattt

SEQ ID NO: 70540 - DNA, 75 bp, synthetic construct
  source 1..75: mol_type = other DNA
aaatatggcaaaacgccactggaactggcgcgggaacggggctttgaagagattgcgcagttactgattgccgca

SEQ ID NO: 70541 - DNA, 75 bp, synthetic construct
  source 1..75: mol_type = other DNA
atttagatgcaatagaagaccagaaactgggactcgtttttaatgtcattgtttctgttgaagagaatgatttgt

SEQ ID NO: 70542 - DNA, 75 bp, synthetic construct
  source 1..75: mol_type = other DNA
gatgccacccttgcgctccgtaaccatttgaattcagctaaacaatcaatgattcgatccattaatgagaacacg

SEQ ID NO: 70543 - DNA, 75 bp, synthetic construct
  source 1..75: mol_type = other DNA
ctgaatttgccagatgatgattcacgctggttacaggcaaaaacactgctcgaacgccaccggacactgcgtgac

SEQ ID NO: 70544 - DNA, 75 bp, synthetic construct
  source 1..75: mol_type = other DNA
ttgctgagaaaacaacgggaaggagaggatataagtcagaatgatattgccaaaagtagtattgaacttattaat

SEQ ID NO: 70545 - DNA, 75 bp, synthetic construct
  source 1..75: mol_type = other DNA
ataattcgcccaccgataaaatgaacgtgaaaggcgatacccaagggaacactcgcgttcgggttgataacattg

SEQ ID NO: 70546 - DNA, 75 bp, synthetic construct
  source 1..75: mol_type = other DNA
cctgctgaaaaagctgcaacaacagtttggcaccgcctgcctgttcatcacccacgacttacgcctggtggaacg

SEQ ID NO: 70547 - DNA, 75 bp, synthetic construct
  source 1..75: mol_type = other DNA
ttcttgcctaagcctggcggtggaatgaacctgttaatcacctcagtggatggagataaaaccgctggcgcggcg

SEQ ID NO: 70548 - DNA, 75 bp, synthetic construct
  source 1..75: mol_type = other DNA
ctgaaacggcagcgggacagagcgcctcggctgcggcaggctcaaaaacagcggctgcgtcgtctgccagtgccg

SEQ ID NO: 70549 - DNA, 75 bp, synthetic construct
  source 1..75: mol_type = other DNA
gggaaacgggagggaagtctatgatgacgctggcgcagtggtttgaagagaagggaattgagaagggaattgaga

SEQ ID NO: 70550 - DNA, 75 bp, synthetic construct
  source 1..75: mol_type = other DNA
gaacctataccgattcatatcagttaggtgatggggaactgctggtttgtacggtgaatatccctgctggcgtat

SEQ ID NO: 70551 - DNA, 75 bp, synthetic construct
  source 1..75: mol_type = other DNA
gctgaccacgatacagaacgacagaacccgcatccagacgatttatcagccggggagcttcacgccactcatcag

SEQ ID NO: 70552 - DNA, 75 bp, synthetic construct
  source 1..75: mol_type = other DNA
gctgtcagtctttcggctgaagaaatggacgctgctgatgtcgtggatgcgattaaagcgtgctcatctttggtt

SEQ ID NO: 70553 - DNA, 75 bp, synthetic construct
  source 1..75: mol_type = other DNA
cggcagaagcacagcgccagtcactgattgatgcagcaatggtttccattagtctgattcagctgaaattacagg

SEQ ID NO: 70554 - DNA, 75 bp, synthetic construct
  source 1..75: mol_type = other DNA
aagcaaagaacgcgaaaaagcggaaaaggcagaaaaggcagcagagaagaaacgacgacgagaggagcagaaaca

SEQ ID NO: 70555 - DNA, 75 bp, synthetic construct
  source 1..75: mol_type = other DNA
ggcagcggctggcgactggctccacgtaataacttcatggtggaaacgcttgaaaagaaccgcagctggacacgc

SEQ ID NO: 70556 - DNA, 75 bp, synthetic construct
  source 1..75: mol_type = other DNA
tccgaggtttctgcccgctttaccctggacgcgatgcccggcaaacagatggcgattgacgccgatcttaacgcc

SEQ ID NO: 70557 - DNA, 75 bp, synthetic construct
  source 1..75: mol_type = other DNA
ctccattctgatcgctcgtcacttcgagaaaccgattctgagagactcattgtcaaatatacagaaacacaatca

SEQ ID NO: 70558 - DNA, 75 bp, synthetic construct
  source 1..75: mol_type = other DNA
gaaggggggatggaacctgtatacatatccgctgagcccggtgaatagcatggatccattaggattatatgaatt

SEQ ID NO: 70559 - DNA, 75 bp, synthetic construct
  source 1..75: mol_type = other DNA
cggtatgcggcacagtccctgtatgctccgctgcgcacccttgaaccggttgcggggatcagaccggtggtgcca

SEQ ID NO: 70560 - DNA, 75 bp, synthetic construct
  source 1..75: mol_type = other DNA
aacaatagagaaatctcttgtgaatttcatgttttcacagattatatcagtgataaagacaaattatatttttct

SEQ ID NO: 70561 - DNA, 75 bp, synthetic construct
  source 1..75: mol_type = other DNA
tcaaagtcggtagttaataaagtggggtatccaaatcctgatttttttatttttaatgatgatcttgattattcg

SEQ ID NO: 70562 - DNA, 75 bp, synthetic construct
  source 1..75: mol_type = other DNA
aacagaatggtgcgcagaatacgatgaatggggcaacctgctgaatgaagagaacccgcatcagctgcagcagct

SEQ ID NO: 70563 - DNA, 75 bp, synthetic construct
  source 1..75: mol_type = other DNA
ctgttgtttatgatttaaaaaatcctttttttatgaatccgaagcgattatctgtcatcaacctctataaacgta

SEQ ID NO: 70564 - DNA, 75 bp, synthetic construct
  source 1..75: mol_type = other DNA
tccaagtgccagagcggttagactactaaaaaataatcagcgtagtgatttgacatcttggaaaggatattttat

SEQ ID NO: 70565 - DNA, 75 bp, synthetic construct
  source 1..75: mol_type = other DNA
gaaccgcccctgaatggcaaatgaaacgggaaatgctctcgccttcgtatacaacacaatggactgagatcccca

SEQ ID NO: 70566 - DNA, 75 bp, synthetic construct
  source 1..75: mol_type = other DNA
atggtgatacgcaaaaagaagtgcagggactgtggaaacgcgattactcataatacggtgtgttgtccgtattgt

SEQ ID NO: 70567 - DNA, 75 bp, synthetic construct
  source 1..75: mol_type = other DNA
ggcggcgactctgtggcacccggaagcgcattttgactgggttcggcctggcattattttgtatggcgcttcgcc

SEQ ID NO: 70568 - DNA, 75 bp, synthetic construct
  source 1..75: mol_type = other DNA
tcgatctgcaggcattaaaacagaatctgtccattgtccgccaggccgcgccgcacgcgcgcgtctggtcggtgg

SEQ ID NO: 70569 - DNA, 75 bp, synthetic construct
  source 1..75: mol_type = other DNA
gataatttcagtgacccggaatgggagtgtaaccggccatcctttgttgtatccggtgatgctgggaaaataacc

SEQ ID NO: 70570 - DNA, 75 bp, synthetic construct
  source 1..75: mol_type = other DNA
ttattcttgttgccatatgttgccccgtaatccccgttttgtgtgtatggtgtgatgttgtaatattaggagctg

SEQ ID NO: 70571 - DNA, 75 bp, synthetic construct
  source 1..75: mol_type = other DNA
atgaatgattttcgtctgacaccgacaggaacgctcaaaatcaatgccgcccgggtagctgcacgtatattttaa

SEQ ID NO: 70572 - DNA, 75 bp, synthetic construct
  source 1..75: mol_type = other DNA
ggaaccggcgcaggttcagaagtcatgagccgtattgcggcccccatgattggcgggatgatcacagctccgctg

SEQ ID NO: 70573 - DNA, 75 bp, synthetic construct
  source 1..75: mol_type = other DNA
ccgggctgaaacgggtggtgaaaaaagaactggcggacggcagcgtcacgcgcagcgggtatgacgcggcaggaa

SEQ ID NO: 70574 - DNA, 75 bp, synthetic construct
  source 1..75: mol_type = other DNA
gacgggaaaacgggtatggcggcgggagcgtgacctgacggggtggatgtcgctgtcgcgtaaaccggaggtgac

SEQ ID NO: 70575 - DNA, 75 bp, synthetic construct
  source 1..75: mol_type = other DNA
agaaagctgtttttatagaaaatgaatatgcagcaacggattctctcgccctgactggaggactgcgtctcgata

SEQ ID NO: 70576 - DNA, 75 bp, synthetic construct
  source 1..75: mol_type = other DNA
gaaccgcgcgtaaagttgcacaaagcataggcgtcagcgtcccggtcctgtacaaatggaagaaagaccttatca

SEQ ID NO: 70577 - DNA, 75 bp, synthetic construct
  source 1..75: mol_type = other DNA
atgccacgtttttttgcccgccatgccgctacgctgtttttcccgatggcgttgattttgtatgactttgccgcc

SEQ ID NO: 70578 - DNA, 75 bp, synthetic construct
  source 1..75: mol_type = other DNA
ggcgtacagccattatatttgatgatgtaacagaatctggtaagtcaatttttcgttttgaagggacggattttg

SEQ ID NO: 70579 - DNA, 75 bp, synthetic construct
  source 1..75: mol_type = other DNA
gctcggctgattggttcattgtcgccatcaccgctggacggtgtattaagtaaagcgtcaacgctggagattttt

SEQ ID NO: 70580 - DNA, 75 bp, synthetic construct
  source 1..75: mol_type = other DNA
agcaggctatatctctagtaggtaaagatatatttaatactttgatcaaagagtacacagaaaagcaatggggta

SEQ ID NO: 70581 - DNA, 75 bp, synthetic construct
  source 1..75: mol_type = other DNA
ggttgcgctcccgcttacgacgcaaaattccctttcacaataccaacccgaatggcagtgctgggaacctgatgt

SEQ ID NO: 70582 - DNA, 75 bp, synthetic construct
  source 1..75: mol_type = other DNA
atgggcgtacttaataactggttgagcgaagaagaaagtctatggatccagtcgcgcattcatctacgggctcta

SEQ ID NO: 70583 - DNA, 75 bp, synthetic construct
  source 1..75: mol_type = other DNA
cgacagaaataccggacattctctccatgaacattgaaccagacctgcttgaagcaatggtctgcaaaagcggtc

SEQ ID NO: 70584 - DNA, 75 bp, synthetic construct
  source 1..75: mol_type = other DNA
ggtaaggggcgtaagggaatcattatccgcaccaaaaaacagagtccgttaaaaaaggctctgacctttctgaaa

SEQ ID NO: 70585 - DNA, 75 bp, synthetic construct
  source 1..75: mol_type = other DNA
ccttatacagaatgaaaaatcatatttcagaaacagaataatccctgatgacttaaagaaagttgttttccttaa

SEQ ID NO: 70586 - DNA, 75 bp, synthetic construct
  source 1..75: mol_type = other DNA
ccgtgagttttgtgtccagtatggtgagactgattacgatttcctgtgccggatggcggcggaggaaggcatctt

SEQ ID NO: 70587 - DNA, 75 bp, synthetic construct
  source 1..75: mol_type = other DNA
gcacaacatcaactacgacaagtttgatatcaagctgggcaatacgctgactgagccgcacttcagagatgaaaa

SEQ ID NO: 70588 - DNA, 75 bp, synthetic construct
  source 1..75: mol_type = other DNA
ttaacgccaaagtcacggcaaaccagaaaaccctgcagcgcgaacaggaagtcaagcaacgtgaagcggaggcca

SEQ ID NO: 70589 - DNA, 75 bp, synthetic construct
  source 1..75: mol_type = other DNA
ggacaagggcgttgcgttttattcccgtaagggcgtgacccgcacacctgaaggcaatctcatttcggatgttaa

SEQ ID NO: 70590 - DNA, 75 bp, synthetic construct
  source 1..75: mol_type = other DNA
aatatgtgcatcctgaaggctggaaagtgtgggagaacgtcagcgcgttgcagcaaacaatgcccctgatgagtg

SEQ ID NO: 70591 - DNA, 75 bp, synthetic construct
  source 1..75: mol_type = other DNA
cactggcaccgaacctgttctttggcaccaccattgccgtcaatattctggtgctgtctaaacataaaacggata

SEQ ID NO: 70592 - DNA, 75 bp, synthetic construct
  source 1..75: mol_type = other DNA
atcggatattacggttcgaaatggcgtgacagctcagccacctggacgtcacaggacagggcgagccatttcagt

SEQ ID NO: 70593 - DNA, 75 bp, synthetic construct
  source 1..75: mol_type = other DNA
acaaaccctgatggcgaaaacccgtcccggaaccggtaacgcctacctgacccgcaagggctttcccggccggga

SEQ ID NO: 70594 - DNA, 75 bp, synthetic construct
  source 1..75: mol_type = other DNA
tggctaacgaactggccaaaaacctcaaaacccctgaagacctcagtcagtttgatcggctgctgaaaaaactca

SEQ ID NO: 70595 - DNA, 75 bp, synthetic construct
  source 1..75: mol_type = other DNA
actgaacggcgcattgccgcagatatcgatgacagcgaactgaaagccccgcgtgacggacgcgtgcagtatcgg

SEQ ID NO: 70596 - DNA, 75 bp, synthetic construct
  source 1..75: mol_type = other DNA
agttcgcggcgttttacgattattgcattgaagttactcgcaggaattttgtgaaggcttttgaggagagtaaat

SEQ ID NO: 70597 - DNA, 75 bp, synthetic construct
  source 1..75: mol_type = other DNA
aggcagccttttgtcttattcaaaggccttacatttcaaaaactctgcttaccaggcgcatttcgcccaggggat

SEQ ID NO: 70598 - DNA, 75 bp, synthetic construct
  source 1..75: mol_type = other DNA
atggtctgccagatggaactgaccagccatctgctgacggctgcagccttcggcacgatgaagaacagcgaaaat

SEQ ID NO: 70599 - DNA, 75 bp, synthetic construct
  source 1..75: mol_type = other DNA
gcatgcgcgaagctctcgtagcgccactggatttcacctctctgcgtaatgccgtaaccgagttcgaacagcatc

SEQ ID NO: 70600 - DNA, 75 bp, synthetic construct
  source 1..75: mol_type = other DNA
gacggaccgtatcccgacgggtgtgatacggacggacgacgagcggacccaccactaccactacgacagccagca

SEQ ID NO: 70601 - DNA, 75 bp, synthetic construct
  source 1..75: mol_type = other DNA
atatcgcagccggactacatgtaccagcggttgtaatgattatgccgatgcattttgccacgacgctagcgcgcg

SEQ ID NO: 70602 - DNA, 75 bp, synthetic construct
  source 1..75: mol_type = other DNA
gtaaaaacacttgatgaaggtgtcaaaaaaatgtgcctggtgcatatcggaaagaatctgcccacagaaaaaaaa

SEQ ID NO: 70603 - DNA, 75 bp, synthetic construct
  source 1..75: mol_type = other DNA
ggtgaatcagaatggattcatttcacaggtagcggatatctgttacgtaccgatgcgtggtcatatccggttctg

SEQ ID NO: 70604 - DNA, 75 bp, synthetic construct
  source 1..75: mol_type = other DNA
atgctgaatgaacattacgatgtcaccacagcagcctatgctgtcggttacgaaagctatcccatttcagtcggg

SEQ ID NO: 70605 - DNA, 75 bp, synthetic construct
  source 1..75: mol_type = other DNA
cagttacggcattacattttgctaccatcgtgcctggcgcttagtgctggcatcatgctgatgctaatgaatttg

SEQ ID NO: 70606 - DNA, 75 bp, synthetic construct
  source 1..75: mol_type = other DNA
gacgctgacctcccgcaacatggacaacaccgtggcgcacgcgggtaagtatgcgaacgctgatgcactggtaca

SEQ ID NO: 70607 - DNA, 75 bp, synthetic construct
  source 1..75: mol_type = other DNA
cagacgatggcgcattacgaaggcgggaagctcaaggtttcggcagcgctgttaccacaactggcacagatcctg

SEQ ID NO: 70608 - DNA, 75 bp, synthetic construct
  source 1..75: mol_type = other DNA
tcaccgttacctttggcgggaaaacctacaccgctaccgtagcgggcgatggtagctggacaaccaccgtgcctg

SEQ ID NO: 70609 - DNA, 75 bp, synthetic construct
  source 1..75: mol_type = other DNA
tttctgttttcgccctttcctgcaggagcaactgtcatcgcgtggtctgagcttcaaccagcccccttccagaat

SEQ ID NO: 70610 - DNA, 75 bp, synthetic construct
  source 1..75: mol_type = other DNA
aaccatcagcgggcaggttaccggagccgccgttggcgacgcggtaaccgttacgcttggcggtaatacttacac

SEQ ID NO: 70611 - DNA, 75 bp, synthetic construct
  source 1..75: mol_type = other DNA
ttgttaagcgcagaagctgcaggtatggtggcaaccagttttgtgctggcccagcttgctaattctaatctgcca

SEQ ID NO: 70612 - DNA, 75 bp, synthetic construct
  source 1..75: mol_type = other DNA
acctcacagcatcataattgctgagggggtggctaccgccctgtcgtgccatttaattcgccctgacgcaatgac

SEQ ID NO: 70613 - DNA, 75 bp, synthetic construct
  source 1..75: mol_type = other DNA
gcaaagttgctttggcatcttaaaggggtggatctctcaggttttgaccctcaacgagcgccacagaccgatgcc

SEQ ID NO: 70614 - DNA, 75 bp, synthetic construct
  source 1..75: mol_type = other DNA
cacggccggggtggggatctcaccgtttgatgtggttcaccttgatgttgcaggcctgatcggcacggacaacac

SEQ ID NO: 70615 - DNA, 75 bp, synthetic construct
  source 1..75: mol_type = other DNA
ccagttgttgaaacgcgaacggataaagaaaaagatctacggaacgcgggaagaagcccgcagcgatatttttga

SEQ ID NO: 70616 - DNA, 75 bp, synthetic construct
  source 1..75: mol_type = other DNA
gtcgttttcaccctggcgggattgcttaatcgcgtgcgccaacatcaggctgccgagctggcggaggagcggtga

SEQ ID NO: 70617 - DNA, 75 bp, synthetic construct
  source 1..75: mol_type = other DNA
ttgtaactactgatgacattgttcacgaggtcaatctggacggaaagcgtattggctacgtgattaaaacagaaa

SEQ ID NO: 70618 - DNA, 75 bp, synthetic construct
  source 1..75: mol_type = other DNA
atatcggagaatctgtataaaaatgcgatgggagtcactattccgggaacaagctattgcggagtcactcttgcg

SEQ ID NO: 70619 - DNA, 75 bp, synthetic construct
  source 1..75: mol_type = other DNA
gctgcgattaccgaaaggttgcccgttccagccacgttgtccgcatgcgatggaaatttgtagtagcgcaccgcc

SEQ ID NO: 70620 - DNA, 75 bp, synthetic construct
  source 1..75: mol_type = other DNA
acatccgtgcagaacgtgggttgaataatataaaaagtcgtttaacactgggggaagactatacccctgcagata

SEQ ID NO: 70621 - DNA, 75 bp, synthetic construct
  source 1..75: mol_type = other DNA
tggctgggattcgacgtcgatcgcaccggtgcggccatcgactggagcgaccggaacgcgcctgcgcccacgctg

SEQ ID NO: 70622 - DNA, 75 bp, synthetic construct
  source 1..75: mol_type = other DNA
aatcactcaaaaaacgcagagacagaacagaaccgaaatatcgcgcgttagacatgacagagcacgctttaaagg

SEQ ID NO: 70623 - DNA, 75 bp, synthetic construct
  source 1..75: mol_type = other DNA
agccaaggggatctcagattacgaaggcagcagtcgcgacaaacaaattttcagcgggcataaaacagaaaatca

SEQ ID NO: 70624 - DNA, 75 bp, synthetic construct
  source 1..75: mol_type = other DNA
attcaggaacatgggaaatttggtaactcaaccacaaatgacttctatctgtcaggcccattggttaaggataaa

SEQ ID NO: 70625 - DNA, 75 bp, synthetic construct
  source 1..75: mol_type = other DNA
cctgttttacgttgggtagacccgagttttgatcaaagcaaatatgacagcatcgtctggaacccaatcacttat

SEQ ID NO: 70626 - DNA, 75 bp, synthetic construct
  source 1..75: mol_type = other DNA
ccgtgattattttgactctattgctgataggataatttacacgggaccaatcgatgccttttataattattgctt

SEQ ID NO: 70627 - DNA, 75 bp, synthetic construct
  source 1..75: mol_type = other DNA
ccgatgcttggccgcaagggaacggcttccatgcacaacccgtgttctcgatagtggtgcacacaccagcgatga

SEQ ID NO: 70628 - DNA, 75 bp, synthetic construct
  source 1..75: mol_type = other DNA
actaccgcgctattgaccttacagagcactggctgagagtggcgataaaaatcatcgaccgcaacgccggggaag

SEQ ID NO: 70629 - DNA, 75 bp, synthetic construct
  source 1..75: mol_type = other DNA
ccaacctttagcggcagcgggcaggcgggggcgaccatccagattaaagacagcaatggtgacaccatcgccagt

SEQ ID NO: 70630 - DNA, 75 bp, synthetic construct
  source 1..75: mol_type = other DNA
tgcattagcttttatacaggccttgattgcattagtcccatcaaagaaaatactggacttggataagataacaga

SEQ ID NO: 70631 - DNA, 75 bp, synthetic construct
  source 1..75: mol_type = other DNA
accggcatctgccagtgtaaaagtgggagcaaccaccacgctgacctttacagtaaaacctgacggagccagtga

SEQ ID NO: 70632 - DNA, 75 bp, synthetic construct
  source 1..75: mol_type = other DNA
aaaaccctggaggaagaagaaaatacggctggagtagttaaagacaaattttatcagtggaacgaatcgaatgat

SEQ ID NO: 70633 - DNA, 75 bp, synthetic construct
  source 1..75: mol_type = other DNA
gggcatgataaccgcgatcaggctggtgggcaattatctttcttgttggggccgtattgtgctgccattttcatc

SEQ ID NO: 70634 - DNA, 75 bp, synthetic construct
  source 1..75: mol_type = other DNA
tgcttatcagcacggaaggggcaacagaatggtgcgcagaatacgatgaatggggcaacctgctgaatgaagaga

SEQ ID NO: 70635 - DNA, 75 bp, synthetic construct
  source 1..75: mol_type = other DNA
ggatggacccgtcgcttaatgccttaatacattgcgaaacgggtgaaacacgtcgtctcggcgaataccatttta

SEQ ID NO: 70636 - DNA, 75 bp, synthetic construct
  source 1..75: mol_type = other DNA
ttcgttttacctccagagggcgtgaatacgaagtcgacgaacgcctgattaccacaatcgacaaacaccgttcag

SEQ ID NO: 70637 - DNA, 75 bp, synthetic construct
  source 1..75: mol_type = other DNA
cactgacgacacttacttctgcgccaccaacgtggtgcaggtgaaccttatccgacaggtacaggagtcacgcag

SEQ ID NO: 70638 - DNA, 75 bp, synthetic construct
  source 1..75: mol_type = other DNA
gatgagcttaaagcagacgatcaggaagtgatctgccgtattctggatatggcgatcacgcaggagaagatgaag

SEQ ID NO: 70639 - DNA, 75 bp, synthetic construct
  source 1..75: mol_type = other DNA
cgatgcagaaagcgatctgtatgaaatcgagatgcgcgggcgtgtgacggaaattgatatgggggaagccaaaca

SEQ ID NO: 70640 - DNA, 75 bp, synthetic construct
  source 1..75: mol_type = other DNA
aagcgatcctcaacgttgaagttatccgcaaaaatatggacgagcctcgggagttctggacgtatgattgccgga

SEQ ID NO: 70641 - DNA, 75 bp, synthetic construct
  source 1..75: mol_type = other DNA
gatcatgatcgacctggacggcaccgaaaacaaatccaaattcggcgcgaacgcaatcctggctgtatctctggc

SEQ ID NO: 70642 - DNA, 75 bp, synthetic construct
  source 1..75: mol_type = other DNA
acgttggaacctggcacaaatacaactgtggaagcatcgccggacgctggtttgacctgaccacgtttgatgatg

SEQ ID NO: 70643 - DNA, 75 bp, synthetic construct
  source 1..75: mol_type = other DNA
tgcccctatatttccagacacctgttatcacttaacccattactggcctgctgccgcagatattcccgtggcgag

SEQ ID NO: 70644 - DNA, 75 bp, synthetic construct
  source 1..75: mol_type = other DNA
ccgttggccgccagtggttgcagacctacccggactcaccgctgaaagacaaaatggagtactacattgagcctg

SEQ ID NO: 70645 - DNA, 75 bp, synthetic construct
  source 1..75: mol_type = other DNA
gtgaacgcagaatgacgctggtcgatctgcccggcattggtgagacaccgcagcatgatcaggaataccgggagc

SEQ ID NO: 70646 - DNA, 75 bp, synthetic construct
  source 1..75: mol_type = other DNA
atgtcagcgatacaggggattgaaggggttatcagccagttacaggctacggcgatgagtgcgcgtgcgcaggaa

SEQ ID NO: 70647 - DNA, 75 bp, synthetic construct
  source 1..75: mol_type = other DNA
ccggtcttttatgaagatgaagtggatatccatcttaatcccaaaatcggtgcggactggcaactgcgcggacag

SEQ ID NO: 70648 - DNA, 75 bp, synthetic construct
  source 1..75: mol_type = other DNA
cgcattcgttctttatgcgcaatatcgagacggagagtttttcgatattgtccgcaatggtgatgaatttttcga

SEQ ID NO: 70649 - DNA, 75 bp, synthetic construct
  source 1..75: mol_type = other DNA
gaaaatacattggcgataaagaagggaaaaagcacgccgtcgtcaatggcgtccttatggttcatcgcggatggg

SEQ ID NO: 70650 - DNA, 75 bp, synthetic construct
  source 1..75: mol_type = other DNA
gttactatattactcagcgtaagaaaggtataacccagcatatctcggccatgaaagcgggtatctcagtccgtt

SEQ ID NO: 70651 - DNA, 75 bp, synthetic construct
  source 1..75: mol_type = other DNA
atgggatgccttggatgggggagtgcttatttctatggatggggtacttctttttactacggcttcccatggtgg

SEQ ID NO: 70652 - DNA, 75 bp, synthetic construct
  source 1..75: mol_type = other DNA
atagccctctggttgaaccgctaatatgctccgcacgctataccggaagcacctttcggcgcggagatgcaacga

SEQ ID NO: 70653 - DNA, 75 bp, synthetic construct
  source 1..75: mol_type = other DNA
caaaaagagctaggagtagactaccccaaacaaaaagaggggaaacgtcaaccaccattaactctgtggtatgaa

SEQ ID NO: 70654 - DNA, 75 bp, synthetic construct
  source 1..75: mol_type = other DNA
aacaaatggtgggcagttactgacgatggggaagaaccggcatcgaaagtaacccactggatgccgctaccggag

SEQ ID NO: 70655 - DNA, 75 bp, synthetic construct
  source 1..75: mol_type = other DNA
cgataccttcgaagggtattacgattggtcgagaaacaaatggtgggcagttactgacaatgaggaagaacaggc

SEQ ID NO: 70656 - DNA, 75 bp, synthetic construct
  source 1..75: mol_type = other DNA
acagcgtgtttgattttgcctgtgggtcaggctcattgctcctaaatattcgcaagcgcatggggcagcacggta

SEQ ID NO: 70657 - DNA, 75 bp, synthetic construct
  source 1..75: mol_type = other DNA
gatggcgatcagattttcccgctgggatgggcaatggttttacagcgtgctggtggcactcacttcattgctgat

SEQ ID NO: 70658 - DNA, 75 bp, synthetic construct
  source 1..75: mol_type = other DNA
ctgatggatatggttatacaaaacatatacctgaaattagtgaatacttgtacaagctcaagataaatggacctc

SEQ ID NO: 70659 - DNA, 75 bp, synthetic construct
  source 1..75: mol_type = other DNA
agcgctggcttttgctattaagtgggtggcggtcggtatcgctgtgtctccgatactgtatgggctggcaaaact

SEQ ID NO: 70660 - DNA, 75 bp, synthetic construct
  source 1..75: mol_type = other DNA
aacaggtgattgcgtttattgattacgagaactgcagtaatctgacagaaattgccttaaatatatatacagagt

SEQ ID NO: 70661 - DNA, 75 bp, synthetic construct
  source 1..75: mol_type = other DNA
aagcaataagccaacttcaggcgagcgaaagcccgcggcgtgatgctgaaatcctgctggagcatgttaccggca

SEQ ID NO: 70662 - DNA, 75 bp, synthetic construct
  source 1..75: mol_type = other DNA
tttgccgtttgcttcagcgtaaaaaaacatcaattcctacagttgggcagtggtacaccacgcctgcagggcatg

SEQ ID NO: 70663 - DNA, 75 bp, synthetic construct
  source 1..75: mol_type = other DNA
atgtatatgaacgagcccagactctatgcccgccaggcgctggaacgctttcgcgcgctgctgccggaggatgag

SEQ ID NO: 70664 - DNA, 75 bp, synthetic construct
  source 1..75: mol_type = other DNA
atcgactgtctctaattgttgctgataaatcacaagctgagcttgaagaaattgccaaagagaaactgatgaaag

SEQ ID NO: 70665 - DNA, 75 bp, synthetic construct
  source 1..75: mol_type = other DNA
caggtgctggccttgagacaaaaagagcaacatgaaagtaatacgtgtagattgaattttgagcagtggctggaa

SEQ ID NO: 70666 - DNA, 75 bp, synthetic construct
  source 1..75: mol_type = other DNA
gcgctgattttaccgctgaccacaccgtcgatgatggcagacttcagcgccgtaggcggtttattgctgctggca

SEQ ID NO: 70667 - DNA, 75 bp, synthetic construct
  source 1..75: mol_type = other DNA
ccaacaccgaagttctgcgcgcaaaagcaatcgataaggatctaacgctgcatgatggcgatggacttttcctgc

SEQ ID NO: 70668 - DNA, 75 bp, synthetic construct
  source 1..75: mol_type = other DNA
gcatggcaaatttacgcaaagaggctcgtggtcgtgattgtcaggttcgaattcccggcgtctgcaacggtaacc

SEQ ID NO: 70669 - DNA, 75 bp, synthetic construct
  source 1..75: mol_type = other DNA
aagaacagagataagaataacaatataaagagtttagattattggttaatgcagataaaccagatgcatattccc

SEQ ID NO: 70670 - DNA, 75 bp, synthetic construct
  source 1..75: mol_type = other DNA
ccggacaggccgcgtcgtcggctcagtcagcgtcttccagcgcaggaacggcatcaacaaaggccactgaagcat

SEQ ID NO: 70671 - DNA, 75 bp, synthetic construct
  source 1..75: mol_type = other DNA
tgatcacaaccgtaacggcaggggcagcactggcacagcagcgttttgtcggggcagataataccccctgtaaag

SEQ ID NO: 70672 - DNA, 75 bp, synthetic construct
  source 1..75: mol_type = other DNA
catcgtgaacatgtttttcccagtagaaatgcccctaaacagtcaatgaatagccaaactgctaatgcagcactc

SEQ ID NO: 70673 - DNA, 75 bp, synthetic construct
  source 1..75: mol_type = other DNA
atggctgatttgagaaaagcagcgcgtggtcgggaatgccaggtaagaatccctggcgtatgtaatggcaattct

SEQ ID NO: 70674 - DNA, 75 bp, synthetic construct
  source 1..75: mol_type = other DNA
tgaaagcaggccgtccgcagatcggattatggctggggctgagcagcagctacagcgcagagttactggccggag

SEQ ID NO: 70675 - DNA, 75 bp, synthetic construct
  source 1..75: mol_type = other DNA
gtcattctgggattttgacggaaaaattattgcgttgccacaggtgcgtaaaaattacccttttgaggggttgta

SEQ ID NO: 70676 - DNA, 75 bp, synthetic construct
  source 1..75: mol_type = other DNA
tgacgcctcccggacgtttcagtttatcgccactgcgtggcacaccagttgccttaaactctggtcggaaggcca

SEQ ID NO: 70677 - DNA, 75 bp, synthetic construct
  source 1..75: mol_type = other DNA
gcgctgcaaaacctctcgcaaaatcttacaagcttactgactcgcaaggtctgtacctgaccgtatccaccagcg

SEQ ID NO: 70678 - DNA, 75 bp, synthetic construct
  source 1..75: mol_type = other DNA
tattaggcaatgtttatcataaagagagtgagaaacccttctggaacaagccctacaccatcctggaaaaagatg

SEQ ID NO: 70679 - DNA, 75 bp, synthetic construct
  source 1..75: mol_type = other DNA
aaggggcaacagcgtggtgcgcagaatatgatgaatggggcaacctgctgaatgaagagaacccgcatcagctgc

SEQ ID NO: 70680 - DNA, 75 bp, synthetic construct
  source 1..75: mol_type = other DNA
tggcaaaaccgaccactggatgctgtttaccccattgtttatcttgactgtatcgtcctgaaagttcggcaggac

SEQ ID NO: 70681 - DNA, 75 bp, synthetic construct
  source 1..75: mol_type = other DNA
ccgatcgcttgaattacccaatgaaacgcgtgggtaaacgcggtgaaggcaaattcgaacggattagctgggatg

SEQ ID NO: 70682 - DNA, 75 bp, synthetic construct
  source 1..75: mol_type = other DNA
tgctggaatatgcccgcgataaccagatccaggcgtcagttgtcgctcctgctgatggtgaatcagttacgattt

SEQ ID NO: 70683 - DNA, 75 bp, synthetic construct
  source 1..75: mol_type = other DNA
ggaagtgaagggcaagcgtaagctcggcctgcaaccggtgccgatgcacgatatcgccctgcatctgcataaagc

SEQ ID NO: 70684 - DNA, 75 bp, synthetic construct
  source 1..75: mol_type = other DNA
tcgctgtgtacgttaacgacgtcaaaggcggttcgaaatcgttcgttaaagtgatcatcctcgccggaattttta

SEQ ID NO: 70685 - DNA, 75 bp, synthetic construct
  source 1..75: mol_type = other DNA
atcgtattttcttgaccgcctcgggctgaaaccggaaaaagattatcgtttcctgggggatgcggtctttgatac

SEQ ID NO: 70686 - DNA, 75 bp, synthetic construct
  source 1..75: mol_type = other DNA
gttcgccactgaccggtcagaccggtatcagtgatgactggccactgccttccggcaacaatggatacctggttc

SEQ ID NO: 70687 - DNA, 75 bp, synthetic construct
  source 1..75: mol_type = other DNA
acctcgccctctcgtacagataaactatcgttcggtgaaggtgaagcagaggttgaaaatgttgaattgtttacg

SEQ ID NO: 70688 - DNA, 75 bp, synthetic construct
  source 1..75: mol_type = other DNA
ttatgctctctatacttggattaagctggatcctggcctcactgggcgtttttgttcgtgatataccacaaacta

SEQ ID NO: 70689 - DNA, 75 bp, synthetic construct
  source 1..75: mol_type = other DNA
ggaaaaccgggcgtcatttatcctggcgaatggggatatcgcactctcgggcagagagttaagcaatcagagctg

SEQ ID NO: 70690 - DNA, 75 bp, synthetic construct
  source 1..75: mol_type = other DNA
cgtggtgggttgtcggggcactggcggtggctgccgtcgtggcgtggtggctgttgcgcccggcgggtgtgccgg

SEQ ID NO: 70691 - DNA, 75 bp, synthetic construct
  source 1..75: mol_type = other DNA
gtctggcaacgcaggccggtgatattcgttgtttttattacgatgcagtgaccatggaatatgctggctggtcag

SEQ ID NO: 70692 - DNA, 75 bp, synthetic construct
  source 1..75: mol_type = other DNA
agtctggcggtggtgagtctggcggtggtgagtccggtggcggtagttctggcggtggtgagtccggtggcggta

SEQ ID NO: 70693 - DNA, 75 bp, synthetic construct
  source 1..75: mol_type = other DNA
ccctacggggattatttcaattggtccgtggcaggatctcgatgaaccgcatggacgagatgttcgcttcggtta

SEQ ID NO: 70694 - DNA, 75 bp, synthetic construct
  source 1..75: mol_type = other DNA
aaacccacaggacctgctcgacccctgcctgaatattcagataggtgcctgggtactggcccgccactttcagag

SEQ ID NO: 70695 - DNA, 75 bp, synthetic construct
  source 1..75: mol_type = other DNA
atgcagccagtgattaacgcgccggaaattgccactgcccgagaacagcagttgtttaatggcaaaaacttccat

SEQ ID NO: 70696 - DNA, 75 bp, synthetic construct
  source 1..75: mol_type = other DNA
ataacgtcctgaaaaagtttatcaaagatccggttgacccggtaaccggcgcgtactgcgacgaacgtactgact

SEQ ID NO: 70697 - DNA, 75 bp, synthetic construct
  source 1..75: mol_type = other DNA
ccgctgcttggggcgaaggtgctgcccggcgagacggaccttgcgctgcccggcccgctgccgttcattctctcc

SEQ ID NO: 70698 - DNA, 75 bp, synthetic construct
  source 1..75: mol_type = other DNA
atccgggaaaccggaccaggaaaaaacttgcaggccataacagtatctaccaataaacttcaatatattgaattt

SEQ ID NO: 70699 - DNA, 75 bp, synthetic construct
  source 1..75: mol_type = other DNA
aagcgttttagcgcaagagtccgtcactccatacattgcaatgctgaatggagagccgattgggtatgcccagtc

SEQ ID NO: 70700 - DNA, 75 bp, synthetic construct
  source 1..75: mol_type = other DNA
cagtaggcattcctgcttgttatggaggtttcgaatctttagttcagaatctcgttgattatcaatctagtgatg

SEQ ID NO: 70701 - DNA, 75 bp, synthetic construct
  source 1..75: mol_type = other DNA
atttgttggcaattggaataatagtgagtatggtcttttgttgaaagataaatatagtaaatttgacaatattga

SEQ ID NO: 70702 - DNA, 75 bp, synthetic construct
  source 1..75: mol_type = other DNA
cagtatttatatctcgctaactgaccattgccagtttgcgattaaacgctttcagcaaaacgtgttgctgcccaa

SEQ ID NO: 70703 - DNA, 75 bp, synthetic construct
  source 1..75: mol_type = other DNA
ggcgctcaggtcaatggcgtcatcaataaacttcaccgttctttaactgaacagggtgttgaggacactctggag

SEQ ID NO: 70704 - DNA, 75 bp, synthetic construct
  source 1..75: mol_type = other DNA
gccggggcagcagtatgatgaggagtccggcctgtattacaaccgccaccgctattatgacccgctgcaggggcg

SEQ ID NO: 70705 - DNA, 75 bp, synthetic construct
  source 1..75: mol_type = other DNA
acaaaatggtggaacgatacagcatcacaaagaatatttgactctctaatattgaataatccgggactagcatta

SEQ ID NO: 70706 - DNA, 75 bp, synthetic construct
  source 1..75: mol_type = other DNA
gttcaacagcaaaatggtgcgcttttatcacagcaaagatgccagtgaaatgatggcatttttggtggattgcta

SEQ ID NO: 70707 - DNA, 75 bp, synthetic construct
  source 1..75: mol_type = other DNA
ggcctgtattacaaccgccaccgctattatgacccgctgcaggggcggtatatcactcaggatccgattgggctg

SEQ ID NO: 70708 - DNA, 75 bp, synthetic construct
  source 1..75: mol_type = other DNA
tccttgaattatcctcagaagttatttttcctgaggcggctaatgctgccattttgaaacatgataaatgggcgg

SEQ ID NO: 70709 - DNA, 75 bp, synthetic construct
  source 1..75: mol_type = other DNA
cttcaccatcggcgggcgtgaaagtaagcaggccatggggcgtgcatcccgcgcacagtctccttccactcaggc

SEQ ID NO: 70710 - DNA, 75 bp, synthetic construct
  source 1..75: mol_type = other DNA
caaaagccgctatcgagaaattcggcgaaaaatggacccagcctggtaatatcgtcaccaacggtgcctatacct

SEQ ID NO: 70711 - DNA, 75 bp, synthetic construct
  source 1..75: mol_type = other DNA
gctggattatctggacacactggaactggtcgatacttccggtgcgccagatattgaatggcctacgcctccggc

SEQ ID NO: 70712 - DNA, 75 bp, synthetic construct
  source 1..75: mol_type = other DNA
caactcaacggcgtggacgttcattctgacagctataactctgtgctgggtgaggccggtacgcgcgtgggttat

SEQ ID NO: 70713 - DNA, 75 bp, synthetic construct
  source 1..75: mol_type = other DNA
cctaagcgcatggacatactcatggcgatgactggtgccggagaactgtcaatccgtgagattgccgctctggtc

SEQ ID NO: 70714 - DNA, 75 bp, synthetic construct
  source 1..75: mol_type = other DNA
gaacgacagcctgcaggcgcagattactgccgcccggactggcggtaatggggctaaagatgtcaaagaatcaaa

SEQ ID NO: 70715 - DNA, 75 bp, synthetic construct
  source 1..75: mol_type = other DNA
tatggcgcgtggctgggtggcttcttctgcctctgcgcaggcaacggactggctcagtcgttggggaactgcccg

SEQ ID NO: 70716 - DNA, 75 bp, synthetic construct
  source 1..75: mol_type = other DNA
ccaaggttatctgccagggctttactggtagccaggggactttccactcagaacaggccattgcatacggcacta

SEQ ID NO: 70717 - DNA, 75 bp, synthetic construct
  source 1..75: mol_type = other DNA
tcgctggttgccgtgcatctggcctgtgaaagcctgcgcgctggcgaatccgatatggcggttgccggctgcgtg

SEQ ID NO: 70718 - DNA, 75 bp, synthetic construct
  source 1..75: mol_type = other DNA
gcttggcgctgatatgcaggctgtggatcttgataagctgaaaattatcgcgtggcgttctcaaaagatagctga

SEQ ID NO: 70719 - DNA, 75 bp, synthetic construct
  source 1..75: mol_type = other DNA
ggttcgatggttctggtgacattaatatcaatactctggtatcgcgcggtcgcgtaacggccctggaggcgaatg

SEQ ID NO: 70720 - DNA, 75 bp, synthetic construct
  source 1..75: mol_type = other DNA
cgaaacgggtatggcggcgggagcgtgacctgacggggtggatgtcgctgtcgcgtaaaccggagatgacgtggt

SEQ ID NO: 70721 - DNA, 75 bp, synthetic construct
  source 1..75: mol_type = other DNA
tgataatctttgcgctaatctggcctgcaaccgcgctcagagcggcagtgagcaaaacaacctgggcggatgctc

SEQ ID NO: 70722 - DNA, 75 bp, synthetic construct
  source 1..75: mol_type = other DNA
gcttatcctgacgcccgccactggctggtgctgtgcggtcatggtaataacggcggcgatggctacgtggtcgcg

SEQ ID NO: 70723 - DNA, 75 bp, synthetic construct
  source 1..75: mol_type = other DNA
cgcccaacgtctggtacaacgttatggcggcgtagcggtgctgaaaggtgccggaaccgtggtcgccgcccatcc

SEQ ID NO: 70724 - DNA, 75 bp, synthetic construct
  source 1..75: mol_type = other DNA
attaaaggcgcagagcaggacgaatccggcgccgaggtatcggtaaacctcccgctactggtagatgttcctgtc

SEQ ID NO: 70725 - DNA, 75 bp, synthetic construct
  source 1..75: mol_type = other DNA
ccgttatgcgtctggtggatctcgtgttgaaacctatggttttgatagagaaggacagaagaactttagctataa

SEQ ID NO: 70726 - DNA, 75 bp, synthetic construct
  source 1..75: mol_type = other DNA
gttaccaagccagttgtgggttacatcgctggtgtgactgcgccgaaaggcaaacgtatgggccacgcgggtgcg

SEQ ID NO: 70727 - DNA, 75 bp, synthetic construct
  source 1..75: mol_type = other DNA
gtagagattcagacattgagcccagatggaagcagacatcaaaaagacttttctgtcggtatgaactgcccctat

SEQ ID NO: 70728 - DNA, 75 bp, synthetic construct
  source 1..75: mol_type = other DNA
atctttataacagtaatgcaggaaatattgggactgcgataactttagggactccatttacgcccggaaaaatca

SEQ ID NO: 70729 - DNA, 75 bp, synthetic construct
  source 1..75: mol_type = other DNA
tggcgagtggctgccgctatcgcccgccgagcctcttcctgcgccgcaaacgcattatcaatggcgctggacgcc

SEQ ID NO: 70730 - DNA, 75 bp, synthetic construct
  source 1..75: mol_type = other DNA
gtatagcgagctggatctcgaaaaagaggcgcagtctcagggtttccaggcacagtcttacgatcttatcgtggc

SEQ ID NO: 70731 - DNA, 75 bp, synthetic construct
  source 1..75: mol_type = other DNA
atgaagaaaaaatacgaactggttgttaaagggataaataattacccgaataagattactgttactgtggcactg

SEQ ID NO: 70732 - DNA, 75 bp, synthetic construct
  source 1..75: mol_type = other DNA
gaagcacgcaaggaggcacacagaatgaaagcaactaacgttaaatcagaaaaaattcatgcaccttcagttcag

SEQ ID NO: 70733 - DNA, 75 bp, synthetic construct
  source 1..75: mol_type = other DNA
gaaaaatggtgattatacggttacggcctctgtcagctctggttcccaggctagtcaacaggtgaattttatcgg

SEQ ID NO: 70734 - DNA, 75 bp, synthetic construct
  source 1..75: mol_type = other DNA
ggctgacgccccaattaacgggtaaaggccagcagtggttaactcgcaagctacttgatgctggtttgttaaaac

SEQ ID NO: 70735 - DNA, 75 bp, synthetic construct
  source 1..75: mol_type = other DNA
ggatggctcaatcgttgataagcatacgcatggtggcgttgagcctggtggcagcagtacagcaccactcggagg

SEQ ID NO: 70736 - DNA, 75 bp, synthetic construct
  source 1..75: mol_type = other DNA
gccatacgtttgcagcgcacttcatgatgtcgggtggaaacatcctggccttacaaaaaattctcggacatcacg

SEQ ID NO: 70737 - DNA, 75 bp, synthetic construct
  source 1..75: mol_type = other DNA
gccttgaaaggcgaagagtcacactcgctggcggaagtggaaattttcgttggcaaacaggttaaagtacaaatt

SEQ ID NO: 70738 - DNA, 75 bp, synthetic construct
  source 1..75: mol_type = other DNA
cgagcgtcccggcaaggtaaaaaccttgaagcagcatccgcgcaagaacaaaacggccatcaatatcgaatacat

SEQ ID NO: 70739 - DNA, 75 bp, synthetic construct
  source 1..75: mol_type = other DNA
atggtaaacctgttattccgggcatgaaactgtcgaaggaaaaatgcgcccaggttaacgccattgagcgggata

SEQ ID NO: 70740 - DNA, 75 bp, synthetic construct
  source 1..75: mol_type = other DNA
atgaaaatacgttcgcaagtcggcatggtgcttaacctcgataaatgtatcggctgccatacctgttcggtgacc

SEQ ID NO: 70741 - DNA, 75 bp, synthetic construct
  source 1..75: mol_type = other DNA
gcacaagatggtcagatattgatattgaaactggcatgtggaacatcccggcggagtttatgaaaatgaagaagc

SEQ ID NO: 70742 - DNA, 75 bp, synthetic construct
  source 1..75: mol_type = other DNA
tagttgtgctcttcgtcatcatcatgacagtagtagatatacaaaagaagaaacactacaacagctttacggaag

SEQ ID NO: 70743 - DNA, 75 bp, synthetic construct
  source 1..75: mol_type = other DNA
tggcgcgcttggtgcactgctggcaagcggtggcgatggcgactcgaaaacggaagtgattaataaccctacgcc

SEQ ID NO: 70744 - DNA, 75 bp, synthetic construct
  source 1..75: mol_type = other DNA
agtggtaaaaatgacctggattatccctctgctgatatacgagcgaagatcagtaaagatatagaaggtggtatc

SEQ ID NO: 70745 - DNA, 75 bp, synthetic construct
  source 1..75: mol_type = other DNA
ccgatataaaaatgaccatgatttacgcccacttttcgcccgatcaccttgaagacgcggtgactaaaaatcctc

SEQ ID NO: 70746 - DNA, 75 bp, synthetic construct
  source 1..75: mol_type = other DNA
tgatattctccgggcacgccgggcaaccggcctgatgacccgcgacaattaccgaacagtaaataacattactct

SEQ ID NO: 70747 - DNA, 75 bp, synthetic construct
  source 1..75: mol_type = other DNA
gtgcgttatttcttcgcttccggtagtgcctatatcgttgctatgttaccggtatttgccatgctggcgaacgtc

SEQ ID NO: 70748 - DNA, 75 bp, synthetic construct
  source 1..75: mol_type = other DNA
ataacgctgtcgattcaggccaggactatagcggattcactctcatcccgtcggcgcaatccccgcgtctgctgg

SEQ ID NO: 70749 - DNA, 75 bp, synthetic construct
  source 1..75: mol_type = other DNA
ctcacctctaaaatgtttgcccactatagagataaacgcctgacaggagagatctacttcagcgagaaatggaag

SEQ ID NO: 70750 - DNA, 75 bp, synthetic construct
  source 1..75: mol_type = other DNA
ctgccagtagcaaaactcaccccgaatttatgtgcggggatatttatcgcgataagtacggcggcatcgtgacga

SEQ ID NO: 70751 - DNA, 75 bp, synthetic construct
  source 1..75: mol_type = other DNA
tgacatccgggcgggacgcattgagcgcgccatttcacgctgtcgcaatatctgggcgtccctgccgggtgccgg

SEQ ID NO: 70752 - DNA, 75 bp, synthetic construct
  source 1..75: mol_type = other DNA
ggtttggtgatgatgtataaccggggcaacccgtggtttgcgtttggtttgacgatgccttacgcttcagaggcc

SEQ ID NO: 70753 - DNA, 75 bp, synthetic construct
  source 1..75: mol_type = other DNA
gatatctggggcggtaaccgcacaccggaacaggaacgttatgccagctcgattctggcgctgaatgccactacc

SEQ ID NO: 70754 - DNA, 75 bp, synthetic construct
  source 1..75: mol_type = other DNA
gcgaatataataatggtggggctatctttgctaaagaaaactcaacgataaatcttgcgaatgttattttcgaca

SEQ ID NO: 70755 - DNA, 75 bp, synthetic construct
  source 1..75: mol_type = other DNA
acagatgaagggcttcctgtaaatcattcatccgtcagcagaatggagcatgcgctgaaatatctgtatccgtgg

SEQ ID NO: 70756 - DNA, 75 bp, synthetic construct
  source 1..75: mol_type = other DNA
ctgccagcggccccgctcggcctgaaatccgccccggcgatattttcaaagataaatacggcggcactgtaacga

SEQ ID NO: 70757 - DNA, 75 bp, synthetic construct
  source 1..75: mol_type = other DNA
tacacactgtattgcaggaagtgggtaaaaccaaatctgacttgtacgccacaggatgattcccagtatccaggg

SEQ ID NO: 70758 - DNA, 75 bp, synthetic construct
  source 1..75: mol_type = other DNA
ggttcgcgagctgctggaacagaacccgtctttcgttttctttaaaccgcaatcttttgcaccggtgaaaggggc

SEQ ID NO: 70759 - DNA, 75 bp, synthetic construct
  source 1..75: mol_type = other DNA
gtagccacgaccatgcaagtcaacatttcaccattaacgccacgcctattgtgattggcgagaaatgctggctgg

SEQ ID NO: 70760 - DNA, 75 bp, synthetic construct
  source 1..75: mol_type = other DNA
gctggattacctggacgcactggaaatggtcgatacttccagtgcgccagatattgaatggcctacgcctccgtc

SEQ ID NO: 70761 - DNA, 75 bp, synthetic construct
  source 1..75: mol_type = other DNA
ttatggctggaaaggtaaaccacgtgccgcaaaagtggaatgcaaaattccggggggcggtcccatcgggctgga

SEQ ID NO: 70762 - DNA, 75 bp, synthetic construct
  source 1..75: mol_type = other DNA
caggcggcggagagggtatcgcaacgctgatccctgtattgaatggtgttcatcaagctggtctgagtaccacaa

SEQ ID NO: 70763 - DNA, 75 bp, synthetic construct
  source 1..75: mol_type = other DNA
catcaacagtaaacaatggccaggtaaagcatcaattggtcgtctgaaaggtgaggaactggtgcaatataattt

SEQ ID NO: 70764 - DNA, 75 bp, synthetic construct
  source 1..75: mol_type = other DNA
gcaattgtcgctacaccgatatctataaggtcgttgttgtcggttctgacgccgggttcctgctctctggtctga

SEQ ID NO: 70765 - DNA, 75 bp, synthetic construct
  source 1..75: mol_type = other DNA
aagatgaaacaatgatattcgccatttcagcaacgctaatgttgtatgtggacaggatatacagcatggcaagcg

SEQ ID NO: 70766 - DNA, 75 bp, synthetic construct
  source 1..75: mol_type = other DNA
atggcggagaagcttgccctgcttgagaaactgggcatcacgctggactatctggaaaaactcttcaaatcccgc

SEQ ID NO: 70767 - DNA, 75 bp, synthetic construct
  source 1..75: mol_type = other DNA
gtcagtgctactacctgagagatattagaaatcatccacattattttattaaagttgacgatgtaccagtggcat

SEQ ID NO: 70768 - DNA, 75 bp, synthetic construct
  source 1..75: mol_type = other DNA
cttggcgacatgaaaaaacttgccaaaaaagtcttggctggggaaatcgaatcccctgacgtgctcgtcggggga

SEQ ID NO: 70769 - DNA, 75 bp, synthetic construct
  source 1..75: mol_type = other DNA
cagagaagttagaaaaaatccttgaagagaaagcaaaggaagagtgtcgatcgtttagcgcagaagtaattaaac

SEQ ID NO: 70770 - DNA, 75 bp, synthetic construct
  source 1..75: mol_type = other DNA
tgcgatggataatgccaatgcccgtctggcaaaagaccggaacggagcagatattcccaataagccgctgtttat

SEQ ID NO: 70771 - DNA, 75 bp, synthetic construct
  source 1..75: mol_type = other DNA
aaaatatgcttggccaccggcgcacgctggagcgaagccgaaaacctacagagtcatcaggtatcaaaataccgt

SEQ ID NO: 70772 - DNA, 75 bp, synthetic construct
  source 1..75: mol_type = other DNA
acccggacagcaccctcagcatgtggccggataaccgtatcgcccgtgacgcgcactatctttaccggtatgacc

SEQ ID NO: 70773 - DNA, 75 bp, synthetic construct
  source 1..75: mol_type = other DNA
ctggattgcagacacaggcgtagctattctcctgaagataaactttgcgtggttctttatgctctcgggcattct

SEQ ID NO: 70774 - DNA, 75 bp, synthetic construct
  source 1..75: mol_type = other DNA
gaaacatctcttcaagccatcaagataagcattcagataaagttaacagtcatcaacaccatggcaaggttgata

SEQ ID NO: 70775 - DNA, 75 bp, synthetic construct
  source 1..75: mol_type = other DNA
tgcgattaaacgcctgattggtcgccgcttccaggacgaagaagtacagcgtgatgtttccatcatgccgttcaa

SEQ ID NO: 70776 - DNA, 75 bp, synthetic construct
  source 1..75: mol_type = other DNA
tcgcgcagaaaatgcatatctgaaagccatgcaggagcatctcctggaaaaaaagcgcctggagctggagaaaaa

SEQ ID NO: 70777 - DNA, 75 bp, synthetic construct
  source 1..75: mol_type = other DNA
tcaggaactgcagtatcagcgcagctggcgacatgcggctaacagccgggtaaatcgtcgtccgtccacgcagtt

SEQ ID NO: 70778 - DNA, 75 bp, synthetic construct
  source 1..75: mol_type = other DNA
ctattatagtcgccatcatgtccctcggtctgacgggttgtgatgataaaaaagccgaaacagaaacgctcccgc

SEQ ID NO: 70779 - DNA, 75 bp, synthetic construct
  source 1..75: mol_type = other DNA
gctgactggttgacagcgattgagatgtacaaaccaacagtgcgcatcgtggaagttaatgtgccacgcgccgca

SEQ ID NO: 70780 - DNA, 75 bp, synthetic construct
  source 1..75: mol_type = other DNA
atcgtatgattgcctatatgtctaacattaactatgatgcctcaaagccaggagcgccagcacttagttttgata

SEQ ID NO: 70781 - DNA, 75 bp, synthetic construct
  source 1..75: mol_type = other DNA
cccacaacctcaataataacggtttcacgacgggcttagagcttgaggttaaactctccgatgtggagtacagct

SEQ ID NO: 70782 - DNA, 75 bp, synthetic construct
  source 1..75: mol_type = other DNA
acatcaccacgccggacgggcgggagacgaaattttactataacgacgggaaccagctgacggcggtggtgtccc

SEQ ID NO: 70783 - DNA, 75 bp, synthetic construct
  source 1..75: mol_type = other DNA
gcgtgggtggtgatttttacgagatgagtaaccgagcacaggagatcactgcatcaggcttatcgttgacggcac

SEQ ID NO: 70784 - DNA, 75 bp, synthetic construct
  source 1..75: mol_type = other DNA
ccgacgaaccgcaggacgtaccgggcgtggtgattcccgcaccggagacgggcgacgcagtgattaaaaacacgt

SEQ ID NO: 70785 - DNA, 75 bp, synthetic construct
  source 1..75: mol_type = other DNA
tcgcaggtctgtcgtatgtataacaacgcgtttgtggggccggagcgtaataatcacggacatgcagttatcctg

SEQ ID NO: 70786 - DNA, 75 bp, synthetic construct
  source 1..75: mol_type = other DNA
tccacacggcacattaggtgcccccattcatgccagtattgatggcatggtcagcgatgtgacagaaaacgcgat

SEQ ID NO: 70787 - DNA, 75 bp, synthetic construct
  source 1..75: mol_type = other DNA
cgttcccggttacagcaccgtctttcccctccacacccgcccgcagtacgcgctgccgggcgggcgattggcgac

SEQ ID NO: 70788 - DNA, 75 bp, synthetic construct
  source 1..75: mol_type = other DNA
cgtgtgaagcgattcgctggtggattaaggacggtggcagagactgccgtatccgctcaaataattgctacggtc

SEQ ID NO: 70789 - DNA, 75 bp, synthetic construct
  source 1..75: mol_type = other DNA
tatggaccatctgtcggggtgccacagtggtggatggaaaaaccgtttttcccaatatgaaactgtcgaaggaaa

SEQ ID NO: 70790 - DNA, 75 bp, synthetic construct
  source 1..75: mol_type = other DNA
tcctgctggccgggtgcagcacctcacaggaagaactgatgccggtcgatcccgacgccagcatgctgacgctgt

SEQ ID NO: 70791 - DNA, 75 bp, synthetic construct
  source 1..75: mol_type = other DNA
atgcccggcggtgtgcgcctgcggagtcgtgcggcttcgtgataaccacgacggagggcgagcggtacctgccct

SEQ ID NO: 70792 - DNA, 75 bp, synthetic construct
  source 1..75: mol_type = other DNA
cgggttaaattatcatggaagaaaaaacggcaggatgcactggaatcaggtacgattatgacggcgtcttgtccg

SEQ ID NO: 70793 - DNA, 75 bp, synthetic construct
  source 1..75: mol_type = other DNA
tcggtattcgatatgcggatgttgaggtcatgaaaattgctggagatgcccagctttctactccatgcactgaca

SEQ ID NO: 70794 - DNA, 75 bp, synthetic construct
  source 1..75: mol_type = other DNA
accgcatcttattactgtcacagcctacacgcccaagcggctatttctacgatactcaccataaactggccaagc

SEQ ID NO: 70795 - DNA, 75 bp, synthetic construct
  source 1..75: mol_type = other DNA
tgaggttcagtcaattcacgctggttttgattgggattccgggaaagtgctgattttcccagcacagccactgac

SEQ ID NO: 70796 - DNA, 75 bp, synthetic construct
  source 1..75: mol_type = other DNA
aatctgctaatgctgatgagcaacaacctgtctttttctacatcaaaaaaaaccggtttgatgactttggctatg

SEQ ID NO: 70797 - DNA, 75 bp, synthetic construct
  source 1..75: mol_type = other DNA
tcaaaaaactgaccgagcagtacaacgtgacctacatcggcatcgactcgacaggtgtcggccacggggtttacg

SEQ ID NO: 70798 - DNA, 75 bp, synthetic construct
  source 1..75: mol_type = other DNA
gcggacctgtcaaaggggcagtacggaaccgtggggcaggggctgcatatcgccaaaaaactgctgccgtttata

SEQ ID NO: 70799 - DNA, 75 bp, synthetic construct
  source 1..75: mol_type = other DNA
caccgattctgcgccagatgatcgacagcgcaggctcaggcaacgttgttaattacgatccctccaacgtgatta

SEQ ID NO: 70800 - DNA, 75 bp, synthetic construct
  source 1..75: mol_type = other DNA
atggtgaaatgctggttggttcacgacggatatcccaggacatcagcacccgtgatgagggcggagacgggaaag

SEQ ID NO: 70801 - DNA, 75 bp, synthetic construct
  source 1..75: mol_type = other DNA
ggctctgacgtgggtgacaaaccatactgaatactcattacgaacccccgcccgccgctgtgcgaaagaatttgc

SEQ ID NO: 70802 - DNA, 75 bp, synthetic construct
  source 1..75: mol_type = other DNA
ttgtttccactattccacgttttaccatctacccgaaaacgcactacgtcacaccgcgcgagcgcatcgtacagg

SEQ ID NO: 70803 - DNA, 75 bp, synthetic construct
  source 1..75: mol_type = other DNA
gattatccctggcggcgttagtttttgttctggggattgatttttggctggaagccttatttttattccgcccga

SEQ ID NO: 70804 - DNA, 75 bp, synthetic construct
  source 1..75: mol_type = other DNA
gttctattctcttttcaaagagatctgccgtctcagatcggttttcaatgaaaaccgatctttccggaattactc

SEQ ID NO: 70805 - DNA, 75 bp, synthetic construct
  source 1..75: mol_type = other DNA
cagtggggataccgcagaggttatctggacattagatatgactcacgagcaatatcttaaagggatgcgtctgga

SEQ ID NO: 70806 - DNA, 75 bp, synthetic construct
  source 1..75: mol_type = other DNA
gcggggccgtctgtgcgcgtgaatgaattgttcagcgcgtatgcgatggcgggtgtgtcttacagccgtgtgtcg

SEQ ID NO: 70807 - DNA, 75 bp, synthetic construct
  source 1..75: mol_type = other DNA
ccgtgacgctgaacgggcaaaattacaccaccacgaccgacgcctccggcaactggagcgtcaccgttccggcat

SEQ ID NO: 70808 - DNA, 75 bp, synthetic construct
  source 1..75: mol_type = other DNA
atgcggcttgtcatccttctatcctgaaagaggccgtaacgctggcttctccagcggcacgtattgtattgatgg

SEQ ID NO: 70809 - DNA, 75 bp, synthetic construct
  source 1..75: mol_type = other DNA
cgtcgattaccgccggggcaaaaacggggctgacgacacccgcctgaacctcggcctgacataccgtatcggtga

SEQ ID NO: 70810 - DNA, 75 bp, synthetic construct
  source 1..75: mol_type = other DNA
tgctggttggttcacgacggatatcccaggacatcagcacccgtgatgagggcggagacgggaaagtggtggtta

SEQ ID NO: 70811 - DNA, 75 bp, synthetic construct
  source 1..75: mol_type = other DNA
ggatgaacgggtgatcaccgggattgcgtcaacgccttctccggatcgggatggtgacatcctggagccggaggg

SEQ ID NO: 70812 - DNA, 75 bp, synthetic construct
  source 1..75: mol_type = other DNA
attaagaccgggctggtcagggggctgtccgtgggcttccgtccccatgaatacacctttctggacggaggcgga

SEQ ID NO: 70813 - DNA, 75 bp, synthetic construct
  source 1..75: mol_type = other DNA
gtggtaagcatgagaatttcaacagtaataaccaacagtcatactggtattcaacctgccggttaagagtgaccc

SEQ ID NO: 70814 - DNA, 75 bp, synthetic construct
  source 1..75: mol_type = other DNA
cattcagaggcagaggcgattatgcgtggtatgacgaatgctgaaatagacgcgcttctggagaagctcgggtaa

SEQ ID NO: 70815 - DNA, 75 bp, synthetic construct
  source 1..75: mol_type = other DNA
tcaaagctgaagatctgcaagatattcgcgtcggcgatgtgatctacctgaccggtacgctggtgacctgccgcg

SEQ ID NO: 70816 - DNA, 75 bp, synthetic construct
  source 1..75: mol_type = other DNA
tcaccggcttttaccgggtgcccctgtcctctgcacagccgggcgatatcctgctgtgctgcttcggcgcatcgg

SEQ ID NO: 70817 - DNA, 75 bp, synthetic construct
  source 1..75: mol_type = other DNA
aataaagaccttgccacggtcgccagacaaattaacccgtacataaaagttgatataccggaaacaacgcgcggc

SEQ ID NO: 70818 - DNA, 75 bp, synthetic construct
  source 1..75: mol_type = other DNA
ttttttcaggagtttgaggcgattaacagtgtaatattgcctttggtgatttttgatttaatagaccgaaagccg

SEQ ID NO: 70819 - DNA, 75 bp, synthetic construct
  source 1..75: mol_type = other DNA
tcttttcttactgcggagataatataaaggaatttatacttttattaccctataataaatcactggagatgtatg

SEQ ID NO: 70820 - DNA, 75 bp, synthetic construct
  source 1..75: mol_type = other DNA
gaacatgctcaggcgcagattatcagcggctcggcaacgggcgcgacgaccggcaacacggtttccgtgacgatt

SEQ ID NO: 70821 - DNA, 75 bp, synthetic construct
  source 1..75: mol_type = other DNA
atacgtttgatttccagcatgttgctgatgccattagtttatttgaacaggatcaaaaacattgctgcaaagtct

SEQ ID NO: 70822 - DNA, 75 bp, synthetic construct
  source 1..75: mol_type = other DNA
atctgtcggggtgccacggtggtggatggaaaacccgttgttcccggtatgaaactgtcgaaggaaaaatgcgac

SEQ ID NO: 70823 - DNA, 75 bp, synthetic construct
  source 1..75: mol_type = other DNA
gcagaataatttgcaaagtgcgaaatctgtcgctcagttaactagcgctctgagcgaactggcaaaacagttttg

SEQ ID NO: 70824 - DNA, 75 bp, synthetic construct
  source 1..75: mol_type = other DNA
ggtacatgtgtggaatcgctgcgaatgcagacccgggataaccttgagcgcatggtggttatcgcggtgcgggtg

SEQ ID NO: 70825 - DNA, 75 bp, synthetic construct
  source 1..75: mol_type = other DNA
gctgatgttagcacggcgcaggtcgcggagctggtggtgacgcaggacggctcagtggctgatggttcgacggcg

SEQ ID NO: 70826 - DNA, 75 bp, synthetic construct
  source 1..75: mol_type = other DNA
atttatcgccgatgtcaggacggcgaagatcgcggatctggtggtcattaaggacgactcagtggcagacggtgc

SEQ ID NO: 70827 - DNA, 75 bp, synthetic construct
  source 1..75: mol_type = other DNA
acaaaaactgaagttgataataagctgaaaaacaaactggaagtgaacgctctggaaagcggtcgttatggtgga

SEQ ID NO: 70828 - DNA, 75 bp, synthetic construct
  source 1..75: mol_type = other DNA
ctgaactggcagcctgtgctgcccgcaacctgaacggacagggcagtgaaagtgacctcgcggcagagctggcag

SEQ ID NO: 70829 - DNA, 75 bp, synthetic construct
  source 1..75: mol_type = other DNA
atgtcatttattaaaactttttccgggaaacatttttattatgacaggataaataaagacaacatcgatattaac

SEQ ID NO: 70830 - DNA, 75 bp, synthetic construct
  source 1..75: mol_type = other DNA
atctgtcggggggccacggtggtggatggaaaacccgtttttcccggtatgaaactgtcgaaggaaaaatgcgac

SEQ ID NO: 70831 - DNA, 75 bp, synthetic construct
  source 1..75: mol_type = other DNA
atggcagggaaagcgcatgggaatggcgatcgtcggggcgataacaccatatgtggattgggggatcgtttacgt

SEQ ID NO: 70832 - DNA, 75 bp, synthetic construct
  source 1..75: mol_type = other DNA
tcaccagtatccattatggcgtcacggggcgtccggtttaccgttaccgtattcaggcagaacactactcactac

SEQ ID NO: 70833 - DNA, 75 bp, synthetic construct
  source 1..75: mol_type = other DNA
aaaagcgtggcaatgcgccagttagccattgctgccattcgtgaagcaggcgaaaaacacgccagagatttagcg

SEQ ID NO: 70834 - DNA, 75 bp, synthetic construct
  source 1..75: mol_type = other DNA
gaacgccataccgtcagccgtctgattggtgcgcctccgggatacgttggttttgatcagggaggtttgctgact

SEQ ID NO: 70835 - DNA, 75 bp, synthetic construct
  source 1..75: mol_type = other DNA
agcgacctgccccagcggcgctatctacaaacgcgaagaagacggcattgtgctgatcgatcaggataaatgccg

SEQ ID NO: 70836 - DNA, 75 bp, synthetic construct
  source 1..75: mol_type = other DNA
actgacctcgcggtgcttgagcggtggtgcgtggcctacgagttctggcgacgtgccgtgaaaaatattgccaga

SEQ ID NO: 70837 - DNA, 75 bp, synthetic construct
  source 1..75: mol_type = other DNA
tatggctatgttgatatgtggtcttttttacaatgattaccttgagcaacaacctgcaacaccagaacaactgac

SEQ ID NO: 70838 - DNA, 75 bp, synthetic construct
  source 1..75: mol_type = other DNA
atgaaaaaacctctcgtcacccgtaatgacatagccgaagcgatcgccctgcatactgcctgtatgccgacacgg

SEQ ID NO: 70839 - DNA, 75 bp, synthetic construct
  source 1..75: mol_type = other DNA
atgacagtgcgctatcagggtatgaatcgaaataccggactcggtatcagcgacactgagcacatcagccagagc

SEQ ID NO: 70840 - DNA, 75 bp, synthetic construct
  source 1..75: mol_type = other DNA
gcgaagcgatccgctggtggataaaagatggcggccgggattgccggctaaccaaggggcagaagaacggatgct

SEQ ID NO: 70841 - DNA, 75 bp, synthetic construct
  source 1..75: mol_type = other DNA
gtggacacaaatgaagcatgggcattctttgaaaaactggaagacagctacttccggcaaaaagaacagcaaccg

SEQ ID NO: 70842 - DNA, 75 bp, synthetic construct
  source 1..75: mol_type = other DNA
atgtcatttattaaaactttttccgggaagcatttttattatgacaggataaataaagacgacatcgatattaac

SEQ ID NO: 70843 - DNA, 75 bp, synthetic construct
  source 1..75: mol_type = other DNA
cacccaggccggagtctggcaggggcaggctgccgggtatgcctatggtggctccctctatgcccgcagccaggt

SEQ ID NO: 70844 - DNA, 75 bp, synthetic construct
  source 1..75: mol_type = other DNA
tttctgaatcagtgttcaacggctgatcctgctgctatatcgaaaatcatgagtaagtttggtcgtgtcagaggt

SEQ ID NO: 70845 - DNA, 75 bp, synthetic construct
  source 1..75: mol_type = other DNA
agacagagcggaaggaagatattgaacttagcgcggatgtcagggcgggtgatttgctgtcattaacgctcgatg

SEQ ID NO: 70846 - DNA, 75 bp, synthetic construct
  source 1..75: mol_type = other DNA
aattgcagaggccatgcggcgtaattaccacaccggagagggatggtggaatgagactccctccgtgaacatgcc

SEQ ID NO: 70847 - DNA, 75 bp, synthetic construct
  source 1..75: mol_type = other DNA
ccgtggaagatgcggtgcgcggcggctgcaacctgttcgaccttgaccagttgcgcatggagtacagcccggacg

SEQ ID NO: 70848 - DNA, 75 bp, synthetic construct
  source 1..75: mol_type = other DNA
aagggcaagctgaccatcagccacgcctttgcgctggcaacgctcaacgaacaacaggtagatgaactggcgcac

SEQ ID NO: 70849 - DNA, 75 bp, synthetic construct
  source 1..75: mol_type = other DNA
cgtgacttatatcggtatcgactcaaccggcgttggtcacggggtttacgagaacgtgaaagcattctttcctgc

SEQ ID NO: 70850 - DNA, 75 bp, synthetic construct
  source 1..75: mol_type = other DNA
aacgttaaaaacgccctggtactcaaggcctacgacattatcagtcaccgccgtctggagtttgacgccgggcac

SEQ ID NO: 70851 - DNA, 75 bp, synthetic construct
  source 1..75: mol_type = other DNA
cactggctgttatctggcttctgttttccaaaaagaaaaaatcgcctccccccaatataaacagcaaaatcatca

SEQ ID NO: 70852 - DNA, 75 bp, synthetic construct
  source 1..75: mol_type = other DNA
cctaccaagttatttgggttactttttcgtggcgttgagcattggtaactgggagacattgtggtttgtttatgg

SEQ ID NO: 70853 - DNA, 75 bp, synthetic construct
  source 1..75: mol_type = other DNA
accactggactcagttggttcccgaagagcaaatccgtttctgggaagactatgaagcgggaagggcgacctctt

SEQ ID NO: 70854 - DNA, 75 bp, synthetic construct
  source 1..75: mol_type = other DNA
atacccctgacaatctgtttcacgatgggaaccctacaacgggggttgaagggactatagtccccgcagaacatc

SEQ ID NO: 70855 - DNA, 75 bp, synthetic construct
  source 1..75: mol_type = other DNA
aacgctggtatctgcagcgcagccaggatgcgctgaaacaccgtcgtgcgaaagctgcagcccgcaagcgtgcca

SEQ ID NO: 70856 - DNA, 75 bp, synthetic construct
  source 1..75: mol_type = other DNA
gtccctataacattggccccggtaagtgttttccgtcgacgttttataagcggctgaatgccggtgatcgtaagg

SEQ ID NO: 70857 - DNA, 75 bp, synthetic construct
  source 1..75: mol_type = other DNA
ccccgttatgtgatgagttcccggcaaattccggtcagccgtcagcggctgtttctgggacgcggcttccgctgg

SEQ ID NO: 70858 - DNA, 75 bp, synthetic construct
  source 1..75: mol_type = other DNA
cagtcaacctgcacactaccaccgtttgcaacccttgccggcatacgctgcagtaccgcacatatcacggaaaag

SEQ ID NO: 70859 - DNA, 75 bp, synthetic construct
  source 1..75: mol_type = other DNA
atcctgaaacgcatgccggcagatgaagcgtactggtgcacaccagagcagcttcaacagttagccatcagggag

SEQ ID NO: 70860 - DNA, 75 bp, synthetic construct
  source 1..75: mol_type = other DNA
cctatttctatctgccgaaaacccagtcctggcaggaagcggcctggtggagcgaagtcttcagctatgcagaag

SEQ ID NO: 70861 - DNA, 75 bp, synthetic construct
  source 1..75: mol_type = other DNA
gtggtcgcgctgaactctaccccgaaatgcatggcacggtggcaggctttaaaagcgacatcgacaatcaggact

SEQ ID NO: 70862 - DNA, 75 bp, synthetic construct
  source 1..75: mol_type = other DNA
gttacacctgataaactgaccggcaccattcagaacgatatcctcaaagagtacctctgccgcaacacctatatt

SEQ ID NO: 70863 - DNA, 75 bp, synthetic construct
  source 1..75: mol_type = other DNA
ttatggctacgatcctcgccccgtcacatcctcaatttatatttgtttttgccgccgttcgtcgtgcagaacgta

SEQ ID NO: 70864 - DNA, 75 bp, synthetic construct
  source 1..75: mol_type = other DNA
gcagcacaccgacgaccagtccgaagaataattcctggttcaggatgcaggcaggtcaccagagtgacgcggata

SEQ ID NO: 70865 - DNA, 75 bp, synthetic construct
  source 1..75: mol_type = other DNA
tggtttattagcggaagtttttttagggaaatatccaaacgcaaaaatcattcatgatcctcgccttatatggaa

SEQ ID NO: 70866 - DNA, 75 bp, synthetic construct
  source 1..75: mol_type = other DNA
acccttaccccctcacaccctgaatttgtctttgtgtttgcggctgtccgtcgcgcagaccgtcatccccgtatc

SEQ ID NO: 70867 - DNA, 75 bp, synthetic construct
  source 1..75: mol_type = other DNA
tatgttcataaaggtggtaccagcaatgacacgacaattaagggcggtacttcacgcatagagggggggactgcg

SEQ ID NO: 70868 - DNA, 75 bp, synthetic construct
  source 1..75: mol_type = other DNA
cgggggtttgaagcagacagggtcactcttgtgctggatgatgccgacgggcagctggctctccccgggcgggga

SEQ ID NO: 70869 - DNA, 75 bp, synthetic construct
  source 1..75: mol_type = other DNA
atgcagcgaactgcatttgccccgtcaacgtattaccattgtcagcaacagcgacatcatccggataaacgcagt

SEQ ID NO: 70870 - DNA, 75 bp, synthetic construct
  source 1..75: mol_type = other DNA
atgtaccccaatctggcaaaggcctaccccaccaataaattaccggatttacgcggtgaatttatccgtggctgg

SEQ ID NO: 70871 - DNA, 75 bp, synthetic construct
  source 1..75: mol_type = other DNA
aggttcggcattacccgttggtgtgcctgttccgtggccttcagccactccgccaacaggctggctgaaatgcaa

SEQ ID NO: 70872 - DNA, 75 bp, synthetic construct
  source 1..75: mol_type = other DNA
ttaataaaaaagtgggctggttgctgcatgggcaggagtcgattctggtgccagatttcaacaccaaatgtcagt

SEQ ID NO: 70873 - DNA, 75 bp, synthetic construct
  source 1..75: mol_type = other DNA
taacgcccgcctgttacgcgaggaaagcgcgtggatcctgcaaaatagccaggcgtgcctgctggtgaccagtgc

SEQ ID NO: 70874 - DNA, 75 bp, synthetic construct
  source 1..75: mol_type = other DNA
cggtctggacaagagggaaatcaggagtctctggtgggaaaagatggatgcaatgcaggagtctgccactcgtca

SEQ ID NO: 70875 - DNA, 75 bp, synthetic construct
  source 1..75: mol_type = other DNA
gccatcacgccggagtcggtactgatgcaggacagcgcattcagcctgacggcaccgccggtgcagggaatgccg

SEQ ID NO: 70876 - DNA, 75 bp, synthetic construct
  source 1..75: mol_type = other DNA
ttaaggaagttattacatataataatatgctgcaatctaatcatattggtaacttaactggtatttatgactcaa

SEQ ID NO: 70877 - DNA, 75 bp, synthetic construct
  source 1..75: mol_type = other DNA
gtttccgaggaggctattgcacgcggcgcatacgataccattgaatacaatacaatcccttatgcggcaatgcgg

SEQ ID NO: 70878 - DNA, 75 bp, synthetic construct
  source 1..75: mol_type = other DNA
aagattacacgcccggtaagacgtattattccgttattcaggcgggcggggatgttaagacccgttttaccagca

SEQ ID NO: 70879 - DNA, 75 bp, synthetic construct
  source 1..75: mol_type = other DNA
caaacgatgccggattaccagcaccggattatggaacctttaaaacatataaacaatcagtggctggtttaggtg

SEQ ID NO: 70880 - DNA, 75 bp, synthetic construct
  source 1..75: mol_type = other DNA
cgacccgaatcaaaccgagttcgcgcaagccgttcgtgaagtaatgaccacactctggccttttcttgaacaaaa

SEQ ID NO: 70881 - DNA, 75 bp, synthetic construct
  source 1..75: mol_type = other DNA
gaactggcaaacttcatagggcacaatgctggaattaatgataacgatgcagcgaaagccattgctcatgccatt

SEQ ID NO: 70882 - DNA, 75 bp, synthetic construct
  source 1..75: mol_type = other DNA
ttgcctgttggcgtacctgttccgtggccctcagccactccgccaacggggtggctgaaatgtaacggagcagca

SEQ ID NO: 70883 - DNA, 75 bp, synthetic construct
  source 1..75: mol_type = other DNA
agtgattgctctgactccggaagcaattgcagccgcccaggcagcagtcagtgcctgtggtgcgaatactgtgct

SEQ ID NO: 70884 - DNA, 75 bp, synthetic construct
  source 1..75: mol_type = other DNA
atttaaagcgccttctctgttgcaacttagccctgactggacgagcaattcctgccgtggcgcatgtaagattgt

SEQ ID NO: 70885 - DNA, 75 bp, synthetic construct
  source 1..75: mol_type = other DNA
cggaagttcatccccgggaagtgattaaacgtgccctgtaccacaatgccgccgccgtgatactggcacacaacc

SEQ ID NO: 70886 - DNA, 75 bp, synthetic construct
  source 1..75: mol_type = other DNA
tctgcagccatgctgctggcgtcggcctgctcccgacggctggttacccagacatcccgtatcggctccattggc

SEQ ID NO: 70887 - DNA, 75 bp, synthetic construct
  source 1..75: mol_type = other DNA
tgaaaggatgccgaacaatgatgatagtgtattgcacaatacacaaaaaggaggtagcgagaaaggtgcagagga

SEQ ID NO: 70888 - DNA, 75 bp, synthetic construct
  source 1..75: mol_type = other DNA
caacattaaaattaccagatttacgcggtgaatttattcgtggctgggatgatgggcgcgggattgactctggtc

SEQ ID NO: 70889 - DNA, 75 bp, synthetic construct
  source 1..75: mol_type = other DNA
acccgtccggtgaagtcacacccagtaaggcagaccggcttattacggaacgtctggtacaggcactgggcctgg

SEQ ID NO: 70890 - DNA, 75 bp, synthetic construct
  source 1..75: mol_type = other DNA
cctttatttacgctgcgctttttctccccacaggaaggtattgtcggtgtgcggattgagcattttcagggggcg

SEQ ID NO: 70891 - DNA, 75 bp, synthetic construct
  source 1..75: mol_type = other DNA
atgttgcagacacagggataactgatcgtgtcaatgacataataaatgacagattctggagtgatgggaaaaaac

SEQ ID NO: 70892 - DNA, 75 bp, synthetic construct
  source 1..75: mol_type = other DNA
ttggtggtgattgctggctggacgagtcggtgaacgataaagacacgctgaaagccgggaagctcaccatcgact

SEQ ID NO: 70893 - DNA, 75 bp, synthetic construct
  source 1..75: mol_type = other DNA
atggaattatggacaggggacggactcgccgcaggaagtgcacgggaaggagtaaacccaggaatactggctaca

SEQ ID NO: 70894 - DNA, 75 bp, synthetic construct
  source 1..75: mol_type = other DNA
accgcgaactgcgccgggcgaaaagtcatgtccagaagtgggagcgagtctgcgccgcgctgcgtgagttgaaca

SEQ ID NO: 70895 - DNA, 75 bp, synthetic construct
  source 1..75: mol_type = other DNA
atctggatgatgactactttgacatgttgcaggaagagctttgtagcgtggtggaggcatccggtgccagcctgg

SEQ ID NO: 70896 - DNA, 75 bp, synthetic construct
  source 1..75: mol_type = other DNA
atgcaacaactttcctttctgcccggagagatgacgcccggcgagcgcagcctcattctgcgggctctgaaaacc

SEQ ID NO: 70897 - DNA, 75 bp, synthetic construct
  source 1..75: mol_type = other DNA
ttattgtcgataactacgggagctattcctgcaatgttaactggcgtaatggtcgcctgtctgccggaaaagatc

SEQ ID NO: 70898 - DNA, 75 bp, synthetic construct
  source 1..75: mol_type = other DNA
accacaaaggcgtcagaagctgccacctcagcccgggatgcggcggcctcaaaagaggcagcgaaatcatcagaa

SEQ ID NO: 70899 - DNA, 75 bp, synthetic construct
  source 1..75: mol_type = other DNA
tcccttgaatttgcgcaggtgctggacaaaatggcctacctgacgatatggcagggcgatgaagtacagcgccgg

SEQ ID NO: 70900 - DNA, 75 bp, synthetic construct
  source 1..75: mol_type = other DNA
tggccggacaccaaaaccaatcgacgaagcgttaaaagctggccgttctcttgatgagtttctcatcaaaaaaga

SEQ ID NO: 70901 - DNA, 75 bp, synthetic construct
  source 1..75: mol_type = other DNA
cgcgagacgttacggcaactggaagccaagacaggtgcgacaagatatctgatgagtgttctcgccagagagctg

SEQ ID NO: 70902 - DNA, 75 bp, synthetic construct
  source 1..75: mol_type = other DNA
tgaagtcagaaagctcgcattaaaatactggggaccagcttcaaacagttcaccatcaaaaacatttgcactcag

SEQ ID NO: 70903 - DNA, 75 bp, synthetic construct
  source 1..75: mol_type = other DNA
ggcacgcatcatgagcggtactggctctgccagtggtggtttcagtgacaactacacgcacgttcaggtcggggt

SEQ ID NO: 70904 - DNA, 75 bp, synthetic construct
  source 1..75: mol_type = other DNA
aagatgaagaccatgattatttgttagtatgccttaaaagcatttaccctgatgaaccaaatttgacagttgcaa

SEQ ID NO: 70905 - DNA, 75 bp, synthetic construct
  source 1..75: mol_type = other DNA
caggattcagttttgatgcatccagggttgtaccaacagcatcagagaatcgccctcgaaacattgcatttaact

SEQ ID NO: 70906 - DNA, 75 bp, synthetic construct
  source 1..75: mol_type = other DNA
cagtgaacacctcttacgtgcctttcaatggtcagcagattttaaccgctgtggctgccggagtgacttatgtag

SEQ ID NO: 70907 - DNA, 75 bp, synthetic construct
  source 1..75: mol_type = other DNA
aaccaactggtttcctcgacagccgcattcgtcgcttccagtcatttgctgaaattagcactgaacccggtcctc

SEQ ID NO: 70908 - DNA, 75 bp, synthetic construct
  source 1..75: mol_type = other DNA
ctgcatcgcgttccttctgcggtcagctataccgtgcgtcagctggaagagtggctggggggggggggggggggg

SEQ ID NO: 70909 - DNA, 75 bp, synthetic construct
  source 1..75: mol_type = other DNA
ggtatgccgatccgtttctatcaggggtcaaaggttctggtatcagagaataacctgacggcaaccacgaaagag

SEQ ID NO: 70910 - DNA, 75 bp, synthetic construct
  source 1..75: mol_type = other DNA
gcaggctcgtaaggactggcaaaacgcccgcaaaaaactatccagggcaaaggtgaaaaaaacggttgtggttga

SEQ ID NO: 70911 - DNA, 75 bp, synthetic construct
  source 1..75: mol_type = other DNA
atgcttattggctatgtacgcgtatcaacaaatgaccagaacacagatctacaacgtaatgcgctgaactgtgca

SEQ ID NO: 70912 - DNA, 75 bp, synthetic construct
  source 1..75: mol_type = other DNA
gcagtcctcgcagatcggtttgcataaatcgttgagggtcgggctgggttatgacgtcaaagtcggaaataacgt

SEQ ID NO: 70913 - DNA, 75 bp, synthetic construct
  source 1..75: mol_type = other DNA
agtgcatcctgtgcggatgtcagatgcgttttacggggctgaagcggggctaccgtctgacagagctggtcctga

SEQ ID NO: 70914 - DNA, 75 bp, synthetic construct
  source 1..75: mol_type = other DNA
tgtacgtcataacagaaacagtgagaaaaacggcgaggcaaatcaccttgagagggatttaccagcggttactga

SEQ ID NO: 70915 - DNA, 75 bp, synthetic construct
  source 1..75: mol_type = other DNA
actgtacaacgtgcgcactggtcatttacgccagggacacgcgcgtcggtctggggaatcaatggtcgttacctg

SEQ ID NO: 70916 - DNA, 75 bp, synthetic construct
  source 1..75: mol_type = other DNA
aacaacgcaaaaattaatcccggcggattcgctccgtttgcagttctacgacggcacgcgctggcaggcgagttg

SEQ ID NO: 70917 - DNA, 75 bp, synthetic construct
  source 1..75: mol_type = other DNA
gacgctggattatgccgagcagcaacgctggctggagcaccgccgccaggtcttcacgccagagtttttacaggg

SEQ ID NO: 70918 - DNA, 75 bp, synthetic construct
  source 1..75: mol_type = other DNA
tattctgtggatgtatcttttacctgtgacactctggtgtttatgggaatggtatcaacacccgggacaaagccg

SEQ ID NO: 70919 - DNA, 75 bp, synthetic construct
  source 1..75: mol_type = other DNA
ccatcatttttagttaccgataatcagggcgatcagcgcggcattctagccaccaatgacatcaccgatgacacc

SEQ ID NO: 70920 - DNA, 75 bp, synthetic construct
  source 1..75: mol_type = other DNA
cggaaataatattgactatggcggcgataaggtgtttgcggggaattaccgtagcgattatttgtggtacgcaat

SEQ ID NO: 70921 - DNA, 75 bp, synthetic construct
  source 1..75: mol_type = other DNA
caaaaattaaaagctcaaagcttttttattttcagtttattgctgacgttaattttattttgcattactacctta

SEQ ID NO: 70922 - DNA, 75 bp, synthetic construct
  source 1..75: mol_type = other DNA
aacccgatgccgttcgggtgtagcaatccacttactcacatgtttaaccagctactgaaggaagccagagcatga

SEQ ID NO: 70923 - DNA, 75 bp, synthetic construct
  source 1..75: mol_type = other DNA
atatttggattcgaatggggtgggggacatggacttttattgatccagatcggcttcttccacataatttgtctc

SEQ ID NO: 70924 - DNA, 75 bp, synthetic construct
  source 1..75: mol_type = other DNA
agttcactcggtgaacttgccactgcactagatatgctggcgccaaaaaatgagcgaggagtacagcatcgcgta

SEQ ID NO: 70925 - DNA, 75 bp, synthetic construct
  source 1..75: mol_type = other DNA
ttgctgctggctcggcgggggtgacgtttgctgcgttatttcctgaggcaacacctgcagtgatgatctgtgcgc

SEQ ID NO: 70926 - DNA, 75 bp, synthetic construct
  source 1..75: mol_type = other DNA
ctacaacaagcaggccagaaggaaaatatcacctggaattatgataaatgctcactggagtggcagtccgccatc

SEQ ID NO: 70927 - DNA, 75 bp, synthetic construct
  source 1..75: mol_type = other DNA
taaacatcatgagattcacagggttaagcctcttatgccagctttatgtcgtatccgtcagggaaaaaaattatc

SEQ ID NO: 70928 - DNA, 75 bp, synthetic construct
  source 1..75: mol_type = other DNA
ctaccggccttagcgttcctgagggtatgctggttctgttcgacactggaaaggaagccgttaatggaagcctgg

SEQ ID NO: 70929 - DNA, 75 bp, synthetic construct
  source 1..75: mol_type = other DNA
acattattcggacatgctcagccaggagccagcgcctacacaatggcatcttgatttgtttcaccgggcgctgga

SEQ ID NO: 70930 - DNA, 75 bp, synthetic construct
  source 1..75: mol_type = other DNA
taacggtgacgcttaatgggcagacgtatcagggcgtcgtgcagccagacggcacctggagcgtgaccgttcccg

SEQ ID NO: 70931 - DNA, 75 bp, synthetic construct
  source 1..75: mol_type = other DNA
atttttgatggcagctacatccttatttctgaagatggagaaaacttaaagtccagaaaaacacctatagcattt

SEQ ID NO: 70932 - DNA, 75 bp, synthetic construct
  source 1..75: mol_type = other DNA
ttggtgtaccggttccatggcccaccgccacaccgccagcaggctggttacagtgcaacggagctacgttcacca

SEQ ID NO: 70933 - DNA, 75 bp, synthetic construct
  source 1..75: mol_type = other DNA
gtgagcaagattgactatcaggcactgcgcgaggcggcggaacaggcaacgcaagatgaatgggtagcatatatt

SEQ ID NO: 70934 - DNA, 75 bp, synthetic construct
  source 1..75: mol_type = other DNA
tggaaggatgccgaacaatgaagatagtgtattgcacaatacacaaaatggaggtagcgagaaaggtgcagagga

SEQ ID NO: 70935 - DNA, 75 bp, synthetic construct
  source 1..75: mol_type = other DNA
tcattaccggctttaaacttctctcctcgtcacgcgacgaagcccgttacgaagtgcgtcttgaaccccgtatgg

SEQ ID NO: 70936 - DNA, 75 bp, synthetic construct
  source 1..75: mol_type = other DNA
gagcattttttacatgcccgccacggatgacgccgatgaccagtaccagggcgactacgacggcgactttaagaa

SEQ ID NO: 70937 - DNA, 75 bp, synthetic construct
  source 1..75: mol_type = other DNA
tattaccgcccctttactgatggtgaccaccaggcggtgctggagagtgtagttaaagaagtcgatgaattgatt

SEQ ID NO: 70938 - DNA, 75 bp, synthetic construct
  source 1..75: mol_type = other DNA
gttgcgtcattctcgctacaactggcagaaggtcgggcagatctctacacggaaatgccagtgaaagtcagtggc

SEQ ID NO: 70939 - DNA, 75 bp, synthetic construct
  source 1..75: mol_type = other DNA
atctgttattcatccggcagggacagggcaaaagcgccagcggtaaaccactaccggtgatcactatcacacgta

SEQ ID NO: 70940 - DNA, 75 bp, synthetic construct
  source 1..75: mol_type = other DNA
gtaacggggttgcaatcgcctccctgaccggcacgttagcgggcacgcatatgatcacggctcgtctggctaaca

SEQ ID NO: 70941 - DNA, 75 bp, synthetic construct
  source 1..75: mol_type = other DNA
aaccggagcatggaaagacgctgttgactgggtgctcaaagaggcttgtcaggctgtaaacattggcatcaaagg

SEQ ID NO: 70942 - DNA, 75 bp, synthetic construct
  source 1..75: mol_type = other DNA
ccgtgaaaagtcgtggcacaagactacggtcggggaagtggtgaaggaaatagctgcgcgtcacaaactgaagat

SEQ ID NO: 70943 - DNA, 75 bp, synthetic construct
  source 1..75: mol_type = other DNA
agtaataccggtgccgtccaggggaacggcctgaaagtcaccgccactgacctgaccagcaccggcagtattaaa

SEQ ID NO: 70944 - DNA, 75 bp, synthetic construct
  source 1..75: mol_type = other DNA
acctattcagtattatgagaacaatgttattggaacgttgcatttaattaactcgatgttaaaaaataaaattta

SEQ ID NO: 70945 - DNA, 75 bp, synthetic construct
  source 1..75: mol_type = other DNA
aggacggcgcagatcgcgagtctggaggtgacgcaggataacgccgtggctgacggcgcaatggcgaacacgctg

SEQ ID NO: 70946 - DNA, 75 bp, synthetic construct
  source 1..75: mol_type = other DNA
tagttcgcccgacccgcacggttcaaactgagaagctgagagaattttcagatcgcaaccaatttgcaagaaaga

SEQ ID NO: 70947 - DNA, 75 bp, synthetic construct
  source 1..75: mol_type = other DNA
aatacggtgccctacacccttggagcgctggaatcggcccaaagcgttgccgaacgtttcggtatttcgttggct

SEQ ID NO: 70948 - DNA, 75 bp, synthetic construct
  source 1..75: mol_type = other DNA
cagaacgtcctgaccagttgtgggtggctgattttacttacggtgtgcccggagttcagggcgggcatggatgct

SEQ ID NO: 70949 - DNA, 75 bp, synthetic construct
  source 1..75: mol_type = other DNA
atccgcaacagcgggcttatcaccggtgataatggtttaatgttaaatgctgtctccctcagcaatccgggaaaa

SEQ ID NO: 70950 - DNA, 75 bp, synthetic construct
  source 1..75: mol_type = other DNA
aatgactatgaagcacgtccggcgaacgggtgggatcttcgcgccgaaggctggttaccggcctggccgcagctg

SEQ ID NO: 70951 - DNA, 75 bp, synthetic construct
  source 1..75: mol_type = other DNA
gtttgtctcacgcctgctgtcggaagtgggtatctggttccgctttgccaccgacgcccggctgaaaatcgaagt

SEQ ID NO: 70952 - DNA, 75 bp, synthetic construct
  source 1..75: mol_type = other DNA
caggatatattggctcacatacggctttatgtttattaaataaaggacataatgttgtaataattgataatttta

SEQ ID NO: 70953 - DNA, 75 bp, synthetic construct
  source 1..75: mol_type = other DNA
tcgcgacagcagcaaatgctaacgtgacggcccaggctgactgggaaacacttccggctctactctctggtttca

SEQ ID NO: 70954 - DNA, 75 bp, synthetic construct
  source 1..75: mol_type = other DNA
actgctcaatggcgtaccagaagctattcaggaagcagacgaattgttgggcaaatatgagttacagaatcattc

SEQ ID NO: 70955 - DNA, 75 bp, synthetic construct
  source 1..75: mol_type = other DNA
gagggcgatatcaccctggatgccagcggcagactgactgtcaacaacagtctcgccacgggggccgtcactgca

SEQ ID NO: 70956 - DNA, 75 bp, synthetic construct
  source 1..75: mol_type = other DNA
acgcgaagatacccaagctcgtctcaccgtcgcgggtattaccggcacctcaaatattcaattcagcagtggcag

SEQ ID NO: 70957 - DNA, 75 bp, synthetic construct
  source 1..75: mol_type = other DNA
atgaaaaagataagaggtttgtgtcttccggtaatgctgggggcagtgttaatgtctcagcatgtacatgcagtt

SEQ ID NO: 70958 - DNA, 75 bp, synthetic construct
  source 1..75: mol_type = other DNA
ggtactcaaaggacagcggaggataattttaccggggcatggatatcaatgcgccctcgtaacctttcatttaat

SEQ ID NO: 70959 - DNA, 75 bp, synthetic construct
  source 1..75: mol_type = other DNA
tggcagcaagaaggctggaaagaagcgccggttccggtatggaatatgctcaactatgctgccttacaggaaggg

SEQ ID NO: 70960 - DNA, 75 bp, synthetic construct
  source 1..75: mol_type = other DNA
taagttcttcgatgagatcaacaagaagtttgctccagaaaacgtgaagtatgacgtcgtggatagcttcggtaa

SEQ ID NO: 70961 - DNA, 75 bp, synthetic construct
  source 1..75: mol_type = other DNA
cagagccacagcaacgtattctgcgtatgagagaactgacgaaaatagtcggtctgtcccggtcaactatctatg

SEQ ID NO: 70962 - DNA, 75 bp, synthetic construct
  source 1..75: mol_type = other DNA
gcgcgcaacctgaaagcaatgcagatggagcgcgacggcaaagatccgcaaatgcaggtcgcggaagtggcgcag

SEQ ID NO: 70963 - DNA, 75 bp, synthetic construct
  source 1..75: mol_type = other DNA
aatggcagttcatggaaaccggtgagcaatactgcctattactacaccttcaacgagatgaagagcgcagactcg

SEQ ID NO: 70964 - DNA, 75 bp, synthetic construct
  source 1..75: mol_type = other DNA
gtggtgttgttgcggcaacgactaaacctgcaggtgcgaatgaaacacgcccacgaaatgtcgcttttaactata

SEQ ID NO: 70965 - DNA, 75 bp, synthetic construct
  source 1..75: mol_type = other DNA
gctgcgatgaaacggtgtccgcgcaagggggccacggctgccagcgggtatatgcgctgggaaggtgtcagcgat

SEQ ID NO: 70966 - DNA, 75 bp, synthetic construct
  source 1..75: mol_type = other DNA
acatcatgggagagcagcttcgcccgctgtatgatgaactgaagcactatgtgctgatgccgggtaaagtgcatg

SEQ ID NO: 70967 - DNA, 75 bp, synthetic construct
  source 1..75: mol_type = other DNA
ttttctgctgaagaatacccggaactggcaaaggtttatccgacaaataaattgccggatttacgcggtgaattt

SEQ ID NO: 70968 - DNA, 75 bp, synthetic construct
  source 1..75: mol_type = other DNA
cgcaggagtctgatgcgaaattcctgacccgccttgctgaacgcaacggcggtgaggtgtcggtaaaaatgggaa

SEQ ID NO: 70969 - DNA, 75 bp, synthetic construct
  source 1..75: mol_type = other DNA
gcaggaagtccgggaggatggggtccagaggatgaggaaaaggctcgcagtcgggggcgtggttctgatacagaa

SEQ ID NO: 70970 - DNA, 75 bp, synthetic construct
  source 1..75: mol_type = other DNA
caacgacgaactccgccagcgtttcgtggataacaccgttccacaggttgaaatgctcggtatgaccgttcctga

SEQ ID NO: 70971 - DNA, 75 bp, synthetic construct
  source 1..75: mol_type = other DNA
ggggatcagtgcgcctgattatcagacgatactcagcaccctgattagctattttcagcagatttatggcagtga

SEQ ID NO: 70972 - DNA, 75 bp, synthetic construct
  source 1..75: mol_type = other DNA
gtcctgtgcgacaccgtgcgttatctgccggagtcctttgagatcccctggaatccgaacacccgtaccgaggtg

SEQ ID NO: 70973 - DNA, 75 bp, synthetic construct
  source 1..75: mol_type = other DNA
ggcgcgaaattctctgccactgattatcctgtgctggcgaaagtgtttccttcgctggtattacctgaagcccgc

SEQ ID NO: 70974 - DNA, 75 bp, synthetic construct
  source 1..75: mol_type = other DNA
ctgctattatttttttgtattcttttccgggttatgctgaagaaacttttgatacgcactttatgatcggcggca

SEQ ID NO: 70975 - DNA, 75 bp, synthetic construct
  source 1..75: mol_type = other DNA
ggaagacgacagtcaggtgaaaagaatgctggtggagtggggaccggttatcccgaaagggaaggtcgagatcac

SEQ ID NO: 70976 - DNA, 75 bp, synthetic construct
  source 1..75: mol_type = other DNA
tccaacacaggttatctggggcaattcgacttctgtgccattgccagaatgggcaacgcagaggatgcccactac

SEQ ID NO: 70977 - DNA, 75 bp, synthetic construct
  source 1..75: mol_type = other DNA
tttcgtctggtagatgccgaaggtttgatcaaccgtatgggctttaataatcttggcgttgataacctcgtagag

SEQ ID NO: 70978 - DNA, 75 bp, synthetic construct
  source 1..75: mol_type = other DNA
agcttcatcgtggcaatattaatgctatcacccagcaccttcacccacttctgaatgacgggcaatgcttccgcc

SEQ ID NO: 70979 - DNA, 75 bp, synthetic construct
  source 1..75: mol_type = other DNA
attgctggaaaggctgggccatactcctccggcagaagcagaaaaagcttattatgcttccatcggaaacaatga

SEQ ID NO: 70980 - DNA, 75 bp, synthetic construct
  source 1..75: mol_type = other DNA
atgcgaattaaacctgacgataactggcgctggtattatgatgaagagcacgatcgaatgatgctcgatttagcc

SEQ ID NO: 70981 - DNA, 75 bp, synthetic construct
  source 1..75: mol_type = other DNA
gagagatgacgcccggcgagcgcagtctcattctgcgggccctgaaaactctggaccgccatcttcatggacccg

SEQ ID NO: 70982 - DNA, 75 bp, synthetic construct
  source 1..75: mol_type = other DNA
ccatcggcggcgcggaaaaccaactcagtcagtttcaaaccgatctcatcaccgataacatgttttgcacaggac

SEQ ID NO: 70983 - DNA, 75 bp, synthetic construct
  source 1..75: mol_type = other DNA
atcgcaggtcatgcccgcagtcggggactgattattgtgactaataacacccgggaatttgaacgtgtgggcggc

SEQ ID NO: 70984 - DNA, 75 bp, synthetic construct
  source 1..75: mol_type = other DNA
aggcactgggcctggtggatatccgggtgccggaccatctgatagtcggtggcagccaggttttctcctttgccg

SEQ ID NO: 70985 - DNA, 75 bp, synthetic construct
  source 1..75: mol_type = other DNA
acgaactaacgaccagactctgggaagtttttcaggcaccacgattttaaaacaaatcacgcccctgtctccggc

SEQ ID NO: 70986 - DNA, 75 bp, synthetic construct
  source 1..75: mol_type = other DNA
ccaccgggggcgataaaaccacctacggcgaagcctatcactatgccgacaacttcctgcaaaaaggcgataaag

SEQ ID NO: 70987 - DNA, 75 bp, synthetic construct
  source 1..75: mol_type = other DNA
atgccagttgcccgttatctctgcattttcataaacgttggtttgggagaaggttctgcattacctgttggtgtg

SEQ ID NO: 70988 - DNA, 75 bp, synthetic construct
  source 1..75: mol_type = other DNA
ggtgactcactgttgattaactggaactgtgcagcctcgaaatccccaccgaagacccctgatgaaaagcaggat

SEQ ID NO: 70989 - DNA, 75 bp, synthetic construct
  source 1..75: mol_type = other DNA
aacagtggcacgctcaccgggatagccgcgctgacgcttgccgcccgtatggatatggcatcccctcaacctgcg

SEQ ID NO: 70990 - DNA, 75 bp, synthetic construct
  source 1..75: mol_type = other DNA
gaccttcgctacgcctgagtgggtcaaagacgcgatgaagcacacctatctcggctacgaaagcaaagaccgtgt

SEQ ID NO: 70991 - DNA, 75 bp, synthetic construct
  source 1..75: mol_type = other DNA
gaaataatgcgggtaacggtgtttaattatatcgaatgtgattacaatcggtggtggcggcctcagtccggaaca

SEQ ID NO: 70992 - DNA, 75 bp, synthetic construct
  source 1..75: mol_type = other DNA
atacagcatcccgcgctgactccacgattgagacagaccaggataattacgtcgcgggtaagccgatagtcgtta

SEQ ID NO: 70993 - DNA, 75 bp, synthetic construct
  source 1..75: mol_type = other DNA
gtgtcgcctgccgtggttcagggggttccggatatcacccgggaaatccagcaggatattgcccggcgaatgagg

SEQ ID NO: 70994 - DNA, 75 bp, synthetic construct
  source 1..75: mol_type = other DNA
cctgacgtttgtctcacgcctgctgtcggaagtgggtatctggttccgctttgccaccgacgcccggctgaaaat

SEQ ID NO: 70995 - DNA, 75 bp, synthetic construct
  source 1..75: mol_type = other DNA
gaaaccgacaacacttacccgatagcggttacagcggaagattcgaaaggaaatttctcccggcgtgaagaaagt

SEQ ID NO: 70996 - DNA, 75 bp, synthetic construct
  source 1..75: mol_type = other DNA
tgaagaacgacatctacgcccatatcgataaggacgggcgctaccgggtcaatctcgactttgaccgtgatacgt

SEQ ID NO: 70997 - DNA, 75 bp, synthetic construct
  source 1..75: mol_type = other DNA
cctggcggatcgcggagcttacacgggtgtaattgccagctggttgcatacccgcgaacccgcgaagaaagaaag

SEQ ID NO: 70998 - DNA, 75 bp, synthetic construct
  source 1..75: mol_type = other DNA
tcacacggaccgtggaggccagtactgttcagcagattatcaggcgcaactgaagcggcataatctgcgtggaaa

SEQ ID NO: 70999 - DNA, 75 bp, synthetic construct
  source 1..75: mol_type = other DNA
gtccatcacagtgataaaggttctcagtatgtatcgctggcctacacacagcggcttaaggaagccggattactg

SEQ ID NO: 71000 - DNA, 75 bp, synthetic construct
  source 1..75: mol_type = other DNA
cgcggcgataccgccatgtcgacgctgtttggtcatgtaaaaggcgcgtttaccggggcgcgggaatctcgtgaa

SEQ ID NO: 71001 - DNA, 75 bp, synthetic construct
  source 1..75: mol_type = other DNA
cgcctcaccacccttatggtcgtggaaaaccttggtggtgagttattaatactcaaccaagaggctgccattatg

SEQ ID NO: 71002 - DNA, 75 bp, synthetic construct
  source 1..75: mol_type = other DNA
gcacgctgacgctgatgccacagctgaatggtgtggatgcggctaaagcccccgccgtggtgaatatcatttcta

SEQ ID NO: 71003 - DNA, 75 bp, synthetic construct
  source 1..75: mol_type = other DNA
tatagcttcagtaaacacgaagtgtataaactgatgcagggggatacctgcactgggctagttattagcgataaa

SEQ ID NO: 71004 - DNA, 75 bp, synthetic construct
  source 1..75: mol_type = other DNA
gtgagtcgagcattgttcgccgtagtattagcatttccattaattgcactggctaacccgcattatcgtccggac

SEQ ID NO: 71005 - DNA, 75 bp, synthetic construct
  source 1..75: mol_type = other DNA
ctggctgaggccgtacaggcccagcaggatgtggaaaccacccgccagactgcggaggccgaccgtaccaaacag

SEQ ID NO: 71006 - DNA, 75 bp, synthetic construct
  source 1..75: mol_type = other DNA
ggcggacaacagcgcaacgactgccccgacggtaatcacagagccggacggcacggtggagatcagtgtcaccag

SEQ ID NO: 71007 - DNA, 75 bp, synthetic construct
  source 1..75: mol_type = other DNA
atgttcctcctgagtccgcatctgtggaatacgatcttcctgacccgttaccggatgccccctgggatccttatg

SEQ ID NO: 71008 - DNA, 75 bp, synthetic construct
  source 1..75: mol_type = other DNA
ttccggttttatctggaaaaacagggatggactcttgttaaccggggcgcaattaaaaatatgactgtggaacaa

SEQ ID NO: 71009 - DNA, 75 bp, synthetic construct
  source 1..75: mol_type = other DNA
tagatggcacgttactttctcccgaccatacgttatccccttacgccaaagaaactctgaagctgctcaccgcgc

SEQ ID NO: 71010 - DNA, 75 bp, synthetic construct
  source 1..75: mol_type = other DNA
agaactatgacgaccttccccatatctaccgctcacgctggcgataccagagacgattcattcttaaacgcctct

SEQ ID NO: 71011 - DNA, 75 bp, synthetic construct
  source 1..75: mol_type = other DNA
atgaacgcaaaaatcaaatacggcctgtcagctgcagttctggcgctgattggagcaggcgcatcagctcctcag

SEQ ID NO: 71012 - DNA, 75 bp, synthetic construct
  source 1..75: mol_type = other DNA
atgaacgcaaaaatcagatacggcctgtcggctgccgttctggcgctgattgccgcaggtgcgcctgcgcctgaa

SEQ ID NO: 71013 - DNA, 75 bp, synthetic construct
  source 1..75: mol_type = other DNA
caggttaacgccattgagcgggataaggcgctggcatgggtggagcgcaatataaaagttccactgaccgagcca

SEQ ID NO: 71014 - DNA, 75 bp, synthetic construct
  source 1..75: mol_type = other DNA
taaccattttgaacgcgtactggatggcgggcttttcttttcggctgccgatgtcaaaaaactctacagtatgta

SEQ ID NO: 71015 - DNA, 75 bp, synthetic construct
  source 1..75: mol_type = other DNA
atgaacacaaaaataaaatacggcctgtcggctgccgttctggcgttgattgccgcaggggcttctgcgcctgaa

SEQ ID NO: 71016 - DNA, 75 bp, synthetic construct
  source 1..75: mol_type = other DNA
accaatcccgtggccatcagataccgttccgtctggttatgccctgatgcaggggcagacttttgacaaatctgc

SEQ ID NO: 71017 - DNA, 75 bp, synthetic construct
  source 1..75: mol_type = other DNA
cacagtcatgttttccggcaattgagatactggtatcagaaacgcaaaacctttgttgcggtctatagtgatttc

SEQ ID NO: 71018 - DNA, 75 bp, synthetic construct
  source 1..75: mol_type = other DNA
atgagcacaacaagcggtagtggccagactcgtaatgcagggaagacatcatcagatggtgctcatacccactcg

SEQ ID NO: 71019 - DNA, 75 bp, synthetic construct
  source 1..75: mol_type = other DNA
ataggtggtgtatacagagatgcccgtgctcatactgacagtcaggttacagcagtacgtgatgaactgaaggca

SEQ ID NO: 71020 - DNA, 75 bp, synthetic construct
  source 1..75: mol_type = other DNA
atgaaaatgaatgtaacggaaaccgtaaaacaggcctgcggccactggccgcgcattctcccggcgctgggtgtg

SEQ ID NO: 71021 - DNA, 75 bp, synthetic construct
  source 1..75: mol_type = other DNA
tgcataaaccgacgacgccgctgccttctctggatttgctgacaccgccgccgagcgaagtggagccggtagata

SEQ ID NO: 71022 - DNA, 75 bp, synthetic construct
  source 1..75: mol_type = other DNA
tattaaagtaccgctgaccgaaccccagaaggcgggtatcgcgtcattttgtccttataacattggccccggtaa

SEQ ID NO: 71023 - DNA, 75 bp, synthetic construct
  source 1..75: mol_type = other DNA
tgaaaatctctacgccgttcattccattgaataccgcgcgctggaacaggacttttacctgtttgccgttcgctg

SEQ ID NO: 71024 - DNA, 75 bp, synthetic construct
  source 1..75: mol_type = other DNA
gcagccgctgctatgcccacttccgacgggataaaatcagcaaccaattaaccaaatatatttgcttccgttatg

SEQ ID NO: 71025 - DNA, 75 bp, synthetic construct
  source 1..75: mol_type = other DNA
ggccagtcaggattcggcacgctggggggtgcccctattaagttgtcaagcatgttatgacgcctgcggggtata

SEQ ID NO: 71026 - DNA, 75 bp, synthetic construct
  source 1..75: mol_type = other DNA
agacaccgcccgtgtgctgggccgtatgtatgacggcatcgaataccgtggttacggtcaggccatcgttgagga

SEQ ID NO: 71027 - DNA, 75 bp, synthetic construct
  source 1..75: mol_type = other DNA
acccgcgaaattctgcgtaattacagggccgtgattaatgcgcggcgtcgtgaaatggggcagaaaccgctcacc

SEQ ID NO: 71028 - DNA, 75 bp, synthetic construct
  source 1..75: mol_type = other DNA
cagaggctttgtttgagatcgcaattgatcggagaaattatcgtgacttcataaaaggattttctacgggcggta

SEQ ID NO: 71029 - DNA, 75 bp, synthetic construct
  source 1..75: mol_type = other DNA
atgtttgtagaaaataacctgaaggctgatcctgataatcagggatgggttcttggttgggctgtagtacgtgac

SEQ ID NO: 71030 - DNA, 75 bp, synthetic construct
  source 1..75: mol_type = other DNA
ttcaaaacgaacgatatagatgtcggcccgctgggaacgaaatcctggatcgaaacaccatattccagcaccact

SEQ ID NO: 71031 - DNA, 75 bp, synthetic construct
  source 1..75: mol_type = other DNA
atacataccggtatcatctgtctcatcgtattcgccgggtgattgggaatgaaaacacatcatcgccataccagc

SEQ ID NO: 71032 - DNA, 75 bp, synthetic construct
  source 1..75: mol_type = other DNA
caatccggtggactgtcagctaatcattgttgatgaaggagtaaaacccgccgtcgaacgggtttacaccatcaa

SEQ ID NO: 71033 - DNA, 75 bp, synthetic construct
  source 1..75: mol_type = other DNA
aggcgctggcatgggtggagaaaaacatcaaagtgccactgaccgaaccccagaaagcgggtattgcgtcattct

SEQ ID NO: 71034 - DNA, 75 bp, synthetic construct
  source 1..75: mol_type = other DNA
agcagcagctatcgggaatcgcctgctgaaagacggtcagacagtgattgtggttaccgtggctgatgttatgag

SEQ ID NO: 71035 - DNA, 75 bp, synthetic construct
  source 1..75: mol_type = other DNA
cgtattgcaggtgcagacggaatgcctgcgtgggcagatattccttcacccacgcatgaagaacttattgaaatt

SEQ ID NO: 71036 - DNA, 75 bp, synthetic construct
  source 1..75: mol_type = other DNA
acttcctcaacggcgatccggaccagccgatcattatggggcgcacctaccaccaggaaaaccgcacccccggca

SEQ ID NO: 71037 - DNA, 75 bp, synthetic construct
  source 1..75: mol_type = other DNA
attacagacaagcctggaaagtggaacataaattatcggatattctactgttgactatttgtgccgttatttcgg

SEQ ID NO: 71038 - DNA, 75 bp, synthetic construct
  source 1..75: mol_type = other DNA
ttatgaagtgagacttcgtggctataactcaccggctttcgccatggctgcaatggacaatgacgagcagcaggc

SEQ ID NO: 71039 - DNA, 75 bp, synthetic construct
  source 1..75: mol_type = other DNA
atgagggagaaggaacggatgatgtctcaattttgtcgaaagagggatataataaaagatgggaacattacacta

SEQ ID NO: 71040 - DNA, 75 bp, synthetic construct
  source 1..75: mol_type = other DNA
gggagggccgtgattcatattgtaccgcggctggcaggggccgggggaaatggtgtttttcaggtggtgctgggg

SEQ ID NO: 71041 - DNA, 75 bp, synthetic construct
  source 1..75: mol_type = other DNA
tacctttctcagtgattttactgatatccatatacggattattaaaagccctgcgtcgggatttgaccaagcgtg

SEQ ID NO: 71042 - DNA, 75 bp, synthetic construct
  source 1..75: mol_type = other DNA
gcaccgcaaatgctcgttttcgaattaccaggtgcagaacgaagcgcagcgatacgcgttgagtcaggcgaaatc

SEQ ID NO: 71043 - DNA, 75 bp, synthetic construct
  source 1..75: mol_type = other DNA
gttaatgactatactcttaatattcttggccaaaatgtttcaagagtcacaacgggaaaaaaccgtatgatttat

SEQ ID NO: 71044 - DNA, 75 bp, synthetic construct
  source 1..75: mol_type = other DNA
gataagccacattagtgatgcagtcgacgatcgtattcgtcttgaagtcgatttgggcaacgagctgaattttat

SEQ ID NO: 71045 - DNA, 75 bp, synthetic construct
  source 1..75: mol_type = other DNA
gaagagaacgcagaagctatcgctgcgttaaatcaattggctgatgaaaccggatgtttctctgatgagtaccgg

SEQ ID NO: 71046 - DNA, 75 bp, synthetic construct
  source 1..75: mol_type = other DNA
ccagtagcctggtcaatattgcaaagaacggtaaacttaccggatttggtggcgtagtagggaacgtaaccaata

SEQ ID NO: 71047 - DNA, 75 bp, synthetic construct
  source 1..75: mol_type = other DNA
ggtgctctatgaagtggaccttatcaacatggtggaaattgtagacggtgtggacctgatggaagcgcaccgcaa

SEQ ID NO: 71048 - DNA, 75 bp, synthetic construct
  source 1..75: mol_type = other DNA
tgttgccatagcgtctgtgctcatcactggtccaggtggtaacgatggtctggaaggtgtcagctacataccata

SEQ ID NO: 71049 - DNA, 75 bp, synthetic construct
  source 1..75: mol_type = other DNA
ggagaactccttaattaccaaccttagcttcgttggttatctattaacgcgggtatgtaatcattctggcaatgc

SEQ ID NO: 71050 - DNA, 75 bp, synthetic construct
  source 1..75: mol_type = other DNA
tgcaggaaaacttaatatttctggcagaaacagtatagtatcatatagagatacgcccagcagttctggacataa

SEQ ID NO: 71051 - DNA, 75 bp, synthetic construct
  source 1..75: mol_type = other DNA
gctgggatcaccagagttgcaatcagtaaagccgagcaaggccttacaaaaagtttcaacggtgacacccttttt

SEQ ID NO: 71052 - DNA, 75 bp, synthetic construct
  source 1..75: mol_type = other DNA
ggacgccgggcaggaagttgagatgccggagccggagaagaagaaacgagaaatgattcagttgtggggggagta

SEQ ID NO: 71053 - DNA, 75 bp, synthetic construct
  source 1..75: mol_type = other DNA
aattggccaacaactcaattaccaccaggatatacttgtgcagaaccctatttattcccagacattaataaaccc

SEQ ID NO: 71054 - DNA, 75 bp, synthetic construct
  source 1..75: mol_type = other DNA
atcaacttaaagatccccaattttgggaacgtgagtttaaagcaggcgagcgtttttatgttgatatggaatttg

SEQ ID NO: 71055 - DNA, 75 bp, synthetic construct
  source 1..75: mol_type = other DNA
atgcctgattggttgcctcgcgatatcagccattcctccgctgaatggttttatcagcgaatggtacacctggca

SEQ ID NO: 71056 - DNA, 75 bp, synthetic construct
  source 1..75: mol_type = other DNA
gcccctataacattggccccggtaagtgtttcccgtcgacgttttataagcggcttaatgccggtgatcgtaaag

SEQ ID NO: 71057 - DNA, 75 bp, synthetic construct
  source 1..75: mol_type = other DNA
ttataatcttccttttacggttctttgtgaggtacataagaactggtataaaacgccaaatgcagcgccacgtgt

SEQ ID NO: 71058 - DNA, 75 bp, synthetic construct
  source 1..75: mol_type = other DNA
ggcagaagtgccgttgctggataataacggcaaatttaatggtcagtacgaactgcgtctgatggtggcgctgga

SEQ ID NO: 71059 - DNA, 75 bp, synthetic construct
  source 1..75: mol_type = other DNA
gcctgttgtcagtctttgaagtcgtgatatggatgacggacggatggtcgctgtatgagtcacggcttaaggaga

SEQ ID NO: 71060 - DNA, 75 bp, synthetic construct
  source 1..75: mol_type = other DNA
atgcggcttaatattgccgacttcaaaggctttaaagcctcccttttatccgcgatcgcggatatcgcagcgttt

SEQ ID NO: 71061 - DNA, 75 bp, synthetic construct
  source 1..75: mol_type = other DNA
gtcggtaacgatttgcgttatgccggacgtttccccgtgtcgctggaaggcagcgaaacggtgtccgacgccagc

SEQ ID NO: 71062 - DNA, 75 bp, synthetic construct
  source 1..75: mol_type = other DNA
ccacgcacagcaacctgcgctgtttacagccatgctgaagcagtttcgtgctgacctcactgtgtttaacgcgca

SEQ ID NO: 71063 - DNA, 75 bp, synthetic construct
  source 1..75: mol_type = other DNA
gaccattcgttcgaaaacctataagggcagcgggtttaatgaactgaagtttgacgatgcgacagggaaagaaca

SEQ ID NO: 71064 - DNA, 75 bp, synthetic construct
  source 1..75: mol_type = other DNA
ctcccgccgtatatcccaggacatcagcacccgtgatgaaggcgggggcggaacggtcgtggttatcgggcgaca

SEQ ID NO: 71065 - DNA, 75 bp, synthetic construct
  source 1..75: mol_type = other DNA
tgccgcgcgccagctactggaacagacattacccgccattaaacacggtaatattctggaaatcgcccagcgcga

SEQ ID NO: 71066 - DNA, 75 bp, synthetic construct
  source 1..75: mol_type = other DNA
ggtggcagagactgccgtatccgttcaaataattgctacggtcaggtctcacggcgtgaccaggagagcgcgctg

SEQ ID NO: 71067 - DNA, 75 bp, synthetic construct
  source 1..75: mol_type = other DNA
aatggatgaaatcagagctggaaaacacaaactggctatatcaagaaactgttgtatataaaataaaagagttat

SEQ ID NO: 71068 - DNA, 75 bp, synthetic construct
  source 1..75: mol_type = other DNA
tgttagttcgtagaaacgctcctggcgtctggcagtgggtgagactcagcaaccgacggatggggttgatgaaat

SEQ ID NO: 71069 - DNA, 75 bp, synthetic construct
  source 1..75: mol_type = other DNA
atgcagcgcattggtcgctgcatgggatatctgcagctggcggcagagattgaagcacttgcctgtggtgctgac

SEQ ID NO: 71070 - DNA, 75 bp, synthetic construct
  source 1..75: mol_type = other DNA
atcctcgaccagtttcttgacgaaaaagaaggtaaccacaccatggcataccgtgatggtgcggggatctggacc

SEQ ID NO: 71071 - DNA, 75 bp, synthetic construct
  source 1..75: mol_type = other DNA
cgcattcgttcaaataactgttacggtcaggttattcgtcgtgaccaggagagtgcgctggtgtgctgggggatc

SEQ ID NO: 71072 - DNA, 75 bp, synthetic construct
  source 1..75: mol_type = other DNA
ccgttgtaccaacagccgcaatccgttgaacagcagcctgttgtggagcctgaacccgttgtagaagagacaaaa

SEQ ID NO: 71073 - DNA, 75 bp, synthetic construct
  source 1..75: mol_type = other DNA
gagcgcgtcacgcagattattaatggcgggcagaacggcattaaagaccgtcgtgaacgttacgccaaagctaaa

SEQ ID NO: 71074 - DNA, 75 bp, synthetic construct
  source 1..75: mol_type = other DNA
tggccgccattgtggcgctggggatctccctggctcccggagaactgagaacctcccgcgaggcacaaatcaaaa

SEQ ID NO: 71075 - DNA, 75 bp, synthetic construct
  source 1..75: mol_type = other DNA
ccgataccgtcctgacccatgacgcgatcacgccgacattattaaagctgtttgatgtcaccgcggacaaagtca

SEQ ID NO: 71076 - DNA, 75 bp, synthetic construct
  source 1..75: mol_type = other DNA
tccgggcgggcggtcggggtgaaagcaccgggcacgtcaacccgaagtacggcagcgagccggggcggctgttct

SEQ ID NO: 71077 - DNA, 75 bp, synthetic construct
  source 1..75: mol_type = other DNA
ttctgaaatcaatgccaagaccaaagttaaaacattcaaactcaaattcaaagactgtgcgggtatccccaataa

SEQ ID NO: 71078 - DNA, 75 bp, synthetic construct
  source 1..75: mol_type = other DNA
taatcgaagaagctaaattaaaaatagcgattgcgaaatgccaccctaattcagagatggcacgggtagagggtg

SEQ ID NO: 71079 - DNA, 75 bp, synthetic construct
  source 1..75: mol_type = other DNA
cagctgggtttttccacggccattgatatttatcttctcgaccaggcattattcattccgcatctcaaatgcggg

SEQ ID NO: 71080 - DNA, 75 bp, synthetic construct
  source 1..75: mol_type = other DNA
tgttaagcgaaaaatgtttgcgaaacttatcaccagtcgttttttgcatatccgcgccagcccggaacaggcatc

SEQ ID NO: 71081 - DNA, 75 bp, synthetic construct
  source 1..75: mol_type = other DNA
ggttttccggtgaacgccctgaccggtcattcctaccaggggataaatgtgctgctgttatggttgtcggcggcg

SEQ ID NO: 71082 - DNA, 75 bp, synthetic construct
  source 1..75: mol_type = other DNA
caataggtcaaataactactcatctagatcagataccgataggaaatgaaggtgccactgaatttgaacaatggt

SEQ ID NO: 71083 - DNA, 75 bp, synthetic construct
  source 1..75: mol_type = other DNA
tgacgaacaattaattatcgctgttgtagctgtgggtaagcgtgagcgcagtgacgtttataatcttgccagtga

SEQ ID NO: 71084 - DNA, 75 bp, synthetic construct
  source 1..75: mol_type = other DNA
taaaacggaatggtgtacatattattagttcacgtatttcgtttgatgaaatgcaaattatcgctttgaatgctg

SEQ ID NO: 71085 - DNA, 75 bp, synthetic construct
  source 1..75: mol_type = other DNA
gttttgcattacgacgacaggtaagtatgcagaacaatatgattaaaaatgtagcaggaagcgatgcaaaaatcg

SEQ ID NO: 71086 - DNA, 75 bp, synthetic construct
  source 1..75: mol_type = other DNA
gcgagtaaagcagcccatggtactttgggcataggaatagctgctgcaactcaagcagctacagcggctctgaaa

SEQ ID NO: 71087 - DNA, 75 bp, synthetic construct
  source 1..75: mol_type = other DNA
aaaacccgcgacagtgataacgccaccatccgtgaagcctggcgtaaggttgatgcgtcctatggtaaggaatca

SEQ ID NO: 71088 - DNA, 75 bp, synthetic construct
  source 1..75: mol_type = other DNA
tgcgcccgaagtggaaccctccggcccttgaacatctgcgtaataacgaattcccctggttttcaccggtgattg

SEQ ID NO: 71089 - DNA, 75 bp, synthetic construct
  source 1..75: mol_type = other DNA
acagcggtgaggtgcgtgctgagcggcatgacgataaccctgcgcacattatcggttatggatcggtgtttgact

SEQ ID NO: 71090 - DNA, 75 bp, synthetic construct
  source 1..75: mol_type = other DNA
gaggtgagtgtgctttatgccgttgctccgaaagcagggagccgtcaggtgcaggatgaactgcgggcatggtct

SEQ ID NO: 71091 - DNA, 75 bp, synthetic construct
  source 1..75: mol_type = other DNA
aggcaccacggcagcggcactgggttttgcacccagcgtagcactcgcggaaacccggcagtataaactgctgcg

SEQ ID NO: 71092 - DNA, 75 bp, synthetic construct
  source 1..75: mol_type = other DNA
atgaacgcggtttacgttatgacattgttgcaccggatactccgactatttgtgacctggtgctgtctccaatgt

SEQ ID NO: 71093 - DNA, 75 bp, synthetic construct
  source 1..75: mol_type = other DNA
gctgccggtaatgttgtcggtggtatcctgggggcattcagcccgattggcagtgagacgtcggaaacgctgtcc

SEQ ID NO: 71094 - DNA, 75 bp, synthetic construct
  source 1..75: mol_type = other DNA
ttgaacgttatgaagaattgtatggtttacctgattcctgttcccctgtcggaacccagacattacgccagcgtc

SEQ ID NO: 71095 - DNA, 75 bp, synthetic construct
  source 1..75: mol_type = other DNA
cggtgacgggggtgacggacggcgcgggccgctgttttcacctggtgctgaccacacaggcgcagcgggcggaag

SEQ ID NO: 71096 - DNA, 75 bp, synthetic construct
  source 1..75: mol_type = other DNA
gcaggtgagtctgaaaaggcagcggcagcagacgcgaaagaggccagacaacatgctgaaaccgccagagtggct

SEQ ID NO: 71097 - DNA, 75 bp, synthetic construct
  source 1..75: mol_type = other DNA
taatggtgatcgactccgttcattaccctgcaccaagaactggactcatgctatttattttcgttttgttatcgc

SEQ ID NO: 71098 - DNA, 75 bp, synthetic construct
  source 1..75: mol_type = other DNA
agtcatcagttgcttgccccggcggacaatatctccattgcaaaaaatgaactggcagttctggggacgatttca

SEQ ID NO: 71099 - DNA, 75 bp, synthetic construct
  source 1..75: mol_type = other DNA
tgtggcgctgagtcgctgggagccacggatgacgctggattccatcaccatcaacagcaattttgacggttcaat

SEQ ID NO: 71100 - DNA, 75 bp, synthetic construct
  source 1..75: mol_type = other DNA
gaacatcgacctgatccgccagttccagagcaatgaaggcatgacgctcatggactcgcgggataagttcgaaac

SEQ ID NO: 71101 - DNA, 75 bp, synthetic construct
  source 1..75: mol_type = other DNA
acgatacagtttttattcattatattggtccaactaaaccctggcatgactgggcctgggattatccaatatcac

SEQ ID NO: 71102 - DNA, 75 bp, synthetic construct
  source 1..75: mol_type = other DNA
tggttccctgctgtctgccctgatagaccagccgcagaccccggcgctgcgcctgcagattatgtctgcggtcta

SEQ ID NO: 71103 - DNA, 75 bp, synthetic construct
  source 1..75: mol_type = other DNA
atccgggcagattgtacagaacggtggtgaactgactgccggacagaacgccatgctcagtgcacagcacctgaa

SEQ ID NO: 71104 - DNA, 75 bp, synthetic construct
  source 1..75: mol_type = other DNA
tccggttgatgcgcgcaaggctggataacgtcgcgccggttgctaaaatccgggctgaatctcagctttttgtga

SEQ ID NO: 71105 - DNA, 75 bp, synthetic construct
  source 1..75: mol_type = other DNA
aagcggccaaaaaaatgattaacacctgtaatgagtatcagaaaagacacggtaaaaagacactctttgaggtac

SEQ ID NO: 71106 - DNA, 75 bp, synthetic construct
  source 1..75: mol_type = other DNA
ggctccattcggtgcggttgccggatatcgtggcagacgtcaggccgcagaagaaaccgccatgcgtgatgctga

SEQ ID NO: 71107 - DNA, 75 bp, synthetic construct
  source 1..75: mol_type = other DNA
ctggttcaggaaattgacttcgtaagacaaacagcccctgccgggcagtttcctgtaagagaatgtttgccttct

SEQ ID NO: 71108 - DNA, 75 bp, synthetic construct
  source 1..75: mol_type = other DNA
actccgccggtgagcatctggagctctgctgtggtaaggcaaggctggtgctgacgaaggacggacaaatttttc

SEQ ID NO: 71109 - DNA, 75 bp, synthetic construct
  source 1..75: mol_type = other DNA
atgttgaatggtggcagaatcgagcctcgatactaactacaccgcaattagcttctggatattttaatgctggtt

SEQ ID NO: 71110 - DNA, 75 bp, synthetic construct
  source 1..75: mol_type = other DNA
aaagcggctgctgaaaaggctgcagctgataagaaagcggcagcagagaaagctgcagccgacaaaaaagcagca

SEQ ID NO: 71111 - DNA, 75 bp, synthetic construct
  source 1..75: mol_type = other DNA
atgacctgcagatactgacgacacttccggcgcaccaggtggcagagcatttcagtgaaccctccgtccgtttta

SEQ ID NO: 71112 - DNA, 75 bp, synthetic construct
  source 1..75: mol_type = other DNA
gtgaccatctcattagacccgggcatcagtatcagtcacctgaataacagagaaaaaataaagatcgctgatgcc

SEQ ID NO: 71113 - DNA, 75 bp, synthetic construct
  source 1..75: mol_type = other DNA
tcacttcaaccgttgaaacaaataagtcgaactacacggttggagagacaatcaccatcacggtaacgctccggg

SEQ ID NO: 71114 - DNA, 75 bp, synthetic construct
  source 1..75: mol_type = other DNA
atgtcagacaaactcataatgctggcgaagatcctctgtgtaatcgtcggcatttcattttcactaatgctggtt

SEQ ID NO: 71115 - DNA, 75 bp, synthetic construct
  source 1..75: mol_type = other DNA
atgcgtacacgaattgactatctggcggataaattctgttttacagaacggaacgaatccccccgtcttcaccgg

SEQ ID NO: 71116 - DNA, 75 bp, synthetic construct
  source 1..75: mol_type = other DNA
ctgaaggcaaaaccccatccggaactggcttatcgtgcagttctggggctgctggcacttcagaaaaaatacggc

SEQ ID NO: 71117 - DNA, 75 bp, synthetic construct
  source 1..75: mol_type = other DNA
tatcaggtgcagaacgacgggcaaaaatacgcgctgagccaggccaaatccatagctgacgaactgatgaccggg

SEQ ID NO: 71118 - DNA, 75 bp, synthetic construct
  source 1..75: mol_type = other DNA
ggaattccgaagagcaacagtgaatgcgtatacaacatagaggaaattatgcgctggatcgaaaatcagaaacaa

SEQ ID NO: 71119 - DNA, 75 bp, synthetic construct
  source 1..75: mol_type = other DNA
gcttgcatattgccaaacgcctgttgccttacattccacagaatgccgggattttactggttccatgctgtcgtg

SEQ ID NO: 71120 - DNA, 75 bp, synthetic construct
  source 1..75: mol_type = other DNA
ttatctactaaaaatatactagtgattgggatgttgattgaagataatgtcgataatccatttttactagcctat

SEQ ID NO: 71121 - DNA, 75 bp, synthetic construct
  source 1..75: mol_type = other DNA
ggggcagcagatgccgcagtctgcattcgaagccatgacggacgccgcctttaacctgggctgccggaatctgat

SEQ ID NO: 71122 - DNA, 75 bp, synthetic construct
  source 1..75: mol_type = other DNA
cgtatccgctcaaataattgctacggtcaggtatcccggcgagaccaggaaagtgcgctggcgtgctgggacatc

SEQ ID NO: 71123 - DNA, 75 bp, synthetic construct
  source 1..75: mol_type = other DNA
accaacgcagcacaacagcgcgtactcgccgataaaaatgaaaaaattgattctctctctaccagactggaaaag

SEQ ID NO: 71124 - DNA, 75 bp, synthetic construct
  source 1..75: mol_type = other DNA
gtggcctcggcgcaggcggaacatcatctggtggccgatatcgcctgggcggttattcaatactggcagaccacg

SEQ ID NO: 71125 - DNA, 75 bp, synthetic construct
  source 1..75: mol_type = other DNA
tgaaatccgcagtgatattaccgggcgcttagcgacgtacatcgctgacccgcaggtggatgttaatatcgccgc

SEQ ID NO: 71126 - DNA, 75 bp, synthetic construct
  source 1..75: mol_type = other DNA
aaaccggcaccgggaaaaatcaccttgcagcggcgatgggcaaccggctgatggtgaaggggcgcagcgtgatta

SEQ ID NO: 71127 - DNA, 75 bp, synthetic construct
  source 1..75: mol_type = other DNA
cgccgctggtgcgctatggctggacgccgcgcggcgaactggcggcagtgtatgaccgcagcaatacacaggtgc

SEQ ID NO: 71128 - DNA, 75 bp, synthetic construct
  source 1..75: mol_type = other DNA
actggcgcaacgtggtgctaacacacaatggtcgtgaagaacgcatttctttgcaggcgctgatgcaaaacggcg

SEQ ID NO: 71129 - DNA, 75 bp, synthetic construct
  source 1..75: mol_type = other DNA
cgacgtttcattttcgctaatgatggttgctctttttctttccatagcctggatggcgttgagttcggcagggct

SEQ ID NO: 71130 - DNA, 75 bp, synthetic construct
  source 1..75: mol_type = other DNA
tgtaatggagaatcaattaacgagaataaagaatatggtggactaatatgtaagaagcaaggtgaatatttcccc

SEQ ID NO: 71131 - DNA, 75 bp, synthetic construct
  source 1..75: mol_type = other DNA
tgatcgtcgatggggtaaatcgccagttgccggaagtgctggcacaaccggtgctgtggcaggcgctgtggacct

SEQ ID NO: 71132 - DNA, 75 bp, synthetic construct
  source 1..75: mol_type = other DNA
ttcacctaaattgacctctattgcccttgtaggggggcctgccaatgacaaggtgcagttgtcttggcgtgagga

SEQ ID NO: 71133 - DNA, 75 bp, synthetic construct
  source 1..75: mol_type = other DNA
gatgttctgtgtgataccggactgcaacctgtattttcagtggatgatcgtgaacaggtgattgccgtgtatggc

SEQ ID NO: 71134 - DNA, 75 bp, synthetic construct
  source 1..75: mol_type = other DNA
tggatggctggcgtgattgccgcaggcgtggtctttctgattatcatgggggtttatcatctgctgaaccgccac

SEQ ID NO: 71135 - DNA, 75 bp, synthetic construct
  source 1..75: mol_type = other DNA
gggcgtgccgcgtccgaaactggccgctgacctgaatactgtacttacgcgttatgcgtggccgggaaatgtgcg

SEQ ID NO: 71136 - DNA, 75 bp, synthetic construct
  source 1..75: mol_type = other DNA
acaatggcatatgcacattttgcaccggattacctgcaggatgcggtggcccttaatccgctgaaaggtggcgtg

SEQ ID NO: 71137 - DNA, 75 bp, synthetic construct
  source 1..75: mol_type = other DNA
atgctcctggattacagcgacgaagaacaaaaaaaattaagaccttttttcactagtgatcacatctattgtttg

SEQ ID NO: 71138 - DNA, 75 bp, synthetic construct
  source 1..75: mol_type = other DNA
ccgatttaccacgcgggcaggccacgcatgtgcttcggcatacatttgcaagctggttcatgatgaacgggggga

SEQ ID NO: 71139 - DNA, 75 bp, synthetic construct
  source 1..75: mol_type = other DNA
cggtcacgacaaagcggagcgggaagtgcgaattaatgagctgctgaccagcaccgggttagcaccgtttcgcga

SEQ ID NO: 71140 - DNA, 75 bp, synthetic construct
  source 1..75: mol_type = other DNA
tactgcaccagattattgatcgacggacagcgtcgatgcgtagcgtgggaatgctgacaaacctgaactatgagg

SEQ ID NO: 71141 - DNA, 75 bp, synthetic construct
  source 1..75: mol_type = other DNA
ccaggcacctatggcggcattatctttttgatttcaaaattctttactgcgtttaccgatatgggtaccggcatt

SEQ ID NO: 71142 - DNA, 75 bp, synthetic construct
  source 1..75: mol_type = other DNA
tggcgagcagaacgtcgttgcctggtatggtttccggtcagtgcgcatttaagctccgcactttctctccggtgg

SEQ ID NO: 71143 - DNA, 75 bp, synthetic construct
  source 1..75: mol_type = other DNA
gccaaaaaactgcttccgtatatcccgaataacgcggggatcctgctggtaccatgctgtcgtggtggttcggca

SEQ ID NO: 71144 - DNA, 75 bp, synthetic construct
  source 1..75: mol_type = other DNA
gaactggtgaaagaagcggtccagatatatgggggaatccgttctatcatcaatatctttgtgtcccagatggta

SEQ ID NO: 71145 - DNA, 75 bp, synthetic construct
  source 1..75: mol_type = other DNA
ctataaagcggtggatgggacagtcagtaaaggggtggaatttgaactcaacggcgcaattaccgacaactggca

SEQ ID NO: 71146 - DNA, 75 bp, synthetic construct
  source 1..75: mol_type = other DNA
aagatgcgctgaaagagtggcaaaaactggacaagactattcagcaacagtttgcgaaaaagctaaaaaagtgct

SEQ ID NO: 71147 - DNA, 75 bp, synthetic construct
  source 1..75: mol_type = other DNA
ttatgatcctgaaacaggtgattcaatgacttttgatagtagcaatagaattgatcgtcgttctcaacgtggtgc

SEQ ID NO: 71148 - DNA, 75 bp, synthetic construct
  source 1..75: mol_type = other DNA
gccctgcacgatgcgcgttaccaggcaaaatacgtttcagctatctggcaaaaactgttcccgaatcaggctgat

SEQ ID NO: 71149 - DNA, 75 bp, synthetic construct
  source 1..75: mol_type = other DNA
cgcagtaaccggcagaatcgcgccgaaggatgtcgctgccgactgggcaatggagcgcctgccggcccagtatca

SEQ ID NO: 71150 - DNA, 75 bp, synthetic construct
  source 1..75: mol_type = other DNA
gcgtctgaacggtgtggcagttgaagaactgtccagcaagttcaccgtagagccgtccgtgcagcagacattgga

SEQ ID NO: 71151 - DNA, 75 bp, synthetic construct
  source 1..75: mol_type = other DNA
cacggtattgatatctccagtcgggaagtgctcaaccactacactcccgaatatcagcaactgttccgccgtggc

SEQ ID NO: 71152 - DNA, 75 bp, synthetic construct
  source 1..75: mol_type = other DNA
acactctcagaaagacttaaagaagccagattagcgcgaggccttacacaaaaggcgcttggggatttggtcggg

SEQ ID NO: 71153 - DNA, 75 bp, synthetic construct
  source 1..75: mol_type = other DNA
atgcacgatcccatagtaatggaagcacgggcggagttaatttctgcacaatcccgtatagaacaggcaagctct

SEQ ID NO: 71154 - DNA, 75 bp, synthetic construct
  source 1..75: mol_type = other DNA
cgttaccagagtcttgctgctgcggaggcgacgggtggacttggttcgacagccacaagcaatcaactggctacg

SEQ ID NO: 71155 - DNA, 75 bp, synthetic construct
  source 1..75: mol_type = other DNA
cgatcgagaaagacgagatgaaccgggtgttcatttttgggaaagtcatcgggagcatgccgcagacctacagga

SEQ ID NO: 71156 - DNA, 75 bp, synthetic construct
  source 1..75: mol_type = other DNA
catcaattacggacgtgagcagatgattgagcagaatgaaccgttcgtttacgacaaacgcgttttgtggaagcg

SEQ ID NO: 71157 - DNA, 75 bp, synthetic construct
  source 1..75: mol_type = other DNA
gcggatgtcagccggagtgagtcggaagccgagtattaccgttataaagttgatgaggctggcgaggaaacaatt

SEQ ID NO: 71158 - DNA, 75 bp, synthetic construct
  source 1..75: mol_type = other DNA
gcgtgagcttgttaagcattctcctggcgatttcggttatcagcgttcccgctggagtaccgaacttctggcgat

SEQ ID NO: 71159 - DNA, 75 bp, synthetic construct
  source 1..75: mol_type = other DNA
ttaatgcttacctgtcccgcgtggcggagctgaacggcgtcgacaccgacgatgtggcaaagaaattcaccgtcg

SEQ ID NO: 71160 - DNA, 75 bp, synthetic construct
  source 1..75: mol_type = other DNA
atgtgttgcgtcctgatggtcgtcatcgcaccaaaaaaattcgctaacaccactaaagggcacgatgagctggtg

SEQ ID NO: 71161 - DNA, 75 bp, synthetic construct
  source 1..75: mol_type = other DNA
cttccggccttcaatctgcaataggcggggctgcctctggagcaattgctggagcacagcttggcagcattgttc

SEQ ID NO: 71162 - DNA, 75 bp, synthetic construct
  source 1..75: mol_type = other DNA
aaaagcgatgctcgatgaggcggatgtctttctgctgccgtcgattaccggcgcagatggcgatatggaaggcat

SEQ ID NO: 71163 - DNA, 75 bp, synthetic construct
  source 1..75: mol_type = other DNA
ttcttctaagtgcacaaattacggggatgacggtaactattaagactactgcttgtcataatggagggggattca

SEQ ID NO: 71164 - DNA, 75 bp, synthetic construct
  source 1..75: mol_type = other DNA
cgctatcagagtctggcggcagcggaagcaacaggtggattgggttccaccgcaaccagtaatcagttagcaaca

SEQ ID NO: 71165 - DNA, 75 bp, synthetic construct
  source 1..75: mol_type = other DNA
aatgcctgtctgcccgcgccgggaaaaaaccgcgcgccggcggcgctgaaaggggccgcgctgacgcgccgcccc

SEQ ID NO: 71166 - DNA, 75 bp, synthetic construct
  source 1..75: mol_type = other DNA
aggtcattctatgggcgggctgggcgcgctggtgctggcgttacgtaacccagatgaatatgtcagcgtctcggc

SEQ ID NO: 71167 - DNA, 75 bp, synthetic construct
  source 1..75: mol_type = other DNA
cgggattacgtggtgggcttgatgatgagcgtggcgcgctaactttaaagtatgtggagcttgcaaatgcaattg

SEQ ID NO: 71168 - DNA, 75 bp, synthetic construct
  source 1..75: mol_type = other DNA
ggacatggattcgctggatgattacgagcgtcactggcagacctggaaattcccggacgaaaccccggaatttgc

SEQ ID NO: 71169 - DNA, 75 bp, synthetic construct
  source 1..75: mol_type = other DNA
gccgggtatcttcagacccatactgatatgccaggcagtgatgacctgaagggcattaacgtgaaataccgttat

SEQ ID NO: 71170 - DNA, 75 bp, synthetic construct
  source 1..75: mol_type = other DNA
gtgtttctgctgccgtccgttactggcgccgatggcaacatggaaggcataccggtggcgctgatggaggcgatg

SEQ ID NO: 71171 - DNA, 75 bp, synthetic construct
  source 1..75: mol_type = other DNA
gggagtggcttacagccgtgtgtcgactttctccggggattatctccgcgtaactgacaacaaggggaaaacgca

SEQ ID NO: 71172 - DNA, 75 bp, synthetic construct
  source 1..75: mol_type = other DNA
ctgtatggtcatgttgctggcgctgcacgagctttcaatatttcccctctctactggaaaaaataccgtaaagga

SEQ ID NO: 71173 - DNA, 75 bp, synthetic construct
  source 1..75: mol_type = other DNA
tgaaattgcaccatcggccagactgacccggtcggaacgaatgcaaattacccgtatccgcgttgaccttgctca

SEQ ID NO: 71174 - DNA, 75 bp, synthetic construct
  source 1..75: mol_type = other DNA
ttaaccatgatgaacgagaggaacttgaacaactgcgtgttgaagtggcttatctaaaaaagttgcaggccttgc

SEQ ID NO: 71175 - DNA, 75 bp, synthetic construct
  source 1..75: mol_type = other DNA
cagatacgtgttgctttgcctggcatcgtccagtcattcgatcctgatgcggtgacagcggttgtgcagcctgcg

SEQ ID NO: 71176 - DNA, 75 bp, synthetic construct
  source 1..75: mol_type = other DNA
ttgtctgttactgatgttgttgttcctgctactgctactgctactgctactgctactgttcttctttttcctgct

SEQ ID NO: 71177 - DNA, 75 bp, synthetic construct
  source 1..75: mol_type = other DNA
tgtccgcagccatctgtctggccgtatccggtgcacctgcatgggcgtctgagcagcaggccacactgagcgcag

SEQ ID NO: 71178 - DNA, 75 bp, synthetic construct
  source 1..75: mol_type = other DNA
ctcccgtacagcccaccaatacgctgaacccgataaccaatcaagcgcagaccgaccgcgacaacgggcaggata

SEQ ID NO: 71179 - DNA, 75 bp, synthetic construct
  source 1..75: mol_type = other DNA
gctctccataaattccgctgcgtgccacatctgaccggaaggcgctttgatcacggggtgacggactgttacacg

SEQ ID NO: 71180 - DNA, 75 bp, synthetic construct
  source 1..75: mol_type = other DNA
gcgatttgcattacgcctcggtgctgcgcacccgcaagctgacggtggcgggtatcgaaccggtggtggtggccg

SEQ ID NO: 71181 - DNA, 75 bp, synthetic construct
  source 1..75: mol_type = other DNA
gccagccagaccttacgcggcattcatcgtaaaaatacctggcaggcgctcaacctcaaacgctatggtgccgag

SEQ ID NO: 71182 - DNA, 75 bp, synthetic construct
  source 1..75: mol_type = other DNA
atgcgctggcaacagcgggccaggcgggtgtagctaacctgctaaatctgatcgaaaaagagatgaaagtggcga

SEQ ID NO: 71183 - DNA, 75 bp, synthetic construct
  source 1..75: mol_type = other DNA
ccaatgtcgagcgtgtgctggtgaatagtcgtcaggccaatctgatattagagatgaccgaagaaggcagatatc

SEQ ID NO: 71184 - DNA, 75 bp, synthetic construct
  source 1..75: mol_type = other DNA
gttggcaaatacattcaacgacgaagaataactcgagctgcaatttacttacacttaacaaaccttcctatcgct

SEQ ID NO: 71185 - DNA, 75 bp, synthetic construct
  source 1..75: mol_type = other DNA
gcggctttatgcgtaacgcgctggagcgagcaaaagcagcgggttgttcgacgctggttttcaccgtggatatgc

SEQ ID NO: 71186 - DNA, 75 bp, synthetic construct
  source 1..75: mol_type = other DNA
cagcacggaaggggcaacagcgtggtgcgcagaatatgatgaatggggcaacctgctgaatgaagagaacccgca

SEQ ID NO: 71187 - DNA, 75 bp, synthetic construct
  source 1..75: mol_type = other DNA
gcaaccgggtgaaggttatctctatgaactgtgcgtcacagccaaaagccagacagagtgtgatatctacccgct

SEQ ID NO: 71188 - DNA, 75 bp, synthetic construct
  source 1..75: mol_type = other DNA
atggaacttaaaaaattgatggagcatatttctattatccccgattacagacaagcctggaaagtggaacataaa

SEQ ID NO: 71189 - DNA, 75 bp, synthetic construct
  source 1..75: mol_type = other DNA
gactccacatttggctgcgttggccccattggtccactgaaacacctctcaaaagaggctctggaagccgcagcc

SEQ ID NO: 71190 - DNA, 75 bp, synthetic construct
  source 1..75: mol_type = other DNA
ttacggacatgctgggtgttgtgacgtcattcagttatgccaatgccaaagatgagcaaaaaacgcattacagcg

SEQ ID NO: 71191 - DNA, 75 bp, synthetic construct
  source 1..75: mol_type = other DNA
cccgaccgaatcggtggccattgatgtcgcttatgaaggttccggcagtggcgactggcgcactgacggtttcat

SEQ ID NO: 71192 - DNA, 75 bp, synthetic construct
  source 1..75: mol_type = other DNA
tgcagatgataataacgctgaactcatcccatgcctgagtacagatcttcttgtcagtcttggtataaaaaaata

SEQ ID NO: 71193 - DNA, 75 bp, synthetic construct
  source 1..75: mol_type = other DNA
gacgttgccgaaaatgtaaaatggcagaaggttggtaataggttgaaaggagtaaacccaacaccgttctatata

SEQ ID NO: 71194 - DNA, 75 bp, synthetic construct
  source 1..75: mol_type = other DNA
atgatgctgaatgcccgcaaggttgaagctgcgaaaggaaaagagaagagctacaagctgtttgatggaggtggc

SEQ ID NO: 71195 - DNA, 75 bp, synthetic construct
  source 1..75: mol_type = other DNA
tcgcggcaaaatcgctactatcttccacggcattgatatctccagtcgggaagtgctcaaccactacactcccga

SEQ ID NO: 71196 - DNA, 75 bp, synthetic construct
  source 1..75: mol_type = other DNA
taacacgacacctttttataatgaaactaccggtggagacagtggttccggtttctatctgtatgataacgtaaa

SEQ ID NO: 71197 - DNA, 75 bp, synthetic construct
  source 1..75: mol_type = other DNA
aaaatcctcagcggcaactatgcgccaaccacgggttctgtagtgattaatgggcaggaaatgtccttttccgac

SEQ ID NO: 71198 - DNA, 75 bp, synthetic construct
  source 1..75: mol_type = other DNA
agtggcttgcgcagtgcgggctgacggtggagcggctggcggcacagatagagccggtttatttgcctgagcgaa

SEQ ID NO: 71199 - DNA, 75 bp, synthetic construct
  source 1..75: mol_type = other DNA
aatattatcggcggtggtttgttggttgggttgacatactgggtcatttatctgcgtgaaaacgatcaccattaa

SEQ ID NO: 71200 - DNA, 75 bp, synthetic construct
  source 1..75: mol_type = other DNA
gagcagtgaaagccgccagtggcttgcgcagtgcgggctgacggtggagcggctggcggcacagatagagccggt

SEQ ID NO: 71201 - DNA, 75 bp, synthetic construct
  source 1..75: mol_type = other DNA
tcaaatacgcggatgcgctggggcatccggccacgttgcttatcgggggcagcattcccgggtattcgtgtgagt

SEQ ID NO: 71202 - DNA, 75 bp, synthetic construct
  source 1..75: mol_type = other DNA
tatttgcctgttcattctgcgtttctgctgaaactgttaatttaaacaattcatctgttcgctcatttgttcagt

SEQ ID NO: 71203 - DNA, 75 bp, synthetic construct
  source 1..75: mol_type = other DNA
tcacggtaaagaatgacgaaacgttaattcgggataagcaaccagaatgtgtagctcgccttcgtttgattaaaa

SEQ ID NO: 71204 - DNA, 75 bp, synthetic construct
  source 1..75: mol_type = other DNA
ccggcgtgctgttactgagtgtggcatcactgcccctggcgtctgtatcactgaacaccgccagcattatcgcca

SEQ ID NO: 71205 - DNA, 75 bp, synthetic construct
  source 1..75: mol_type = other DNA
tgctactggctgaagtgcggctggggcggctgccggatccagacttctgtccgggtgtcgcattttattccgcag

SEQ ID NO: 71206 - DNA, 75 bp, synthetic construct
  source 1..75: mol_type = other DNA
atgaatccgccgttcagtcacgggcaggatatccggcatatcctgcgggctttttccctgttgcgtccggggggc

SEQ ID NO: 71207 - DNA, 75 bp, synthetic construct
  source 1..75: mol_type = other DNA
agggcaacgtcgtaagacggagcgagaagtcagcagaggccgtagtagtcaggactccgacgaagggccgaacga

SEQ ID NO: 71208 - DNA, 75 bp, synthetic construct
  source 1..75: mol_type = other DNA
tactggctgtactgctccgggttcagctgtaaggtcagaacatcggtgaaagtgacacattatattccggaagtg

SEQ ID NO: 71209 - DNA, 75 bp, synthetic construct
  source 1..75: mol_type = other DNA
ctatgctgcccgcgaggaaacacggcacgagcatcttgccgagttacgggggctctacggcttccgcaccttctc

SEQ ID NO: 71210 - DNA, 75 bp, synthetic construct
  source 1..75: mol_type = other DNA
accaccagcaatacagcggtggcggtaaacctcagagcaacgccaataacgaacctccaatggactttgacgacg

SEQ ID NO: 71211 - DNA, 75 bp, synthetic construct
  source 1..75: mol_type = other DNA
tttatcagggcgttgttagtgggttccagtattactggtcaggttctgttagttccgctttcgtggaggcaatga

SEQ ID NO: 71212 - DNA, 75 bp, synthetic construct
  source 1..75: mol_type = other DNA
cttttttaaaggtatcgatgccttaccgcttaccgggcaatacactcactatgcgctgaataaaaaaaccggcaa

SEQ ID NO: 71213 - DNA, 75 bp, synthetic construct
  source 1..75: mol_type = other DNA
gtgaacacggcagcggaggccatccgtgccctgtcgctgcaggtgccgggattccgcggtcagatgaacgaaggc

SEQ ID NO: 71214 - DNA, 75 bp, synthetic construct
  source 1..75: mol_type = other DNA
agggattatcgcagcgcggatgattcgccgatcacctggaccttctccggcggagaacagacagatccccgcgca

SEQ ID NO: 71215 - DNA, 75 bp, synthetic construct
  source 1..75: mol_type = other DNA
aggatatcaattcgctgacctctcaccttcacgagaaagattttttgttaacgtgggaacagacgccagatgaac

SEQ ID NO: 71216 - DNA, 75 bp, synthetic construct
  source 1..75: mol_type = other DNA
gcagacagatgatgacaaggcggcggccgtggttgcccagcgggtggctgacatcatcagccggaccggtgagcc

SEQ ID NO: 71217 - DNA, 75 bp, synthetic construct
  source 1..75: mol_type = other DNA
aacgtttgttaatgcctgccaggaacatgatgacaacagcttaaaattatttgcttcgctgttaatttcactttc

SEQ ID NO: 71218 - DNA, 75 bp, synthetic construct
  source 1..75: mol_type = other DNA
gcatgaatgggtgcagggtgtgtatacggggcgaaaggttgaagcccggataacagatgttactgacctgtcaga

SEQ ID NO: 71219 - DNA, 75 bp, synthetic construct
  source 1..75: mol_type = other DNA
ccgggattccgccgtcagatgaacgaaggctggtaccagatacgtattcgcggtgaggacacggcaccggaggcg

SEQ ID NO: 71220 - DNA, 75 bp, synthetic construct
  source 1..75: mol_type = other DNA
tgggcgcggcgatggtgattgttgccgcctggtgcgtggaagattatcaggtgattcgtctggcaggttcactca

SEQ ID NO: 71221 - DNA, 75 bp, synthetic construct
  source 1..75: mol_type = other DNA
atgaatatcgcaattgtgacaataaatcaggagaatgccgcaatagcgagctggctggcagaacaggatttcagc

SEQ ID NO: 71222 - DNA, 75 bp, synthetic construct
  source 1..75: mol_type = other DNA
cgcatcccgacgataacaacgaccgcccctggtgggggctaccctgcaccgtgacgccctgttttggggcacgtc

SEQ ID NO: 71223 - DNA, 75 bp, synthetic construct
  source 1..75: mol_type = other DNA
cgcatcccgacaacaacaacgaccgcccctggtgggggctgccctgcaccgtgacgccctgtttcggggcacgtc

SEQ ID NO: 71224 - DNA, 75 bp, synthetic construct
  source 1..75: mol_type = other DNA
gcatcagcaaacagtcaaaaagctgcaaaaaccagtgaaaccaatgcaaagacaagcgagactgcagcggcgaac

SEQ ID NO: 71225 - DNA, 75 bp, synthetic construct
  source 1..75: mol_type = other DNA
tctgcgtaaacagtcactggcgaccaacagtgacaccatgagcgtctcacttattctggaagatggcacaaccta

SEQ ID NO: 71226 - DNA, 75 bp, synthetic construct
  source 1..75: mol_type = other DNA
tcgtatgcgtttgaggattatgcccggagcgcggcgagcaaaaaacagtgcccatgctgtcacggaaaaaaattt

SEQ ID NO: 71227 - DNA, 75 bp, synthetic construct
  source 1..75: mol_type = other DNA
tacctgagcactatcaacatggcgaaagaactggcgatggtcgagcgcaccgaacaggggcgcgccgttcgtcag

SEQ ID NO: 71228 - DNA, 75 bp, synthetic construct
  source 1..75: mol_type = other DNA
atgctctatagcaatatattggcgcacgcccggcgatgtgcgccagcggagtcgtgcggcttcgtggtaagcacg

SEQ ID NO: 71229 - DNA, 75 bp, synthetic construct
  source 1..75: mol_type = other DNA
cagcaacgatggcctttcagttactcgcaccgccgataaagattctgcaaaaacttttgttcaggagacgctgaa

SEQ ID NO: 71230 - DNA, 75 bp, synthetic construct
  source 1..75: mol_type = other DNA
tgctgaccggaagtgatgacggtcgccacagcaacacgtctctggcgtggggggctggcgtgcagtttaacccga

SEQ ID NO: 71231 - DNA, 75 bp, synthetic construct
  source 1..75: mol_type = other DNA
cccctggtgggggctaccctgcaccgtgacgccctgtttcggcgcccgtctggtgcaggagggtaaccggttgca

SEQ ID NO: 71232 - DNA, 75 bp, synthetic construct
  source 1..75: mol_type = other DNA
ataaaggccgcctgaccggcgaacgccagacggtggagaacccggagacgggggaactgctgtggcaccatgaga

SEQ ID NO: 71233 - DNA, 75 bp, synthetic construct
  source 1..75: mol_type = other DNA
tctttgggctggcgaatcctgacgacgtgcggaatatctgtgatgccaaaggaaatagttttgtcgatgcgatga

SEQ ID NO: 71234 - DNA, 75 bp, synthetic construct
  source 1..75: mol_type = other DNA
atgatgtacagcaaatacgatgaggcgcagttccacttgaggcttacacacgagttgcacgctaagattaagcag

SEQ ID NO: 71235 - DNA, 75 bp, synthetic construct
  source 1..75: mol_type = other DNA
tgacgatatgttaattattgcggttgttgctgtagggaaacgagaacgttgtaacgtttataatcttgccagtga

SEQ ID NO: 71236 - DNA, 75 bp, synthetic construct
  source 1..75: mol_type = other DNA
aaaactggaaagtcggtccgggtaaaattgatatcgcgctggttcgtgaagatgtcgatgattacgatcgcagcc

SEQ ID NO: 71237 - DNA, 75 bp, synthetic construct
  source 1..75: mol_type = other DNA
gctgagcgagtcgcggatgagcaatctgacgttgttaagaagatggtctttgaaacgctgaaaaatatttatagc

SEQ ID NO: 71238 - DNA, 75 bp, synthetic construct
  source 1..75: mol_type = other DNA
tggactgcagattgtgctgggggcggcagccatcgtgggctctttcttcactgccggggcatcaatggcgttatg

SEQ ID NO: 71239 - DNA, 75 bp, synthetic construct
  source 1..75: mol_type = other DNA
gcacggggtgacggactgttacacgctgttccgggacgcttaccatctggcgggaattgagatgccggattttca

SEQ ID NO: 71240 - DNA, 75 bp, synthetic construct
  source 1..75: mol_type = other DNA
acgcttcttgagcctgtaataatggaactacaagaaatagaccaattgcacgacagatataacgaacagcacacc

SEQ ID NO: 71241 - DNA, 75 bp, synthetic construct
  source 1..75: mol_type = other DNA
gagggagcggtcatccacattgtgccgcgactggccggagccgggggaaatggtgtttttcaggtggtgctgggg

SEQ ID NO: 71242 - DNA, 75 bp, synthetic construct
  source 1..75: mol_type = other DNA
gtggttgtgggctgtattatgagatatacgaaagcaggcttatcggtcttttgcgcgatcatcttttagaactta

SEQ ID NO: 71243 - DNA, 75 bp, synthetic construct
  source 1..75: mol_type = other DNA
ttatcgatccgcgatataccgatacggctgctggtcgtgaagatgaatggcttcctattcgcccgggcaccgatg

SEQ ID NO: 71244 - DNA, 75 bp, synthetic construct
  source 1..75: mol_type = other DNA
cggtaccacgcgccgtgtaacgttcacagcaacggtagaaaccctctacgggacaaccacagtaacctcggaggc

SEQ ID NO: 71245 - DNA, 75 bp, synthetic construct
  source 1..75: mol_type = other DNA
atatccactggtacaacgagcgccgcatcaaagtgtcgcttggcgggcgtagtcccatcgagtatcgtcatgcgg

SEQ ID NO: 71246 - DNA, 75 bp, synthetic construct
  source 1..75: mol_type = other DNA
cagcgaagaccagcgaaacaaatgccaaagccagcgaaactgcggcgaaaagcagtcaggatgcagcagccgaaa

SEQ ID NO: 71247 - DNA, 75 bp, synthetic construct
  source 1..75: mol_type = other DNA
aagagcgtctctcttcgcgtcagtgtgcggcattcgtttcgggcgtggtgaaagatgccttcatcctgtggctga

SEQ ID NO: 71248 - DNA, 75 bp, synthetic construct
  source 1..75: mol_type = other DNA
tgcttttgcggtggtctcctttcatctgaaccagtcactctcttcgcttttttccctcgatctctctctggtcag

SEQ ID NO: 71249 - DNA, 75 bp, synthetic construct
  source 1..75: mol_type = other DNA
tatttttatccctgtcaggctgtaatgatgctttggcttcgcagagtacaatgttttactcatttaatgataaca

SEQ ID NO: 71250 - DNA, 75 bp, synthetic construct
  source 1..75: mol_type = other DNA
ctctcgcgctgttgggcatgaatgcaggtgcttatgccgccgatgtaagcattgatattttaagtgcgacagtga

SEQ ID NO: 71251 - DNA, 75 bp, synthetic construct
  source 1..75: mol_type = other DNA
aaaccgggctgagatgggattttctgcgttcctggggaaaatgggcattagtatgaatgacagggcgcgggcaac

SEQ ID NO: 71252 - DNA, 75 bp, synthetic construct
  source 1..75: mol_type = other DNA
gtgccggatggcggcggaggaaggcatcttcttttatgaggagcacgcgcaaaaaagtaccgaccagagcctggt

SEQ ID NO: 71253 - DNA, 75 bp, synthetic construct
  source 1..75: mol_type = other DNA
gtatttttcgtcactggataacatgattgcccaggggaacccgatgccggtgccttatggtgaaatgctggttgg

SEQ ID NO: 71254 - DNA, 75 bp, synthetic construct
  source 1..75: mol_type = other DNA
cactgggggccagcatgatactgggcggtgtggcccagatgctggcaccgaaggcaaaaacaccggattaccgcg

SEQ ID NO: 71255 - DNA, 75 bp, synthetic construct
  source 1..75: mol_type = other DNA
ctcccgccgtatatcccaggacatcagtacccgtgatgaaggcggtgacgggaaggtggtggttatcgggcggca

SEQ ID NO: 71256 - DNA, 75 bp, synthetic construct
  source 1..75: mol_type = other DNA
ttgattcagtaatcagtaattccggtaaagcaggtttatcacatgtaattattgcagcagtacatgaattaaaag

SEQ ID NO: 71257 - DNA, 75 bp, synthetic construct
  source 1..75: mol_type = other DNA
atggtgtacacgtacatttagatgctaatgattctagaggcttgttaaatctgaaatatctatgttctctcttag

SEQ ID NO: 71258 - DNA, 75 bp, synthetic construct
  source 1..75: mol_type = other DNA
ccatcgctgatggtgcagaaaggtattgccggaacctattgcaaaacgccattcgctgattcctatgcgttcatc

SEQ ID NO: 71259 - DNA, 75 bp, synthetic construct
  source 1..75: mol_type = other DNA
gatggaacatttccaaaacaaaaacgcttgggaaggcaatccgttggctggctggagtcagaactgaatgaatgg

SEQ ID NO: 71260 - DNA, 75 bp, synthetic construct
  source 1..75: mol_type = other DNA
atgaaagggaaatctgcattaactcttctgctcgctggtatattttcgtgcggcacatgccaggcgacaggggca

SEQ ID NO: 71261 - DNA, 75 bp, synthetic construct
  source 1..75: mol_type = other DNA
attcatggtttatcactgaccttgaagacgaatcacatcctgaccgttacagcgcacaatatcgtgccgagtctc

SEQ ID NO: 71262 - DNA, 75 bp, synthetic construct
  source 1..75: mol_type = other DNA
aaaacagggaggtgattatttattcgctgtaaaaggaaaccaggggcggctaaataaagcctttgaggaaaaatt

SEQ ID NO: 71263 - DNA, 75 bp, synthetic construct
  source 1..75: mol_type = other DNA
gagattcataaattccgctgtgtgccgcatcttaccgggcggcgctttgagcacggggtgacggactgttacacg

SEQ ID NO: 71264 - DNA, 75 bp, synthetic construct
  source 1..75: mol_type = other DNA
aagaggagccgcgcgaaaccgttttcaggcaaaacaccttaaccggggcggtgctgcggggtatatcgcgaaata

SEQ ID NO: 71265 - DNA, 75 bp, synthetic construct
  source 1..75: mol_type = other DNA
atgcctgatgcgacgcttatcgcgtcttatcaggccttgtattatccctccagtgcagagaaaatcggccagttt

SEQ ID NO: 71266 - DNA, 75 bp, synthetic construct
  source 1..75: mol_type = other DNA
tgattaaagatggttattccgttgatattaaagatgcctgtcgtgttgttattagaaaaggccgttatttacaga

SEQ ID NO: 71267 - DNA, 75 bp, synthetic construct
  source 1..75: mol_type = other DNA
gaccgcgccggtatcagagggcagttcagcgacgcggatgcataccatctggaccaggcttttccactgctgatg

SEQ ID NO: 71268 - DNA, 75 bp, synthetic construct
  source 1..75: mol_type = other DNA
attaacgtgaaataccgttatgagtttacggacacactggggatggtgacgtcattcagctatgcaggagacagg

SEQ ID NO: 71269 - DNA, 75 bp, synthetic construct
  source 1..75: mol_type = other DNA
ccgggcgagcgtgatatttcattgtttgcaaatctggggaaggcctcattatacgatgcgggatactggtcttta

SEQ ID NO: 71270 - DNA, 75 bp, synthetic construct
  source 1..75: mol_type = other DNA
tctcactgggtgccagcatgatactgggtggtgtggcccagatgctggccccgaaggcaaagacgccggagtaca

SEQ ID NO: 71271 - DNA, 75 bp, synthetic construct
  source 1..75: mol_type = other DNA
aacgaacttattacgatagatcgtaactcttctttggcggatttagagcagggacttaagcaggcagatttcatt

SEQ ID NO: 71272 - DNA, 75 bp, synthetic construct
  source 1..75: mol_type = other DNA
ggtaaaaatgcccgctccctcatcctctggacagaacgcggcgcagcccgtcacgcaaaaatgctcgaaaccgat

SEQ ID NO: 71273 - DNA, 75 bp, synthetic construct
  source 1..75: mol_type = other DNA
tggtaccagatacgtattgccggtgatgacacggcaccggaggcggtgtacgcccgtcttcacgaacagctgggt

SEQ ID NO: 71274 - DNA, 75 bp, synthetic construct
  source 1..75: mol_type = other DNA
cgaccataaattatggcgggaaaaaattcacgtatccggtcattgatgagtggccgggattctcaacagtaatgg

SEQ ID NO: 71275 - DNA, 75 bp, synthetic construct
  source 1..75: mol_type = other DNA
caaccgtaaattatgacgggaaaaaattcacgtatatggttactaatgagtggttcggatttcaagatgaagtgt

SEQ ID NO: 71276 - DNA, 75 bp, synthetic construct
  source 1..75: mol_type = other DNA
tgcaaagccgataccctcagcagttgtggttacgtttatctggctgtttatccgacgcccaaaatgaaaaattaa

SEQ ID NO: 71277 - DNA, 75 bp, synthetic construct
  source 1..75: mol_type = other DNA
cgaaatggatttttacactctcgcggaggagatgccggacagtgacgatttattggatgccgatgatgacgcgcc

SEQ ID NO: 71278 - DNA, 75 bp, synthetic construct
  source 1..75: mol_type = other DNA
acgggtacggtggtcgctacaacaaaaatccggtgaccgtacagggccgggataactggctggtacgtctggacc

SEQ ID NO: 71279 - DNA, 75 bp, synthetic construct
  source 1..75: mol_type = other DNA
aaagtgctgccgcgcatgacggcaccgatgctgaccgagcaggaagtcgccgcgctggaactgcctgaccttgtg

SEQ ID NO: 71280 - DNA, 75 bp, synthetic construct
  source 1..75: mol_type = other DNA
ttatctgactctgggcggaagcctgcgggtaactggtgatatcacctgtaatgatgaatccagcgatggctttac

SEQ ID NO: 71281 - DNA, 75 bp, synthetic construct
  source 1..75: mol_type = other DNA
gcactacacgcggacacaatatgaagagccgctggtcgaaagtcgctatctttacgacccgctgggccgcagggt

SEQ ID NO: 71282 - DNA, 75 bp, synthetic construct
  source 1..75: mol_type = other DNA
gagaaagacgagatgaaccgggtattcattttcgggaaagtcatcgggagcatgccgcagacgtacaggaagcat

SEQ ID NO: 71283 - DNA, 75 bp, synthetic construct
  source 1..75: mol_type = other DNA
tggtgcaggagggtaaccggttgcattaccttgcagaccgcgccggtatcagaggccggttcagcaatgcggatg

SEQ ID NO: 71284 - DNA, 75 bp, synthetic construct
  source 1..75: mol_type = other DNA
cttcatttacgaaggcaatcagataacgtgcggcgataagctggagtccgtgaccgggaaattgcagttcgatat

SEQ ID NO: 71285 - DNA, 75 bp, synthetic construct
  source 1..75: mol_type = other DNA
gaaaatcaggactatatgattgcttcccaaattcgggaagcaaaaggtagaggcggtcacaaccgcaaggaatac

SEQ ID NO: 71286 - DNA, 75 bp, synthetic construct
  source 1..75: mol_type = other DNA
gatgtgctgctgtgctgctttggttcatcggtgccgaatcatgccgccatttactgtggtgacggcgagctgctg

SEQ ID NO: 71287 - DNA, 75 bp, synthetic construct
  source 1..75: mol_type = other DNA
ctgccacatatatcaataaatcaggcgtatttagtgttgctaaaattgatgagccacgatttgaaaaagaaggtt

SEQ ID NO: 71288 - DNA, 75 bp, synthetic construct
  source 1..75: mol_type = other DNA
tgtggcaggaagggatgctgatgcgtccacaccatttccagcagcagcagcgttacaacgactacctggataacc

SEQ ID NO: 71289 - DNA, 75 bp, synthetic construct
  source 1..75: mol_type = other DNA
agaggtattccgaaaaatggcaacgacgaacgcattcagtctggcgtcaccgccactggcacgcatctgccttca

SEQ ID NO: 71290 - DNA, 75 bp, synthetic construct
  source 1..75: mol_type = other DNA
ccggaagactggctgcaggcagagatgcagggggagattgtggcgctggttcacagccaccctggtggtctgccc

SEQ ID NO: 71291 - DNA, 75 bp, synthetic construct
  source 1..75: mol_type = other DNA
gttccttcaaagccgtcagggagaagctggatacccgtcgcggctctcattccgagctggagacagcggtgaaag

SEQ ID NO: 71292 - DNA, 75 bp, synthetic construct
  source 1..75: mol_type = other DNA
gttcgtggatgaacgcgtgattgagcagcatattgaggcaggcatttcactgtgtgatgcggtgaactttctcgt

SEQ ID NO: 71293 - DNA, 75 bp, synthetic construct
  source 1..75: mol_type = other DNA
attcacgcggcctcggcaaaagatgccatcattcagatggtgacaaaatgttatcagaacagagaatgtcagaat

SEQ ID NO: 71294 - DNA, 75 bp, synthetic construct
  source 1..75: mol_type = other DNA
agcgcgctgtcaggctgaatatggcaacagatgaggagcgcagccgactggaggcatgggaacgctacagcgttc

SEQ ID NO: 71295 - DNA, 75 bp, synthetic construct
  source 1..75: mol_type = other DNA
gattgccggtgatgataaccaactggcgtttgcacctttatcacgccttgatacccctactcgccgcacatgggc

SEQ ID NO: 71296 - DNA, 75 bp, synthetic construct
  source 1..75: mol_type = other DNA
gacccgcaatggtcaggagatttttaatcagtccacgacggatgctcagggcgtattttcctcagttatagatat

SEQ ID NO: 71297 - DNA, 75 bp, synthetic construct
  source 1..75: mol_type = other DNA
ccgtgctgtatggcaaatacaccatggaaggggatcagtttgatactgtcgaggtggattttggacgctctgaag

SEQ ID NO: 71298 - DNA, 75 bp, synthetic construct
  source 1..75: mol_type = other DNA
accagtgtcattgtcctgatgaatgaggaccgccagaaggtcgaggatgccgcagagtttatgcgcaaggctgtt

SEQ ID NO: 71299 - DNA, 75 bp, synthetic construct
  source 1..75: mol_type = other DNA
cgcctggaagcactgactggttatctttatgagatacagtactctgccgacggctggcaaatgtcggttggttta

SEQ ID NO: 71300 - DNA, 75 bp, synthetic construct
  source 1..75: mol_type = other DNA
cccgggggccgaagggagataaaggcgagacaggtccggcaggtccacagggtccaaaaggggataagggagata

SEQ ID NO: 71301 - DNA, 75 bp, synthetic construct
  source 1..75: mol_type = other DNA
gcagcctatgtttctcctgttgttgagggcagggttctgcgtcaccgtggcggtgaaacccgcgtactgcgtccg

SEQ ID NO: 71302 - DNA, 75 bp, synthetic construct
  source 1..75: mol_type = other DNA
cagcacgacgcagaagggcgtggttcagttaagcagcgagacggcgagtgatgatgaaacaaaggccgcgacccc

SEQ ID NO: 71303 - DNA, 75 bp, synthetic construct
  source 1..75: mol_type = other DNA
ttaaagacggcacaggaaaaccggtaccgggatgcacgatagagctgaaagcacgtcgcaccacagagacggtga

SEQ ID NO: 71304 - DNA, 75 bp, synthetic construct
  source 1..75: mol_type = other DNA
atgaataactcaattaatacccctcgccttacgtccgcacttcaattaatcgagcaagcagcggctgtcctggtt

SEQ ID NO: 71305 - DNA, 75 bp, synthetic construct
  source 1..75: mol_type = other DNA
agtgatggtctgtgggggagacgtcttctgcctcgatggcgaatgcgataaggctcagagcgggaagagtaatga

SEQ ID NO: 71306 - DNA, 75 bp, synthetic construct
  source 1..75: mol_type = other DNA
atcaaaacaatgaacgagccatccactcaataatgatgagtaataagggcgatgatttgcgctctgtgttctatg

SEQ ID NO: 71307 - DNA, 75 bp, synthetic construct
  source 1..75: mol_type = other DNA
catactgtcggtattggtgctcatacgcactcggttgcgattggctcacatggacacaccatcaccgttaacgct

SEQ ID NO: 71308 - DNA, 75 bp, synthetic construct
  source 1..75: mol_type = other DNA
cgaagcagatcaccctgaatatggctctggcggtcgattctatttcgttcgatgcggtacgtgtcgcgctcaatc

SEQ ID NO: 71309 - DNA, 75 bp, synthetic construct
  source 1..75: mol_type = other DNA
ccaaaaattaacggtgttaagtttgatggctcggcggatattaacctcacgtcggaaaatattggtgcatttgcc

SEQ ID NO: 71310 - DNA, 75 bp, synthetic construct
  source 1..75: mol_type = other DNA
aacccggcgctctacccgcaggtcaaaatggtctgccagatggaactgaccagccatctgctgacggctgcagcc

SEQ ID NO: 71311 - DNA, 75 bp, synthetic construct
  source 1..75: mol_type = other DNA
gttgccgccagaatggcggatgttcctcttgcaccaggcagtaatgaaaagaaaaaactgtatctcctgacggat

SEQ ID NO: 71312 - DNA, 75 bp, synthetic construct
  source 1..75: mol_type = other DNA
tggtaatggtattcgttggccaggaggcggcggttctgcgttagcattttatgatggcggtgggttcacttatgt

SEQ ID NO: 71313 - DNA, 75 bp, synthetic construct
  source 1..75: mol_type = other DNA
cgggaaaaagcgcagcggcgcagcctggcagagacgctccagcaggaagggagtgagaacggccacggcgtggtg

SEQ ID NO: 71314 - DNA, 75 bp, synthetic construct
  source 1..75: mol_type = other DNA
ggactgaaggggggatggaacctgtatggatatcaattgaatccgatatcagacatcgaccccctgggtttatct

SEQ ID NO: 71315 - DNA, 75 bp, synthetic construct
  source 1..75: mol_type = other DNA
ttgttgccataaccaaagatgcctcaacgcttaatcccgaaggctttagtgtcgttgagattccagatataacag

SEQ ID NO: 71316 - DNA, 75 bp, synthetic construct
  source 1..75: mol_type = other DNA
tcatgggaacgctacagcgttctggtcagccgcgtggatacggcaaagccagaatggccacaaaaaccagagtaa

SEQ ID NO: 71317 - DNA, 75 bp, synthetic construct
  source 1..75: mol_type = other DNA
cgctctacccgcaggtcaaaatggtctgccagatggaactgaccagccatctgctgacggctgcagccttcggca

SEQ ID NO: 71318 - DNA, 75 bp, synthetic construct
  source 1..75: mol_type = other DNA
ctttcagcgcgttttaacacggcactggaagccagcctgcaggcatggcagcagaaacaccacgcggtcattctg

SEQ ID NO: 71319 - DNA, 75 bp, synthetic construct
  source 1..75: mol_type = other DNA
agcgcgctgtcaggctgaatatggcaacagatgaggaacgcagccgactggaagcatgggaacgctacagcgttc

SEQ ID NO: 71320 - DNA, 75 bp, synthetic construct
  source 1..75: mol_type = other DNA
tcccgtcaccatctggcagacactgctcacccgactgctggaccagcactatggcctcacgctgaatgacacacc

SEQ ID NO: 71321 - DNA, 75 bp, synthetic construct
  source 1..75: mol_type = other DNA
aaacagcgcagctctggcataacgccacgccgcatccgcactggtgcggcctgaccctgctggccatcgatggtg

SEQ ID NO: 71322 - DNA, 75 bp, synthetic construct
  source 1..75: mol_type = other DNA
cggcgaagccacgacccaactgccgtttgtagtggcgctgtttactgctatcaaaaacgatccgcaactgcgcca

SEQ ID NO: 71323 - DNA, 75 bp, synthetic construct
  source 1..75: mol_type = other DNA
gacttggcgatgttccggtacgcctgaacgcgtttcatgcccacggcgtgtatggcgaggcgcaaagctgggcga

SEQ ID NO: 71324 - DNA, 75 bp, synthetic construct
  source 1..75: mol_type = other DNA
cgacagcgtgatttttgccaccgatacagatgtagtgctgaaggccggtttgcaactggtcaatgcccctgccac

SEQ ID NO: 71325 - DNA, 75 bp, synthetic construct
  source 1..75: mol_type = other DNA
actgagggtggtggcagaaaacgaatgggcaaactgtacggcgatcactcttaacatgaccggggtgtccgatgg

SEQ ID NO: 71326 - DNA, 75 bp, synthetic construct
  source 1..75: mol_type = other DNA
cagcatattgaggcaggcatttcactctgtgatgcagtgaactttctcgttgaaaaatacgccctggtgcgtacc

SEQ ID NO: 71327 - DNA, 75 bp, synthetic construct
  source 1..75: mol_type = other DNA
cgggtgacggaagagcgtgactggggcggcgtggtctggcgttaccgctatgacgccgatggcctctgtaccgcc

SEQ ID NO: 71328 - DNA, 75 bp, synthetic construct
  source 1..75: mol_type = other DNA
tttttaatggtggagtatttgaagttttaaatagtactaatatatatgtaggttcagatactcctggtgggggag

SEQ ID NO: 71329 - DNA, 75 bp, synthetic construct
  source 1..75: mol_type = other DNA
ggcctcgatccgcgcttaaaagattgcgtcattcgcgtcgcttgtgatgtcaccaatccgctggtgggcgataac

SEQ ID NO: 71330 - DNA, 75 bp, synthetic construct
  source 1..75: mol_type = other DNA
tgggtggattggtacagcgaatgccaatgttacgacgacccacgtaaatatctcgaaagcctgaaagaagaaaca

SEQ ID NO: 71331 - DNA, 75 bp, synthetic construct
  source 1..75: mol_type = other DNA
ccgctgaacgtgcgcaccagacagaaattatttgccgccttcttgaggtataccctgataaattaaatgatggtg

SEQ ID NO: 71332 - DNA, 75 bp, synthetic construct
  source 1..75: mol_type = other DNA
ttttctgaagtggatgatattttttattattataacacaggagataatctgggaggggctggagggttttatcag

SEQ ID NO: 71333 - DNA, 75 bp, synthetic construct
  source 1..75: mol_type = other DNA
ccgcgctattaattagtgcatgttctcacacccccaatcctgtgcagaaaaaagggggatggtttgagttaaaca

SEQ ID NO: 71334 - DNA, 75 bp, synthetic construct
  source 1..75: mol_type = other DNA
tataaagaaactgagagtgaaagccatcgagttataattgacaacattttgaaattaaagcagctgacgagaatt

SEQ ID NO: 71335 - DNA, 75 bp, synthetic construct
  source 1..75: mol_type = other DNA
tatcccgtctgaaaaacgaaaatcctcgctttatgtccttgttcgataaacacaataaacttgatcatgaaattg

SEQ ID NO: 71336 - DNA, 75 bp, synthetic construct
  source 1..75: mol_type = other DNA
tttttacgcactgcggttaatgatttcatggatagcgtccaccatatttggtgtccactattctctcaggaattt

SEQ ID NO: 71337 - DNA, 75 bp, synthetic construct
  source 1..75: mol_type = other DNA
ccggtgttatcgtgggctggcgggtctcatccacgatggaaacgtcgttcgtgctggatgcactggagcaggcgc

SEQ ID NO: 71338 - DNA, 75 bp, synthetic construct
  source 1..75: mol_type = other DNA
acggctatcgcccggaaacagagcggttccggtgggacagccgggaccagctgaccgggtattgcagcgcacagg

SEQ ID NO: 71339 - DNA, 75 bp, synthetic construct
  source 1..75: mol_type = other DNA
cggcaatgtatgtgctggagaaagaaggtatcaccaccgccttcggtgttccgggagctgcaatcaatccgttct

SEQ ID NO: 71340 - DNA, 75 bp, synthetic construct
  source 1..75: mol_type = other DNA
gcaggttatcgcagacagtgtaatcagtgcgcgaacggcgcgactgggcggcaaaaaaggtcaacagggccaggc

SEQ ID NO: 71341 - DNA, 75 bp, synthetic construct
  source 1..75: mol_type = other DNA
taaagttacggtaactgtagccttacaggacaaagaacgctttgacggtgaaatttttgacctggatgtcgccat

SEQ ID NO: 71342 - DNA, 75 bp, synthetic construct
  source 1..75: mol_type = other DNA
gcctgcgtcgtcaggggctgcgggcgaaagccagccggaagttcagcccggtcagctaccgtgcacatggcctgc

SEQ ID NO: 71343 - DNA, 75 bp, synthetic construct
  source 1..75: mol_type = other DNA
agtttcgtacgtttgctcgaggttttgataatgtccgccagggtgatgaactggatgtcccggcacaagttagtg

SEQ ID NO: 71344 - DNA, 75 bp, synthetic construct
  source 1..75: mol_type = other DNA
tctgcagtagtgctctgtcattatcgcaaaaagatcaagaagcaaaattattttcagaattattggacagtgaac

SEQ ID NO: 71345 - DNA, 75 bp, synthetic construct
  source 1..75: mol_type = other DNA
cagacgtactgatttttgaaccgaaagtatttggtgatgaacgtggattcttttttgaaagttttaaccaaaaga

SEQ ID NO: 71346 - DNA, 75 bp, synthetic construct
  source 1..75: mol_type = other DNA
cagatagccagtacttcacagcaaatcgggtctctgctcgccgaggatatgaacagcgagcaagcggcaaatatg

SEQ ID NO: 71347 - DNA, 75 bp, synthetic construct
  source 1..75: mol_type = other DNA
agctatcagaccggatggattaagtgttgttgaagtggcggatattactgctaaccgacgggcggacatttcagg

SEQ ID NO: 71348 - DNA, 75 bp, synthetic construct
  source 1..75: mol_type = other DNA
tcggaaagccagacttcttgcagatgctgaatccgtgattttgccgctggagcgcgcggtcagactgaacatggc

SEQ ID NO: 71349 - DNA, 75 bp, synthetic construct
  source 1..75: mol_type = other DNA
cagacgtgttaattttcaagccgaaagtttttgctgacgagcgcggtttcttttttgagagttttaaccagaagg

SEQ ID NO: 71350 - DNA, 75 bp, synthetic construct
  source 1..75: mol_type = other DNA
ctggttgtgtaatcattgagccaaaagtctttggtgactctcgtggtttctttttggaagcatggcatcagaaga

SEQ ID NO: 71351 - DNA, 75 bp, synthetic construct
  source 1..75: mol_type = other DNA
tgcgcaagcggcgcgcaccatcgtccgtgatagtggtgatggcaaagtacagacgctgggcgcggtagagcatag

SEQ ID NO: 71352 - DNA, 75 bp, synthetic construct
  source 1..75: mol_type = other DNA
gtatttgatctcaaccaactgggggcgttagataccgccggtgcaacgttgttagctctgcttctgggtgaggac

SEQ ID NO: 71353 - DNA, 75 bp, synthetic construct
  source 1..75: mol_type = other DNA
ttaacgagaactgtcgggttctgggaaaactgtccgcgaaccagattgaaggcgatctcgttaaaacagtgggca

SEQ ID NO: 71354 - DNA, 75 bp, synthetic construct
  source 1..75: mol_type = other DNA
tctatctcatcatgttttattattttttgaagtcagttttttcttttgattataagttcgcaaaagtggttattt

SEQ ID NO: 71355 - DNA, 75 bp, synthetic construct
  source 1..75: mol_type = other DNA
ccgcagataacggcacctgtcagaaatatgtcgataatccggcctgtacgctggcctcacgtcagtgcgcgtttt

SEQ ID NO: 71356 - DNA, 75 bp, synthetic construct
  source 1..75: mol_type = other DNA
gggacgctcaacaacgtcacgattaacgagaactgccgggttctgggaaaactgtccgcgaaccagattgaaggc

SEQ ID NO: 71357 - DNA, 75 bp, synthetic construct
  source 1..75: mol_type = other DNA
ccagatctaaaaatcgattggcctctatataatgagcctattgtatcagagaaagattctaagcaaccatttctc

SEQ ID NO: 71358 - DNA, 75 bp, synthetic construct
  source 1..75: mol_type = other DNA
ctgatgtgttaattttcgagccgaaagtttttggtgatgagcgtggtttctttatggaaagctttaatcagaaag

SEQ ID NO: 71359 - DNA, 75 bp, synthetic construct
  source 1..75: mol_type = other DNA
tccgggaataccgcgatgatgaactgtacagcgtacggcacctggtgtttaacggctttgagctgataagccagc

SEQ ID NO: 71360 - DNA, 75 bp, synthetic construct
  source 1..75: mol_type = other DNA
tgaaacatttggttcatgggttggagtaactctttcgtcagaaaataaaaggcagctatggattccagaaggatt

SEQ ID NO: 71361 - DNA, 75 bp, synthetic construct
  source 1..75: mol_type = other DNA
ggcgtgaacgggacctgacgggctggatgtcgctgtcacggaaaccgcaagtgacctggtacggctgggacggcg

SEQ ID NO: 71362 - DNA, 75 bp, synthetic construct
  source 1..75: mol_type = other DNA
ttgctgggttggtcgtttgttgcaaaaagcagaggggatcgtggctggtatgttaatgatgttggatgtcaaact

SEQ ID NO: 71363 - DNA, 75 bp, synthetic construct
  source 1..75: mol_type = other DNA
tactgtcacggaaatacccggagctggtgataccggatgggctggcagcagaaggaagcagtaaacgggactgga

SEQ ID NO: 71364 - DNA, 75 bp, synthetic construct
  source 1..75: mol_type = other DNA
caggcgtgtaaacaggcgcttaagttctgccgtaaacgtcgctacgcagtcagtaacgttctggatgatcttaac

SEQ ID NO: 71365 - DNA, 75 bp, synthetic construct
  source 1..75: mol_type = other DNA
aacgctgatgagttgatcgcgctgttactgcttttcactcggcaggttggtcagtcccgaactgacctgatttga

SEQ ID NO: 71366 - DNA, 75 bp, synthetic construct
  source 1..75: mol_type = other DNA
ggttttaacattcagctgaatgattgcgataccaatgttgcatctaaagccgctgttgcctttttaggtacggcg

SEQ ID NO: 71367 - DNA, 75 bp, synthetic construct
  source 1..75: mol_type = other DNA
ccgctgatggcgctcttcaatgcggtgtccctgatgtccctgaatccggaaccgaaaaagaaagcgtatgaggtt

SEQ ID NO: 71368 - DNA, 75 bp, synthetic construct
  source 1..75: mol_type = other DNA
tgatgggcttattggtaaaagactttataaagctgaaggtattattgaaggaatgcttatggctctgaatgtccg

SEQ ID NO: 71369 - DNA, 75 bp, synthetic construct
  source 1..75: mol_type = other DNA
ggtgcacaggtcagtcgtgaagaggcgcgccagtggcgtgtgcagcacccgcttgctgtggatgtgccggagaga

SEQ ID NO: 71370 - DNA, 75 bp, synthetic construct
  source 1..75: mol_type = other DNA
aggatgttacatggtcgcccattgctgccggatttaagggactgatccccgaaaaagtaaaatcacgtccacagt

SEQ ID NO: 71371 - DNA, 75 bp, synthetic construct
  source 1..75: mol_type = other DNA
gaccagccgggattcagcgcaggagcctcgtcgcagttaatcaacagcattgatatcctccgggctcgcagggcg

SEQ ID NO: 71372 - DNA, 75 bp, synthetic construct
  source 1..75: mol_type = other DNA
cctgattgtgttcggatgccggacggtcgaacttaggttatcggagatcggcgagtgggattttaccgaaatgct

SEQ ID NO: 71373 - DNA, 75 bp, synthetic construct
  source 1..75: mol_type = other DNA
gccagaggcatagcagaaatcaacatcacgaaacagcgtaatggcacgctcgggaccatttaccggcgttttcat

SEQ ID NO: 71374 - DNA, 75 bp, synthetic construct
  source 1..75: mol_type = other DNA
atttaatcgttctccgtttgggcagagttatatcacgggtatccgccgtaaccagactacaggacgtcttgaagc

SEQ ID NO: 71375 - DNA, 75 bp, synthetic construct
  source 1..75: mol_type = other DNA
caaggagcttggggaattactacgcgcccttgatgaaaaaatttacccaccgtactacagcgccctgattcgcct

SEQ ID NO: 71376 - DNA, 75 bp, synthetic construct
  source 1..75: mol_type = other DNA
caggtatgcaaacaggcgcttaagtactgccgaaaacgacgatacgcaatcagcaacgttcttgatgatatggtt

SEQ ID NO: 71377 - DNA, 75 bp, synthetic construct
  source 1..75: mol_type = other DNA
ttcttgaagagagcaaagcaagaaacagatacaactcctacagctacacagacacccccaccagctacgaactac

SEQ ID NO: 71378 - DNA, 75 bp, synthetic construct
  source 1..75: mol_type = other DNA
gtctgacattttcgttaatgtcccagccggatgtctttacgaattatataaataaaaatgacgtactggcgtggg

SEQ ID NO: 71379 - DNA, 75 bp, synthetic construct
  source 1..75: mol_type = other DNA
gccttggatcgctaaatgatgtttccctgtctgatgccagagagcgacggaatgaatacaggtcactcatagcaa

SEQ ID NO: 71380 - DNA, 75 bp, synthetic construct
  source 1..75: mol_type = other DNA
atgcgtaacatcattaaactggcgctggtgggattgcttagcgtctctacgattgtggttgctgcagaatcctcg

SEQ ID NO: 71381 - DNA, 75 bp, synthetic construct
  source 1..75: mol_type = other DNA
taataacagtattgttttgtttggaaagttttgttttcatatattgcctttatttattattcgatacgcatataa

SEQ ID NO: 71382 - DNA, 75 bp, synthetic construct
  source 1..75: mol_type = other DNA
tttccctcgctctctctctggtcagccagcagtttctctcccttgaattccagcagatcctcgacaaaatggcct

SEQ ID NO: 71383 - DNA, 75 bp, synthetic construct
  source 1..75: mol_type = other DNA
aggctcactcttgcacaaagcatgtatctgaaagaaatctggggttatctgacccatgatgaacaggaactgttt

SEQ ID NO: 71384 - DNA, 75 bp, synthetic construct
  source 1..75: mol_type = other DNA
cacagaaatcccaaaggaagacggtagcagcagaccgctggccatatcctgcgtggaagacaaggtggtacagct

SEQ ID NO: 71385 - DNA, 75 bp, synthetic construct
  source 1..75: mol_type = other DNA
atgctgggcgggatgagtgacaccgccagcaaccgcatcacgggtgtcagtcacaccgacgggatccggcttaaa

SEQ ID NO: 71386 - DNA, 75 bp, synthetic construct
  source 1..75: mol_type = other DNA
gccggaagaaaccaccacagcaacagtagcgaaaatctcagagtgcgatttaaccgcgacgattgaacaacgcgg

SEQ ID NO: 71387 - DNA, 75 bp, synthetic construct
  source 1..75: mol_type = other DNA
ggctggtacgtggggtaacacggaaacaccagacgggacggttacagtcaccatcagcgatgatcataactttga

SEQ ID NO: 71388 - DNA, 75 bp, synthetic construct
  source 1..75: mol_type = other DNA
tgaaaaatttctcagtatagaatataccaatgttgagggcattcctcttacatctcgaaggataactatcatggg

SEQ ID NO: 71389 - DNA, 75 bp, synthetic construct
  source 1..75: mol_type = other DNA
caaaaagcagaaggggtaattgatggtatgttgatgatgctgaatgtctcactggagatggattgggctgtgtcg

SEQ ID NO: 71390 - DNA, 75 bp, synthetic construct
  source 1..75: mol_type = other DNA
tatcccacagcaagtatcagcgatttgctggttgtggtgatgaagaaatccacagcaggcatcagtatcagctga

SEQ ID NO: 71391 - DNA, 75 bp, synthetic construct
  source 1..75: mol_type = other DNA
agaactgcgcgggcaggatggcatcagcgaagagctggagcagcgtatccgtgatgtgctgctgggtaaggcatg

SEQ ID NO: 71392 - DNA, 75 bp, synthetic construct
  source 1..75: mol_type = other DNA
ctcgcatgggtgccttccaactaaatgaatctttacttgaacgaatcacccgtaaattacgtgacggatggaaac

SEQ ID NO: 71393 - DNA, 75 bp, synthetic construct
  source 1..75: mol_type = other DNA
ccacctcgcagtttctggcgtcggtgattctggataatctgcctgagcggccctttaacatccggatggtccggg

SEQ ID NO: 71394 - DNA, 75 bp, synthetic construct
  source 1..75: mol_type = other DNA
acggcgattctctttatgtggttaaccataacggcgaaccatacgttcccatgaaacctgtcgttgcggggatgg

SEQ ID NO: 71395 - DNA, 75 bp, synthetic construct
  source 1..75: mol_type = other DNA
tgcaaacgctgaattcatagcagaggctaacccggctaccgtgctggcactgctggatgaacaggaaagaaacca

SEQ ID NO: 71396 - DNA, 75 bp, synthetic construct
  source 1..75: mol_type = other DNA
tatcaaaaatccgtacgctggtaaatgaagcgaatatgctgattgattttgtcctggctgatacaggcaaaggga

SEQ ID NO: 71397 - DNA, 75 bp, synthetic construct
  source 1..75: mol_type = other DNA
agcgttggggagcgtgggtggcaaataatcatgaggatgttacctggtcatcgattgcagccggattcaaggggc

SEQ ID NO: 71398 - DNA, 75 bp, synthetic construct
  source 1..75: mol_type = other DNA
gtgaaatcacgctgccatcttccggcaccacgctgataagcctggttgacgggcaggggagtccggtcagcgtgg

SEQ ID NO: 71399 - DNA, 75 bp, synthetic construct
  source 1..75: mol_type = other DNA
agacggtcagtaaaacgctggaagaccagagcgccaccattcagcagatacagcgcgtgcagaaggacacaaatg

SEQ ID NO: 71400 - DNA, 75 bp, synthetic construct
  source 1..75: mol_type = other DNA
tacggaaagcgaaaaaatcatccggtgaacctgacgtcgtcctgtgggcaagtgacgattttgaatcgacctgtg

SEQ ID NO: 71401 - DNA, 75 bp, synthetic construct
  source 1..75: mol_type = other DNA
tccgtcgaatttacggctaaggacggtactcgtctgcaaggctggtttattccttcttcgacgggccctgctgac

SEQ ID NO: 71402 - DNA, 75 bp, synthetic construct
  source 1..75: mol_type = other DNA
acccgcgaggcggtgagagatgcgcatgacgctttcaaggatgcagatgttgagctggataccattctgcgctca

SEQ ID NO: 71403 - DNA, 75 bp, synthetic construct
  source 1..75: mol_type = other DNA
aggtgctaactgggttatgttacctggaggaatgataattcagcgtgtttatcttggatttcctgttggcaccaa

SEQ ID NO: 71404 - DNA, 75 bp, synthetic construct
  source 1..75: mol_type = other DNA
ccgtggcgttacaccaatgatcgtgatgtaagaacgattgttgccctggggctggtgatggatttcgatgctcga

SEQ ID NO: 71405 - DNA, 75 bp, synthetic construct
  source 1..75: mol_type = other DNA
ccaggcggtggatattgaagtcagccttcacgaagacttttcgccggtgattcagtcacgacgcgcctggtttag

SEQ ID NO: 71406 - DNA, 75 bp, synthetic construct
  source 1..75: mol_type = other DNA
gcgccacgcccgcgccagtgaatctccgttctggccgtcgccagggcaattcatcaagtggtgcaaagacagcaa

SEQ ID NO: 71407 - DNA, 75 bp, synthetic construct
  source 1..75: mol_type = other DNA
ccaatgacgatcgctttattaatcctgaggcgatgtgcagcgaaattcaggctgcgtgtcgggaaacggcgcaac

SEQ ID NO: 71408 - DNA, 75 bp, synthetic construct
  source 1..75: mol_type = other DNA
atgaaatttgataaacccgcaggggaaaacccgatcgatcagctgaaggttgtcggtcgtccccatgaccgcatc

SEQ ID NO: 71409 - DNA, 75 bp, synthetic construct
  source 1..75: mol_type = other DNA
cgaaaaaggggatagtacagctcagcagtgcgaccaacagtacgtctgaaacgctggcggcaacgccaaaggcag

SEQ ID NO: 71410 - DNA, 75 bp, synthetic construct
  source 1..75: mol_type = other DNA
aaagccgctattggtcgtctgaaaggcgaggaactggcacaatataattcgtggctggattatctggacgcactg

SEQ ID NO: 71411 - DNA, 75 bp, synthetic construct
  source 1..75: mol_type = other DNA
aacagcctgaaccagtggcgcaacaggaagtagaaaaagtttgcaatgcctgcggtcagtctggcggggataact

SEQ ID NO: 71412 - DNA, 75 bp, synthetic construct
  source 1..75: mol_type = other DNA
gctggcacaaaaaccgaattgtcattttttgagcaaattcagtcagagattatggcaatatttaatgaagtagtc

SEQ ID NO: 71413 - DNA, 75 bp, synthetic construct
  source 1..75: mol_type = other DNA
gcacgcacaacgcatcagtgcaaccacaaagcatgtacgccgcaaagctgaccttctacagtcttggttaaacaa

SEQ ID NO: 71414 - DNA, 75 bp, synthetic construct
  source 1..75: mol_type = other DNA
atgtattttgatgtcattaatgtgaaaaaattcaatgatatcaaatggttttgtaaaaacacatggttgttgtat

SEQ ID NO: 71415 - DNA, 75 bp, synthetic construct
  source 1..75: mol_type = other DNA
atccagatacgtggacagaacatcagcgcacagaatgctgctctttcccgcgaaatacaaagagcagaattacaa

SEQ ID NO: 71416 - DNA, 75 bp, synthetic construct
  source 1..75: mol_type = other DNA
gcgctggataatacgctgatttacagtggcgttattgatatgcctgccggtcacggtcacatgacgctggagttt

SEQ ID NO: 71417 - DNA, 75 bp, synthetic construct
  source 1..75: mol_type = other DNA
gccgcgggtggtgaagggtgtgcgcttcagtctgcgcctgaccagtggtaagggaacggatgccagactggtgac

SEQ ID NO: 71418 - DNA, 75 bp, synthetic construct
  source 1..75: mol_type = other DNA
ggttttgctgtggctgcgggataaccagcccgatgccatcaataatccggcgttacgggaaaaactattcacctt

SEQ ID NO: 71419 - DNA, 75 bp, synthetic construct
  source 1..75: mol_type = other DNA
ttaatgaactgggtaacagtatcactctctggcgtcgtgacggaccggtaatgatttcttttgatgatctgtgga

SEQ ID NO: 71420 - DNA, 75 bp, synthetic construct
  source 1..75: mol_type = other DNA
gagcgggttgtactgggggatgattttcaggatatcgctgatccgctgatgtcagaacaggagcgccgggatgaa

SEQ ID NO: 71421 - DNA, 75 bp, synthetic construct
  source 1..75: mol_type = other DNA
cattggtgctatgccgctggataaatgcgagctacggcactggctggcctgttttgaccaggtggcaaagcgaac

SEQ ID NO: 71422 - DNA, 75 bp, synthetic construct
  source 1..75: mol_type = other DNA
cacaggttctttccaccccaatgcggcagccccagccgcgcagatacagcaatacacgtaccgacagcagtaaga

SEQ ID NO: 71423 - DNA, 75 bp, synthetic construct
  source 1..75: mol_type = other DNA
agacggcaattattcactggcaggggaggaagcttgttgttaatgcttttgccggtacagggaaaaccagcacac

SEQ ID NO: 71424 - DNA, 75 bp, synthetic construct
  source 1..75: mol_type = other DNA
catctgatttgatatatcttatatcaaagatcgaaaataacaggaagattatagaatcaatttatatatcggctg

SEQ ID NO: 71425 - DNA, 75 bp, synthetic construct
  source 1..75: mol_type = other DNA
cttgaacgaggggttaacatatcggtaagaatgcaaaaacataacttatcaaataaaccatatgttgcattcaga

SEQ ID NO: 71426 - DNA, 75 bp, synthetic construct
  source 1..75: mol_type = other DNA
tgagcaggaggagtttgatttttacaggcaaatttatcctgtaacaggtggagagcaccaggtggaagccttgat

SEQ ID NO: 71427 - DNA, 75 bp, synthetic construct
  source 1..75: mol_type = other DNA
cgcgattgactattccccctcgcgataaaagcgttgtggcagctccgcgcccggctatcgatgaaaattgcactc

SEQ ID NO: 71428 - DNA, 75 bp, synthetic construct
  source 1..75: mol_type = other DNA
aatcattgcagctattggctttgtcgcaggtaaggcaattttctctgataatgtagtgtttaggcgaaggatgta

SEQ ID NO: 71429 - DNA, 75 bp, synthetic construct
  source 1..75: mol_type = other DNA
ggacaaaatgtagattcagaagaacatgtatcaaccagcaaagcggttgttgatgcctgggttgaagaatggaat

SEQ ID NO: 71430 - DNA, 75 bp, synthetic construct
  source 1..75: mol_type = other DNA
ctcacccgactgctggaccagcactacggcctcacgttaaatgacacaccgttcgccgatgaacgtgtgattgag

SEQ ID NO: 71431 - DNA, 75 bp, synthetic construct
  source 1..75: mol_type = other DNA
ggaagtaactcagtggcaacactgacgatagatgattctaaactatccgtaaacgggagcagtagtataggtagt

SEQ ID NO: 71432 - DNA, 75 bp, synthetic construct
  source 1..75: mol_type = other DNA
ggaagctgggttaattacaactacgactggatgtttaagccgggggccatgaaacaggtggcggaatatgctgat

SEQ ID NO: 71433 - DNA, 75 bp, synthetic construct
  source 1..75: mol_type = other DNA
cagcttcagaaaatggggatgacgccggagcagattaagcaggctaccggactgtccgaagctgaactgaaaaaa

SEQ ID NO: 71434 - DNA, 75 bp, synthetic construct
  source 1..75: mol_type = other DNA
aaagcttgtggcaggagctggcagacatcaccgataaaacgcagcttgaatggcgcgaagttttccaggacctca

SEQ ID NO: 71435 - DNA, 75 bp, synthetic construct
  source 1..75: mol_type = other DNA
tagtcaaaaaaatatcggcaagtcagtaattgttaataatggggtgctgcaaataaccagccaggatgactggac

SEQ ID NO: 71436 - DNA, 75 bp, synthetic construct
  source 1..75: mol_type = other DNA
aaatagtcatctgtcacgctgactacccgcacaacgaatatgaatttgataagccagtgccgaaagaaatggtca

SEQ ID NO: 71437 - DNA, 75 bp, synthetic construct
  source 1..75: mol_type = other DNA
cgctgaccggacatgaaaatgaggtggtatcagcgcagacggataccgtgactgatacggctgctctggtcacgg

SEQ ID NO: 71438 - DNA, 75 bp, synthetic construct
  source 1..75: mol_type = other DNA
ctggagagtgcgctggatatgtataggttagataacaaccgttatccaaccacagaacaaggcatacaggcactt

SEQ ID NO: 71439 - DNA, 75 bp, synthetic construct
  source 1..75: mol_type = other DNA
gttcgctgatgaacgtgtgattgagcagcatattgaggcaggcatttcactgtgcgatgcggtgaactttctcgt

SEQ ID NO: 71440 - DNA, 75 bp, synthetic construct
  source 1..75: mol_type = other DNA
atgccatcttgttaaatctcaataaggctatcgatgcccactaccagtggctggtgagtatgtttcacagcgtgg

SEQ ID NO: 71441 - DNA, 75 bp, synthetic construct
  source 1..75: mol_type = other DNA
ccctgggatctgatgctgtgcggccatactcacggcgggcaactgcgcgtaccgttggttggtgaaccttttgcc

SEQ ID NO: 71442 - DNA, 75 bp, synthetic construct
  source 1..75: mol_type = other DNA
atggacattgaaatacgccactgcaataacatcgtacgagcacatatcaccctcactgccgataaactgaacatt

SEQ ID NO: 71443 - DNA, 75 bp, synthetic construct
  source 1..75: mol_type = other DNA
aaggaacagaactgcttactactgccaatacatggactcaggcacaaacttttaatggtggtattaatggcaatt

SEQ ID NO: 71444 - DNA, 75 bp, synthetic construct
  source 1..75: mol_type = other DNA
aaatccggatgaagccggtcgttacagcatggacgttgagtacggtcagtacagcgtcattctgttggtggaagg

SEQ ID NO: 71445 - DNA, 75 bp, synthetic construct
  source 1..75: mol_type = other DNA
tatatcactcaggatccgattgggctgaaggggggatggaatttttatcagtatccgctgaatccggttcagtat

SEQ ID NO: 71446 - DNA, 75 bp, synthetic construct
  source 1..75: mol_type = other DNA
agtcgggcgggatattcttgcgaaatcgaccgttgccgctgttatcgaatacctcggtttacaggaaacggtaaa

SEQ ID NO: 71447 - DNA, 75 bp, synthetic construct
  source 1..75: mol_type = other DNA
tctggatcagcccctgtcgctcgacaatgtagcggcgaaagcaggttattccaagtggcacttacagagaatgtt

SEQ ID NO: 71448 - DNA, 75 bp, synthetic construct
  source 1..75: mol_type = other DNA
aactcatgcaggggatcaccgacagactgaacgcggcccttatggacctgataaaccttgccggaccgctgcagg

SEQ ID NO: 71449 - DNA, 75 bp, synthetic construct
  source 1..75: mol_type = other DNA
tggtgaacacggtggcctctgaaaatccggatgaagccgggtgttacagcatggaggtggagtatggtcagtaca

SEQ ID NO: 71450 - DNA, 75 bp, synthetic construct
  source 1..75: mol_type = other DNA
gatcacattgtcgggcatatgtttctgatcagctaccgtccgaactggcgctggctggggatgcgggagaccgca

SEQ ID NO: 71451 - DNA, 75 bp, synthetic construct
  source 1..75: mol_type = other DNA
acttccttttatgaacttattactgtgcgtaatcacactgccagcccatcatcgccggtggtattacgctggttg

SEQ ID NO: 71452 - DNA, 75 bp, synthetic construct
  source 1..75: mol_type = other DNA
cacgaaatgtcacgcacatgtcacgacgagtcacgacagataaagatacagataaagatacagatcaagaagatc

SEQ ID NO: 71453 - DNA, 75 bp, synthetic construct
  source 1..75: mol_type = other DNA
acaacagtggtgcccataattcaggcggtaacattaatggtggttcagctggttcgggtgggaatggtggcgcat

SEQ ID NO: 71454 - DNA, 75 bp, synthetic construct
  source 1..75: mol_type = other DNA
tggtctaacagtgaaagagtttttacttataccactggtggaagaaatggtgctgaatcagtgagttcacctgat

SEQ ID NO: 71455 - DNA, 75 bp, synthetic construct
  source 1..75: mol_type = other DNA
caagttatttcttgccgctcgttccgatggtatgggcaaagcctgtcagtggtgcatagaatatttaagaaatcc

SEQ ID NO: 71456 - DNA, 75 bp, synthetic construct
  source 1..75: mol_type = other DNA
cgattgactacttcaatgttcaggacaagatggctggtcgtgagattgaccgaggcagactggcagagacaatcc

SEQ ID NO: 71457 - DNA, 75 bp, synthetic construct
  source 1..75: mol_type = other DNA
tgtactgccttttaccgacaggtgcaagaacatattactgagcgtaatcacactgccagtccagcaccgccggtg

SEQ ID NO: 71458 - DNA, 75 bp, synthetic construct
  source 1..75: mol_type = other DNA
atccattagaaaacagtgaattgcgtcattatccagcggtttgtatccgcgatacctccgttaacttccccccga

SEQ ID NO: 71459 - DNA, 75 bp, synthetic construct
  source 1..75: mol_type = other DNA
atcaagtatttcaacatgatggatgaaggcaaagtcaccggttatttctgccagggctttaacccggttgcgtcc

SEQ ID NO: 71460 - DNA, 75 bp, synthetic construct
  source 1..75: mol_type = other DNA
atgaaacgaacgcctgtcctgattgatgtgaacggcgttccgcttcgggagagcctcagctacaacgggggcggt

SEQ ID NO: 71461 - DNA, 75 bp, synthetic construct
  source 1..75: mol_type = other DNA
gtttaagattttccagaaaggcaatcagggggcaggcaatatcaccgactgtacggtgattgtgaccaaaaaagc

SEQ ID NO: 71462 - DNA, 75 bp, synthetic construct
  source 1..75: mol_type = other DNA
ttgattcacttctggccagcctgctggaggaagaaggcagccgtaacaataacaagaccctggcggattacgcgc

SEQ ID NO: 71463 - DNA, 75 bp, synthetic construct
  source 1..75: mol_type = other DNA
gtggcgaaagattcacgcatcatcgactcgatgatccacgccgcacacaacggtaagaaagtcaccgtggtggtt

SEQ ID NO: 71464 - DNA, 75 bp, synthetic construct
  source 1..75: mol_type = other DNA
agatcatatgtattctccgcgaggccgaagccggcgtttctgcccgtgagctctgccgtaagcacgccatttccg

SEQ ID NO: 71465 - DNA, 75 bp, synthetic construct
  source 1..75: mol_type = other DNA
gaaaaccaccaacgatgctgtggcgacgaataccaccaatatcgccaataacacttccaatattgccactaacac

SEQ ID NO: 71466 - DNA, 75 bp, synthetic construct
  source 1..75: mol_type = other DNA
cggcgatcaccttaaaaatcgacccgtcagtcgtgctggcaacccgtaaatatgtcgacgatgcagtcatcgagg

SEQ ID NO: 71467 - DNA, 75 bp, synthetic construct
  source 1..75: mol_type = other DNA
ccgacgaggacatagagaatgccgaagacgaagcgccgccaggcatcggcgaacttggcgacaacccgccagagt

SEQ ID NO: 71468 - DNA, 75 bp, synthetic construct
  source 1..75: mol_type = other DNA
atgccggacaacgtggattttattcaggaacaacaggctgaattactggagcgccagattaacgcggcaagggta

SEQ ID NO: 71469 - DNA, 75 bp, synthetic construct
  source 1..75: mol_type = other DNA
tgggcgatgaatattggttgccacctgactattccacagagctgcgagttccagctgctgcgcgacaagcaggag

SEQ ID NO: 71470 - DNA, 75 bp, synthetic construct
  source 1..75: mol_type = other DNA
ctgatctggtggtcattaaggatggctcagtggcagacggttcgacggcgaacacgctgcgggtgagggtgacgg

SEQ ID NO: 71471 - DNA, 75 bp, synthetic construct
  source 1..75: mol_type = other DNA
agtcgggcgggatattcttgcgaaatcgaccgttgccgccgttatcgaatatctcggtttacaggaaacggtaaa

SEQ ID NO: 71472 - DNA, 75 bp, synthetic construct
  source 1..75: mol_type = other DNA
cgtcgttaccaccagaaaaaattcaggttcctttcatgttaacgccaccagtggcaaaaataggggcaaattccg

SEQ ID NO: 71473 - DNA, 75 bp, synthetic construct
  source 1..75: mol_type = other DNA
atggatgttgagtatggccagtacagcgtcatcctgctggttgaaggttttccgccttcacatgccgggaccatt

SEQ ID NO: 71474 - DNA, 75 bp, synthetic construct
  source 1..75: mol_type = other DNA
ggcagaacttccccctcttaacgtactgattcaaattaacattagtgatgaaaacagtaagtccgggattcaact

SEQ ID NO: 71475 - DNA, 75 bp, synthetic construct
  source 1..75: mol_type = other DNA
caatgcactgaggatatttaattcatcttttggtgctatttttcgtcgttctgaagaatgcctgcatatcatccc

SEQ ID NO: 71476 - DNA, 75 bp, synthetic construct
  source 1..75: mol_type = other DNA
agctacaccgtggaaatcttggtgctatcactcagcatctgaagccacttctcgaaaacggtgagtgcttccggc

SEQ ID NO: 71477 - DNA, 75 bp, synthetic construct
  source 1..75: mol_type = other DNA
ggggaaaatggcgatatagggccgctacgcccctttacgcttaatctcagaactggtcgcataaatatggggcat

SEQ ID NO: 71478 - DNA, 75 bp, synthetic construct
  source 1..75: mol_type = other DNA
gaactgctggcggaaaatacagccgcaacggaacaggatgtgacgttcgggaccgctattctgggggctaaaaag

SEQ ID NO: 71479 - DNA, 75 bp, synthetic construct
  source 1..75: mol_type = other DNA
actgccagcatcaacagcagcagcctgagccggaacgtgacgtttgtcgccgatgtcaggacggcgcagatcgcg

SEQ ID NO: 71480 - DNA, 75 bp, synthetic construct
  source 1..75: mol_type = other DNA
atcgcccgtgaagaagagttgcgccgtcaggatcaggcatatgtggatgagtccgggccggaagagcgccagaat

SEQ ID NO: 71481 - DNA, 75 bp, synthetic construct
  source 1..75: mol_type = other DNA
accggacctcagggaccgaagggcgacccgggggagacacaaatccgttttcgtctggggccggcgagcattatt

SEQ ID NO: 71482 - DNA, 75 bp, synthetic construct
  source 1..75: mol_type = other DNA
aaatgcagaaacaatataagcatctgtttgcccatggtgagtatataaaaggcataacttcattaattaagtaca

SEQ ID NO: 71483 - DNA, 75 bp, synthetic construct
  source 1..75: mol_type = other DNA
gttgttatggatctttttgcccgcagggttatcggctggagtctgtcagcgcatgccgataccgcactgataagc

SEQ ID NO: 71484 - DNA, 75 bp, synthetic construct
  source 1..75: mol_type = other DNA
ggggatgtcggaagccgattcacatgcctttattgaagatgtggaggcggcgtggatggaattctgcgatccggt

SEQ ID NO: 71485 - DNA, 75 bp, synthetic construct
  source 1..75: mol_type = other DNA
atgaatagcaccacacattacgaaaacgccaatttcctgcgcgagctggccgaaagcctgcctcgtatttttcca

SEQ ID NO: 71486 - DNA, 75 bp, synthetic construct
  source 1..75: mol_type = other DNA
aagccgccattgcggcaggtagcacgatggttcgtatcggcactgcaatttttggtgcgcgtgattactctaaaa

SEQ ID NO: 71487 - DNA, 75 bp, synthetic construct
  source 1..75: mol_type = other DNA
caccatcaccaccagaaacagcaggagtgcagccacagccaggcgcagttttaccgtcacaggtgattctccaga

SEQ ID NO: 71488 - DNA, 75 bp, synthetic construct
  source 1..75: mol_type = other DNA
taggcgatggcggcggaacattgccaacgccggacgcaaagcagacagcattagtaaatgagaaacgccgggctg

SEQ ID NO: 71489 - DNA, 75 bp, synthetic construct
  source 1..75: mol_type = other DNA
ccgatgaagacggtattccctgcatcagcggtacccgtaaatccaatgcgtcgagttatctgccaacgatatttg

SEQ ID NO: 71490 - DNA, 75 bp, synthetic construct
  source 1..75: mol_type = other DNA
ggcaaaacatcttgccgcaccggacccgcattcacagtatgctcagaaagaaagtcctacgtttaccgggacacc

SEQ ID NO: 71491 - DNA, 75 bp, synthetic construct
  source 1..75: mol_type = other DNA
tcctcgtcctcggcctctgcggccgctcaaaaagccagtgagtcatcacaaagtgcagcagatgctgaattgtca

SEQ ID NO: 71492 - DNA, 75 bp, synthetic construct
  source 1..75: mol_type = other DNA
attagtcggaacccttgataaagcgccaatgattgattttagcagtactgattcacttggtatttcaacacttat

SEQ ID NO: 71493 - DNA, 75 bp, synthetic construct
  source 1..75: mol_type = other DNA
atggtgtggtgtgtggtcagtcgtgcagatggcattccgtgcatcctgcccgcgtccgctcattatgccgcagag

SEQ ID NO: 71494 - DNA, 75 bp, synthetic construct
  source 1..75: mol_type = other DNA
cagcatattgaggcaggcatttcactgtgtgatgcggtgaactttctcgttgaaaaatacgcactggtacgtacc

SEQ ID NO: 71495 - DNA, 75 bp, synthetic construct
  source 1..75: mol_type = other DNA
aggcttctgaagtgtttttacctgtgcggtgttgacgatgaaacaggtgagcctgttgagcatgttgatgctggc

SEQ ID NO: 71496 - DNA, 75 bp, synthetic construct
  source 1..75: mol_type = other DNA
ccggacggcacggtggaaatcagtgtcaccagccagacggcgggagtcagtgcagtcactgcaaccatcaacagc

SEQ ID NO: 71497 - DNA, 75 bp, synthetic construct
  source 1..75: mol_type = other DNA
tggtccggcaggtccgcaggggccgaaaggcgacaggggagagcggggagagaccggtctgacgggaaatgcagg

SEQ ID NO: 71498 - DNA, 75 bp, synthetic construct
  source 1..75: mol_type = other DNA
actctgccgataatatagcgggcgtttattacagacccgttcaaaagtatataaatggcacctggtataatgtag

SEQ ID NO: 71499 - DNA, 75 bp, synthetic construct
  source 1..75: mol_type = other DNA
atcaactgcacaggaaacccggaccagaatggtttctatcagcattcagtctttcttacccttgctggggacaaa

SEQ ID NO: 71500 - DNA, 75 bp, synthetic construct
  source 1..75: mol_type = other DNA
cgtgaccagaatgttattttgggacgcaatgcggtatccaccgatggtgcacaggcattacttcgtcaggaccat

SEQ ID NO: 71501 - DNA, 75 bp, synthetic construct
  source 1..75: mol_type = other DNA
gcttaatcgttgaaaaagatggggggccgtctttgtcgctatcgaaaagggaggactactggaggttaaagaggg

SEQ ID NO: 71502 - DNA, 75 bp, synthetic construct
  source 1..75: mol_type = other DNA
cttaaggaagtgcaggaagcggtgatgcgcattgaaggcggcctgagtacatacgagaaagagctggccctgatg

SEQ ID NO: 71503 - DNA, 75 bp, synthetic construct
  source 1..75: mol_type = other DNA
tgcgtgaggcggcagagaaagcaacgtggggtgactgggactcatataaaccacaccgtggcgcacgtggttatg

SEQ ID NO: 71504 - DNA, 75 bp, synthetic construct
  source 1..75: mol_type = other DNA
ttcggccggcacgctctcccttgatggaaactcactggataacagcggcactgtccagggtaaccatgtcacgct

SEQ ID NO: 71505 - DNA, 75 bp, synthetic construct
  source 1..75: mol_type = other DNA
ttagcccagagtttcgccccgaagctgcccagcttgtactcgatcagcattacacggttgcagccgctgctacgg

SEQ ID NO: 71506 - DNA, 75 bp, synthetic construct
  source 1..75: mol_type = other DNA
ctggatacagacgtgccggacagtgaatgcgtttttgccgtggtgctgacccgtggggatgtgcgtcacatagcc

SEQ ID NO: 71507 - DNA, 75 bp, synthetic construct
  source 1..75: mol_type = other DNA
cattcaggtgccgtcaaactatgacccggaaaaacgcacctacagcggtatctgggacgggagtctgaaaccggc

SEQ ID NO: 71508 - DNA, 75 bp, synthetic construct
  source 1..75: mol_type = other DNA
gtgctgccgccggagccgcccgcataccgggtgctgacgggcgtggtggacggcttcgggcggacgctggccttt

SEQ ID NO: 71509 - DNA, 75 bp, synthetic construct
  source 1..75: mol_type = other DNA
aaagcatcctgaactaaaatataatcgtttgcacgtaggtaaagtatttgatggagtattgagccctgctcaacc

SEQ ID NO: 71510 - DNA, 75 bp, synthetic construct
  source 1..75: mol_type = other DNA
gcggcactgtccagggtaaccatgtcacgattcgccagaacagtgtcaccaacagtggcacgctcaccgggatcg

SEQ ID NO: 71511 - DNA, 75 bp, synthetic construct
  source 1..75: mol_type = other DNA
cgaagtttcgctggcctaccgcaaaatcgagtgggaacacgttaagtcaggcacttctggcgctgacgactggcg

SEQ ID NO: 71512 - DNA, 75 bp, synthetic construct
  source 1..75: mol_type = other DNA
agggcatgacggttccggattatacggtgaaggtgagaaagtggttttgtgtgatgtgtgacgaagattatgagg

SEQ ID NO: 71513 - DNA, 75 bp, synthetic construct
  source 1..75: mol_type = other DNA
tacagaccgtctgcataaccagcatggtgatatcctggccggcaacagtctgtgggtacagaaggatgcttccgg

SEQ ID NO: 71514 - DNA, 75 bp, synthetic construct
  source 1..75: mol_type = other DNA
agaaatcgacaccattgtgtcccacacccgcgatattgccattcaggaagatcgtcacgagctgggtgatgatat

SEQ ID NO: 71515 - DNA, 75 bp, synthetic construct
  source 1..75: mol_type = other DNA
gaagtcattcctattgacatgcctgactctaacggcgagatgacttggcaagccaaaaactacacacagtattcg

SEQ ID NO: 71516 - DNA, 75 bp, synthetic construct
  source 1..75: mol_type = other DNA
tcgatccggcggatatcctgcaactcactatcattggcattctctcgatcatcgtgctttttttcaaatggaaag

SEQ ID NO: 71517 - DNA, 75 bp, synthetic construct
  source 1..75: mol_type = other DNA
catccgggcagattaaaaatcctcttcttcaccctgctgtcggtttcgaccgttgcggcgctgcaaacggttggt

SEQ ID NO: 71518 - DNA, 75 bp, synthetic construct
  source 1..75: mol_type = other DNA
acaatgagcgaagaaacgccctgaagcaaagactactgagtcgggtgtttcttacaacaaaaatagattcatcac

SEQ ID NO: 71519 - DNA, 75 bp, synthetic construct
  source 1..75: mol_type = other DNA
ttaaccggcggtacgctggaactggtgtggatggggctggccccgctggcgggcgcacagccgcctaacgtgatt

SEQ ID NO: 71520 - DNA, 75 bp, synthetic construct
  source 1..75: mol_type = other DNA
cccggaaggggtgatacggatgcacgacgagcggacccaccactaccactacgacagccagcaccgcctggtgtt

SEQ ID NO: 71521 - DNA, 75 bp, synthetic construct
  source 1..75: mol_type = other DNA
attagcatcatatggcgcgatctttactggattatggacctgctgaatgacagaggggagccggtaatctccggt

SEQ ID NO: 71522 - DNA, 75 bp, synthetic construct
  source 1..75: mol_type = other DNA
tcaatgccagagcttattagagcggctttttcttactttccacgagagaatataaatcaacggggcttgatgtac

SEQ ID NO: 71523 - DNA, 75 bp, synthetic construct
  source 1..75: mol_type = other DNA
gcagcactctcaatattatcgggcctcctattcctgattcggaaggtacccggctggaaattctctgcaagacag

SEQ ID NO: 71524 - DNA, 75 bp, synthetic construct
  source 1..75: mol_type = other DNA
gcagggttaccttcctgaaaaccaaaaacggtaaaaagcgaaccgtgccgatttctgaggaactggagaaaaaag

SEQ ID NO: 71525 - DNA, 75 bp, synthetic construct
  source 1..75: mol_type = other DNA
tcccggagcagaagcggattgtgaatttgcgttcccaggtgacgatggcgctgaaaaaatatcgcccgcaggccg

SEQ ID NO: 71526 - DNA, 75 bp, synthetic construct
  source 1..75: mol_type = other DNA
gaaaagatgcttgatgccctagacgatcaggagttggttaaactggtagccgaacgcagcaaccaaccgctgcat

SEQ ID NO: 71527 - DNA, 75 bp, synthetic construct
  source 1..75: mol_type = other DNA
gatggtctatgggggccaggtaaagcaagtaatgatacaaaagaagctgctggccgttgtgacctcgttgaaacc

SEQ ID NO: 71528 - DNA, 75 bp, synthetic construct
  source 1..75: mol_type = other DNA
cgtggattcgccgctgccaaccgcctatctggactacattacccagcgtcatgacggacatgacgcagtgatggc

SEQ ID NO: 71529 - DNA, 75 bp, synthetic construct
  source 1..75: mol_type = other DNA
gcagtttgaaggcaaggtgcagcgcattgcccgcgttcaccattacggcctgcgagatcgcgtcagtcgtaaggg

SEQ ID NO: 71530 - DNA, 75 bp, synthetic construct
  source 1..75: mol_type = other DNA
actggctgagtgccttgctggcgaatctggaaccagccgccagaagccgcatgatgcgccagctggcgcaggaac

SEQ ID NO: 71531 - DNA, 75 bp, synthetic construct
  source 1..75: mol_type = other DNA
cctgtccactggtcatgaacgcacgctgtacgccttccttgaccccgcatgcatcaactgccgtctgctggaacc

SEQ ID NO: 71532 - DNA, 75 bp, synthetic construct
  source 1..75: mol_type = other DNA
cgccctgtaccctgacggtggtcaggaggttattgccatcctgccggttacagaactgggcgcactgattaaccg

SEQ ID NO: 71533 - DNA, 75 bp, synthetic construct
  source 1..75: mol_type = other DNA
gctgaccatccgtgtatctggctacgcagtacgtttcaactcgctgactaaagaacagcagcaggacgttattac

SEQ ID NO: 71534 - DNA, 75 bp, synthetic construct
  source 1..75: mol_type = other DNA
taccttgtcgacagtcagggaaaggatgagattctgcgtcagtgggcgcatgcgcacagcatacctgtggagaaa

SEQ ID NO: 71535 - DNA, 75 bp, synthetic construct
  source 1..75: mol_type = other DNA
agtttaagattttccagaaaggcaatcagggggcaggcaatatcaccgactgtacggtgattgtgaccaaaaaag

SEQ ID NO: 71536 - DNA, 75 bp, synthetic construct
  source 1..75: mol_type = other DNA
tgcctgcactggttgggtattataactggcagcgtacaccttatgaccgaccgatttacaccacatcaacggggg

SEQ ID NO: 71537 - DNA, 75 bp, synthetic construct
  source 1..75: mol_type = other DNA
cgattatgttgtgcaacaggacgcgttacagaaagagggtgatgcggtttccggcggcgtaacgttgcggaggaa

SEQ ID NO: 71538 - DNA, 75 bp, synthetic construct
  source 1..75: mol_type = other DNA
caagcgcgagtatcagcgaacttaagaaaaacccaatggcgactgtcagctccggtgatggctacccggttgcta

SEQ ID NO: 71539 - DNA, 75 bp, synthetic construct
  source 1..75: mol_type = other DNA
atggcaccggacacaacaacgggcaggcacccgccgcaacgacgtgaagcgcggtttgcgaaacggcgttgcccc

SEQ ID NO: 71540 - DNA, 75 bp, synthetic construct
  source 1..75: mol_type = other DNA
ggtcaatggtattccggtaatgtcacatgggatattaagaagatttatacaaacaaaattctggtgataaatacc

SEQ ID NO: 71541 - DNA, 75 bp, synthetic construct
  source 1..75: mol_type = other DNA
ccgtaaggccgcagccggcttcagtaactgctgtaaggatggtggctggggtcaggatgtgggtctggcgaagtg

SEQ ID NO: 71542 - DNA, 75 bp, synthetic construct
  source 1..75: mol_type = other DNA
gtccggactgggcagagcgcctgaaaaaggggctgtcgattattccggctccgatttatccggaccaggctgcac

SEQ ID NO: 71543 - DNA, 75 bp, synthetic construct
  source 1..75: mol_type = other DNA
atttaaccgcagagaagttcgccacagcaatccgaaaccactggcacgtggagaataagctgcactggcgtctgg

SEQ ID NO: 71544 - DNA, 75 bp, synthetic construct
  source 1..75: mol_type = other DNA
tgatgaagaagacatacaacgcatcgaagagatcaagcgttggataagtaatggcgtccctgtaggcaaagttaa

SEQ ID NO: 71545 - DNA, 75 bp, synthetic construct
  source 1..75: mol_type = other DNA
cgttggccgcattttgccgaagcaacagcccgcagcgccgcactttgcgctgaacaagagagcctgttagatgaa

SEQ ID NO: 71546 - DNA, 75 bp, synthetic construct
  source 1..75: mol_type = other DNA
tgccgatgcgctggaaggcaaacatccggctgttccggttgatgtggtgcaccgcgcgctgcgtgaaatccacga

SEQ ID NO: 71547 - DNA, 75 bp, synthetic construct
  source 1..75: mol_type = other DNA
ccgtatctgattacggtgaatccgaaactggatggtctcggaaaggtggacagcagtctgtttgccggactgtat

SEQ ID NO: 71548 - DNA, 75 bp, synthetic construct
  source 1..75: mol_type = other DNA
aacaacctggaataaatcatcctctcaatcaggaaactgggaaagtatatatactcgcgctgagcgtgggcttaa

SEQ ID NO: 71549 - DNA, 75 bp, synthetic construct
  source 1..75: mol_type = other DNA
aggacgggatatcaccgctgttgcgtcatccgttactgcaaccggcaatatcagcgtgaatgccggtcgtgatgt

SEQ ID NO: 71550 - DNA, 75 bp, synthetic construct
  source 1..75: mol_type = other DNA
cgaaagatgtgacgctgcagaacggcagtattatcagcggtcagaatgtgcacctggcaggagggaatgtcacta

SEQ ID NO: 71551 - DNA, 75 bp, synthetic construct
  source 1..75: mol_type = other DNA
tcatgctgaacagcgcgtcttccacgctggcgggtgaaaccagtgcgggtggcacggtgtctgtaaaaggcaaca

SEQ ID NO: 71552 - DNA, 75 bp, synthetic construct
  source 1..75: mol_type = other DNA
gaggccagactacagccgggttacgtcatttatttggtcatgtcaggaatttcagaatatggcacaaggcattga

SEQ ID NO: 71553 - DNA, 75 bp, synthetic construct
  source 1..75: mol_type = other DNA
atgacagtatcagcccgatatttgacaaggagaaagagcagaggcgtctgcagacagtggggcttatcagtgaca

SEQ ID NO: 71554 - DNA, 75 bp, synthetic construct
  source 1..75: mol_type = other DNA
ggaggatgttgccattctctgccatctggatccgaacattccatatacacatccaagcttagcgcacacagagga

SEQ ID NO: 71555 - DNA, 75 bp, synthetic construct
  source 1..75: mol_type = other DNA
atgctttattttattcagactgatacagatattattattatccgtattttaagtcagcatcaggatgccgggcgt

SEQ ID NO: 71556 - DNA, 75 bp, synthetic construct
  source 1..75: mol_type = other DNA
acatcgaaacacgcctccggcgttcactcatcagaaggtatcccgtggcatgagctgccagcttcacacagggga

SEQ ID NO: 71557 - DNA, 75 bp, synthetic construct
  source 1..75: mol_type = other DNA
gagtctggggctgaaggcctcttatgctctgaccggtcaggcaagtccgacgcccggtgctgtccagtcagtgat

SEQ ID NO: 71558 - DNA, 75 bp, synthetic construct
  source 1..75: mol_type = other DNA
cagccgaatgtactaaaataataacagcagcagcagggaatttttacatagcacaagttggtggtgctactgtca

SEQ ID NO: 71559 - DNA, 75 bp, synthetic construct
  source 1..75: mol_type = other DNA
gctgcaaggctggcagcggtcagcaggcgctaaggcggaactggcgctggcggagaagctggggcatgcagttat

SEQ ID NO: 71560 - DNA, 75 bp, synthetic construct
  source 1..75: mol_type = other DNA
gtggggtgttttgccacctacatcaaccgtcagggcggcgtgctcattccacgcaacctgtacctgatccgcacc

SEQ ID NO: 71561 - DNA, 75 bp, synthetic construct
  source 1..75: mol_type = other DNA
cgtaagcgccgaatccatgtttaacccctgtgacaacatgactgttgccgcgaaaatcatcaccgactgctatca

SEQ ID NO: 71562 - DNA, 75 bp, synthetic construct
  source 1..75: mol_type = other DNA
acggagtggtgggaaaacagtgacccgcccggcaccttccggcttgatattggtgtactggaaagcggcatcaca

SEQ ID NO: 71563 - DNA, 75 bp, synthetic construct
  source 1..75: mol_type = other DNA
cgataaagtcaatactatcgcgttgggtaatggcagccagtctctggcagataacgcaattgctattggtcaggg

SEQ ID NO: 71564 - DNA, 75 bp, synthetic construct
  source 1..75: mol_type = other DNA
tgcgacaaccagtccagcgaaaatccaactgaggccgatctgggtatttacagccatctttatgcggtagcggag

SEQ ID NO: 71565 - DNA, 75 bp, synthetic construct
  source 1..75: mol_type = other DNA
agcagcagtaccatttagaccttgaattagtaaagaagaagccagcgaaccgcaccgaggcaaaagcccatttgg

SEQ ID NO: 71566 - DNA, 75 bp, synthetic construct
  source 1..75: mol_type = other DNA
cggcaggggtgacgatgacctgttcacctggttactgacctaccagccactggcacacatggcgttaaaactggg

SEQ ID NO: 71567 - DNA, 75 bp, synthetic construct
  source 1..75: mol_type = other DNA
ctcaacaagcaccagatacagacgctggccaccatgacggcggcgatgttcagcagcaccttcgaaaaactctgc

SEQ ID NO: 71568 - DNA, 75 bp, synthetic construct
  source 1..75: mol_type = other DNA
cactaacactacagatattgccaccaacactgccaatatcgccgataacactgctgatatcgccactaacactac

SEQ ID NO: 71569 - DNA, 75 bp, synthetic construct
  source 1..75: mol_type = other DNA
atttgacaaggagaaagagcagaggcgtctgcagacagtggggcttatcagtgacattggcagtcaggtggcgga

SEQ ID NO: 71570 - DNA, 75 bp, synthetic construct
  source 1..75: mol_type = other DNA
tgctggatgcaattgaaaataagaaatctttaacggtaatttacttaggaggtagtcagccaggaacattgagag

SEQ ID NO: 71571 - DNA, 75 bp, synthetic construct
  source 1..75: mol_type = other DNA
cagaagatcctatgcagatatggggcgctgttggtgtccttcttatcctgctgctattcgtcatatggttattct

SEQ ID NO: 71572 - DNA, 75 bp, synthetic construct
  source 1..75: mol_type = other DNA
atgtctgaactgatagccatccaggcagctgaaactttcattggtaacaatattgaagagattgctatttatgac

SEQ ID NO: 71573 - DNA, 75 bp, synthetic construct
  source 1..75: mol_type = other DNA
ccattatggtgtgtccgccacagagctacttgatccctgtaccaatctgtccgtcttcgaacacattctcagaga

SEQ ID NO: 71574 - DNA, 75 bp, synthetic construct
  source 1..75: mol_type = other DNA
agctcgcaatgcagtgtgctcccgccgttcaccccgataccatccacgacatcacccgcaccgaatccggcttaa

SEQ ID NO: 71575 - DNA, 75 bp, synthetic construct
  source 1..75: mol_type = other DNA
gattatcacttgccagtgcagcgaacgctattgcgatgggggcagacagtcgcagttcgaacgataacgccatcg

SEQ ID NO: 71576 - DNA, 75 bp, synthetic construct
  source 1..75: mol_type = other DNA
cgtggtaaaaaaagcgggcgcagtaagctgttaatttctgcactggttgcgggtgggttgttgtcgtcatttggg

SEQ ID NO: 71577 - DNA, 75 bp, synthetic construct
  source 1..75: mol_type = other DNA
gagcgcaagcgagctgttgctcacctgacgctgtctgagcgcgaggaaatacgagccggtctgtcagctaaaatg

SEQ ID NO: 71578 - DNA, 75 bp, synthetic construct
  source 1..75: mol_type = other DNA
tttttacgttcagagcgatgcgacagaccttaacgtgatgtaccacaagggcgatacggcgcaaaacatgaaact

SEQ ID NO: 71579 - DNA, 75 bp, synthetic construct
  source 1..75: mol_type = other DNA
tggtggcgatgtccctgtggcataaccatccgcagaaaacggagtcaccgtcaatgaatgaggctgtgatgcaga

SEQ ID NO: 71580 - DNA, 75 bp, synthetic construct
  source 1..75: mol_type = other DNA
gctggttgatgtcatgaaggacggctgcgaatgggtcaacttttatggtgtcacctgctttcataactgtacttc

SEQ ID NO: 71581 - DNA, 75 bp, synthetic construct
  source 1..75: mol_type = other DNA
gaaaggattacggcgacgccaaaatcaggaggccctagctatgtatacgaaatccgtgtgaagagttggtgggtg

SEQ ID NO: 71582 - DNA, 75 bp, synthetic construct
  source 1..75: mol_type = other DNA
aagccggtgcctctgtggtgtcactttcagaccagcgtttcctgtcaggagatgaggaagaaacgtcaaagtata

SEQ ID NO: 71583 - DNA, 75 bp, synthetic construct
  source 1..75: mol_type = other DNA
caatcacccgtccggtgaagtcacacccagcaaggcagaccgccttatcacggaacgtctggtacaggcactggc

SEQ ID NO: 71584 - DNA, 75 bp, synthetic construct
  source 1..75: mol_type = other DNA
aactcaattcgatagaaattgatttctctggaatatcccactggctggcaaaatacacattcaggtattccagaa

SEQ ID NO: 71585 - DNA, 75 bp, synthetic construct
  source 1..75: mol_type = other DNA
catcgtttcagtggtctgccgctcggggaatacaccctgacagtcagggcaattaacagttatggccagcagggc

SEQ ID NO: 71586 - DNA, 75 bp, synthetic construct
  source 1..75: mol_type = other DNA
aacgcgaagcgcgtaaccgttgcccgtacggttgtgttgctgtgttcgccgcccgtattcgtcagggggcgcacc

SEQ ID NO: 71587 - DNA, 75 bp, synthetic construct
  source 1..75: mol_type = other DNA
gaaaacaacacagttaccatcaccagtaatggctgtactcacggcacttgaaatgaaatgcacaagatataaagt

SEQ ID NO: 71588 - DNA, 75 bp, synthetic construct
  source 1..75: mol_type = other DNA
acatcaccgcacaccccgcgccggaccggatacaggtcagtaccctgcctgatggtgtggagacatacggggtgt

SEQ ID NO: 71589 - DNA, 75 bp, synthetic construct
  source 1..75: mol_type = other DNA
acagcatatgacagagcgatcagtacggtcacacaatcgctcaccagagtcgcacaggcatcacaaaaagaagct

SEQ ID NO: 71590 - DNA, 75 bp, synthetic construct
  source 1..75: mol_type = other DNA
atgaaacatatccctgaaggcgtgattcaggcacccgtatcacccgacgccccggaggcgctgccgggatgtcgt

SEQ ID NO: 71591 - DNA, 75 bp, synthetic construct
  source 1..75: mol_type = other DNA
gaacctgccaccaccaccttccggattgccgcaccggcagcaccgtcgcggattgagctgacgccgggctatttt

SEQ ID NO: 71592 - DNA, 75 bp, synthetic construct
  source 1..75: mol_type = other DNA
ggagcaacagggaaacgagttgcatatcagttggggaaaagttggcaccaaagggcaaagtcagataaaaagttt

SEQ ID NO: 71593 - DNA, 75 bp, synthetic construct
  source 1..75: mol_type = other DNA
ttacaaggacgagtggggcgataaatataaatcagaggctgatgttaaaagtcatgacatcatgtttggtgtgac

SEQ ID NO: 71594 - DNA, 75 bp, synthetic construct
  source 1..75: mol_type = other DNA
attcgatatgacgaatgccagttacgcccagcagccagcagcatttcttgcaatggtacagcagttccgtgctga

SEQ ID NO: 71595 - DNA, 75 bp, synthetic construct
  source 1..75: mol_type = other DNA
aaggcagtgacaaaagtgatacggtttttggcgcaggccttgcggtgggatacgatttttatcagcactacaatg

SEQ ID NO: 71596 - DNA, 75 bp, synthetic construct
  source 1..75: mol_type = other DNA
aaggactgtctgtaccggtcattctgaatatcaccagtggtgaaaccgacaccaataccctgagtcaggagatcg

SEQ ID NO: 71597 - DNA, 75 bp, synthetic construct
  source 1..75: mol_type = other DNA
ttattccggcggtggctttcagcggtgccagacatgagcgggagaacagcgatacttattcgtcatgccgcctga

SEQ ID NO: 71598 - DNA, 75 bp, synthetic construct
  source 1..75: mol_type = other DNA
cgttctggatggtgaaacgataaagaccattgagcgtctttatcaccagtcatgtatcggcgctgttcgctgggg

SEQ ID NO: 71599 - DNA, 75 bp, synthetic construct
  source 1..75: mol_type = other DNA
acttgatattcacgaattaagtttgcgtgaatcttttgatagagcttggcgggaatcacacgaagtaaataaagg

SEQ ID NO: 71600 - DNA, 75 bp, synthetic construct
  source 1..75: mol_type = other DNA
aaactaaataccgaataaaactcatatgggatgacaattataaaagaagaaatgaagaggagtttttcatttcta

SEQ ID NO: 71601 - DNA, 75 bp, synthetic construct
  source 1..75: mol_type = other DNA
gaaaacggtgatgcgtactgtgcgtgatgcggtcgtgtcggtggcccgggccgtctgggactggattttcttctg

SEQ ID NO: 71602 - DNA, 75 bp, synthetic construct
  source 1..75: mol_type = other DNA
ctggttcgtcggggggtcacagaagtcagggagaaaaagataatctggaaaaaggcgaaaaaggagaataaagca

SEQ ID NO: 71603 - DNA, 75 bp, synthetic construct
  source 1..75: mol_type = other DNA
aggctcaagatatttaatagagggagagttgaggctaaaaatatagagattcatttccctgataacgatggaaat

SEQ ID NO: 71604 - DNA, 75 bp, synthetic construct
  source 1..75: mol_type = other DNA
aacaggtgattgcctttatcgattacgagaactgcagtaacctgacagaaatttccttaaatatatatacggagt

SEQ ID NO: 71605 - DNA, 75 bp, synthetic construct
  source 1..75: mol_type = other DNA
tatgatttttatccacagttcagtattccggttcgtacagaactggagttttatgctcgtggaaatgctgacacg

SEQ ID NO: 71606 - DNA, 75 bp, synthetic construct
  source 1..75: mol_type = other DNA
aagccggtgcctctgtgatgtcactttcagaccagcgtttcctgtcaggagatgaggaagaaacatcaaagtata

SEQ ID NO: 71607 - DNA, 75 bp, synthetic construct
  source 1..75: mol_type = other DNA
tcaccgtgaagaatgacgaaacgttaattcgagataagcaccctgaatgtatagctcgcctgcgtctaattaaaa

SEQ ID NO: 71608 - DNA, 75 bp, synthetic construct
  source 1..75: mol_type = other DNA
acgcgttcggctgtaccagccgcggtcaggcccaccgtgccgggctgtgggtgataaagaccgaactgctggaaa

SEQ ID NO: 71609 - DNA, 75 bp, synthetic construct
  source 1..75: mol_type = other DNA
tcgctctgtaacgaactttttcagggggaggtgtccccggtcagtgatgtaaacgcctgcacccgtgacgtactg

SEQ ID NO: 71610 - DNA, 75 bp, synthetic construct
  source 1..75: mol_type = other DNA
tgccgtctgatagtgcggaaaaacggtgctgaaatttataaccgtaccgcgctggataatacgctgatttacagt

SEQ ID NO: 71611 - DNA, 75 bp, synthetic construct
  source 1..75: mol_type = other DNA
cagttatcagcaccaccagcaacccggagtattactttgttgttgccctggccgggcagtcaaacggtatggcgt

SEQ ID NO: 71612 - DNA, 75 bp, synthetic construct
  source 1..75: mol_type = other DNA
gggcaaccggctgccggacccggagctgcacccggacagtacactcacagtgtggccggataaccgcatcgcgga

SEQ ID NO: 71613 - DNA, 75 bp, synthetic construct
  source 1..75: mol_type = other DNA
attgcggtgaaatgcaacattctgaccagtacctacatcccccacccgctgctcagccagcaggctttttcgcgt

SEQ ID NO: 71614 - DNA, 75 bp, synthetic construct
  source 1..75: mol_type = other DNA
cggtatgcagagtcaggtgctgctggcggcggacaggattgcgatgattaatcctgcgaatggcaacacaaagcc

SEQ ID NO: 71615 - DNA, 75 bp, synthetic construct
  source 1..75: mol_type = other DNA
cctaacggtaacgtaaggatttatgctacatggacaatattacctgatggcacgaaaagactttcaactgttaat

SEQ ID NO: 71616 - DNA, 75 bp, synthetic construct
  source 1..75: mol_type = other DNA
gctgcggcggccagtaagatagaagttctggctggtaaacaacgcttgtctaatagtttcgaggttagctcactt

SEQ ID NO: 71617 - DNA, 75 bp, synthetic construct
  source 1..75: mol_type = other DNA
gcttaccgtaaacagcttggtttgaaagacttctcccccaaaagccaggacgcagtggcattgcagcagattaaa

SEQ ID NO: 71618 - DNA, 75 bp, synthetic construct
  source 1..75: mol_type = other DNA
gctgaaatttataaccgtaccgcgctggataatacgctgatttacagtggcgttattgatatgcctgccggtcac

SEQ ID NO: 71619 - DNA, 75 bp, synthetic construct
  source 1..75: mol_type = other DNA
aagccggagactgggacagcacattgtggatgattggcggccctgtcttcttctcgctgttagcgatggcgattt

SEQ ID NO: 71620 - DNA, 75 bp, synthetic construct
  source 1..75: mol_type = other DNA
tgtacgtcaccgatgccgtgcaggatcgcaacgatatcgaaatgcttcgcgaaaacatggtgaagtcgaaaggcc

SEQ ID NO: 71621 - DNA, 75 bp, synthetic construct
  source 1..75: mol_type = other DNA
tcagcttctttcacgctggtgggatgcctaccgtaagcagcttgctctgaaagacttctcccccaaaagccagga

SEQ ID NO: 71622 - DNA, 75 bp, synthetic construct
  source 1..75: mol_type = other DNA
ccggaaaaacgcacttacagcggcatctgggacggcagcctgaaaccggcatacagcaacaacccggcctggtgc

SEQ ID NO: 71623 - DNA, 75 bp, synthetic construct
  source 1..75: mol_type = other DNA
atgacggttaaaaacatatctcttgatcgctataaacaacgtttttttagtgaatacctggaattaccaggactg

SEQ ID NO: 71624 - DNA, 75 bp, synthetic construct
  source 1..75: mol_type = other DNA
ttctccatgttgatgactttgattatacaaacccggaacttctcccggaggttgtaaaggcaatagatgttgccg

SEQ ID NO: 71625 - DNA, 75 bp, synthetic construct
  source 1..75: mol_type = other DNA
tccgtgacccgttcgccgacgaagccatgcagggttctgatgatgtgttcaccaccccggacattcgctacgtgc

SEQ ID NO: 71626 - DNA, 75 bp, synthetic construct
  source 1..75: mol_type = other DNA
ttccatccgctctgctcaacgagtccgccacgctgttccgccggaagtattacattaacggcagtcatgcaggct

SEQ ID NO: 71627 - DNA, 75 bp, synthetic construct
  source 1..75: mol_type = other DNA
cagaaagctaccttcgccatgtgcctggcgtcatagcagactggccggtcaaccgggtcagcgaactgcttccgt

SEQ ID NO: 71628 - DNA, 75 bp, synthetic construct
  source 1..75: mol_type = other DNA
tgtggctgaacgccaaactgcgtcacggcaatacggtggtgctgaaaatccgtaatgcccgggggcagatcaaag

SEQ ID NO: 71629 - DNA, 75 bp, synthetic construct
  source 1..75: mol_type = other DNA
atctggcgctggcgaaatgggacacgccgcgggtggtgaagggcgtgcgcttcagtctgcgcctgaccagcggaa

SEQ ID NO: 71630 - DNA, 75 bp, synthetic construct
  source 1..75: mol_type = other DNA
cgcattacgcgtaaaggtttaatcattcccgatctccgttatctggtgggagattgtcagcttgcgcatatcacc

SEQ ID NO: 71631 - DNA, 75 bp, synthetic construct
  source 1..75: mol_type = other DNA
aatcaacaacctgcatttgctttagggcaaacaggaagcactgtcggaaatgataaagctgttggctggaactgg

SEQ ID NO: 71632 - DNA, 75 bp, synthetic construct
  source 1..75: mol_type = other DNA
gctgccgtggtgctggcacacaatcacccgtccggtgaagtcacacctggtaagactgaccggcttatcactgaa

SEQ ID NO: 71633 - DNA, 75 bp, synthetic construct
  source 1..75: mol_type = other DNA
tattactggaaaaacacgtatgccacgcagtatgaaacagtctatggcgcatataaaaatctgaccgcacagaat

SEQ ID NO: 71634 - DNA, 75 bp, synthetic construct
  source 1..75: mol_type = other DNA
atgcagatactaaattcccagcgtaaagctttcctcgatatggtggcatggtcagaaggaacggataacggacgg

SEQ ID NO: 71635 - DNA, 75 bp, synthetic construct
  source 1..75: mol_type = other DNA
cgcctggtacaggcactgggcctggtggatatccgggtgccggaccatctgatagtcggtggcagccaggttttc

SEQ ID NO: 71636 - DNA, 75 bp, synthetic construct
  source 1..75: mol_type = other DNA
gttttgccgtttgcacaacaggtattttccagttattttctgttcccttttacttctggttaagtaaaaaaataa

SEQ ID NO: 71637 - DNA, 75 bp, synthetic construct
  source 1..75: mol_type = other DNA
tcaggaacagccctcagttacaccagaaatctacgtggctgacaaaaatacagacgttattttaccgtggctggc

SEQ ID NO: 71638 - DNA, 75 bp, synthetic construct
  source 1..75: mol_type = other DNA
acggtaaaattttaaacacagacacacccgataattctgcttcggatttagacagtttcttaaagaaaaacaaaa

SEQ ID NO: 71639 - DNA, 75 bp, synthetic construct
  source 1..75: mol_type = other DNA
cagataacagcagtaccggtgctggcggtgtatgacccgacggtacagtatgaattctggttctcagaaaaacgc

SEQ ID NO: 71640 - DNA, 75 bp, synthetic construct
  source 1..75: mol_type = other DNA
aaattaaaacaggtgaatatctcagcaaggggctgacagaggcggggttcgtcgtggatcacgctgataatggtc

SEQ ID NO: 71641 - DNA, 75 bp, synthetic construct
  source 1..75: mol_type = other DNA
atccctggaaagctggttgcgtgaaaagatgaagaccctgttcttcggctctggccatggtggtgagcggggagc

SEQ ID NO: 71642 - DNA, 75 bp, synthetic construct
  source 1..75: mol_type = other DNA
ctggtgaaggcggactctgcaccgggaacgctgaataaatttctgatggacctggaggacgcacagtattacccg

SEQ ID NO: 71643 - DNA, 75 bp, synthetic construct
  source 1..75: mol_type = other DNA
gacgctggagttttctgtatcagcatggtgggtaaatggctggtatcccacagcaagtatcagcgatttgctggt

SEQ ID NO: 71644 - DNA, 75 bp, synthetic construct
  source 1..75: mol_type = other DNA
gcaaaacgcactctgcgtaatgcctgcctgcgcttccttgcttttggtgaaacgcatctggctgacgtgctggtg

SEQ ID NO: 71645 - DNA, 75 bp, synthetic construct
  source 1..75: mol_type = other DNA
tataagtctgcgtagctttgaaggaggaattgagcacagtaactatcaaggttgcgtctccccagcatacactgt

SEQ ID NO: 71646 - DNA, 75 bp, synthetic construct
  source 1..75: mol_type = other DNA
ctacattgttcgatattaagatggccgtaaccaatctggcttctgtagatatgccactacaatatatgtgccaca

SEQ ID NO: 71647 - DNA, 75 bp, synthetic construct
  source 1..75: mol_type = other DNA
gaaggtgaaagtgagccgtgttcctgacggcgttgccggatacagcgtgtgggggctgaagctgccgacgctgcg

SEQ ID NO: 71648 - DNA, 75 bp, synthetic construct
  source 1..75: mol_type = other DNA
tgacacgctggatcctttataacggcgagcaacaggtagccgcctttgcattacctgcaacctgtcggcctgagg

SEQ ID NO: 71649 - DNA, 75 bp, synthetic construct
  source 1..75: mol_type = other DNA
ttgcgaggagatcaatcgccagaatcgtcagttgcgggtggaaaaaattctgaatcgctccggcatccagccgtt

SEQ ID NO: 71650 - DNA, 75 bp, synthetic construct
  source 1..75: mol_type = other DNA
ggacaactgggtctcaatgtggtatctgtttcatgtgtgggcaatgatcattcagcctcgatcattcttgatgga

SEQ ID NO: 71651 - DNA, 75 bp, synthetic construct
  source 1..75: mol_type = other DNA
gattattttactgagcaggatataaaagaagagattagttgcaaaagaggatttgagtttggaagatacacagct

SEQ ID NO: 71652 - DNA, 75 bp, synthetic construct
  source 1..75: mol_type = other DNA
tgaaatgaaaattcaggttggtgctaatgatggtgaaaccatcactatcaatctggcaaaaattgatgcgaaaac

SEQ ID NO: 71653 - DNA, 75 bp, synthetic construct
  source 1..75: mol_type = other DNA
tccggaccttatctggtcgttaccagacggcgaaatacgccgctacgacaggcgcctgaacataatctgtcgcga

SEQ ID NO: 71654 - DNA, 75 bp, synthetic construct
  source 1..75: mol_type = other DNA
atatgcggttaagttgagaacagatacgccattacgaaatgataatattataaaaaaatatataaaagctcaagc

SEQ ID NO: 71655 - DNA, 75 bp, synthetic construct
  source 1..75: mol_type = other DNA
agctggagacaataagcgactgtcttagcttgctggcaaaaatcaaagaaactattgaagagattaaatttcagc

SEQ ID NO: 71656 - DNA, 75 bp, synthetic construct
  source 1..75: mol_type = other DNA
acatgcgaaaagcgaattgctaattggttggctgttgctgagtatgcgctatacattcccatgcgagaatcattt

SEQ ID NO: 71657 - DNA, 75 bp, synthetic construct
  source 1..75: mol_type = other DNA
acatgcgaaaagcgaattgctaattggttagccgttgctgaatatgccctgtatattcccatgcgagaatcattt

SEQ ID NO: 71658 - DNA, 75 bp, synthetic construct
  source 1..75: mol_type = other DNA
cagcagggaaagcatccagtgcgcaagtcaataaggttattcggcaggccagctttattgctgcagctctggccc

SEQ ID NO: 71659 - DNA, 75 bp, synthetic construct
  source 1..75: mol_type = other DNA
cggcgtgacatcagaccacacctggaaaaaccttcatttttacgcccgtaaggtgatgagtatgtggcgttaccg

SEQ ID NO: 71660 - DNA, 75 bp, synthetic construct
  source 1..75: mol_type = other DNA
tcagaacgtcaaaagcgcgaagagttgtttaattacttcatcagaaagggtgccgtgcagcaagaaacagaagac

SEQ ID NO: 71661 - DNA, 75 bp, synthetic construct
  source 1..75: mol_type = other DNA
tggcgaacaccggcagcggactggtacaggctgccaccctgctgctggatgtggtgaatactgtcaacggcggac

SEQ ID NO: 71662 - DNA, 75 bp, synthetic construct
  source 1..75: mol_type = other DNA
gggctggctgcagctcgcgccaaaggcagagtaggtggacgccatcctaagttgaccacagaacagtgggcacag

SEQ ID NO: 71663 - DNA, 75 bp, synthetic construct
  source 1..75: mol_type = other DNA
tcagttagctatcgcagtggataatattgtcaggccagaacgtacacggcagatgatcgttgatttttatcgcca

SEQ ID NO: 71664 - DNA, 75 bp, synthetic construct
  source 1..75: mol_type = other DNA
gagtatgtcgccagcggtggcaaaggcaactttgatgattctgaaacgatggtaccatgcgatgctttatgagac

SEQ ID NO: 71665 - DNA, 75 bp, synthetic construct
  source 1..75: mol_type = other DNA
tcgcggtgccaacgaagcttttgacctgatggtgtatgccgaggctctggtcattctgcatggatacgaaaagat

SEQ ID NO: 71666 - DNA, 75 bp, synthetic construct
  source 1..75: mol_type = other DNA
tgttgacctgcaagacccgattgaggtaatacctcaactgattgaaaaatggcaggcaggcgctgatatggtgct

SEQ ID NO: 71667 - DNA, 75 bp, synthetic construct
  source 1..75: mol_type = other DNA
ggcggacaactgggcgaacagtggttccgtgctggcaaccggtaaccttactgcttcggcaaccggtcagttgac

SEQ ID NO: 71668 - DNA, 75 bp, synthetic construct
  source 1..75: mol_type = other DNA
gattaaccgtaccttcccggataacaccggcagaagtgcccgccgtgccagggccagcggtgatgttgccctgtg

SEQ ID NO: 71669 - DNA, 75 bp, synthetic construct
  source 1..75: mol_type = other DNA
gttgccagtggcgatgtatacaactctggttacgggttattcccatctgaacaggctcgtaaggactggcaaaac

SEQ ID NO: 71670 - DNA, 75 bp, synthetic construct
  source 1..75: mol_type = other DNA
cggttcgggcttaggctccagcgcctgttcggtggtcgcggcgctgatggcgatgaatgaacactgtggcaagcc

SEQ ID NO: 71671 - DNA, 75 bp, synthetic construct
  source 1..75: mol_type = other DNA
gacacttaaataatggcggatatggagcgagacccaacaaaccgcctacgcccgatccaagtaaattgccggaca

SEQ ID NO: 71672 - DNA, 75 bp, synthetic construct
  source 1..75: mol_type = other DNA
gtgttcacacttccctgccagtactggtccctgatattccacaaccggtggttgctggcagagatgagccgtatc

SEQ ID NO: 71673 - DNA, 75 bp, synthetic construct
  source 1..75: mol_type = other DNA
cctgaatccggggatttaccacaggttcagtctgatgcagcggtattcgggcgcaaccagaagggcttcatatga

SEQ ID NO: 71674 - DNA, 75 bp, synthetic construct
  source 1..75: mol_type = other DNA
tgctctacacgccagctatgacgacgggcaatcaggcgaaaaatttttgcgggaactgtgcgaagtggatctgct

SEQ ID NO: 71675 - DNA, 75 bp, synthetic construct
  source 1..75: mol_type = other DNA
ggacgtcagcaactcgagcgcggcgatgtgcttccccatgacatggtcgaatcttccgctgctgcatggcgggat

SEQ ID NO: 71676 - DNA, 75 bp, synthetic construct
  source 1..75: mol_type = other DNA
ttatcgacgcttgagaattacgcgtttcctcaactgggagcaaaaacgctggattcgattacggctgcggacgtg

SEQ ID NO: 71677 - DNA, 75 bp, synthetic construct
  source 1..75: mol_type = other DNA
acaacgtaatgcgctgaactgtgcaggatgtgagctgatttttgaagacaagataagcggtacaaagtccgacag

SEQ ID NO: 71678 - DNA, 75 bp, synthetic construct
  source 1..75: mol_type = other DNA
accgggactgaaaaaactgctcagaacattatcagcaggtgacactctggtagtctggaagctggaccggctggg

SEQ ID NO: 71679 - DNA, 75 bp, synthetic construct
  source 1..75: mol_type = other DNA
gcacatcacaattcatcattgcgtcaatgcaaggcgagatcaaacgccgccagcgccgcaaggccaaagagcagg

SEQ ID NO: 71680 - DNA, 75 bp, synthetic construct
  source 1..75: mol_type = other DNA
atttagccgtgatcttccctgatctggagatcgaattgaaatacgcctgcgctgataacatcacaggtaaagcta

SEQ ID NO: 71681 - DNA, 75 bp, synthetic construct
  source 1..75: mol_type = other DNA
gtcggacggttgctggctgcgggggaatctcgtcaacgtgtggcgctgatttttgatattggcctgtccacgctc

SEQ ID NO: 71682 - DNA, 75 bp, synthetic construct
  source 1..75: mol_type = other DNA
tgagtcggatttactgaaatatccagtctctaaaggtcgtaaacacatccgaattactcaggacgctttagatac

SEQ ID NO: 71683 - DNA, 75 bp, synthetic construct
  source 1..75: mol_type = other DNA
tactggatgtattaaaaaatataaatagctatgatgactcagcttttatatctagtttgatatatttaatttcaa

SEQ ID NO: 71684 - DNA, 75 bp, synthetic construct
  source 1..75: mol_type = other DNA
ctgccggagacatatgaccgtccggatccgcgcattaaacagctggcgcgccgcagtacagttacgccgggtggg

SEQ ID NO: 71685 - DNA, 75 bp, synthetic construct
  source 1..75: mol_type = other DNA
tcccccgtaagcaggttgcaatcatctatgatgtggctgtttccacgctttataagaagtttccggcgtcatcct

SEQ ID NO: 71686 - DNA, 75 bp, synthetic construct
  source 1..75: mol_type = other DNA
agcgggaaaaaattaagggacaaattgttgaactcgtacaacaacgtggacgaatgactcttcgtgaactggcag

SEQ ID NO: 71687 - DNA, 75 bp, synthetic construct
  source 1..75: mol_type = other DNA
ttacggctcgttgctggcgtcaatgattgaccagccgcagaccccggcgcttgagttgcagattaaggtcgcctg

SEQ ID NO: 71688 - DNA, 75 bp, synthetic construct
  source 1..75: mol_type = other DNA
acaccggatcgatggggccgaaagtggccgcctgctgcaagtttgttgaagcttgcaacggtattgccgggatcg

SEQ ID NO: 71689 - DNA, 75 bp, synthetic construct
  source 1..75: mol_type = other DNA
ggtcataacctgctggcatcgttctacgtacagagcgatgccacagaccttaacgtgatgtatcacaaaggaaac

SEQ ID NO: 71690 - DNA, 75 bp, synthetic construct
  source 1..75: mol_type = other DNA
caaacatttcgcaccattctgaccgtatccagcactgccactgtggcgcttaccgtggataacaccatggtgatg

SEQ ID NO: 71691 - DNA, 75 bp, synthetic construct
  source 1..75: mol_type = other DNA
cgcgccgctatcgacgccgccaaccgcgccctgcccgcctggcgtgcgctcaccgccaaagaacgcgccaccatt

SEQ ID NO: 71692 - DNA, 75 bp, synthetic construct
  source 1..75: mol_type = other DNA
tgccgggaataacagccttcaggtgacgccggttattgatggtcaggacagtacaccgttcacgctgacgcagtc

SEQ ID NO: 71693 - DNA, 75 bp, synthetic construct
  source 1..75: mol_type = other DNA
aggggttactctggaaggaaatgccggtcataacctgctggcatcgttctacgtacagagcgatgccacagacct

SEQ ID NO: 71694 - DNA, 75 bp, synthetic construct
  source 1..75: mol_type = other DNA
gtttaaccgtcatagtgacggcactggtaacgaggaaagacctctgcgaggtacgaatccgaaccggccagacgg

SEQ ID NO: 71695 - DNA, 75 bp, synthetic construct
  source 1..75: mol_type = other DNA
atgttagtcgccctgattgtcatctgtttaaccgtcatagtgacggcactggtaacgaggaaggacctctgcgag

SEQ ID NO: 71696 - DNA, 75 bp, synthetic construct
  source 1..75: mol_type = other DNA
acacgggattgcctgtgggtaaggccagtatccggtgatccgagcgtggaaattaccggtgcgggtattggtgct

SEQ ID NO: 71697 - DNA, 75 bp, synthetic construct
  source 1..75: mol_type = other DNA
acagtctggtgattgttgatttaccgggtgtgggagaaaacgggcaacgggaccatgaataccgtgccctgtacc

SEQ ID NO: 71698 - DNA, 75 bp, synthetic construct
  source 1..75: mol_type = other DNA
cctttgagcaaccgctggctttactgccatatacgcttcgcaacctcatccttgaacgtcttcgtagcctgacgc

SEQ ID NO: 71699 - DNA, 75 bp, synthetic construct
  source 1..75: mol_type = other DNA
ccctgatcgtcatctgtttaaccgtcgttgtgacggcactggtaacgaggaaagacatctgcgaggtacgaatcc

SEQ ID NO: 71700 - DNA, 75 bp, synthetic construct
  source 1..75: mol_type = other DNA
gtgccgtggatttgcggtgataccacgtattactggaaaaacgctggcaccgataaatatgaggcagtatacggt

SEQ ID NO: 71701 - DNA, 75 bp, synthetic construct
  source 1..75: mol_type = other DNA
atacccgctcgttgcgcccgttaggccaaattctgctggaaaatcaggtcatcactgaagaacaactcgatacag

SEQ ID NO: 71702 - DNA, 75 bp, synthetic construct
  source 1..75: mol_type = other DNA
atgctctacacacgtaggttagcctcttacgtgccgaaaggcaaggagaagcaggctatgaagcagcaaaaggcg

SEQ ID NO: 71703 - DNA, 75 bp, synthetic construct
  source 1..75: mol_type = other DNA
atatatcgcctaattatgaagagcggttcagataactttcgtgcgtcttccattcaggggatcatgaagcgtatc

SEQ ID NO: 71704 - DNA, 75 bp, synthetic construct
  source 1..75: mol_type = other DNA
ggcgcacaggcggacgtcgaccgaagctgacaaaagaacagcatgagcaaatagcaaggctaatcaaaaacgggc

SEQ ID NO: 71705 - DNA, 75 bp, synthetic construct
  source 1..75: mol_type = other DNA
agctcaggataatgcttgctggtccggctgcgagttatatgacacattcaccagccataaagaaggttcttgatg

SEQ ID NO: 71706 - DNA, 75 bp, synthetic construct
  source 1..75: mol_type = other DNA
caaattatcaaagtcgaaaacaatttatatgtaatagaccttaaattaatagagaaaatgttttgttttcatgat

SEQ ID NO: 71707 - DNA, 75 bp, synthetic construct
  source 1..75: mol_type = other DNA
ttatccttgtagatggttcatcttatctttatcgcgcatatcacgcgtttcccccgctgactaacagcgcaggcg

SEQ ID NO: 71708 - DNA, 75 bp, synthetic construct
  source 1..75: mol_type = other DNA
cctgccggggcagcagtatgatgaggagtccggcctgtattacaaccgccaccgctattatgacccgctgcaggg

SEQ ID NO: 71709 - DNA, 75 bp, synthetic construct
  source 1..75: mol_type = other DNA
caacggggcaacccgtcggacagccactgggaccaacggtaaaggtctttaagttaacgaataagcccgtggatt

SEQ ID NO: 71710 - DNA, 75 bp, synthetic construct
  source 1..75: mol_type = other DNA
agggtggatatcatgcatttaaaattggcatatcaaaggatgtcatggcctttttttcggccagtcctgagtgtg

SEQ ID NO: 71711 - DNA, 75 bp, synthetic construct
  source 1..75: mol_type = other DNA
gatccgatagggttgaaggggggaataaatctatacacgtatccactggcaccaatacgttacactgatccactg

SEQ ID NO: 71712 - DNA, 75 bp, synthetic construct
  source 1..75: mol_type = other DNA
actgttcctcgtgggggatgatgcactctcccgtcagtggctgcaggcgaatgcggccgcgctgcttgaaaggaa

SEQ ID NO: 71713 - DNA, 75 bp, synthetic construct
  source 1..75: mol_type = other DNA
tttacggactgctcggggtacacgacgcggtatgagtacgaccggtacggtcaacaaatcgccgttcaccgggaa

SEQ ID NO: 71714 - DNA, 75 bp, synthetic construct
  source 1..75: mol_type = other DNA
gataaggcgcgccagcttttcgatacggcttctcaggtctgcgaaattgtcgacggtgttcgacagtgtctgcag

SEQ ID NO: 71715 - DNA, 75 bp, synthetic construct
  source 1..75: mol_type = other DNA
tgcaacaggcggtggcccgcaaccgggtgaccatgaacgcccgggaaacacaacgggaaagaaccgcacatgaac

SEQ ID NO: 71716 - DNA, 75 bp, synthetic construct
  source 1..75: mol_type = other DNA
cactggtagcgatactggtgccttttttcctggtgggatgcgtcagcctggataaggcgcgccagcttttcgata

SEQ ID NO: 71717 - DNA, 75 bp, synthetic construct
  source 1..75: mol_type = other DNA
ggcactggtagcgatactggtgccttttttattggtgggatgcgtcagcctggataaggcgcgccagcttttcga

SEQ ID NO: 71718 - DNA, 75 bp, synthetic construct
  source 1..75: mol_type = other DNA
gctaatcagtacgcactggcgctgtactggccggtttctgccctgccgcaaggggttaccctggaaggaaatgcc

SEQ ID NO: 71719 - DNA, 75 bp, synthetic construct
  source 1..75: mol_type = other DNA
caccggaagagttgtgggtgttcatcagcccccgcattgccgacaggatcacagacggggggcgcaactggttgt

SEQ ID NO: 71720 - DNA, 75 bp, synthetic construct
  source 1..75: mol_type = other DNA
agatcaccgacgtgatgcgccttacccgggctgtgaaaaactgctggcggaatgacagtgaaaaaacagcggatg

SEQ ID NO: 71721 - DNA, 75 bp, synthetic construct
  source 1..75: mol_type = other DNA
ggagcgcgcggtcaggaaactggcagacggaaatcaggtggtgcctgcatccacaacgggcaggaaaaccaccac

SEQ ID NO: 71722 - DNA, 75 bp, synthetic construct
  source 1..75: mol_type = other DNA
agcttaaggaatccattggtgaacggattgtggatcgcgttactgatggtgggcgtaactgcctggtgtttggtt

SEQ ID NO: 71723 - DNA, 75 bp, synthetic construct
  source 1..75: mol_type = other DNA
tgcgatcttaaaaacacagatcaaaataggcgtttccatcgaacaacaagagaagctgcccacaaaatctaaatt

SEQ ID NO: 71724 - DNA, 75 bp, synthetic construct
  source 1..75: mol_type = other DNA
acatcaagattaagcgattatgtggattttacagcgagagcaagtcgggatagcttcttgaaatcattaacatta

SEQ ID NO: 71725 - DNA, 75 bp, synthetic construct
  source 1..75: mol_type = other DNA
cgctttgtgccgtggcggtgcaggtactggctggtctttttaccggaaactgggcttacggggcgatagccggtt

SEQ ID NO: 71726 - DNA, 75 bp, synthetic construct
  source 1..75: mol_type = other DNA
gtacagaaccaggctgtaacaggcgcgttaagtccggcaagtgtgaggagcacaggcgggcggcatggcgtgcag

SEQ ID NO: 71727 - DNA, 75 bp, synthetic construct
  source 1..75: mol_type = other DNA
tcattttatgtggcgctgatgtggcgcaggccgtcgatgacaaaaacatgtacatgcatttttttgaagagatga

SEQ ID NO: 71728 - DNA, 75 bp, synthetic construct
  source 1..75: mol_type = other DNA
accattgccccatgggggaattaccggactgacccttcatccttcttcagtaaaggggcgggggaaatgggtttt

SEQ ID NO: 71729 - DNA, 75 bp, synthetic construct
  source 1..75: mol_type = other DNA
gtcagcgccagtatacgtactgaacatcagcctgccatgccatggaaagtcataccgttatacatcgccagccgc

SEQ ID NO: 71730 - DNA, 75 bp, synthetic construct
  source 1..75: mol_type = other DNA
ccttgatccgcgtacggtggcggaaggggaaatggcacttatcgtggcgcgactgaaggagattgcagatcatgc

SEQ ID NO: 71731 - DNA, 75 bp, synthetic construct
  source 1..75: mol_type = other DNA
atgattaagagcattgatgtcactccatttcttcactcgctttgcgcttttgcggctcaggtactggttggtatt

SEQ ID NO: 71732 - DNA, 75 bp, synthetic construct
  source 1..75: mol_type = other DNA
gccgtgagctggcagcaaagtatccgggaaacacgccgctgatgctgcttatctggtccccggaagagattcagg

SEQ ID NO: 71733 - DNA, 75 bp, synthetic construct
  source 1..75: mol_type = other DNA
ccacctcgcagtacctgacgtcggtgattctgaataatctgcctgagcgcccctttaacatccggatggtcaggg

SEQ ID NO: 71734 - DNA, 75 bp, synthetic construct
  source 1..75: mol_type = other DNA
ccgctgacggacacggacggcaatcccgtgatacacggtgtgaccgccgtctggcgcgccggggagcaggagcag

SEQ ID NO: 71735 - DNA, 75 bp, synthetic construct
  source 1..75: mol_type = other DNA
tgaaaaatacgcgctggtacgaactgaccagccgggattcagcgcaggagtcccgtcgcagttaatcaacagcat

SEQ ID NO: 71736 - DNA, 75 bp, synthetic construct
  source 1..75: mol_type = other DNA
ttaagaacacagttacatttagtgtagataaagacagcttgaaaaaagcgaaagactctattacaggcttaaagg

SEQ ID NO: 71737 - DNA, 75 bp, synthetic construct
  source 1..75: mol_type = other DNA
gccgcagatattcccgtggcgagcgataacccagcgcactatgcggatgccattcgttataatgctcgaacgcct

SEQ ID NO: 71738 - DNA, 75 bp, synthetic construct
  source 1..75: mol_type = other DNA
gaccggggaggtcgaacaaaaagttaccgcagacatgatgattgagtttatcggtcaggatggggctaaaacgtg

SEQ ID NO: 71739 - DNA, 75 bp, synthetic construct
  source 1..75: mol_type = other DNA
aatacaccagaagggtgtgttataaaagaatatccagatggccgtaaggaactggtgagtttcatgactggtaca

SEQ ID NO: 71740 - DNA, 75 bp, synthetic construct
  source 1..75: mol_type = other DNA
actgacattcaccgtatcttcatcaggagcgaataactggacaccaacaaccagtatcagcgatctgctggttgt

SEQ ID NO: 71741 - DNA, 75 bp, synthetic construct
  source 1..75: mol_type = other DNA
tcgtggtttattccggtcgttatgacgacgaaaacgggcagcagcaatatttcctgaaacaaaacatgatggttt

SEQ ID NO: 71742 - DNA, 75 bp, synthetic construct
  source 1..75: mol_type = other DNA
ggcgctggtgctggacggcattcaggtgaaacgtccgcgttgccaggaagcggctcagcagggttacgccaacgc

SEQ ID NO: 71743 - DNA, 75 bp, synthetic construct
  source 1..75: mol_type = other DNA
acgcagctttaaaaaattccgtgaactgtacgatctttcccgtggttcagaatccgccgcagaactggcctgtaa

SEQ ID NO: 71744 - DNA, 75 bp, synthetic construct
  source 1..75: mol_type = other DNA
ctgaccaccattctcaatccggaagcggttatttttgccaacccgatagcgcagggtgcctgtgcagctgatgcg

SEQ ID NO: 71745 - DNA, 75 bp, synthetic construct
  source 1..75: mol_type = other DNA
cggcattctccatttacggtcatgacgttcaggatgccgatgacacatcgattcctgccgatgttgaagaaaaac

SEQ ID NO: 71746 - DNA, 75 bp, synthetic construct
  source 1..75: mol_type = other DNA
aagctctgaccagcaactgccggtggtgtaaggccagcccggaaaaattcacggtattcattgaatcgggtggca

SEQ ID NO: 71747 - DNA, 75 bp, synthetic construct
  source 1..75: mol_type = other DNA
tcacgtttgaatggaacggtcgtatctggaatgctggccccgactcactgggccgcctgtccccggtagtcatgc

SEQ ID NO: 71748 - DNA, 75 bp, synthetic construct
  source 1..75: mol_type = other DNA
cgtagcggatgtggataaatgggcgctgtatgccatcagtcggtactgcgaccagtcggtgccggatggatttgg

SEQ ID NO: 71749 - DNA, 75 bp, synthetic construct
  source 1..75: mol_type = other DNA
tggcgggcctgacgcgcatgatggcgcaaaacatcgtggcctggcgcgatgagaacggccagttccagaaccgtc

SEQ ID NO: 71750 - DNA, 75 bp, synthetic construct
  source 1..75: mol_type = other DNA
gcgattcaaaatgatttactggagagtttatcaaaagcgttaaaccaaccgtggccacaacgaatgcaggagacg

SEQ ID NO: 71751 - DNA, 75 bp, synthetic construct
  source 1..75: mol_type = other DNA
atgtggtacagggaaggtactatcacatttacacagggtagcaatactctggttggggcagggacagcctggaac

SEQ ID NO: 71752 - DNA, 75 bp, synthetic construct
  source 1..75: mol_type = other DNA
ggggcgggatttacccgtgcattgtattctacatggctgagttatttaccagcagagaagtttgcgtacaaggta

SEQ ID NO: 71753 - DNA, 75 bp, synthetic construct
  source 1..75: mol_type = other DNA
gaaaggtgtatctgaccccggcacagcttgccatgctgctggagggtatagtctggatgcaaccgggaaggtcga

SEQ ID NO: 71754 - DNA, 75 bp, synthetic construct
  source 1..75: mol_type = other DNA
gcgaaaggcgtacctttccgcgaggcgcaccatattgtgggtgaagcggtggtggaagccattcgtcagggcaaa

SEQ ID NO: 71755 - DNA, 75 bp, synthetic construct
  source 1..75: mol_type = other DNA
ttacaattaatgatccttcagcagttgtaaatctggtgtatatagatgacttttgttctgacatattaaagctat

SEQ ID NO: 71756 - DNA, 75 bp, synthetic construct
  source 1..75: mol_type = other DNA
taacagcaagaagcaagttgctgatgaactgggcatcggcattgctacgctctatcgcaagattaagaaatatga

SEQ ID NO: 71757 - DNA, 75 bp, synthetic construct
  source 1..75: mol_type = other DNA
aaattcacccgggacatcacggccagcgcgagagaggggaaaattgacccggtatcgggacgcgatacggaaatc

SEQ ID NO: 71758 - DNA, 75 bp, synthetic construct
  source 1..75: mol_type = other DNA
actggtttctgcattgtgtattgtgttcgcttctgttttgggcttctttatcggtctggcgagactttcggataa

SEQ ID NO: 71759 - DNA, 75 bp, synthetic construct
  source 1..75: mol_type = other DNA
tgtcgcccgggttctgcgaggactgttctggtgtctgaagtacaccgtcattctgccactggccacaatggccct

SEQ ID NO: 71760 - DNA, 75 bp, synthetic construct
  source 1..75: mol_type = other DNA
ccagcagggagccccgtgcagccatggcgctgagaaaaatcgcgggtctttatcgcattgagaagttcatccgtg

SEQ ID NO: 71761 - DNA, 75 bp, synthetic construct
  source 1..75: mol_type = other DNA
taccgcaacgcgtctggcatttgcaggtttcggctttggtcagaatggtactttcgactatggtcgtaactacgg

SEQ ID NO: 71762 - DNA, 75 bp, synthetic construct
  source 1..75: mol_type = other DNA
cccgtgcaccggagcggtggccatcagggaccattaccgtcagggtttatgacgatcagccgtttgaccggcaaa

SEQ ID NO: 71763 - DNA, 75 bp, synthetic construct
  source 1..75: mol_type = other DNA
ctcagcctgcatgtgttgttttaccagtacaggaggctgcaatacaggaagaaattaaaacagaaactgtggcgg

SEQ ID NO: 71764 - DNA, 75 bp, synthetic construct
  source 1..75: mol_type = other DNA
tacgacgataagggccgcctgacgggcgaacggcagacggtggagaacccggagacgggggaactgctgtggcag

SEQ ID NO: 71765 - DNA, 75 bp, synthetic construct
  source 1..75: mol_type = other DNA
cgttgataaaagcgtatacacctggcgtgtggctgataacaacgctcagcaggaacagccagagcaggcagaacc

SEQ ID NO: 71766 - DNA, 75 bp, synthetic construct
  source 1..75: mol_type = other DNA
ctggtttgtcagccaaaatgagcattcgtgcgatagctactgcgctgaatcgcagtccttcgacgatctcacgtg

SEQ ID NO: 71767 - DNA, 75 bp, synthetic construct
  source 1..75: mol_type = other DNA
cgtaaaaaatcaggaattggagtagcgccaactctgcatgaaattgctcgagggttaatagataaggcgctggca

SEQ ID NO: 71768 - DNA, 75 bp, synthetic construct
  source 1..75: mol_type = other DNA
agtaaatctgctggctgctttatttcatgccagcattagcctcatagtcttatttattgcaatactggtgtttaa

SEQ ID NO: 71769 - DNA, 75 bp, synthetic construct
  source 1..75: mol_type = other DNA
gtgcctggtttgaagattacgcttttgcagcaaccactggtgtggatggatggtcctgccaacctgcgtcatttt

SEQ ID NO: 71770 - DNA, 75 bp, synthetic construct
  source 1..75: mol_type = other DNA
ccctttaacatccggatggtccgggagacggcggacagcaccacggaccagctgcagaacagaacgctgtggtcg

SEQ ID NO: 71771 - DNA, 75 bp, synthetic construct
  source 1..75: mol_type = other DNA
ccaaaaagaaactggctaaagtgggcaactcactgattggtttgatgttcgtgggtttcgccgcccgactggcga

SEQ ID NO: 71772 - DNA, 75 bp, synthetic construct
  source 1..75: mol_type = other DNA
gagctgactaacgacgccgctcccggaattgaagcgctcaagaaagagctgggccgcttacaaactggcgtccag

SEQ ID NO: 71773 - DNA, 75 bp, synthetic construct
  source 1..75: mol_type = other DNA
ttgtatctttgtttgtttttacatacaacacatgggcgcatgtgtaataataatattaaaataatgcgcaagtat

SEQ ID NO: 71774 - DNA, 75 bp, synthetic construct
  source 1..75: mol_type = other DNA
tgcgttaccagtccgggaagcggaaacacaggaagaaataaaaactgaaagtgtggcggtcacagtgcagtcaca

SEQ ID NO: 71775 - DNA, 75 bp, synthetic construct
  source 1..75: mol_type = other DNA
ggctggtaaataactggtatcccacagcaagtatcagcgatttgctggttgtggtgatgaagaaagccactgcag

SEQ ID NO: 71776 - DNA, 75 bp, synthetic construct
  source 1..75: mol_type = other DNA
cactttgtgctgtggctgcgcaggtactggttggtctttttaccggaaactgggcttacggagcgatagccggtt

SEQ ID NO: 71777 - DNA, 75 bp, synthetic construct
  source 1..75: mol_type = other DNA
tggtggaactgcggaacaaaccagcccatgaactgaaggaagtgggcgatcagtggcgcacgccggataacattt

SEQ ID NO: 71778 - DNA, 75 bp, synthetic construct
  source 1..75: mol_type = other DNA
gccggaagctggcagcaaagtattcgggagacacgccactgatgctggttatctggtccccggaagaaattcagg

SEQ ID NO: 71779 - DNA, 75 bp, synthetic construct
  source 1..75: mol_type = other DNA
ctgtattttcagctctgaccctgggtgttgcgacaagtgcgtctgccgcaatcgtcaatggcggtactgttcact

SEQ ID NO: 71780 - DNA, 75 bp, synthetic construct
  source 1..75: mol_type = other DNA
aattgaactgataccggggtattttcagataacggcagtcccgcgtcttgcggtgtatgacccgacggtgcagtt

SEQ ID NO: 71781 - DNA, 75 bp, synthetic construct
  source 1..75: mol_type = other DNA
atgggaaaaaatcaggaagaaaggaaaatccccgtcattgtaatgaaaaaacgtcgtaccttttcgttaccttcc

SEQ ID NO: 71782 - DNA, 75 bp, synthetic construct
  source 1..75: mol_type = other DNA
ttaataatcttgagcgttgggcatatgacaacgggatcgatagcctccagggtgatcagggacgcagaaaaatac

SEQ ID NO: 71783 - DNA, 75 bp, synthetic construct
  source 1..75: mol_type = other DNA
acttgaggcatgtggtgaggcgtttctggcgcaggttcgccagcaggcagaaaaactggtcagggagatggcggc

SEQ ID NO: 71784 - DNA, 75 bp, synthetic construct
  source 1..75: mol_type = other DNA
taactgcgacgattgaacaacgtggtccactaactgcggatgaactggctacgttgttcggtaccacatcccgca

SEQ ID NO: 71785 - DNA, 75 bp, synthetic construct
  source 1..75: mol_type = other DNA
tttgacaagacctggaagggaccggcaatcagctacatcgggcgcgatgaacttgaggcatgtggtgaggcgttt

SEQ ID NO: 71786 - DNA, 75 bp, synthetic construct
  source 1..75: mol_type = other DNA
cactgcgccaggtgtgcaagctgtcggcgcgtaaacaaaggcaggtgcaggattttattggggtgattagtagca

SEQ ID NO: 71787 - DNA, 75 bp, synthetic construct
  source 1..75: mol_type = other DNA
tttccatgaaccggcaacggatgtcagccgggtgttctcatcggtgatagatatgccggcagggcggggtcatgt

SEQ ID NO: 71788 - DNA, 75 bp, synthetic construct
  source 1..75: mol_type = other DNA
atgtgcaataacatccgtccggacgcaaccgccgccgcgctcactacgctgatgctcgcgcttattgatatttct

SEQ ID NO: 71789 - DNA, 75 bp, synthetic construct
  source 1..75: mol_type = other DNA
cggaagaccagcggattgagtccggtatttcttccgccgcggcgatggagattatcagcaacgtgagcgaaaacc

SEQ ID NO: 71790 - DNA, 75 bp, synthetic construct
  source 1..75: mol_type = other DNA
aagccctggatactatcgccagtagtctgaaaaaaaccgtcgaacaatatggcaatgaggctgtatatattcagt

SEQ ID NO: 71791 - DNA, 75 bp, synthetic construct
  source 1..75: mol_type = other DNA
gtcgtcttatcgtcctggcagaccagccgaaatatacaggcgaaggaacgggcatcaagaaaatcacgggcggcg

SEQ ID NO: 71792 - DNA, 75 bp, synthetic construct
  source 1..75: mol_type = other DNA
gggatgtgttattcagtcggcagtgctacgcgccaggggagcagttcgccgacccggtttatcggccagtcggct

SEQ ID NO: 71793 - DNA, 75 bp, synthetic construct
  source 1..75: mol_type = other DNA
tctgctgaactgtgcggcatcagccaacagagcgtgtatctcgccgtcctcccggtggcgcataactttccgctg

SEQ ID NO: 71794 - DNA, 75 bp, synthetic construct
  source 1..75: mol_type = other DNA
atgtaaaattcactcctataaatcacaacaaccagatctggtttaccagcaaagaattggcggcagcattaaaat

SEQ ID NO: 71795 - DNA, 75 bp, synthetic construct
  source 1..75: mol_type = other DNA
ccgcttgatgcgctgccgcccctcactagtgggcactgttgcaaagttagcgatgaggcagccttttgtcttatt

SEQ ID NO: 71796 - DNA, 75 bp, synthetic construct
  source 1..75: mol_type = other DNA
tattctgatcgacggtgataaagccatcgtcaacaatgacggcgacaacgccatcagcaacggcggcaccggcac

SEQ ID NO: 71797 - DNA, 75 bp, synthetic construct
  source 1..75: mol_type = other DNA
cggccttgctgttcttctacggcaaggtgctgtgcacggatctgccctggcttcaggagatcggaagacctcggc

SEQ ID NO: 71798 - DNA, 75 bp, synthetic construct
  source 1..75: mol_type = other DNA
ctccggtaagcggatggatgatgacgaagagattacctacactgcacgcggtgtggctgccgacccggacgacgt

SEQ ID NO: 71799 - DNA, 75 bp, synthetic construct
  source 1..75: mol_type = other DNA
tggttgtggatgacttttccaccatgcgacgcatagtgcgtaacctgctgaaagagctgggattcaataatgttg

SEQ ID NO: 71800 - DNA, 75 bp, synthetic construct
  source 1..75: mol_type = other DNA
gcagccacaacagcaggttgcgccgcagccacaatatcagcagccgcaacaaccggttgcgccacagccgcaata

SEQ ID NO: 71801 - DNA, 75 bp, synthetic construct
  source 1..75: mol_type = other DNA
acggcgcatgtaaaattccaaccgtggcaggatgataagtggagtcgtgtgttaccatatttccgtcagaatctg

SEQ ID NO: 71802 - DNA, 75 bp, synthetic construct
  source 1..75: mol_type = other DNA
gattctatccgcgaaaacccaaacaacggacgctccatttcacaggttcgcgccgcgattcgatccgggaagtaa

SEQ ID NO: 71803 - DNA, 75 bp, synthetic construct
  source 1..75: mol_type = other DNA
tgagcgtctcgatgcactgaaagatgaagtgcgtcgcccgttgaccgaatgggaggcggagcaggaacgcattaa

SEQ ID NO: 71804 - DNA, 75 bp, synthetic construct
  source 1..75: mol_type = other DNA
gacgtctttattggcggtgaacaggtgacctatctggatatccagccggagttcccgccgtggcagagaatgatc

SEQ ID NO: 71805 - DNA, 75 bp, synthetic construct
  source 1..75: mol_type = other DNA
ggcgcgctgagcgcaagcaattacaccgtcagcgccacggtcaacgacaaagcgggcaaccccggcagcgccagc

SEQ ID NO: 71806 - DNA, 75 bp, synthetic construct
  source 1..75: mol_type = other DNA
aagagttcgatcggcagctggcagctcggattgagtctgaccacgaaatggccatgctgatgaatgacgctttcg

SEQ ID NO: 71807 - DNA, 75 bp, synthetic construct
  source 1..75: mol_type = other DNA
cgcaactggaggcgagcggcctgaggatcggctacctgatcgatcccgactgcacgctggtgcggctgatccaga

SEQ ID NO: 71808 - DNA, 75 bp, synthetic construct
  source 1..75: mol_type = other DNA
taacgtgaatgcgaactccgggacgctcaacaatgtcacgattaatcagaactgccggattctgggaaaactgtc

SEQ ID NO: 71809 - DNA, 75 bp, synthetic construct
  source 1..75: mol_type = other DNA
gcgtggttaatacactcagccgcgccgccactcgacgctattcgtgagaacccaggcaaagggcactccatttca

SEQ ID NO: 71810 - DNA, 75 bp, synthetic construct
  source 1..75: mol_type = other DNA
gtggccatcagggaccattaccgtcaggatttatgacgatcagccgtttgaccggcagattgttattccggcggt

SEQ ID NO: 71811 - DNA, 75 bp, synthetic construct
  source 1..75: mol_type = other DNA
aaaagatgattggtgggttaaccagctcaaggcgcagcgtatgcgctggcgcgaggcgctgcttatcgctgccgg

SEQ ID NO: 71812 - DNA, 75 bp, synthetic construct
  source 1..75: mol_type = other DNA
ccctggttcatgaagcgttagttgcgcgaggactggaaacaccgctgcgcccgcccgtgcatgaaatggataacg

SEQ ID NO: 71813 - DNA, 75 bp, synthetic construct
  source 1..75: mol_type = other DNA
tattgcaatttttattctcttttaaaatatattccacgggcgtcattagtgcgagcgccttgtggggtcttttgc

SEQ ID NO: 71814 - DNA, 75 bp, synthetic construct
  source 1..75: mol_type = other DNA
aggtaacagttgatcacgacacaaaaccaagcaacggcccaacggctgaggctttcagctttggtgatcccatcc

SEQ ID NO: 71815 - DNA, 75 bp, synthetic construct
  source 1..75: mol_type = other DNA
tgtcagaagtcgcggcaaaggatgaatttttgaatatcaagaacgtgagccgggatgacatgatggctgcgcacc

SEQ ID NO: 71816 - DNA, 75 bp, synthetic construct
  source 1..75: mol_type = other DNA
atttagaggaattgaaaaagcacaggcctgatatatacgaaatctgtgagcagacagcttcattatcctataacg

SEQ ID NO: 71817 - DNA, 75 bp, synthetic construct
  source 1..75: mol_type = other DNA
cgcctgccgggaatgaatgacaaggagctgaaaaagtttgccgcccgtatctcatcgcagcttttcatgatgtat

SEQ ID NO: 71818 - DNA, 75 bp, synthetic construct
  source 1..75: mol_type = other DNA
gccattgcaaaaaagattacaagaaataaacaatttcatagaagaaggtgttattgaattccaagaataccattt

SEQ ID NO: 71819 - DNA, 75 bp, synthetic construct
  source 1..75: mol_type = other DNA
acgatgagatggtccgggccatcctcgaaggaaggaaaacgcagactcgccgacctgtaaaaaatgtcggggcgg

SEQ ID NO: 71820 - DNA, 75 bp, synthetic construct
  source 1..75: mol_type = other DNA
atcacattcaagcgactggatctggtggataagatgaatgatatcgtggcgaagcactttccgggggtgttacct

SEQ ID NO: 71821 - DNA, 75 bp, synthetic construct
  source 1..75: mol_type = other DNA
aagtgcggtgccgctggttggtcgcgcgtcagttgcctctgatcgttccattattccgccaggtactaccttgct

SEQ ID NO: 71822 - DNA, 75 bp, synthetic construct
  source 1..75: mol_type = other DNA
cccggtcagcggtgaagatgcgctgtttgcgggctgcattaagttctgggttaaccgtcttgatgaatgggtgtt

SEQ ID NO: 71823 - DNA, 75 bp, synthetic construct
  source 1..75: mol_type = other DNA
ttattgttcattatccgttatcatcattggttgtgcgtcagcttatgccgttgaattcaacaaagatttaatcga

SEQ ID NO: 71824 - DNA, 75 bp, synthetic construct
  source 1..75: mol_type = other DNA
ggcaattgcttttgttgagtctgaaatagatgaatggattgagaagtgtatattagaatctagagacgaggtggc

SEQ ID NO: 71825 - DNA, 75 bp, synthetic construct
  source 1..75: mol_type = other DNA
ggaaatagctaccgcattatctacctgcatgtgcctgcggcgatctggtcgatgggcatttatgcatcaatggcg

SEQ ID NO: 71826 - DNA, 75 bp, synthetic construct
  source 1..75: mol_type = other DNA
caggcaccctgaacagcgttattccaccggcagtgcagcacctgacggtggaggtgagcgcggctgacggtcagt

SEQ ID NO: 71827 - DNA, 75 bp, synthetic construct
  source 1..75: mol_type = other DNA
gtgtgccgccgcagatgatggggataatgccaaacaatgttggggggtttggggatatagaaaaagccagttgcg

SEQ ID NO: 71828 - DNA, 75 bp, synthetic construct
  source 1..75: mol_type = other DNA
ggcgtgaaaaccgtgggttgtggctcaacgggaaacgtccccgaccgccaccataccaaacaggaagttgccggt

SEQ ID NO: 71829 - DNA, 75 bp, synthetic construct
  source 1..75: mol_type = other DNA
tcaatcaaaaaaaggattattaggtgtagattccatacatattattgatggtcagcaacgattgaccactcttca

SEQ ID NO: 71830 - DNA, 75 bp, synthetic construct
  source 1..75: mol_type = other DNA
ctcttcaccggcaccatcaaccgcacggaagtccatccccgggaggtaattaaacgtgccctgtaccacaatgcc

SEQ ID NO: 71831 - DNA, 75 bp, synthetic construct
  source 1..75: mol_type = other DNA
ccggcgctggtccctgttgttgcggccagctcccgcccggtggcggaggccatacgatctccagtggcatcagtt

SEQ ID NO: 71832 - DNA, 75 bp, synthetic construct
  source 1..75: mol_type = other DNA
accgtgaccggattctggagcgaattgaaaagctcagatcctttctgaatgaccatcagccggtgatggccgagc

SEQ ID NO: 71833 - DNA, 75 bp, synthetic construct
  source 1..75: mol_type = other DNA
tgtcgcagattgatgtgctgcgggggcaactgagtgaccagctgacgggaagtcacacgaagctcagcgatattc

SEQ ID NO: 71834 - DNA, 75 bp, synthetic construct
  source 1..75: mol_type = other DNA
ttcgcggtgcagttgtgctatttgcgctatccaggctttgctctgccgactgacgcggagccgcccgcctcattg

SEQ ID NO: 71835 - DNA, 75 bp, synthetic construct
  source 1..75: mol_type = other DNA
gtaatgtattttctgatagcttcacgcaacatggtacgttacgtaaacatttcaaccacccgccgtcactagagg

SEQ ID NO: 71836 - DNA, 75 bp, synthetic construct
  source 1..75: mol_type = other DNA
tgctcgcctttcgctttccgtgaaaatcaccctgccggacggaagcagacatccgatgattttttatgctgatat

SEQ ID NO: 71837 - DNA, 75 bp, synthetic construct
  source 1..75: mol_type = other DNA
tttctgaaagaattgctgttaagttctctgatgttataattgcagataaccaagctatcagtgattatgtgaagt

SEQ ID NO: 71838 - DNA, 75 bp, synthetic construct
  source 1..75: mol_type = other DNA
agccaatcagattgaaggcgatattgtcaaaacggtcagcaagtctttcccccgcacgaacagttatgccagtgg

SEQ ID NO: 71839 - DNA, 75 bp, synthetic construct
  source 1..75: mol_type = other DNA
atagcacaaaaagaattatatttttatttttacttttccttgtttttcctgattttttgttttatacattaggga

SEQ ID NO: 71840 - DNA, 75 bp, synthetic construct
  source 1..75: mol_type = other DNA
tttttaagggctaaaaacacttgcaaagataatttgctaataatagtagtattattcatattgttgtgttttaac

SEQ ID NO: 71841 - DNA, 75 bp, synthetic construct
  source 1..75: mol_type = other DNA
tgtactttcaatgtatagcatcttaataatggcatacgtctcctcttgttatgcacagactttgtggttatgttc

SEQ ID NO: 71842 - DNA, 75 bp, synthetic construct
  source 1..75: mol_type = other DNA
gtattcctggtgatgtatctgttcttgcagaacatgcgggcaacattgatacccaccattgctgtacctgtcgtg

SEQ ID NO: 71843 - DNA, 75 bp, synthetic construct
  source 1..75: mol_type = other DNA
cctgaagagactaaacccgccgtcacaccggctgtgcagtcaccaaagcgcagaagcagcagtgacagcgaagtg

SEQ ID NO: 71844 - DNA, 75 bp, synthetic construct
  source 1..75: mol_type = other DNA
gcgtgggctggagcgactcctggagcgaatacgcctgggtgcgtgaacagggaaaccgggtggatatcatcagcc

SEQ ID NO: 71845 - DNA, 75 bp, synthetic construct
  source 1..75: mol_type = other DNA
gcaaaggtgtttgttcgcaacgagttaacaccgttgcaggagcgattcaaagaaattaatgactggctgggggtg

SEQ ID NO: 71846 - DNA, 75 bp, synthetic construct
  source 1..75: mol_type = other DNA
cgtggctggagagtcagggagcatttaaccatccttactggatgtgcaaaggctcatgggcttatgcaaataata

SEQ ID NO: 71847 - DNA, 75 bp, synthetic construct
  source 1..75: mol_type = other DNA
gctcttatgcaatttagtgctgatatggcgctgaatgaggcaggcaaaattcttaccgcagatattcagggggtg

SEQ ID NO: 71848 - DNA, 75 bp, synthetic construct
  source 1..75: mol_type = other DNA
accactggtggcgtggctgctggcgctgtcggcacggcgacagttgtcggtgtggcaacggctgttggtgtggcg

SEQ ID NO: 71849 - DNA, 75 bp, synthetic construct
  source 1..75: mol_type = other DNA
cgctggtatgagcctcccgtcagctttgacggactggcgcgcaccttccgcgctgccgtgcatcacagttccccg

SEQ ID NO: 71850 - DNA, 75 bp, synthetic construct
  source 1..75: mol_type = other DNA
gcaatgcctatctggagaaacgcacgaaccgcttcggtgaagtgatcgcccttgaacctgcgctggcaaaataca

SEQ ID NO: 71851 - DNA, 75 bp, synthetic construct
  source 1..75: mol_type = other DNA
accggcagtgcagcacctgacggtggaggtgagcgcagctgacggccagtatctggcgcaggctaaatgggacac

SEQ ID NO: 71852 - DNA, 75 bp, synthetic construct
  source 1..75: mol_type = other DNA
gggggaactgtcagaatgttatcgataaatggaagaaaatcagtgatgaacagagcgcagaaatcgatcagaagc

SEQ ID NO: 71853 - DNA, 75 bp, synthetic construct
  source 1..75: mol_type = other DNA
gcattgatgcgtcagccctgcgatcggatgtcactcaactggaagagaatatcggacaactggaagaagacatcc

SEQ ID NO: 71854 - DNA, 75 bp, synthetic construct
  source 1..75: mol_type = other DNA
actgaacgcgcccgccgcaaagcagatctgctgcgggatggcctgaccagtggaaccaaaaacagacagaaacgg

SEQ ID NO: 71855 - DNA, 75 bp, synthetic construct
  source 1..75: mol_type = other DNA
gcagagtatcctggtgaacaaaaccccgctgacggacacggacggtaatcctgtgatacatggtgtgacagcggt

SEQ ID NO: 71856 - DNA, 75 bp, synthetic construct
  source 1..75: mol_type = other DNA
gcgtaacggtaactgggtgacggaaaaggatgtcaccattaacggcaagaccacctcgcagttcctggcgtcggt

SEQ ID NO: 71857 - DNA, 75 bp, synthetic construct
  source 1..75: mol_type = other DNA
tcacagaagattgtctttttgatacccgcacacaagtcagattacaactaagtcgaagcgttcataaaacgctgg

SEQ ID NO: 71858 - DNA, 75 bp, synthetic construct
  source 1..75: mol_type = other DNA
gcgtaacggtaactgggtgacagaaaaggatgtcaccattaacggcaagaccacctcacagttcctggcctcggt

SEQ ID NO: 71859 - DNA, 75 bp, synthetic construct
  source 1..75: mol_type = other DNA
gtaagctgcaggtgctgaagaacggggttgagattttccatgaaccggcaacggatgtcagccgggtgttctcat

SEQ ID NO: 71860 - DNA, 75 bp, synthetic construct
  source 1..75: mol_type = other DNA
acccgtccggtgaagtcacccccagtaaggcagaccgccttatcacggaacgcctggtacaggcactggccctgg

SEQ ID NO: 71861 - DNA, 75 bp, synthetic construct
  source 1..75: mol_type = other DNA
aagccatcacgctgaaaatcgacccgtcggtggtactggcgacccgtaaatacgtggatgataaagtcctggaat

SEQ ID NO: 71862 - DNA, 75 bp, synthetic construct
  source 1..75: mol_type = other DNA
atggaactgtggctgacggtgaacggtaaacgcacctgcgccagcgcaccgctggatccgctgacccgtgccgtg

SEQ ID NO: 71863 - DNA, 75 bp, synthetic construct
  source 1..75: mol_type = other DNA
gaactgaaggaaattccaaagctaattgatgccaaccgcaagacagtgcgcgatcgccttgatgaactgaaagcc

SEQ ID NO: 71864 - DNA, 75 bp, synthetic construct
  source 1..75: mol_type = other DNA
gaagaggggatgtcagaaaactcagtgttggttcagggacttgcttggtggttgaagtaccgggagaaaatgcgg

SEQ ID NO: 71865 - DNA, 75 bp, synthetic construct
  source 1..75: mol_type = other DNA
tgtgcgcacagtggatctggggacgaatcgtgagtctttacgagcaggcggccagctatgatggcgagatcacta

SEQ ID NO: 71866 - DNA, 75 bp, synthetic construct
  source 1..75: mol_type = other DNA
cgtccgggtgacctggttgcagatttttttatgggctcaggttcaacggtaaaagcggcactggcgctcgggcgt

SEQ ID NO: 71867 - DNA, 75 bp, synthetic construct
  source 1..75: mol_type = other DNA
tcgttcagcaatcgaagacggtgtagtggaaccgcatgagaagacagcaattaacgacgagctgtatctctcaat

SEQ ID NO: 71868 - DNA, 75 bp, synthetic construct
  source 1..75: mol_type = other DNA
acgaaatgctgaatcagcaactgccattactaataacgtcctgcaatcaatgcaaatcatcaatacagttctgga

SEQ ID NO: 71869 - DNA, 75 bp, synthetic construct
  source 1..75: mol_type = other DNA
gtgcctgctgccgctgctgaccggttgcggaagtacgcggacagtttacgtgagcgttccggtggcaccactgcc

SEQ ID NO: 71870 - DNA, 75 bp, synthetic construct
  source 1..75: mol_type = other DNA
gtgaaaaaatttctgagcgtgctggagaacctcacgaatgctttccgtatgccggatggtgcatctgagatgacg

SEQ ID NO: 71871 - DNA, 75 bp, synthetic construct
  source 1..75: mol_type = other DNA
tgataagaagatcactgcgcatcatgcgattatccccacccgtcaggcgtttaatattggtgccctgagtgataa

SEQ ID NO: 71872 - DNA, 75 bp, synthetic construct
  source 1..75: mol_type = other DNA
gcagattcagtgggagcagaaattcgcccgtcacgtaaatcacgtcagggcgcaggttaaaccagtcagcaaggg

SEQ ID NO: 71873 - DNA, 75 bp, synthetic construct
  source 1..75: mol_type = other DNA
aagatgccgccctggaagattccatcgctcgcttccagcaaaaactctccgacctcggttttcagattgaagaag

SEQ ID NO: 71874 - DNA, 75 bp, synthetic construct
  source 1..75: mol_type = other DNA
aacattaccagggtccatatcgcggcaaaagtgacggctatgcggcaaaagaaagggaactcaaacagcacataa

SEQ ID NO: 71875 - DNA, 75 bp, synthetic construct
  source 1..75: mol_type = other DNA
gatggcgatcagattttcccgctgggatgggcaatgattttacagcgcgctgctggcactcactacattgcggat

SEQ ID NO: 71876 - DNA, 75 bp, synthetic construct
  source 1..75: mol_type = other DNA
cctggctgacggattttgctgcgctgctgcgtctgctcagtgaaggagacgaactgctattattgcaagatggcg

SEQ ID NO: 71877 - DNA, 75 bp, synthetic construct
  source 1..75: mol_type = other DNA
tgcgacccggaaaaatgaaatgtatccgggtggtaaccgcagatgaacgtctgaaggacgtttatacggaagacg

SEQ ID NO: 71878 - DNA, 75 bp, synthetic construct
  source 1..75: mol_type = other DNA
atgctgcacacattacatcgttcaccctggctgacggattttgctgcgctgctgcgtctgctcagtgaaggcgac

SEQ ID NO: 71879 - DNA, 75 bp, synthetic construct
  source 1..75: mol_type = other DNA
aaacgtgggctgttacccggtatgttattgcccgaattctgcgagtgttttcctggtgtctgatgtacaccgtta

SEQ ID NO: 71880 - DNA, 75 bp, synthetic construct
  source 1..75: mol_type = other DNA
tgtctggtgttctctcgattggcagggtgcagactcccacgcttgcgatggtggtcagacgggatgcggaaatta

SEQ ID NO: 71881 - DNA, 75 bp, synthetic construct
  source 1..75: mol_type = other DNA
gccagcgttaaaggaatgaatgaacctgctgatggtgccatgaatctctttaagaccagcaatggctggaaagcc

SEQ ID NO: 71882 - DNA, 75 bp, synthetic construct
  source 1..75: mol_type = other DNA
ctgcgggacagcgggcaacagtgcggagtgaacagagtctggcgactgatgaaacgtatcgggataaaggctcag

SEQ ID NO: 71883 - DNA, 75 bp, synthetic construct
  source 1..75: mol_type = other DNA
gaaacgtgtcggaataaaggctcaggtcggataccgaagcccgcggacacgtaaaggcgaggccagtatcgtgtc

SEQ ID NO: 71884 - DNA, 75 bp, synthetic construct
  source 1..75: mol_type = other DNA
gcaaccggtcaccttcgtggcagataaggacagcgcagttgtcgttctgcaaacatcgaaagcggaaatcattgg

SEQ ID NO: 71885 - DNA, 75 bp, synthetic construct
  source 1..75: mol_type = other DNA
accgcctttgcgttgcccgctgtctattcgaatcagttcgcgccaccttcgacgtcggcggacgcctgcgtgaca

SEQ ID NO: 71886 - DNA, 75 bp, synthetic construct
  source 1..75: mol_type = other DNA
ggcggctatcgtgctgtggaacacggtgtacctggaacgcgccacccaggggttggtcgaggccggcaagccggt

SEQ ID NO: 71887 - DNA, 75 bp, synthetic construct
  source 1..75: mol_type = other DNA
tgctgccggccgagaagttcgccgcactcaagcgcgagcaggccctgcccctggcgatcaacccgaacagcgacc

SEQ ID NO: 71888 - DNA, 75 bp, synthetic construct
  source 1..75: mol_type = other DNA
taaccgtcaccggcactacgatccgttgcaggggcggtatatcaccccggacccgattgggttgagaggtggatg

SEQ ID NO: 71889 - DNA, 75 bp, synthetic construct
  source 1..75: mol_type = other DNA
ggccagacaggtggagccggaatacacaccggcgcgaaaagttcatttttaccactgcgaccaccggggcctgcc

SEQ ID NO: 71890 - DNA, 75 bp, synthetic construct
  source 1..75: mol_type = other DNA
atggcaccttccaaaactgctcagccaaaacactcactgcgtaaaatcgcagttgtagtagccacagcggttagc

SEQ ID NO: 71891 - DNA, 75 bp, synthetic construct
  source 1..75: mol_type = other DNA
tttctgctttcctcctgactttattcggttctctcgtctggtcagctaaccactaccacagcaaataccagcgcg

SEQ ID NO: 71892 - DNA, 75 bp, synthetic construct
  source 1..75: mol_type = other DNA
acaaagacaattttgatgaagttatgacatcaatgagtccgaaggctcattttatggttaatagtgttatcccgg

SEQ ID NO: 71893 - DNA, 75 bp, synthetic construct
  source 1..75: mol_type = other DNA
gctttatcaaattatcgcgctggtggccctgtacggcgcgaatatccgcatgatgcaggaatggcaggcaaaaca

SEQ ID NO: 71894 - DNA, 75 bp, synthetic construct
  source 1..75: mol_type = other DNA
ttccaacgagatcgtggtggatgaccacgcgcacaataaagtgaagtctggcggcgacacatcgggaggcccggt

SEQ ID NO: 71895 - DNA, 75 bp, synthetic construct
  source 1..75: mol_type = other DNA
aagcagaaaaagcttattatgcttccatcggaaacgatgatctggcagcctgagttcacagataaaacactctcc

SEQ ID NO: 71896 - DNA, 75 bp, synthetic construct
  source 1..75: mol_type = other DNA
cgcaacaacaatatcgttctggaatatcgcaaaaaagaactggttcgcctgaccctgacagaccccgtgacaggg

SEQ ID NO: 71897 - DNA, 75 bp, synthetic construct
  source 1..75: mol_type = other DNA
tggccgtattcaactgtacgttgcaagagatagcctgccagaaggtgtttataacgatcagtttaaaaaatggga

SEQ ID NO: 71898 - DNA, 75 bp, synthetic construct
  source 1..75: mol_type = other DNA
ggaaagcctgagggcgtatttccccgccacagagcgcattctgttcgcggaacattatcaggggccgtatcgtcc

SEQ ID NO: 71899 - DNA, 75 bp, synthetic construct
  source 1..75: mol_type = other DNA
ggcagaagagaagcatcagcgcggagaactggaaaagccacatcaccaactggtcagcacatacagtgaactgaa

SEQ ID NO: 71900 - DNA, 75 bp, synthetic construct
  source 1..75: mol_type = other DNA
tccctttttctttaataccgaaaatatcatgacgattgctctacaaacgtcggtaatcggcattatggccattgg

SEQ ID NO: 71901 - DNA, 75 bp, synthetic construct
  source 1..75: mol_type = other DNA
tagtgaatttatgcaccagtgaacatctgctggttcatcatccgatgctggaaggcattctcctgtctgaatgtg

SEQ ID NO: 71902 - DNA, 75 bp, synthetic construct
  source 1..75: mol_type = other DNA
gacaaaaccacacgatatgcaggcggcgattgcctgtagctcatgccacgatttaatcgacgggcgggtaaaaac

SEQ ID NO: 71903 - DNA, 75 bp, synthetic construct
  source 1..75: mol_type = other DNA
caaggattgcctgtcttgagccacgtatagatgagcttgagcgcgagctggaatcacttatccaactgaatggca

SEQ ID NO: 71904 - DNA, 75 bp, synthetic construct
  source 1..75: mol_type = other DNA
tccgcgagcaactcattgtggctaccgctgatttgagcggagcaacgaaaggacagcttgaagcctggctggagc

SEQ ID NO: 71905 - DNA, 75 bp, synthetic construct
  source 1..75: mol_type = other DNA
tacaaaatacgattaccagtattgagtcagcacgagatgaaatgccattcggactcgataacgatcaagcacaca

SEQ ID NO: 71906 - DNA, 75 bp, synthetic construct
  source 1..75: mol_type = other DNA
aaatcggcattggcccttccagttctcataccgttggaccaatgaaagcgggtaaacaatttaccgacgatctga

SEQ ID NO: 71907 - DNA, 75 bp, synthetic construct
  source 1..75: mol_type = other DNA
gggatcgtctcagcttatgtcgttattcttgggctaagaggctgacggtttattcctttattttttcctttctct

SEQ ID NO: 71908 - DNA, 75 bp, synthetic construct
  source 1..75: mol_type = other DNA
cgttacagcaggcgtatgcccataaaccgctggtgcggctgtatgacaaaggcgttccggcgctgaaaaatgtcg

SEQ ID NO: 71909 - DNA, 75 bp, synthetic construct
  source 1..75: mol_type = other DNA
cgttcgtggtggtcgaatggaaggtcatgataagcttaagggggatttactcactgcatatcaactggattatta

SEQ ID NO: 71910 - DNA, 75 bp, synthetic construct
  source 1..75: mol_type = other DNA
gttaattgagcagaacagaagcgccgtagaaaccatatttctgattatatggggatttgttgcgctccgtattat

SEQ ID NO: 71911 - DNA, 75 bp, synthetic construct
  source 1..75: mol_type = other DNA
cagttaatgatttctttaaaagcaacacactctcacctttttctgtaagaaggttttatccggcatacttgatgg

SEQ ID NO: 71912 - DNA, 75 bp, synthetic construct
  source 1..75: mol_type = other DNA
gccgcgctcctaaccttaagaaccgtaccgatgaggcaactgaacaggctgttgttgattacgccgtcgctttcc

SEQ ID NO: 71913 - DNA, 75 bp, synthetic construct
  source 1..75: mol_type = other DNA
gatttatggtcctgacaaacgggccacgccgcccctggatgatgatctgatagtgaatttatgcaccagtgaaca

SEQ ID NO: 71914 - DNA, 75 bp, synthetic construct
  source 1..75: mol_type = other DNA
tcgacggcctgcccctgacaactgaaacggtcagcccggaagcaacctttgactcgttgcccgaggctgaaaacc

SEQ ID NO: 71915 - DNA, 75 bp, synthetic construct
  source 1..75: mol_type = other DNA
atggttgatactgtaaaaatatccagttgtgagttaatcaacaccgattgcctggaatttatccagaccttatcg

SEQ ID NO: 71916 - DNA, 75 bp, synthetic construct
  source 1..75: mol_type = other DNA
tttctgccgcgtccggcaaccggaaaccggtggtgaaaatcgcatcttctgccggcgctgcggcacagtcaacaa

SEQ ID NO: 71917 - DNA, 75 bp, synthetic construct
  source 1..75: mol_type = other DNA
gatgcgtgagcgctttaatgtgctgaaccacattatctgggcgaagccgtccggacgctggaacgggtgcaataa

SEQ ID NO: 71918 - DNA, 75 bp, synthetic construct
  source 1..75: mol_type = other DNA
cgtgaaagttcgctccggcgagctgcagccaacgccacgggaactcattatcaaccatattcaggacatcctggc

SEQ ID NO: 71919 - DNA, 75 bp, synthetic construct
  source 1..75: mol_type = other DNA
gccagtacttcacagcaaatcgggtctctgctcgccgaagatatgaacagcgagcaagcggccaatatggcgcgt

SEQ ID NO: 71920 - DNA, 75 bp, synthetic construct
  source 1..75: mol_type = other DNA
ggaaagcctgcgggcgtattttccggccacagagcgcattctgttcgcggaacattatcaggggccgtatcgccc

SEQ ID NO: 71921 - DNA, 75 bp, synthetic construct
  source 1..75: mol_type = other DNA
taaaaaaggctactgtagattcaatctgtcaatgcaacacccctttcaattatctctttcggtgttttgaacttc

SEQ ID NO: 71922 - DNA, 75 bp, synthetic construct
  source 1..75: mol_type = other DNA
gctgcgccctctctttggtatagtgatgatcttcgtgggcatcgttggcgccaacggcagcgtcatcatgcctgc

SEQ ID NO: 71923 - DNA, 75 bp, synthetic construct
  source 1..75: mol_type = other DNA
cgatgggtgaaacaattacgtgatgagcggcagggaaaaacaccaaaagcctcccccattaccccggaacaaatt

SEQ ID NO: 71924 - DNA, 75 bp, synthetic construct
  source 1..75: mol_type = other DNA
tgcgtattcctgatcgatgaacaggaaagaagaacgcttatttctaacgaaaaaaatgcggaggggtacatgtgc

SEQ ID NO: 71925 - DNA, 75 bp, synthetic construct
  source 1..75: mol_type = other DNA
tacgtcaatgaccacaaagcagggagcttcactgcggaacggaagaacgctgagaaagttctgtccactctcgga

SEQ ID NO: 71926 - DNA, 75 bp, synthetic construct
  source 1..75: mol_type = other DNA
atcaactgcacagggaacccggaccagaatggtttctatcagcattctgtttttcttacccttgccgatgacaag

SEQ ID NO: 71927 - DNA, 75 bp, synthetic construct
  source 1..75: mol_type = other DNA
gcctggcatctgatatcgaaatcatgatgcgtgagcgctttaatgtgctgaaccacattatctgggcgaagccgt

SEQ ID NO: 71928 - DNA, 75 bp, synthetic construct
  source 1..75: mol_type = other DNA
gcagacgtttgatgccatttatgttcccccggggaaagcgctggcggtacatattacccgacaactggctattga

SEQ ID NO: 71929 - DNA, 75 bp, synthetic construct
  source 1..75: mol_type = other DNA
agccgcgctctatatctaaaaaaataagcgaaaatgataaagttactaattataaatggcgagagagcgtcggct

SEQ ID NO: 71930 - DNA, 75 bp, synthetic construct
  source 1..75: mol_type = other DNA
cttccgagcagtgaaggcacctcgtccttacgtgacagggccgcgagttattgagaccggtaagaagtatgtgtt

SEQ ID NO: 71931 - DNA, 75 bp, synthetic construct
  source 1..75: mol_type = other DNA
caggacgaggcgcttactttgataggctgcgtctgcgaagtgcatggattgaagatagcaaaggcaacaagctgt

SEQ ID NO: 71932 - DNA, 75 bp, synthetic construct
  source 1..75: mol_type = other DNA
cgttggagccgcattattttcgctttatgaatctaaagggtggttaactcgacatcttggttaccgtgaagttac

SEQ ID NO: 71933 - DNA, 75 bp, synthetic construct
  source 1..75: mol_type = other DNA
gtttattaatgctgatatttgcgggagtgggcgcacaggcggcaaagaagattgccacgttgtatacgttcgggg

SEQ ID NO: 71934 - DNA, 75 bp, synthetic construct
  source 1..75: mol_type = other DNA
agaaagctttttccagttgttgaaacgcgaacggataaagaaaaagatctacggaacgcgggaagaagtccgcag

SEQ ID NO: 71935 - DNA, 75 bp, synthetic construct
  source 1..75: mol_type = other DNA
ctgaagcctcatgaggtgatcggcgctctggccgatgaaggcgaccagctgaacaacgccaccccggtttatttc

SEQ ID NO: 71936 - DNA, 75 bp, synthetic construct
  source 1..75: mol_type = other DNA
tttacccggaagaccagcaggaggcggtcgcccgtaccctgacgctggaatccgagcctctcgtcaaactgctgg

SEQ ID NO: 71937 - DNA, 75 bp, synthetic construct
  source 1..75: mol_type = other DNA
atgtcagcggtaaccgcaatccgtaatattcacgagctgacgccggatccaaaaacaggcatcagctgggcagag

SEQ ID NO: 71938 - DNA, 75 bp, synthetic construct
  source 1..75: mol_type = other DNA
ggtaaaaaaagccgcccggcagaatatgaaatggcatgagcagttgatctctcatttcgcggagatcttcttccc

SEQ ID NO: 71939 - DNA, 75 bp, synthetic construct
  source 1..75: mol_type = other DNA
tctttgccgccctgcatgttgagggagtgcagcgtgtggagctggcttcaccgctggcggatgtggtcctgaaca

SEQ ID NO: 71940 - DNA, 75 bp, synthetic construct
  source 1..75: mol_type = other DNA
taacgactggcagacgctggagctggtgttcaccgccggcagtgccacggttactccgaaactgaatggagtggc

SEQ ID NO: 71941 - DNA, 75 bp, synthetic construct
  source 1..75: mol_type = other DNA
cgggcgtatgacggtctgagtgttgctggcccgtcaggcgcatacgagtattttgcacgcagcgccagcggtctg

SEQ ID NO: 71942 - DNA, 75 bp, synthetic construct
  source 1..75: mol_type = other DNA
ccacgacgctacagccaggcatgttactgaccgtggagccggggatttatttgccagggcaagggggcgtgcgca

SEQ ID NO: 71943 - DNA, 75 bp, synthetic construct
  source 1..75: mol_type = other DNA
gatggaaagcgatgaagcgttacgcctgcgtgtgcctgcagcctttgaggggctttcagttgcgggaccaactgc

SEQ ID NO: 71944 - DNA, 75 bp, synthetic construct
  source 1..75: mol_type = other DNA
actatgccgcaattaactgcaacggaagccgccgcgcaggagaaccagcgagtgatggggatcctgacatgccag

SEQ ID NO: 71945 - DNA, 75 bp, synthetic construct
  source 1..75: mol_type = other DNA
gccacctgaacagaggtgatatgctcacctcagaacaacacaggtgccataatgaaaaaaagaaatttcagcgca

SEQ ID NO: 71946 - DNA, 75 bp, synthetic construct
  source 1..75: mol_type = other DNA
actagcaaagcagaatcaacatcagatccgctggcagctcttgacgacgctatcagccagatcgacaaattccgc

SEQ ID NO: 71947 - DNA, 75 bp, synthetic construct
  source 1..75: mol_type = other DNA
caagatccacgatgtacatgttcgccatccaacgacagcaacaacagaagcgctcagtcgtatcggggcgctgta

SEQ ID NO: 71948 - DNA, 75 bp, synthetic construct
  source 1..75: mol_type = other DNA
gggtggaatgttgtcgtcgtttggggcattggcgaatgccgggaatgacaacggtcagggtgttgattacggtag

SEQ ID NO: 71949 - DNA, 75 bp, synthetic construct
  source 1..75: mol_type = other DNA
attctgctggatatggacacaccgggcgggatggtggcgggagcatttgactgtgctgacatcatcgcccgtgtg

SEQ ID NO: 71950 - DNA, 75 bp, synthetic construct
  source 1..75: mol_type = other DNA
tatggcgattgcaaaagtgatgcctataatgttgtggatgcaaatgtcaataagctaaaagtaatacttacacaa

SEQ ID NO: 71951 - DNA, 75 bp, synthetic construct
  source 1..75: mol_type = other DNA
ttgaccgggccgcgcgttccagaggtgaaaaccggacggcaaccgacccggggctcagacaggcgcttgagcaga

SEQ ID NO: 71952 - DNA, 75 bp, synthetic construct
  source 1..75: mol_type = other DNA
gttacgctgaagttccagagcgagaccaaaggatggaccacccatctggtgcagtcagcctattatgacatcaac

SEQ ID NO: 71953 - DNA, 75 bp, synthetic construct
  source 1..75: mol_type = other DNA
gctggggtgtggttggtgtctggatgggaatgtttgccgactgggctgtgcgggccgtgctgttttactggcgaa

SEQ ID NO: 71954 - DNA, 75 bp, synthetic construct
  source 1..75: mol_type = other DNA
tctatcccgaagaccagcaggaggccattgcccggacgctcacacttgagtcagagccgattgttaagctgctgc

SEQ ID NO: 71955 - DNA, 75 bp, synthetic construct
  source 1..75: mol_type = other DNA
tggcagacgctggagctggtgttcaccgccggcagtgccacggttactccgaaactgaatggagtggctggcccg

SEQ ID NO: 71956 - DNA, 75 bp, synthetic construct
  source 1..75: mol_type = other DNA
ctggtgttcaccgccggcagtgccacggttactccgaaactgaatggagtggctggcccggcattccaggtcata

SEQ ID NO: 71957 - DNA, 75 bp, synthetic construct
  source 1..75: mol_type = other DNA
ggtctcctggatacaggaaaaacttcatattccacagccggtcggtgatgaagccgtgtttactgctcaaccggt

SEQ ID NO: 71958 - DNA, 75 bp, synthetic construct
  source 1..75: mol_type = other DNA
gaaatggaaaaggcaaagtcaacctgattaaacattactcctccgttgaatccatacagcagcatgtccccttag

SEQ ID NO: 71959 - DNA, 75 bp, synthetic construct
  source 1..75: mol_type = other DNA
caagtatccgccagataaaacaccttatgcagttgaactgatactgaagcaggctgaagtggtgtcgaacagctg

SEQ ID NO: 71960 - DNA, 75 bp, synthetic construct
  source 1..75: mol_type = other DNA
tattgaagtgactgccagccataatccgattgattacaacggtatgaagctggtgcgagagggggcacgacccat

SEQ ID NO: 71961 - DNA, 75 bp, synthetic construct
  source 1..75: mol_type = other DNA
acctacgcacagcaaccggacctgttcacggccatgctgaagcagttccgtactgacctttccggatttaacgcg

SEQ ID NO: 71962 - DNA, 75 bp, synthetic construct
  source 1..75: mol_type = other DNA
ggtctgtctgttgatgccgtcacgggaacagaggccgccgtttttgaaggtcagtccggcattgaggccgggctg

SEQ ID NO: 71963 - DNA, 75 bp, synthetic construct
  source 1..75: mol_type = other DNA
aagtcatgttggtgcgtttgccttagggaaaacaggaagcaccgttgcgaatgataaagcagttggatggaactg

SEQ ID NO: 71964 - DNA, 75 bp, synthetic construct
  source 1..75: mol_type = other DNA
cgcactcgcaggaatcgcagagctaccgcgcaaccacccaaaatggcaggaatgggaaagacgcgggaaggagct

SEQ ID NO: 71965 - DNA, 75 bp, synthetic construct
  source 1..75: mol_type = other DNA
gacctgagcaaagggcagtacggctgtgtcggccagggcttacatattgccaaaaaactgcttccgtatatcccg

SEQ ID NO: 71966 - DNA, 75 bp, synthetic construct
  source 1..75: mol_type = other DNA
aactccagatgagaaatttctcgcaaataaaacagtcgatgattcaaagcgaacagaaagtgaaaatcggaattc

SEQ ID NO: 71967 - DNA, 75 bp, synthetic construct
  source 1..75: mol_type = other DNA
tccgggcgggcaggccgccggcgcgtttgactgcgctgacatgatttaccgcctccgtcagcagaagccggtctg

SEQ ID NO: 71968 - DNA, 75 bp, synthetic construct
  source 1..75: mol_type = other DNA
ccgtagccagtatggcctgagcgccacgctggacaggcaaactggcgtctataaatacggctacgccaaacacat

SEQ ID NO: 71969 - DNA, 75 bp, synthetic construct
  source 1..75: mol_type = other DNA
atgacgttaaagccactcataagcagcagcatggacttaaccagtctattaaagatgcgcacaaaacagcgccaa

SEQ ID NO: 71970 - DNA, 75 bp, synthetic construct
  source 1..75: mol_type = other DNA
gctgggatacctcattcgcgtgtctgagtggtgggagttcggcggagaaccgggaacatttaccgttgaagtcgg

SEQ ID NO: 71971 - DNA, 75 bp, synthetic construct
  source 1..75: mol_type = other DNA
ggttctctgttagcgggcactaaatatcgcggcgactttgaaaaacgttttaaagcgttgctcaagcagctggag

SEQ ID NO: 71972 - DNA, 75 bp, synthetic construct
  source 1..75: mol_type = other DNA
catatgcaagccttgactacaccaaaggtgacgacattgagaacccgctacagggtgtagttggtatcaatgtga

SEQ ID NO: 71973 - DNA, 75 bp, synthetic construct
  source 1..75: mol_type = other DNA
cagcaggctaccagcaaatccacgacggcattattcatctggtcgatagcgcccggacggaaacggtacgtagcg

SEQ ID NO: 71974 - DNA, 75 bp, synthetic construct
  source 1..75: mol_type = other DNA
gggatgtttctggatggtaagtgggtactgccgggcgaagaaatcaactgccggtgtggctgggaggccgttatt

SEQ ID NO: 71975 - DNA, 75 bp, synthetic construct
  source 1..75: mol_type = other DNA
aaaaatttacgacaaaaataataaggaaatcaaagtgaacggtggtgagttgccaacagacatgggtaaatcaac

SEQ ID NO: 71976 - DNA, 75 bp, synthetic construct
  source 1..75: mol_type = other DNA
gactatcgcctcgaaacaactgctggcggcggtagggcagagtcgactgattcaactgtgggaacagctgttttc

SEQ ID NO: 71977 - DNA, 75 bp, synthetic construct
  source 1..75: mol_type = other DNA
cgttgatttcacccaggctagcaaaaaagtggatattaagggcgcaacggtatccgccgaagatatggacactgc

SEQ ID NO: 71978 - DNA, 75 bp, synthetic construct
  source 1..75: mol_type = other DNA
tagaagcccaggaagagaaaggcgattacaactccggtacggtgcgctttttgcgtggcgcagtgaaagcctgcc

SEQ ID NO: 71979 - DNA, 75 bp, synthetic construct
  source 1..75: mol_type = other DNA
agggcaatgatgggattcgtatccccttcatgcggaacgatttcacttctcgggatgcctcctgcacaggcgctt

SEQ ID NO: 71980 - DNA, 75 bp, synthetic construct
  source 1..75: mol_type = other DNA
cgatgcggccctgctgcccgcgttgcgtctggggaatgcccgtgcagatgatctggtgcgcaataacggaatagc

SEQ ID NO: 71981 - DNA, 75 bp, synthetic construct
  source 1..75: mol_type = other DNA
gctcgaaatcaaccgaaacaagcaacaggctggcgtgacagccggcaaaccaaaactcgacctgacgaacactga

SEQ ID NO: 71982 - DNA, 75 bp, synthetic construct
  source 1..75: mol_type = other DNA
atgtcaacttctatcagaatctgtagctacctgttgttgccgctgatttatctgctggttaacgtcaaaatcgcc

SEQ ID NO: 71983 - DNA, 75 bp, synthetic construct
  source 1..75: mol_type = other DNA
agaaagttttttccagttgttgaaacgtgaacggataaagaaaaagatctacggaatgcgggaagaagcccgcag

SEQ ID NO: 71984 - DNA, 75 bp, synthetic construct
  source 1..75: mol_type = other DNA
tcgggttgttcgatcttttcagtagcgttcagcaggcaaccgttgatcccgcctggttgggtatgtcgacggaag

SEQ ID NO: 71985 - DNA, 75 bp, synthetic construct
  source 1..75: mol_type = other DNA
aaaccagcgtctggaactcgggcaggctggttggcaaattgattactggtatgccgatgttgttagcgggaaggt

SEQ ID NO: 71986 - DNA, 75 bp, synthetic construct
  source 1..75: mol_type = other DNA
ccggccgcgcaaggcgtgctggcagccgtgcagaccctgcgtgagatgaacgccgacaacctgcgcaaggtgccg

SEQ ID NO: 71987 - DNA, 75 bp, synthetic construct
  source 1..75: mol_type = other DNA
atcgcggcgactttgaaaaacgttttaaagcgttgctcaagcagctggagcaagacactaacagcatcctgttta

SEQ ID NO: 71988 - DNA, 75 bp, synthetic construct
  source 1..75: mol_type = other DNA
ttggcgctactctgaaggctgctgctgggcagagtcaatcaggtacatatacctttgcaaatggtaaagttaact

SEQ ID NO: 71989 - DNA, 75 bp, synthetic construct
  source 1..75: mol_type = other DNA
gcgacgtttgctgcatcgccagaaggaaaaacgctgcgaaccgatctgctgcaacgggcaatctacctgaaacaa

SEQ ID NO: 71990 - DNA, 75 bp, synthetic construct
  source 1..75: mol_type = other DNA
tggagcctgaagaaagctgttgcccggagtgtggcggtgagctggattatctgggggaaatcagtgcagaacaac

SEQ ID NO: 71991 - DNA, 75 bp, synthetic construct
  source 1..75: mol_type = other DNA
aaaaaggctcagaaattgagagctaagagattacaacatttgcttgagaaaatggggcgtgatcgtatttcactt

SEQ ID NO: 71992 - DNA, 75 bp, synthetic construct
  source 1..75: mol_type = other DNA
tgctgggaaaactgaactgccatagcaccattgaactggtgcattttgcgctcgaccaccatctgctggcggggc

SEQ ID NO: 71993 - DNA, 75 bp, synthetic construct
  source 1..75: mol_type = other DNA
ccgaccaggaatgacacaggagcaggcgacgatattaatcacggaagcattctgggctctgaaagaacgcccgaa

SEQ ID NO: 71994 - DNA, 75 bp, synthetic construct
  source 1..75: mol_type = other DNA
tctacccaatgtagtcatggcctggaaatttggctggcaagggggcgtactctcggggcttttgggcagcatgat

SEQ ID NO: 71995 - DNA, 75 bp, synthetic construct
  source 1..75: mol_type = other DNA
tggagatttttctcgcaacccaggcattgctgggaattggcctgggcattgccattagtcggcagcaacatctgg

SEQ ID NO: 71996 - DNA, 75 bp, synthetic construct
  source 1..75: mol_type = other DNA
ctcagctgcaacaactgctgacttgttatcgaccattaaggatggctctactgttacatatgcagggacagacac

SEQ ID NO: 71997 - DNA, 75 bp, synthetic construct
  source 1..75: mol_type = other DNA
tgacgaacttatagaaaaagcaattgctttcaagcttgcgtatcgacagcaataccaacaaaaagctggatggaa

SEQ ID NO: 71998 - DNA, 75 bp, synthetic construct
  source 1..75: mol_type = other DNA
gaatttgttcgtacgcgcacctattacccgcaactgggtctaattcaactttttgatggtgagcatctggcgcta

SEQ ID NO: 71999 - DNA, 75 bp, synthetic construct
  source 1..75: mol_type = other DNA
acacagttgctgaaattagcgcgagcctgggcgtctctgataatacggctcgagctgatttacggacaattgtta

SEQ ID NO: 72000 - DNA, 75 bp, synthetic construct
  source 1..75: mol_type = other DNA
aattcgttggttgcatggatacatttctgtggatggcaaaaagagctggctacacgattattccaccagcaaagg

SEQ ID NO: 72001 - DNA, 75 bp, synthetic construct
  source 1..75: mol_type = other DNA
cgttcctttcctttttatctgatttatgggcagttgatattccaatcaacatcacgggaacgattataattccgc

SEQ ID NO: 72002 - DNA, 75 bp, synthetic construct
  source 1..75: mol_type = other DNA
gtaatggtatgttgatgtgtcaggagctatataatcgctctacgagtgaacttactaatgagcaacttcaagccc

SEQ ID NO: 72003 - DNA, 75 bp, synthetic construct
  source 1..75: mol_type = other DNA
ccgctactgtaccggcaactcccgcgtggcatttgctgtcagcctggcctttgctgcaccactgttacggctggt

SEQ ID NO: 72004 - DNA, 75 bp, synthetic construct
  source 1..75: mol_type = other DNA
aggcagcaactaaagctgatttgacagctgctcagctcactacaacagctgctggcggtactatcgctgctcctg

SEQ ID NO: 72005 - DNA, 75 bp, synthetic construct
  source 1..75: mol_type = other DNA
atgacaggcaaagaggcaattcttcactacctgaaaacgcaccggactttctgcgcgccggatgtagctgcggca

SEQ ID NO: 72006 - DNA, 75 bp, synthetic construct
  source 1..75: mol_type = other DNA
acccgcgatatcgccgtgctggaagatgccggcgtaccgtatcagctgctggaatccagccgcctggcggaagtg

SEQ ID NO: 72007 - DNA, 75 bp, synthetic construct
  source 1..75: mol_type = other DNA
aatcgagaaatattacttcacccatgaaaaagacaacatcatgtcggtgtttgccactgttggttctggccctgg

SEQ ID NO: 72008 - DNA, 75 bp, synthetic construct
  source 1..75: mol_type = other DNA
tctcaaaacgccgtcaggtcggcgcaagtgagtatgcatatattagttttttaacagtcagtcagcgtcgtactt

SEQ ID NO: 72009 - DNA, 75 bp, synthetic construct
  source 1..75: mol_type = other DNA
tcgctggcatttatcttcggcgtattgccaatggcaaccagcacgggtgccggttccggtggtcagcatgcggtg

SEQ ID NO: 72010 - DNA, 75 bp, synthetic construct
  source 1..75: mol_type = other DNA
gtgacccccccacagaacaagagttgcttagtcttttttatcagcagtgcctgaaacacggaacatggggtaatg

SEQ ID NO: 72011 - DNA, 75 bp, synthetic construct
  source 1..75: mol_type = other DNA
cgcacgtgggtattcccgacagtgggacaaataccgcgccatgtacctgaaaaaaaatccgttatgtgtgcgttg

SEQ ID NO: 72012 - DNA, 75 bp, synthetic construct
  source 1..75: mol_type = other DNA
gtgcagagccaccagagcacatgaccatcagccaaaatattgtctctactgatacgcatggtatagccgaggtca

SEQ ID NO: 72013 - DNA, 75 bp, synthetic construct
  source 1..75: mol_type = other DNA
ttgaaaaacagccagcagctatgcgccggataattggtaagcatcttgccgtccctcgctggcaggatacatgtg

SEQ ID NO: 72014 - DNA, 75 bp, synthetic construct
  source 1..75: mol_type = other DNA
atctgcccagtcacagctcggtgttaaaccgcgcattctcggcgtgccggggcacgataacaaagccgttgctac

SEQ ID NO: 72015 - DNA, 75 bp, synthetic construct
  source 1..75: mol_type = other DNA
gtacggtgaaatgcgcgtggggtcgcgggtggcttctcaggagatcagcacggcagacgagggggacggtggtca

SEQ ID NO: 72016 - DNA, 75 bp, synthetic construct
  source 1..75: mol_type = other DNA
aaacatgggtttatcaacgagatacaatgattgaaagaggtgataacagcggtgttcatcagtatggtccagctg

SEQ ID NO: 72017 - DNA, 75 bp, synthetic construct
  source 1..75: mol_type = other DNA
aaatggtagctccacgcttagcacatcaattaatgtcaacgctgatgcgtctacggcacatctcaccttgctaca

SEQ ID NO: 72018 - DNA, 75 bp, synthetic construct
  source 1..75: mol_type = other DNA
gaagtgaacagaaaattcgtagtctttttgatataaaatatgctttttgttctataaaaactaatggtgttttag

SEQ ID NO: 72019 - DNA, 75 bp, synthetic construct
  source 1..75: mol_type = other DNA
tgctgattccgttgcggctaaaagtttctggcgaagaaaaatcggcattagaaaaagcgcagtctgccctggcgg

SEQ ID NO: 72020 - DNA, 75 bp, synthetic construct
  source 1..75: mol_type = other DNA
tgaacctcaacctgcaccgcgcaccattccggagaaccgcgtggccgccgggcgtaatcattttgctgaaccggc

SEQ ID NO: 72021 - DNA, 75 bp, synthetic construct
  source 1..75: mol_type = other DNA
agacactgctgtttcttttagcatttgtctttgcgcccacccatgggcttttggcaaatcgtcggcgtgcgcata

SEQ ID NO: 72022 - DNA, 75 bp, synthetic construct
  source 1..75: mol_type = other DNA
acggtcgcatgatgcgcgatcgcctgatcaatcacgcgatccgccaggcctgcgaagacaaactgggggccgatc

SEQ ID NO: 72023 - DNA, 75 bp, synthetic construct
  source 1..75: mol_type = other DNA
atgattattaaaaacctgaagcactatacccctgaaaaacctgatgtgccgggtgcgatgtacctgaaatcagag

SEQ ID NO: 72024 - DNA, 75 bp, synthetic construct
  source 1..75: mol_type = other DNA
gtgacgccctgtttcggcgcccgtctggtgcaggagggtaaccgcctgcattaccttgccgaccgcgccggtatc

SEQ ID NO: 72025 - DNA, 75 bp, synthetic construct
  source 1..75: mol_type = other DNA
ctgacctgcaaagctgacaccctcggtagcggtggttacgtttatctggctgtttatccgacgcccgaaacgaaa

SEQ ID NO: 72026 - DNA, 75 bp, synthetic construct
  source 1..75: mol_type = other DNA
tctcaaagcagcgctggcgatgtacaacagccaggatgaaaacataaagaatcactggttactggaatcggcaaa

SEQ ID NO: 72027 - DNA, 75 bp, synthetic construct
  source 1..75: mol_type = other DNA
tctgaccgatgccgaccgctacccacagctcaatggcgagggcagcggcagctggagcggtaatcttaaagggaa

SEQ ID NO: 72028 - DNA, 75 bp, synthetic construct
  source 1..75: mol_type = other DNA
aaactttactcgacctgaattatgcccgtcaggttaacgaaatttctttgtataccgccttagggggcggttggc

SEQ ID NO: 72029 - DNA, 75 bp, synthetic construct
  source 1..75: mol_type = other DNA
gaacggcaatcttgaaatcaaagggagtacccatgcgactggtaacatatttgcagatggacagaattccaatca

SEQ ID NO: 72030 - DNA, 75 bp, synthetic construct
  source 1..75: mol_type = other DNA
agcccgtcttaatgagccgctgaaaaatggtgccgtgatccacatcgttccgcgtcttgcgggagcaaaaagtgg

SEQ ID NO: 72031 - DNA, 75 bp, synthetic construct
  source 1..75: mol_type = other DNA
tcacttcagataactctacagcgtgccagaggattgtatgcaagtggtgctgtcagttacatcgaagtgctggat

SEQ ID NO: 72032 - DNA, 75 bp, synthetic construct
  source 1..75: mol_type = other DNA
ttattgggtgcgggccaatgcggtaccgatggtgcgcgagggaaaaatcagtggctatatgtcgattcgtacccg

SEQ ID NO: 72033 - DNA, 75 bp, synthetic construct
  source 1..75: mol_type = other DNA
gtcggtggtcgcacggggctgacggctgtcgtagtcggcgttatgttcctgttagttatgttcttctcaccgctg

SEQ ID NO: 72034 - DNA, 75 bp, synthetic construct
  source 1..75: mol_type = other DNA
gaacaggccagagcaagacaaccgttctaaaggcagcgctggccgcattcgataacctggacgagaacctgaaaa

SEQ ID NO: 72035 - DNA, 75 bp, synthetic construct
  source 1..75: mol_type = other DNA
aacagcgcatcagcttctggccgcagcattttggtctcattccacaatgggtgaccctggagccccgtgtcttcg

SEQ ID NO: 72036 - DNA, 75 bp, synthetic construct
  source 1..75: mol_type = other DNA
cacctgaaccggatgacgataatgacgaaacatgggtactgttcaatgtcatgaacggtaaccgcgctgaaatga

SEQ ID NO: 72037 - DNA, 75 bp, synthetic construct
  source 1..75: mol_type = other DNA
aaaaacgcgacgctgattgaagcgattaaatcagcgaagttaccgcacgatcgttaccagaccaccaccattgtt

SEQ ID NO: 72038 - DNA, 75 bp, synthetic construct
  source 1..75: mol_type = other DNA
atgaaccgaaaatccccatcattatatgaaattctctatggtaatttcactggcgggctggagctgaatcaggtt

SEQ ID NO: 72039 - DNA, 75 bp, synthetic construct
  source 1..75: mol_type = other DNA
gtatgcaaaagggctgacctgcgaagccgacaccctcggctcctgtggttacgtttatctgactgtttatccgac

SEQ ID NO: 72040 - DNA, 75 bp, synthetic construct
  source 1..75: mol_type = other DNA
attttgtcctgaaatcatatgatgaaacagtcctggctgttatccagtttggtgaaaccgcaaccgtcagacagc

SEQ ID NO: 72041 - DNA, 75 bp, synthetic construct
  source 1..75: mol_type = other DNA
acactgacgacacaccggtaaaggtactggcaccgggcctgaaaaagacgaaaacagggcgcatctggacgtatg

SEQ ID NO: 72042 - DNA, 75 bp, synthetic construct
  source 1..75: mol_type = other DNA
aaatatgcagaccatctgccgttataccgccagtcagaaatataccgccgtcagggtgtggagctgagccgtgcc

SEQ ID NO: 72043 - DNA, 75 bp, synthetic construct
  source 1..75: mol_type = other DNA
aaaaaagcctgtacaaaatgtgactgtattgttgaagcaccggcgccgtcccgcccgatagagcgtggtatcgcg

SEQ ID NO: 72044 - DNA, 75 bp, synthetic construct
  source 1..75: mol_type = other DNA
cggaccgtatcactcaccgcacggtgaacggcgaaccggcagagcagtggcagtatgacggccacggctggctga

SEQ ID NO: 72045 - DNA, 75 bp, synthetic construct
  source 1..75: mol_type = other DNA
gtaatcatcacggacagcctgaaccggcgggaggtgctgtacacggaaggcgagggtggcctgaagcgggtggtg

SEQ ID NO: 72046 - DNA, 75 bp, synthetic construct
  source 1..75: mol_type = other DNA
tcatgcctgggcaatctcgatccgcagcggctttccaaagtcaccgcggatggcgaatggttaagtggtgacaaa

SEQ ID NO: 72047 - DNA, 75 bp, synthetic construct
  source 1..75: mol_type = other DNA
tggaagcgatgggtaaaaagcatctgattggcagccgtcgcgattgcttagtgcctgcgccaaccattgaagaga

SEQ ID NO: 72048 - DNA, 75 bp, synthetic construct
  source 1..75: mol_type = other DNA
gctgggttgtagccgggcgactatcagcaaagctgtgaagcaacagaccgttaacaaaatgaaccatgaacctga

SEQ ID NO: 72049 - DNA, 75 bp, synthetic construct
  source 1..75: mol_type = other DNA
gctgattgctgtggcatggtggaaccctgtgggctggctgggtgccgcggctgtatcgggcatgtatgcggcagg

SEQ ID NO: 72050 - DNA, 75 bp, synthetic construct
  source 1..75: mol_type = other DNA
attgccggaaccactgataccaccgcgaaagagcgtgaacctgtcgatccgacgctgatggtcgatgtggaatac

SEQ ID NO: 72051 - DNA, 75 bp, synthetic construct
  source 1..75: mol_type = other DNA
atgcaagcgtagatctaaaccctcatcaaattgaggcggctctttttgctatcgaaaatccgctaagcaaaggtg

SEQ ID NO: 72052 - DNA, 75 bp, synthetic construct
  source 1..75: mol_type = other DNA
agctgccagaaacaaggccacggcggaagcgaaaattcacgccaccacggaaaataacagcgaggccgtgtcatg

SEQ ID NO: 72053 - DNA, 75 bp, synthetic construct
  source 1..75: mol_type = other DNA
agccggctcctgatgacactggaaacagcggatccggacgaggcggaaggctggttgcccacagataaccggagc

SEQ ID NO: 72054 - DNA, 75 bp, synthetic construct
  source 1..75: mol_type = other DNA
atgcttgaacaacatcaggatagcctcttaccgcgcgttacgcaaggagaagaaggccatgaaactaccgggaaa

SEQ ID NO: 72055 - DNA, 75 bp, synthetic construct
  source 1..75: mol_type = other DNA
ccgatctggtcggcgctgatccgcgtgaaatcgtctttacctctggtgcaaccgaatctgacaacctggcgatca

SEQ ID NO: 72056 - DNA, 75 bp, synthetic construct
  source 1..75: mol_type = other DNA
ccggtttcccgtttcctggccttactgggtgccatgcgattacccacccgcaatgctgaaggcatccgggctctg

SEQ ID NO: 72057 - DNA, 75 bp, synthetic construct
  source 1..75: mol_type = other DNA
aaaccgctgttgaaatccctggaaagctggttgcgtgaaaagatgaagaccctgtcgcgacactcagagttggcg

SEQ ID NO: 72058 - DNA, 75 bp, synthetic construct
  source 1..75: mol_type = other DNA
gcgagagagggaaagaaagcgggaacaaaatggcgattgtcacggcgcgtcacgaaatgtcacgcacatgtcacg

SEQ ID NO: 72059 - DNA, 75 bp, synthetic construct
  source 1..75: mol_type = other DNA
gaccattcttaactgatttctgtgaggactttatcgtgtcagacacactgcccgggacaacgcatcccgacgaca

SEQ ID NO: 72060 - DNA, 75 bp, synthetic construct
  source 1..75: mol_type = other DNA
gacgtcgctgcatgaatggatgatggagaagaatggcacgctgtcgaaaaaatccagactgggcgaagcgttcag

SEQ ID NO: 72061 - DNA, 75 bp, synthetic construct
  source 1..75: mol_type = other DNA
atctgctcagtcacagctcggcgttaaaccgcgcattctgggtgtaccaggtcacgacaccaaggcggtagctac

SEQ ID NO: 72062 - DNA, 75 bp, synthetic construct
  source 1..75: mol_type = other DNA
ccgacgaaaacggtcagtacaccggactgaaagccctgctggcggcggagtcggtaaccggtgttaaaccgcgta

SEQ ID NO: 72063 - DNA, 75 bp, synthetic construct
  source 1..75: mol_type = other DNA
tgtttatcgggcgcatgttgctcggtggttttgtctcgatggttgccggtgttgttctggtgcagtttcctgacc

SEQ ID NO: 72064 - DNA, 75 bp, synthetic construct
  source 1..75: mol_type = other DNA
tgtgaagccgataccctcagcagttgtggttacgtttatctggctgtttatccgacgcccgaaatgaaaaattaa

SEQ ID NO: 72065 - DNA, 75 bp, synthetic construct
  source 1..75: mol_type = other DNA
atgagtgattttcaccacggcgtgcaggtgcttgagattaacgacggcacccgcgtcatttccactgttgcaacc

SEQ ID NO: 72066 - DNA, 75 bp, synthetic construct
  source 1..75: mol_type = other DNA
cggtgtgtttcaggctgtgctgggggcggctgttatggcggttgctatatggatgccgggggtaggaattatggc

SEQ ID NO: 72067 - DNA, 75 bp, synthetic construct
  source 1..75: mol_type = other DNA
cggttattcgtttttactggggctatcgtgcggcggataatgaaaccgatacatacgccattccgctaaaaaata

SEQ ID NO: 72068 - DNA, 75 bp, synthetic construct
  source 1..75: mol_type = other DNA
gttactggcagagatgagccgcattgcagcggatgtgatactggaaatctgccatcagacagatgtggagccgag

SEQ ID NO: 72069 - DNA, 75 bp, synthetic construct
  source 1..75: mol_type = other DNA
tccacctggatgtcagacgtgaatcatgtcggaaaattgaagccccttcagagcccctttcaagccaagaacagg

SEQ ID NO: 72070 - DNA, 75 bp, synthetic construct
  source 1..75: mol_type = other DNA
acggggtgtacggcagctacttcaactccgacgaaccgtccctgaaggacgaagcccggatggtggtgcttgagc

SEQ ID NO: 72071 - DNA, 75 bp, synthetic construct
  source 1..75: mol_type = other DNA
gtagagattacagcggtgatgaaatggttaccagagtagtacctgtacataatgtttctgttcgtgaattagccc

SEQ ID NO: 72072 - DNA, 75 bp, synthetic construct
  source 1..75: mol_type = other DNA
ggaaccctgtgggctggctgggggccgcggctgtatcgggtatgtatgcagcaggggccagtatgatcctgggtg

SEQ ID NO: 72073 - DNA, 75 bp, synthetic construct
  source 1..75: mol_type = other DNA
ttcagcgacgctgatttacggtatctcgaccaggcatttccactgctgctcaaacagcttgaactgatgctcacc

SEQ ID NO: 72074 - DNA, 75 bp, synthetic construct
  source 1..75: mol_type = other DNA
gccttttgccgggatgccaggagcgcaggccacggcgcgacagaggcggcgcgaccggaacggtcgctgcaagcc

SEQ ID NO: 72075 - DNA, 75 bp, synthetic construct
  source 1..75: mol_type = other DNA
cgcggctgtatcgggtatgtatgcagcaggggccagtatgatcctgggtggtgtggcgcagatgctggcaccgaa

SEQ ID NO: 72076 - DNA, 75 bp, synthetic construct
  source 1..75: mol_type = other DNA
cggaagaccagcggattgagtccggtatttcttccgctgcggtgatggagattatccgcaacgagagcgaaaacc

SEQ ID NO: 72077 - DNA, 75 bp, synthetic construct
  source 1..75: mol_type = other DNA
atgtcaacaccaaatccccttgagccggtaaaaggtgccggtaccaccctgtgggtttataacggtcagggtgac

SEQ ID NO: 72078 - DNA, 75 bp, synthetic construct
  source 1..75: mol_type = other DNA
acctgtccaatacaaaatgggtcgaaaatgtgaaaagtggtgcctatcagtcatggattgcacagaactatgagg

SEQ ID NO: 72079 - DNA, 75 bp, synthetic construct
  source 1..75: mol_type = other DNA
aactaattttcatttttcgagaatgggtgaaaaaatggtttctgttccccatacggtgaatgacttcatttccag

SEQ ID NO: 72080 - DNA, 75 bp, synthetic construct
  source 1..75: mol_type = other DNA
agtatcggtaaggccgtgacggcgaaagaagtgatcacccgcacggtgaaagtgaccaacgtgggcaaaccttct

SEQ ID NO: 72081 - DNA, 75 bp, synthetic construct
  source 1..75: mol_type = other DNA
ggatgccgggaatcagtatcgctttcagtgacattctcttttctatgggggcagcgatgacgcttggtggtgttg

SEQ ID NO: 72082 - DNA, 75 bp, synthetic construct
  source 1..75: mol_type = other DNA
cagatactggctgattacttgaaagaaacaaccggaaacgtaccggaaaagttgctacagaagaaaggcgagtaa

SEQ ID NO: 72083 - DNA, 75 bp, synthetic construct
  source 1..75: mol_type = other DNA
cgcgtgcgcaactgtcactgcggattaaccgttctgccgactggcaggacaggcgctgtaaccggcgtaatgaag

SEQ ID NO: 72084 - DNA, 75 bp, synthetic construct
  source 1..75: mol_type = other DNA
gcacggcgcggagctggccgccacgctggcacctgagctgatggggtataacgaacaaattcccgcagtaaaaca

SEQ ID NO: 72085 - DNA, 75 bp, synthetic construct
  source 1..75: mol_type = other DNA
tatctggaatctgtacagtctgagcaacggcggggcatttatggcccccgaaccggatgacgatgatgacgaaac

SEQ ID NO: 72086 - DNA, 75 bp, synthetic construct
  source 1..75: mol_type = other DNA
tgcaaaagattttttagacctggagaagaagtatcaagttctattgcaagtaaagtttttcacgcatttattgat

SEQ ID NO: 72087 - DNA, 75 bp, synthetic construct
  source 1..75: mol_type = other DNA
gttgaacaacacggatgctccggatgatgttaaagccgtccgggtacggaagtgcctgcaagtaatggggtattg

SEQ ID NO: 72088 - DNA, 75 bp, synthetic construct
  source 1..75: mol_type = other DNA
cgttctgaaaaactgcgtcgtgaagttgatctggctgaggctctgctgaaacaacgtgaacaggacagcgatcgt

SEQ ID NO: 72089 - DNA, 75 bp, synthetic construct
  source 1..75: mol_type = other DNA
aaaaacagtaaagaacatatgtcatggacatatgatgcagccaaaggcgtgggccgtattcagcaggatgaccaa

SEQ ID NO: 72090 - DNA, 75 bp, synthetic construct
  source 1..75: mol_type = other DNA
gcagcgcgatttgattgcctggtttgacagcagtgagacacgggcctacaaaatccgtttcccgaacggcacggt

SEQ ID NO: 72091 - DNA, 75 bp, synthetic construct
  source 1..75: mol_type = other DNA
ccacaacgaaggctggcgaagccactgaacaggccagcgcagcagcgaggtctgcttccgcagcgaagacatccg

SEQ ID NO: 72092 - DNA, 75 bp, synthetic construct
  source 1..75: mol_type = other DNA
atggaatcgctctcagagagaacctcaacaggctaccagcaaatccacgacggtattattcatctggtcgatagc

SEQ ID NO: 72093 - DNA, 75 bp, synthetic construct
  source 1..75: mol_type = other DNA
tttcccgacatgaagccgtctatgctggatggactgaaaaaagaagttatcagagcctgtaacgcatgcgcaaaa

SEQ ID NO: 72094 - DNA, 75 bp, synthetic construct
  source 1..75: mol_type = other DNA
tactggctggcgaaagcatcgacgcttccccccgcgcccgtcttgccgctggcctgcgaacccgccacgctacgt

SEQ ID NO: 72095 - DNA, 75 bp, synthetic construct
  source 1..75: mol_type = other DNA
caatgctcactggaaaccggtgcttcattaacatggctaaccactggtaacggggcaatgtttgaaaagcctcga

SEQ ID NO: 72096 - DNA, 75 bp, synthetic construct
  source 1..75: mol_type = other DNA
gccgacatccggtacggtggcaaaagggaaaacaaccaccctgacggtttcttttgagccggaaagtgcaacaga

SEQ ID NO: 72097 - DNA, 75 bp, synthetic construct
  source 1..75: mol_type = other DNA
caactatccggcaattcctagtgaggtgttgtccgcaatcctgaaggttgccaggattcgtgccgatttcgatga

SEQ ID NO: 72098 - DNA, 75 bp, synthetic construct
  source 1..75: mol_type = other DNA
tcaaagccgcgagaattgtagctatggcgaggcaatagaaattctctatgctcaagaagtagcagcgggtttggc

SEQ ID NO: 72099 - DNA, 75 bp, synthetic construct
  source 1..75: mol_type = other DNA
gatgctgaaattaccgctgctatggaagataaattgaagatcaacatggagcgccagtggcctgaaccaaaagat

SEQ ID NO: 72100 - DNA, 75 bp, synthetic construct
  source 1..75: mol_type = other DNA
cacgcttattaaatggagtgtatcaacgggatcttcctcacaaacgcaatgtcgtcagtgcagagaagtattgtc

SEQ ID NO: 72101 - DNA, 75 bp, synthetic construct
  source 1..75: mol_type = other DNA
tgtgcgaggtgggcgtatgactgggaacgataagcttaaagcagatctgcttaatggttatcagttggactacta

SEQ ID NO: 72102 - DNA, 75 bp, synthetic construct
  source 1..75: mol_type = other DNA
gcggtttaaatcgccatcaattaggtgggtttatccctgtttacgatcaattagcagggactcactattttttga

SEQ ID NO: 72103 - DNA, 75 bp, synthetic construct
  source 1..75: mol_type = other DNA
cggcgctgattgctacggcaatctggatgccaggaatcagtatcgctttcagtgacattctcttttcaatggggg

SEQ ID NO: 72104 - DNA, 75 bp, synthetic construct
  source 1..75: mol_type = other DNA
gcggcgctgattgcggtggcatggtggaaccctgtgggctggctgggggccgcggctgtatcgggcatgtatgcg

SEQ ID NO: 72105 - DNA, 75 bp, synthetic construct
  source 1..75: mol_type = other DNA
gggtgtgttgcgtcgtctgcgggggctgcagcgtatggtggaagacgagagtgaggaagggcgcgatgaatgctg

SEQ ID NO: 72106 - DNA, 75 bp, synthetic construct
  source 1..75: mol_type = other DNA
tggtaacactcgttatcagatcctgagagaactgtgggaggagaccggcgagcagcgtttctaccgtattcatgt

SEQ ID NO: 72107 - DNA, 75 bp, synthetic construct
  source 1..75: mol_type = other DNA
atgacagcacaaattgcagcttacgggcggctggtggctgacccgcagttaaagaccaccagcaagggtacacaa

SEQ ID NO: 72108 - DNA, 75 bp, synthetic construct
  source 1..75: mol_type = other DNA
cgaacaaaataggttattacaatctttacccatcaatctccacatgccatacattcaggttcatcgtgccttatc

SEQ ID NO: 72109 - DNA, 75 bp, synthetic construct
  source 1..75: mol_type = other DNA
ctgccatcctgctgtttctggtagtggcagtggatttcaccggacggctgatgtcggtactggcagatggtgtgc

SEQ ID NO: 72110 - DNA, 75 bp, synthetic construct
  source 1..75: mol_type = other DNA
ctggcatcgtgcggcctgaccgtggagcagatgcaaaaccagatggacccggtatacacgccggcgcgaaaaatt

SEQ ID NO: 72111 - DNA, 75 bp, synthetic construct
  source 1..75: mol_type = other DNA
ctacgcccgatccaagtaaattgccggacatagcgaaacaattaagactgccatatcctattgaccaggccagta

SEQ ID NO: 72112 - DNA, 75 bp, synthetic construct
  source 1..75: mol_type = other DNA
ttattgacgtgataggtaacgtgtacaaagaaaccggagaactgactgaagatggcgaaccggtatgtgttaagg

SEQ ID NO: 72113 - DNA, 75 bp, synthetic construct
  source 1..75: mol_type = other DNA
tatctggaatctgtacaccctgaacaacggcggggcatttatggcccccgaaccggatgatgacgaaacatgggt

SEQ ID NO: 72114 - DNA, 75 bp, synthetic construct
  source 1..75: mol_type = other DNA
catcattaatgattcgcaaatatcgtcattattcgatgaatacgtggttgctgttgagcatcaactccgtagctg

SEQ ID NO: 72115 - DNA, 75 bp, synthetic construct
  source 1..75: mol_type = other DNA
gacatactggaagctgaagctatcagaacagggcagagcaaaacaaccgttctcaaagcggcgctggcgatgtac

SEQ ID NO: 72116 - DNA, 75 bp, synthetic construct
  source 1..75: mol_type = other DNA
atgaaagatttaacactcaaatttgaagacagggccgacttttcggcctttatggatagcactggctattatgat

SEQ ID NO: 72117 - DNA, 75 bp, synthetic construct
  source 1..75: mol_type = other DNA
aaggtcaacattccggtcgtatccggtaatggtgaacttgctgcggttgcagaaatcaccgtcaccgccagttaa

SEQ ID NO: 72118 - DNA, 75 bp, synthetic construct
  source 1..75: mol_type = other DNA
ttctcggcgttagcggcggtattgctgcctataaaacccctgaactggtgcgtcgtttgcgcgatcgcggggccg

SEQ ID NO: 72119 - DNA, 75 bp, synthetic construct
  source 1..75: mol_type = other DNA
ctccgctacgcctgtcagcgaattactggaccaactttcacacatcgacatgaataatgcaccgttgctgattgc

SEQ ID NO: 72120 - DNA, 75 bp, synthetic construct
  source 1..75: mol_type = other DNA
gacgcaacaggacaccatacgccagatggctgaatacaaccgcctgctctcacagcgggtggcggcttatgcttc

SEQ ID NO: 72121 - DNA, 75 bp, synthetic construct
  source 1..75: mol_type = other DNA
atgacactgcaggttgaattctggacggtggtgagttttctgctcaccttcatgaggtttgtgggagggctcgcc

SEQ ID NO: 72122 - DNA, 75 bp, synthetic construct
  source 1..75: mol_type = other DNA
gtgtcagacacactctccgggacaacgcatcccgatgacaatcacgaccatccctggtggggactaccctgcaca

SEQ ID NO: 72123 - DNA, 75 bp, synthetic construct
  source 1..75: mol_type = other DNA
ttatcgattccctgactgacgtgaaaatgccccattacgcaccgctggctcaagtcagcggtagtatcgacctta

SEQ ID NO: 72124 - DNA, 75 bp, synthetic construct
  source 1..75: mol_type = other DNA
ccgacagggccgacttttcggcctttatggagagtactggctattatgatgacgagtcgatgcaggatgatattc

SEQ ID NO: 72125 - DNA, 75 bp, synthetic construct
  source 1..75: mol_type = other DNA
tctgaccgatcatgaaatcaggaccgtcctggcgcgcatggaggacatcccggaagaccagcggactgaatccgg

SEQ ID NO: 72126 - DNA, 75 bp, synthetic construct
  source 1..75: mol_type = other DNA
tgtctctgataacccagacaccacacaggacgatatctcggactatgtggcctctaacgttaaagatacgcttag

SEQ ID NO: 72127 - DNA, 75 bp, synthetic construct
  source 1..75: mol_type = other DNA
cggaagaccagcggattgagtccggtatttcttccgccgctgcgatggagattatcagcaacgtgagcgaaaacc

SEQ ID NO: 72128 - DNA, 75 bp, synthetic construct
  source 1..75: mol_type = other DNA
cgcacggagtgttatgccatgacggttcattattaccgtctgcgggactacgccctgcagcatccggaatgcaac

SEQ ID NO: 72129 - DNA, 75 bp, synthetic construct
  source 1..75: mol_type = other DNA
tatcaaaacagaaaaagagcgccttgtgaatccgctgggactgcaagttctgagctaccaacctgatccagaggt

SEQ ID NO: 72130 - DNA, 75 bp, synthetic construct
  source 1..75: mol_type = other DNA
acgttcagagcggtttccgccgatccgtcgaaagccaccattagtgtgaaagatatgacaattacggtaaacggc

SEQ ID NO: 72131 - DNA, 75 bp, synthetic construct
  source 1..75: mol_type = other DNA
agccgggaatggaagtgacctctgagccgtcggttatggaagtgcgttttggggacgggtattcccagcgtgcgc

SEQ ID NO: 72132 - DNA, 75 bp, synthetic construct
  source 1..75: mol_type = other DNA
gattatggatcggatgaccatgaacggcgggcgatgggtgaattttaactgggagagctggcgcccgaatgttgg

SEQ ID NO: 72133 - DNA, 75 bp, synthetic construct
  source 1..75: mol_type = other DNA
tgcgtggtttcacctttgatcaaaaacgccagacgcttcacctccagctgcgggccgcgaactttgccagcttcg

SEQ ID NO: 72134 - DNA, 75 bp, synthetic construct
  source 1..75: mol_type = other DNA
gtcactgaaatcccattttggatgttcgtacaaagaaattagtgaggagcagtttaccgaagcactgtcacttgc

SEQ ID NO: 72135 - DNA, 75 bp, synthetic construct
  source 1..75: mol_type = other DNA
gcgtcaccctggtctgtccgtactgcagtcagcatttttcggcagacgtgcccgtcatggaattctcccgccctg

SEQ ID NO: 72136 - DNA, 75 bp, synthetic construct
  source 1..75: mol_type = other DNA
aattgctatcgccaccattggaattgaaaccaaaggtgtctccgttgaaagtttaagtattgatgcagtagccaa

SEQ ID NO: 72137 - DNA, 75 bp, synthetic construct
  source 1..75: mol_type = other DNA
taaaaaaagcaactgtagattcaattggtcaacgcaacagttatgtgaaaacatggggttgcggaggttttttga

SEQ ID NO: 72138 - DNA, 75 bp, synthetic construct
  source 1..75: mol_type = other DNA
cgaagacaaagcgcgtctgacccgtaacatcattgccggtctgccgggcgcggaagaagggtataccctcgacca

SEQ ID NO: 72139 - DNA, 75 bp, synthetic construct
  source 1..75: mol_type = other DNA
gatcaagaaaaaatgcttaaagacatgaaagacaaaaaagaatcaatggagcgcactgttgcaagatggctcgct

SEQ ID NO: 72140 - DNA, 75 bp, synthetic construct
  source 1..75: mol_type = other DNA
agtttggataaactggttgaggttacagggcatccattgcattggtttttattgcctcctgaagagggggagcaa

SEQ ID NO: 72141 - DNA, 75 bp, synthetic construct
  source 1..75: mol_type = other DNA
acttaagtaatctggagccgaatattcagatctggaacgtggatttgcgcggcgaccgttcgctgacgctgcgtt

SEQ ID NO: 72142 - DNA, 75 bp, synthetic construct
  source 1..75: mol_type = other DNA
taccgcatcgcgttacggaagtatcaacactatcagcgccaaacctgtaccggacttgtgcagaaatcctccagc

SEQ ID NO: 72143 - DNA, 75 bp, synthetic construct
  source 1..75: mol_type = other DNA
atgctgagcgaagacgatttagaacagcagtgcctgcaatggtttgctgaacaggggtgggaagtgctgcatggg

SEQ ID NO: 72144 - DNA, 75 bp, synthetic construct
  source 1..75: mol_type = other DNA
cgtgaagtgcagccggatgaagtgtacaacctgggcgcaatgagccacgttgcggtttcttttgagtcaccggaa

SEQ ID NO: 72145 - DNA, 75 bp, synthetic construct
  source 1..75: mol_type = other DNA
tcgcctccatgcggctgtttgcccgcttatccctggatagcgccatgccggaacgcaccaccatcatgaatttcc

SEQ ID NO: 72146 - DNA, 75 bp, synthetic construct
  source 1..75: mol_type = other DNA
atgattttgaacaactccagtcactggccgaccgtcgactttatctcgctaaacaggccgggcgcaatcgggtat

SEQ ID NO: 72147 - DNA, 75 bp, synthetic construct
  source 1..75: mol_type = other DNA
attcacatatcctggagcaaataaaagccatctacaatcaagtaatagcgatgttgttgctgctgcagctataag

SEQ ID NO: 72148 - DNA, 75 bp, synthetic construct
  source 1..75: mol_type = other DNA
tactggaaatctgccatcaggcagatgtggagccggggatattcacggtgatccacacatgggggcgtgaccagc

SEQ ID NO: 72149 - DNA, 75 bp, synthetic construct
  source 1..75: mol_type = other DNA
ttgccgctttccgggactactgggcagcggaggggaaagttttcacgcaggttcagtgggagcagaaattcgccc

SEQ ID NO: 72150 - DNA, 75 bp, synthetic construct
  source 1..75: mol_type = other DNA
gctgacccaaaacggcgtcccgatgagccgttaccgtgccgggcggctgatgaaacatctgaatctgagcagttg

SEQ ID NO: 72151 - DNA, 75 bp, synthetic construct
  source 1..75: mol_type = other DNA
tactacggtttcctgagtccggtgaagcgccgcttactggaagaagttgtgtacgtcataacggagacggtgaga

SEQ ID NO: 72152 - DNA, 75 bp, synthetic construct
  source 1..75: mol_type = other DNA
tatcgcataccttttataacgattcattcagccataaagaacttggcgtaaccgtcggaggcctgaacaccgata

SEQ ID NO: 72153 - DNA, 75 bp, synthetic construct
  source 1..75: mol_type = other DNA
tactgaaaacgatgtcctgtgatgagtttgaggactggcgggacagcggcgaagacttccgccgcgaactgaccc

SEQ ID NO: 72154 - DNA, 75 bp, synthetic construct
  source 1..75: mol_type = other DNA
cccctcactttgaagggatcggagctataaaaatggttttaggtacattcctcaaattgaggattgtgggaaaac

SEQ ID NO: 72155 - DNA, 75 bp, synthetic construct
  source 1..75: mol_type = other DNA
ggtcactgtcgtcaaatggcaaggtactccatacccataaacaccccggcgacagcggcgggacgacgggggcgc

SEQ ID NO: 72156 - DNA, 75 bp, synthetic construct
  source 1..75: mol_type = other DNA
ttcagaccggcacctggcaaggcatctggctgggggaacatcgcatccacggcggatcgcgtcgcatcatcgcga

SEQ ID NO: 72157 - DNA, 75 bp, synthetic construct
  source 1..75: mol_type = other DNA
gactaccctgatggggtacacgcagtggtgttgttcatctccggactgttgccacactaaaaaggtctgcttccg

SEQ ID NO: 72158 - DNA, 75 bp, synthetic construct
  source 1..75: mol_type = other DNA
gataaagacgaagagttccagaaattcatctccgtaccggaaaaccgtgagtatgtttacggtgataccgcgacg

SEQ ID NO: 72159 - DNA, 75 bp, synthetic construct
  source 1..75: mol_type = other DNA
gttgaggactaccgctgcgccgcactggtggaaaacatccagattggtgatttcagcgccgccgcagccgaaacc

SEQ ID NO: 72160 - DNA, 75 bp, synthetic construct
  source 1..75: mol_type = other DNA
ttcagcagggaaaccgctggcttaactggctggagaaacaaccggaaggggcagtccgtccggtggtaattgaat

SEQ ID NO: 72161 - DNA, 75 bp, synthetic construct
  source 1..75: mol_type = other DNA
atgaacacactcgcaaatattcaggaactcgcgcgcgcactgcgcaatatgattcgcaccggcgttatcgtcgaa

SEQ ID NO: 72162 - DNA, 75 bp, synthetic construct
  source 1..75: mol_type = other DNA
gttggcgcagtgaaagccgcgacagatgcgggctccgctgctgcgagtaaagtgggagaactggtctccgtacat

SEQ ID NO: 72163 - DNA, 75 bp, synthetic construct
  source 1..75: mol_type = other DNA
tacccggagctggtaataccggatgaactggcagtggaaggaaacagcaaacgggactggaatcgcttcctggac

SEQ ID NO: 72164 - DNA, 75 bp, synthetic construct
  source 1..75: mol_type = other DNA
aaacagccaaacccaaagataaaatttataagattgccgatggtggtgggctctaccttcaggtcaatcctaacg

SEQ ID NO: 72165 - DNA, 75 bp, synthetic construct
  source 1..75: mol_type = other DNA
agtcctcgacgaatgtttactactgtatccaaagcggcattgatggcgatcgggcagggcgtcaggagggcggca

SEQ ID NO: 72166 - DNA, 75 bp, synthetic construct
  source 1..75: mol_type = other DNA
cctcgataaaacattaattaatggcctgaatgtttgccagaaactggagattaatgttccggtttatgcggggat

SEQ ID NO: 72167 - DNA, 75 bp, synthetic construct
  source 1..75: mol_type = other DNA
gctcgttattacgggcgacaataccacagtaaacaacactggaaaaaccatcgtcgacggcaaaggcaccaccgg

SEQ ID NO: 72168 - DNA, 75 bp, synthetic construct
  source 1..75: mol_type = other DNA
gggaaaacgtcacaggagttttaagtagccatgacaatgcattcggtcattttcttggtgcgctggccggagcag

SEQ ID NO: 72169 - DNA, 75 bp, synthetic construct
  source 1..75: mol_type = other DNA
ttaacggcattgccattggtagcaatgcgcaagtcattcatgtcaacagtattgcgataggtaatggttctacga

SEQ ID NO: 72170 - DNA, 75 bp, synthetic construct
  source 1..75: mol_type = other DNA
tctggaccatcgcgtatcgtcgcctggcgagtacttgatgcccaatatttcggagtcgcccaggctcgcagaaga

SEQ ID NO: 72171 - DNA, 75 bp, synthetic construct
  source 1..75: mol_type = other DNA
agaagctttactgtggctgttcttgctgaaccagaagagatcgtattaccagaaaagcactccggctcttctact

SEQ ID NO: 72172 - DNA, 75 bp, synthetic construct
  source 1..75: mol_type = other DNA
cggctccggcgatgttcggcagactgccggaccagcgggactacgtgcgctggcgggtgagtgcaaacgaggggc

SEQ ID NO: 72173 - DNA, 75 bp, synthetic construct
  source 1..75: mol_type = other DNA
taggatcatttgactatggccgtaactacggtgttgcttatgatgccgcagcttataccgatatgttagttgaat

SEQ ID NO: 72174 - DNA, 75 bp, synthetic construct
  source 1..75: mol_type = other DNA
gggcgataaacaacgtttcttgcctcaaggcgactatcattatcaaattcattatcaggttaaaaatgctttcct

SEQ ID NO: 72175 - DNA, 75 bp, synthetic construct
  source 1..75: mol_type = other DNA
cgtgggagaagtagaagctgtacatgttattccacgtccgcatactgatgtcgaaaaaatcttaccaaaaggaat

SEQ ID NO: 72176 - DNA, 75 bp, synthetic construct
  source 1..75: mol_type = other DNA
agagggaagccggtgcacaggtgatgcgtgagactgaacagcagatttaccgtcagctgactgacgaggtactgg

SEQ ID NO: 72177 - DNA, 75 bp, synthetic construct
  source 1..75: mol_type = other DNA
ccaccgtacaaaacgggaagaatacctgttgatgagtggtgatgagttcatggaaaggttctcctggcatgtggc

SEQ ID NO: 72178 - DNA, 75 bp, synthetic construct
  source 1..75: mol_type = other DNA
gacggccggggcagaaaaacgccgtcgccggaagaaaaaactgcggacggagcgtgcggaagataatccatggat

SEQ ID NO: 72179 - DNA, 75 bp, synthetic construct
  source 1..75: mol_type = other DNA
atgaattactaaaaaaaaatggaattgatgattatagcgttattagttttatcgatgcccaaaaagtcgttgata

SEQ ID NO: 72180 - DNA, 75 bp, synthetic construct
  source 1..75: mol_type = other DNA
tctcaggcgagaagccgttcttattaccggacaatgaaggggtaaagatgaacacttcaccggtgcgaatggatg

SEQ ID NO: 72181 - DNA, 75 bp, synthetic construct
  source 1..75: mol_type = other DNA
tgcattattgaagatgggggcatgtgtgttgatggattcggtgagtatgtaggtcactcactgcctgatggaagc

SEQ ID NO: 72182 - DNA, 75 bp, synthetic construct
  source 1..75: mol_type = other DNA
aaagaaaaacagcgaatgtctctatcatcttcctaccatcaacacttggatcaaaaaccaacccttaccatctca

SEQ ID NO: 72183 - DNA, 75 bp, synthetic construct
  source 1..75: mol_type = other DNA
ttattggattgcgcattttgatcggcattggtctgggaggcgattactcagtaggtcacactttgctggctgaat

SEQ ID NO: 72184 - DNA, 75 bp, synthetic construct
  source 1..75: mol_type = other DNA
attgtcatccgtttcggtagcaatttatactcgattatccctctttattttaggttttttctatagttcttctgc

SEQ ID NO: 72185 - DNA, 75 bp, synthetic construct
  source 1..75: mol_type = other DNA
tgtactccgggttcagatgagaatgataccaacgtatttaagattgcaagtatagatagcgtttttaaaaaggat

SEQ ID NO: 72186 - DNA, 75 bp, synthetic construct
  source 1..75: mol_type = other DNA
agagtgattgctgtatgtaccctggttcagacctggtagggaaggttgaaatgactgagtggttagttgactttg

SEQ ID NO: 72187 - DNA, 75 bp, synthetic construct
  source 1..75: mol_type = other DNA
gaaaaaggaattagccactttattaccgaacatattgcgccattctatgaacgtcgctggggtggttttttgcgt

SEQ ID NO: 72188 - DNA, 75 bp, synthetic construct
  source 1..75: mol_type = other DNA
tggacatagcaacagaagaactaagtcatctcgaaattattggttctcttgttggtatgctcaacaaaggtgcaa

SEQ ID NO: 72189 - DNA, 75 bp, synthetic construct
  source 1..75: mol_type = other DNA
tgtacgcgtggattaagcgaagaagaggtgcagggtgagtatgaactgaacactggcaaagtgattatcgaaacg

SEQ ID NO: 72190 - DNA, 75 bp, synthetic construct
  source 1..75: mol_type = other DNA
caggattggcagtatcgtaccggcgcagcaggaagggtacgtacttattggccttgatctcacatacagcgatgg

SEQ ID NO: 72191 - DNA, 75 bp, synthetic construct
  source 1..75: mol_type = other DNA
caggattggcagtatagtaccggcacagcaggaagggtacatacttatcggccttgatctcacatacagtgatgg

SEQ ID NO: 72192 - DNA, 75 bp, synthetic construct
  source 1..75: mol_type = other DNA
atctgcattatggcgacctgagtgatacctccaacctgacgcgcattttgcgtgaagtgcagccggatgaagtgt

SEQ ID NO: 72193 - DNA, 75 bp, synthetic construct
  source 1..75: mol_type = other DNA
tccggccgtctgattcaggaaaccgcccctgacggcgatatcacccgctaccgttatgataatccacacagtgac

SEQ ID NO: 72194 - DNA, 75 bp, synthetic construct
  source 1..75: mol_type = other DNA
tgacattgcagggcgcttcaccgggacgtataccggagctgatgcgcgatcttgcaagtatgggacaacttgtga

SEQ ID NO: 72195 - DNA, 75 bp, synthetic construct
  source 1..75: mol_type = other DNA
acggcaaggattccacgggcaccgagataaacggtgacaaagccatcgtcaacaacgacggcgacagcacgatcc

SEQ ID NO: 72196 - DNA, 75 bp, synthetic construct
  source 1..75: mol_type = other DNA
tgttacaggacgcccaggccaatggctacgcggtgcctgcttttaacattcataacgccgagacgatccaggcga

SEQ ID NO: 72197 - DNA, 75 bp, synthetic construct
  source 1..75: mol_type = other DNA
cccctctctacccaagcactagagatcgtacagcagctcaaagtgatgtctgggcaatatcctctggtgtttcct

SEQ ID NO: 72198 - DNA, 75 bp, synthetic construct
  source 1..75: mol_type = other DNA
agatgattatgaaaaagccaacagtgcttacaatgagggattgatcgcgaaaaatgaactcagagatattgataa

SEQ ID NO: 72199 - DNA, 75 bp, synthetic construct
  source 1..75: mol_type = other DNA
gggacggcgaccggctgaccacgatacagaacgacaggagccgcatccagacgatttatcagccggggagcttca

SEQ ID NO: 72200 - DNA, 75 bp, synthetic construct
  source 1..75: mol_type = other DNA
tggccaacaactcaattaccaccaggatatacttgtgcagaaccctatttattcccagacattaataaacccgat

SEQ ID NO: 72201 - DNA, 75 bp, synthetic construct
  source 1..75: mol_type = other DNA
tgattaaagaaatcaaagagcgtataggcagcctggacgtccgagacaatattgagcgtcgggcttatgaaattg

SEQ ID NO: 72202 - DNA, 75 bp, synthetic construct
  source 1..75: mol_type = other DNA
atggaattttccgttatttttttctgggttatcactggtcttattaccatcttattcttaaaatcaataataacc

SEQ ID NO: 72203 - DNA, 75 bp, synthetic construct
  source 1..75: mol_type = other DNA
tgggtgctgggcgaggcctgtcgccagatgcacaagtggcaaggaccggcatggcaaccgttccgtcttgccatc

SEQ ID NO: 72204 - DNA, 75 bp, synthetic construct
  source 1..75: mol_type = other DNA
tcgtgattagcccctccgctgtcgaacgcatgttagtcactctcgctaccgggcgcggtttgatgttggtggggg

SEQ ID NO: 72205 - DNA, 75 bp, synthetic construct
  source 1..75: mol_type = other DNA
aaaactgcgtgaacgcctggcgcgcatcaacgcccgtgcaccggtctacaccgtcacccacggcgacatcgacct

SEQ ID NO: 72206 - DNA, 75 bp, synthetic construct
  source 1..75: mol_type = other DNA
ccgcggctggaatgtcaacatatccagggtgatggataacgccacacatgtggcggtgtacttcggctcttacct

SEQ ID NO: 72207 - DNA, 75 bp, synthetic construct
  source 1..75: mol_type = other DNA
ggagagtatggcagcgagttcgggggctttttccccgtccaggttcgtttcacgccagcccacgaacgtttccac

SEQ ID NO: 72208 - DNA, 75 bp, synthetic construct
  source 1..75: mol_type = other DNA
tcaccagaaaagatgatttcagaaaattcagatatcagaatggcagaggctgttctgaaagcggaatccaaatct

SEQ ID NO: 72209 - DNA, 75 bp, synthetic construct
  source 1..75: mol_type = other DNA
gatctcggattgcctgacgaggacggtctgtcactgattcgccgctggcgtagcaatgatgtttcactgccgatt

SEQ ID NO: 72210 - DNA, 75 bp, synthetic construct
  source 1..75: mol_type = other DNA
ccggtgtgatgaacacgaaaaccaaagggaaggtctcactcaatctggaaatcgaaccgtttgatgagaaccgtg

SEQ ID NO: 72211 - DNA, 75 bp, synthetic construct
  source 1..75: mol_type = other DNA
ctggggcatagcgatataaaaatgactatgcgttatgcgcattttgctccaggtcatttagaggctgctgttgaa

SEQ ID NO: 72212 - DNA, 75 bp, synthetic construct
  source 1..75: mol_type = other DNA
aagggcttaaccctgcctatccgttgatcccaatcgacggcaactgcaagataatcggcgtagcagtgcagatga

SEQ ID NO: 72213 - DNA, 75 bp, synthetic construct
  source 1..75: mol_type = other DNA
agcggcaggatgctaaaactaaagctccgcgtcgttttaatgacggtacactcaacactgcaatggaaaatattc

SEQ ID NO: 72214 - DNA, 75 bp, synthetic construct
  source 1..75: mol_type = other DNA
ctgctctaatcgataaggctgatccaaaagtaaaatcaaaaacttttgatgactctaaggttacagcgcatcacg

SEQ ID NO: 72215 - DNA, 75 bp, synthetic construct
  source 1..75: mol_type = other DNA
cgattatccggaaaccattacagactatgtcacactgcaacgaggctcggcttatggcggcgtgttatctaattt

SEQ ID NO: 72216 - DNA, 75 bp, synthetic construct
  source 1..75: mol_type = other DNA
tcgccgcgcgtatcaagcgattacgggaagataaagggctttcacagaaggctctggcggagctttgcggctggg

SEQ ID NO: 72217 - DNA, 75 bp, synthetic construct
  source 1..75: mol_type = other DNA
taacctgacggcaaccacgaaagaggtcgctgctgcaaccaatattgaccgcgccatgttactgggggctcaggc

SEQ ID NO: 72218 - DNA, 75 bp, synthetic construct
  source 1..75: mol_type = other DNA
aatatcatttattaaatcgaatttgacagctgttatgtttgatcatgtgcgaatatcgacagggaattttaaaga

SEQ ID NO: 72219 - DNA, 75 bp, synthetic construct
  source 1..75: mol_type = other DNA
ataatcagaagaagaataggaaaagatttcttttcagaaataaaaaggaaaaggttaaaaaaagaagatatcatg

SEQ ID NO: 72220 - DNA, 75 bp, synthetic construct
  source 1..75: mol_type = other DNA
actgcaaaagtatcaaaaagcgggtaataaattaggcggcagtgctgaaaatataggtgataacttaggaaaggc

SEQ ID NO: 72221 - DNA, 75 bp, synthetic construct
  source 1..75: mol_type = other DNA
tgaagttggtagcgcacttaaagagattgctaaaccagacgctggggtggctgtggaccttactggtgtttctgg

SEQ ID NO: 72222 - DNA, 75 bp, synthetic construct
  source 1..75: mol_type = other DNA
agcggcaaaacggaatgtgggcaacggggaaaaccaaatccctgatatgtctttctggacggttactggtggcaa

SEQ ID NO: 72223 - DNA, 75 bp, synthetic construct
  source 1..75: mol_type = other DNA
gggaaaacacagttcattattcagaaccacagccagaaggcgctggagtgggagatcctcaaaggcgtgatggtg

SEQ ID NO: 72224 - DNA, 75 bp, synthetic construct
  source 1..75: mol_type = other DNA
atgtatcccaaactggcaaaagcctaccccaccaataaattaccggatttacggggagaatttattcgcggttgg

SEQ ID NO: 72225 - DNA, 75 bp, synthetic construct
  source 1..75: mol_type = other DNA
tcggtcgtgaaggctataccaaagtacagaacgcctcttaccaggttgccgcttatctggcggatgaaatcgcca

SEQ ID NO: 72226 - DNA, 75 bp, synthetic construct
  source 1..75: mol_type = other DNA
taaagctgcagcaggtgttgaattaacaacgaaagtactgggtaatgttggaaaaggtatttctcaatatattat

SEQ ID NO: 72227 - DNA, 75 bp, synthetic construct
  source 1..75: mol_type = other DNA
acatgcacagcgcgatgactggctgaagagagagatacagcgcgtatacgatgaaaatcatcaggtgtacggtgt

SEQ ID NO: 72228 - DNA, 75 bp, synthetic construct
  source 1..75: mol_type = other DNA
accgggactaactctgattctgacctgtcttcaatccaggacgaaatcaaatcccgtctggatgaaattgatcgc

SEQ ID NO: 72229 - DNA, 75 bp, synthetic construct
  source 1..75: mol_type = other DNA
agcttcccgtttcagctgcgtttcctgtttgccagccggcccgagatcatggggtgggtgctgggcatcgtttac

SEQ ID NO: 72230 - DNA, 75 bp, synthetic construct
  source 1..75: mol_type = other DNA
actacaaagcctccctgaaatatctcagcgaccacccgaaactgcagggtattgcccagcagaacagctttaaac

SEQ ID NO: 72231 - DNA, 75 bp, synthetic construct
  source 1..75: mol_type = other DNA
ggtcgcttctcttaccaggtaaacccgatgccgttcgggtgcggcaatccacttaccaatatgtttaaccagtta

SEQ ID NO: 72232 - DNA, 75 bp, synthetic construct
  source 1..75: mol_type = other DNA
agcagtacggggtcagaccggtatgcagtgaactgcatattgccccgtcaacgtattaccattgtcagcaacagc

SEQ ID NO: 72233 - DNA, 75 bp, synthetic construct
  source 1..75: mol_type = other DNA
gtttatcgacccggttgccatgtcgcaaattacgcgcattgaaattccgggcgtgaccggcgtattaaccggcat

SEQ ID NO: 72234 - DNA, 75 bp, synthetic construct
  source 1..75: mol_type = other DNA
gtggcgcgcctcatggcggttatgggacttgccggtgttctccggggtaaaaaggtccgcactaccgtcagccgg

SEQ ID NO: 72235 - DNA, 75 bp, synthetic construct
  source 1..75: mol_type = other DNA
catctgtacgggtcgcccggacgaaggcatcccggcggtttgcttcaaactgaaagatggtgaagatccgggata

SEQ ID NO: 72236 - DNA, 75 bp, synthetic construct
  source 1..75: mol_type = other DNA
aacgacaaacaatttaaccaggtctttgctgaaatggttgcctggcataatgtgacaggccgtaccggtcacgaa

SEQ ID NO: 72237 - DNA, 75 bp, synthetic construct
  source 1..75: mol_type = other DNA
tctgtatcgaaatttagcgactggtcacgtatttatagtacctttggtatcaatctgctaagaaccggactgata

SEQ ID NO: 72238 - DNA, 75 bp, synthetic construct
  source 1..75: mol_type = other DNA
tacagcgtcaatttcctgccaaaagtaaaaattgatgtggcgattgctgatgaccaactcgatgaagtgatcgat

SEQ ID NO: 72239 - DNA, 75 bp, synthetic construct
  source 1..75: mol_type = other DNA
ggactggtataacaatcgacgattgctggaaaggctgggccatactcccccggcagaagcagaaaaagcttatta

SEQ ID NO: 72240 - DNA, 75 bp, synthetic construct
  source 1..75: mol_type = other DNA
ataatgccgctgatactcatgttgtagacgtttacaacattggtacggctattactctggatcaggaagttgatc

SEQ ID NO: 72241 - DNA, 75 bp, synthetic construct
  source 1..75: mol_type = other DNA
caactgaccgccttacacgtgctgaagctgctgcctaccttggcgttaacaatcaaacgctggcgaactgggcct

SEQ ID NO: 72242 - DNA, 75 bp, synthetic construct
  source 1..75: mol_type = other DNA
ataacactgggcaactcttcgggttagatggtataaaagcagataatccaataaaagcaaagcaagggagttcag

SEQ ID NO: 72243 - DNA, 75 bp, synthetic construct
  source 1..75: mol_type = other DNA
atgtcactcttccgcagaggtgaaatatggtacgcctcgtactcgctcccgggcgggaagcgaattaaggagtct

SEQ ID NO: 72244 - DNA, 75 bp, synthetic construct
  source 1..75: mol_type = other DNA
cacccgccgtgcgtaccacccggctggattatactgccacacggatcggtttccggctggttaagggccgctcgc

SEQ ID NO: 72245 - DNA, 75 bp, synthetic construct
  source 1..75: mol_type = other DNA
catgccgtgctgtatccgctgaaatttggctcctgtatgcgggaagttaacctctggggatgtccttatcgactg

SEQ ID NO: 72246 - DNA, 75 bp, synthetic construct
  source 1..75: mol_type = other DNA
tattaaaaaataaatgtataacaacgttagttgatgctgctgactggcaggaatctgttgacggttccattcgat

SEQ ID NO: 72247 - DNA, 75 bp, synthetic construct
  source 1..75: mol_type = other DNA
accccaccaataaattaccggatttacggggagaatttattcgcggctgggatgatgggcgcggggtggatgcgg

SEQ ID NO: 72248 - DNA, 75 bp, synthetic construct
  source 1..75: mol_type = other DNA
ggtgcgaccggtgttgacgttctggcgaacagcggtgttgcagctccaactacagctgttgataccggtactctg

SEQ ID NO: 72249 - DNA, 75 bp, synthetic construct
  source 1..75: mol_type = other DNA
ctaagcaacaacagcaagccgcaatcaacgccatcctcgcaactcctctcgataaagacaagccagtcaccatcc

SEQ ID NO: 72250 - DNA, 75 bp, synthetic construct
  source 1..75: mol_type = other DNA
ggttatgagtgggaagatattgacgacaacacagtcagcactggcgtaaacagcagcgaagtgtttaataacact

SEQ ID NO: 72251 - DNA, 75 bp, synthetic construct
  source 1..75: mol_type = other DNA
ataccgataccgctaatggcgttactaccggttccatgactggtaagtacgttaaagttggagctgatgcattgg

SEQ ID NO: 72252 - DNA, 75 bp, synthetic construct
  source 1..75: mol_type = other DNA
atcactctggatcaggaagttgatctgtccatctctaataactctcacgtagcgggtattacgctgactcagggt

SEQ ID NO: 72253 - DNA, 75 bp, synthetic construct
  source 1..75: mol_type = other DNA
ggtcacggatgcagggcaggctggtgttgctgcaatgattatcaacgatgccctgcaccacagcgaaactccagc

SEQ ID NO: 72254 - DNA, 75 bp, synthetic construct
  source 1..75: mol_type = other DNA
gttcgtggcagaacgtcctgaccagttgtgggtggctgattctacttacgtcagcacatggcagggggtcgtcta

SEQ ID NO: 72255 - DNA, 75 bp, synthetic construct
  source 1..75: mol_type = other DNA
ttctaccctaccccacgcttgattgctgagtacgttgccagagccactgaattgaagcctggtgagaagctgctg

SEQ ID NO: 72256 - DNA, 75 bp, synthetic construct
  source 1..75: mol_type = other DNA
ggaccgtgttgaaggagctgcgctggagttttatgaggcagcagccagaaggagcgtccggcaagtcttcctgga

SEQ ID NO: 72257 - DNA, 75 bp, synthetic construct
  source 1..75: mol_type = other DNA
cgccagtgcacgcattatgggcattggcctcaacacgattttacgacacttaaaaaactcaggccgcagtcggta

SEQ ID NO: 72258 - DNA, 75 bp, synthetic construct
  source 1..75: mol_type = other DNA
gcaattgttgaagtgctgtcgcccggtcaactcccgactaaacgcggattaatttacgccgcgacgccagccagc

SEQ ID NO: 72259 - DNA, 75 bp, synthetic construct
  source 1..75: mol_type = other DNA
atctgaatctgagacaacatctggcaaggctgggacggaagttactgtcgttctcaaaatcggtggagttgcatg

SEQ ID NO: 72260 - DNA, 75 bp, synthetic construct
  source 1..75: mol_type = other DNA
tttcaccgatttactcgataagctcaaccccggcgatcttctggtttttaataatacccgcgtgatcccggcgcg

SEQ ID NO: 72261 - DNA, 75 bp, synthetic construct
  source 1..75: mol_type = other DNA
cgtctgggcgtctttgtaccgacccttaagtcactgaagaacagtaaaaaaaatacactgtcacgcaccgatgcc

SEQ ID NO: 72262 - DNA, 75 bp, synthetic construct
  source 1..75: mol_type = other DNA
tcgggctgggtattcccggcagcgagaaccatatcgccacgccggtatcccgttttctggccctgctcagcgtga

SEQ ID NO: 72263 - DNA, 75 bp, synthetic construct
  source 1..75: mol_type = other DNA
atctgcttggatggaatgctcttgttgtaaagtggatcgcttctgatgctaaaggtctgcctgtcgattttccgg

SEQ ID NO: 72264 - DNA, 75 bp, synthetic construct
  source 1..75: mol_type = other DNA
catttcatattagcacccgttaatgctcctcaacatattgtaaaagactctacagcattgtggaatgaagttgaa

SEQ ID NO: 72265 - DNA, 75 bp, synthetic construct
  source 1..75: mol_type = other DNA
gatgaggtattaggccgttctattcctcgcactgaatatgagaaaaaagccaagtttaaccaagatgactataaa

SEQ ID NO: 72266 - DNA, 75 bp, synthetic construct
  source 1..75: mol_type = other DNA
agtgtggcgttgattacgtgctgtgcgtgcgtttcgacaggcgtttcgcggcgttaaccgcgcaaaatttcatca

SEQ ID NO: 72267 - DNA, 75 bp, synthetic construct
  source 1..75: mol_type = other DNA
tatccccgtcttgctacagcatatccatcagggaaactacctgatctccgcggtgagtttattcgtggctgggat

SEQ ID NO: 72268 - DNA, 75 bp, synthetic construct
  source 1..75: mol_type = other DNA
cgttctgctggaatcacgattgataaccttgaggccaagtgcgcggcgctggcagcggagagtgcggggatgaag

SEQ ID NO: 72269 - DNA, 75 bp, synthetic construct
  source 1..75: mol_type = other DNA
aaattgtgaaacgaagcgaaggcatgacttccgttgcgaaagctgcctatcatgcccgtacacgtattacggatg

SEQ ID NO: 72270 - DNA, 75 bp, synthetic construct
  source 1..75: mol_type = other DNA
aacaggctggcaacttcgacacattgtgccgaaatccgaagggggactggataacataggtaatctggccatgtt

SEQ ID NO: 72271 - DNA, 75 bp, synthetic construct
  source 1..75: mol_type = other DNA
ggtgactcagggtaaagcgggcgtcatcgccgcattccagcagcagtttatccatttcagcgctaaaccggttgt

SEQ ID NO: 72272 - DNA, 75 bp, synthetic construct
  source 1..75: mol_type = other DNA
gttacagaattatgtgcagaccaacctctataacctgctttataccagtaccacgaaggttccccagactgaagc

SEQ ID NO: 72273 - DNA, 75 bp, synthetic construct
  source 1..75: mol_type = other DNA
gcaacgccggacggacgtaaagcgcataccccgctggcagaaggcgctagtccggcctccggtactgaccatctc

SEQ ID NO: 72274 - DNA, 75 bp, synthetic construct
  source 1..75: mol_type = other DNA
aatgacaaggtttgaccagcaatatcaaattgatgtcaaactgcgggagttcggacgcagcacaagccatgaatg

SEQ ID NO: 72275 - DNA, 75 bp, synthetic construct
  source 1..75: mol_type = other DNA
actgcaatgtattcgtgtactaccagaatgatacagctatcctccagcagggagtgatgaccaacggtgatttct

SEQ ID NO: 72276 - DNA, 75 bp, synthetic construct
  source 1..75: mol_type = other DNA
cgtccggccgacctggggctcgttcgcgcagctcgaaaaagctgacccggactttatggcggagcgcgaggacgt

SEQ ID NO: 72277 - DNA, 75 bp, synthetic construct
  source 1..75: mol_type = other DNA
caaactttcagagttaccaccacatgaactactcacacctgttcttggccagagtgttaatcctctgggcatggg

SEQ ID NO: 72278 - DNA, 75 bp, synthetic construct
  source 1..75: mol_type = other DNA
atgtcatggcagcaattcaaacacgcctggttgattaaattctgggcacccatccctgcggtcatcgcggcgggt

SEQ ID NO: 72279 - DNA, 75 bp, synthetic construct
  source 1..75: mol_type = other DNA
catgtctcgtgcgcagatcctgcaacaagcaggtacttctgttctggcacaggctaaccagaccacgcagaacgt

SEQ ID NO: 72280 - DNA, 75 bp, synthetic construct
  source 1..75: mol_type = other DNA
caaatgtaacctacagcgatgtcgcaaacggtattgataccgcaacgcagtcaggccagttagttcaggttggtg

SEQ ID NO: 72281 - DNA, 75 bp, synthetic construct
  source 1..75: mol_type = other DNA
ggcttgggtatcttcattaacgaaaccaccggcgaatttccgcaaaaagaacaggaactgtttgaaggtatcgtg

SEQ ID NO: 72282 - DNA, 75 bp, synthetic construct
  source 1..75: mol_type = other DNA
gttaaaccgacggatgtggcggttggcgtgaaggaactgatcgagttaccgaagtcggttatcgaagaccgtttt

SEQ ID NO: 72283 - DNA, 75 bp, synthetic construct
  source 1..75: mol_type = other DNA
tgtcagcaaccaggccatcgttataagaaggcgtctaaggaacacattgagatccctaattatctggatcgccag

SEQ ID NO: 72284 - DNA, 75 bp, synthetic construct
  source 1..75: mol_type = other DNA
gccgagcgtcagcgaagtcgccgtctggtttatttatctcatcccggcgctggtggcatttgctctgccaccacg

SEQ ID NO: 72285 - DNA, 75 bp, synthetic construct
  source 1..75: mol_type = other DNA
taagcgagctatacatgaaaattccctccgcgccgccatgattgtctttctcatgatgcaggacgccaataatgc

SEQ ID NO: 72286 - DNA, 75 bp, synthetic construct
  source 1..75: mol_type = other DNA
agagtaatcaaaaattgattgttcttggcaatttgacagtcaaaggtaatatttccactttctctctttctaatc

SEQ ID NO: 72287 - DNA, 75 bp, synthetic construct
  source 1..75: mol_type = other DNA
tcggtgatgccgtggtggatttattaccggagaagccgggcacgctgttgcagtgccctggtggtgcgcctgcca

SEQ ID NO: 72288 - DNA, 75 bp, synthetic construct
  source 1..75: mol_type = other DNA
gggtggtgaacgaaccttcacatttatggtgcgcccttcggcagaccttttccttacccctgatgatttaccgcc

SEQ ID NO: 72289 - DNA, 75 bp, synthetic construct
  source 1..75: mol_type = other DNA
gttcatcaggtgggtacgacggttttccgtattgcgatataggtggttcagaccgacgaataaatgaaaatgccg

SEQ ID NO: 72290 - DNA, 75 bp, synthetic construct
  source 1..75: mol_type = other DNA
atgacagtcagaatatcgggcgtgctgaaggacggcaccgggaagccggtaccgggatgcaccattgaactgaaa

SEQ ID NO: 72291 - DNA, 75 bp, synthetic construct
  source 1..75: mol_type = other DNA
aatgtggtgtccggcgatatcacggacatcaccacaccggacgggcgggagacgaaattttactataacgacggg

SEQ ID NO: 72292 - DNA, 75 bp, synthetic construct
  source 1..75: mol_type = other DNA
ggggctgaggcgcaggctgaacagctggctgcctgcccgggaatgactgtggagagcgcccgggctgtgctggct

SEQ ID NO: 72293 - DNA, 75 bp, synthetic construct
  source 1..75: mol_type = other DNA
ttaagctcttctatcgtgaacatcaccgttacggctgctattccatgaactggggcgccagtaaagggctcgatc

SEQ ID NO: 72294 - DNA, 75 bp, synthetic construct
  source 1..75: mol_type = other DNA
ccgtttgctgacagtgccacacagcgctttctcagcagccagaacatcacaacagtaaccggtgctgataatccg

SEQ ID NO: 72295 - DNA, 75 bp, synthetic construct
  source 1..75: mol_type = other DNA
accccatctaccacaccagcgcccttgccgggtttttgataggggccatcataggtatcgccattattgccgtcg

SEQ ID NO: 72296 - DNA, 75 bp, synthetic construct
  source 1..75: mol_type = other DNA
aggaacaacaaaattctttcaagtggctggcggcattactggaagaaaaatatgctggtgaaattaccatttcgg

SEQ ID NO: 72297 - DNA, 75 bp, synthetic construct
  source 1..75: mol_type = other DNA
agggataccatcgctttcgtcgttatgcgccccgcatgttgcgctgtctgaagctcgaagccgcgccggtcgccg

SEQ ID NO: 72298 - DNA, 75 bp, synthetic construct
  source 1..75: mol_type = other DNA
tgccgaaaaagtggcgatgtatacggggctgtctgtggaagctgtcacggggacagaggctgccgtttttgaagg

SEQ ID NO: 72299 - DNA, 75 bp, synthetic construct
  source 1..75: mol_type = other DNA
agcgggagaaagcgcagcgccgcagcctggcggagaagctgcagcaggaagggagcgaggacgggcacggcgtgg

SEQ ID NO: 72300 - DNA, 75 bp, synthetic construct
  source 1..75: mol_type = other DNA
cgcctgttggtaacctggattcttatattcgcgcggcatatgcctgtcctatgttatcacaggaagaagaacagc

SEQ ID NO: 72301 - DNA, 75 bp, synthetic construct
  source 1..75: mol_type = other DNA
gcggatgaattaatcaatgcgtcggatgccatcagcgtgatggctgcggcgctgaacactcatgatacaggaggc

SEQ ID NO: 72302 - DNA, 75 bp, synthetic construct
  source 1..75: mol_type = other DNA
tccacgccaagccttgtggcaagccgtataagctcagtgactcgcatggactttacctgctggttaaccctaacg

SEQ ID NO: 72303 - DNA, 75 bp, synthetic construct
  source 1..75: mol_type = other DNA
ttgtgggtgctttagcgggttgcgcgcgtactgcgccaattgatcaggttcactcaaccgtcagcgctggtcata

SEQ ID NO: 72304 - DNA, 75 bp, synthetic construct
  source 1..75: mol_type = other DNA
aaacgcgtgaagattaccttgcgcttctcgcggaagatattgaacgcgatattccctacgatcccgaacctattg

SEQ ID NO: 72305 - DNA, 75 bp, synthetic construct
  source 1..75: mol_type = other DNA
gctgtccactacggctacgacgataagggccgcctgaccggcgaacggcagacggtggagaacccggagacgggg

SEQ ID NO: 72306 - DNA, 75 bp, synthetic construct
  source 1..75: mol_type = other DNA
tcgatggcaacggacgtctgaccggtgcccgtaccgtacagactgcgccgtatgatcgttatacctgtcatcttt

SEQ ID NO: 72307 - DNA, 75 bp, synthetic construct
  source 1..75: mol_type = other DNA
tcagtggtgtactgcaggcggatgcatacgccgggttcaacgagctgtaccgggatggccggataacggaagccg

SEQ ID NO: 72308 - DNA, 75 bp, synthetic construct
  source 1..75: mol_type = other DNA
tcggggagatcatacttttgtcatacggatagtaattgattcacttttaagtctggtgattattggctttgttgt

SEQ ID NO: 72309 - DNA, 75 bp, synthetic construct
  source 1..75: mol_type = other DNA
tttgccctgcaactttgtgccttacgatatccgggccgtgcactggctcctggtgagatgatcccgcgtgaagtc

SEQ ID NO: 72310 - DNA, 75 bp, synthetic construct
  source 1..75: mol_type = other DNA
ccgcgatttgaacgagaaggtttgctgattgaaggacagagaacaaactatttcagaaattcaaatacaccagaa

SEQ ID NO: 72311 - DNA, 75 bp, synthetic construct
  source 1..75: mol_type = other DNA
accattgaccgcctttatcaccagtcatgtattggcgcagtccgctgggggaatctgccggataatgcccgggag

SEQ ID NO: 72312 - DNA, 75 bp, synthetic construct
  source 1..75: mol_type = other DNA
ctacggcgggtggtcggtcatgcacgggcggatcgatctcggtaccttcgttgcattcgccagcttcctcgcgat

SEQ ID NO: 72313 - DNA, 75 bp, synthetic construct
  source 1..75: mol_type = other DNA
ctgctggaggagaacgtcacttgtttggtcacgttcgtaacctgagaatatggcataaagaattaactgatgcgc

SEQ ID NO: 72314 - DNA, 75 bp, synthetic construct
  source 1..75: mol_type = other DNA
gagattcataaaaactgggatattgcaccaaacgccgcaccccgcgtgtgggatatagcagcagccaataccggg

SEQ ID NO: 72315 - DNA, 75 bp, synthetic construct
  source 1..75: mol_type = other DNA
ttgtttcagcactggctggtgatattacgacgattcagactgatattccggtgatgccgggcacgggagctaaat

SEQ ID NO: 72316 - DNA, 75 bp, synthetic construct
  source 1..75: mol_type = other DNA
ggaagaagcctggaaatgggtagactccattactgaggcgtgggcgatggacaatgatgcgccgaaaccgtatca

SEQ ID NO: 72317 - DNA, 75 bp, synthetic construct
  source 1..75: mol_type = other DNA
atgatttcagaaacagcagtgcattcacgccatgggtatctgttggactgggttatgcacgggtacatcataagg

SEQ ID NO: 72318 - DNA, 75 bp, synthetic construct
  source 1..75: mol_type = other DNA
ccgtcagccctgacggaggaagcgctgaaacggatcggcgaactgtacgccatcgaggcagagataaggggaatg

SEQ ID NO: 72319 - DNA, 75 bp, synthetic construct
  source 1..75: mol_type = other DNA
atgaaaaaggttattgttgtttcagcgcttgctatggcgggcgtattttcagcccaggctctggctgataggggt

SEQ ID NO: 72320 - DNA, 75 bp, synthetic construct
  source 1..75: mol_type = other DNA
tttggggatgatgtttataagtataagggcggcgataagaacgatactgtatttggtgccggccttgcggtgggc

SEQ ID NO: 72321 - DNA, 75 bp, synthetic construct
  source 1..75: mol_type = other DNA
ggtggcgaataaagatctgaccatcagcgtggtggacgacaaacgccgtatttacggcgtggaaggtgcggtgga

SEQ ID NO: 72322 - DNA, 75 bp, synthetic construct
  source 1..75: mol_type = other DNA
gtgtggtgttcccgccggtgctggtgcagatgctcgaccggctggaaagtgaaatcctggctgaccgggtgagtg

SEQ ID NO: 72323 - DNA, 75 bp, synthetic construct
  source 1..75: mol_type = other DNA
aatgtgacggtgacggcagaaagagtcggtgaatggtggttgtttaccgccactctttttgcagatgcggaaatg

SEQ ID NO: 72324 - DNA, 75 bp, synthetic construct
  source 1..75: mol_type = other DNA
ccgtgcgtagcctcaataatcccattgcatcagcctatctccaagtgcttttgctcaccggtgcacggcgtgaag

SEQ ID NO: 72325 - DNA, 75 bp, synthetic construct
  source 1..75: mol_type = other DNA
aacgcccatattctactcgatacattgccgatcacattaacttgtccagtcgtggaggcgaaagtaaaaaaagag

SEQ ID NO: 72326 - DNA, 75 bp, synthetic construct
  source 1..75: mol_type = other DNA
taacacccagaccggcctgcagtactccgatcggctggacatcatgggaactggtacgctgaacatcgatgaatc

SEQ ID NO: 72327 - DNA, 75 bp, synthetic construct
  source 1..75: mol_type = other DNA
aataagcacgccaccaccggtctcggcgatacccagtttgccagggccatgcgctgccttaatattactcctttg

SEQ ID NO: 72328 - DNA, 75 bp, synthetic construct
  source 1..75: mol_type = other DNA
ctttaaagccctcggcgcacccgtggaattaatcaaagtgcacaacacgccggacggcaatttccccaacggtat

SEQ ID NO: 72329 - DNA, 75 bp, synthetic construct
  source 1..75: mol_type = other DNA
tactcgattggttgaaaaaggaagtgaaactttcattaggttgtactgagcctattgctattgcgtatgctgccg

SEQ ID NO: 72330 - DNA, 75 bp, synthetic construct
  source 1..75: mol_type = other DNA
acttcaggaccgactcgttaaggagctcaggcttaaggggatctgtacaatagaagcggccaatgcatttgcaga

SEQ ID NO: 72331 - DNA, 75 bp, synthetic construct
  source 1..75: mol_type = other DNA
gccgcttgtagaatgaaagttggtgaatgggcaaaccctgggggcatgtatcgtgaccgtcgtggcaaaatgatg

SEQ ID NO: 72332 - DNA, 75 bp, synthetic construct
  source 1..75: mol_type = other DNA
gtgtgctggatgcagggagagtttgacatgagcgccgccacccacgcacagcaacctgcgctgtttacagccatg

SEQ ID NO: 72333 - DNA, 75 bp, synthetic construct
  source 1..75: mol_type = other DNA
gttacttgggaacaccaaataacacctatctaaaatataatcccaaagctaaagggaatggagttacaattatca

SEQ ID NO: 72334 - DNA, 75 bp, synthetic construct
  source 1..75: mol_type = other DNA
agtatgattccgttcgttaaacgccatgaagatcaggtaatgacgttcctgatgatcctgccaattgccttgtta

SEQ ID NO: 72335 - DNA, 75 bp, synthetic construct
  source 1..75: mol_type = other DNA
tgcagatacgtccgttcgcacaatctccctgctgccggcagccggagaggctgctgcgcagggctggagcattaa

SEQ ID NO: 72336 - DNA, 75 bp, synthetic construct
  source 1..75: mol_type = other DNA
tgctgccaactacaacgtgaaacgcctgacggtgacacctgctgatgatgacgctgtaccgcctgttgcggctgt

SEQ ID NO: 72337 - DNA, 75 bp, synthetic construct
  source 1..75: mol_type = other DNA
ggtggtaaaccggtgatgtcaaaaaccgggcatgcgtttatcaaagaacgcatgcgccgcgaagatgccatttat

SEQ ID NO: 72338 - DNA, 75 bp, synthetic construct
  source 1..75: mol_type = other DNA
ttttcagaagcaatcaacgtgattttggtaatggtaccgtagttgtcaaaaacaatgcagtaaacggcggagatt

SEQ ID NO: 72339 - DNA, 75 bp, synthetic construct
  source 1..75: mol_type = other DNA
acgcatccggtggatgacgcaattaccctgctgacacagggcggcagactgacctgtaagttccgcctgtcaggc

SEQ ID NO: 72340 - DNA, 75 bp, synthetic construct
  source 1..75: mol_type = other DNA
gacatcccggtagacctcaacacgctgtggtcaccggacacctgcccggtgcatctgctgccttatctcgcctgg

SEQ ID NO: 72341 - DNA, 75 bp, synthetic construct
  source 1..75: mol_type = other DNA
ggtggcgaaatgagcgcccaccattacttccgtgatttcgcttactgcgacagcggcatgatcccgtggctgctg

SEQ ID NO: 72342 - DNA, 75 bp, synthetic construct
  source 1..75: mol_type = other DNA
tcactggtggtggcgacaaagggggagccttatctgttcagtggtgtatcgccttccacaatttctggctccaga

SEQ ID NO: 72343 - DNA, 75 bp, synthetic construct
  source 1..75: mol_type = other DNA
ctgaccgaagcgcaccttgacctgccgatggaattcgaaagtatcggtaaagcgggaagccgtctgggtacggcg

SEQ ID NO: 72344 - DNA, 75 bp, synthetic construct
  source 1..75: mol_type = other DNA
tattctggcacgtgatgccgggcttaaaccgatggcagtaaacagagtgcagtcaattattgacgatttgtgtaa

SEQ ID NO: 72345 - DNA, 75 bp, synthetic construct
  source 1..75: mol_type = other DNA
gaaaacaacgtcagataatttctgggtcagtttggaaccgggaattaacattgggccgtggcgtatcagaaactt

SEQ ID NO: 72346 - DNA, 75 bp, synthetic construct
  source 1..75: mol_type = other DNA
gattttcaaaaagcagaaagttgatgacaaggtgctgtttatcgatgccagccgtgaattcaaggcaggtaaaaa

SEQ ID NO: 72347 - DNA, 75 bp, synthetic construct
  source 1..75: mol_type = other DNA
gtgctgttccgtggctccagcgaaggtaagattcgccagaaactgattgatgaaaatctgctggatgcggtaatt

SEQ ID NO: 72348 - DNA, 75 bp, synthetic construct
  source 1..75: mol_type = other DNA
ctttccctgaaaatgcagaggtgcttcaaactgatactcgtgtcgttccgacgaaaggagccgttgtacgggcta

SEQ ID NO: 72349 - DNA, 75 bp, synthetic construct
  source 1..75: mol_type = other DNA
ttgcaaatatcatccgcacgggcgtgatttttgccgtggacgaaacaacgtggcgcgttcgcgtgcgcagcggag

SEQ ID NO: 72350 - DNA, 75 bp, synthetic construct
  source 1..75: mol_type = other DNA
caaaacaagagagaaatttaacaggtgttcaaacagatgttgaagtggtgtttgaacatgatgtcaacacaaagg

SEQ ID NO: 72351 - DNA, 75 bp, synthetic construct
  source 1..75: mol_type = other DNA
gccaggcattgcgaaaaccgattcgaacggagcagggcgctaacggggcgatacgggagctggaaaaattccgcc

SEQ ID NO: 72352 - DNA, 75 bp, synthetic construct
  source 1..75: mol_type = other DNA
cacgattattatggggagcggtactgcacacactgtcatacagggcgtttcagtgaggaggcagtggcaggatga

SEQ ID NO: 72353 - DNA, 75 bp, synthetic construct
  source 1..75: mol_type = other DNA
gacggaaatcgtggttacagcgcctgacggcgcggtgttccgctacgatgcggacgctggcgcactgagcgccag

SEQ ID NO: 72354 - DNA, 75 bp, synthetic construct
  source 1..75: mol_type = other DNA
gagggcgtggtggatgcctccaaacagggctatcaacatttctttgctctgctgggtgctgccagcgccgtcaca

SEQ ID NO: 72355 - DNA, 75 bp, synthetic construct
  source 1..75: mol_type = other DNA
gcgtcgcttcgattttgaaacggtttttccgattatggatttcgcccaggagttggaactggtcgccagtgcttc

SEQ ID NO: 72356 - DNA, 75 bp, synthetic construct
  source 1..75: mol_type = other DNA
ggcaatgcattacggtcacggctggatcatgggggaggatggtaaacgctggcatccgtgccgttcacaagatga

SEQ ID NO: 72357 - DNA, 75 bp, synthetic construct
  source 1..75: mol_type = other DNA
gttcagccagcctgccagccagttactggcaggggcgcgcatggatgtgtatgtcatccgtgacggggagggcaa

SEQ ID NO: 72358 - DNA, 75 bp, synthetic construct
  source 1..75: mol_type = other DNA
ctgactctgaacagccaacttatggacggctggcaaatcacctgggggctggatgctgagcatgagcgctttacc

SEQ ID NO: 72359 - DNA, 75 bp, synthetic construct
  source 1..75: mol_type = other DNA
ctggtaggctctgaagatttaccggtgctggatgaaaacacgttcaacagccatacccctgcgccctcggcacgg

SEQ ID NO: 72360 - DNA, 75 bp, synthetic construct
  source 1..75: mol_type = other DNA
atgatcatcggaaatattcataatctccagcaatggttgccggaagagttacgccaggcgattgagcatattaaa

SEQ ID NO: 72361 - DNA, 75 bp, synthetic construct
  source 1..75: mol_type = other DNA
cctatgatattcgcgggaaattaggcgaagaactgaatgaagatattgcctggcgcattggtcgcgcctatggcg

SEQ ID NO: 72362 - DNA, 75 bp, synthetic construct
  source 1..75: mol_type = other DNA
gacactggggctgaatgcgctgacgttaactgatatcactaaaaatgccgcgtacggcgtcgatatcggcagcct

SEQ ID NO: 72363 - DNA, 75 bp, synthetic construct
  source 1..75: mol_type = other DNA
taaaaatattaaagaaaatctctggttaatttgctgcttaatatttatacttatccaattcatgaccttatctct

SEQ ID NO: 72364 - DNA, 75 bp, synthetic construct
  source 1..75: mol_type = other DNA
attacagcgcactaagaccgcacgaatataatggtgggttacccccaaacgaatcggaaaatcgatactggaaaa

SEQ ID NO: 72365 - DNA, 75 bp, synthetic construct
  source 1..75: mol_type = other DNA
gtctgttattagcattagcaatcccggtgattctcgcgcaaatcgcccaaactgcgatgggttttgtcgataccg

SEQ ID NO: 72366 - DNA, 75 bp, synthetic construct
  source 1..75: mol_type = other DNA
aagatcaccggagtactgaaagggtctttatctgaggatgtctttcaggacagaggcacgattgccggttcggtg

SEQ ID NO: 72367 - DNA, 75 bp, synthetic construct
  source 1..75: mol_type = other DNA
gccgtcagtgtgcttaacctgggtactattgatgaaccaggtcacgcagataacaccgccactctcaaactgaaa

SEQ ID NO: 72368 - DNA, 75 bp, synthetic construct
  source 1..75: mol_type = other DNA
gcgcgggattcgtatcattctcgatatggtgtttaaccatacctctacccaacatgcctggtttcgcgaggcgct

SEQ ID NO: 72369 - DNA, 75 bp, synthetic construct
  source 1..75: mol_type = other DNA
gttttatgaggactggaatgtatatcaagaaataaaaataataattacagaaatgccatattgtatatctgaaat

SEQ ID NO: 72370 - DNA, 75 bp, synthetic construct
  source 1..75: mol_type = other DNA
ttcctggggaaaccaggccagctccaccatcttcgacagcagccagtcagccacgccagtgatcgcctttttacc

SEQ ID NO: 72371 - DNA, 75 bp, synthetic construct
  source 1..75: mol_type = other DNA
gaatcaaaaagactgcatcgtcccaagacaaaaataatcaaagcagcattactggcttatcaggatctggacgaa

SEQ ID NO: 72372 - DNA, 75 bp, synthetic construct
  source 1..75: mol_type = other DNA
caggttacattatccgctccatggaaaacatcgatccggctctggcggacaaagccgtgggttatctgcgtgcgt

SEQ ID NO: 72373 - DNA, 75 bp, synthetic construct
  source 1..75: mol_type = other DNA
tttctgcctgaagacaaagctgcagcacgagattttctccttgaaatcaaaccactgtttccgctcatagagatc

SEQ ID NO: 72374 - DNA, 75 bp, synthetic construct
  source 1..75: mol_type = other DNA
ctgactcctctcagcgcatgcgggtaatggcaatggcggtggactccggcggtgaagatggggttaccgataatg

SEQ ID NO: 72375 - DNA, 75 bp, synthetic construct
  source 1..75: mol_type = other DNA
aacatcagtccctctgcaggcaatccggtagttatgggatacgacgcttccggtgttgttgaagcaaccggacca

SEQ ID NO: 72376 - DNA, 75 bp, synthetic construct
  source 1..75: mol_type = other DNA
atcagaataaggcaggggaaaaacgaacacctttcctcacttatgaaactttaaaaggtggaaaacaggttacga

SEQ ID NO: 72377 - DNA, 75 bp, synthetic construct
  source 1..75: mol_type = other DNA
cggagagctgggaggatgttctggctaacggtaccagtcttgttctgacaggcagttgtggtactggaaaaaatc

SEQ ID NO: 72378 - DNA, 75 bp, synthetic construct
  source 1..75: mol_type = other DNA
agattgtctaccgaatctcgcaggccagacattgaaacatttggtgagaatgtaggaatcttaacaagagaggta

SEQ ID NO: 72379 - DNA, 75 bp, synthetic construct
  source 1..75: mol_type = other DNA
tcagctttgattatcaacaggcgcaggtaagcggtttgcatacgagatggctgcattatgggctgctgtgcatgg

SEQ ID NO: 72380 - DNA, 75 bp, synthetic construct
  source 1..75: mol_type = other DNA
cagagcgtgacggaggtacagtcagaaacgctgccacagggcctgaaagcccggctctcttctctgctactgatg

SEQ ID NO: 72381 - DNA, 75 bp, synthetic construct
  source 1..75: mol_type = other DNA
aatcgcttccgtttccgtggtgcgctttccactgccagcatcgatgactttacccgttattctaaagttcttgca

SEQ ID NO: 72382 - DNA, 75 bp, synthetic construct
  source 1..75: mol_type = other DNA
ctcacagactgcggtgaaacccggggacgctgggtgattgaaggcgacctgtccagttacttcgacaccgtacat

SEQ ID NO: 72383 - DNA, 75 bp, synthetic construct
  source 1..75: mol_type = other DNA
cgatcagaatccaaaattcagggcgcagcagacctttgacgaaaatcaggcgcaaaattttgccccggccacgct

SEQ ID NO: 72384 - DNA, 75 bp, synthetic construct
  source 1..75: mol_type = other DNA
acgtcatcgccgttttgtggttcaggtaacgggctatggcagtcgtggcgaacgctggattattgatcgttacaa

SEQ ID NO: 72385 - DNA, 75 bp, synthetic construct
  source 1..75: mol_type = other DNA
atgcgttcttattttcaacaaataaatcgaatttctgaacattatcttaatcatcttgatgtgatcattaaagaa

SEQ ID NO: 72386 - DNA, 75 bp, synthetic construct
  source 1..75: mol_type = other DNA
gcgtgaggtggatacgtcgctgactctgaaagatggcgatattgtgttgctgggtggtctggcagaaaacaagga

SEQ ID NO: 72387 - DNA, 75 bp, synthetic construct
  source 1..75: mol_type = other DNA
ataaattctggcgtcgttgccgtcgtgatggccttggtaaacgtatttacctgtttaagggcgacagcatccggc

SEQ ID NO: 72388 - DNA, 75 bp, synthetic construct
  source 1..75: mol_type = other DNA
atgggggtgtttaattataaatcttattcttttgcacatgtagcagaacttgtttcttcttcttataatcttgct

SEQ ID NO: 72389 - DNA, 75 bp, synthetic construct
  source 1..75: mol_type = other DNA
cgacggcgctgcaaactgtacctgaacaaaatattgatgtaacaaatagctataacgcattaattattaaaatga

SEQ ID NO: 72390 - DNA, 75 bp, synthetic construct
  source 1..75: mol_type = other DNA
ctgttaaaagaaggtcagtacgacgcagcgcaaaaactgctcgccaccctccccgccaatgaaatgcttgaggag

SEQ ID NO: 72391 - DNA, 75 bp, synthetic construct
  source 1..75: mol_type = other DNA
catctcataacacaactcgacttagtgttaaagaagttactgagttgttgctaactttagattatgtaaaagagc

SEQ ID NO: 72392 - DNA, 75 bp, synthetic construct
  source 1..75: mol_type = other DNA
acgataacgtagcgaccaacaccaccaatatcaccaacctgactgattccgttggcgaccttaaagacgatgccc

SEQ ID NO: 72393 - DNA, 75 bp, synthetic construct
  source 1..75: mol_type = other DNA
ctaatgaagttactatccctacactcatcgtgaccggtgaaaaagcccattcacgctattttgctgaagatgcct

SEQ ID NO: 72394 - DNA, 75 bp, synthetic construct
  source 1..75: mol_type = other DNA
tgcaaaactttaaaaagtttccggaactggacctgcgcttcactcatgaccgtaacattctggtcggggacaatg

SEQ ID NO: 72395 - DNA, 75 bp, synthetic construct
  source 1..75: mol_type = other DNA
acagcggaacgcatgatccgcattgctacaacagaaatccgtaaagtaccggaactaagaaactgtgactcgacg

SEQ ID NO: 72396 - DNA, 75 bp, synthetic construct
  source 1..75: mol_type = other DNA
ttcaagctcaaatgaaaatgtattagtctttccttcaatagaaatcgctttgcaagaactatcgaaaattacaga

SEQ ID NO: 72397 - DNA, 75 bp, synthetic construct
  source 1..75: mol_type = other DNA
aactttgtcaaaacggatacgggcgtgaatgattcgccaacgttgctcaagcgtgaggtggatacgtcgctgact

SEQ ID NO: 72398 - DNA, 75 bp, synthetic construct
  source 1..75: mol_type = other DNA
gtttttttctcctgcatcatttatgcaggcgcgagccagttcgtcattaccgcgatgctggcagccgggagtagt

SEQ ID NO: 72399 - DNA, 75 bp, synthetic construct
  source 1..75: mol_type = other DNA
gtctattttccagaaatccccagtagttttaggccagtttttagccaagacttcgtgtctaacataaattatagt

SEQ ID NO: 72400 - DNA, 75 bp, synthetic construct
  source 1..75: mol_type = other DNA
ttgccgcctgaacttgccagcgatacccgtccggtgacgctggacttaagtctgacgggcgatcagaaaaaacag

SEQ ID NO: 72401 - DNA, 75 bp, synthetic construct
  source 1..75: mol_type = other DNA
cgttacaggtaaagcgaccaacggtccaatactggacggaaacggcgtgacagtcctcggtattctggaagtgtt

SEQ ID NO: 72402 - DNA, 75 bp, synthetic construct
  source 1..75: mol_type = other DNA
ggaatgttgcgggctactttataccaacattaattgcaattcccgcctttggattaattgcgaggaaaattggtg

SEQ ID NO: 72403 - DNA, 75 bp, synthetic construct
  source 1..75: mol_type = other DNA
tgaaagacggtgcaggaaaaccaatacagaactgcactattcagctcaaagcaaagcgtaacagcaccacggtac

SEQ ID NO: 72404 - DNA, 75 bp, synthetic construct
  source 1..75: mol_type = other DNA
cgttattacgacggggatttgaatgatgtgacttcaccaggtatttacagcgttacaggtaaagcgaccaacggt

SEQ ID NO: 72405 - DNA, 75 bp, synthetic construct
  source 1..75: mol_type = other DNA
tcgtggagcgaatggcgggaagtctacacctcgtattcacttcccctgaatctgggtatcggcggtgcagtggca

SEQ ID NO: 72406 - DNA, 75 bp, synthetic construct
  source 1..75: mol_type = other DNA
tagcgtccgttgagctgagtattgatgccagcacagtgatggcgacgcaggattacgtcgatgacaaaatcgcag

SEQ ID NO: 72407 - DNA, 75 bp, synthetic construct
  source 1..75: mol_type = other DNA
tgatcctgcttctgtccctccgcttcctgatatctggctacccttgaatgattctctggaagcgataacagggta

SEQ ID NO: 72408 - DNA, 75 bp, synthetic construct
  source 1..75: mol_type = other DNA
gatattttttgaggctacattaaaagcagatacaacagaaaatacggttggtggttttgtccagtattctccgga

SEQ ID NO: 72409 - DNA, 75 bp, synthetic construct
  source 1..75: mol_type = other DNA
tgatgccaagaccagcgtgcagaagctgaccaaggcaaccggagacgcgggctatccgtccagcgtcaagcagtg

SEQ ID NO: 72410 - DNA, 75 bp, synthetic construct
  source 1..75: mol_type = other DNA
cgggggatgaggttatgaaggagtgtcttcgtccaaaccgaagagtggtgattactgctgaggaggaaggagaca

SEQ ID NO: 72411 - DNA, 75 bp, synthetic construct
  source 1..75: mol_type = other DNA
atataaaaaaattgttattggtgacgatgaaataacgatgcctggcgacaagattgttaagtttaaacgtgcatc

SEQ ID NO: 72412 - DNA, 75 bp, synthetic construct
  source 1..75: mol_type = other DNA
gcaatacgacactgaacttccctggtttgaacacactgacgacgggctgacggagcacggtcaacagtgccctta

SEQ ID NO: 72413 - DNA, 75 bp, synthetic construct
  source 1..75: mol_type = other DNA
taatttcacataaaactctattaatcgttttcttattaagtttaatgagcccagctattggcatttctattccag

SEQ ID NO: 72414 - DNA, 75 bp, synthetic construct
  source 1..75: mol_type = other DNA
gattgctatctgtaccgttgacggacagctttttcaggccggagacgcgcaagaacgtttttccattcagtctat

SEQ ID NO: 72415 - DNA, 75 bp, synthetic construct
  source 1..75: mol_type = other DNA
tcaacaataatgttgtggtggttattgatgatcaacagcgggaaaaagtcgtcatggggcgcggaattggctttc

SEQ ID NO: 72416 - DNA, 75 bp, synthetic construct
  source 1..75: mol_type = other DNA
ttattgaggggcaaagaacgaactacatgctcaattcggaaaaccctgccagttgggggcgatcgtcaaatatgg

SEQ ID NO: 72417 - DNA, 75 bp, synthetic construct
  source 1..75: mol_type = other DNA
gccatgcgtcattactccgaagaggaaatctggcaacgcgtcggcaaagatccgtctggatcaccgttcaattct

SEQ ID NO: 72418 - DNA, 75 bp, synthetic construct
  source 1..75: mol_type = other DNA
ttgaaattaccggtaagtcagtctgcctggatgtgctgacgcagtggattgaaggatgtgagacaccgcgttacc

SEQ ID NO: 72419 - DNA, 75 bp, synthetic construct
  source 1..75: mol_type = other DNA
acaggcaatgtttatatgcgcaacctttctggcacatggaatggttcagacggtccgtggagttactggcgtcag

SEQ ID NO: 72420 - DNA, 75 bp, synthetic construct
  source 1..75: mol_type = other DNA
atattccggtactgattaaaaaacgcgagcaggaaaaaggcctggatcgcagcaaaatggtggcgttctctaact

SEQ ID NO: 72421 - DNA, 75 bp, synthetic construct
  source 1..75: mol_type = other DNA
ttgatggtgaatacgtctgtgatatagatattagcgttgaagaatggaagattttattaagggataaaaaagttt

SEQ ID NO: 72422 - DNA, 75 bp, synthetic construct
  source 1..75: mol_type = other DNA
acctcaatattagcgatggcggtaagttcgtatcgcaaaatattacttttttgggcgataaagcaagcggtatcg

SEQ ID NO: 72423 - DNA, 75 bp, synthetic construct
  source 1..75: mol_type = other DNA
tatcgtgaagaggcaattattaaatccggtatgaacccgttcctgctggatagcgaagatgtgtttatcgattta

SEQ ID NO: 72424 - DNA, 75 bp, synthetic construct
  source 1..75: mol_type = other DNA
ctatataattcattttttactgataaagtggttctctgggatgaatcagtaaaaaaagttaagtggatttatgag

SEQ ID NO: 72425 - DNA, 75 bp, synthetic construct
  source 1..75: mol_type = other DNA
tatccgtttatcaactgtacccactgtggcccgcgtttcaccattattcgcgccatgccttacgaccgcccgttt

SEQ ID NO: 72426 - DNA, 75 bp, synthetic construct
  source 1..75: mol_type = other DNA
catgatgaccaaaaacgtcaagttcctggtcggctttgccatactctctgtatttattgcagtaggtatgtctgt

SEQ ID NO: 72427 - DNA, 75 bp, synthetic construct
  source 1..75: mol_type = other DNA
atgcttcgcctggttcgtgcagtgatcccggttgctgttctgatgatgttgttccctgagttagctatggctgct

SEQ ID NO: 72428 - DNA, 75 bp, synthetic construct
  source 1..75: mol_type = other DNA
aacgattaagtaagctggaaagttttatagataagtggagggagggtaaagaaatctggataaaagcatatctac

SEQ ID NO: 72429 - DNA, 75 bp, synthetic construct
  source 1..75: mol_type = other DNA
tggagagcaacaatccatcaatatccgggcctgttacaggtcagcttcatgcagacggagaaccggaaaaaatga

SEQ ID NO: 72430 - DNA, 75 bp, synthetic construct
  source 1..75: mol_type = other DNA
gactatatttatctggccacccctcaggttgaggatggttcgtgtgtatcatcttttattatatcaggaacgacg

SEQ ID NO: 72431 - DNA, 75 bp, synthetic construct
  source 1..75: mol_type = other DNA
cggaggcgcagagcatcttggtttatggcgaaacagtagtggctcaatcgcttcatttgaccgcaactatccgga

SEQ ID NO: 72432 - DNA, 75 bp, synthetic construct
  source 1..75: mol_type = other DNA
cgcttgcaatggcaggtatgttttcggcccaggctctggctgatgagagcaaaacaggcttttatgtgaccggta

SEQ ID NO: 72433 - DNA, 75 bp, synthetic construct
  source 1..75: mol_type = other DNA
aatttaactggtacagttaataacactttccttttgggaggtggcgcttttaacctggattcaccaggaagtctt

SEQ ID NO: 72434 - DNA, 75 bp, synthetic construct
  source 1..75: mol_type = other DNA
acaagatgtttggctttacccatgcaacagggactgaattcgccggtgttgcccaactgaaagacagtaccttca

SEQ ID NO: 72435 - DNA, 75 bp, synthetic construct
  source 1..75: mol_type = other DNA
tgctcgtgttggtaggatttgtcgtaggtaatgtctggagcgacagaggatggcaaaaaaaatgggcggagcgtg

SEQ ID NO: 72436 - DNA, 75 bp, synthetic construct
  source 1..75: mol_type = other DNA
aactattatttgttgtcggggcgctggtttatctggttgggctatggatctcatgcccattgttaagtggaaaag

SEQ ID NO: 72437 - DNA, 75 bp, synthetic construct
  source 1..75: mol_type = other DNA
gtttcccggaatggctgccgctggataaatgggtgccgcaagtgtttgtcgcctctggcgattgcgccgagcgtc

SEQ ID NO: 72438 - DNA, 75 bp, synthetic construct
  source 1..75: mol_type = other DNA
gtacctccagctaccagatgctgccgggttacttcaggttcgtctgccagaacggatgcgtctgtggtcagtctc

SEQ ID NO: 72439 - DNA, 75 bp, synthetic construct
  source 1..75: mol_type = other DNA
atctcagcggaaagtctgccaggacattggcagtgaaagcaatatctttgctgactgggccgcttcccgtcaggg

SEQ ID NO: 72440 - DNA, 75 bp, synthetic construct
  source 1..75: mol_type = other DNA
gcgatggtgaaaaaattccgtgcggatcttggtgctttctccggtcagtgtattggtggttcatcagacagtgtg

SEQ ID NO: 72441 - DNA, 75 bp, synthetic construct
  source 1..75: mol_type = other DNA
ctgctggaagcagaaatgaagctgattgactgcatggcgaaggtcagggcgtggacgccggagatgcgtgccgga

SEQ ID NO: 72442 - DNA, 75 bp, synthetic construct
  source 1..75: mol_type = other DNA
tggtcgaatcgcgcacgtccgcgatgcatcaggtcgcatcaccgccgttgaatgctatacccgcgaagggctgtt

SEQ ID NO: 72443 - DNA, 75 bp, synthetic construct
  source 1..75: mol_type = other DNA
acttcctgcagaagatggccagcgacattaacagcatgaacctcagctcctgccaggcggcgcaggggattgtcg

SEQ ID NO: 72444 - DNA, 75 bp, synthetic construct
  source 1..75: mol_type = other DNA
ggggattcggttactgttggcagtggagccattattctgtctccgtatatatgcagcggagctgttattggtgcg

SEQ ID NO: 72445 - DNA, 75 bp, synthetic construct
  source 1..75: mol_type = other DNA
gtgctggcactgcgacaaccagctgcgtgaccagacatccgaatcactcgggcaacttgctcaccaaaacctgtc

SEQ ID NO: 72446 - DNA, 75 bp, synthetic construct
  source 1..75: mol_type = other DNA
tattcggcagcctgtttttttcctgcagcgtgatggccgcaaacggtacgctggcccccaccgtggtgccaatgg

SEQ ID NO: 72447 - DNA, 75 bp, synthetic construct
  source 1..75: mol_type = other DNA
accaacttttggcaaatgggttggggtgaatttatctgctgagaataagcgccagttgtggatacctgaaggatt

SEQ ID NO: 72448 - DNA, 75 bp, synthetic construct
  source 1..75: mol_type = other DNA
ccgctgaatccggttcagtatatagattcaatgggactggcatcaaaatatggacacttaaataatggcggatat

SEQ ID NO: 72449 - DNA, 75 bp, synthetic construct
  source 1..75: mol_type = other DNA
ccgttggagtgattcggcgccgattttggtgcgcaatcgtcttattcaggcgttccgtagcgatgggcgaatccg

SEQ ID NO: 72450 - DNA, 75 bp, synthetic construct
  source 1..75: mol_type = other DNA
atgcaggccgccgcgtgtggctattgatgatatccgggggggcgatactgctctctgcctgcaccattttacctt

SEQ ID NO: 72451 - DNA, 75 bp, synthetic construct
  source 1..75: mol_type = other DNA
ctcagccaggaggttctgttatccctgctcagtttctgcactgcgtgcagcatccacggtgttcagacccgtgag

SEQ ID NO: 72452 - DNA, 75 bp, synthetic construct
  source 1..75: mol_type = other DNA
atgtcagttacagagtctaaggcaaaaaatgggtataaatccagccataaactgtcaaaagcacaggaaaccgtc

SEQ ID NO: 72453 - DNA, 75 bp, synthetic construct
  source 1..75: mol_type = other DNA
aatgtcggttacagtcggagtggtgacagcagccagatttattacggaatgagtggtgggattattgctcatgct

SEQ ID NO: 72454 - DNA, 75 bp, synthetic construct
  source 1..75: mol_type = other DNA
accctgcttgcccgctacgccaaaaacatgaccgcagacgcccgtaacggcaggcttgacccggtactgtgccgc

SEQ ID NO: 72455 - DNA, 75 bp, synthetic construct
  source 1..75: mol_type = other DNA
gtttgagaaaaccgagtgcggtatgtattacctgccgtatgcgacctctcttcgtttgagcgatctcggctatac

SEQ ID NO: 72456 - DNA, 75 bp, synthetic construct
  source 1..75: mol_type = other DNA
cgcacggtgccgtattctgcggagtccgtcagtgaactggcggagtccattaaaggtgtcggcctgttgcagaat

SEQ ID NO: 72457 - DNA, 75 bp, synthetic construct
  source 1..75: mol_type = other DNA
caaatggaactggcacggattgcgctggcatcgctggaagcagagccggttgtgttctggtttgaaaaatatcaa

SEQ ID NO: 72458 - DNA, 75 bp, synthetic construct
  source 1..75: mol_type = other DNA
aataacggcatcaataattgtaaaacatgaagaatgcatttatgacgataccagaggaaacttcgttataaaggg

SEQ ID NO: 72459 - DNA, 75 bp, synthetic construct
  source 1..75: mol_type = other DNA
ttctctcgctgctcattggcactgcgttgtgcacgtccgccagtgccgggctgcaggatgacatgaattcgtttt

SEQ ID NO: 72460 - DNA, 75 bp, synthetic construct
  source 1..75: mol_type = other DNA
gttgcgcgcctgaataaagtggttcagcaggtgcataaaggtaatcaggcagccgattttgataccttcggcaaa

SEQ ID NO: 72461 - DNA, 75 bp, synthetic construct
  source 1..75: mol_type = other DNA
ctgatcccggaactggtcgaagcgctgaaaaaatggggacgcgaagatatctgcgtggtcgcgggtggcgtcatt

SEQ ID NO: 72462 - DNA, 75 bp, synthetic construct
  source 1..75: mol_type = other DNA
cagcgatgagcgggtgatccgtgctgtaggtggtgctggcgcactgtctgactggctattacgtcacgtgaaatc

SEQ ID NO: 72463 - DNA, 75 bp, synthetic construct
  source 1..75: mol_type = other DNA
ccgttgacgcggcgaagctggaatccaccatccaaaaagcgcggggtataccgtcgcaatgggtggagatgctga

SEQ ID NO: 72464 - DNA, 75 bp, synthetic construct
  source 1..75: mol_type = other DNA
agccggagcggccgtaaatgccggctgtcagccggaacggcggaagggccgtttgctggtcgcaggcagggaacc

SEQ ID NO: 72465 - DNA, 75 bp, synthetic construct
  source 1..75: mol_type = other DNA
agagttccatatgaaagacaaccgctgggtgcctggctggatgtgtgcaccacgtccacagacggatgccactga

SEQ ID NO: 72466 - DNA, 75 bp, synthetic construct
  source 1..75: mol_type = other DNA
gccccggctgggccggacgttttgaacaggaaggccagcaccaggactaccagcgcacgcagtatgaagtgtatg

SEQ ID NO: 72467 - DNA, 75 bp, synthetic construct
  source 1..75: mol_type = other DNA
ctggcagcagtatcggatgaacgggcagcctatgaattatttatggagaagcgtttcggggaatctgtagatcgc

SEQ ID NO: 72468 - DNA, 75 bp, synthetic construct
  source 1..75: mol_type = other DNA
agcaaatgccgccgctgatgacgctgagcggtatcgcgctgttagtggttggcgtggtcattgcagtcagagcaa

SEQ ID NO: 72469 - DNA, 75 bp, synthetic construct
  source 1..75: mol_type = other DNA
gggatgtgatttatgggaccaatgtccgtattgtcaaaccggtcaacatttatgaatgtgaactcagggacaatg

SEQ ID NO: 72470 - DNA, 75 bp, synthetic construct
  source 1..75: mol_type = other DNA
tggacgccggagatgcgtgccggaagtggcgtggtggtgtcctggcgttatggcaacgtgtgtgtccagcgtggt

SEQ ID NO: 72471 - DNA, 75 bp, synthetic construct
  source 1..75: mol_type = other DNA
ggcgtttttccgctgtctgaacggaagccgcaggatatcgctgtctgacctgcgatttttcatgccatccctgac

SEQ ID NO: 72472 - DNA, 75 bp, synthetic construct
  source 1..75: mol_type = other DNA
cactgcgccaggtgtgcaagctgtcggcacgtaaacagaagcaggtgcaggaatttattggggtgattgccggta

SEQ ID NO: 72473 - DNA, 75 bp, synthetic construct
  source 1..75: mol_type = other DNA
ggattacgatctatcgtgatcaggatgccaggtctgtaaaagatgccgctaacagcgccatacagaactgggtgg

SEQ ID NO: 72474 - DNA, 75 bp, synthetic construct
  source 1..75: mol_type = other DNA
tagagttggatggcgataatagccgctttgtggggcaattcaacattgatacaggcagcgcgctcagcgtcaacg

SEQ ID NO: 72475 - DNA, 75 bp, synthetic construct
  source 1..75: mol_type = other DNA
accgcttcgccaacgagtttgcccgcagcaaagcagccagtgaagaagtgatcaatatgctttcgcaggcgaatc

SEQ ID NO: 72476 - DNA, 75 bp, synthetic construct
  source 1..75: mol_type = other DNA
aaaagccggtgattcgtatctgcgaacgcttctggtacagggggctcgttcagtactgattggcgctgagaaaag

SEQ ID NO: 72477 - DNA, 75 bp, synthetic construct
  source 1..75: mol_type = other DNA
agtatgccgagtcaccgaccatccgcagccgtctggacgaaatgattgtgctgcttgaccagtacactgccaacg

SEQ ID NO: 72478 - DNA, 75 bp, synthetic construct
  source 1..75: mol_type = other DNA
ctgtacccggtttatgctcagccccgacacccgcgttgtggccgttgatctgaacaatgtggccggtgacaagac

SEQ ID NO: 72479 - DNA, 75 bp, synthetic construct
  source 1..75: mol_type = other DNA
tgaagtggcggtggcggggaacagtaaattccgcttcgtgggggctgatgccttctcgccagatgaactgcgcac

SEQ ID NO: 72480 - DNA, 75 bp, synthetic construct
  source 1..75: mol_type = other DNA
ccagagataaatattgaatggccaaaccaggatgtattgatttccgataaagataaagtcggtgcattgttcctt

SEQ ID NO: 72481 - DNA, 75 bp, synthetic construct
  source 1..75: mol_type = other DNA
agatcacaacccttcatccattcctacgatcctaaaaaaatacattaataaaaataatgaattcattgatttatc

SEQ ID NO: 72482 - DNA, 75 bp, synthetic construct
  source 1..75: mol_type = other DNA
atgcagcaaccggacaaatctctggcactgctggcatggacgctctgcctgaatgtgtttggcagcggagcgtac

SEQ ID NO: 72483 - DNA, 75 bp, synthetic construct
  source 1..75: mol_type = other DNA
gccgacgtttggtcagtgggtgggcgtggtgctgagtgcggaaaacaaacgtcaactgtggatcccggaaggatt

SEQ ID NO: 72484 - DNA, 75 bp, synthetic construct
  source 1..75: mol_type = other DNA
cattatatgatcagaaagcattgactgaacttattcggcgcaacgccctacatccattcagccgtgaaccctttt

SEQ ID NO: 72485 - DNA, 75 bp, synthetic construct
  source 1..75: mol_type = other DNA
gtaccaggcgctggttgctcaggcagaaatcgaactggcgttccattcaccggaaacagtcggaagctggcatgc

SEQ ID NO: 72486 - DNA, 75 bp, synthetic construct
  source 1..75: mol_type = other DNA
caggcagaaaaatatgaagttccggtcattattgaagcatttccggaaacactggctggtgaaaaaggtcagaat

SEQ ID NO: 72487 - DNA, 75 bp, synthetic construct
  source 1..75: mol_type = other DNA
gaaagtaaatggtctgcaagacggttcgcaggctgaaagtgagcaggggctggtggtgaagcctcaagggaatgc

SEQ ID NO: 72488 - DNA, 75 bp, synthetic construct
  source 1..75: mol_type = other DNA
aagctacaatctgtaaaagtaaaggttggacagactgccctcgaatatcataaagctgccgctcgcgttgaagag

SEQ ID NO: 72489 - DNA, 75 bp, synthetic construct
  source 1..75: mol_type = other DNA
gaaataccagccacagtggccggttccccggaacaacagaaaaaaacaggacgtaagaagaagaaaaaaaagaag

SEQ ID NO: 72490 - DNA, 75 bp, synthetic construct
  source 1..75: mol_type = other DNA
tgttacgccccaaacgtcgccgctgggttaatgaaaagtacacgcgctgggttaagacgcagccgtgtgcatgtt

SEQ ID NO: 72491 - DNA, 75 bp, synthetic construct
  source 1..75: mol_type = other DNA
tttataaatttgatgtgcgaatctctcaactttcagaagaaattaacgcagcagcaagattaatttatatggtca

SEQ ID NO: 72492 - DNA, 75 bp, synthetic construct
  source 1..75: mol_type = other DNA
atttgctttctgtctggcagttgttgcctggctaatgaaaactttcgatgttgaatggcaaacagcactggaaac

SEQ ID NO: 72493 - DNA, 75 bp, synthetic construct
  source 1..75: mol_type = other DNA
cccgacctttggtcagtgggtgggcgtgcatctgtctggcgagaacaagcgtcagctgtggatcccggaaggttt

SEQ ID NO: 72494 - DNA, 75 bp, synthetic construct
  source 1..75: mol_type = other DNA
tgctgttcggcaagctcgcggaagtggctggtgaatatctgcgcaagggcgcgcaggtctacatcgaggggcaac

SEQ ID NO: 72495 - DNA, 75 bp, synthetic construct
  source 1..75: mol_type = other DNA
gcgcaggaaggcaaaacacctgcacaaatcggtgatttgctgggctattcaccccgccacgttcagcgaatgctg

SEQ ID NO: 72496 - DNA, 75 bp, synthetic construct
  source 1..75: mol_type = other DNA
gtagagcgttagctcaggcggttacacaaactcttagacccgctgtaaccaaggctgcgacgcaagcgggcatgg

SEQ ID NO: 72497 - DNA, 75 bp, synthetic construct
  source 1..75: mol_type = other DNA
tgctgattgaaacacagggcgaggtctgcctccttccccttcccggtgatgcagcagagcggttgttcccgtcgg

SEQ ID NO: 72498 - DNA, 75 bp, synthetic construct
  source 1..75: mol_type = other DNA
atgacgtgcggtaatcaggcagatgatccgcatcacatcattggtcatggactgggagggatgggaacaaaggct

SEQ ID NO: 72499 - DNA, 75 bp, synthetic construct
  source 1..75: mol_type = other DNA
ttaatgtttatgaaatattatggttttttatgaaaaagacgctgatcgtactggctgtaactgcttctgttatga

SEQ ID NO: 72500 - DNA, 75 bp, synthetic construct
  source 1..75: mol_type = other DNA
ctgtataacgcggtagtgaccgcagctgataaagcctccgctaatcgtggcgtgctggtggtgatgaacgacacc

SEQ ID NO: 72501 - DNA, 75 bp, synthetic construct
  source 1..75: mol_type = other DNA
ggggctgatgctttctcacctgacgaactgcgtactgatttgttcagcgatgacggggacggttatgtcgaccgc

SEQ ID NO: 72502 - DNA, 75 bp, synthetic construct
  source 1..75: mol_type = other DNA
aaacggaagcttttggtgacagtaatgccacgcgaaccacagacgcatttctggaaacggagtgcgtggaaaatg

SEQ ID NO: 72503 - DNA, 75 bp, synthetic construct
  source 1..75: mol_type = other DNA
catcgtgtcagtctgccgttatcggttttcgatccccaggactaccatccactgctgattaccgtttccggaaaa

SEQ ID NO: 72504 - DNA, 75 bp, synthetic construct
  source 1..75: mol_type = other DNA
agaaatatgtcttgcaggtggctccggaagattgcaccggttgtaacctgtgcgtcgaagtttgcccggcgaaag

SEQ ID NO: 72505 - DNA, 75 bp, synthetic construct
  source 1..75: mol_type = other DNA
agccgggataatgcactgaagtctcagattactaaacttctggccagcattcagaacaaggcggtcagtgacacg

SEQ ID NO: 72506 - DNA, 75 bp, synthetic construct
  source 1..75: mol_type = other DNA
taagcaatttctttttgagcaaactgaaatgagcccaggtacggtgcgtgaatatgtcgttcgtctgcgccgttt

SEQ ID NO: 72507 - DNA, 75 bp, synthetic construct
  source 1..75: mol_type = other DNA
atcagacgccacgccagaggttcgtcgtgaacaggttgcagctttacgccagcaactcaacgatgttgccgaagc

SEQ ID NO: 72508 - DNA, 75 bp, synthetic construct
  source 1..75: mol_type = other DNA
tactgacaatcaaacagtggcgcgaaacatacggacctggtagcaacgttgtactgccagcagaagaagcggaag

SEQ ID NO: 72509 - DNA, 75 bp, synthetic construct
  source 1..75: mol_type = other DNA
gtgacctggttcctgataccgatagctatcaggaaatatttgctcagccacatttgattgacgaaaacgatcctt

SEQ ID NO: 72510 - DNA, 75 bp, synthetic construct
  source 1..75: mol_type = other DNA
gttgttgaccgtcagatgagctacatgcgccagcagctttccgcccgcatgctcagccgttaccagaacaactat

SEQ ID NO: 72511 - DNA, 75 bp, synthetic construct
  source 1..75: mol_type = other DNA
tcatactcctcttgtcagaaaaaacgctgatgagttgatcgcgctgttactgcttttcactcggcaggttggtca

SEQ ID NO: 72512 - DNA, 75 bp, synthetic construct
  source 1..75: mol_type = other DNA
cacgcgctgggttaagacgcagccgtgtgcatgctgtggaaagccagctgatgatccgcatcacctgattggcca

SEQ ID NO: 72513 - DNA, 75 bp, synthetic construct
  source 1..75: mol_type = other DNA
tcagggcatggataaaatcaggtgaacgattcgaaggacggtcagatggcggtggcttataccttcgttaccgga

SEQ ID NO: 72514 - DNA, 75 bp, synthetic construct
  source 1..75: mol_type = other DNA
gtgaagtcacaaaaaccataagcatatcctgtacgtataagagtggctcaccctggataaaggtcacaggtaatg

SEQ ID NO: 72515 - DNA, 75 bp, synthetic construct
  source 1..75: mol_type = other DNA
atgttttctgtaccgctctccggagggggaattgctcgtttatcattatttatatcgttgcttctgacatcggtc

SEQ ID NO: 72516 - DNA, 75 bp, synthetic construct
  source 1..75: mol_type = other DNA
acgattgttattgtcactggtgagagtgtgcgcagggattatatgtcagtgtatgactatcccgtaccaaccaca

SEQ ID NO: 72517 - DNA, 75 bp, synthetic construct
  source 1..75: mol_type = other DNA
atgagtatatttatctcatggcttgttctgattatttcggtggtctgcgccattgggattatgcgaattattaat

SEQ ID NO: 72518 - DNA, 75 bp, synthetic construct
  source 1..75: mol_type = other DNA
tcagcacgcgcagccagcacgtcagccggacaggccgcgtcgtcggctcagtcagcatcttccagcgcaggaacg

SEQ ID NO: 72519 - DNA, 75 bp, synthetic construct
  source 1..75: mol_type = other DNA
cgataccgtacttaaggacgacgtgctggcctcaaaagaactgctggtgatgcccgatggtagcgtgacgctcaa

SEQ ID NO: 72520 - DNA, 75 bp, synthetic construct
  source 1..75: mol_type = other DNA
ctttacgcgatatttatagacttgagattgatttacttaaaaaggcaaggattaaagcaggaaaaatagaagcaa

SEQ ID NO: 72521 - DNA, 75 bp, synthetic construct
  source 1..75: mol_type = other DNA
gctaaggttcgcgccgaaatgccggatgtgcctaatttcacgattcacgacttccgacgcaccgcacgtactcat

SEQ ID NO: 72522 - DNA, 75 bp, synthetic construct
  source 1..75: mol_type = other DNA
accggatgttccccgtatcccctcgcctgaaatcctggctgccggatattcaggccgtggtgcagctgcaaccgg

SEQ ID NO: 72523 - DNA, 75 bp, synthetic construct
  source 1..75: mol_type = other DNA
gccagagttgctcttggctatgacgtagcagcagagaaacaggaacgaaaagctgaagcactggcaaaaatggag

SEQ ID NO: 72524 - DNA, 75 bp, synthetic construct
  source 1..75: mol_type = other DNA
gggaaggctttcagccattcttcgcctgccagacctgtgtgcgcgacccgggccgccggggatacacaaaacaca

SEQ ID NO: 72525 - DNA, 75 bp, synthetic construct
  source 1..75: mol_type = other DNA
gggcgtgtttgaccggattgaggaaaagcgtgatgccatgcagtcgctgattctgccgccaccggcacgccaggc

SEQ ID NO: 72526 - DNA, 75 bp, synthetic construct
  source 1..75: mol_type = other DNA
tgaaaggtatcgttgaccgaggagcaccaacgatagcaacagatgtattacgctggacacgccgtatctttgact

SEQ ID NO: 72527 - DNA, 75 bp, synthetic construct
  source 1..75: mol_type = other DNA
gcgcacaaaaaatcttgcgccgctgcctcacgcccaccagcaacagaacccaccacaggaaaagacggtggtcag

SEQ ID NO: 72528 - DNA, 75 bp, synthetic construct
  source 1..75: mol_type = other DNA
ttgcgacggaggcaatccactggcctgaaagtgtggatgaacacaaaaaggcaaatgcctttgccggcacagccc

SEQ ID NO: 72529 - DNA, 75 bp, synthetic construct
  source 1..75: mol_type = other DNA
gacgacgatacgcttccggttcccgtctctttacaagggcgtgtaacaggcaacagcggcgttgatattttcgcc

SEQ ID NO: 72530 - DNA, 75 bp, synthetic construct
  source 1..75: mol_type = other DNA
aatatgctgaaaggcgggatttccggtcgcagtgcaaaaggaaaacgtatccatacccgtgccattcacagtatc

SEQ ID NO: 72531 - DNA, 75 bp, synthetic construct
  source 1..75: mol_type = other DNA
cgccagcttgctccgcagttaccggatatgcagcaaacgttgctggataagcactatctgcgtaagcatggcgca

SEQ ID NO: 72532 - DNA, 75 bp, synthetic construct
  source 1..75: mol_type = other DNA
tctaaagcgctggattgaagagttttacccaaatgcgcgtcccctggtcattcgctcaggcacaagcaaatgctt

SEQ ID NO: 72533 - DNA, 75 bp, synthetic construct
  source 1..75: mol_type = other DNA
ctcaaaaagccagtgagtcatcacaaagtgcagcagatgctgaattgtcaagaaagacggcagaaagtgcagccg

SEQ ID NO: 72534 - DNA, 75 bp, synthetic construct
  source 1..75: mol_type = other DNA
tacaaagcggaggtaatacaccgtaagagctggaaaaaccgtgcagaagtggaactggccacactcacgtgggtg

SEQ ID NO: 72535 - DNA, 75 bp, synthetic construct
  source 1..75: mol_type = other DNA
taactttgattttgcagcgatgcgcctgaacatcactattcctcagatagcgttgttgagtagcgctcacggggt

SEQ ID NO: 72536 - DNA, 75 bp, synthetic construct
  source 1..75: mol_type = other DNA
cgaatgccgcagcgtcacaacaatcagcagccacttctgcatccaccgcgaccacgaaagcgtcagaagctgcca

SEQ ID NO: 72537 - DNA, 75 bp, synthetic construct
  source 1..75: mol_type = other DNA
gccgtttctgaattactggatagttcaaccagcaaaatagagagcatatcagagaagattaacggcttatcaggt

SEQ ID NO: 72538 - DNA, 75 bp, synthetic construct
  source 1..75: mol_type = other DNA
tgaacgtatcttcatatgtggggagacactcaaaggtgaagaccccagcaaatacattagacaaaaatatgggca

SEQ ID NO: 72539 - DNA, 75 bp, synthetic construct
  source 1..75: mol_type = other DNA
gcagaaagtgcagccggtaatgcagccagggatgcaacgaccgcaacagaaaaagcccgggagtcagcagaaagc

SEQ ID NO: 72540 - DNA, 75 bp, synthetic construct
  source 1..75: mol_type = other DNA
tgagcatcacctcgtccggcaatcccccgacgttctccctgacgccggagggcaggctgacggcccgcaatgcgg

SEQ ID NO: 72541 - DNA, 75 bp, synthetic construct
  source 1..75: mol_type = other DNA
cgcgaccagacctccgaatcacttgagcaacttactcaacaaaatctgacagcctggatgattgacgtcatacgc

SEQ ID NO: 72542 - DNA, 75 bp, synthetic construct
  source 1..75: mol_type = other DNA
atgaataccagaactctttttcccctgcttttcactgttgcatcattctccgcctccgccggtaactgggccgtc

SEQ ID NO: 72543 - DNA, 75 bp, synthetic construct
  source 1..75: mol_type = other DNA
cgccgatgtttattgcctgtggcctgctcgcaggctgcggtctgacgcagaccgtcacggacggcacgatcagca

SEQ ID NO: 72544 - DNA, 75 bp, synthetic construct
  source 1..75: mol_type = other DNA
atcatccttcctgtagcctgacccgcaaactgggagtgaaggaagagccgcttacgctgctgaaaaacgtgcgcg

SEQ ID NO: 72545 - DNA, 75 bp, synthetic construct
  source 1..75: mol_type = other DNA
tgagtcggtacagcgatacatcgtgaagccgggagaagtccacgccgtgaggccgcacccgttgccgtcagggca

SEQ ID NO: 72546 - DNA, 75 bp, synthetic construct
  source 1..75: mol_type = other DNA
tgccggatggagcgcagaatatttatctggcgctatcgactaacgataataatacgctggataagagtaataaaa

SEQ ID NO: 72547 - DNA, 75 bp, synthetic construct
  source 1..75: mol_type = other DNA
tgacgaacatcagccagtcaccaccgctgacattctgacaccacgacgcagggaggattacggtaaagacctgtg

SEQ ID NO: 72548 - DNA, 75 bp, synthetic construct
  source 1..75: mol_type = other DNA
gaagcagagacgtccgcgaggaatgccggcatatcagccagtaaggcggaagcgagcgccgcaaatgctgatact

SEQ ID NO: 72549 - DNA, 75 bp, synthetic construct
  source 1..75: mol_type = other DNA
tgaaaataaaacacaaactctcatatgttcgcccgactaaccgcgggaaaatttccgaagaagacaccaccgaaa

SEQ ID NO: 72550 - DNA, 75 bp, synthetic construct
  source 1..75: mol_type = other DNA
ccggcgctcggcggtctgctggtggagtacgcatcgtggcactggatctttttgatcaacattccggtggggatt

SEQ ID NO: 72551 - DNA, 75 bp, synthetic construct
  source 1..75: mol_type = other DNA
cgctgggtctgtcgctggtcaccctgttgtttatgactaccgccctgctgggctggtactacgttttgccgttcg

SEQ ID NO: 72552 - DNA, 75 bp, synthetic construct
  source 1..75: mol_type = other DNA
atagcggtgattacactgctggagatattaaaggtatgaaccataccgatgttgctattaattatttcagtatca

SEQ ID NO: 72553 - DNA, 75 bp, synthetic construct
  source 1..75: mol_type = other DNA
accgcgttgggaaggcattactcgcccgtacagcgcggaagatgtggtgaaattacgcggttcagtcaatcctga

SEQ ID NO: 72554 - DNA, 75 bp, synthetic construct
  source 1..75: mol_type = other DNA
atcaacacattatgcgtactgccgggctggactcttcccaggggccaacggcggcaaaatacattcttgagacgg

SEQ ID NO: 72555 - DNA, 75 bp, synthetic construct
  source 1..75: mol_type = other DNA
tgttaccgttcacgcaattggtaagacccgcagtatcgagcgtatcaacaaagcgctggattttattgctgaacg

SEQ ID NO: 72556 - DNA, 75 bp, synthetic construct
  source 1..75: mol_type = other DNA
cggtcagctcgatcacgataccggcaaatctctgaaagatacggccgcagccgtaaccgcatgggcgtctacatg

SEQ ID NO: 72557 - DNA, 75 bp, synthetic construct
  source 1..75: mol_type = other DNA
ccagtgaacgtgaatcatttaattcagcagcagaccaccggttagcggaattaatcaccggaaagttatatgaca

SEQ ID NO: 72558 - DNA, 75 bp, synthetic construct
  source 1..75: mol_type = other DNA
caaagtaaattcagatgccaggtatgtggatatacagcgaacgccgatgtaaatggcgctcgtaacattttagcg

SEQ ID NO: 72559 - DNA, 75 bp, synthetic construct
  source 1..75: mol_type = other DNA
gtcttctggtctggtcccccggtcagcgggatatcatcaaaacggtggcactggtgctgatggtgctggatcata

SEQ ID NO: 72560 - DNA, 75 bp, synthetic construct
  source 1..75: mol_type = other DNA
ttttgtactgatgctatcaacttattaaataacaagtacgcgtcaggttttaaaaatataaagccgacgtattca

SEQ ID NO: 72561 - DNA, 75 bp, synthetic construct
  source 1..75: mol_type = other DNA
acgggtattgcgggcgctcttcagactcctaccctaagtatattcctcgcagatgaactgaaagcccgtcctata

SEQ ID NO: 72562 - DNA, 75 bp, synthetic construct
  source 1..75: mol_type = other DNA
gtgctggcactgcgacaaccagttgcgtgaccagacctccgaatcacttgagcaacttgctcaccaaaacctgtc

SEQ ID NO: 72563 - DNA, 75 bp, synthetic construct
  source 1..75: mol_type = other DNA
ttaccatcacagtaaaaatgagaagtttttggtcattcgaggtcaggcatgctttaaatttgaacatgtgattac

SEQ ID NO: 72564 - DNA, 75 bp, synthetic construct
  source 1..75: mol_type = other DNA
ttattgcgggtgaaattcaggcgcgcccggaacaggttgacgctgccgttcgcctgcttgacgaagggaataccg

SEQ ID NO: 72565 - DNA, 75 bp, synthetic construct
  source 1..75: mol_type = other DNA
cgccaccctaagcaaaaccgaactcgaagacctctacctgccctacaaacctaaacgccgcacccgcgggcaaat

SEQ ID NO: 72566 - DNA, 75 bp, synthetic construct
  source 1..75: mol_type = other DNA
ttacacgctcgatgagggagatgatccgtttgatgaaacggtctggcagaaagcgaatcccggcctgggcatctg

SEQ ID NO: 72567 - DNA, 75 bp, synthetic construct
  source 1..75: mol_type = other DNA
cgggatggaaagatacagagagttaaaactccagaagctattatccctgccgcaaaataacaaaggtgctttcga

SEQ ID NO: 72568 - DNA, 75 bp, synthetic construct
  source 1..75: mol_type = other DNA
caaatctgccagtgcgttcaacaccgacaagctgctgtggctgaaccatcactacattaacgcgctgccgccgga

SEQ ID NO: 72569 - DNA, 75 bp, synthetic construct
  source 1..75: mol_type = other DNA
tgctgggataccgttcggtgaatgcagcggtggagcatcttcgtgcgctggagaaaaaaggcgtcatcacgataa

SEQ ID NO: 72570 - DNA, 75 bp, synthetic construct
  source 1..75: mol_type = other DNA
tcactgcttgccggtgaggaaaacgccaggctgcgtgcagcccactggttacatgagaggggcctgaaagtatga

SEQ ID NO: 72571 - DNA, 75 bp, synthetic construct
  source 1..75: mol_type = other DNA
accgtcctagaaaatctgcagcgggaaggctttcagccgttcttcgcctgccagacccgtgtgcgcgaccagagc

SEQ ID NO: 72572 - DNA, 75 bp, synthetic construct
  source 1..75: mol_type = other DNA
tgcgtgaggcggcagagaaagcaactaaaggaagctacatcgtagggcatacatctgttaaccagcacggcaatt

SEQ ID NO: 72573 - DNA, 75 bp, synthetic construct
  source 1..75: mol_type = other DNA
gcaccaagtcgccgaacctcgccgactcggtgatgatcagctacgcgccaatgaattcagccctgaacatctggg

SEQ ID NO: 72574 - DNA, 75 bp, synthetic construct
  source 1..75: mol_type = other DNA
cgaccgtcaatactcgccacaccgtttcgcggtagcggcgcggtgtttgatccggacgacgaagcggtgcgcggc

SEQ ID NO: 72575 - DNA, 75 bp, synthetic construct
  source 1..75: mol_type = other DNA
ggagcatcatttatagaatttgcaacatcgttagcctataagcacaggttaaagctaccaaatggtattgaggca

SEQ ID NO: 72576 - DNA, 75 bp, synthetic construct
  source 1..75: mol_type = other DNA
agcaggtgctggatatgctgatttcttaccagaaagagcgtggctttccgccaaccaatcaggaggtggcaacca

SEQ ID NO: 72577 - DNA, 75 bp, synthetic construct
  source 1..75: mol_type = other DNA
tgtatatcaggacaaaatgtagattcagaagaacatgtatcaaccagcaaagcggttgttgatgcctgggttgaa

SEQ ID NO: 72578 - DNA, 75 bp, synthetic construct
  source 1..75: mol_type = other DNA
ttctccggcaccagttacggcattgccgggctgctgatgctggcagtcagccacaggctgtaccgggcggaagac

SEQ ID NO: 72579 - DNA, 75 bp, synthetic construct
  source 1..75: mol_type = other DNA
atgggctgtgattgcccagttcgcgtattacgttgccggctttccctggtatgaagggaatatcctgtttgcctt

SEQ ID NO: 72580 - DNA, 75 bp, synthetic construct
  source 1..75: mol_type = other DNA
ctttccgctgtttgccctggtgtgggggcggaatctgtcccgtcatgcgcatatccggcaggtggccattaaccg

SEQ ID NO: 72581 - DNA, 75 bp, synthetic construct
  source 1..75: mol_type = other DNA
ttgccccctcgctagccctgccaatatctaagcgcaccggcgatactttcgttggtgcttatccctggaatgctc

SEQ ID NO: 72582 - DNA, 75 bp, synthetic construct
  source 1..75: mol_type = other DNA
catgcgacattgcaatcagaaaggcaacgtgaaattgatctgtctcgcctttacaatgagtatcgtgattatgta

SEQ ID NO: 72583 - DNA, 75 bp, synthetic construct
  source 1..75: mol_type = other DNA
tcgggaacaaaaccaacccctcatttcctcggcgcggtggtgctggaacctcaactcaaaaacagcttgttaggt

SEQ ID NO: 72584 - DNA, 75 bp, synthetic construct
  source 1..75: mol_type = other DNA
ttcaaccacccgccgtcactagaggcattatggttttttactgaagcctttataaaatggattaaaatagaaaac

SEQ ID NO: 72585 - DNA, 75 bp, synthetic construct
  source 1..75: mol_type = other DNA
ccaaccaatcaggaggtggcaaccatgctgggataccgttcagtgaatacagcggtggagcatcttcgcgcactg

SEQ ID NO: 72586 - DNA, 75 bp, synthetic construct
  source 1..75: mol_type = other DNA
cggtgcgctggcgggtgtttctcgcgtaaccatctggagcgacgtcgccggggtatacagtgccgacccgcgtaa

SEQ ID NO: 72587 - DNA, 75 bp, synthetic construct
  source 1..75: mol_type = other DNA
cggcacaacatcatggatatgctgggctgggcaggcgtcattgtgctgatgtcgctgctggtcagtgttcgcacc

SEQ ID NO: 72588 - DNA, 75 bp, synthetic construct
  source 1..75: mol_type = other DNA
taagccaaagcttgccctggatactcagaccggaggaaaaacatggagttactacgtgcgtcagctttttggcgg

SEQ ID NO: 72589 - DNA, 75 bp, synthetic construct
  source 1..75: mol_type = other DNA
taacgtgcccgtcgggctggcactgcctgcatcgctgaccaccaaaatcggatatgcccttgttcaggggtatga

SEQ ID NO: 72590 - DNA, 75 bp, synthetic construct
  source 1..75: mol_type = other DNA
tgcacaccctgccgttgccaggcgtgggtttctgcgtggcagcgctggcgattaccggtgtgccgccgttcaacg

SEQ ID NO: 72591 - DNA, 75 bp, synthetic construct
  source 1..75: mol_type = other DNA
cgggattatttcatcctcagagaacggttgatgatgatgcagaagcagctggaaggggcgcaggaatatatccgc

SEQ ID NO: 72592 - DNA, 75 bp, synthetic construct
  source 1..75: mol_type = other DNA
cggtaccggaactcggggtggttatcgttaagccaggccgtgaatcaatgtcggtattccataacgacagagtac

SEQ ID NO: 72593 - DNA, 75 bp, synthetic construct
  source 1..75: mol_type = other DNA
tgtgcttgctgcggtatgccagccgacgatccgcatcatctgattggtcacgggcagggcggaatgggaaccaaa

SEQ ID NO: 72594 - DNA, 75 bp, synthetic construct
  source 1..75: mol_type = other DNA
aggtacaacaccgataactcattaccggctctgcaacgggaagctcagacacagaagcgcggcctgtgggctgac

SEQ ID NO: 72595 - DNA, 75 bp, synthetic construct
  source 1..75: mol_type = other DNA
atcagcagagcagaaaaataggaatgattgttcccagtgttgttatttcagagaagcatacagatatgcttgaaa

SEQ ID NO: 72596 - DNA, 75 bp, synthetic construct
  source 1..75: mol_type = other DNA
aaatctgcgcataccgaactacgccgtctggacaggaagaaagaatctttgcttgataaatttatcgatgaactt

SEQ ID NO: 72597 - DNA, 75 bp, synthetic construct
  source 1..75: mol_type = other DNA
tgattaaagaaatcaaagaacgcataggcagcctggacgttcgagacaatattgagcgccgtgcttatgaaattg

SEQ ID NO: 72598 - DNA, 75 bp, synthetic construct
  source 1..75: mol_type = other DNA
caggtgttgccgatcgagaaggcaatacaataatgcgtgatcaacttatcaatgaaacccagaactttgaagcgg

SEQ ID NO: 72599 - DNA, 75 bp, synthetic construct
  source 1..75: mol_type = other DNA
aaaactcaaccaggcgaccgcaatcattactgacatgcagatacgccagcgtgatgttgctgcactcgatgcaaa

SEQ ID NO: 72600 - DNA, 75 bp, synthetic construct
  source 1..75: mol_type = other DNA
agaaaatgtgagtggttttaactggaataccaatagctcaacagtatttggacaaatgagccaacagttggctaa

SEQ ID NO: 72601 - DNA, 75 bp, synthetic construct
  source 1..75: mol_type = other DNA
gaaccctcagacagaaaacaaagtgatgagcggctaaaactggagattaaggtggcacatatccgcactcgcgaa

SEQ ID NO: 72602 - DNA, 75 bp, synthetic construct
  source 1..75: mol_type = other DNA
agctgaaatactctgacctggcctctactgccgggtatctttcagccatgatccccccgttgtcatggatgatgg

SEQ ID NO: 72603 - DNA, 75 bp, synthetic construct
  source 1..75: mol_type = other DNA
catctctcgacgcgctttgtgcggtactggtatcggtggtgtcggtgaagattctctcattcatccaccagcagg

SEQ ID NO: 72604 - DNA, 75 bp, synthetic construct
  source 1..75: mol_type = other DNA
gcgtaacggcaaaatcctcggctgggcatggggcgcgggatttgttgacggtatcggtcagggaatggagcgcgc

SEQ ID NO: 72605 - DNA, 75 bp, synthetic construct
  source 1..75: mol_type = other DNA
taaagtctacgaagagatcgacgaggtgatgtacgaggcgcggcaggctgttgtcgaccaggctaaactggagga

SEQ ID NO: 72606 - DNA, 75 bp, synthetic construct
  source 1..75: mol_type = other DNA
atgaaccgtgttctgtgtgtggtgattattgtcatggcggttggctgtggtgcgctgtggctggcaacaaaccat

SEQ ID NO: 72607 - DNA, 75 bp, synthetic construct
  source 1..75: mol_type = other DNA
cctatgacgcaacgggatgctttgttgggctggaagcctggggggatgtgtccagtgagcgtgccatcgtgcgta

SEQ ID NO: 72608 - DNA, 75 bp, synthetic construct
  source 1..75: mol_type = other DNA
gttcgcgcgaagtgccgcaagcgtggctggaggaagcgcaaaagcgcggcctgaaagtcggcaagcagctgactt

SEQ ID NO: 72609 - DNA, 75 bp, synthetic construct
  source 1..75: mol_type = other DNA
atgaggggagagcggcgttgccttcacttttctcctcaggcagccagaatctggacggactattacaacaatgtg

SEQ ID NO: 72610 - DNA, 75 bp, synthetic construct
  source 1..75: mol_type = other DNA
ctcaaccgccagttcccgaccattagcctgttagacattggcgcgattttaaaacaggtcggtcaggtgctggag

SEQ ID NO: 72611 - DNA, 75 bp, synthetic construct
  source 1..75: mol_type = other DNA
gctggcgaccggtgcaaacgcgctggataccgctgcggcaatccgtgctgaactggcgaagatggaaccgttctt

SEQ ID NO: 72612 - DNA, 75 bp, synthetic construct
  source 1..75: mol_type = other DNA
cgctaacccacaataataagccgctgccgtttggggcgatggtgacatcagagagtagccagagtagcggcattg

SEQ ID NO: 72613 - DNA, 75 bp, synthetic construct
  source 1..75: mol_type = other DNA
ctgatagaggcgaaatgttctcgtgctgacttgttggcagatagaaaaaagcgttttcgtaaaaatccgtctctt

SEQ ID NO: 72614 - DNA, 75 bp, synthetic construct
  source 1..75: mol_type = other DNA
aagtaccagtattgtcggcgcagcagaaacccgcccccgtaacattgcgtttaattacatcgtaagggcggcata

SEQ ID NO: 72615 - DNA, 75 bp, synthetic construct
  source 1..75: mol_type = other DNA
agagctgaaaatgaaactctgcgcgctgatgttgccgctggtcgtaagcgcctgcggatcaacgccacctgcccc

SEQ ID NO: 72616 - DNA, 75 bp, synthetic construct
  source 1..75: mol_type = other DNA
ggctccttgcgtaaagcccccatcacctccggcgtggataatgcaaccggtccccgactggcagaagccgctgaa

SEQ ID NO: 72617 - DNA, 75 bp, synthetic construct
  source 1..75: mol_type = other DNA
gggctcggtactcctgattcccgcacggtggctgaactggaatctgaaattctgcaactgcgtaaggcgttaaat

SEQ ID NO: 72618 - DNA, 75 bp, synthetic construct
  source 1..75: mol_type = other DNA
ctggagattgcccgttatgccctgaaatacggtctgaccatgccgggtaaacaccgccgcaccccgccgtacatg

SEQ ID NO: 72619 - DNA, 75 bp, synthetic construct
  source 1..75: mol_type = other DNA
cagccaccgcaaaagcggtgaaaattgcgatggataatgccagtgcccgtctggcaaaagaccggaacggagcag

SEQ ID NO: 72620 - DNA, 75 bp, synthetic construct
  source 1..75: mol_type = other DNA
taaaaaaagcagctgtagattcaatctgtcaatgcaacacccctttcaattatctctttcactgcccgcgacggt

SEQ ID NO: 72621 - DNA, 75 bp, synthetic construct
  source 1..75: mol_type = other DNA
agatgacggcggtgcaccgcgaggaagggctgagtcagtaccgcgcatacgacagccgtggacagttaattgccg

SEQ ID NO: 72622 - DNA, 75 bp, synthetic construct
  source 1..75: mol_type = other DNA
aaaagacaagctgaatcttgatacaaagaccggaggcaagacctggcattattatgtgcagcagttatttggcgg

SEQ ID NO: 72623 - DNA, 75 bp, synthetic construct
  source 1..75: mol_type = other DNA
tccgctttggtgtcagcaaggccaactatggagcaccgttcaaagaccgctggttcaggcggtatgacggcggag

SEQ ID NO: 72624 - DNA, 75 bp, synthetic construct
  source 1..75: mol_type = other DNA
aaatgcgccgcaaatatgatgagtacggacgtctgattcaggaaaccgcccctgacggcgatatcacccgctacc

SEQ ID NO: 72625 - DNA, 75 bp, synthetic construct
  source 1..75: mol_type = other DNA
agagagcggttgatgctgatgcagaagcagctggaagtggcgcaggaatatatccgcactcagtgcctgaaataa

SEQ ID NO: 72626 - DNA, 75 bp, synthetic construct
  source 1..75: mol_type = other DNA
taccacgacccgacgtgtcaggttttccactgaaatcgacactctctatggaataacgactgttacatcggaggc

SEQ ID NO: 72627 - DNA, 75 bp, synthetic construct
  source 1..75: mol_type = other DNA
ccaatgaatgggtttgtgaaagcgttcttatcgcaattaccgggctcaaaccaggcacaattctccgggcccgga

SEQ ID NO: 72628 - DNA, 75 bp, synthetic construct
  source 1..75: mol_type = other DNA
ggtatgctggtgatacgcaacaaaaagccctacgtttttgaagcggtcggcccggtgaaatacaccccgctcaag

SEQ ID NO: 72629 - DNA, 75 bp, synthetic construct
  source 1..75: mol_type = other DNA
agtcacgtggacgaccataaaatccatctgggataaaggtattgcgcattttgcagcaaaaccgccgcaggaggt

SEQ ID NO: 72630 - DNA, 75 bp, synthetic construct
  source 1..75: mol_type = other DNA
tctggtagtgatggtggcgacgtttatctcgctggtcgctgccgggtggatttttaccgcgctgatttatctcgt

SEQ ID NO: 72631 - DNA, 75 bp, synthetic construct
  source 1..75: mol_type = other DNA
gaattaacagacgaagaattatcactcattcaaagtatggacggtgtttactttaatccgcgcccacgcaaaaca

SEQ ID NO: 72632 - DNA, 75 bp, synthetic construct
  source 1..75: mol_type = other DNA
aaagccgcaataaactggaaaataaaatccgccaggcagagaagcggctggctgagctggaaaaccgtcttgcag

SEQ ID NO: 72633 - DNA, 75 bp, synthetic construct
  source 1..75: mol_type = other DNA
aacggcgctaagggtgtgctatccggtgaattttcagaaactacgtttataagctgcccggaatgctttggcgat

SEQ ID NO: 72634 - DNA, 75 bp, synthetic construct
  source 1..75: mol_type = other DNA
gacagcgtatgggccgggcagaatgtttctccgaaagacaaagtaagaattgagggtgaaattgataaagacctg

SEQ ID NO: 72635 - DNA, 75 bp, synthetic construct
  source 1..75: mol_type = other DNA
cgctggtgtcgcccggtggtgccggtaaatccatgctggccctgcaactggccgcacagattgcaggcgggccgg

SEQ ID NO: 72636 - DNA, 75 bp, synthetic construct
  source 1..75: mol_type = other DNA
cacaggaaaagacggtggtcagcattgccgttgatccggagtcaccggctcagtatctccagcgccagaaatcac

SEQ ID NO: 72637 - DNA, 75 bp, synthetic construct
  source 1..75: mol_type = other DNA
ttattgtcctgctggtggcctgcggtgcgctgtggctggcaacagaccattaccgcgataatgccatcacttaca

SEQ ID NO: 72638 - DNA, 75 bp, synthetic construct
  source 1..75: mol_type = other DNA
aatacatggcatgggatatgactctcggttggatcgtctggcagcaacgagctggtatccgtttttcaacaatgt

SEQ ID NO: 72639 - DNA, 75 bp, synthetic construct
  source 1..75: mol_type = other DNA
attatgatggctatacaaaaggcattattgatgtgatggataattttatacccttgataagcttgttgagctcag

SEQ ID NO: 72640 - DNA, 75 bp, synthetic construct
  source 1..75: mol_type = other DNA
cctgctggacaacgacgacgacttctacaaagaaaacggcatcgctaccgatgatatcgtggctgtgggcttagt

SEQ ID NO: 72641 - DNA, 75 bp, synthetic construct
  source 1..75: mol_type = other DNA
atggaaagagaccatatcaataacaaatcacagaaattacaggctcgcgccccgcatgaagttgttgaggctatg

SEQ ID NO: 72642 - DNA, 75 bp, synthetic construct
  source 1..75: mol_type = other DNA
aatatacggcggcttctctggatgagcttaaccgggcgatcaatgatgcggagtcggtactggggacaacccggc

SEQ ID NO: 72643 - DNA, 75 bp, synthetic construct
  source 1..75: mol_type = other DNA
aaaattgatgatgcgtcctacagtgaagcactggaagctgaaagggagtgcagggctgaaatataccgcgaacag

SEQ ID NO: 72644 - DNA, 75 bp, synthetic construct
  source 1..75: mol_type = other DNA
tcacaggagcagaacacattaaccacttcatggcctgaagcaatgggatatgcctctggttatgtctggttgaat

SEQ ID NO: 72645 - DNA, 75 bp, synthetic construct
  source 1..75: mol_type = other DNA
taatgtgccggtcgggctggcgatgccactttcactgacgacccgtatcgggcatgcgatggtggccggctatga

SEQ ID NO: 72646 - DNA, 75 bp, synthetic construct
  source 1..75: mol_type = other DNA
atgatgcgaataatgtctatttagcggcaatgtatgcagaaacacgtaatatgactgcatatggcagcggaaaag

SEQ ID NO: 72647 - DNA, 75 bp, synthetic construct
  source 1..75: mol_type = other DNA
atgcaaagcagaatggtgcaccggtcgtgctctctgaactctctcagatacagctgaaatactccgacctggcgt

SEQ ID NO: 72648 - DNA, 75 bp, synthetic construct
  source 1..75: mol_type = other DNA
gcgtatccgcatgttcagccagatcgccaatatcatgctttactgcctgtttattttttctggatactcgttggt

SEQ ID NO: 72649 - DNA, 75 bp, synthetic construct
  source 1..75: mol_type = other DNA
cgtgctgatgtttctgctgggcgtaagcgcctgcaagtcgccgccacctgtgcaaagtcaacgaccggagccagc

SEQ ID NO: 72650 - DNA, 75 bp, synthetic construct
  source 1..75: mol_type = other DNA
taaggtcgaacaaatcggcatcaaggcagcggaggaaatcgggcaactcgtagccgtcgctcgtgaagaactcca

SEQ ID NO: 72651 - DNA, 75 bp, synthetic construct
  source 1..75: mol_type = other DNA
ctggcgtctatctttgttgaaccggcgaaaatcctgttcctcaacaacgccattaaccacggtatcttctcgccg

SEQ ID NO: 72652 - DNA, 75 bp, synthetic construct
  source 1..75: mol_type = other DNA
accacgagcaagaatacacgccgatcaactcgcgtaataaagtccttgtcgcctctctcattggcacggccattg

SEQ ID NO: 72653 - DNA, 75 bp, synthetic construct
  source 1..75: mol_type = other DNA
accgggaaaaattaccggcgcagatgatgacggccatgacgcatcagttacgcctggtgctgaaacgaaaatcgt

SEQ ID NO: 72654 - DNA, 75 bp, synthetic construct
  source 1..75: mol_type = other DNA
gggcaatctgctgttttgtcctcttcattgtggtgtgtctttttctggcgacgcacatgaaaggcgcttttcggg

SEQ ID NO: 72655 - DNA, 75 bp, synthetic construct
  source 1..75: mol_type = other DNA
taaggtcgaacaaatcggcatcaaagcagcggaagaaatcgggcaacttgtcaccgttgcacgcgaagaactcca

SEQ ID NO: 72656 - DNA, 75 bp, synthetic construct
  source 1..75: mol_type = other DNA
atgtgatgcagcgtatgccacaggcttcattgtctaccggtattgacagcaaagggaggccaaaacgtcaccgcc

SEQ ID NO: 72657 - DNA, 75 bp, synthetic construct
  source 1..75: mol_type = other DNA
taaatgatgaaaagcacatggccgactggctaattcagcatattccgcaaacaactgagaaattcttaattcgct

SEQ ID NO: 72658 - DNA, 75 bp, synthetic construct
  source 1..75: mol_type = other DNA
gaggcggtgaatgccctgccggctccgcaggacgggcgtgatgccacggcactggaagtgctccccgccattgac

SEQ ID NO: 72659 - DNA, 75 bp, synthetic construct
  source 1..75: mol_type = other DNA
ccggcggacggtaaaagtgtcactgcggatgatgtacgcccgatgatcgagcagatggtgaaggacgcagtgagt

SEQ ID NO: 72660 - DNA, 75 bp, synthetic construct
  source 1..75: mol_type = other DNA
cggaaggagtgacggagaaggattatcaattcctgccgtcgaaggctgaccatttctcaggtgggaaaatcacgc

SEQ ID NO: 72661 - DNA, 75 bp, synthetic construct
  source 1..75: mol_type = other DNA
tatgcggaagctatcctgaatgtattcccacaaattatacctgataaaaaagatatcgcacatttagaatttatt

SEQ ID NO: 72662 - DNA, 75 bp, synthetic construct
  source 1..75: mol_type = other DNA
ttattcaggagataaacacgccatgcagaacgactgatatttcttcacattttgacatgagcacttatcaggccc

SEQ ID NO: 72663 - DNA, 75 bp, synthetic construct
  source 1..75: mol_type = other DNA
cacccctgctggggcactcgatcacttaccgtatcgctgtcggttcacaggcggggcgaaaggtgttcactttgc

SEQ ID NO: 72664 - DNA, 75 bp, synthetic construct
  source 1..75: mol_type = other DNA
tccacggggtgttcgcacccaacagtcggcaccgggcgttggtcacgccggcaaaacggggcaggggcaacaagg

SEQ ID NO: 72665 - DNA, 75 bp, synthetic construct
  source 1..75: mol_type = other DNA
ccagcgactgtggtctgcatgggagaaagctaccggcgagcagcgtctgcatgcagaacgccggactaaagctgc

SEQ ID NO: 72666 - DNA, 75 bp, synthetic construct
  source 1..75: mol_type = other DNA
agatgttgatcttacattgaactggggaaggttgagtagtgtcctgcctgactatcatggacaagactctgttcg

SEQ ID NO: 72667 - DNA, 75 bp, synthetic construct
  source 1..75: mol_type = other DNA
tttgaaaacattgctgaccaaaatcgaaaagactcaggatgagttacggactgttatcggtactgttttaaacga

SEQ ID NO: 72668 - DNA, 75 bp, synthetic construct
  source 1..75: mol_type = other DNA
tgtgtgggggatgaccctttcgggcgttttatgcgcaaaaccctggctgatgagggtgtggacacggcgtatatg

SEQ ID NO: 72669 - DNA, 75 bp, synthetic construct
  source 1..75: mol_type = other DNA
ccgcctttaaagcggcttccggggaaatggatatcagtgccctgcatctgctgtcactcggactgctttttgccg

SEQ ID NO: 72670 - DNA, 75 bp, synthetic construct
  source 1..75: mol_type = other DNA
gtggtgcgcttgccacgacagcaaaaggtgccatgacagcgttaccccgtcgccaggatttactgaaacacccct

SEQ ID NO: 72671 - DNA, 75 bp, synthetic construct
  source 1..75: mol_type = other DNA
cgccaaccggtaaagcgtacgacgccatcaaagagctcggtattaaaacgtcagatagcaaaggcaatacgcgcc

SEQ ID NO: 72672 - DNA, 75 bp, synthetic construct
  source 1..75: mol_type = other DNA
ccatgcagaaggctgcacacgtaaacctttgcattttaccctgaacgctggaggacgcagcctgacgctggtcga

SEQ ID NO: 72673 - DNA, 75 bp, synthetic construct
  source 1..75: mol_type = other DNA
atggttaatgatgtttctgccaataagatactggtgtgggcagctgtagccgcggcaaatcataagcttcccaaa

SEQ ID NO: 72674 - DNA, 75 bp, synthetic construct
  source 1..75: mol_type = other DNA
gtgggggatgatccttttggtgcgttaatgcaaagaacgctgctaactgagggagtcgatatcacgtatctgaag

SEQ ID NO: 72675 - DNA, 75 bp, synthetic construct
  source 1..75: mol_type = other DNA
gccacttaagccggtgtttgactggctgggcgaaaagttacaggccgcgtggcagtggtttaaaaacctgattgc

SEQ ID NO: 72676 - DNA, 75 bp, synthetic construct
  source 1..75: mol_type = other DNA
ccttcgggaagctgaaggctgggaatggtgcgccggacgtatggagcctgtcggtttctgccgtgaggatgccgg

SEQ ID NO: 72677 - DNA, 75 bp, synthetic construct
  source 1..75: mol_type = other DNA
caagccaagtagaagttgataaagtactttattgtaaaaaaatagttaacttttctggcgttaaatggaaacaga

SEQ ID NO: 72678 - DNA, 75 bp, synthetic construct
  source 1..75: mol_type = other DNA
tgctcattcccatgatgttgctgcccaaagccgttcttgccgatggagatcttgccgatatggttcgcaatgtcg

SEQ ID NO: 72679 - DNA, 75 bp, synthetic construct
  source 1..75: mol_type = other DNA
gatgtgcgggttatccgcaatctgattacggaaagtgaagtggcggtggcggggaacagtaaattccgcttcgtg

SEQ ID NO: 72680 - DNA, 75 bp, synthetic construct
  source 1..75: mol_type = other DNA
atgattgagggtaatatagtcactgtagggaaaagactattttctatcatgaatcatgagtatactgcaaagaaa

SEQ ID NO: 72681 - DNA, 75 bp, synthetic construct
  source 1..75: mol_type = other DNA
ggttggaacacggcttcagaattgtggaagtttgaaatctttccccgcaccaccatcatgatgcagcatacttcg

SEQ ID NO: 72682 - DNA, 75 bp, synthetic construct
  source 1..75: mol_type = other DNA
gcgctcctgttggcggtctggtatcagaccttacaagagtatgaacaattggattatcgaactttaagtgactgc

SEQ ID NO: 72683 - DNA, 75 bp, synthetic construct
  source 1..75: mol_type = other DNA
cgttttcagagaatattttggcataacacctcatcagatgatgattaatcagtccggatttattgagagcagaat

SEQ ID NO: 72684 - DNA, 75 bp, synthetic construct
  source 1..75: mol_type = other DNA
ggcgaagttgatggcgatgatccggctgtgttcagaccaatacaaaaatacatcaatggcacatggtataacgtt

SEQ ID NO: 72685 - DNA, 75 bp, synthetic construct
  source 1..75: mol_type = other DNA
ccttcgggaagccgaaggctgggaatggtgcgccgggcgcatggagcctgtcggtgagtgccgtgaggatgccgg

SEQ ID NO: 72686 - DNA, 75 bp, synthetic construct
  source 1..75: mol_type = other DNA
cagccgccgaagccatcaaaacgctgatgcacgcgctgattgatatttcatgcacggcagcaaccgcagaaaaac

SEQ ID NO: 72687 - DNA, 75 bp, synthetic construct
  source 1..75: mol_type = other DNA
gaaggggagtgggcggacagatacaaaggcggcgatgaccatgacacagtattcagtggcggtatcgcggctggt

SEQ ID NO: 72688 - DNA, 75 bp, synthetic construct
  source 1..75: mol_type = other DNA
cgcgggcctatcgtccggcactttccaatggtgccaggcattgattttgccggtacagtgtccgccagctcacat

SEQ ID NO: 72689 - DNA, 75 bp, synthetic construct
  source 1..75: mol_type = other DNA
gccgaagcccttgccacacagtttaaaaataccgaacgtccgacccgtgctcaggcgaaagtgctggaatccgca

SEQ ID NO: 72690 - DNA, 75 bp, synthetic construct
  source 1..75: mol_type = other DNA
cttgggattacgggtacgggtacagtgggcgtgagtcgttgtcacactcagactctgctgacaactttgcatgga

SEQ ID NO: 72691 - DNA, 75 bp, synthetic construct
  source 1..75: mol_type = other DNA
tgggaggagtgctgcttacgggcagtgctcttgccggtgaaacgaaaagtgtgccattgacattgcgcgtactgg

SEQ ID NO: 72692 - DNA, 75 bp, synthetic construct
  source 1..75: mol_type = other DNA
ggtcgtgattaacggtgaaacagttatcagcacgggtattcctgggtttggtattcgggttcagaaaagtagtga

SEQ ID NO: 72693 - DNA, 75 bp, synthetic construct
  source 1..75: mol_type = other DNA
cggtgctgcctgcaatggcgctgttattcccgctgccgtcgttttcagccgggacggaactggatattaaccgca

SEQ ID NO: 72694 - DNA, 75 bp, synthetic construct
  source 1..75: mol_type = other DNA
gatgtgatcatcaaaaaaatcaatggtactgaatatcgcaaagatgcaggttataccctgaactgtgccaatagc

SEQ ID NO: 72695 - DNA, 75 bp, synthetic construct
  source 1..75: mol_type = other DNA
gaatcccgtgatcctgtccagcgcgaaatcgagcaggataagctcattagtcgggcaaagctggcgcatgagcag

SEQ ID NO: 72696 - DNA, 75 bp, synthetic construct
  source 1..75: mol_type = other DNA
gccatcaataacatcgccagaaagctggcacaggatttacgccgcgcccagcaggcgcgtatccggtcacagaaa

SEQ ID NO: 72697 - DNA, 75 bp, synthetic construct
  source 1..75: mol_type = other DNA
acgaggctctgctggacagcatcagctgggttaaggtggatttgacctacttctggcagtacgaacagctcagct

SEQ ID NO: 72698 - DNA, 75 bp, synthetic construct
  source 1..75: mol_type = other DNA
ataaagacgtcatcgcaattgatggaaaaacactccggcattcttatgacaagagtcgccgcaagggagcgattc

SEQ ID NO: 72699 - DNA, 75 bp, synthetic construct
  source 1..75: mol_type = other DNA
ctgaaaatttgaaccaacaggagaaagataaatcaacagatggggataccagaactgacattacctgtatggatg

SEQ ID NO: 72700 - DNA, 75 bp, synthetic construct
  source 1..75: mol_type = other DNA
cggcggaagttgcgccggagtctgcactttcaaacctgatcactctgtatgctgccgataacgagcaggaacaac

SEQ ID NO: 72701 - DNA, 75 bp, synthetic construct
  source 1..75: mol_type = other DNA
agctgaagcggagggaatgaaaagtatacttattgaacaggccaacgaatacatgaacagtaagcaatggcctgg

SEQ ID NO: 72702 - DNA, 75 bp, synthetic construct
  source 1..75: mol_type = other DNA
aaccgaaacggcgtaaagactacaaacagcgaattacagaccatcagcgacagcagctcgtctatgaactgaagt

SEQ ID NO: 72703 - DNA, 75 bp, synthetic construct
  source 1..75: mol_type = other DNA
gcctgaaagcgaaaggactgaaaatctgcgtctggattaacccctatatcggtcaaaaatcccccgtctttaaag

SEQ ID NO: 72704 - DNA, 75 bp, synthetic construct
  source 1..75: mol_type = other DNA
ccggtactggataacccgcgtcttgatgccattctggctgctgctgatgctggttgttttgctacctacatcatg

SEQ ID NO: 72705 - DNA, 75 bp, synthetic construct
  source 1..75: mol_type = other DNA
gaattagcaatatggtatggtaatgagtatattcggttatccagtccgctaacgtttgaaaactctgcccagacc

SEQ ID NO: 72706 - DNA, 75 bp, synthetic construct
  source 1..75: mol_type = other DNA
ctgtcgcttttcggcggctggctgggtgcgcgactggttaagggtaaggcgctgttcaggcagtttgcggggtga

SEQ ID NO: 72707 - DNA, 75 bp, synthetic construct
  source 1..75: mol_type = other DNA
aggtcattcttaatgcggttgacaaactcacccgcccattccgtgttgcacaggccagttcgaaagagctggctg

SEQ ID NO: 72708 - DNA, 75 bp, synthetic construct
  source 1..75: mol_type = other DNA
caatcacccttttctcttcctttagtgccctggtttatggtctggtcgctatcggcggctggttaggtgacaagg

SEQ ID NO: 72709 - DNA, 75 bp, synthetic construct
  source 1..75: mol_type = other DNA
gcagcggctttaacgaggtcgccgcatcgttctcatggaacagcccgaaaaaggccattaacccttatctggaca

SEQ ID NO: 72710 - DNA, 75 bp, synthetic construct
  source 1..75: mol_type = other DNA
tgttgtccgtggtgcagcgcagttttctttaagcaggtaaaaggcgcgaaggtaaaagccagcgcagttatttag

SEQ ID NO: 72711 - DNA, 75 bp, synthetic construct
  source 1..75: mol_type = other DNA
taagcctcaacttaaagaggctgaatttacaatccaagtgcaacaaaaaaagaagtactcatcaactagaatata

SEQ ID NO: 72712 - DNA, 75 bp, synthetic construct
  source 1..75: mol_type = other DNA
tgtgaaggagatacacgcagacatttcccgcgcctgactgagagagcgcaggagccggaaccacaaccagttcgt

SEQ ID NO: 72713 - DNA, 75 bp, synthetic construct
  source 1..75: mol_type = other DNA
atcattgtacaagctcagatttgtggtgctctggcgaccacggctaaaggcgcgatgaccgccttaccccgacaa

SEQ ID NO: 72714 - DNA, 75 bp, synthetic construct
  source 1..75: mol_type = other DNA
cttgtgtattttcaggggcagtttatccactatcccgccaaacctgtttctgtcgtcgatacgaccggggcagga

SEQ ID NO: 72715 - DNA, 75 bp, synthetic construct
  source 1..75: mol_type = other DNA
gtcggcggtgacccgtttggccgctacatgcgtcataccctgcaacaggagcaggtcgacgtcagccatatgtat

SEQ ID NO: 72716 - DNA, 75 bp, synthetic construct
  source 1..75: mol_type = other DNA
attatctatgttgaaaagaaaactaatgcattgggcgttgttgtgacgtatgcacagactgcacgagacgatgct

SEQ ID NO: 72717 - DNA, 75 bp, synthetic construct
  source 1..75: mol_type = other DNA
gggggagatccctcggacagatgaagtctatgaggcatttaaactccatgcccgcagccagagtgttgctgaaaa

SEQ ID NO: 72718 - DNA, 75 bp, synthetic construct
  source 1..75: mol_type = other DNA
taaagcatcctatgttcgtgctgatgcaagcaaagcagcaactgccggttatgtaaaaactaactcagcatatac

SEQ ID NO: 72719 - DNA, 75 bp, synthetic construct
  source 1..75: mol_type = other DNA
caaaccgtgaactggtggatgccgccattgaattggccggagagttttatgcgatgcagggctattcgcatcgtc

SEQ ID NO: 72720 - DNA, 75 bp, synthetic construct
  source 1..75: mol_type = other DNA
tgtggctggatcgcgaaggtggcagcaagattaacaccggcgttggcttctttgatcacatgctggatcagatcg

SEQ ID NO: 72721 - DNA, 75 bp, synthetic construct
  source 1..75: mol_type = other DNA
tgctggcagccctgcgcaacaacccagggttgaacaacgccaaactggcagggcttatcggcatggacaccaaaa

SEQ ID NO: 72722 - DNA, 75 bp, synthetic construct
  source 1..75: mol_type = other DNA
tggctgagccgcaccatgacggtactgtgcactggcatctcatgtgtttcatgcgcaaaaaagaccgccgcgcca

SEQ ID NO: 72723 - DNA, 75 bp, synthetic construct
  source 1..75: mol_type = other DNA
gggctcggtactcctagttcccgcacggtggctgaactggaatctgaaattctgcaactgcgtaaggcgttaaat

SEQ ID NO: 72724 - DNA, 75 bp, synthetic construct
  source 1..75: mol_type = other DNA
ttccggattaccgccgaaaggaaaaatccgtatcgctggagaaaatggttttcctgcatggtctgaaattccacc

SEQ ID NO: 72725 - DNA, 75 bp, synthetic construct
  source 1..75: mol_type = other DNA
gccagcagagtttccaccgttgcaccctttggcacttcccgcgaaaggcgacgaagcgatggtgagtcgtgcagc

SEQ ID NO: 72726 - DNA, 75 bp, synthetic construct
  source 1..75: mol_type = other DNA
gttacggcagcagtaacgcgaaccagcagcgcgttgtcctggttggctggcgcaccacttgcactgctgcgacgc

SEQ ID NO: 72727 - DNA, 75 bp, synthetic construct
  source 1..75: mol_type = other DNA
tccgccagcacgccgccgcgccattcctggagtgcagctttgcattacctgccaggaaatcgcagagctgaaagg

SEQ ID NO: 72728 - DNA, 75 bp, synthetic construct
  source 1..75: mol_type = other DNA
tttctggcgcgtcgtgagcggtgcttacggaaaagcagcaagcgcgctgcatcgggtgaagagtggtatctgtca

SEQ ID NO: 72729 - DNA, 75 bp, synthetic construct
  source 1..75: mol_type = other DNA
caatgcgtaattatgtcgatgctgcaatcgccggggttgttggtggttttggttggtttattcagtatggttctg

SEQ ID NO: 72730 - DNA, 75 bp, synthetic construct
  source 1..75: mol_type = other DNA
aacgaaacaattatttctggcggcaccgcgcatgaaggcggggcggtccatgttattgacacaatgagagtgaat

SEQ ID NO: 72731 - DNA, 75 bp, synthetic construct
  source 1..75: mol_type = other DNA
cggattcttgaagctgaatgctgtgcagatcatatccatatgcttgtggagatcccgcccaaaatgagcgtatcc

SEQ ID NO: 72732 - DNA, 75 bp, synthetic construct
  source 1..75: mol_type = other DNA
catactgacagaacttcagacatgggctggtgaaaatggtctgatctttacgggagcacatgacccgcgtaaacc

SEQ ID NO: 72733 - DNA, 75 bp, synthetic construct
  source 1..75: mol_type = other DNA
agcatccaattgttctcgttgtcattgctggcatagttgtaggcggtattgctggcgtcatagaagcactcagga

SEQ ID NO: 72734 - DNA, 75 bp, synthetic construct
  source 1..75: mol_type = other DNA
aaatacaaacaaagattttgaggtatttgctgtcaatacttccggtgataactatgatatctacgtgaaatatca

SEQ ID NO: 72735 - DNA, 75 bp, synthetic construct
  source 1..75: mol_type = other DNA
caacctgtcacccagcttgccgttatgctgaatttactggtttttattcgttccagtgaactcagatacgcccgc

SEQ ID NO: 72736 - DNA, 75 bp, synthetic construct
  source 1..75: mol_type = other DNA
cgggagcacatgacccgcgtaaaccaatcagtgaaaataccgtaaataaggccctcagagtgatggggtatgaca

SEQ ID NO: 72737 - DNA, 75 bp, synthetic construct
  source 1..75: mol_type = other DNA
aacaaaaaaattgatgatggttgcactggtcagttccactctggccctttcagggtgtggtgcgatgagcacagc

SEQ ID NO: 72738 - DNA, 75 bp, synthetic construct
  source 1..75: mol_type = other DNA
ctacggggccatcatcaccaataacagtgagaaaaaatcaacggtaacactcgaccttcagacattaaaagccag

SEQ ID NO: 72739 - DNA, 75 bp, synthetic construct
  source 1..75: mol_type = other DNA
ggcgtggaagatcgcggcgtgatgacggcgtttatgcgagcactgggatttacggcacaacagggtggctgggag

SEQ ID NO: 72740 - DNA, 75 bp, synthetic construct
  source 1..75: mol_type = other DNA
aaatggcttaaagcgtatatttggcttaaaaaccgtaaaagaatttgttaaagcaattctttatattgttttttt

SEQ ID NO: 72741 - DNA, 75 bp, synthetic construct
  source 1..75: mol_type = other DNA
gcagaactttaaaactagcaatattgcatattcacaactatgtaaaaaattatctttatttaaaagcatacccag

SEQ ID NO: 72742 - DNA, 75 bp, synthetic construct
  source 1..75: mol_type = other DNA
aaggccgataagatggatctgcgggagtctcagggatggctgaaccgtggttatgaaggcgcagcagttggtgca

SEQ ID NO: 72743 - DNA, 75 bp, synthetic construct
  source 1..75: mol_type = other DNA
atcggtggaacgacccttgatattgcacatgtccgcagcaaaatgtcaggtttcacaaaaacctattgtgacccc

SEQ ID NO: 72744 - DNA, 75 bp, synthetic construct
  source 1..75: mol_type = other DNA
ctaataacttctataatagaaattatgaaagatgtttaaaatttgatgatattgaattaagcatcaaatggccaa

SEQ ID NO: 72745 - DNA, 75 bp, synthetic construct
  source 1..75: mol_type = other DNA
gtgaatttatctgctgagaataagcggcaattgtggattcctgagggatttgcacatggttttttagtgctgagt

SEQ ID NO: 72746 - DNA, 75 bp, synthetic construct
  source 1..75: mol_type = other DNA
catcatacggtatcactctatcaaagaaggatgaaaatgcaccgtacttcaacagaataatcggtaatggaattt

SEQ ID NO: 72747 - DNA, 75 bp, synthetic construct
  source 1..75: mol_type = other DNA
tccggcgtgggaacttaaagaacagtgcagccagtggcaaagcgaaatcacctttatcaaccatcgccagaacgc

SEQ ID NO: 72748 - DNA, 75 bp, synthetic construct
  source 1..75: mol_type = other DNA
ccagatattggtatcgaatggccaaaaataaaatcactgatactatctgaaaaagataaaaaacattctagattg

SEQ ID NO: 72749 - DNA, 75 bp, synthetic construct
  source 1..75: mol_type = other DNA
ttggcgaggtgcgtgtgccgcacaaaggcgatgtagtgagtcaggtgattgagggggcctatgaagtgctgggca

SEQ ID NO: 72750 - DNA, 75 bp, synthetic construct
  source 1..75: mol_type = other DNA
tggtttatctcctgttaaccagcaacggcaagtttacggatggtaaagcgttattccatgccgatcataaaaatc

SEQ ID NO: 72751 - DNA, 75 bp, synthetic construct
  source 1..75: mol_type = other DNA
ggcactggagacggtggcgaaccagaccatcaaatcggccagtgtgaaaggggcggatgcaaacgccggtgtcat

SEQ ID NO: 72752 - DNA, 75 bp, synthetic construct
  source 1..75: mol_type = other DNA
ccaggaggatgcacagtattacccgaaagcgcttgcggagctggaggctgtggcggaggtgatacttaagcgagc

SEQ ID NO: 72753 - DNA, 75 bp, synthetic construct
  source 1..75: mol_type = other DNA
tgcgctggccacgtacgggaatattttttccgttacccgtcaggccattatcaacgatgacctgacccagttaac

SEQ ID NO: 72754 - DNA, 75 bp, synthetic construct
  source 1..75: mol_type = other DNA
atgaaaaaggccagcaatcggtggatattgaccgtattgatcagcacgttgtcaatgtcgatgcgctgaatttta

SEQ ID NO: 72755 - DNA, 75 bp, synthetic construct
  source 1..75: mol_type = other DNA
gttccggtatatcaggaagcactgggttgcgttgtgcaacttctgtgatgacggtctggcggaggcggacaataa

SEQ ID NO: 72756 - DNA, 75 bp, synthetic construct
  source 1..75: mol_type = other DNA
gtgacacttcttgcccaattggttacgtttttatttatctgtatggtctggaaagacgggcgcttgttgacagca

SEQ ID NO: 72757 - DNA, 75 bp, synthetic construct
  source 1..75: mol_type = other DNA
gcaggactgcgcaacggaagctgaaattgctactgagttcctctacatcgatgatatcgggttaggtgaaaaagg

SEQ ID NO: 72758 - DNA, 75 bp, synthetic construct
  source 1..75: mol_type = other DNA
gtggagtgggataaagccgctgacccattaaataccagtttatcgcaatggagtgacaataacgttatagtccct

SEQ ID NO: 72759 - DNA, 75 bp, synthetic construct
  source 1..75: mol_type = other DNA
ctgcaaaagaaagcgggaaaatcacgtgtcgtggcctataaatttacgtccggttcatttaattacacggcgtat

SEQ ID NO: 72760 - DNA, 75 bp, synthetic construct
  source 1..75: mol_type = other DNA
aaattatatcaacttttcacgcagaaaaagttattaatgatctgttaaaaaacgattataaaatttccctttctc

SEQ ID NO: 72761 - DNA, 75 bp, synthetic construct
  source 1..75: mol_type = other DNA
cagatacaacttatcgagagttgaataaagcagcacagcgtagcattacagcgccagacaggataggagaaggaa

SEQ ID NO: 72762 - DNA, 75 bp, synthetic construct
  source 1..75: mol_type = other DNA
tacgtccttttaccagcgaagaagagttcgttgacaactacccgtttgtcccgtggcactatcagattctgcaaa

SEQ ID NO: 72763 - DNA, 75 bp, synthetic construct
  source 1..75: mol_type = other DNA
gcgggcggtctgcgcgatattgaggttgaagccgtcaccaaaatgctggcctgcggcacacggatactgggtgta

SEQ ID NO: 72764 - DNA, 75 bp, synthetic construct
  source 1..75: mol_type = other DNA
cgtccgacagttgtgctttccgacgcacagcaggtaaatccggataatatttcgtggggataccgtggcggacgt

SEQ ID NO: 72765 - DNA, 75 bp, synthetic construct
  source 1..75: mol_type = other DNA
ggactcaaccacaaactattaatggcgatttgacggtaaccggaaacggctcatttaacgacgttcagatccgct

SEQ ID NO: 72766 - DNA, 75 bp, synthetic construct
  source 1..75: mol_type = other DNA
cctacattgaacattaaatggccagttcactcagagcttcctaatgtttctgaaaaagattcgataattagatac

SEQ ID NO: 72767 - DNA, 75 bp, synthetic construct
  source 1..75: mol_type = other DNA
cccctccacacccgcccgcagtacgcgctgccgggcgggcgattggcgacaacaccgattcggaatacacctgcc

SEQ ID NO: 72768 - DNA, 75 bp, synthetic construct
  source 1..75: mol_type = other DNA
tctgtcaatgcaacacccctttcaattatctctttcggtgttttgaacttcagtgtctttctcggtctgttgttt

SEQ ID NO: 72769 - DNA, 75 bp, synthetic construct
  source 1..75: mol_type = other DNA
tgggcactccggcagaaactgacgctgagttacgtatccgccagtcgcaaagtgttgcgttgccatcaataaccc

SEQ ID NO: 72770 - DNA, 75 bp, synthetic construct
  source 1..75: mol_type = other DNA
tacctttgcagagtttgaacttaaccgcatcagagagcgaaccagagagggcttagaacgagctaaagcacaagg

SEQ ID NO: 72771 - DNA, 75 bp, synthetic construct
  source 1..75: mol_type = other DNA
atggccctcaatttggacacactcggcttatcggcaacggtaaccgctgaggggatcagtgcgcctgattaccag

SEQ ID NO: 72772 - DNA, 75 bp, synthetic construct
  source 1..75: mol_type = other DNA
gggaaatgtggtggagaaagttattgaaggggcttacgaggtggtgggcgtgtttgaccggatagaggagaagcg

SEQ ID NO: 72773 - DNA, 75 bp, synthetic construct
  source 1..75: mol_type = other DNA
gcatcagcttctggccgcagcattttggcctcattccacagtgggtgaccctggacccccgtgtcttcggctgga

SEQ ID NO: 72774 - DNA, 75 bp, synthetic construct
  source 1..75: mol_type = other DNA
cgaaattttgataccattggtacaaactttagttcgcgacaatgtaaagctaaataatgatgtgtataaagaact

SEQ ID NO: 72775 - DNA, 75 bp, synthetic construct
  source 1..75: mol_type = other DNA
cttagtggcgagcgcgattttgttttcgttggagatcacaatccttgtaaaccgatgagtgaaaatacagtgaac

SEQ ID NO: 72776 - DNA, 75 bp, synthetic construct
  source 1..75: mol_type = other DNA
tggcttcaggaccatggcatgtagctcgttgattgaatcagggctgtggtctaggaacgctgttgaaaggcagat

SEQ ID NO: 72777 - DNA, 75 bp, synthetic construct
  source 1..75: mol_type = other DNA
ctacaatcgccgcgttgaactgtatcgggagaaagaaaaaataacgtaccactggaagaagccggagcggttgcg

SEQ ID NO: 72778 - DNA, 75 bp, synthetic construct
  source 1..75: mol_type = other DNA
atggcgctgacagaacccgattttattgaacgcgatgccgataaaatcacggcagaaatgattgcgaagtatgaa

SEQ ID NO: 72779 - DNA, 75 bp, synthetic construct
  source 1..75: mol_type = other DNA
taatccgcagtattaccggaatcagccagcaggctgacgaacaggccacgcagccggatacagtcaccgctgaaa

SEQ ID NO: 72780 - DNA, 75 bp, synthetic construct
  source 1..75: mol_type = other DNA
ctgagtgaaagcaatccggcttccgcccttaaccatctcaaccatgcgttgcagctcgatccccgctgtggcgtg

SEQ ID NO: 72781 - DNA, 75 bp, synthetic construct
  source 1..75: mol_type = other DNA
aacggcgtggatatgcgcaacatacgcaccagagttctggagatgttgtcgtaccgtcgccgcgtgcagatgtac

SEQ ID NO: 72782 - DNA, 75 bp, synthetic construct
  source 1..75: mol_type = other DNA
gatgatacgcccaacgcgccggtggtgacgcgtgaagcgcagttagatattcagtcgcaatcacaaccgccgaca

SEQ ID NO: 72783 - DNA, 75 bp, synthetic construct
  source 1..75: mol_type = other DNA
aaggcactgcgggtgatgggctacgacacgaaaaaggatatctgtggccacggctttcgggcgatggcatgcagt

SEQ ID NO: 72784 - DNA, 75 bp, synthetic construct
  source 1..75: mol_type = other DNA
gtcattatccccagcgcatcctgttcacgctggccccgcgttatctctcatggggaggggcaagctgtgtgggta

SEQ ID NO: 72785 - DNA, 75 bp, synthetic construct
  source 1..75: mol_type = other DNA
ttgcgcagtgcgggctgacggtggagcaactggccagacaggtggagccggaatacacaccggcgcgaaaagctc

SEQ ID NO: 72786 - DNA, 75 bp, synthetic construct
  source 1..75: mol_type = other DNA
aggagttgatggagccccaaatacgaaagcttccactatagatatagatagcaaaagcaatgttactgtcaatgg

SEQ ID NO: 72787 - DNA, 75 bp, synthetic construct
  source 1..75: mol_type = other DNA
cgacatcaccccggttaatggtgaaaccatgcaggaaattaacggtctgcttacctccatggataaaacatggga

SEQ ID NO: 72788 - DNA, 75 bp, synthetic construct
  source 1..75: mol_type = other DNA
tgagcgtggatgatcgggaaaaaatcgaatttgatgtgctgaattttatctggcgcattgacggtaaggatgtgc

SEQ ID NO: 72789 - DNA, 75 bp, synthetic construct
  source 1..75: mol_type = other DNA
tatatggctatcccgtgccaaccacgccgtggctgaatacagctcccggtttatttattgacggctatacatcgg

SEQ ID NO: 72790 - DNA, 75 bp, synthetic construct
  source 1..75: mol_type = other DNA
atatattcctgagatattttatgaggcctgcaaacatctccagtcatttttttatcatcaggagacgtcacaaaa

SEQ ID NO: 72791 - DNA, 75 bp, synthetic construct
  source 1..75: mol_type = other DNA
attgccattaacgacgcgcaggccgcagcatgggcggagtatcaggcgctggaaggcgatataaccgagatggtg

SEQ ID NO: 72792 - DNA, 75 bp, synthetic construct
  source 1..75: mol_type = other DNA
atgtgccgcagaaacaggaatttgtcgaacgtattcgtgcggcgctggggacaccaaaatcaccggatgagatga

SEQ ID NO: 72793 - DNA, 75 bp, synthetic construct
  source 1..75: mol_type = other DNA
gttgcagtggtgggctgattaccttaatgccttgaaagataggtttatcagtccctttgattttacaacaaagta

SEQ ID NO: 72794 - DNA, 75 bp, synthetic construct
  source 1..75: mol_type = other DNA
gaaggtcaacctgaagagccacctgttgcagagacacaatctttccaaccggaaagtggtatcgatcaacagtgg

SEQ ID NO: 72795 - DNA, 75 bp, synthetic construct
  source 1..75: mol_type = other DNA
cgaacagttgctgcatatcacctggccggaactgaagccgcgcaacaatctggtgctggaaaaaccgaccattct

SEQ ID NO: 72796 - DNA, 75 bp, synthetic construct
  source 1..75: mol_type = other DNA
atactcagtgataacggcggcagaagcctgtattttgagcacctgtttcccggtgaggacggttacagccgcagc

SEQ ID NO: 72797 - DNA, 75 bp, synthetic construct
  source 1..75: mol_type = other DNA
aatcccctgctcggtgcaaaggtccttcccggtgaaaccgacatcgccctgcccggcccgctgccgttcatcctc

SEQ ID NO: 72798 - DNA, 75 bp, synthetic construct
  source 1..75: mol_type = other DNA
gtgccttttccccggagttcaagcttgaagctatcaagcaggtggttaaataccagcgtgatgtcagagaagtcg

SEQ ID NO: 72799 - DNA, 75 bp, synthetic construct
  source 1..75: mol_type = other DNA
atacttttattaccctataataaatcactggagatgtatgaacttaacgagcaaaagatccagtatttgactacc

SEQ ID NO: 72800 - DNA, 75 bp, synthetic construct
  source 1..75: mol_type = other DNA
tatgattgcgtgatgcctgtttatcagttcgatcgtgatttttctctggtgcaggccgtaccgcgtaacgtgccc

SEQ ID NO: 72801 - DNA, 75 bp, synthetic construct
  source 1..75: mol_type = other DNA
gaagctggaaggaaaaccgcttccgtcacaggcgccgacactgaaatgggccagtctgaaactggcgaaactggg

SEQ ID NO: 72802 - DNA, 75 bp, synthetic construct
  source 1..75: mol_type = other DNA
tgatgatactaaagtcattcttattgacactgctcgtggacctcttgtacttaaagtttatgcgccaaagcataa

SEQ ID NO: 72803 - DNA, 75 bp, synthetic construct
  source 1..75: mol_type = other DNA
tcgaagttgccgcccgtttacagcagcgtactaccgcgattatgcgctttgccgttcagagcggcttaatcgact

SEQ ID NO: 72804 - DNA, 75 bp, synthetic construct
  source 1..75: mol_type = other DNA
tcctgaacgttggggaaagcatctacgtaactgggactacatatcagaagtctacctgaatccagaaaaagaggc

SEQ ID NO: 72805 - DNA, 75 bp, synthetic construct
  source 1..75: mol_type = other DNA
attcactgaacccgcttccctcaatacctggccgatagcctgtagtgatggacaattacatgaggtgaagtacgg

SEQ ID NO: 72806 - DNA, 75 bp, synthetic construct
  source 1..75: mol_type = other DNA
agcatcgagcgatggtcagtttttcccgacagcgcggcatggcgaagccatgaacatggtcaatgccaaatatgg

SEQ ID NO: 72807 - DNA, 75 bp, synthetic construct
  source 1..75: mol_type = other DNA
atgattaaagtcttaattgtcgatgatgaaccgttagcacgggagaacctgcgcgtatttttgcaggagcagagc

SEQ ID NO: 72808 - DNA, 75 bp, synthetic construct
  source 1..75: mol_type = other DNA
aacaaagaagtgctgttatgtgcaggcgcgattgcctcaccgcagatcctgcaacgctccggcgtcggcaacgct

SEQ ID NO: 72809 - DNA, 75 bp, synthetic construct
  source 1..75: mol_type = other DNA
ttgaccatctgaaaacccttattgcaaagggcgcaaatcagtgtgcgcgggcaggggataaattaccggatttac

SEQ ID NO: 72810 - DNA, 75 bp, synthetic construct
  source 1..75: mol_type = other DNA
ctgatttacacgctgcgtaaggcacaccgcactggcgcgaagttcatgatgaacaacaacagcctgtttgccatc

SEQ ID NO: 72811 - DNA, 75 bp, synthetic construct
  source 1..75: mol_type = other DNA
agaagccaaaagggttcctggcgtatgaatccaccgatgaaaccgataaggttcgtgcgttcggtaaacttcagc

SEQ ID NO: 72812 - DNA, 75 bp, synthetic construct
  source 1..75: mol_type = other DNA
gattaaagaattatctttctctacattcaatctcaaaagactggataaagtagaattcatctattccactctcta

SEQ ID NO: 72813 - DNA, 75 bp, synthetic construct
  source 1..75: mol_type = other DNA
ctgcggccataaccacagcctgaccataacccagtatctccaggcgctgatctccaccattcctggcaccgtcca

SEQ ID NO: 72814 - DNA, 75 bp, synthetic construct
  source 1..75: mol_type = other DNA
cgctgccgctgggcaatgcgcagatggatcctattgcctgcgaaaatggccaccgtctgctggagttggtggagc

SEQ ID NO: 72815 - DNA, 75 bp, synthetic construct
  source 1..75: mol_type = other DNA
gtgcgtaactctccattgtgggaacaggatccgcgccagcagcttgcctatctttgcacgaaacgatgggctcgc

SEQ ID NO: 72816 - DNA, 75 bp, synthetic construct
  source 1..75: mol_type = other DNA
accttcgccatgtgcttggcgtcatagcagactggccggtcaaccgggtcagcgaactgcttccgtggcgcatag

SEQ ID NO: 72817 - DNA, 75 bp, synthetic construct
  source 1..75: mol_type = other DNA
gccagaatttcccatcctttcagccgtggactcatccgatttttgtcttgaatgcctgctgaatgccatcaaaaa

SEQ ID NO: 72818 - DNA, 75 bp, synthetic construct
  source 1..75: mol_type = other DNA
tatatattcaggtgtacagggatttgttgtcaggcagtttgttcatgaaggacagttgataaaaaaaggggatcc

SEQ ID NO: 72819 - DNA, 75 bp, synthetic construct
  source 1..75: mol_type = other DNA
atatcatgggggcgctgaatctgaaagcactgacgtcaccgctaatctgcgaatataaaaccattaatgaatata

SEQ ID NO: 72820 - DNA, 75 bp, synthetic construct
  source 1..75: mol_type = other DNA
gcggtatgctggtggattctcaggcgattaagctgatgaaaattggggctgcaacccgccagaaagccactgcgt

SEQ ID NO: 72821 - DNA, 75 bp, synthetic construct
  source 1..75: mol_type = other DNA
ctgtagcaggatcaaaagagtggcgggaagcgtggcaaaaacgggcttttgctcacatttcaaatggttataaac

SEQ ID NO: 72822 - DNA, 75 bp, synthetic construct
  source 1..75: mol_type = other DNA
cggctgtgggcctacgtccgtgatgaccgtaatgccggttcacagatgcccccggcggtctggttcgcgtactca

SEQ ID NO: 72823 - DNA, 75 bp, synthetic construct
  source 1..75: mol_type = other DNA
gaacaacagcagcctgtttgccattcgtctgctgaaggataacgacggaaattatctgtggcgtccgggcattga

SEQ ID NO: 72824 - DNA, 75 bp, synthetic construct
  source 1..75: mol_type = other DNA
atataggtacaaaagatccagtcaccgggttaaacacttttatttatgataatgtaggtgaggcaaatatcagag

SEQ ID NO: 72825 - DNA, 75 bp, synthetic construct
  source 1..75: mol_type = other DNA
gaccattggtagcagcagctttgtcgatcggagagatgaaaggtgttgcatcgccagaaaggcgtttcctgcggc

SEQ ID NO: 72826 - DNA, 75 bp, synthetic construct
  source 1..75: mol_type = other DNA
tacggtaatgccagtgcaggatacagtcacagtgggggctaccggcaactgtattatgggctgagtggcggtatt

SEQ ID NO: 72827 - DNA, 75 bp, synthetic construct
  source 1..75: mol_type = other DNA
tgtgatttctgacttccctcccgtttcggtagaaaaattcaacctctgttcagtgatggcacaccatagaccatg

SEQ ID NO: 72828 - DNA, 75 bp, synthetic construct
  source 1..75: mol_type = other DNA
tatggtggcaccagcgattatgcctatctgaatctgaaaacaggactgaatatcgggagctggcgtcttcgggac

SEQ ID NO: 72829 - DNA, 75 bp, synthetic construct
  source 1..75: mol_type = other DNA
gacgccgtgggcaggctcagggcacagacggatgccgcaggcaggacaacagagtacagcccggatgtggtgacg

SEQ ID NO: 72830 - DNA, 75 bp, synthetic construct
  source 1..75: mol_type = other DNA
gtgctttgccagttgtgggctgaaagaaaacgtaaactgttgatcatttgtcctgcttcactgcgtcgccaatgg

SEQ ID NO: 72831 - DNA, 75 bp, synthetic construct
  source 1..75: mol_type = other DNA
ttgccgttattggtagcgatggttcaggcaagtcaacggtgtgtgaacatcttattaccgttgtcgaaaaatatg

SEQ ID NO: 72832 - DNA, 75 bp, synthetic construct
  source 1..75: mol_type = other DNA
gcgccatcgtcgtccgttaccggcacaccttccccgtgaaatataccgcctggagcctgaagaaagctgttgccc

SEQ ID NO: 72833 - DNA, 75 bp, synthetic construct
  source 1..75: mol_type = other DNA
ccgttgctgtttatggtttgaacaaacacaaccctgacgaaaaccatccacacgatcctttcaaccactacggca

SEQ ID NO: 72834 - DNA, 75 bp, synthetic construct
  source 1..75: mol_type = other DNA
cgtttcttgttgggctggtaagcagcaatgtaatggcattgactctggatgaagccagaactcaggggcgggtag

SEQ ID NO: 72835 - DNA, 75 bp, synthetic construct
  source 1..75: mol_type = other DNA
aattgctggatggggttgaggttgagtggttgccattggggaacgtcgctgaaatttatggtggcctaacaggaa

SEQ ID NO: 72836 - DNA, 75 bp, synthetic construct
  source 1..75: mol_type = other DNA
ctgacgaagtatatggtgacctgcactcgacggatgatttcttcaccgaaaccacgccgtatgcgccgagcagcc

SEQ ID NO: 72837 - DNA, 75 bp, synthetic construct
  source 1..75: mol_type = other DNA
cagggcgtatctggaggtatgtccgggatgatcgcaatgtgggttcgtcatctcctccagcggtctggttcgcgt

SEQ ID NO: 72838 - DNA, 75 bp, synthetic construct
  source 1..75: mol_type = other DNA
gagccattctgaatatcgacgggccgccgatcccggacgcacgatcctccaggcttgaaatactttgcagccaga

SEQ ID NO: 72839 - DNA, 75 bp, synthetic construct
  source 1..75: mol_type = other DNA
caaaaggaggcactaaataagtttgctgattatgtgttatctttggctgacgttaaaccaatccgatcaaagaac

SEQ ID NO: 72840 - DNA, 75 bp, synthetic construct
  source 1..75: mol_type = other DNA
cacgcgtctgggggatgggcacgtcagcatcgagcgatggtcagtttttcccgacagcgcggcatggcgaagcca

SEQ ID NO: 72841 - DNA, 75 bp, synthetic construct
  source 1..75: mol_type = other DNA
caggatatatctggacgtatgtccgggatgaccgaaatgccgcttcgccagaacctccggcggtctggttcgcct

SEQ ID NO: 72842 - DNA, 75 bp, synthetic construct
  source 1..75: mol_type = other DNA
gttggccgatcgaacgcgctctcgctggggtaaatttcgtccgtgggtactgtttggcgcactgccattcgggat

SEQ ID NO: 72843 - DNA, 75 bp, synthetic construct
  source 1..75: mol_type = other DNA
aatggtcagcttctatggctggaaccgcattgaccgctttatggcagcctggaaacgcgccggattcagcgtggt

SEQ ID NO: 72844 - DNA, 75 bp, synthetic construct
  source 1..75: mol_type = other DNA
tatcaatagcgtaatcaacgtcccacaggtgctggaaacactgggcggcgagacagctgtgcagcaagttctgat

SEQ ID NO: 72845 - DNA, 75 bp, synthetic construct
  source 1..75: mol_type = other DNA
acagcgcacaagctatccctatctctctcaggtgaataccgttgaccctcagcaaatgatgatgatggtcactct

SEQ ID NO: 72846 - DNA, 75 bp, synthetic construct
  source 1..75: mol_type = other DNA
ggcaaatggatttacgacctctgcacgttctattgggacaactgtgctgaataatgattctgcgcaatacagcat

SEQ ID NO: 72847 - DNA, 75 bp, synthetic construct
  source 1..75: mol_type = other DNA
atgtcccgttttgtcctcggtaactgcatcgatgttatggcccgtatccctgataacgccattgatttcatactg

SEQ ID NO: 72848 - DNA, 75 bp, synthetic construct
  source 1..75: mol_type = other DNA
aaaacaaaggtctgagtctttccggcattattgccgcgattaccggcgttcgcccgcaaggcccgtggggaaaac

SEQ ID NO: 72849 - DNA, 75 bp, synthetic construct
  source 1..75: mol_type = other DNA
gagcacacacacactcactagccaacgtgaacacggctagtgctaactccggtgctggtagtgcatcaacaagat

SEQ ID NO: 72850 - DNA, 75 bp, synthetic construct
  source 1..75: mol_type = other DNA
cgtgcgtgaagttaacctgctcggccagaacgtgaacgcctggcgcggtgagaactacgacggcaccaccggatc

SEQ ID NO: 72851 - DNA, 75 bp, synthetic construct
  source 1..75: mol_type = other DNA
ctgaagatgactgggctggatggaaaatcctgcatggtgcattgggagagcagatagaattggttggcgacgatc

SEQ ID NO: 72852 - DNA, 75 bp, synthetic construct
  source 1..75: mol_type = other DNA
tttcatatgtgcatttaaagattattatggtgtcacgccatctcattattttgagaaaataatcggcgtcacaga

SEQ ID NO: 72853 - DNA, 75 bp, synthetic construct
  source 1..75: mol_type = other DNA
cgtgacctgacggggtggatgtcgctgtcgcgtaaaccggaggagacctggtacgggtgggacggtgacaggctg

SEQ ID NO: 72854 - DNA, 75 bp, synthetic construct
  source 1..75: mol_type = other DNA
gatgaaaagcgctctctgcacgcatatttaacgtggcagcttcataccccggcgaatatgacgggaatgaaaagc

SEQ ID NO: 72855 - DNA, 75 bp, synthetic construct
  source 1..75: mol_type = other DNA
aaaaagaggccgacttgatgcaggcctttgcacagaaaatggggtactgcctggctcctgacccctattaccacc

SEQ ID NO: 72856 - DNA, 75 bp, synthetic construct
  source 1..75: mol_type = other DNA
aagaagcactcaccatgtcggacaggattgtggtgatgcgcgatggtcgcattgagcaagacggcacgccgcgtg

SEQ ID NO: 72857 - DNA, 75 bp, synthetic construct
  source 1..75: mol_type = other DNA
tcgatataagccattctatagtaagtcaatatctggaaagccagcataagctgacgagaggtcctctgactgaca

SEQ ID NO: 72858 - DNA, 75 bp, synthetic construct
  source 1..75: mol_type = other DNA
tgcgtgaaaaggcagaaaaagcaacgtggggagactgggactcatataaaccacaccgtggcgcacgtggttata

SEQ ID NO: 72859 - DNA, 75 bp, synthetic construct
  source 1..75: mol_type = other DNA
gaaaaaataccgtgtgctactgaatcgcgttcagccggaaaatgccccggatattgaatggccggaactaccgca

SEQ ID NO: 72860 - DNA, 75 bp, synthetic construct
  source 1..75: mol_type = other DNA
gcggtgaagtcacggaagaagataaatcagtagccagcgaactactgaagcggagactggagcagatgaagcaga

SEQ ID NO: 72861 - DNA, 75 bp, synthetic construct
  source 1..75: mol_type = other DNA
tttatttacactggataacgctgcttttcattgcaatcacttatgccgcaatggaactccgtggctggtttccca

SEQ ID NO: 72862 - DNA, 75 bp, synthetic construct
  source 1..75: mol_type = other DNA
ttcgtgaccgtcaggggcgtaccattgccggcgataaaaccgatgaatggctgcaaccggcctgtaatgagatgt

SEQ ID NO: 72863 - DNA, 75 bp, synthetic construct
  source 1..75: mol_type = other DNA
gcaaggtcctaaaggtgaacgaggagaagccggaccacagggaccgatgggagcacgaggtgagcgtggggagac

SEQ ID NO: 72864 - DNA, 75 bp, synthetic construct
  source 1..75: mol_type = other DNA
attctgcaatttcgggacggtacactgtccaagcaccttataaagcgggtgccgggattggcgtcctggaaatgt

SEQ ID NO: 72865 - DNA, 75 bp, synthetic construct
  source 1..75: mol_type = other DNA
aacccggtgagcgtgggcctcagggattacaggggccaccgggtccagccggagagagagggccgacaggcgaag

SEQ ID NO: 72866 - DNA, 75 bp, synthetic construct
  source 1..75: mol_type = other DNA
ttaagcgattgacggtaaaaccaggtgaaagtatctcacttcagatgcatcaccatcgtgctgagcattggattg

SEQ ID NO: 72867 - DNA, 75 bp, synthetic construct
  source 1..75: mol_type = other DNA
attgaaaatattgatttttctgacgcttatgaaaagtcgattgaagaccgaatgaaagcagaagtcgccattgcc

SEQ ID NO: 72868 - DNA, 75 bp, synthetic construct
  source 1..75: mol_type = other DNA
atgccgaagcgggcaagttggtgacttttggcattgtgccaaggcatccagaaacaggttatgggtatattcgtc

SEQ ID NO: 72869 - DNA, 75 bp, synthetic construct
  source 1..75: mol_type = other DNA
ccgcccggatattcttgaagcatgcgaaaaggcaatgagtgctgttgagcctgaccttaattttattcgcgttga

SEQ ID NO: 72870 - DNA, 75 bp, synthetic construct
  source 1..75: mol_type = other DNA
tggccacctggtcttcaccaaaaactacacatccaaatctgcgtatgtcgcgtaccgtcacgaatgcgcttacat

SEQ ID NO: 72871 - DNA, 75 bp, synthetic construct
  source 1..75: mol_type = other DNA
cgccggcgataaaaccgatgagtggctgcaaccggcctgtaatgaaatgttccgcgtgctgaaaaaagacgcgtt

SEQ ID NO: 72872 - DNA, 75 bp, synthetic construct
  source 1..75: mol_type = other DNA
accgcgtgctgaaaaaaaacgcgttaatggtcagcttctatggctggaaccgcattgaccgctttatggcagcct

SEQ ID NO: 72873 - DNA, 75 bp, synthetic construct
  source 1..75: mol_type = other DNA
gcaccgattgacgaaaagcttatggcgcttcacaagtggttttgggaacaaagtgaagccgagcgcgccgctggc

SEQ ID NO: 72874 - DNA, 75 bp, synthetic construct
  source 1..75: mol_type = other DNA
ggggagcgagtgatgttctccccgcccggaaacgtcacgccggagggcttcttcgggatagacggcctgcggatt

SEQ ID NO: 72875 - DNA, 75 bp, synthetic construct
  source 1..75: mol_type = other DNA
tggttccggcaggagctggagccggcgctgaagcgcaagggatggtggggaccgcgtgacacgactgacccggta

SEQ ID NO: 72876 - DNA, 75 bp, synthetic construct
  source 1..75: mol_type = other DNA
gtgaggcttgtggtaataccatgattgttcatgcggtatctggaagtttgcatggctattatgtttgtccgatga

SEQ ID NO: 72877 - DNA, 75 bp, synthetic construct
  source 1..75: mol_type = other DNA
cctcttcagcctgtgcaccggagactggcctgcaacaactggttgccaccctcatccctgatgaacagcgcatca

SEQ ID NO: 72878 - DNA, 75 bp, synthetic construct
  source 1..75: mol_type = other DNA
tatcaaccagctggctgaacgaattgaatcgctggagaagaagaatggcgagatgggaagatcgctggaagccgc

SEQ ID NO: 72879 - DNA, 75 bp, synthetic construct
  source 1..75: mol_type = other DNA
ctcgtccctgatgaacagcgcatcagcttctggccgcagcactttggcctcattccacagtgggtgaccctggag

SEQ ID NO: 72880 - DNA, 75 bp, synthetic construct
  source 1..75: mol_type = other DNA
tggtggaagaccaggtgaaaacccacagcgaagccaacctgaagtacatggacctggagaaaaagtcgaagacct

SEQ ID NO: 72881 - DNA, 75 bp, synthetic construct
  source 1..75: mol_type = other DNA
ctggcacgatattttcaccttgatgaagcagacaaggaatttatcggaaaaagcagaggtgatcacaacggcact

SEQ ID NO: 72882 - DNA, 75 bp, synthetic construct
  source 1..75: mol_type = other DNA
catcttttcaactctgggtgatgttcctatcaaagagatccgccccaaaatgctcaagcagcatcttgacccaat

SEQ ID NO: 72883 - DNA, 75 bp, synthetic construct
  source 1..75: mol_type = other DNA
cgcttcatggttgctttatctaacgcatctatacggttagaaacccgtatgctgatcgagtggcaattgttgacg

SEQ ID NO: 72884 - DNA, 75 bp, synthetic construct
  source 1..75: mol_type = other DNA
cgggcattgcctacggcacctccgccggcagtgccggctactggtttttgcagtggttggatcaggtcagtccat

SEQ ID NO: 72885 - DNA, 75 bp, synthetic construct
  source 1..75: mol_type = other DNA
acgcgcggtggcttttgtcgagagtgagattgatgaatggattaaggcagtcattagtaactcaagatctcatgc

SEQ ID NO: 72886 - DNA, 75 bp, synthetic construct
  source 1..75: mol_type = other DNA
tgaaagtgaaaaaggtaccacttgaacataatgatatagtaaactacagcgcattgagatgtccatttattcacc

SEQ ID NO: 72887 - DNA, 75 bp, synthetic construct
  source 1..75: mol_type = other DNA
gccgatggtgtaaaggatggtcgttttatcgtgacgccacctctgtttgcgatgaagggaaaaaaagagaatacc

SEQ ID NO: 72888 - DNA, 75 bp, synthetic construct
  source 1..75: mol_type = other DNA
actccacggtcggcgtcatacaaacccgcaaggcgttgcaggcagcgggcatgacttttcgcgtcagcgatattc

SEQ ID NO: 72889 - DNA, 75 bp, synthetic construct
  source 1..75: mol_type = other DNA
caactgtcgacatcgactgtaaaggaaaatcggtgtccaggtcgtcgattgctaaaatcgagtttctgccgccct

SEQ ID NO: 72890 - DNA, 75 bp, synthetic construct
  source 1..75: mol_type = other DNA
aagattatgtcagcgcggaactgggcgaaccaggtcccttctcccgggctttctggtttcatggcacccggactt

SEQ ID NO: 72891 - DNA, 75 bp, synthetic construct
  source 1..75: mol_type = other DNA
gaaaacgccattcagcttatcgaagatggcctgcgcgaagtgtcgtgcggctatgacgcggagtacgagcagacc

SEQ ID NO: 72892 - DNA, 75 bp, synthetic construct
  source 1..75: mol_type = other DNA
aagcagcaaacctggcggcaactctgagggaaatggaaacaaaggcggtcgcgatcaagggccacctgatttaga

SEQ ID NO: 72893 - DNA, 75 bp, synthetic construct
  source 1..75: mol_type = other DNA
gtcgtgtatatactgagtacaggagtacagctttagctggttctttatggtcaccaacccatcatgcttggtatg

SEQ ID NO: 72894 - DNA, 75 bp, synthetic construct
  source 1..75: mol_type = other DNA
agagagcagattttggaatatcccttcagaattcatgaaaatgaaacgcccacataaggttccattgagtaaaga

SEQ ID NO: 72895 - DNA, 75 bp, synthetic construct
  source 1..75: mol_type = other DNA
atgcttatgcttatgctgatggcgataaagcgagtagtaatctgaatataaatctttccgatggctcagtctgga

SEQ ID NO: 72896 - DNA, 75 bp, synthetic construct
  source 1..75: mol_type = other DNA
ctgctgtttttctgacggatggttctgtgtggaatggtgctgtttccattaacgcgccagtggaccgcgcatcag

SEQ ID NO: 72897 - DNA, 75 bp, synthetic construct
  source 1..75: mol_type = other DNA
cgggaagtacatctcagtggaagacgttttcattatctctaacaaactgtcaaaatacaggtcgtgtacaggcat

SEQ ID NO: 72898 - DNA, 75 bp, synthetic construct
  source 1..75: mol_type = other DNA
gtgggcagagtattcagatcccaagtcacgttggacagcacgtaaagggctgttttggggcgcggctgaaggtgg

SEQ ID NO: 72899 - DNA, 75 bp, synthetic construct
  source 1..75: mol_type = other DNA
cggtttaagtctgtggggaaatatcgccagtggtgaccacagcacaggctcggggctcacctggttcggtaaaac

SEQ ID NO: 72900 - DNA, 75 bp, synthetic construct
  source 1..75: mol_type = other DNA
ggagcgcatgtctggatattttttgcttcacgagtttcggcccgcgaagctcgccgtctggggactgctattatt

SEQ ID NO: 72901 - DNA, 75 bp, synthetic construct
  source 1..75: mol_type = other DNA
gagctacttgaagaaaacggaatttcactaaaagttgatagtatagatgctgcacctggtaatgagtttgttgtt

SEQ ID NO: 72902 - DNA, 75 bp, synthetic construct
  source 1..75: mol_type = other DNA
gtgatgagctgggtgtacccgctgcgctggaaatatcccgttcacgtcagggagcgcatgtctggatattttttg

SEQ ID NO: 72903 - DNA, 75 bp, synthetic construct
  source 1..75: mol_type = other DNA
atctgatcgcgttccgcatcccatctgaattgcaggatgagtttaatcggtctgttctcgcttctggaggagata

SEQ ID NO: 72904 - DNA, 75 bp, synthetic construct
  source 1..75: mol_type = other DNA
ttggtggcgtgctggcgttaacgccaggcaatatccgccgtacggaaaaactgctgtcactgcagccggtggagg

SEQ ID NO: 72905 - DNA, 75 bp, synthetic construct
  source 1..75: mol_type = other DNA
gattaccggtaagcaggtgccggaaatcattttgctgaattcacatgatggcaccagttcgtaccagatgttgcc

SEQ ID NO: 72906 - DNA, 75 bp, synthetic construct
  source 1..75: mol_type = other DNA
tttctgcagacgattaacattctgccggtcgcagaaatgaagggtgagaaaatcggcgtcggtgtgaccggtact

SEQ ID NO: 72907 - DNA, 75 bp, synthetic construct
  source 1..75: mol_type = other DNA
ccgcactcgtgctgttaccggtattgatggcgatgtgaagcttaatcgtgccctgtgggtaatggcagaaaacat

SEQ ID NO: 72908 - DNA, 75 bp, synthetic construct
  source 1..75: mol_type = other DNA
acattctcgaatatgccaggcagcagaaatgtattgggcaactttgtaaaattccaccaggagatatggttgaaa

SEQ ID NO: 72909 - DNA, 75 bp, synthetic construct
  source 1..75: mol_type = other DNA
atcagacatacagacacagacgaaatactctcgcgtctgagtaaacaccatcatttatatgagaaaaagaaaaca

SEQ ID NO: 72910 - DNA, 75 bp, synthetic construct
  source 1..75: mol_type = other DNA
gattacctgtatcagcaccctgaacgacgtgctgccggtggtcagctcacgtcagcacagctcggtctgcccgcc

SEQ ID NO: 72911 - DNA, 75 bp, synthetic construct
  source 1..75: mol_type = other DNA
aggggcctggatcctccgcagatctattatattcgagggtggtaatttatgggaaggtgtgggccgatatcattc

SEQ ID NO: 72912 - DNA, 75 bp, synthetic construct
  source 1..75: mol_type = other DNA
atgaaatcaatggataagttaacaacaggtgtcgcctatggcacctctgcaggcagtgctggctactggttttta

SEQ ID NO: 72913 - DNA, 75 bp, synthetic construct
  source 1..75: mol_type = other DNA
catcgtacagatttgttgaatgaacggcggccaatgatgcaggcatggggagattacgttatgtctgcgatctct

SEQ ID NO: 72914 - DNA, 75 bp, synthetic construct
  source 1..75: mol_type = other DNA
aggctacacccacgagctgctgggcactaataacgttaatggcctgtcggaaattctgattggtcagggcgatat

SEQ ID NO: 72915 - DNA, 75 bp, synthetic construct
  source 1..75: mol_type = other DNA
gattgaagcaacgtcaaaccaggtcaatcaatttggcggttataccggaatgacaccggcagactttcgcgaatt

SEQ ID NO: 72916 - DNA, 75 bp, synthetic construct
  source 1..75: mol_type = other DNA
gatctgccgctggaagcgaaagcggtgctcgattcgatggtgaacatcgacgcgcagttgaacgaactgaccttt

SEQ ID NO: 72917 - DNA, 75 bp, synthetic construct
  source 1..75: mol_type = other DNA
atttgcaggtcaggtttggtgacgggccgtggcaggatgttaaggggctgaatgaagtgggcagtgatacaggca

SEQ ID NO: 72918 - DNA, 75 bp, synthetic construct
  source 1..75: mol_type = other DNA
gacgacctaccagcgtattcaggagaacctgatcaaaggcgggttaaacgggcgcacggcaaaaggtggtcgcac

SEQ ID NO: 72919 - DNA, 75 bp, synthetic construct
  source 1..75: mol_type = other DNA
acgatacgatacatcgatggtttattgcggtgataacctgaagggcgagattgaggcaatttatagtagccttga

SEQ ID NO: 72920 - DNA, 75 bp, synthetic construct
  source 1..75: mol_type = other DNA
atgtttctgaaaacagaacaatttgaatataacggtgtgtccgtcacgctttccgaactgtctgcgctgcagcgt

SEQ ID NO: 72921 - DNA, 75 bp, synthetic construct
  source 1..75: mol_type = other DNA
caagatagcaatgggcgtaaggcgactattaatctttggcagattgatgaaacgcataacacggttgcccttgaa

SEQ ID NO: 72922 - DNA, 75 bp, synthetic construct
  source 1..75: mol_type = other DNA
atgattctaggtaatgattacgttgatttagctccgcttttccaggctcatagcactagaaactatctgctctct

SEQ ID NO: 72923 - DNA, 75 bp, synthetic construct
  source 1..75: mol_type = other DNA
ctcaaaaagccagtgagtcatcacaaagtgcagcagatgctgagttgtcaaaaaagacggcagaaagtgcagccg

SEQ ID NO: 72924 - DNA, 75 bp, synthetic construct
  source 1..75: mol_type = other DNA
tgtaaacgtagttaccgagaatagccagatggttgtaaaccacggcgtaggcttcactgtacagatcacagtagc

SEQ ID NO: 72925 - DNA, 75 bp, synthetic construct
  source 1..75: mol_type = other DNA
tcaaaaaagacggcagaaagtgcagccggtaatgcagccagggatgcaacgaccgcaacagaaaaagcccgggag

SEQ ID NO: 72926 - DNA, 75 bp, synthetic construct
  source 1..75: mol_type = other DNA
cggatgttattgaagtttattccggcggcgtgcttgatgttagaggtggtacggcaactaatattactcagcacg

SEQ ID NO: 72927 - DNA, 75 bp, synthetic construct
  source 1..75: mol_type = other DNA
taccagctgatgccctgtgtgaaaacagttctcaggtgaaaattcagctaagtcgaagcgcctcacgagcattga

SEQ ID NO: 72928 - DNA, 75 bp, synthetic construct
  source 1..75: mol_type = other DNA
gacatctgggcgtaccgtttacctgtatcgggcaaatgaccgccgatatcgaagggctttgttttattcgtgacg

SEQ ID NO: 72929 - DNA, 75 bp, synthetic construct
  source 1..75: mol_type = other DNA
agcgatccgcaggattgctttggtctgatggtcggcagcactgttcattctgagtatcaggcagaactgaatgtt

SEQ ID NO: 72930 - DNA, 75 bp, synthetic construct
  source 1..75: mol_type = other DNA
ggtctgggaggaagtgaaaaacaggcagaggaaggtgagtttgaaaccgtgatgctgtctccccgttcagagcag

SEQ ID NO: 72931 - DNA, 75 bp, synthetic construct
  source 1..75: mol_type = other DNA
cccgctgacacatgaagaactgatgcactatgtgcccagtatttttggggaagaccggcatacctcccgcagtga

SEQ ID NO: 72932 - DNA, 75 bp, synthetic construct
  source 1..75: mol_type = other DNA
gcggcagccggttctgcgacttcagcagctggatcagcaactgctgcggctaacagccagaaagctgcgaagacg

SEQ ID NO: 72933 - DNA, 75 bp, synthetic construct
  source 1..75: mol_type = other DNA
cgcgcgtggatgccgcgattgaagagagcgtcattgcccatatgaacgaattattaatcgccctgagcgatgacg

SEQ ID NO: 72934 - DNA, 75 bp, synthetic construct
  source 1..75: mol_type = other DNA
caattattgtcgcaattgctatcgccaccattggaattgaaaccaaaggtgtctccgttgaaagtttaagtattg

SEQ ID NO: 72935 - DNA, 75 bp, synthetic construct
  source 1..75: mol_type = other DNA
caatatctggatgattcagagaggctactgaagaacgttgccggcgactggattaaaaatcctgagcaatatgaa

SEQ ID NO: 72936 - DNA, 75 bp, synthetic construct
  source 1..75: mol_type = other DNA
acagtgctggaaagcctgcagcgggaaggttttcagccattcttcgcctgccagacccgtgtgcgcgacccgggc

SEQ ID NO: 72937 - DNA, 75 bp, synthetic construct
  source 1..75: mol_type = other DNA
aactatagacgaaccgattacgacagacctgtctatgtaactatgaccggtgcaactggaaaccaagtatataac

SEQ ID NO: 72938 - DNA, 75 bp, synthetic construct
  source 1..75: mol_type = other DNA
cgtgttgccggtctgcctttatggctcatgcatgtacattgatgccattcaccggattgcccgcaaagccgacat

SEQ ID NO: 72939 - DNA, 75 bp, synthetic construct
  source 1..75: mol_type = other DNA
ggaggtccaaccggcgacagtgatgatgacctcaaaacattactgaaagccctgctggctaagctggaaggaaat

SEQ ID NO: 72940 - DNA, 75 bp, synthetic construct
  source 1..75: mol_type = other DNA
cggaagagcagcgccttcgtgaggtgtacggtgataatccggctgcgctggcgaaggccacatctgcactgaaga

SEQ ID NO: 72941 - DNA, 75 bp, synthetic construct
  source 1..75: mol_type = other DNA
aggaacaaagtatgggcattcattacaacaaaggcgcggagttactcgactttgtgaaaaacaaagaggacttca

SEQ ID NO: 72942 - DNA, 75 bp, synthetic construct
  source 1..75: mol_type = other DNA
atcgtttacctccccgctggatgttcctgaaaattgaaaccgatgaaggcgtggtcggctggggcgagcccgtga

SEQ ID NO: 72943 - DNA, 75 bp, synthetic construct
  source 1..75: mol_type = other DNA
gtgcttaagattttatggccgcatattctgttcctgctttttatatctgtgtctgtcagggcagaaaaaccctgg

SEQ ID NO: 72944 - DNA, 75 bp, synthetic construct
  source 1..75: mol_type = other DNA
gtggttattggcgcttctattcgctatggtcactaccattctgcgttccaggaatttgtcaaaaagcatgcgacg

SEQ ID NO: 72945 - DNA, 75 bp, synthetic construct
  source 1..75: mol_type = other DNA
tactgaatcgacggtatgaaaaagcgagtatcatcctaacatcaaacaaaggcttcgctgactggggggagatgt

SEQ ID NO: 72946 - DNA, 75 bp, synthetic construct
  source 1..75: mol_type = other DNA
tgttggatggaatgcagccggtggtgcatttggtaactggctggatgggaaggatccattatctggtgctgcgat

SEQ ID NO: 72947 - DNA, 75 bp, synthetic construct
  source 1..75: mol_type = other DNA
ctttcccttcttcctgacggcagctatggctatttcacccgtgaagttgaaaatcagcacggtacgccctgcaac

SEQ ID NO: 72948 - DNA, 75 bp, synthetic construct
  source 1..75: mol_type = other DNA
cgacggcaaaatcctctccggcagtaacctcacgctgacggcgcaggtgctggcgaacaccggcagcggactggt

SEQ ID NO: 72949 - DNA, 75 bp, synthetic construct
  source 1..75: mol_type = other DNA
gaacggtgccgacctgctgacggatgacagtctgctgacggccgttctgatttcgctgtttacggacaggcgggc

SEQ ID NO: 72950 - DNA, 75 bp, synthetic construct
  source 1..75: mol_type = other DNA
cgcaacactccagaacgtcaggtgctgggatattacacattatgcggcagttgttttgaacgagccgcattgccc

SEQ ID NO: 72951 - DNA, 75 bp, synthetic construct
  source 1..75: mol_type = other DNA
tcctgtgagcattattccggtggtgcaacatgggatattcgaaagccgtatatagataaggtcctggttattaat

SEQ ID NO: 72952 - DNA, 75 bp, synthetic construct
  source 1..75: mol_type = other DNA
tcgaatgtggccactgttttttgaatactgcctgacgacaatatgggccttcacctgcctggtcggtttcattat

SEQ ID NO: 72953 - DNA, 75 bp, synthetic construct
  source 1..75: mol_type = other DNA
gattttgcgtggctatctgctcgtgacgagagaggataaaccacgtgttatggggtactacacgctgtctggcag

SEQ ID NO: 72954 - DNA, 75 bp, synthetic construct
  source 1..75: mol_type = other DNA
accacgtcagcggtggggacgggatactggttactgcagctgctggacaaagtctctccgtcccagtgggtggca

SEQ ID NO: 72955 - DNA, 75 bp, synthetic construct
  source 1..75: mol_type = other DNA
ttctactgtgaccctccatactggggaacggaaggttatggtgtggagttcggactagaaaattatgatcatatg

SEQ ID NO: 72956 - DNA, 75 bp, synthetic construct
  source 1..75: mol_type = other DNA
gaaccggatgatctctggtgacttctatccggcgtttctgttttttggtgtccggggaggagcaaaacgtcgtcg

SEQ ID NO: 72957 - DNA, 75 bp, synthetic construct
  source 1..75: mol_type = other DNA
tgcaccggataaagaccaggaatggggggataatcggccatcttttattgtgacaagcgatgactggaatatcac

SEQ ID NO: 72958 - DNA, 75 bp, synthetic construct
  source 1..75: mol_type = other DNA
gagtgccagccgctgacgccagatcgttggctgaacgaaggcgataccatcagcatagggaatgtgactttacag

SEQ ID NO: 72959 - DNA, 75 bp, synthetic construct
  source 1..75: mol_type = other DNA
gggtaaccggcgttttcctgaaggttctgcgtattatccggcgtttctgtattacggtgtgcgtcatgccgcata

SEQ ID NO: 72960 - DNA, 75 bp, synthetic construct
  source 1..75: mol_type = other DNA
cgtcagagggggtgggggtggttttcaggacgaaaccgtccctgccggacaccgaccgccccctcaaatttttgt

SEQ ID NO: 72961 - DNA, 75 bp, synthetic construct
  source 1..75: mol_type = other DNA
ctggccgtgtttgctgaacgccgtaaggacagttttggcccgtatgtccgactgatgagcgtcaccctgaactga

SEQ ID NO: 72962 - DNA, 75 bp, synthetic construct
  source 1..75: mol_type = other DNA
gcgttgtatatgcccgcaatggtagccaccagtaagactgagtggggacgggcgttccgcgaccgtctggcggct

SEQ ID NO: 72963 - DNA, 75 bp, synthetic construct
  source 1..75: mol_type = other DNA
gtgcgcagtgaacaggcagcgcaggtggcgattgcgcggatgaaccgggccattgatgaggtactgagacgatga

SEQ ID NO: 72964 - DNA, 75 bp, synthetic construct
  source 1..75: mol_type = other DNA
atgagtgattcgcgactgctgccgaccggctcatcaccgcttgaagtcgccgccgcaaaagcctgtgcggaaatt

SEQ ID NO: 72965 - DNA, 75 bp, synthetic construct
  source 1..75: mol_type = other DNA
tctcaacgttccatcgcgatgtcgcgcgagggttatatcccatcgattgggcgggggacgtaacggatataaatg

SEQ ID NO: 72966 - DNA, 75 bp, synthetic construct
  source 1..75: mol_type = other DNA
gcaggacacggcaacagatgcaggtctgcttaaccagaacgacgttaccacgcttatccgcaaagacggttttcg

SEQ ID NO: 72967 - DNA, 75 bp, synthetic construct
  source 1..75: mol_type = other DNA
ccacggtagtgcgctccactccgctcatctcaattgatttgatcgtggagaacgaacgcggcgagttcttgctgg

SEQ ID NO: 72968 - DNA, 75 bp, synthetic construct
  source 1..75: mol_type = other DNA
tttttccggtacggcattttcaacccactatgtggtgttaggtttccgcctgaaaattgattccagtatgccgat

SEQ ID NO: 72969 - DNA, 75 bp, synthetic construct
  source 1..75: mol_type = other DNA
ctgaatgatccggcttaccgccgtctgcgtatcattaccgataacctcaaacaggaagagcacgcgattgtccag

SEQ ID NO: 72970 - DNA, 75 bp, synthetic construct
  source 1..75: mol_type = other DNA
accgaagtcattaacgatatcaacggggaactggtgaacctctatcgggtggtcaagcatcatctggaagaattt

SEQ ID NO: 72971 - DNA, 75 bp, synthetic construct
  source 1..75: mol_type = other DNA
atgctgaaaggcggaatttccggccgcagtgccagaggaaaacgtatccatacccgggccattcacagcatcgac

SEQ ID NO: 72972 - DNA, 75 bp, synthetic construct
  source 1..75: mol_type = other DNA
tgcgcaagctggcacaggtggcgtatggagtgctgaagtcaggcgtgccgttcgatgcgtcacggcataatccgg

SEQ ID NO: 72973 - DNA, 75 bp, synthetic construct
  source 1..75: mol_type = other DNA
gttggcgctgatttgcaggaaagcgaccgtttgtatcgttactccataactaatcgtcccgaccttaacaggatg

SEQ ID NO: 72974 - DNA, 75 bp, synthetic construct
  source 1..75: mol_type = other DNA
taatccgccgcgtcgccggaatcaaccagcaggctgacgaacaggccacgcagccggacagcgtgaccgcagaaa

SEQ ID NO: 72975 - DNA, 75 bp, synthetic construct
  source 1..75: mol_type = other DNA
caatattgcgcccgataccagcaacgcgcaggttacgctgaacatccctgctcaacaggtggtgacgaataacag

SEQ ID NO: 72976 - DNA, 75 bp, synthetic construct
  source 1..75: mol_type = other DNA
gttcgtcaccgatgtggcaagaaaactgaatacccgatactgggcactggcccgggtggccatgacagggctgaa

SEQ ID NO: 72977 - DNA, 75 bp, synthetic construct
  source 1..75: mol_type = other DNA
agttgttacgggaaggtatcagagtggccagatgcactgtggcacgtctcatggcggttatgggacttgccggtg

SEQ ID NO: 72978 - DNA, 75 bp, synthetic construct
  source 1..75: mol_type = other DNA
atagtcccgatgcatcttctatttttgatacccagggatacctctcgacgtatcatgttcagccagatttactcg

SEQ ID NO: 72979 - DNA, 75 bp, synthetic construct
  source 1..75: mol_type = other DNA
ccttatgtactggatggtattaatagattaaaaaaaacagggaatatagtcgctggatttgaggctaatgggggg

SEQ ID NO: 72980 - DNA, 75 bp, synthetic construct
  source 1..75: mol_type = other DNA
ggccgcccgtgagggcggcagcgttcgccacgcgtcgggctatgacctgatgttgctgcaactggcggaagatcg

SEQ ID NO: 72981 - DNA, 75 bp, synthetic construct
  source 1..75: mol_type = other DNA
atgctgagttaaacgctgttgctgatgagcgcatgaaaaaaccggaaattgtgaaggttagcctggatgacctat

SEQ ID NO: 72982 - DNA, 75 bp, synthetic construct
  source 1..75: mol_type = other DNA
acgaaaaagtcagaccactcactgataccgtgcgggctaaaacacctgttcaggtggattacaccattgaagcca

SEQ ID NO: 72983 - DNA, 75 bp, synthetic construct
  source 1..75: mol_type = other DNA
ataaaggttttattctgcttgaggttctggcgggactgatagtgattggtattgccacaccaatgatttattcag

SEQ ID NO: 72984 - DNA, 75 bp, synthetic construct
  source 1..75: mol_type = other DNA
ttgaccggattgaagaaaagcgtgacgccatgcagtcgctggtcttaccgccaccggcacgccaggcgctggcac

SEQ ID NO: 72985 - DNA, 75 bp, synthetic construct
  source 1..75: mol_type = other DNA
ttgaccggattgaggaaaagcgtgatgccatgcagtcgctgattctgccgccaccggcacgtcaggcgctggcac

SEQ ID NO: 72986 - DNA, 75 bp, synthetic construct
  source 1..75: mol_type = other DNA
cgggcaacacaccccggattttattgtttttattcttttttgttgtttctgtcataaccacaattgcatgcggat

SEQ ID NO: 72987 - DNA, 75 bp, synthetic construct
  source 1..75: mol_type = other DNA
tgctgctgtccgcaatcctcggtgatgcgatcaacctcgggctgaccaagatggccgagtcgagccccggcctga

SEQ ID NO: 72988 - DNA, 75 bp, synthetic construct
  source 1..75: mol_type = other DNA
aggtgcgtgggatgggcaggagccaattaccattccggttgagggtatagaaatgggcagcctgagtatgctgtc

SEQ ID NO: 72989 - DNA, 75 bp, synthetic construct
  source 1..75: mol_type = other DNA
gatacgtttgatccgacgcatgatattgacctctactgcgatcaggccagcggtcttgtgaatatcgccattatg

SEQ ID NO: 72990 - DNA, 75 bp, synthetic construct
  source 1..75: mol_type = other DNA
catcctcaccgagtcggggctgaagatcaccccactggattccgcggtgcccaataccgcgcaggcgctgatcga

SEQ ID NO: 72991 - DNA, 75 bp, synthetic construct
  source 1..75: mol_type = other DNA
gcagatcgtgagtctctgttctggatgaatgttaagacgatcccttcggtagataaaaatgcattgaacggcagg

SEQ ID NO: 72992 - DNA, 75 bp, synthetic construct
  source 1..75: mol_type = other DNA
gaagtgaaacgctacctggagcgctacccgaatacgcaatatgttgatgttttacttactgatttgaatggttgc

SEQ ID NO: 72993 - DNA, 75 bp, synthetic construct
  source 1..75: mol_type = other DNA
atgcagcaaacgatgagttttctgacccacgatctgacacaaatgatgccgcgtccggtaagaggcgatcagggc

SEQ ID NO: 72994 - DNA, 75 bp, synthetic construct
  source 1..75: mol_type = other DNA
aaggctttcagcccttctttgcctgccagacccgcgtgcgcgacccgggccgccggggatacacaaaacacatgc

SEQ ID NO: 72995 - DNA, 75 bp, synthetic construct
  source 1..75: mol_type = other DNA
tgagctggatggactggatttgtttaccggtttcactgtcacacacactgacagcagtgcctccgccgatatttt

SEQ ID NO: 72996 - DNA, 75 bp, synthetic construct
  source 1..75: mol_type = other DNA
tcaccgtactggtggcagaaagatattaacagcacgctggatattagcgtcgatcgcatcgcgcattattgttaa

SEQ ID NO: 72997 - DNA, 75 bp, synthetic construct
  source 1..75: mol_type = other DNA
gacggtaccgtctggcgtctgctgaatggctttaaattgttccgcgaaaaactggatacccgtcgcggttcaaat

SEQ ID NO: 72998 - DNA, 75 bp, synthetic construct
  source 1..75: mol_type = other DNA
agcagatgcaaaaccagatggacccggtgtacacgccggcgcgaaaaatccacctgtaccactgcgaccatcgcg

SEQ ID NO: 72999 - DNA, 75 bp, synthetic construct
  source 1..75: mol_type = other DNA
tggaacctgtataattacccactgaatccgataataaggatggatcctttgggtttgtataatttatatcaatta

SEQ ID NO: 73000 - DNA, 75 bp, synthetic construct
  source 1..75: mol_type = other DNA
gcggaaagagcgcttcgtgcagtctgtctcggaaagaaaaactttatgttctttggcagcgatcacggcggcgag

SEQ ID NO: 73001 - DNA, 75 bp, synthetic construct
  source 1..75: mol_type = other DNA
atgggatatctgaaagggaaaagcagtctgatgctttacgagcagtttggtgatttgaaattcaaatacaggaac

SEQ ID NO: 73002 - DNA, 75 bp, synthetic construct
  source 1..75: mol_type = other DNA
tgtcctgacgagctggataactggagcgaagccggactaaacgccctggctgaatgggaaaaatcagaccatcaa

SEQ ID NO: 73003 - DNA, 75 bp, synthetic construct
  source 1..75: mol_type = other DNA
ttgacggaaccactgcaagtactgattataaactgaccgacggcactaacaaaattccgttccaggctcgctata

SEQ ID NO: 73004 - DNA, 75 bp, synthetic construct
  source 1..75: mol_type = other DNA
agcaataattttctctggtagccaaatgtctgggcataacaatattttagcagttcagggaggggctggtacagc

SEQ ID NO: 73005 - DNA, 75 bp, synthetic construct
  source 1..75: mol_type = other DNA
gtgaggttcgcgtaccgcacaaggggaatgtggtggataaagtcattgaaggggcttatgaggtgctggggatat

SEQ ID NO: 73006 - DNA, 75 bp, synthetic construct
  source 1..75: mol_type = other DNA
aatgcgaaattctgtggcgcatttctgtgttcaggttgaatctatcagcgatgcacgcctagttgatcaaatcat

SEQ ID NO: 73007 - DNA, 75 bp, synthetic construct
  source 1..75: mol_type = other DNA
ccatcaccggcgcagcaggcactggcaaaagctgcactcacgtaccggttcggtgaagaccaccagccggtgact

SEQ ID NO: 73008 - DNA, 75 bp, synthetic construct
  source 1..75: mol_type = other DNA
ccgagagagcgcgctgtttcttacctcccgtcggatcgtctaacgccagagcttaaagctgaaattgggttaaac

SEQ ID NO: 73009 - DNA, 75 bp, synthetic construct
  source 1..75: mol_type = other DNA
tgagctcggtgatttccatcatgtgaatcgtgtttatgttgtcggtggtggggccccgttgatctatgattcgat

SEQ ID NO: 73010 - DNA, 75 bp, synthetic construct
  source 1..75: mol_type = other DNA
atcagttcaatcagctcacactgattgttcagcctgaaggaaaatgcatccggtggaaagaaaatcacaatccgc

SEQ ID NO: 73011 - DNA, 75 bp, synthetic construct
  source 1..75: mol_type = other DNA
ccctcttatacttcagcacaacagccagcagcagtcggtatttcgtcgcccactctcactgggtttattgcgaag

SEQ ID NO: 73012 - DNA, 75 bp, synthetic construct
  source 1..75: mol_type = other DNA
ggcggcgagcgtggagcactgttgtacgggctgatcggcacctgccgtctgaacggtatcgatccggaagcgtat

SEQ ID NO: 73013 - DNA, 75 bp, synthetic construct
  source 1..75: mol_type = other DNA
aaagcgctctggacagactgaccagagagcggaaaacaacacagcaggctattctggaacaactgattctgtacg

SEQ ID NO: 73014 - DNA, 75 bp, synthetic construct
  source 1..75: mol_type = other DNA
gatacgaaatatggtcgctatgtttttaaagtctttgccccgaaaacgaaaaggaatgaacgttttttaaaatct

SEQ ID NO: 73015 - DNA, 75 bp, synthetic construct
  source 1..75: mol_type = other DNA
gcaataccctgacagcgctacacgctggtattccacaaatcgtcttcggccagggagccgatcgcccggtaaatg

SEQ ID NO: 73016 - DNA, 75 bp, synthetic construct
  source 1..75: mol_type = other DNA
actggatacccgccgtggctcaaaatctgaactggaaaccgcgctgaaagatctgggttccgtggtttcttttaa

SEQ ID NO: 73017 - DNA, 75 bp, synthetic construct
  source 1..75: mol_type = other DNA
ggtattacggcgatctggccattgtggtggcgaaaacgtcttatgtggcagaggacggtaccgaaaaacgttatc

SEQ ID NO: 73018 - DNA, 75 bp, synthetic construct
  source 1..75: mol_type = other DNA
tcgatgagtttgatgccataggaaaagagcgtggcgacagcggcgaacacggtgaattacgccgggtcgtcaatg

SEQ ID NO: 73019 - DNA, 75 bp, synthetic construct
  source 1..75: mol_type = other DNA
gccactaaccatgaacacattctggacagcgccatctggcgtcgatttgatgaagtgattgaatttccgttgccg

SEQ ID NO: 73020 - DNA, 75 bp, synthetic construct
  source 1..75: mol_type = other DNA
ttatctgttggtgaatatcagtatttattgctattagcaaatatgcatccgtcttacaggctggtaaaaaaataa

SEQ ID NO: 73021 - DNA, 75 bp, synthetic construct
  source 1..75: mol_type = other DNA
atgtcaggacccccgaaaaccccgccacgcctgcatttgatacgaggcaatccctcaaagcgtcccgttaaagac

SEQ ID NO: 73022 - DNA, 75 bp, synthetic construct
  source 1..75: mol_type = other DNA
cgtgcgcttgccaacttcgacacacgcggctttatcaagctggtcatcgaggaaggtagcggacggctcatcggc

SEQ ID NO: 73023 - DNA, 75 bp, synthetic construct
  source 1..75: mol_type = other DNA
taaggtcagcgtcagctatgacaactcgggcaccatcaaccctgacgccggattctggaataaaaccggatacgg

SEQ ID NO: 73024 - DNA, 75 bp, synthetic construct
  source 1..75: mol_type = other DNA
gactaccacctgttttatgagtacgacgctgcggaccggatcatccgctggtccgataacgaccagacgtggagc

SEQ ID NO: 73025 - DNA, 75 bp, synthetic construct
  source 1..75: mol_type = other DNA
aaccccacctgcctgaagatgcccagccagcgggatatcgctggactgacgatgaatccgtactacatgctcctt

SEQ ID NO: 73026 - DNA, 75 bp, synthetic construct
  source 1..75: mol_type = other DNA
caagagatggagatggacccgacaaacgatgaattcataatttatggcgctccatctaattacttacttgatacc

SEQ ID NO: 73027 - DNA, 75 bp, synthetic construct
  source 1..75: mol_type = other DNA
gttggtctgaccgcgttacgtggtctggctggagttgctgatatttacaatcaggaacagcaacagaaagctatt

SEQ ID NO: 73028 - DNA, 75 bp, synthetic construct
  source 1..75: mol_type = other DNA
gataaggtacttgttcatagaggtttctctaccctcaatgtcattgttattgctttggtcgtcgttgttttgtgc

SEQ ID NO: 73029 - DNA, 75 bp, synthetic construct
  source 1..75: mol_type = other DNA
acaacatcaaaatggttgttaccctgatccacccgatcgcgatggacgacggtctgcgtttcgcaatccgtgaag

SEQ ID NO: 73030 - DNA, 75 bp, synthetic construct
  source 1..75: mol_type = other DNA
actggacgttttaatgacctcgttaaacagcaccagcagctacttaacgcagcagttcgaaaacaacagtaattc

SEQ ID NO: 73031 - DNA, 75 bp, synthetic construct
  source 1..75: mol_type = other DNA
ttcttgaccgtgatggcaccattaatgtcgatcacggctatgtccatgagatcgacaactttgaatttatcgacg

SEQ ID NO: 73032 - DNA, 75 bp, synthetic construct
  source 1..75: mol_type = other DNA
acgggggttgacccgctctcccgcgcccagttctgggatctgatcgacagtattcgccagcggcagagcaatatg

SEQ ID NO: 73033 - DNA, 75 bp, synthetic construct
  source 1..75: mol_type = other DNA
aatctggtttcctatctgattggctggggagagctggtgttacactggcatgaccaagaggcaaaaggaaaaact

SEQ ID NO: 73034 - DNA, 75 bp, synthetic construct
  source 1..75: mol_type = other DNA
gaaggtttatctgaagtccggaaaagttcagctgactaacagcggctctgatccgctggtcggggttgtctgggc

SEQ ID NO: 73035 - DNA, 75 bp, synthetic construct
  source 1..75: mol_type = other DNA
tcgccaggttctttaagttgctcaatatcggtcattacctcatgcgggattctgaccgttgtcatttgtgatttt

SEQ ID NO: 73036 - DNA, 75 bp, synthetic construct
  source 1..75: mol_type = other DNA
tcaggcggcgctaattcagatatcacgacccgcacaatcgaagcggtgcgtaaatcgaaggaagcgttagacctg

SEQ ID NO: 73037 - DNA, 75 bp, synthetic construct
  source 1..75: mol_type = other DNA
tccgcttttttgcccctgcgctgacgaaggaggaatttcatggcaaccgtctcctgtggctggctgccgtggata

SEQ ID NO: 73038 - DNA, 75 bp, synthetic construct
  source 1..75: mol_type = other DNA
caggttgagcgttttcgacaggcatttccgaaaacagaagaagagatggaagacggtatctggttttttgatgag

SEQ ID NO: 73039 - DNA, 75 bp, synthetic construct
  source 1..75: mol_type = other DNA
taaacgcctggggctatcaaaaacgttccgtcgtctgattgccacactcatccggcgttatggcgtcagtctcat

SEQ ID NO: 73040 - DNA, 75 bp, synthetic construct
  source 1..75: mol_type = other DNA
gagaaatcgaacgccaaaatgattgttatcgatccgcgatataccgatacggctgccggtcgtgaagacgaatgg

SEQ ID NO: 73041 - DNA, 75 bp, synthetic construct
  source 1..75: mol_type = other DNA
tcactctcacccggcgttatggcgccagtctcattcatctggatgcctgcgctgaatgcctgccgggtttaccca

SEQ ID NO: 73042 - DNA, 75 bp, synthetic construct
  source 1..75: mol_type = other DNA
ggaaaattatgggctggatggaagggctgcgcggcgtcggtgtaatgtcgctggcggtgtttaccatgtgggtct

SEQ ID NO: 73043 - DNA, 75 bp, synthetic construct
  source 1..75: mol_type = other DNA
gtgggctatatgtcgcaggcgttttcgctctataacgaactcaccgtgcggcaaaacctggagttacatgcccgt

SEQ ID NO: 73044 - DNA, 75 bp, synthetic construct
  source 1..75: mol_type = other DNA
tgagtctatttttaagagcgcagctgtacacaacgcgggcggcaattcgtgggcgctgttaggttcgactttctc

SEQ ID NO: 73045 - DNA, 75 bp, synthetic construct
  source 1..75: mol_type = other DNA
atgtccaaactcgatctaaacgccctgaacgaactgccgaaggtagatcgcattctggcgctggcggaaactaac

SEQ ID NO: 73046 - DNA, 75 bp, synthetic construct
  source 1..75: mol_type = other DNA
ccacagtgctgaacaagctggcggagaaactggccaaagaccagaacggtgcggatattcccgataaggcagcct

SEQ ID NO: 73047 - DNA, 75 bp, synthetic construct
  source 1..75: mol_type = other DNA
cagaactgacgcagaccgaagcagtgaaaactcttggattcctgaaacggaaagccgcagagcagaaggtggcag

SEQ ID NO: 73048 - DNA, 75 bp, synthetic construct
  source 1..75: mol_type = other DNA
ggggggctctatcgaactcatggcgttttattttggtctttccagcgtggatgtggctgcgcggcgtcgtatctc

SEQ ID NO: 73049 - DNA, 75 bp, synthetic construct
  source 1..75: mol_type = other DNA
ttttaacagcgatgaactgtttcgccgtattggtggaattgacgcgctggtggcgtggttgcgcaggaaagaggg

SEQ ID NO: 73050 - DNA, 75 bp, synthetic construct
  source 1..75: mol_type = other DNA
atctcagcagagactgcaactggaaaaatacaaccagcgacggcttgagtataacgatatgattgcccatagcca

SEQ ID NO: 73051 - DNA, 75 bp, synthetic construct
  source 1..75: mol_type = other DNA
aacattaggtgatgaaatcctgtcttttgcatgtgaatattcgaaagccgctgtcaaaaaagaattagcgcaata

SEQ ID NO: 73052 - DNA, 75 bp, synthetic construct
  source 1..75: mol_type = other DNA
tttcgggaaaagttcagcaactgaaggttcatactgaaggtggggttgttacaacagcggaaacactgatggtca

SEQ ID NO: 73053 - DNA, 75 bp, synthetic construct
  source 1..75: mol_type = other DNA
cagcgtattggcatgcccgattcaaccgggaaaaagacgataaaagaggccaggattggcagtatagtaccggca

SEQ ID NO: 73054 - DNA, 75 bp, synthetic construct
  source 1..75: mol_type = other DNA
ctcttttgcttctaccgagactttatcgtttactcctgacaacataaatgcggacattagtcttggaactctgag

SEQ ID NO: 73055 - DNA, 75 bp, synthetic construct
  source 1..75: mol_type = other DNA
tgccattatttcgttcttcgaccaggtatttgatcagggaatgaatccagccgtaccctggtctgcatactggac

SEQ ID NO: 73056 - DNA, 75 bp, synthetic construct
  source 1..75: mol_type = other DNA
gtacagcgccttcacgctgctgagctgggcatgtatcgccttgatgatgtggtcgatacgctgctggttctgcag

SEQ ID NO: 73057 - DNA, 75 bp, synthetic construct
  source 1..75: mol_type = other DNA
ggtagcattgttcagggttcagccggggtgcgcattggtgcccccaccggcgtggcctgttcggtgtgccccggc

SEQ ID NO: 73058 - DNA, 75 bp, synthetic construct
  source 1..75: mol_type = other DNA
gcgtgttattactacgactattttttgccgccgtcttaatgctatggtgcgctcaaactgctgcttatagcgggc

SEQ ID NO: 73059 - DNA, 75 bp, synthetic construct
  source 1..75: mol_type = other DNA
cgtaatgatgtaaaacatcaggttgataatatggtcacagaatataaagggaatataggtgatactcagaacagc

SEQ ID NO: 73060 - DNA, 75 bp, synthetic construct
  source 1..75: mol_type = other DNA
acacttgtgtagccaactttgtccataccaccatcttcccgaacgggccgaaagattttgaagataaagacgatg

SEQ ID NO: 73061 - DNA, 75 bp, synthetic construct
  source 1..75: mol_type = other DNA
atcgtctgtcacaaccgcagatttacaagattattgcccggcagagaaaacttcattcacggcgacatcagcccg

SEQ ID NO: 73062 - DNA, 75 bp, synthetic construct
  source 1..75: mol_type = other DNA
aaaacgtactcatgcgggaatggggatggaagacgcaggtaaatctgtctggcggaactatccgaagcagccgaa

SEQ ID NO: 73063 - DNA, 75 bp, synthetic construct
  source 1..75: mol_type = other DNA
tgaagatgtcaatacggtggcaggctttggtctgtctcgttatacccttgaaccatggctgaataatggtgaact

SEQ ID NO: 73064 - DNA, 75 bp, synthetic construct
  source 1..75: mol_type = other DNA
tcggtgcggcctttggtgccgggctgattgccgggccggctatcggcggactggcgggggatatctcaccgcatc

SEQ ID NO: 73065 - DNA, 75 bp, synthetic construct
  source 1..75: mol_type = other DNA
gaatctgaccagacctcagcagaatgcacgccaccatttgctacccttaccggcatacgctgcagtaccgcacat

SEQ ID NO: 73066 - DNA, 75 bp, synthetic construct
  source 1..75: mol_type = other DNA
aagaccgcgcgccggtggcgctgaaaggggccgcgctcacgcgccgcccctttcattacgcggacgttctgatgg

SEQ ID NO: 73067 - DNA, 75 bp, synthetic construct
  source 1..75: mol_type = other DNA
gtgactctggaagaatactgttcgttaatctggaaaacgaacatcatgagtccattaaaaatcccaattacagat

SEQ ID NO: 73068 - DNA, 75 bp, synthetic construct
  source 1..75: mol_type = other DNA
tgtgtaaaggatatattcatgggcatagtgctgggggaactaatccatctctagtggaagctatgcaatttggta

SEQ ID NO: 73069 - DNA, 75 bp, synthetic construct
  source 1..75: mol_type = other DNA
ggttctgtatccggtaaacagtttgcatggaaggaccagggaatgcatctgtccatgaaggacaaggactacaat

SEQ ID NO: 73070 - DNA, 75 bp, synthetic construct
  source 1..75: mol_type = other DNA
catgaaaggaggtatttctgctgcaggcaagttaaatttaaatatggataatagttccaacctgcatgttgataa

SEQ ID NO: 73071 - DNA, 75 bp, synthetic construct
  source 1..75: mol_type = other DNA
ggtaaaggtacacaggctaatataaatatatcttcttcgcagttaaatactggttcgctatcagttggtgaggga

SEQ ID NO: 73072 - DNA, 75 bp, synthetic construct
  source 1..75: mol_type = other DNA
atggagacaccagaagcagcaatgaaagccattacccggaatcttgatcgcgaaatctggcgtgacctgatgcaa

SEQ ID NO: 73073 - DNA, 75 bp, synthetic construct
  source 1..75: mol_type = other DNA
aatccaatgatattgaagctgagtttggatactatccagtagaagttaacgttgaaactgatgatttttctttac

SEQ ID NO: 73074 - DNA, 75 bp, synthetic construct
  source 1..75: mol_type = other DNA
aacgcctggggctgtcaaaaatgttccgccgtctggttgtcacacttatccggcgttatggcgtcagtctcattc

SEQ ID NO: 73075 - DNA, 75 bp, synthetic construct
  source 1..75: mol_type = other DNA
gctgttcgacagggatgcactgagcagccgcttcttttatgacgcctttccgggaatgcgtctgcgccacccggt

SEQ ID NO: 73076 - DNA, 75 bp, synthetic construct
  source 1..75: mol_type = other DNA
ttatcccaaaacccacaataccttagcttcgaaaaattccagtatctttatatggcactggatagttgctttgct

SEQ ID NO: 73077 - DNA, 75 bp, synthetic construct
  source 1..75: mol_type = other DNA
cggcttaagcgccagggcctgtcaaaaacgttccgccgtctggttgtcacactcatccgacgttatggcgtcagt

SEQ ID NO: 73078 - DNA, 75 bp, synthetic construct
  source 1..75: mol_type = other DNA
ttaaggaagttcaccgtaagcttcccggtctggtgactgcgcattccactcgcaaaattctgtttgtggaagaac

SEQ ID NO: 73079 - DNA, 75 bp, synthetic construct
  source 1..75: mol_type = other DNA
gtccaatggtcgaaggagcaaccatagctacacggaacttgtacccggtgcagatcttggcattttcattatgag

SEQ ID NO: 73080 - DNA, 75 bp, synthetic construct
  source 1..75: mol_type = other DNA
cggtgattcactccgcgtggtggatgaacgtgactctaccgaaacaccggcaacttatgccagccctcaccagtt

SEQ ID NO: 73081 - DNA, 75 bp, synthetic construct
  source 1..75: mol_type = other DNA
gcagaggaaatggcagacgcagcgcagagcgcaatgcttgccgccatcggctttgatgctgatctgttgctgcag

SEQ ID NO: 73082 - DNA, 75 bp, synthetic construct
  source 1..75: mol_type = other DNA
tcaagacggagaacaagttaatttgaccgacttccagggacagcgtgttctggtttatttctacccgaaagccat

SEQ ID NO: 73083 - DNA, 75 bp, synthetic construct
  source 1..75: mol_type = other DNA
tgctgcgccgtgctgttgaaggtactccgttcgagtgcctgaaagacgcgtttgttggtccgaccctgattgcat

SEQ ID NO: 73084 - DNA, 75 bp, synthetic construct
  source 1..75: mol_type = other DNA
cataatgtcccggccgcggtgagtgatttgcgcgccgcgctggaactggaaccgaataatagcaacacccaggca

SEQ ID NO: 73085 - DNA, 75 bp, synthetic construct
  source 1..75: mol_type = other DNA
tcctcgccgtcgaacagcagttgccgctgaacgggcaaaatggcgcatccgataccatgctgcgcgccagcgcct

SEQ ID NO: 73086 - DNA, 75 bp, synthetic construct
  source 1..75: mol_type = other DNA
tggctcctacagcactgcgcaaatttcctgtgccatgccctacacctacggcagtaatgatggcaacagcaccac

SEQ ID NO: 73087 - DNA, 75 bp, synthetic construct
  source 1..75: mol_type = other DNA
cgacggggaatcagaatggattcattttaccggcagtggctatctgttacgtaccgatgcgtggtcgtacccggt

SEQ ID NO: 73088 - DNA, 75 bp, synthetic construct
  source 1..75: mol_type = other DNA
tctgaccggacctcaacagacagcatccccccctcagttgccctgagcggcatacgctgcagcaccgcacatatc

SEQ ID NO: 73089 - DNA, 75 bp, synthetic construct
  source 1..75: mol_type = other DNA
ctgcatctgttcagcggcaaaccgattcccgacaaccgggaaaacataaccattcatctggatgaccacatctag

SEQ ID NO: 73090 - DNA, 75 bp, synthetic construct
  source 1..75: mol_type = other DNA
atattccttatttgattgtaatgattgctgtgtttgtcatgctaacgtatacagacatggtgagcaaattttcta

SEQ ID NO: 73091 - DNA, 75 bp, synthetic construct
  source 1..75: mol_type = other DNA
cgctggtccgggagctcgccacgcggtgtcaagaaggcccgctggcggaggccctgaccgggctgcgctgcctgt

SEQ ID NO: 73092 - DNA, 75 bp, synthetic construct
  source 1..75: mol_type = other DNA
ccacaaaggctgtggaagctgcgtgcggcggtgttcggcggtggcgcattgcagatggtgatttgcggcggcctg

SEQ ID NO: 73093 - DNA, 75 bp, synthetic construct
  source 1..75: mol_type = other DNA
agggtagtgagtttgcctttgtagtatttggtgcggcgcagatggcgaatgtgctggagccagagtgggcgaaat

SEQ ID NO: 73094 - DNA, 75 bp, synthetic construct
  source 1..75: mol_type = other DNA
ctgggttatcgctcgccacgggaatatctacggcagcaggccagtaatgggttaagtgataacaggtgtctggaa

SEQ ID NO: 73095 - DNA, 75 bp, synthetic construct
  source 1..75: mol_type = other DNA
agcgattacctctttccgttcagtgctggcggagctggggctggaactgccgggcggtaacaagccggaaccgcg

SEQ ID NO: 73096 - DNA, 75 bp, synthetic construct
  source 1..75: mol_type = other DNA
tgcagctgcttgcccgtgataccggctctaaagtgcttaagcaggcactgcagggcatcagccgtgataccaaag

SEQ ID NO: 73097 - DNA, 75 bp, synthetic construct
  source 1..75: mol_type = other DNA
ccacgacgccagcggcagacgaacagagaaacgctgcgaccggaagaaaatccgcttcacgtacctgtgggacgg

SEQ ID NO: 73098 - DNA, 75 bp, synthetic construct
  source 1..75: mol_type = other DNA
ttacgctgacgtttgaggggatcccctacagcgaaaccgtctgctggcgtccggcactgctcagtcgcccggtga

SEQ ID NO: 73099 - DNA, 75 bp, synthetic construct
  source 1..75: mol_type = other DNA
tgcggtaacgaccggaaaaaacatcattgagggcgaaggcatagaacgctatgaaatcgactggaagataccgga

SEQ ID NO: 73100 - DNA, 75 bp, synthetic construct
  source 1..75: mol_type = other DNA
aaatcgcaggtgcagaaagccaacttcgtgaagtagagcagcaaattgaaagagagaagagtattcgtttacccc

SEQ ID NO: 73101 - DNA, 75 bp, synthetic construct
  source 1..75: mol_type = other DNA
ataaatgtttttttaaaacaaaaaatactatatttaacgaaacttaaattgataatagatatggctattaagata

SEQ ID NO: 73102 - DNA, 75 bp, synthetic construct
  source 1..75: mol_type = other DNA
ataaaacggatattacttattcaggcggtgatattaccggcgctaccaaagatgatacgttgattaaagttgctg

SEQ ID NO: 73103 - DNA, 75 bp, synthetic construct
  source 1..75: mol_type = other DNA
tgttggttctcctgaatttttttctgaactctgtattcgtgcggaaataaaaccggaactgctgacaggaaaata

SEQ ID NO: 73104 - DNA, 75 bp, synthetic construct
  source 1..75: mol_type = other DNA
attactttgacatatggaccgtttaatacaaaaagtaacttgagttttattagcgcattatctctttattttatt

SEQ ID NO: 73105 - DNA, 75 bp, synthetic construct
  source 1..75: mol_type = other DNA
ttgctgttcaggcggttacaacggggaaaaatatcattgaaggcgatggaattgaacgttatgaactggactgga

SEQ ID NO: 73106 - DNA, 75 bp, synthetic construct
  source 1..75: mol_type = other DNA
gaaaaccgcccgaatctgtccgtattttgcaggataatgaacagcgtaatctggcaaacagaatggaaaacagat

SEQ ID NO: 73107 - DNA, 75 bp, synthetic construct
  source 1..75: mol_type = other DNA
gcgataattcgcccaccgataagatgaacgtgaaaggcgatacccaagggaacactcgcgttcgggttgataaca

SEQ ID NO: 73108 - DNA, 75 bp, synthetic construct
  source 1..75: mol_type = other DNA
tccagacgatttatcagccggggagcttcacgccactcatcagagttgaaaccgccaccggtgagctggcgaaaa

SEQ ID NO: 73109 - DNA, 75 bp, synthetic construct
  source 1..75: mol_type = other DNA
gctcgccggtggtttctgcttttgcactgttcccgctggtggcgattttctaccagtttggctggaagcaaagtc

SEQ ID NO: 73110 - DNA, 75 bp, synthetic construct
  source 1..75: mol_type = other DNA
atcatggtattgcagaataccttgaaaatggaagaaaagcggagcgtgagtatacccgtgatgaacttgaccata

SEQ ID NO: 73111 - DNA, 75 bp, synthetic construct
  source 1..75: mol_type = other DNA
attcactaccaatttgggatggctggatttggattattggtttagcgttttactgtattattatcctgctatcga

SEQ ID NO: 73112 - DNA, 75 bp, synthetic construct
  source 1..75: mol_type = other DNA
ctactggggctgtcgcggcatcggtcattgccgataccacctcagcttctcaacgcgtgaagtggttcggttggt

SEQ ID NO: 73113 - DNA, 75 bp, synthetic construct
  source 1..75: mol_type = other DNA
gacggccacacgctggcacggctgtgggcgtcgctgccgccggatatccggttaagcccgcatctttacctggcg

SEQ ID NO: 73114 - DNA, 75 bp, synthetic construct
  source 1..75: mol_type = other DNA
cgctctgctggccatctcaggcgtgctcacccgcacaatgcagcccgtacagatgagcattccgctgagggggag

SEQ ID NO: 73115 - DNA, 75 bp, synthetic construct
  source 1..75: mol_type = other DNA
ctggacgctggcgtgagggcggttgtactttgcgaaggcgaaattgattgtatgagctatgcgcaatacggcatc

SEQ ID NO: 73116 - DNA, 75 bp, synthetic construct
  source 1..75: mol_type = other DNA
gcgttcgacagcgccactgtcggcgcggcgcagctggtctacaaagcgcatttgcgtacctacagcgtggagaag

SEQ ID NO: 73117 - DNA, 75 bp, synthetic construct
  source 1..75: mol_type = other DNA
ggcaaatgtctgatgtcgatcgctcaacggtggcgttaaacaccaccaacgcaatcagtacggcgctgggtgatg

SEQ ID NO: 73118 - DNA, 75 bp, synthetic construct
  source 1..75: mol_type = other DNA
agattttgctgaatcaatgaaagataataaaggaaaagaatattacctgttcttagatgaggttcgaaggaatct

SEQ ID NO: 73119 - DNA, 75 bp, synthetic construct
  source 1..75: mol_type = other DNA
cgaagctatgcaaggcttccacgccggatggcgtaaatccggtattggcggcgcagatggtaaacatggcctgca

SEQ ID NO: 73120 - DNA, 75 bp, synthetic construct
  source 1..75: mol_type = other DNA
ggctggcaattcgtatgctgcgttgtgagctctgctatgttgcaggtgattgtcccgatgagctggataactgga

SEQ ID NO: 73121 - DNA, 75 bp, synthetic construct
  source 1..75: mol_type = other DNA
ggcgaactgcgcaggccacagctgatggttatgagaattttattgcccgcgtagggatgcagacacctaaccagc

SEQ ID NO: 73122 - DNA, 75 bp, synthetic construct
  source 1..75: mol_type = other DNA
aattgaggtttatggtgtcagtgcacatgctatatcagccaaagcagggggagtagtaaacgttaacggtacgca

SEQ ID NO: 73123 - DNA, 75 bp, synthetic construct
  source 1..75: mol_type = other DNA
tctgcggcttaaacgtctgggcatgtcaaaaatgttccgtcgtctggttgtcacactcatccggcgttatggcgt

SEQ ID NO: 73124 - DNA, 75 bp, synthetic construct
  source 1..75: mol_type = other DNA
cttcaccagccgcaaccgcatgctggtggaatggtcatatcgcggttcgtgggttatcggtgaagcggtcgacgc

SEQ ID NO: 73125 - DNA, 75 bp, synthetic construct
  source 1..75: mol_type = other DNA
agtcataatacaaggtgggacaaaactgagacacataaggcctcacaatggcttgcaaggctttacatgttttga

SEQ ID NO: 73126 - DNA, 75 bp, synthetic construct
  source 1..75: mol_type = other DNA
taccgcgcttcgtgcgctgctgttaagccgcaagaatccgtttagcgatatcaaatcggacggcacggtgaaaac

SEQ ID NO: 73127 - DNA, 75 bp, synthetic construct
  source 1..75: mol_type = other DNA
gcacgcgagcaaacgtatttcgtcgacaaaacggcagagcatagtgaaaactgcctgtggatgatggccaacatg

SEQ ID NO: 73128 - DNA, 75 bp, synthetic construct
  source 1..75: mol_type = other DNA
gcgccgtcgcggatggtatgaggaagacgtaatcgcatggatgaaagaacgcgaacaagaagcgcgcggaacgac

SEQ ID NO: 73129 - DNA, 75 bp, synthetic construct
  source 1..75: mol_type = other DNA
ggcaaatgtctgacgttgaccgctcaacggtggccgtaaacaccaccaccgcgatcagtacggcgctgggtgatg

SEQ ID NO: 73130 - DNA, 75 bp, synthetic construct
  source 1..75: mol_type = other DNA
ccgtcgatgaaatgttcgacaccctgctggaaaatggctcataccatcgcactttgcgtttctgggattatcaac

SEQ ID NO: 73131 - DNA, 75 bp, synthetic construct
  source 1..75: mol_type = other DNA
cagcgaagaaagcggcggcagacgcgaagaaaaaagcagaagcagaagccgccaaagccgcagtcgaagcgcaga

SEQ ID NO: 73132 - DNA, 75 bp, synthetic construct
  source 1..75: mol_type = other DNA
cgcgtactgcacctcactggatatgaccggtttctcaatcaccttactgaaagttgatgacgaaacgctggcact

SEQ ID NO: 73133 - DNA, 75 bp, synthetic construct
  source 1..75: mol_type = other DNA
gttcagcggcgtcatcgacatcatctgcgtctgcttcaaaagatgaggcgaccagacaagcgtcagcagcgaaag

SEQ ID NO: 73134 - DNA, 75 bp, synthetic construct
  source 1..75: mol_type = other DNA
ttaaggctgatttaagccagtccgcattagtcatttcactaccgcaggcttacctcgaatatacctggcccgact

SEQ ID NO: 73135 - DNA, 75 bp, synthetic construct
  source 1..75: mol_type = other DNA
gatcgcagcaaatttgcagagatatcgaaaaattatggttatttcatgccgaagcagcagggactttctctgaaa

SEQ ID NO: 73136 - DNA, 75 bp, synthetic construct
  source 1..75: mol_type = other DNA
gtgagccagggcgaagtgtatgttgtcagcggaaaaggggtattcctttcagagagagtttaccgtgaatggctg

SEQ ID NO: 73137 - DNA, 75 bp, synthetic construct
  source 1..75: mol_type = other DNA
ggcttcttctgttctgtctctcagcagtcaataatgaacataaccaggatggctgaagatgtatggataacagaa

SEQ ID NO: 73138 - DNA, 75 bp, synthetic construct
  source 1..75: mol_type = other DNA
taggcattacggccgttatcttaaagattatgataacaatagcacacacaatcatttgataaattgtactaatta

SEQ ID NO: 73139 - DNA, 75 bp, synthetic construct
  source 1..75: mol_type = other DNA
ggcataaagggccggagatgcttttcaggcactatggttcgtatcttaaagagtatgataactttacatcgataa

SEQ ID NO: 73140 - DNA, 75 bp, synthetic construct
  source 1..75: mol_type = other DNA
accaaaagcggtcaaggctgcatacgaccttgcagccggcaaggcgcccgtcagccacactcacccgtggagtca

SEQ ID NO: 73141 - DNA, 75 bp, synthetic construct
  source 1..75: mol_type = other DNA
ttaatgacagttgcagcctgaacattagcggcagcgatgaagagcaggcgcggcgcgtgctggaagagtacatcc

SEQ ID NO: 73142 - DNA, 75 bp, synthetic construct
  source 1..75: mol_type = other DNA
ggattatctggacgcactggagctggttgatacctccagtgtgccagatattgaatggcctacgcctccggcagt

SEQ ID NO: 73143 - DNA, 75 bp, synthetic construct
  source 1..75: mol_type = other DNA
attaccggaatgcgtcactgggtatggagcagcagcgactccagttgcagaaatacaaccagcgacggcttgagt

SEQ ID NO: 73144 - DNA, 75 bp, synthetic construct
  source 1..75: mol_type = other DNA
gatgaaaaaggtgctttaggcggtaaagctcagggttattttataagctccgccacgcaaggttttgaaaatctc

SEQ ID NO: 73145 - DNA, 75 bp, synthetic construct
  source 1..75: mol_type = other DNA
gacaccgttgtcgagtgcgtgcttaacaaactctgcccttcgcatacctacgtaatttttaaatatccggagtaa

SEQ ID NO: 73146 - DNA, 75 bp, synthetic construct
  source 1..75: mol_type = other DNA
cattgttgaatgaacatttgaaaaaatggaattctgcacaaggtgacattttaagaaagtgtaggcttgtcgcaa

SEQ ID NO: 73147 - DNA, 75 bp, synthetic construct
  source 1..75: mol_type = other DNA
agagacgagatattataggcaccaatggtggcaaatctgatttttggaaacgagtattggaggactataaaacaa

SEQ ID NO: 73148 - DNA, 75 bp, synthetic construct
  source 1..75: mol_type = other DNA
agaggggcagtggttaacgtttaaatcgataattgcattgctcattctttgtggcgtagtgttggcgattaatct

SEQ ID NO: 73149 - DNA, 75 bp, synthetic construct
  source 1..75: mol_type = other DNA
aggctgtctgcgacaagctcggcattgaactgcacaccgttaactttgctgccgagtactgggacaacgtcttcg

SEQ ID NO: 73150 - DNA, 75 bp, synthetic construct
  source 1..75: mol_type = other DNA
gccttgatctcacatacagcgatggctccaccgcgcataaacctgtaacagaatacggcagtgcgcaccctgatg

SEQ ID NO: 73151 - DNA, 75 bp, synthetic construct
  source 1..75: mol_type = other DNA
tcagtggcaaccccattcccgacaaccgggaaaacatcatcattcgtttggatgagcacatccagtctgttcagg

SEQ ID NO: 73152 - DNA, 75 bp, synthetic construct
  source 1..75: mol_type = other DNA
ggcccgtcagcctgaaatgctggaacctcagaatcagaaattgctggagaacgggtatgcgaattttctccgtat

SEQ ID NO: 73153 - DNA, 75 bp, synthetic construct
  source 1..75: mol_type = other DNA
aagcgcgcagcaccttcagcagtcactccgtctgccgggacagcagtatgatgaggagtcggggctgtactacaa

SEQ ID NO: 73154 - DNA, 75 bp, synthetic construct
  source 1..75: mol_type = other DNA
gaaaaataaaggtaaccggattcaataaattagatgctataattgaatttggttctaaattgactattttatatg

SEQ ID NO: 73155 - DNA, 75 bp, synthetic construct
  source 1..75: mol_type = other DNA
ttccactcaaagatcgcgtctccatgatctttctgcaatatgggcagatcgatgtaatagatggcgcgtttgtac

SEQ ID NO: 73156 - DNA, 75 bp, synthetic construct
  source 1..75: mol_type = other DNA
catacatgtgggcgctggtatgcgtcctcgtttctctcattctgtatgcaggactactcccccgaatgatttcat

SEQ ID NO: 73157 - DNA, 75 bp, synthetic construct
  source 1..75: mol_type = other DNA
gtttacggtgcgcagggtgtcaaagtaccactgaatgatgcgcttcttcagtgggaacaagagcagacagaaggc

SEQ ID NO: 73158 - DNA, 75 bp, synthetic construct
  source 1..75: mol_type = other DNA
cagtatcataaagactggaatgaggataaaaatgctatgaaagcaattgataaactcaaaaattatcttaataaa

SEQ ID NO: 73159 - DNA, 75 bp, synthetic construct
  source 1..75: mol_type = other DNA
caggatcgctggcatcttggcgtgatggcaggctacgccaatcagcacagtaatactcagagtaatcgtgtgggt

SEQ ID NO: 73160 - DNA, 75 bp, synthetic construct
  source 1..75: mol_type = other DNA
ggtaaactggtgccgcaggacccgaacgatgaaccggcgtcggagctgctgaagcgtattgcggcggaaaaagcg

SEQ ID NO: 73161 - DNA, 75 bp, synthetic construct
  source 1..75: mol_type = other DNA
ctgttaagcaagctgaccactgccggaatcaacggtcagttccgcacaccgcgccacattatccgcacgatggtt

SEQ ID NO: 73162 - DNA, 75 bp, synthetic construct
  source 1..75: mol_type = other DNA
aatgccgcatgcgaaggctttttcggcagactgaaaacggaaatgtattatgggcgtaaatggtcgggcatcacg

SEQ ID NO: 73163 - DNA, 75 bp, synthetic construct
  source 1..75: mol_type = other DNA
cgccaacgcgtaattgttttgctttctcatcccgccaacccgcgcgatcacaccaacgttttgatgcacgttcag

SEQ ID NO: 73164 - DNA, 75 bp, synthetic construct
  source 1..75: mol_type = other DNA
ggctccgcgtatatcacgttcagaaaaccggaactggttgaccgactgaatgatattattgcagaacactatcct

SEQ ID NO: 73165 - DNA, 75 bp, synthetic construct
  source 1..75: mol_type = other DNA
ccgacgccatcaacgttctggccctgaatgcgggccggatcgctgtggatattgacggcattgaactggctgcgc

SEQ ID NO: 73166 - DNA, 75 bp, synthetic construct
  source 1..75: mol_type = other DNA
aatcataaaaaaagacccgggcatcagtatcagtcacctgaacaacagagaaaaaacaaagatcgctgatgccct

SEQ ID NO: 73167 - DNA, 75 bp, synthetic construct
  source 1..75: mol_type = other DNA
agggtgtcaaagtcccactgaatgatgcgcttcttcagtgggaacaagagcagacagaaggcgtctcagatccat

SEQ ID NO: 73168 - DNA, 75 bp, synthetic construct
  source 1..75: mol_type = other DNA
ggtcgaagccggatgtatgatggggtatctttccacctcgtttcatgccgttgatttaggcgcaccctttgtatc

SEQ ID NO: 73169 - DNA, 75 bp, synthetic construct
  source 1..75: mol_type = other DNA
gcacctgttcagcggcaaaccgatccccgacaatcgggaaaacatcaccattcatctggatgagcacatccagtc

SEQ ID NO: 73170 - DNA, 75 bp, synthetic construct
  source 1..75: mol_type = other DNA
aataacgactggacagtgacctacccgtcttatcagcggctggttcagtacaaaacggacggtgataaaggctca

SEQ ID NO: 73171 - DNA, 75 bp, synthetic construct
  source 1..75: mol_type = other DNA
gccatattctgagcgtactgccggaatggccttccaaccgggttgatgaactcctgccatggaacgtagtactca

SEQ ID NO: 73172 - DNA, 75 bp, synthetic construct
  source 1..75: mol_type = other DNA
ggaggcggacaataacacagcggaaagagcgcttcgtgcagtctgtctcggaaagaaaaattcttatgacctttg

SEQ ID NO: 73173 - DNA, 75 bp, synthetic construct
  source 1..75: mol_type = other DNA
aacttcacatggaagaatatcttaagatgtaaccgtatcggagaaagatataactttacacagacaaatattgat

SEQ ID NO: 73174 - DNA, 75 bp, synthetic construct
  source 1..75: mol_type = other DNA
tgaaacagtcgagcgttttatcgtgtcgccgggggaagtagtacccgcgccgccgcatccgacatcatcaggtca

SEQ ID NO: 73175 - DNA, 75 bp, synthetic construct
  source 1..75: mol_type = other DNA
cggagccgtgcccctggacaacaatatctgcgagcgtgctatccgcccggtcgttatgggacgaaaggcctggtt

SEQ ID NO: 73176 - DNA, 75 bp, synthetic construct
  source 1..75: mol_type = other DNA
tccgattggactgaaggggggatggaacctgtatggatatcaattgaatccgatatcagacatcgaccccctggg

SEQ ID NO: 73177 - DNA, 75 bp, synthetic construct
  source 1..75: mol_type = other DNA
gaacggtgcagaactggccgctgcactagcaccggagctgatggggattaaaaaccagcctgagatgataaaaaa

SEQ ID NO: 73178 - DNA, 75 bp, synthetic construct
  source 1..75: mol_type = other DNA
cgggctggatgtcgctgtcacggaaaccggaagtgacctggtacggctgggacggcgaccggctgaccacgatac

SEQ ID NO: 73179 - DNA, 75 bp, synthetic construct
  source 1..75: mol_type = other DNA
tggtttaggcggtttttttgttgcgttacaccaggtaatcgaggcgttagggggaatttccgaagctgccaggta

SEQ ID NO: 73180 - DNA, 75 bp, synthetic construct
  source 1..75: mol_type = other DNA
gggcggcggatcaggggacggcgcaggtgaaagccgaggcggcgctggatgaccataacgagtatcagcagaccg

SEQ ID NO: 73181 - DNA, 75 bp, synthetic construct
  source 1..75: mol_type = other DNA
tccgtgaagatccgcaggcaaatccactgaccacgccatcggggaaaattgagatttattcgcaggcgctggctg

SEQ ID NO: 73182 - DNA, 75 bp, synthetic construct
  source 1..75: mol_type = other DNA
aacaacgccacggcgcgagcgtgatgcgtgatggcatgatggcggcaggggttatcacgtcaggcgaatggctgg

SEQ ID NO: 73183 - DNA, 75 bp, synthetic construct
  source 1..75: mol_type = other DNA
atcctaacgtcgccaaccgcaacaagggcccgcgccgtcagccggaaaagaatgtcttcaccgatgaacagattg

SEQ ID NO: 73184 - DNA, 75 bp, synthetic construct
  source 1..75: mol_type = other DNA
gagtccattgagctgttactggatgaggcgctggaaacgggggaaaacgagagcacggagtttgacgtcaccacg

SEQ ID NO: 73185 - DNA, 75 bp, synthetic construct
  source 1..75: mol_type = other DNA
tatgccatcaagcgagttacgaagatagatgaacgcttttttgacctgctttatctgcgaatgcaaatcaaaggt

SEQ ID NO: 73186 - DNA, 75 bp, synthetic construct
  source 1..75: mol_type = other DNA
caaaggtgcattgcaggaaatcctcaatgtgtgttcgcaagtgcgtcacaatggcgagattgtaccgctcgatga

SEQ ID NO: 73187 - DNA, 75 bp, synthetic construct
  source 1..75: mol_type = other DNA
cgcgtgatggtcgtgactacgatccggaagtactgcagaaggcggtgaatgatgcggtcgcaaatattccgcagc

SEQ ID NO: 73188 - DNA, 75 bp, synthetic construct
  source 1..75: mol_type = other DNA
tctgtttatccatgactgactttggtaagcgtctcgcctcactgcgtaaggcaaggcagttaacgcagatagaac

SEQ ID NO: 73189 - DNA, 75 bp, synthetic construct
  source 1..75: mol_type = other DNA
ctggccgtgtttgctgaacgccgtaaggacagttttggtccgtatgtccggctgatgagcgtcaccctgaactga

SEQ ID NO: 73190 - DNA, 75 bp, synthetic construct
  source 1..75: mol_type = other DNA
gtcatcatatgcatcaggttcaggctggcgaaaaatgccagatggttcaattgaacagtggggacgaattagttt

SEQ ID NO: 73191 - DNA, 75 bp, synthetic construct
  source 1..75: mol_type = other DNA
acggttacggggtcaagcgggaagcttttcatgaaaccgagcttgttccgggggaggggagtcgttctgcggaag

SEQ ID NO: 73192 - DNA, 75 bp, synthetic construct
  source 1..75: mol_type = other DNA
cgtccgatattccggacatcctcaccatgaatattgaaccggacctgctggatgccatgctccggaaaaccggtc

SEQ ID NO: 73193 - DNA, 75 bp, synthetic construct
  source 1..75: mol_type = other DNA
cattccacaatgggtgaccctggaaccccgtgtcttcggctggatggaccgtctttgcgaagactactgcggtgg

SEQ ID NO: 73194 - DNA, 75 bp, synthetic construct
  source 1..75: mol_type = other DNA
gcacggatacatataccggccgtgaagtacaggatattcccggtgtgctggctgtgtttgctgaacgccgtaagg

SEQ ID NO: 73195 - DNA, 75 bp, synthetic construct
  source 1..75: mol_type = other DNA
ataacgccagttttgaagaatggcatgaactgttaatggattatgcagagttacgcggtggaagtgccgctgatg

SEQ ID NO: 73196 - DNA, 75 bp, synthetic construct
  source 1..75: mol_type = other DNA
cgtacggagtgttatgccatgacggttcattattaccgtctgcgggattatgccctgcagcatccggaatgcagc

SEQ ID NO: 73197 - DNA, 75 bp, synthetic construct
  source 1..75: mol_type = other DNA
tcatcagggattcgatggcctgggctgtcctgtcactgttgcagttcattctggttcaggttctggtcagaacaa

SEQ ID NO: 73198 - DNA, 75 bp, synthetic construct
  source 1..75: mol_type = other DNA
acaactggatatcatcaacaccgcgttcagggtaatcgaaacggttcgcccaaaactggccagcagccggtgcga

SEQ ID NO: 73199 - DNA, 75 bp, synthetic construct
  source 1..75: mol_type = other DNA
tgagcaggctgaagccctccgtcagaaagatcagcaactgagtctggttgaagagacggaggccttcctgcgctc

SEQ ID NO: 73200 - DNA, 75 bp, synthetic construct
  source 1..75: mol_type = other DNA
gcatgtccaccacgttggcgctggtactggcaggtacaggcgtgatgttcccgtttttctcaccgttcctcggct

SEQ ID NO: 73201 - DNA, 75 bp, synthetic construct
  source 1..75: mol_type = other DNA
atgacaacctcttcgcataattccaccacaccttctgtttccgtgaccgctgcatcagggaataacccgcctcag

SEQ ID NO: 73202 - DNA, 75 bp, synthetic construct
  source 1..75: mol_type = other DNA
cgggtacgttcgtccgcacatcctctgccgtcctccatcatgatggcgctgagtgatgaattgtttggacgggaa

SEQ ID NO: 73203 - DNA, 75 bp, synthetic construct
  source 1..75: mol_type = other DNA
ggcggaaaagtggagtggacaaaatcaggtaataaactgaaagggaataacccgacaccattttatattaatatt

SEQ ID NO: 73204 - DNA, 75 bp, synthetic construct
  source 1..75: mol_type = other DNA
atgattttggtgacctgctgcgccgtgaaggctgccgtggattttttattcacaccggtcgtacgggaccggcca

SEQ ID NO: 73205 - DNA, 75 bp, synthetic construct
  source 1..75: mol_type = other DNA
ggggagacgctgagctttctgtccgagctgggcgtggcgctgctgttgttcatggtcggactggaattctccctc

SEQ ID NO: 73206 - DNA, 75 bp, synthetic construct
  source 1..75: mol_type = other DNA
gtttggcagaagacaggaaataaactcataggaacaaatccgaccccattttatataaatctgtcggagttgagt

SEQ ID NO: 73207 - DNA, 75 bp, synthetic construct
  source 1..75: mol_type = other DNA
ccaagtctgctgcggcagtggccgttccgcagtcacgtgaagacgtgattaacgatatccgaaaaattggcgaca

SEQ ID NO: 73208 - DNA, 75 bp, synthetic construct
  source 1..75: mol_type = other DNA
gtctgtgcgaagactactacggtggtatctggaatctgtacagtctgaacaacggcggggcatttatggcccccg

SEQ ID NO: 73209 - DNA, 75 bp, synthetic construct
  source 1..75: mol_type = other DNA
actgtatcgtcagagtgaaatctttgcccgccagggtgtcgaactgagccgtgccttactctccaactgggttga

SEQ ID NO: 73210 - DNA, 75 bp, synthetic construct
  source 1..75: mol_type = other DNA
aacgaagccgtcagtcgcgaacgtcagacgggaatgcagatggtgaaatctgtgcttgaacgcatcggggaggcg

SEQ ID NO: 73211 - DNA, 75 bp, synthetic construct
  source 1..75: mol_type = other DNA
cttttcataagctggggcgcaaagtgctgtatatgcgcactgatctcgatgcttatcttgcatccactcgcagaa

SEQ ID NO: 73212 - DNA, 75 bp, synthetic construct
  source 1..75: mol_type = other DNA
gtgggtaagcatcactggaaagtagaaaaacagcctgagtggtacgtgaaagctgtcagaaaaactatcgcaaag

SEQ ID NO: 73213 - DNA, 75 bp, synthetic construct
  source 1..75: mol_type = other DNA
cgttatttatttctgaacttggctcgttaccggaaaatgtcacctggttatcgccggaaggggaatatcagaagt

SEQ ID NO: 73214 - DNA, 75 bp, synthetic construct
  source 1..75: mol_type = other DNA
ttaacaaaagaaatatataaaagctcatcgaaaatcaacaattgcttgaacagaattaaattaccagagatgata

SEQ ID NO: 73215 - DNA, 75 bp, synthetic construct
  source 1..75: mol_type = other DNA
atgcgctggaccggttggtacagcagggcggctttgacgggcggacgcaacgttatcattatgacctgaccggaa

SEQ ID NO: 73216 - DNA, 75 bp, synthetic construct
  source 1..75: mol_type = other DNA
gggattcagaaattcagcatcatgcctgatagaggcgaaatgttctcgtgctgacttgttggcagatagaaaaaa

SEQ ID NO: 73217 - DNA, 75 bp, synthetic construct
  source 1..75: mol_type = other DNA
gaacgaggatttacgccgctgggctgatactcctttgcctgctgacgttatccggctgcggaaacgtccggcatt

SEQ ID NO: 73218 - DNA, 75 bp, synthetic construct
  source 1..75: mol_type = other DNA
tggtggtgggataaatgcggctatcacatattctgagaccaagtctttacctacatcgggagtcagcaattcagt

SEQ ID NO: 73219 - DNA, 75 bp, synthetic construct
  source 1..75: mol_type = other DNA
caatctgatgtctgatttcgttctggataaaacaaaggcgaccgcagagggccgccagtgggaaagctacatact

SEQ ID NO: 73220 - DNA, 75 bp, synthetic construct
  source 1..75: mol_type = other DNA
ccgctctggccatatctctgctattcactgcacctgtttatgcagctgatgaaggatccggtgaaattcacttta

SEQ ID NO: 73221 - DNA, 75 bp, synthetic construct
  source 1..75: mol_type = other DNA
ttatgccatgacggtccattattaccggctgcgggattacgccctgcagcatccggaatgcagcgccattatgcg

SEQ ID NO: 73222 - DNA, 75 bp, synthetic construct
  source 1..75: mol_type = other DNA
atgagtatcgatgcactacgatgggctaaaaaggtgaaaaccggcagttcatccagtaagtcagtattgacctgg

SEQ ID NO: 73223 - DNA, 75 bp, synthetic construct
  source 1..75: mol_type = other DNA
tgtcccagccgcagatctaccagattattgcccgccagagaaagctgcatacacgacgtcatcagcctgatctgt

SEQ ID NO: 73224 - DNA, 75 bp, synthetic construct
  source 1..75: mol_type = other DNA
gatttggctcggttcttcttgaatgggatatgcctaattatcgcggacattcactgactgaaatctggcggggta

SEQ ID NO: 73225 - DNA, 75 bp, synthetic construct
  source 1..75: mol_type = other DNA
tggcctgcaacaactggttgccaccatagtccctgatgaacagcgcatcagcttctggccgcagcattttggcct

SEQ ID NO: 73226 - DNA, 75 bp, synthetic construct
  source 1..75: mol_type = other DNA
cacggagccagcattatgaaagatggcatgatggcggcagggattatcacgtcaggtgaatggctggacggcgtg

SEQ ID NO: 73227 - DNA, 75 bp, synthetic construct
  source 1..75: mol_type = other DNA
atgcgataccgtcgcgaagatactgaaggcgattacactttcggccagggtgacgatactttccttatcgacagt

SEQ ID NO: 73228 - DNA, 75 bp, synthetic construct
  source 1..75: mol_type = other DNA
tccggactggcaacccgatgccgactttatccgcctggcggcgctatggggcgtggcgctaagagagccggtgac

SEQ ID NO: 73229 - DNA, 75 bp, synthetic construct
  source 1..75: mol_type = other DNA
cagcactctgggtcacgccagtaaagagtttgttgctcaggggtatcggtaagatggtgggggccatctgccgaa

SEQ ID NO: 73230 - DNA, 75 bp, synthetic construct
  source 1..75: mol_type = other DNA
cccgtgttacggaaagtaccgacctggtaacagcgattaacgatgttgattccagcgttatcggtatcgtggcaa

SEQ ID NO: 73231 - DNA, 75 bp, synthetic construct
  source 1..75: mol_type = other DNA
aataccagaacctgctgatgtgtgagtttgtggacgatctcgcgtccgtgttcccgctcagcgagctgcaagcgt

SEQ ID NO: 73232 - DNA, 75 bp, synthetic construct
  source 1..75: mol_type = other DNA
cccgcgaacgtgagggattatcgccgcgtgatggtggcgatgagttcagccaggcctggaaacaggagatcgaag

SEQ ID NO: 73233 - DNA, 75 bp, synthetic construct
  source 1..75: mol_type = other DNA
atctgcccagtcacagctcggtgttaaaccgcgcatcctcggcgtgccggggcacgataataaagccgttgctac

SEQ ID NO: 73234 - DNA, 75 bp, synthetic construct
  source 1..75: mol_type = other DNA
tatcaggcgctgctgaagcgacacaacctgcgtggcagtatgagtgcgaaaggctactgttatacaatgcctgtg

SEQ ID NO: 73235 - DNA, 75 bp, synthetic construct
  source 1..75: mol_type = other DNA
tgcagtctgtctcggaaagaaaaattcgtgttcttcggtagcgatcacggcggcgagcgtggtgcactgttgtac

SEQ ID NO: 73236 - DNA, 75 bp, synthetic construct
  source 1..75: mol_type = other DNA
tcggtgataaaatgatttcaatcaatctattacctatgaccctggttaacgagcctgacgcagtctcttttttac

SEQ ID NO: 73237 - DNA, 75 bp, synthetic construct
  source 1..75: mol_type = other DNA
tcgacagtgacagctatcagttgctcaaggcatatgatgtcaatatctccggtctggtaagcaccatcatgcaga

SEQ ID NO: 73238 - DNA, 75 bp, synthetic construct
  source 1..75: mol_type = other DNA
gtggccggcactgacgtactatgcgaacgatggctgggtggaaatcgataacaacatcgctgaaaatgccctgcg

SEQ ID NO: 73239 - DNA, 75 bp, synthetic construct
  source 1..75: mol_type = other DNA
aaaaacaacctgagtggtacgtgaaagctgtcagaaaaactatcgcggcattgcctgggggttacgctgaagctg

SEQ ID NO: 73240 - DNA, 75 bp, synthetic construct
  source 1..75: mol_type = other DNA
ttattcgtcacgttacgccaggcaatatcacctaccgccgtgaggcttacgaatatgactgcgtaatgccgcgcc

SEQ ID NO: 73241 - DNA, 75 bp, synthetic construct
  source 1..75: mol_type = other DNA
ggtgttggtggattttacgggaaagatgatgtctgtcatttctgatggcgtcctcattggtctggcgatctactt

SEQ ID NO: 73242 - DNA, 75 bp, synthetic construct
  source 1..75: mol_type = other DNA
accatcaccgaaccctgtacaggaacggtgcgcacgtatttacaggaagaagttctgcatctccgctatgcctcg

SEQ ID NO: 73243 - DNA, 75 bp, synthetic construct
  source 1..75: mol_type = other DNA
accaaagaaggtaccgaagaaccgtggtatgtggtggacaaagacgtcgaaaacaacattctggttgtcgctcag

SEQ ID NO: 73244 - DNA, 75 bp, synthetic construct
  source 1..75: mol_type = other DNA
gagagctatatcgcagcattcaactggatggcagagcaactgagccgccgcatggcaattggcgaagaaatgcag

SEQ ID NO: 73245 - DNA, 75 bp, synthetic construct
  source 1..75: mol_type = other DNA
acggtggcgaacgaccggtgcatcacggtacgtaatgaccagacgctgcaggtgacgaatgaccggacggtgagc

SEQ ID NO: 73246 - DNA, 75 bp, synthetic construct
  source 1..75: mol_type = other DNA
gccgctttggctttttgatgcgctggatattgagtttggattctggctggattcagctgcgagcgacaaaaatgc

SEQ ID NO: 73247 - DNA, 75 bp, synthetic construct
  source 1..75: mol_type = other DNA
tccattaggattagaaacactaaaatgcattaagccactgcattcaatgggcggaactggtgaaagaagcggtcc

SEQ ID NO: 73248 - DNA, 75 bp, synthetic construct
  source 1..75: mol_type = other DNA
ctgggctgattcgctgctggctgtttttaaccgtctcgttgctatcgcacagcttgctggattcggtaaccactg

SEQ ID NO: 73249 - DNA, 75 bp, synthetic construct
  source 1..75: mol_type = other DNA
agatatcgttcaccacaaaaatcaccgggcgtggtcaacagtggctgaccagaaagctgctcgataacggaatgc

SEQ ID NO: 73250 - DNA, 75 bp, synthetic construct
  source 1..75: mol_type = other DNA
tactgaaatcatgccagcaacaactgacacagccctcaaaccatgccagcgccgatctactgccagccgtagtag

SEQ ID NO: 73251 - DNA, 75 bp, synthetic construct
  source 1..75: mol_type = other DNA
ccacaccgtggcgcacgtggttatgaggtccgactaagtagtcaggccattgcgcaacacgttctgaaaaacaac

SEQ ID NO: 73252 - DNA, 75 bp, synthetic construct
  source 1..75: mol_type = other DNA
ttggccactgattacgccttcgaagtaaaaaacgcaattttttattcaagacaagatattgctcctgaaaaacag

SEQ ID NO: 73253 - DNA, 75 bp, synthetic construct
  source 1..75: mol_type = other DNA
tattgagcaggcgcggcaactgcatcagagaggcatgcaaagaagggaaattgccagaaaattaggcatgccgct

SEQ ID NO: 73254 - DNA, 75 bp, synthetic construct
  source 1..75: mol_type = other DNA
aggtcagcgctacttatgaaaaacggaacgacggagggattcgcgtacttaaccgtggatacgatccaacgaaaa

SEQ ID NO: 73255 - DNA, 75 bp, synthetic construct
  source 1..75: mol_type = other DNA
gacgatatcggccacattactgaacgagaacggcgtcacagagtggacgccgctgttttatgaggaccatccggc

SEQ ID NO: 73256 - DNA, 75 bp, synthetic construct
  source 1..75: mol_type = other DNA
gtttcactgggacaggtataacccggcaacggaggcgagttcatgctgggtgagggtgtcgcaggcgtgggcggg

SEQ ID NO: 73257 - DNA, 75 bp, synthetic construct
  source 1..75: mol_type = other DNA
tggactttctgaacggcgacccggaccagcccattgtgacgggacgcacataccatgaagacaaccgttcgccgg

SEQ ID NO: 73258 - DNA, 75 bp, synthetic construct
  source 1..75: mol_type = other DNA
ggaaggcttcaccactgacggtattgccacaaaaatccgtatcgatgccggtgtggcaccgcttgactggcgcgg

SEQ ID NO: 73259 - DNA, 75 bp, synthetic construct
  source 1..75: mol_type = other DNA
atataatgtaaactctaaggatattgaaaatattcttgatggcaaaggggatttatttaaaaaacgtacactgtg

SEQ ID NO: 73260 - DNA, 75 bp, synthetic construct
  source 1..75: mol_type = other DNA
acgcatacctaccaagctgggatacaaaaatccaaagcatgttcaggtcattgaaataaccaaccatttcccggg

SEQ ID NO: 73261 - DNA, 75 bp, synthetic construct
  source 1..75: mol_type = other DNA
aaaaatccaaagcatgttcaggtcattgaaataaccaaccatttcccgggcggttattgggaagatcaggggtac

SEQ ID NO: 73262 - DNA, 75 bp, synthetic construct
  source 1..75: mol_type = other DNA
cgtacgctgttacaaacgctgatagcatcgcagccacaactagcagaaagggtgatgccgtggttaagtactcaa

SEQ ID NO: 73263 - DNA, 75 bp, synthetic construct
  source 1..75: mol_type = other DNA
tacctcgcttattcctggctcgaaaatgaaaaaggggagaaaagcgatgatcttctggtcgccctgccgccgata

SEQ ID NO: 73264 - DNA, 75 bp, synthetic construct
  source 1..75: mol_type = other DNA
ccatcaaaggggttaaacgctataaacagagccagctactggcggtggggaatccaaccgatctggcgattgaag

SEQ ID NO: 73265 - DNA, 75 bp, synthetic construct
  source 1..75: mol_type = other DNA
ttcagtcatttgctgacgaacgctgcggacgcgcaggcgttgtgtatcaggcgtcgaattttgattttattggca

SEQ ID NO: 73266 - DNA, 75 bp, synthetic construct
  source 1..75: mol_type = other DNA
gcgtggagcctactgccgttttgtcgcacagcagatgaccttctcgacttccggctgtgataatgccaaagtgac

SEQ ID NO: 73267 - DNA, 75 bp, synthetic construct
  source 1..75: mol_type = other DNA
tcaatggacagcctcatgctcaacggtatgggcatatcaatgcaacttcagggtattgataatcacaactgtaca

SEQ ID NO: 73268 - DNA, 75 bp, synthetic construct
  source 1..75: mol_type = other DNA
tcgctgaattacagctattccaataatatatggcaaaacgatcgggatcatttactcgcttttacgcttaatgtt

SEQ ID NO: 73269 - DNA, 75 bp, synthetic construct
  source 1..75: mol_type = other DNA
gaatagaaccgaaggttttctttccgccgttaataatcgtcggcatactttgttggcttacagtcagagatctgg

SEQ ID NO: 73270 - DNA, 75 bp, synthetic construct
  source 1..75: mol_type = other DNA
aacggacgagcgcctgtcgcgcctcgactggagccgcgagcagcgtctggcgctggtgaatgcgattgttgaaac

SEQ ID NO: 73271 - DNA, 75 bp, synthetic construct
  source 1..75: mol_type = other DNA
ttatcaggggctgttgctacgtgtttgatggccagcaggatgaaatatctgatgcgtatatctgcgcaacagacg

SEQ ID NO: 73272 - DNA, 75 bp, synthetic construct
  source 1..75: mol_type = other DNA
caaatcagcacgatgctcttgagaatattcagctcttagtagggactggtgcactactgtatagcagcaataacc

SEQ ID NO: 73273 - DNA, 75 bp, synthetic construct
  source 1..75: mol_type = other DNA
gggcgtggtcaacagtggctgaccagaaagctgctcgataacggaatgctgaaagtaacaggggaggctgcttaa

SEQ ID NO: 73274 - DNA, 75 bp, synthetic construct
  source 1..75: mol_type = other DNA
ttggtccaaacaaactgtttgcatggatgcgcgatcacaaaatccttattgcttcaggttcccggcgcaatgtgc

SEQ ID NO: 73275 - DNA, 75 bp, synthetic construct
  source 1..75: mol_type = other DNA
gttcttcgtcctgaccatcctggttgtaaaacgtatatcatcccttccgcttcgcctgcttgttgccgcaccatt

SEQ ID NO: 73276 - DNA, 75 bp, synthetic construct
  source 1..75: mol_type = other DNA
atgaatctggtgatgtcagataatgcccgtaacaagctgggctgctacatgacgcagcaggcgtcgcttaacaat

SEQ ID NO: 73277 - DNA, 75 bp, synthetic construct
  source 1..75: mol_type = other DNA
tcgaacaacgtcaggacaacaaaattatccgtccttccgccaattatgttggaccggaagaccgccagtttgtcg

SEQ ID NO: 73278 - DNA, 75 bp, synthetic construct
  source 1..75: mol_type = other DNA
atgaaaaatatcgtattagcatccttgctgggctttggcttaatttcttcggcctgggccactgaaaccgtgaat

SEQ ID NO: 73279 - DNA, 75 bp, synthetic construct
  source 1..75: mol_type = other DNA
tgattcttctggttgccagtatgtgcagccacggcgcagtgcagcctgaccgcacgcgcatcatctttaatagca

SEQ ID NO: 73280 - DNA, 75 bp, synthetic construct
  source 1..75: mol_type = other DNA
taaaccaccattttttatagatgataaatcggtagcttttaaattaaagctaccactcaataaaaatcgattaac

SEQ ID NO: 73281 - DNA, 75 bp, synthetic construct
  source 1..75: mol_type = other DNA
tggttttgtgttttctgcaggtgccggagctattgaagcttatatagagcgggtcagtcgcagtcgtggatttga

SEQ ID NO: 73282 - DNA, 75 bp, synthetic construct
  source 1..75: mol_type = other DNA
aaacaaatcgtcatcagcgaaccgctgctggataacaccgggcaggtcaatcgccagacgctaaaaatcctgttt

SEQ ID NO: 73283 - DNA, 75 bp, synthetic construct
  source 1..75: mol_type = other DNA
accacgaaagcgtcagaagctgcctcctcagccagggatgcgtcggcttcaaaagaggcggcaaaatcatcagaa

SEQ ID NO: 73284 - DNA, 75 bp, synthetic construct
  source 1..75: mol_type = other DNA
gttcttctttctctactttttcatcatggcaacctgttttccgtttttgcctgtatggctgtccgatgtggtcgg

SEQ ID NO: 73285 - DNA, 75 bp, synthetic construct
  source 1..75: mol_type = other DNA
tggtaaagcctttcctcagccagcaggtgttgcgttaccagtccgggaagcggaaacacaggaagaaataaaaac

SEQ ID NO: 73286 - DNA, 75 bp, synthetic construct
  source 1..75: mol_type = other DNA
catgacttagacagtaagaacccacacgctcacgtcatgttaaccctgaaaaccatcgggcccgaaggcttcggt

SEQ ID NO: 73287 - DNA, 75 bp, synthetic construct
  source 1..75: mol_type = other DNA
gcttctggccgcagcactttggcctcattccacagtgggtgaccctggagccccgtatcttcggctggatggacc

SEQ ID NO: 73288 - DNA, 75 bp, synthetic construct
  source 1..75: mol_type = other DNA
ccgcactgagtgcgctgtccattgacgatgacggctggtgccagctattgcctgccggtcatttcagtgcccgtg

SEQ ID NO: 73289 - DNA, 75 bp, synthetic construct
  source 1..75: mol_type = other DNA
tgacagtcaaaggtggtatcgagcatgtggtgatcgaggttgcagtgggtatcagcctgaaggggaaaaccattg

SEQ ID NO: 73290 - DNA, 75 bp, synthetic construct
  source 1..75: mol_type = other DNA
ttttaacctgctgttctgcgtgctggtggttcgtgctcgtgggaacgtttcaaaaatctttgtattacgaaggcg

SEQ ID NO: 73291 - DNA, 75 bp, synthetic construct
  source 1..75: mol_type = other DNA
gcggctgcatcatctgccagtgccgcgtcaacaagtgccgggcaggcctcagccagtgccaccgctgccggaaag

SEQ ID NO: 73292 - DNA, 75 bp, synthetic construct
  source 1..75: mol_type = other DNA
gcgccaactgacatcaccacggaagccctgcagcgtatcggtgaactgtacgctatcgaggctgagatccgcggc

SEQ ID NO: 73293 - DNA, 75 bp, synthetic construct
  source 1..75: mol_type = other DNA
gaacggcaaccttgaaatcaacggcaatgcccactccacaggcagcatgctctctgacggccagaactccaatca

SEQ ID NO: 73294 - DNA, 75 bp, synthetic construct
  source 1..75: mol_type = other DNA
ggatggtgtcattctgggcgcggtgtattcagacgtcgataagccaccgttcagcgacaaaaacgtccggggcac

SEQ ID NO: 73295 - DNA, 75 bp, synthetic construct
  source 1..75: mol_type = other DNA
cagggataacgaaaccgccgacgcagcggtacaggcaggcaacaccgggcattactgcctgagcaccatgcatac

SEQ ID NO: 73296 - DNA, 75 bp, synthetic construct
  source 1..75: mol_type = other DNA
tattcattgttacggttgcattctctgccttattaattttgttagttggttttgatattccaggtaaaatttata

SEQ ID NO: 73297 - DNA, 75 bp, synthetic construct
  source 1..75: mol_type = other DNA
tgacccgctacctcggtatcggcgactacgagagctggtcagaagccgacaaacaggcgttcctgatccgcgaac

SEQ ID NO: 73298 - DNA, 75 bp, synthetic construct
  source 1..75: mol_type = other DNA
gtttcactgggacaggtataacccggcaacggaggcgagttcgtgctgggtgggggtgtcgcaggcgtgggcggg

SEQ ID NO: 73299 - DNA, 75 bp, synthetic construct
  source 1..75: mol_type = other DNA
gtttcactgggacaggtataacccggcaacggaggcgagttcgtgctgggtgggcgtgtcccaggcgtgggcggg

SEQ ID NO: 73300 - DNA, 75 bp, synthetic construct
  source 1..75: mol_type = other DNA
ggtggatatctgcaagaaccggcttatcgccaccatcccgctgatggaagaggtcgtttttgagcaacgctacca

SEQ ID NO: 73301 - DNA, 75 bp, synthetic construct
  source 1..75: mol_type = other DNA
taatgttgttaaccatcagcttgggttgcaatgctgcggtgcaacccgatcgcacacgcattgtgtttaacgcca

SEQ ID NO: 73302 - DNA, 75 bp, synthetic construct
  source 1..75: mol_type = other DNA
gtttcactgggacaggtataacccggcaacggaggcgagttcgtgctgggtgggagtgtcacaggcgtgggcggg

SEQ ID NO: 73303 - DNA, 75 bp, synthetic construct
  source 1..75: mol_type = other DNA
gtttcactgggacaggtataacccggcaacggaggcgagttcgtgctgggtgagagtgtcgcaggcgtgggcggg

SEQ ID NO: 73304 - DNA, 75 bp, synthetic construct
  source 1..75: mol_type = other DNA
tggcatgtcaaaagtagataccaatgattgtagaggcatgtcaagaaaaataatgacaacagaggtgaataaaac

SEQ ID NO: 73305 - DNA, 75 bp, synthetic construct
  source 1..75: mol_type = other DNA
gtttcactgggacaggtataacccggcaacggaggcgagttcgtgctgggtgcgcgtgtcgcaggcgtgggcggg

SEQ ID NO: 73306 - DNA, 75 bp, synthetic construct
  source 1..75: mol_type = other DNA
gtttcactgggacaggtataacccggcaacggaggcgagttcgtgctgggtgtgagtgtctcaggcgtgggcggg

SEQ ID NO: 73307 - DNA, 75 bp, synthetic construct
  source 1..75: mol_type = other DNA
aacaactacagccagtaccaaagaaactacgtcagcgtaatgcacaatccagtacattgaagaaagatattcagg

SEQ ID NO: 73308 - DNA, 75 bp, synthetic construct
  source 1..75: mol_type = other DNA
cgctcaggctgaaaagcgtataaccgacctccagaacaggcttggcgaagcgcactcgcaacttacctcaatggc

SEQ ID NO: 73309 - DNA, 75 bp, synthetic construct
  source 1..75: mol_type = other DNA
acatactgtcggtattggtgctcatacgcactccgttgcgattggttcacatggacacaccatcaccgttaacgc

SEQ ID NO: 73310 - DNA, 75 bp, synthetic construct
  source 1..75: mol_type = other DNA
gataagtggttttacaagctcatcaaggatggtgcctttccggcccccatcaaactcggccgcagctcccgatgg

SEQ ID NO: 73311 - DNA, 75 bp, synthetic construct
  source 1..75: mol_type = other DNA
ctgatggttcagatggtgtccggtgaacgtattccggcggatgatttcagtctggttacggatgacagggtgatc

SEQ ID NO: 73312 - DNA, 75 bp, synthetic construct
  source 1..75: mol_type = other DNA
tggcgggatggatttcggatgggatcacccgcaggcgcaggttcagctttggtgggataaggacgcagacacaat

SEQ ID NO: 73313 - DNA, 75 bp, synthetic construct
  source 1..75: mol_type = other DNA
cgcgctttggcgtcagtgagggctatccctggaagcttcgcgaactggtgtttgatccggtcacggagcggctgt

SEQ ID NO: 73314 - DNA, 75 bp, synthetic construct
  source 1..75: mol_type = other DNA
accgcgcagattgttgatgaaatctgcgattttgtggcgaatcagcaggcggttttcctgggcggtcactacatc

SEQ ID NO: 73315 - DNA, 75 bp, synthetic construct
  source 1..75: mol_type = other DNA
ggacacctttgcagtggtgaatttcaggttaatccagaaccagtcttatccgtttgtgatgagtgtggatgtcgc

SEQ ID NO: 73316 - DNA, 75 bp, synthetic construct
  source 1..75: mol_type = other DNA
ctttctattggcgtataccccgatgtaacgctagccgatgctcgcgagaaacgcagtgaagccaggaaactcctc

SEQ ID NO: 73317 - DNA, 75 bp, synthetic construct
  source 1..75: mol_type = other DNA
gataaaccatctgacatcggtgaagaccgtaacggaagggcttgctcaggcaacagagcagcttgccgttgagca

SEQ ID NO: 73318 - DNA, 75 bp, synthetic construct
  source 1..75: mol_type = other DNA
cagagagtgtccgctaccttgaaataaaaggtagcgccacagacagcataaaaaatgttccaaacgggttatcat

SEQ ID NO: 73319 - DNA, 75 bp, synthetic construct
  source 1..75: mol_type = other DNA
agagcgtctcagcgatcagcaggattattatgcaaaggccgatgctttacgtaataactggaatgccggactcca

SEQ ID NO: 73320 - DNA, 75 bp, synthetic construct
  source 1..75: mol_type = other DNA
actttgctatcgttcgtgagcttgagattgattttcatagcggcatgaccgtaataactggcgagaccggcgcgg

SEQ ID NO: 73321 - DNA, 75 bp, synthetic construct
  source 1..75: mol_type = other DNA
tggggggatgttggtatggctcttggctattgtgctcttgcaggcggtgcagtagtcggcggtacgtgggcgctg

SEQ ID NO: 73322 - DNA, 75 bp, synthetic construct
  source 1..75: mol_type = other DNA
cagcagtccagcgcgaacgtgacacgcagtctctctccgttatcacagcagaactcgaacccgtcagagcaccat

SEQ ID NO: 73323 - DNA, 75 bp, synthetic construct
  source 1..75: mol_type = other DNA
taaatgcggctatcacatattctgagaccaagtctttacctacatcgggagtcagcaattcagtaggtgtaacgg

SEQ ID NO: 73324 - DNA, 75 bp, synthetic construct
  source 1..75: mol_type = other DNA
tgtttcccggtgatcatgatcccaataaagttatgagcgaaaacacagttaataatgcgctcaggactatgggct

SEQ ID NO: 73325 - DNA, 75 bp, synthetic construct
  source 1..75: mol_type = other DNA
agcgtcctgatttccttgtctggctctgtgaaaagctgggggtaatgagaatcccctccatgtttaacacggact

SEQ ID NO: 73326 - DNA, 75 bp, synthetic construct
  source 1..75: mol_type = other DNA
taaggttatgagtgaaaacacggtaaacagcgcattgcgtgcgatgggctatgacacgaaaactgaagtttgcgg

SEQ ID NO: 73327 - DNA, 75 bp, synthetic construct
  source 1..75: mol_type = other DNA
aggtaaacgcctgaaaggctggctgccggtggcctgtattaatccggagagaaagggacaggctgaacgtattgc

SEQ ID NO: 73328 - DNA, 75 bp, synthetic construct
  source 1..75: mol_type = other DNA
ggattacctggacgcactggagctggttgatacctccagtgggccagatattgaatggcctacgcctccggcagt

SEQ ID NO: 73329 - DNA, 75 bp, synthetic construct
  source 1..75: mol_type = other DNA
catgttaaataccgatgagtatcaggatacctttgacaatgagagacaatgttacgttctgactaaaaatcctca

SEQ ID NO: 73330 - DNA, 75 bp, synthetic construct
  source 1..75: mol_type = other DNA
ccagcccaggctggcatggcaccagaaaaccaggcgcaggcccagcaatccagcgggagtttctggatgccgctg

SEQ ID NO: 73331 - DNA, 75 bp, synthetic construct
  source 1..75: mol_type = other DNA
ttgcctctcagcaacgaacagatgaagcaaattgaagctctgacccgcgaggcgatgggcttttctgaaaaacgc

SEQ ID NO: 73332 - DNA, 75 bp, synthetic construct
  source 1..75: mol_type = other DNA
tacagggctacagctacgaggcgaagggcaatggcattgtgctgctgcctgaacgcgtggtgttcactaaagaga

SEQ ID NO: 73333 - DNA, 75 bp, synthetic construct
  source 1..75: mol_type = other DNA
tcgtagaactactgcaaaaagccagtaatggaatagacgcggctgtttcatttagccaggcacagattcctgatg

SEQ ID NO: 73334 - DNA, 75 bp, synthetic construct
  source 1..75: mol_type = other DNA
aattaagggcgtgcgttactcttatcgtggcatgaaaatgaaagaggagcatattgttcctctcagtcggaaggc

SEQ ID NO: 73335 - DNA, 75 bp, synthetic construct
  source 1..75: mol_type = other DNA
attactggcaaagatgcttttgtgatcatgccggatattgaattgaaggctattccagcactgttgaccaaaata

SEQ ID NO: 73336 - DNA, 75 bp, synthetic construct
  source 1..75: mol_type = other DNA
cagacaggtattttctggtcctaatgaggctatcgatctggcggtggtcggcattgtcgacacgctttcgcgata

SEQ ID NO: 73337 - DNA, 75 bp, synthetic construct
  source 1..75: mol_type = other DNA
gttcgtgctcagttagccgtgcagttgccgtattacctgctgccccaacatttctttcttctcaaggtgctgccg

SEQ ID NO: 73338 - DNA, 75 bp, synthetic construct
  source 1..75: mol_type = other DNA
aacagcctggaaaaatttcgcaagctgcaggccgataacaagaagttaggcgacaggctgaactatgccagacag

SEQ ID NO: 73339 - DNA, 75 bp, synthetic construct
  source 1..75: mol_type = other DNA
ttttagcggcggggcacgccgttcttgcctgtggagagatggtgcagtcaggccgcccgttgaagcaggaaccca

SEQ ID NO: 73340 - DNA, 75 bp, synthetic construct
  source 1..75: mol_type = other DNA
acctctgccgaactgcagagtgcagcggcaatggggcggcgattcggagaggcactggcggaagggctgaatatg

SEQ ID NO: 73341 - DNA, 75 bp, synthetic construct
  source 1..75: mol_type = other DNA
accagaatctgaggcagcatctggcaaggctgggcaggaagtcactgtcgttctcaaaatcggtggcgctgcatg

SEQ ID NO: 73342 - DNA, 75 bp, synthetic construct
  source 1..75: mol_type = other DNA
atggtaaatctccctcctgagctggggtcacctgatgtgtgggctggtggaggtattggactcattgcaggccta

SEQ ID NO: 73343 - DNA, 75 bp, synthetic construct
  source 1..75: mol_type = other DNA
acggtgctgtggacttcgccgcactggttgaaggtggtgcgcgcatgaatgtggcaaaccctgacgacagctggg

SEQ ID NO: 73344 - DNA, 75 bp, synthetic construct
  source 1..75: mol_type = other DNA
gtggtgtatgtcataccgatcttcatgttaagaatggcgattttggtgacaaaaccggcgtaattctgggccatg

SEQ ID NO: 73345 - DNA, 75 bp, synthetic construct
  source 1..75: mol_type = other DNA
gcgggggcggcattcgcacgtatttaaaaccgactggtaccagcatcccccatgcactgaagaacaggccgaatg

SEQ ID NO: 73346 - DNA, 75 bp, synthetic construct
  source 1..75: mol_type = other DNA
cgaacctgttaactcgcagtcagagcagtaaagaagtcgatatatacaacctaaaaatagattctgagatggata

SEQ ID NO: 73347 - DNA, 75 bp, synthetic construct
  source 1..75: mol_type = other DNA
gatggtcattatgtatatcagttctctgaatacggtactgatcgcgtaattgatgataattggcatgatggtgat

SEQ ID NO: 73348 - DNA, 75 bp, synthetic construct
  source 1..75: mol_type = other DNA
acaccatgagtacaattctgcacgaacagggctttaattctgcctggattgaaatgcagttagctcatatggata

SEQ ID NO: 73349 - DNA, 75 bp, synthetic construct
  source 1..75: mol_type = other DNA
ggtaaagaaaaatcagacccgtattaccgggatggataaccagctcctctcgttgtatgccaaagggatgaccac

SEQ ID NO: 73350 - DNA, 75 bp, synthetic construct
  source 1..75: mol_type = other DNA
cagaagatcctatgcagatatggggcgctgttggtgtccttcttatcctgctgctattcgttatatggttattct

SEQ ID NO: 73351 - DNA, 75 bp, synthetic construct
  source 1..75: mol_type = other DNA
tccgttgtatgtacgtaattctgatgggactaggttttcctatcatgagatatatgagtttaaactttgacacat

SEQ ID NO: 73352 - DNA, 75 bp, synthetic construct
  source 1..75: mol_type = other DNA
ccatgagcaactgaaaacggccatgcttcatgcgccggatggtcgccttcgtctgcgtaatgtgcttcagcatcc

SEQ ID NO: 73353 - DNA, 75 bp, synthetic construct
  source 1..75: mol_type = other DNA
aatatttttatatcgattccctttgattggggtgatgacgttacgacgcctcgtcggcaaatatatatgtctaac

SEQ ID NO: 73354 - DNA, 75 bp, synthetic construct
  source 1..75: mol_type = other DNA
taccggcggcttcaacagtgaaacagtacaggacgtcatgctgggagcggtggaacgccgcttcggcaacgagct

SEQ ID NO: 73355 - DNA, 75 bp, synthetic construct
  source 1..75: mol_type = other DNA
agggagtatggcgaaaacaaccccagactgtaccgtgcaggaacagagccccttgtggatctcgccctggaagag

SEQ ID NO: 73356 - DNA, 75 bp, synthetic construct
  source 1..75: mol_type = other DNA
ggcgtcgttttgtgctgaaagatcaggggttaacttcccatacctggaataacaaggtgaggcacatgcgtgcga

SEQ ID NO: 73357 - DNA, 75 bp, synthetic construct
  source 1..75: mol_type = other DNA
gataaggaccgttatctctccggcaatcctatcgaggtgacggtagaactgagagatgaaaatgacaaacctgtt

SEQ ID NO: 73358 - DNA, 75 bp, synthetic construct
  source 1..75: mol_type = other DNA
tggcgcaacagatactcgaagcgcacttcaccgagagtattcaggaagaaattgctgacgagctgggttttgatc

SEQ ID NO: 73359 - DNA, 75 bp, synthetic construct
  source 1..75: mol_type = other DNA
ttttgactctgaaaccaactacattctggcgcgctttaaagcctccagcgcagtgtttaaatctttgtgggatca

SEQ ID NO: 73360 - DNA, 75 bp, synthetic construct
  source 1..75: mol_type = other DNA
caagggcagaaaatgaatgcactgacaaccgatgtggcagcacaacagcaaaaagaaagggctcaatacgataaa

SEQ ID NO: 73361 - DNA, 75 bp, synthetic construct
  source 1..75: mol_type = other DNA
agccgaaagcggtgattgaaaattacgcgcaatatgcaggcgtaaaaccggaacaggtgctggtcagccgtggcg

SEQ ID NO: 73362 - DNA, 75 bp, synthetic construct
  source 1..75: mol_type = other DNA
gtgcagatgtgcgcatttttgccggaagcgatccggcgcataccgcaacagccaccagtggtatcagtgctgcca

SEQ ID NO: 73363 - DNA, 75 bp, synthetic construct
  source 1..75: mol_type = other DNA
atgcaggtcgaaatctttggcgacgagacgccgggtgcagtgtttgaaggcacgtatatcgttctgcccgcgaag

SEQ ID NO: 73364 - DNA, 75 bp, synthetic construct
  source 1..75: mol_type = other DNA
atatgggaacacatgcacgaaactggtcgtgttaataccacatacgaaacttttcgtcggcatgtccggcgatac

SEQ ID NO: 73365 - DNA, 75 bp, synthetic construct
  source 1..75: mol_type = other DNA
gattttctacaatcgtcagcgtcgtcactctcgtctggggaatatctccccggcagccttcagggaaaaatatca

SEQ ID NO: 73366 - DNA, 75 bp, synthetic construct
  source 1..75: mol_type = other DNA
ctatgggccagggagcctggcacgaggccaatatgtctggcgataaaatcgaccatggcggctgtgtgaatacgc

SEQ ID NO: 73367 - DNA, 75 bp, synthetic construct
  source 1..75: mol_type = other DNA
gctgcagtggtgggctgattatctggatgccaatcgggagaaggcggtaagtccgttcgattttggtaaaatgaa

SEQ ID NO: 73368 - DNA, 75 bp, synthetic construct
  source 1..75: mol_type = other DNA
ctgaatgacatcaacaagcatgatccggtctgtatcatgaccattgttgccaccacatggggaaacagccgggaa

SEQ ID NO: 73369 - DNA, 75 bp, synthetic construct
  source 1..75: mol_type = other DNA
cagcagactgttaatcatcttcctgatgacgatgttgaccgtgagttgcgcgaaaactttacccgcaaaacctga

SEQ ID NO: 73370 - DNA, 75 bp, synthetic construct
  source 1..75: mol_type = other DNA
gacagtcagtgcggcaggttgtggctgtatcagcccccggcgacaggggcttaaacaggtgtatggcaccggaca

SEQ ID NO: 73371 - DNA, 75 bp, synthetic construct
  source 1..75: mol_type = other DNA
ggagtgatgacgctatagagcgccagttaagccactctgagcgcaataatgtgcgcgcggcctatattcatactt

SEQ ID NO: 73372 - DNA, 75 bp, synthetic construct
  source 1..75: mol_type = other DNA
gggcgtatcaaactcgccaagcacggtaagtttctggaaggaagtgttgatgagcaggttgagcgttttcgacga

SEQ ID NO: 73373 - DNA, 75 bp, synthetic construct
  source 1..75: mol_type = other DNA
ctgggttatcgctcgccacgggaatatctgcggcagcgggcctgtaatgggttaagtgataacagatgtctggaa

SEQ ID NO: 73374 - DNA, 75 bp, synthetic construct
  source 1..75: mol_type = other DNA
cccttttgcccgggaaccggtggactgtgtgttatgggtgaaatcggatgaggtgatagccaacgattataatcc

SEQ ID NO: 73375 - DNA, 75 bp, synthetic construct
  source 1..75: mol_type = other DNA
tgtggtggtttcggaagagaaggagcattatctggtcgtggatggttttcatcgtcagttgctgggcaggaaagc

SEQ ID NO: 73376 - DNA, 75 bp, synthetic construct
  source 1..75: mol_type = other DNA
caggaggtttccaatggtggcagtgctactagtaccgttattaatgccggattccagtacatttcaagtggtggt

SEQ ID NO: 73377 - DNA, 75 bp, synthetic construct
  source 1..75: mol_type = other DNA
aggcaattgccaatataaaaatctggcataagggtgaacagcgcgcgccgcataagccattgttattgctatacg

SEQ ID NO: 73378 - DNA, 75 bp, synthetic construct
  source 1..75: mol_type = other DNA
catgaacagtaggcaatggtctggtaaagcagctattggtcgcctgaagggggacgagctggcgcaatataattt

SEQ ID NO: 73379 - DNA, 75 bp, synthetic construct
  source 1..75: mol_type = other DNA
actgagccattcagagcgcaataatgttcgtgcagcttatattcatacttctgaacatctagatgagcggcgtct

SEQ ID NO: 73380 - DNA, 75 bp, synthetic construct
  source 1..75: mol_type = other DNA
gatggttcaatggtggtctgattatatagatgcaactaagaaacaaatgattactccttatgagtttgctaaaaa

SEQ ID NO: 73381 - DNA, 75 bp, synthetic construct
  source 1..75: mol_type = other DNA
attttgacgggaaaactattacgttgccgcaggtgcgtaaaaattacccttttgaggggtttgtggagtggcatc

SEQ ID NO: 73382 - DNA, 75 bp, synthetic construct
  source 1..75: mol_type = other DNA
tattgccagttatctgcgataatttcgtgcaaactctgcaattaaatgcttatccggtattaatcacagagatgg

SEQ ID NO: 73383 - DNA, 75 bp, synthetic construct
  source 1..75: mol_type = other DNA
cgcaccataaaactaaaaatatcaagctgatggctattgttcagcgtttacagcggattatggtcaacgaaaatc

SEQ ID NO: 73384 - DNA, 75 bp, synthetic construct
  source 1..75: mol_type = other DNA
tccagcaaatccgtaaacagcgcgacccgttatttcgcaaaaatgtattacgcgcttataactaccagtgcgcga

SEQ ID NO: 73385 - DNA, 75 bp, synthetic construct
  source 1..75: mol_type = other DNA
ccggttttatcgagaccgcattctatgccgcaagcgattgtgacgctggcgagctggtcaaaatcagcacctgga

SEQ ID NO: 73386 - DNA, 75 bp, synthetic construct
  source 1..75: mol_type = other DNA
atgaaaatacatgatggtgagccaggattatacgccgcaatggaaaataatcaccctttgtgtgtcacacggttc

SEQ ID NO: 73387 - DNA, 75 bp, synthetic construct
  source 1..75: mol_type = other DNA
agacaatcccccagccctgcagcgcgttcacggatgcttaaacagcgtgacatggttaaagggggcgagaagaaa

SEQ ID NO: 73388 - DNA, 75 bp, synthetic construct
  source 1..75: mol_type = other DNA
tccacaccacggcggcgaacctggatatcgatatcccgtatgcgacggacccggcaggaaaccggctgccggacc

SEQ ID NO: 73389 - DNA, 75 bp, synthetic construct
  source 1..75: mol_type = other DNA
acgtgaatagatatgactggaaaaataaaacaactgagcatttattgaatgataataatctggcagataatcaca

SEQ ID NO: 73390 - DNA, 75 bp, synthetic construct
  source 1..75: mol_type = other DNA
ttgcctttacgccaggactgggggatgatagcactacgttaaaatctaaagtattcgcctgggcatacgaattat

SEQ ID NO: 73391 - DNA, 75 bp, synthetic construct
  source 1..75: mol_type = other DNA
aaccatcgagctggtggcgcgtcatctgcgcgaacacaaagtacagaagatgattatcgccaaccgcactcgcga

SEQ ID NO: 73392 - DNA, 75 bp, synthetic construct
  source 1..75: mol_type = other DNA
ctggcacagcaggcagaggtactggaaaaccagggcaaatgggcgcaggcggcagcacttcagcggcaacgactg

SEQ ID NO: 73393 - DNA, 75 bp, synthetic construct
  source 1..75: mol_type = other DNA
tcacgcacaatatttagaaaatagacgcgcaatgcttcagtggtatagtaacttcatatttaataaaattagtga

SEQ ID NO: 73394 - DNA, 75 bp, synthetic construct
  source 1..75: mol_type = other DNA
atgacccttttagcactcggtatcaaccataaaacggcacctgtatcgctgcgagaacgtgtatcgttttcgccg

SEQ ID NO: 73395 - DNA, 75 bp, synthetic construct
  source 1..75: mol_type = other DNA
cgcgtttattccagaaaaagagctgggtatcgtgatgctggctaacaaaaactatcccaatccagcgagagtcgc

SEQ ID NO: 73396 - DNA, 75 bp, synthetic construct
  source 1..75: mol_type = other DNA
gcatcccgtatgccaccgacccggcgggaaaccgcctgccggacccggagctacacccggacagcacgctcacgg

SEQ ID NO: 73397 - DNA, 75 bp, synthetic construct
  source 1..75: mol_type = other DNA
gatttgattcaggggagtccgctggccgattacatatcggcgaaaggattaaaagcaggtgatgttcatccggtt

SEQ ID NO: 73398 - DNA, 75 bp, synthetic construct
  source 1..75: mol_type = other DNA
accaggccattactcacagtataacggtcggcagtcgcataaccgttcaggggttcatttcatgccacaaggcaa

SEQ ID NO: 73399 - DNA, 75 bp, synthetic construct
  source 1..75: mol_type = other DNA
acaagggtttgacagtgcctggattgagatgcaattagcacatgttgataaaaattctattcgtggaacatacaa

SEQ ID NO: 73400 - DNA, 75 bp, synthetic construct
  source 1..75: mol_type = other DNA
ttgaaccgaagaacacggcggtgcggagtccggagagtaacggaatagcagagagcttcgtgaaaacgataaagc

SEQ ID NO: 73401 - DNA, 75 bp, synthetic construct
  source 1..75: mol_type = other DNA
cgattatttctgagagttactcccccgacgaatcgcccagtagcgatgccaaaaatagtcaaaatatgttgggat

SEQ ID NO: 73402 - DNA, 75 bp, synthetic construct
  source 1..75: mol_type = other DNA
tttgacgcctacaaagaagcctcaaatcatatccgtgaaatcttctcgcgctacacctcgcgcattgaaccgttg

SEQ ID NO: 73403 - DNA, 75 bp, synthetic construct
  source 1..75: mol_type = other DNA
accttttgatcactgacggcgatttcacgctggacagcggcaacgagccgcgccgttgcgataaccgcgacagca

SEQ ID NO: 73404 - DNA, 75 bp, synthetic construct
  source 1..75: mol_type = other DNA
aggcagagtggccgtgaaagaaagcaatcagcgatggtgctctgacgggttcgagttccgctgtgataacggaga

SEQ ID NO: 73405 - DNA, 75 bp, synthetic construct
  source 1..75: mol_type = other DNA
acttccggagcagaaactgctggcaccacgcccgctgtttaccgctgcccgggaagtgaaaacggttgttccggt

SEQ ID NO: 73406 - DNA, 75 bp, synthetic construct
  source 1..75: mol_type = other DNA
aggcttacaggaatgaaatggcgaagtatggtaccggcagtgaaattcagcggggtatccaggccgcgacagcgg

SEQ ID NO: 73407 - DNA, 75 bp, synthetic construct
  source 1..75: mol_type = other DNA
gtgacagtgtggtggttgacccggggcatgaccgtcgtactgtggacgaaaaatttgagcagaagaaaagcgggc

SEQ ID NO: 73408 - DNA, 75 bp, synthetic construct
  source 1..75: mol_type = other DNA
gaaggaacgactcaggccgcagtggcagaaggcactatcaccatccgggacagggacaatcagaagcagaatctg

SEQ ID NO: 73409 - DNA, 75 bp, synthetic construct
  source 1..75: mol_type = other DNA
gcatagaagatggaacgttgcggatcgacaggttgacagcagacgtgccggatggtgccgaggcactcatactgg

SEQ ID NO: 73410 - DNA, 75 bp, synthetic construct
  source 1..75: mol_type = other DNA
caggcgtggctcaccgccagcggtgaaggcgcggcgctgacagaaaaacatattaatgcggcctttaaagaggtt

SEQ ID NO: 73411 - DNA, 75 bp, synthetic construct
  source 1..75: mol_type = other DNA
gcacgttattctgacccgtatgggcgatcagctatctacggcaaaaggcacggtagtcaatttcgttgttaaata

SEQ ID NO: 73412 - DNA, 75 bp, synthetic construct
  source 1..75: mol_type = other DNA
gatcgcacatccgaagaacgactgatgtcatcgttaacagatgtcgtgcatgccgggaagcactcggcgctgatt

SEQ ID NO: 73413 - DNA, 75 bp, synthetic construct
  source 1..75: mol_type = other DNA
tctacacgaaggtgtttgcactggatgtggctgcacggcaccgggtgcagttttcgatgcctgagtccgatgcgg

SEQ ID NO: 73414 - DNA, 75 bp, synthetic construct
  source 1..75: mol_type = other DNA
ctatcaatgaagcgctacgccggatgaagatagcgggtatcaccaagcctgaacttgaagcgtacctgcgtgaaa

SEQ ID NO: 73415 - DNA, 75 bp, synthetic construct
  source 1..75: mol_type = other DNA
gccttccggtgactggtttgccgatctgagtcgccttggtgtggatattgtggaatacaccgtggaatgcggccc

SEQ ID NO: 73416 - DNA, 75 bp, synthetic construct
  source 1..75: mol_type = other DNA
cactggcggaagcacagttcaggggaacgcagattgccacggcgcgggcaagggcagccgtgtaccgtgctcagc

SEQ ID NO: 73417 - DNA, 75 bp, synthetic construct
  source 1..75: mol_type = other DNA
aattgaagccgtgctggctgccatcaaccaggcagattcgcccctgaagatcgtgccgtcctttgcgagcgataa

SEQ ID NO: 73418 - DNA, 75 bp, synthetic construct
  source 1..75: mol_type = other DNA
gggttgttagtggacggtgtcattgcttcagtactgatgaatgatgactaccgatcgctctatagcgtgattgtt

SEQ ID NO: 73419 - DNA, 75 bp, synthetic construct
  source 1..75: mol_type = other DNA
atttctttgccggtatccgcgatatcgttggcggacgctccggggcttatgaaaaagaattgcgtaaagcgcggg

SEQ ID NO: 73420 - DNA, 75 bp, synthetic construct
  source 1..75: mol_type = other DNA
ggcgcttccggttgccgaatcctggtttctctggttcatgaaatggtgaaacgtaatgcccgcaaaggactggca

SEQ ID NO: 73421 - DNA, 75 bp, synthetic construct
  source 1..75: mol_type = other DNA
tttggatcgatcttgagatgaccggtctggatcccgagcgtgatcgcattattgagattgccacgctggtgaccg

SEQ ID NO: 73422 - DNA, 75 bp, synthetic construct
  source 1..75: mol_type = other DNA
cttcacggccgcagcgggaacataaaggccgaatatcggtgaaggaaagcgaccagcgctggtgttccgatggct

SEQ ID NO: 73423 - DNA, 75 bp, synthetic construct
  source 1..75: mol_type = other DNA
gccgggggatgagacgctgacgttcagccgtgatgaggcaggacgtgaagtgctccggcacagtaaccggggttt

SEQ ID NO: 73424 - DNA, 75 bp, synthetic construct
  source 1..75: mol_type = other DNA
tggtttttagcgatcttgatggcaccctgctggacagtcatagttatgactggcaaccagctgccccctggctca

SEQ ID NO: 73425 - DNA, 75 bp, synthetic construct
  source 1..75: mol_type = other DNA
cggcagcaaagaaccttgcagaggcgttcgagcattataacgaatggcatccgcatagtgcactgggttatcgct

SEQ ID NO: 73426 - DNA, 75 bp, synthetic construct
  source 1..75: mol_type = other DNA
taaaatatatgcttgaaacagaaagcaaaggttcactactcagtactgataatttcaaaaaaccatttaactacg

SEQ ID NO: 73427 - DNA, 75 bp, synthetic construct
  source 1..75: mol_type = other DNA
ttaccgttgatgaagaagacggcgagattgttcgtagcctgaaaatccgccagatcgaacctgaattcttgaacc

SEQ ID NO: 73428 - DNA, 75 bp, synthetic construct
  source 1..75: mol_type = other DNA
tttctaaatcaccagttcgggtttcattttgcccgttctgcggtgaaagtctgaaaacgtgggagaacagaaatg

SEQ ID NO: 73429 - DNA, 75 bp, synthetic construct
  source 1..75: mol_type = other DNA
atgcagtcgctgcaaagcgtgattgaacaactggatattcgccgtgctcaggtgcatgtcgaggcgttgatcgtg

SEQ ID NO: 73430 - DNA, 75 bp, synthetic construct
  source 1..75: mol_type = other DNA
gagcttaaccagtcaaacgttttttatctgacgctggataatgcacaacaaatccaaccagaatcaggtggggca

SEQ ID NO: 73431 - DNA, 75 bp, synthetic construct
  source 1..75: mol_type = other DNA
ggccagttccccattacacagaaactggccagtctctttgtttgcaataaatgtattacctgcaatacgggctaa

SEQ ID NO: 73432 - DNA, 75 bp, synthetic construct
  source 1..75: mol_type = other DNA
ttcttgggcaaaaagaagagaacagttggcgcattatgctaatgacaatgcttatctcacaaccagcactggcag

SEQ ID NO: 73433 - DNA, 75 bp, synthetic construct
  source 1..75: mol_type = other DNA
ctgcgggcaggcaccggataagtgaagagactgaccagtatgccggaggccaccggctgaaacaggccggaaaca

SEQ ID NO: 73434 - DNA, 75 bp, synthetic construct
  source 1..75: mol_type = other DNA
tttctaaattaccagttcgggtttcattttgcccgttctgtggtgaaagtctgaaaacgtgggagaacagaaatg

SEQ ID NO: 73435 - DNA, 75 bp, synthetic construct
  source 1..75: mol_type = other DNA
aaatcaataataaaaaagaagaaaaaggcttatcgttgattgaatcagcaatggttttggctctggcagctacag

SEQ ID NO: 73436 - DNA, 75 bp, synthetic construct
  source 1..75: mol_type = other DNA
ggcagtttgcccggatgttggggcttgaaccgaagaacacggcggtgcggagtccggagagtaacggcatagcag

SEQ ID NO: 73437 - DNA, 75 bp, synthetic construct
  source 1..75: mol_type = other DNA
ggcccagccttcccagcaatcgtcgattgttataccagtccacccacgttagtgtggccagttccacttctgcac

SEQ ID NO: 73438 - DNA, 75 bp, synthetic construct
  source 1..75: mol_type = other DNA
gtctgcttattaaagtacaataaccacttaaaaaatataaatattaaaacaatactactgctttttgttctttct

SEQ ID NO: 73439 - DNA, 75 bp, synthetic construct
  source 1..75: mol_type = other DNA
aatgcttgcacctgagtttgtcagcatattttttggattaaagcctgccaccgcagatgcaataaaagatgttgg

SEQ ID NO: 73440 - DNA, 75 bp, synthetic construct
  source 1..75: mol_type = other DNA
gccgcaaaggcaaaactgccagaaagcgtgacgcgtcagcaacctgcgacagtgaatgcagacggtaaagtgatg

SEQ ID NO: 73441 - DNA, 75 bp, synthetic construct
  source 1..75: mol_type = other DNA
gggtactcggctggtgtgagcgggtgccggaagcggatgaggtgctgcctgcgccgctgccgccgtaccgggtac

SEQ ID NO: 73442 - DNA, 75 bp, synthetic construct
  source 1..75: mol_type = other DNA
gtccaactgctgcagaacagcatggatgcgccgaaaatcatcggttcctttccatgcaaaaagattgttgattaa

SEQ ID NO: 73443 - DNA, 75 bp, synthetic construct
  source 1..75: mol_type = other DNA
gacatcgctcaaatacactccggtcaatatgttggtcgtggcgttgcaatgtgtttttgtccgttctgtggtgaa

SEQ ID NO: 73444 - DNA, 75 bp, synthetic construct
  source 1..75: mol_type = other DNA
aataaaacacaaaacactgtatctcaggtgatgagtgttatgtctgctattaacggtttgtatgtaggtcaggca

SEQ ID NO: 73445 - DNA, 75 bp, synthetic construct
  source 1..75: mol_type = other DNA
agcgttctgaaaaagatcgagagttgcaacagtgggtggcgaaacagagcctggcggaattatgtcgtcgtaccg

SEQ ID NO: 73446 - DNA, 75 bp, synthetic construct
  source 1..75: mol_type = other DNA
atgtccatagtaatgttgctatggtttttaagtacgctaagacgtaaacccagtcaaaagaaaggctgtattgac

SEQ ID NO: 73447 - DNA, 75 bp, synthetic construct
  source 1..75: mol_type = other DNA
atgtgggggcgaggcctgtaggggaaattaaaccgctagaattgctaaatgtactgcgtaaaattgagaagcgtg

SEQ ID NO: 73448 - DNA, 75 bp, synthetic construct
  source 1..75: mol_type = other DNA
ttcctcaccgccttcctctcttctattatgaacaatatgccgacggtactggttggcgcgttgtccattgatggc

SEQ ID NO: 73449 - DNA, 75 bp, synthetic construct
  source 1..75: mol_type = other DNA
gagggcgatatcatactgaacagtgccgggaaactggtcctgaagaacagccttgccggcggcaataccaccgta

SEQ ID NO: 73450 - DNA, 75 bp, synthetic construct
  source 1..75: mol_type = other DNA
agcaaatgaaaaaactggagaaacaggtaaaggatcttcactacacgccagttcaggtaacacgggtagggatta

SEQ ID NO: 73451 - DNA, 75 bp, synthetic construct
  source 1..75: mol_type = other DNA
atcatccacgtaaccgcctggacggaacgcgaagcgcgtagccgttgcccgtccggttgtgttgctgtattcgcc

SEQ ID NO: 73452 - DNA, 75 bp, synthetic construct
  source 1..75: mol_type = other DNA
ctgacggtaaaaggcactgtgcaactcagcagcgccactaacagcacatcagaaacgcaggctgccactccaaag

SEQ ID NO: 73453 - DNA, 75 bp, synthetic construct
  source 1..75: mol_type = other DNA
atgaatatcgcaaaatccttatcgccggaggcatgaaaccggaagatgcagagaaattcgtttcttttatggata

SEQ ID NO: 73454 - DNA, 75 bp, synthetic construct
  source 1..75: mol_type = other DNA
aacgcgaagcgcgtagccgttgcccgtccggttgtgttgctgtattcgccgcccgtattcgtcaggggtcacatc

SEQ ID NO: 73455 - DNA, 75 bp, synthetic construct
  source 1..75: mol_type = other DNA
tgcggagtccggagagtaacggaatagcagagagcttcgtgaaaacgataaagcgtgactacatcagtatcatgc

SEQ ID NO: 73456 - DNA, 75 bp, synthetic construct
  source 1..75: mol_type = other DNA
aaccacgcgttcactccggcggcacgccaaaaaatctaagtcacctgcctttgttattccagtctgcgcgtgaac

SEQ ID NO: 73457 - DNA, 75 bp, synthetic construct
  source 1..75: mol_type = other DNA
gatggtacctggactgcatcagctaatttacgcggacggctttatctgcatcgcggcatcgagcgcacttatacc

SEQ ID NO: 73458 - DNA, 75 bp, synthetic construct
  source 1..75: mol_type = other DNA
tgtgaccaccgtgggctgccgctggcgcttatcagcccggaaggggaaacggcgtggcagggggagtatgacgag

SEQ ID NO: 73459 - DNA, 75 bp, synthetic construct
  source 1..75: mol_type = other DNA
agtggtgggcgtggcgctggtccgcacatttcggcctttgcgaagatgagaatgaaattgccagcggcaatagtg

SEQ ID NO: 73460 - DNA, 75 bp, synthetic construct
  source 1..75: mol_type = other DNA
atgataatccgttccagactgatactttggaactgaccagcggcaacatcgctgaccataacggcaacgtagtgt

SEQ ID NO: 73461 - DNA, 75 bp, synthetic construct
  source 1..75: mol_type = other DNA
gaagatgcgtcgacctcatatcgtaccactatccactcaagtgattgagatttttcagcaactcaagccaatcac

SEQ ID NO: 73462 - DNA, 75 bp, synthetic construct
  source 1..75: mol_type = other DNA
gtctatttaggcgacaactggtacaaaattaatgactatcttgccgccaaagttttattgcaggttaaaggcagt

SEQ ID NO: 73463 - DNA, 75 bp, synthetic construct
  source 1..75: mol_type = other DNA
cttatttcgacgctcaacgggcaggtcgcgccatttggtgtgctgccggaaacggcggtactgaacgtgccgtta

SEQ ID NO: 73464 - DNA, 75 bp, synthetic construct
  source 1..75: mol_type = other DNA
tgctcgtgaagcggcgagtggtatgccggacccgacgctgccggaggtgtccggaggtagtggcagagaggacga

SEQ ID NO: 73465 - DNA, 75 bp, synthetic construct
  source 1..75: mol_type = other DNA
attaatacgattaattttcttggtggaagaggtacgccaggtgatctatatctagtagaatctaccgggcaatat

SEQ ID NO: 73466 - DNA, 75 bp, synthetic construct
  source 1..75: mol_type = other DNA
accatcttcgacagcagccagtcggccacgccagtgatcgcctttttaccggcggcgggcgaagtacatctcacc

SEQ ID NO: 73467 - DNA, 75 bp, synthetic construct
  source 1..75: mol_type = other DNA
agcggaacgctgaacgtcaatagcgcggcggacggctacatcaataccaatttgaccgccaacggcagcgtcggc

SEQ ID NO: 73468 - DNA, 75 bp, synthetic construct
  source 1..75: mol_type = other DNA
cagccaatggaatgaatgtgacgttaattaccgcgccaaagggaagtaacgagaaaatgttccaagcaggaacac

SEQ ID NO: 73469 - DNA, 75 bp, synthetic construct
  source 1..75: mol_type = other DNA
ggccgtgaactgacccggcatgccgttctgctgatgctgcatgtgttcattcgctccagtgaactgcgtttcgcc

SEQ ID NO: 73470 - DNA, 75 bp, synthetic construct
  source 1..75: mol_type = other DNA
caattgaaaaaccgctctcctccctgccttactcgctttcccgtcacatcctggaacatctgcgcaaactcaccc

SEQ ID NO: 73471 - DNA, 75 bp, synthetic construct
  source 1..75: mol_type = other DNA
gtggtgcacggctggatcgcttaccggattgccgctggcattcgtcaatgtttgccatcgtcgcgtttggcttgc

SEQ ID NO: 73472 - DNA, 75 bp, synthetic construct
  source 1..75: mol_type = other DNA
tgtgctgatgtgagccaccaggtaagtgctgtgctggatgttgaagatcccatcaccgttgcttataacctggaa

SEQ ID NO: 73473 - DNA, 75 bp, synthetic construct
  source 1..75: mol_type = other DNA
acgaacggagaaactgttttacgggatatttccggagagaaacgttttaacggtgaaaaagacagcagaatgctg

SEQ ID NO: 73474 - DNA, 75 bp, synthetic construct
  source 1..75: mol_type = other DNA
ccgatgcggtatttaccatcgcatctgatgacctgtggatcgagagttcagcgatccaacaattacacaccacgg

SEQ ID NO: 73475 - DNA, 75 bp, synthetic construct
  source 1..75: mol_type = other DNA
gcaacaggggccgcttttgtccctgatatgtactggctcatcttctttcgcttcctgatgggaacaggaatgggg

SEQ ID NO: 73476 - DNA, 75 bp, synthetic construct
  source 1..75: mol_type = other DNA
ctggcggcgttattcatggtgctggcgaaccgatacgactggcagttatttcttgaggtaacggggccgggtgga

SEQ ID NO: 73477 - DNA, 75 bp, synthetic construct
  source 1..75: mol_type = other DNA
gttattaccaccttatagttggtccatacggcatattgctcgtaaactggacctgagcccttcagtaatagcaag

SEQ ID NO: 73478 - DNA, 75 bp, synthetic construct
  source 1..75: mol_type = other DNA
atcggcggtcgataccatgaagttaagtttgcccgtaatggggaatacagcccgtaacctgattggattcagtaa

SEQ ID NO: 73479 - DNA, 75 bp, synthetic construct
  source 1..75: mol_type = other DNA
tctggggcgtgatattgtgtttgccgtggatgaggcgcatatcgtgacggtgaatccgctgctctcgccctatat

SEQ ID NO: 73480 - DNA, 75 bp, synthetic construct
  source 1..75: mol_type = other DNA
tggcgcgtaatgtcgatgccattattttatcggcagtgtctgaaaatggcagtagccgtaccgttcgtcgcgcca

SEQ ID NO: 73481 - DNA, 75 bp, synthetic construct
  source 1..75: mol_type = other DNA
ctggtctttatgatcacttcgctggaaaccattggcgatatcacggcgacctctgacgtttccgaacagccagtg

SEQ ID NO: 73482 - DNA, 75 bp, synthetic construct
  source 1..75: mol_type = other DNA
ggcaacagctttacgggttttatattgcttatgatttgtggctgaagaacggggcaaaacccggcggagtgtttt

SEQ ID NO: 73483 - DNA, 75 bp, synthetic construct
  source 1..75: mol_type = other DNA
aattaatatgcgatgcagtaaaaaaacacacacagattcgtgatgaacgttttttcaaaaccaataactctcaat

SEQ ID NO: 73484 - DNA, 75 bp, synthetic construct
  source 1..75: mol_type = other DNA
gtagcaagagcaatgttacggtttgttactgtgacagctgaagctttgcgttttcgccaaatccagaggggattt

SEQ ID NO: 73485 - DNA, 75 bp, synthetic construct
  source 1..75: mol_type = other DNA
gtggcaagagcgatgttacggtttgttactgtgacagctgaagctttacgttttcggcaaatacagaggggattt

SEQ ID NO: 73486 - DNA, 75 bp, synthetic construct
  source 1..75: mol_type = other DNA
atcaggttgcccgggatgatacatccggccagtacgttgcgttaaaaacagctgcgttatcatttgcgctgccgg

SEQ ID NO: 73487 - DNA, 75 bp, synthetic construct
  source 1..75: mol_type = other DNA
atattaagtcactattgggctttattggtctggcgctggaaaccttgctgggaacactttttcgcccctcccgct

SEQ ID NO: 73488 - DNA, 75 bp, synthetic construct
  source 1..75: mol_type = other DNA
gaaaccttcgaaaaacagggtatcgacgcagcacaaatgcccggcgttctggtccattctcacggcccgtttgca

SEQ ID NO: 73489 - DNA, 75 bp, synthetic construct
  source 1..75: mol_type = other DNA
tcaccagctcacagatgtctatgcaggatctgcaaacacatctcgactattgtgccgaacaattacgaaaacaaa

SEQ ID NO: 73490 - DNA, 75 bp, synthetic construct
  source 1..75: mol_type = other DNA
tcgagctgcagcttgtggacgggaacggtaagggaattgagctaagtgatttcaaagtcacctttacgatcgact

SEQ ID NO: 73491 - DNA, 75 bp, synthetic construct
  source 1..75: mol_type = other DNA
gaaacggcaagataattctcaatgcccagtggctgcaagccagcatgaatgcgccgcgtcagtatgcaacatacg

SEQ ID NO: 73492 - DNA, 75 bp, synthetic construct
  source 1..75: mol_type = other DNA
ttgccgttggtgaaatcgcttgtgtatcggtacacggcgctaaccgtctgggcggcaactcgctgctggacctgg

SEQ ID NO: 73493 - DNA, 75 bp, synthetic construct
  source 1..75: mol_type = other DNA
tgcattgtcgatgcctctattagtaatatgaaacaaacaaaaccagtaaaactaatcaaatctgatggtgtctgg

SEQ ID NO: 73494 - DNA, 75 bp, synthetic construct
  source 1..75: mol_type = other DNA
gctggttgagattcttgagcaagaccgtacgcttatcagcattaaccgcgcgcaaccggcgaatctgccgctgac

SEQ ID NO: 73495 - DNA, 75 bp, synthetic construct
  source 1..75: mol_type = other DNA
catttggtggatttgttggttcattcgtatcagaaggtgcaagcagcgcaacgcaaaaagaagttgatggagaca

SEQ ID NO: 73496 - DNA, 75 bp, synthetic construct
  source 1..75: mol_type = other DNA
gatggcgtttactgctctggcactggaactgacggcgctgtggttccagcatgtgatgttactgaaaccttgcgt

SEQ ID NO: 73497 - DNA, 75 bp, synthetic construct
  source 1..75: mol_type = other DNA
tgttgccacacaggagggatggttgtacctcgctggcatcaaagatgtttatacgtgcgaaattgtcggctacgc

SEQ ID NO: 73498 - DNA, 75 bp, synthetic construct
  source 1..75: mol_type = other DNA
tggaaatgaacaatttagttttgactcacgattcctaccatcaggttataattactctttaaatagtaacttacc

SEQ ID NO: 73499 - DNA, 75 bp, synthetic construct
  source 1..75: mol_type = other DNA
gtaattcctctcttcctgttatgagaaaagcgggactaatggtatataattttatatctggaaaattaacaaaaa

SEQ ID NO: 73500 - DNA, 75 bp, synthetic construct
  source 1..75: mol_type = other DNA
tcggaatgacagtggggatcgacagccgtaatgatattccagaaggaattgccacgctgggcgcttttatgggtt

SEQ ID NO: 73501 - DNA, 75 bp, synthetic construct
  source 1..75: mol_type = other DNA
aaactctgtggagtttcgcgctctacggcacagccgttggtgcaggcacgctcttccttcctattcagttaggtt

SEQ ID NO: 73502 - DNA, 75 bp, synthetic construct
  source 1..75: mol_type = other DNA
aagagatgatcgaggcaattgaacagcacactgcctgtatcagtaccagggatatacctggcgttattgccaact

SEQ ID NO: 73503 - DNA, 75 bp, synthetic construct
  source 1..75: mol_type = other DNA
ccgcgacgaagccgcgctgatatctgccacactgcgtgaggccacccgcaagaacggtaagcgtctctattccat

SEQ ID NO: 73504 - DNA, 75 bp, synthetic construct
  source 1..75: mol_type = other DNA
cggcccgatgacccgtgatgaactgaaagacctggcgtgcctgggcttctcggctgacctggtgatgcagtcttt

SEQ ID NO: 73505 - DNA, 75 bp, synthetic construct
  source 1..75: mol_type = other DNA
cagatcatccagcaggccggtaactccgtgctggcaaaagccaaccaggtaccgcagcaggttctgtctctgctg

SEQ ID NO: 73506 - DNA, 75 bp, synthetic construct
  source 1..75: mol_type = other DNA
gcctgcaggcaggcttaaaaccggcatcatgtacctgcttgcaggtcagatcgccggtggtgacttcaccctgcc

SEQ ID NO: 73507 - DNA, 75 bp, synthetic construct
  source 1..75: mol_type = other DNA
ttggaaatatattttatacaaatcatcgtgatgatataagcatggaggctgagagggacagtatcagaacaatgt

SEQ ID NO: 73508 - DNA, 75 bp, synthetic construct
  source 1..75: mol_type = other DNA
tcctgccgcctggcgcggtgatgaccggtaatcacgagatgtacaaagtctttacgccttttaagaatgcctggc

SEQ ID NO: 73509 - DNA, 75 bp, synthetic construct
  source 1..75: mol_type = other DNA
tatttagttggcagttacactctgatgccagttatagcaaacctgatgatatgaaaggcaaatggcaaagtaata

SEQ ID NO: 73510 - DNA, 75 bp, synthetic construct
  source 1..75: mol_type = other DNA
tcccggagaactcagtctgtgcagactgagtacaggcaatggcatcttctggccatccgtctgtgaccggaacgg

SEQ ID NO: 73511 - DNA, 75 bp, synthetic construct
  source 1..75: mol_type = other DNA
gttcgcctggtggtcgagcgtgagcgtgaaattaaagcgttcgtgccggaagagttctgggaagtcgatgccagc

SEQ ID NO: 73512 - DNA, 75 bp, synthetic construct
  source 1..75: mol_type = other DNA
cgccccttctcttcccttgatcaaaccgtcgatgaaatgttcgacaccctgctggaaaatggctcataccatcgc

SEQ ID NO: 73513 - DNA, 75 bp, synthetic construct
  source 1..75: mol_type = other DNA
acaccctgtacaccatgggtccgtctccggaaccgaacatgaccattctgtggtccgaaaaactgccgctgaact

SEQ ID NO: 73514 - DNA, 75 bp, synthetic construct
  source 1..75: mol_type = other DNA
tggcacaattgggaggcgcactatgaagtgttgcctggtaaagagaaggtcgtctctgaactgaaacaactggct

SEQ ID NO: 73515 - DNA, 75 bp, synthetic construct
  source 1..75: mol_type = other DNA
ggatggcgtaaatccggtattggcggcgcagatggtaaacatggcttgcatgaatatctgcagacccaggtggtt

SEQ ID NO: 73516 - DNA, 75 bp, synthetic construct
  source 1..75: mol_type = other DNA
ttgagattggtttctcaaatgtcattgagccttatatcacgatgcttaaagattcttacactacgcaggtgttgt

SEQ ID NO: 73517 - DNA, 75 bp, synthetic construct
  source 1..75: mol_type = other DNA
tgcgactgagcaatttgaaggtgcttcaactgaggatccgctggcgcttctggataaagctattgcatcagtcga

SEQ ID NO: 73518 - DNA, 75 bp, synthetic construct
  source 1..75: mol_type = other DNA
aagtcgataccgaacacctgctgctggcgctatccgacagcgacgtggtgaagaccatcctgggacagttcaaga

SEQ ID NO: 73519 - DNA, 75 bp, synthetic construct
  source 1..75: mol_type = other DNA
ccatgcgcagtacctgggtggtcgtcgtgaaatgatgcaatggtacgcagattacattgattcgctctccaggtg

SEQ ID NO: 73520 - DNA, 75 bp, synthetic construct
  source 1..75: mol_type = other DNA
gggcgacggtttcggatctggggccgctgttgctggcgcggctgttgaatctcaacgatgtgcaatctggcgtgc

SEQ ID NO: 73521 - DNA, 75 bp, synthetic construct
  source 1..75: mol_type = other DNA
catctggcgcgccgcattattacgccgctggtttctggcgttgtggtgatgattatcggcctgtcgctaattcag

SEQ ID NO: 73522 - DNA, 75 bp, synthetic construct
  source 1..75: mol_type = other DNA
ctgagcgggcggcgtaataacggtgtgcctgtttccctttccgtatcaactggagcagagaatggcagtgattga

SEQ ID NO: 73523 - DNA, 75 bp, synthetic construct
  source 1..75: mol_type = other DNA
atgactgaattaaccaaagagcaattaatcaaggaagccaaattaaaaatagcggttgcgaactgttaccctaat

SEQ ID NO: 73524 - DNA, 75 bp, synthetic construct
  source 1..75: mol_type = other DNA
gtgaacttgaggcttactactatgatggcgatggccgtgaaaaaactggatgtgggcgaaattttaacgctggta

SEQ ID NO: 73525 - DNA, 75 bp, synthetic construct
  source 1..75: mol_type = other DNA
tgcgtgaggcggcagaacgtgcaatcccggcaatggaacgcctgttaatgttgccagttgatgatgatttgttaa

SEQ ID NO: 73526 - DNA, 75 bp, synthetic construct
  source 1..75: mol_type = other DNA
ggagtttgatgtggggccactgaacagctggctgcgtgcgctgcccatgtgttttgacccggatacggacaggaa

SEQ ID NO: 73527 - DNA, 75 bp, synthetic construct
  source 1..75: mol_type = other DNA
aatagaataaacttaaatataaaaattaataaaatcctagaagaaatgtcacaaaacctgttcaaatcctggttt

SEQ ID NO: 73528 - DNA, 75 bp, synthetic construct
  source 1..75: mol_type = other DNA
ttaataccatcgggcagaaactggcagcggcaggtgtcagggatgctgattattaccctgaaggaatgcacagcc

SEQ ID NO: 73529 - DNA, 75 bp, synthetic construct
  source 1..75: mol_type = other DNA
actgacaaggggacgaatgtaacctggaaggtcaacggcgttgccggtgacaacttgcataagctgggggaagga

SEQ ID NO: 73530 - DNA, 75 bp, synthetic construct
  source 1..75: mol_type = other DNA
atgtctggggggcgacgtataacacccgtaataatgtcaccaccgatgcgggtgccgggtttgagcagacgctga

SEQ ID NO: 73531 - DNA, 75 bp, synthetic construct
  source 1..75: mol_type = other DNA
ctgaatctggaggaacatattcacgattgtacgctggtgatcaccggtgaagggcgtattgacagccagagtatt

SEQ ID NO: 73532 - DNA, 75 bp, synthetic construct
  source 1..75: mol_type = other DNA
agaaaatcatcccgcaactgaaaacgccaaacgtggacggtttcagagcgtatgtcagggcgtttgtgcatcagg

SEQ ID NO: 73533 - DNA, 75 bp, synthetic construct
  source 1..75: mol_type = other DNA
ttgaaattaacaagcgagtatttaaagcgatagtgggggcaataccattaggttatccgcacaacgcagatggac

SEQ ID NO: 73534 - DNA, 75 bp, synthetic construct
  source 1..75: mol_type = other DNA
tggtggcggatgatcgccagtatctgaacttttccagtaacgattatttaggtttaagccatcatccgcaaatta

SEQ ID NO: 73535 - DNA, 75 bp, synthetic construct
  source 1..75: mol_type = other DNA
accgacaatggccggctggtccgcctggcccccaccagtcagccagcctggagtcagagcgacgtcatgacgttt

SEQ ID NO: 73536 - DNA, 75 bp, synthetic construct
  source 1..75: mol_type = other DNA
cactacacgcggacacaatatgaagagccgctggtcgaaagtcgctatctttacgacccgctgggccgcagggtg

SEQ ID NO: 73537 - DNA, 75 bp, synthetic construct
  source 1..75: mol_type = other DNA
accggcttattgaccaccctgccattattggcctttgcgctaatctcacctttggctgccccggtagcgcgacgt

SEQ ID NO: 73538 - DNA, 75 bp, synthetic construct
  source 1..75: mol_type = other DNA
gactgggttagcggcgagatgaaaacccattacgctataaacctgaagattgttcgtctcgcggatgccgcagac

SEQ ID NO: 73539 - DNA, 75 bp, synthetic construct
  source 1..75: mol_type = other DNA
gttattcagtcagggactcatttgccattcgcgggccagtgtcacagttgatgaagaatgttcgcaagtggtgga

SEQ ID NO: 73540 - DNA, 75 bp, synthetic construct
  source 1..75: mol_type = other DNA
aagcgatatcaaatataactatctggcgtaaaggcgaacaacgtgcaccacataagccattattgctgctgtacg

SEQ ID NO: 73541 - DNA, 75 bp, synthetic construct
  source 1..75: mol_type = other DNA
cagtaccagcgtattcaggttgatcatcttggcgcgttattaactcgcgatcgttataaagacgttatttctcac

SEQ ID NO: 73542 - DNA, 75 bp, synthetic construct
  source 1..75: mol_type = other DNA
cccttgctttgcgaatgctttcacagaagcagggttcgcaacgattacttttgattatcgtggattcggtgagag

SEQ ID NO: 73543 - DNA, 75 bp, synthetic construct
  source 1..75: mol_type = other DNA
cctttccttacggtcatggaaacgttgcaatataaaccggcagagagtgcagccagcgtccagtgcccagttttg

SEQ ID NO: 73544 - DNA, 75 bp, synthetic construct
  source 1..75: mol_type = other DNA
accattttaaagtaaaaaccgtgacggaaagcctgcgccgtcacggactgagggcaaaagcgtcctggaatttca

SEQ ID NO: 73545 - DNA, 75 bp, synthetic construct
  source 1..75: mol_type = other DNA
cgctggtttgaccgtggtgttctgcgggaggtggtccgggaagcccgggtagaaatccgcagcatggcggatgcc

SEQ ID NO: 73546 - DNA, 75 bp, synthetic construct
  source 1..75: mol_type = other DNA
cgctttcgcctggtcgtgaaggaaagcgatcacccctgctggctcgatgaagatgacgaaaacctgcccgtggtg

SEQ ID NO: 73547 - DNA, 75 bp, synthetic construct
  source 1..75: mol_type = other DNA
atacgggaatacattgagattttctacaatcgtcagcgtcgtcactctcgtctggggaatatctccccggcagcc

SEQ ID NO: 73548 - DNA, 75 bp, synthetic construct
  source 1..75: mol_type = other DNA
gtactggccggatcacgatgatttcaacaatatgctcatgaacggtgatcaggttcgagagctggttttccataa

SEQ ID NO: 73549 - DNA, 75 bp, synthetic construct
  source 1..75: mol_type = other DNA
cgttctctggcgcaatttcaggaaatacagccacaaccaacggcgatatcacttcgaataatggctggctggtca

SEQ ID NO: 73550 - DNA, 75 bp, synthetic construct
  source 1..75: mol_type = other DNA
accagtgcggcccgctcttatatagggaaaaactacacgactctccagggcagtagtaccacaacaactcctgcc

SEQ ID NO: 73551 - DNA, 75 bp, synthetic construct
  source 1..75: mol_type = other DNA
tgcatcgaagcgaccggcacctatatggaacctgtcgctgagtgcctttacgatgctggctacatagtgtcagtc

SEQ ID NO: 73552 - DNA, 75 bp, synthetic construct
  source 1..75: mol_type = other DNA
tgtaaacatagtaagtcaaggggttaaaagatttttgacaagaaagaatatggaaacaaatggtgagataaaaaa

SEQ ID NO: 73553 - DNA, 75 bp, synthetic construct
  source 1..75: mol_type = other DNA
gcgtataaatgggcggaggcgcttgcttttcgggtggcgctgatgcgccagcaggtcaatgatgcagtccgggct

SEQ ID NO: 73554 - DNA, 75 bp, synthetic construct
  source 1..75: mol_type = other DNA
gaaatgtggagtatccggcaggcgtttgagcagaaaaataacgagctgctgagacagtatcaggccggagaaatt

SEQ ID NO: 73555 - DNA, 75 bp, synthetic construct
  source 1..75: mol_type = other DNA
ggtgcgcatcagcggcccgcgacagacgcgggaatacggctacagcgccacgggcaggctggagagcgtgcgcac

SEQ ID NO: 73556 - DNA, 75 bp, synthetic construct
  source 1..75: mol_type = other DNA
gaccattcccgctgcgaatgcctcagcggataccctgcgggaattcattgccacgctgccgcaggaatgcgggaa

SEQ ID NO: 73557 - DNA, 75 bp, synthetic construct
  source 1..75: mol_type = other DNA
cgaccgttggtttttatgtttctgaacaagagcgacctgatgatgcggttgaagtctcgccagaggtggaggcat

SEQ ID NO: 73558 - DNA, 75 bp, synthetic construct
  source 1..75: mol_type = other DNA
gtaccgggctgacgcaggccctggcccttaacaacgatatctggcgggccagtttttatcgtttctgccagctgc

SEQ ID NO: 73559 - DNA, 75 bp, synthetic construct
  source 1..75: mol_type = other DNA
tttaaataaaaaaattaatttcaatgtaaataatgcttatcaaaatgactttgaaataatcagaggattagcaca

SEQ ID NO: 73560 - DNA, 75 bp, synthetic construct
  source 1..75: mol_type = other DNA
acgactgaatgttatagggaaatggattaatgcgttaatcctttatggggaagcagatcggattatctcaataat

SEQ ID NO: 73561 - DNA, 75 bp, synthetic construct
  source 1..75: mol_type = other DNA
ctgtttctttttatagtaaaactggcctgtgaaaatgactcaaacgcactaagagtcatccgtttaaaccttatg

SEQ ID NO: 73562 - DNA, 75 bp, synthetic construct
  source 1..75: mol_type = other DNA
ttcaaaacatttaatataccgaatagcaagaaaacaagaagtttatgtattaaagaatctccggtaaatcaagat

SEQ ID NO: 73563 - DNA, 75 bp, synthetic construct
  source 1..75: mol_type = other DNA
gcaacttcctgacggcaagctcggcgcttgccttccttcatacccctttcgcccgtgcaattcccgctcaacaaa

SEQ ID NO: 73564 - DNA, 75 bp, synthetic construct
  source 1..75: mol_type = other DNA
tcatgtcaaaccttggtaggttcactctgccttattttgatttcttggccaatcccatggaaacgaacagtaata

SEQ ID NO: 73565 - DNA, 75 bp, synthetic construct
  source 1..75: mol_type = other DNA
ggtctgggatttcatctcgccagcacatcgccgctgcgggccggacagctgtgaattgccagaacaacgtggctg

SEQ ID NO: 73566 - DNA, 75 bp, synthetic construct
  source 1..75: mol_type = other DNA
agactttggtgagtcggaatggattagttacaccgggtcgggttatctgctccacctgggtgcctggtcatttcc

SEQ ID NO: 73567 - DNA, 75 bp, synthetic construct
  source 1..75: mol_type = other DNA
ttctggcggatgcgcatatccgctacagcaagccgattagcggtaaacctcatgcggtagccgaccttggtgcct

SEQ ID NO: 73568 - DNA, 75 bp, synthetic construct
  source 1..75: mol_type = other DNA
gggtaattgctgttggggtaatcctgacgataagccatttactggaaataagcaggttgaatgcgattacatgtt

SEQ ID NO: 73569 - DNA, 75 bp, synthetic construct
  source 1..75: mol_type = other DNA
gcagtcagtggcaggcgctgccggtacttccggcagacggaacgcaggtgtctttcccgtatgccggtgaatggc

SEQ ID NO: 73570 - DNA, 75 bp, synthetic construct
  source 1..75: mol_type = other DNA
ccgggaagagacactgaagaatgagaatgcggctgcgcgtgcgtcgaatgatgctgaactgctggggtacgggca

SEQ ID NO: 73571 - DNA, 75 bp, synthetic construct
  source 1..75: mol_type = other DNA
tcggtaaacaggcggagtcgctcatcggtaaggccggcagtctggcgaccagattcacaggtatgatgggggcgg

SEQ ID NO: 73572 - DNA, 75 bp, synthetic construct
  source 1..75: mol_type = other DNA
ccagaccatgcagcgtgaatcagattatcgctggccgtcaaattcccgtatcggtaaacgggatgcctttcagtt

SEQ ID NO: 73573 - DNA, 75 bp, synthetic construct
  source 1..75: mol_type = other DNA
tttttgcccgtaatgtggtgggctggtcgatgaagccgacactgtcgcgcgagctggcactggatgcgctgctga

SEQ ID NO: 73574 - DNA, 75 bp, synthetic construct
  source 1..75: mol_type = other DNA
tggttataacgacgccaccaaatcgctgcaaaccgcagaaggcatcattaaagcgtatgccgatcttgacgccat

SEQ ID NO: 73575 - DNA, 75 bp, synthetic construct
  source 1..75: mol_type = other DNA
gtattttgcacaggagtcgctgaaaaatacgcgttaatcgaacaatggcgacaacaatttcccattgaagcgatg

SEQ ID NO: 73576 - DNA, 75 bp, synthetic construct
  source 1..75: mol_type = other DNA
atgcaaaacagaaaatggattttgtcctcgctggtaatgacttttttcggcatccccatactgacgcaatttttg

SEQ ID NO: 73577 - DNA, 75 bp, synthetic construct
  source 1..75: mol_type = other DNA
gtggagtgtgaaagcccggtggtgatttgtaacgaacagcaccgctttattgtttccgagcagctgcgccagctg

SEQ ID NO: 73578 - DNA, 75 bp, synthetic construct
  source 1..75: mol_type = other DNA
ccgctcgatttaattgaagttcgctccggttcttatctggaagaggacgacgtggtgcgctttgcggaccgctac

SEQ ID NO: 73579 - DNA, 75 bp, synthetic construct
  source 1..75: mol_type = other DNA
accctgctgttgccggaagattatcggatttatgggccagagattgtcgcgttatctttctttgctgttgcgccc

SEQ ID NO: 73580 - DNA, 75 bp, synthetic construct
  source 1..75: mol_type = other DNA
attatcacctgccggatggtgcaattgccggaagcgttgaagcattgctggaactggcggaacgtgcgcgactga

SEQ ID NO: 73581 - DNA, 75 bp, synthetic construct
  source 1..75: mol_type = other DNA
ggtgacgtgatcagccacaaaaccgaaaacagttatgtttacgccgaatctggtctggtgacgaccgtcggtgta

SEQ ID NO: 73582 - DNA, 75 bp, synthetic construct
  source 1..75: mol_type = other DNA
ggggatttatttcagtgaaccccgtgcacagcacatccttaatttctacaaatttgtaccccatgtgaaaggggc

SEQ ID NO: 73583 - DNA, 75 bp, synthetic construct
  source 1..75: mol_type = other DNA
ggatggcgatcagattcgccaggtgccggtgctcgatgagaacggtaaacctgttcttggtactgatggcactcc

SEQ ID NO: 73584 - DNA, 75 bp, synthetic construct
  source 1..75: mol_type = other DNA
ggcgatgtgattaatcacaaaactgaaaacagctatgtgtatgccgaatctggcctggtcaccaccgtcggggtg

SEQ ID NO: 73585 - DNA, 75 bp, synthetic construct
  source 1..75: mol_type = other DNA
atcatacggggtcagaaccatataataacgcactgtcagagaaacgggccggcacagtcaaagggtggtttataa

SEQ ID NO: 73586 - DNA, 75 bp, synthetic construct
  source 1..75: mol_type = other DNA
gtgacattctgcctgaacttgacctggtactgtggctgattaaagccgatgaccgtgccctgtctgtggatgagt

SEQ ID NO: 73587 - DNA, 75 bp, synthetic construct
  source 1..75: mol_type = other DNA
ccagtgctttcagtgggtgacggtgaagtggtggttgccaaacgcagtggcgcagcaggttattatgtggctatt

SEQ ID NO: 73588 - DNA, 75 bp, synthetic construct
  source 1..75: mol_type = other DNA
tgaaaaagttatcttgcagacagacagtggtactgaaaccggtgcgacacttgcgctgagagaaaagaagagcgc

SEQ ID NO: 73589 - DNA, 75 bp, synthetic construct
  source 1..75: mol_type = other DNA
ttattgttctggcggttgctgtattgccattattgggtattggtggtgcaaagctttatcagtcagaaatgccag

SEQ ID NO: 73590 - DNA, 75 bp, synthetic construct
  source 1..75: mol_type = other DNA
agcgagtctgcgccgcgctgcgggagctgaacaagcaccgggatattgtccgacagattgtcgattcctccagtc

SEQ ID NO: 73591 - DNA, 75 bp, synthetic construct
  source 1..75: mol_type = other DNA
atcaactgtactggaaatcctgaccagaatggtttctaccagcattcagtttttctgaccctgacggataacaga

SEQ ID NO: 73592 - DNA, 75 bp, synthetic construct
  source 1..75: mol_type = other DNA
caactcggtgacctatgtggatcactttatctccagcgtgattgatcaggttcgcgataagaaagcgattgtgtt

SEQ ID NO: 73593 - DNA, 75 bp, synthetic construct
  source 1..75: mol_type = other DNA
ttatgttgacagctgggcgctgtataactggtttgataacagcgtcagttccgataaccgttctgctgacgacta

SEQ ID NO: 73594 - DNA, 75 bp, synthetic construct
  source 1..75: mol_type = other DNA
actggatgaagatctctgtaatactctggttatgggatacgatgcaccgcttcgcttcaaaattgctaaagaatg

SEQ ID NO: 73595 - DNA, 75 bp, synthetic construct
  source 1..75: mol_type = other DNA
tccgcgataagtacaccacatcaatcagcgacgatatggtgcagctggtggactggattaacagccagcctgaaa

SEQ ID NO: 73596 - DNA, 75 bp, synthetic construct
  source 1..75: mol_type = other DNA
catttataccggtgcttattatctggctatagcctttaaaaaatggggagtctcctgggaggctgttggtgcata

SEQ ID NO: 73597 - DNA, 75 bp, synthetic construct
  source 1..75: mol_type = other DNA
cgaacctggatatcgatatcccgtatgcgacggacccggcaggaaaccggctgccggacccggaactgcacccgg

SEQ ID NO: 73598 - DNA, 75 bp, synthetic construct
  source 1..75: mol_type = other DNA
aatatctatcccgtcacgccaggattgattgatcagttgcgcgccaaaccgattatgtcgcaggctaacccggag

SEQ ID NO: 73599 - DNA, 75 bp, synthetic construct
  source 1..75: mol_type = other DNA
aaagtgccgcttgaaatgatagaagtccgctccggtgtctatcttgaagaagatgatattgtgcgctttgggcaa

SEQ ID NO: 73600 - DNA, 75 bp, synthetic construct
  source 1..75: mol_type = other DNA
taagtatcacgaatggttttttgtacggactgcttatggcctctctccactggtggcgcaggaaagttaaccggc

SEQ ID NO: 73601 - DNA, 75 bp, synthetic construct
  source 1..75: mol_type = other DNA
atcagcatggcattgatgcggtcttcagcgtattgaccagcataggtacgttggacgaagcattccgcggggctt

SEQ ID NO: 73602 - DNA, 75 bp, synthetic construct
  source 1..75: mol_type = other DNA
ttaccggattactgggtctgttaatggcaacgtatccaccgctgtgggtaatgctctgtattcaggtcgcctttg

SEQ ID NO: 73603 - DNA, 75 bp, synthetic construct
  source 1..75: mol_type = other DNA
actgattactaataaagttctggcgtgttaccagcgtgaaattaacaacgaaatagcacttcagttaaataataa

SEQ ID NO: 73604 - DNA, 75 bp, synthetic construct
  source 1..75: mol_type = other DNA
cacgccttgatcactcccgcaagccggatatggctcgagaaaaacttgtgcaacttcttggcgatgttccccgga

SEQ ID NO: 73605 - DNA, 75 bp, synthetic construct
  source 1..75: mol_type = other DNA
atttcactcgcgaagtagcagaagatcgtcttgaacaacagttcgtacaggaaaaagcagaacagcaaaatcagc

SEQ ID NO: 73606 - DNA, 75 bp, synthetic construct
  source 1..75: mol_type = other DNA
atgcgtgatgatcgttttaattccctgaaacaggagtttgatggcgcaccggaagatacatcgggcgcattgttg

SEQ ID NO: 73607 - DNA, 75 bp, synthetic construct
  source 1..75: mol_type = other DNA
tatcgtgttgttgtcactgataataagttttgcgttacaagagaaagtcatagtggttgctttactaatctgttg

SEQ ID NO: 73608 - DNA, 75 bp, synthetic construct
  source 1..75: mol_type = other DNA
gttgcgccaatcggtgggcgtgatgtatctctgagccaggtgtgtcaggcgctttctaacctcattgagcgtaac

SEQ ID NO: 73609 - DNA, 75 bp, synthetic construct
  source 1..75: mol_type = other DNA
tacaacctggtatcaatgttttccgaccttgccatccttgggctggtggaccttaacgaggttacgccggaattg

SEQ ID NO: 73610 - DNA, 75 bp, synthetic construct
  source 1..75: mol_type = other DNA
gtgctgaatactacatgcatcgtgcagtttttcgcccttggggtaaattcgatgcaatagaccaaggcgatagat

SEQ ID NO: 73611 - DNA, 75 bp, synthetic construct
  source 1..75: mol_type = other DNA
gaatgcgaaaatccaattgttatctgcaatgaagatcaccgatttattgtagcagagcaattacgacagattggt

SEQ ID NO: 73612 - DNA, 75 bp, synthetic construct
  source 1..75: mol_type = other DNA
gggcagactggcggcggatgttatcagaaatgtcagcgtcagaactgggcgaatggggggatttcttccggaagc

SEQ ID NO: 73613 - DNA, 75 bp, synthetic construct
  source 1..75: mol_type = other DNA
ctcaatattgcgtcggactatgcggaatatgttgcagaggcgcgttacagaagaaaattcccggaggtggtgagc

SEQ ID NO: 73614 - DNA, 75 bp, synthetic construct
  source 1..75: mol_type = other DNA
gatggtggtgtctatgatatggataatatcagagtgaccacacctaagcgacatattgatattcatagaggtaag

SEQ ID NO: 73615 - DNA, 75 bp, synthetic construct
  source 1..75: mol_type = other DNA
atcgttggggggcttgggctgcagcagaaaatagtggtgtcgactggcagccgatagcggctggtttcaaggggc

SEQ ID NO: 73616 - DNA, 75 bp, synthetic construct
  source 1..75: mol_type = other DNA
tcgttggggttgtatcttgccgccgccacgctgtttttgcagaccggaacgtttgcgcttagcgcgatgagcgag

SEQ ID NO: 73617 - DNA, 75 bp, synthetic construct
  source 1..75: mol_type = other DNA
caactgaagcggcataatctgcgtggaagtatgagcgcaaaaggttgctgctacgataatgcctgcgtggaaagc

SEQ ID NO: 73618 - DNA, 75 bp, synthetic construct
  source 1..75: mol_type = other DNA
ttgcgaagaggcgtaactattctgatggtactgtcagaaaagaattgcaggccgcacttggttttattgaaggtg

SEQ ID NO: 73619 - DNA, 75 bp, synthetic construct
  source 1..75: mol_type = other DNA
acggcgcgaaattctctgccactgattaccctgtgctggcgaaagtgtttccggcgctagcattacctgacgcac

SEQ ID NO: 73620 - DNA, 75 bp, synthetic construct
  source 1..75: mol_type = other DNA
aaacgtatatcaaaaccagcccatcatacctggcgcagctatgcgatgttcctgctggatgtgatgccggaaaga

SEQ ID NO: 73621 - DNA, 75 bp, synthetic construct
  source 1..75: mol_type = other DNA
atgggtaaagggtgggatgcgtcctttcagttcggcaggcgtgaacgtttacgacaggaggtattacatcgggag

SEQ ID NO: 73622 - DNA, 75 bp, synthetic construct
  source 1..75: mol_type = other DNA
ccacggcagttattacatgaaaggctggcagtcagttgatatgccggaaattcttcatcattgcctgctttacag

SEQ ID NO: 73623 - DNA, 75 bp, synthetic construct
  source 1..75: mol_type = other DNA
gcggaaaacagcctcacgcagctggttgcgaaaaagaatgaggatcagacgctggccatcgcgcaggtgagtcag

SEQ ID NO: 73624 - DNA, 75 bp, synthetic construct
  source 1..75: mol_type = other DNA
ttacccgactctggatggcgttaacgtcttcaaagcgaacgatattgtcattgcgttgttgcaggaaaaaggcgc

SEQ ID NO: 73625 - DNA, 75 bp, synthetic construct
  source 1..75: mol_type = other DNA
accctgctcgataacctccagcgtgaaggatttcatcctttctttgcctgccagacccgcgttcgtgatgtgggt

SEQ ID NO: 73626 - DNA, 75 bp, synthetic construct
  source 1..75: mol_type = other DNA
gctcagtagcgacaccaacagcacttctgaaacattagctgcaacgccaaaagcggttaaagctgcatacgatct

SEQ ID NO: 73627 - DNA, 75 bp, synthetic construct
  source 1..75: mol_type = other DNA
ctgctcggcaaaaaacgatggaaaatgaactccttaaagaagccgttgaatatgggcgagcaaaaaagtggatag

SEQ ID NO: 73628 - DNA, 75 bp, synthetic construct
  source 1..75: mol_type = other DNA
cggaatcagtcagccgatagggggagctttacctgcattccaaaatcctggaggcaacgaaacacgtccccgcaa

SEQ ID NO: 73629 - DNA, 75 bp, synthetic construct
  source 1..75: mol_type = other DNA
gatatcacgcttggtaacaacgtcaccgtgggcgcgggcagcgtggtgctcgactctgtcccggacaacgcgctg

SEQ ID NO: 73630 - DNA, 75 bp, synthetic construct
  source 1..75: mol_type = other DNA
tttccggttatgactcgccgtatgtgcctggctgggactgccacggtctgccgatcgagctgaaagtagagcaag

SEQ ID NO: 73631 - DNA, 75 bp, synthetic construct
  source 1..75: mol_type = other DNA
atgcctggtaacggggaaatgacctgttaccttctgcttcacaaccggaacggagaatacacgctctgggggaac

SEQ ID NO: 73632 - DNA, 75 bp, synthetic construct
  source 1..75: mol_type = other DNA
gcaggtaaacaaccgctggacaatacgctgactaatttgagtggaaaggatgtcgctggtcttctcgcatacctt

SEQ ID NO: 73633 - DNA, 75 bp, synthetic construct
  source 1..75: mol_type = other DNA
tttccagaaaggcaatcagggggcaggcaatatcaccgactgtacggtgattgtgaccaaaaaagcggcttccgg

SEQ ID NO: 73634 - DNA, 75 bp, synthetic construct
  source 1..75: mol_type = other DNA
tcgcctgaagggttttactacaccatgtatccgttatatgactggaaagcccgtgatatctggatatataacgcc

SEQ ID NO: 73635 - DNA, 75 bp, synthetic construct
  source 1..75: mol_type = other DNA
ccaccggggactgccgctggcgcttatcagcgaagacggcaatacggcgtggagcgcggaatatgatgaatgggg

SEQ ID NO: 73636 - DNA, 75 bp, synthetic construct
  source 1..75: mol_type = other DNA
tcgcctgaagggttttattacaccatgtatccgttatatgactggaaagcccgcgatatctggatatataacgcc

SEQ ID NO: 73637 - DNA, 75 bp, synthetic construct
  source 1..75: mol_type = other DNA
cgggcaggctggagagcgtgcgtaccctcgcaccggacctggacatccgcatcccgtatgccaccgacccggcgg

SEQ ID NO: 73638 - DNA, 75 bp, synthetic construct
  source 1..75: mol_type = other DNA
ttcgttcgaaaacctataagggcagcgggtttaatgaactgaagtttgacgatgcgacagggaaagaacaggtct

SEQ ID NO: 73639 - DNA, 75 bp, synthetic construct
  source 1..75: mol_type = other DNA
acccaaaacttcagccctgggtattactgacaagaataaattccagtaagcctcgacaccgccaggcagctataa

SEQ ID NO: 73640 - DNA, 75 bp, synthetic construct
  source 1..75: mol_type = other DNA
atgactatgccggtatcagtaccggtggtcgcgtgctggcggtgaacagcgagacccggacgctgacgcttgacc

SEQ ID NO: 73641 - DNA, 75 bp, synthetic construct
  source 1..75: mol_type = other DNA
caccatttaatattgaaagttataaaactgctgatggacaatatgcaataccgtttaaggcaaaatatctgaagt

SEQ ID NO: 73642 - DNA, 75 bp, synthetic construct
  source 1..75: mol_type = other DNA
tctctaagtatgcggtttggaaagcataccagcgggtcaaagctaatcgaggtgcggcaggtgtcgatgggcagt

SEQ ID NO: 73643 - DNA, 75 bp, synthetic construct
  source 1..75: mol_type = other DNA
ggagcatgtacggggggagtttgtggtgttctttcacgtataataggaccaagtaaatttgatagtactgcagat

SEQ ID NO: 73644 - DNA, 75 bp, synthetic construct
  source 1..75: mol_type = other DNA
cggtggttgaagcggtgaatgacgtggcgcgggcagccagtcaggttcagacactggcggagaaaaaccagcatc

SEQ ID NO: 73645 - DNA, 75 bp, synthetic construct
  source 1..75: mol_type = other DNA
tatatgtaagacgctcataaagaatgatttctggtgccggaccctgtccttcagcccaaacaaaccccgtcacta

SEQ ID NO: 73646 - DNA, 75 bp, synthetic construct
  source 1..75: mol_type = other DNA
cgccgggaatataccaaacatatgctgcgtctgcgacgggccggacagataaccggtcagcatgtgcctgaaatt

SEQ ID NO: 73647 - DNA, 75 bp, synthetic construct
  source 1..75: mol_type = other DNA
gccggagaaggaggccatcgtggataatggtgccacctttgagccgttgtccggttcgctgaacagtgtcacacc

SEQ ID NO: 73648 - DNA, 75 bp, synthetic construct
  source 1..75: mol_type = other DNA
aaacgtcgaccgcagaacgtaaaatcttattctggtacgacccgatgtatcccaatacgcggttcgataaaccag

SEQ ID NO: 73649 - DNA, 75 bp, synthetic construct
  source 1..75: mol_type = other DNA
ctatgtggaatgcgtacagatggatcgttggtatgagccgcctgtgagtttcgacggactggcgcgaaccttccg

SEQ ID NO: 73650 - DNA, 75 bp, synthetic construct
  source 1..75: mol_type = other DNA
aagggtgatttttcatgagccggcaacggatgtcacccgggtgttttcgtccgtcattgatatgccggcaggacg

SEQ ID NO: 73651 - DNA, 75 bp, synthetic construct
  source 1..75: mol_type = other DNA
tctttgttcgcaacgagttgatacctctgcagaagcgccttcaggaattgaacgactggcttggagaagaagtca

SEQ ID NO: 73652 - DNA, 75 bp, synthetic construct
  source 1..75: mol_type = other DNA
atgcaattagccagtcgttttggttatgcgaaccagatacgccgtgaccgtccgctgacacatgaagagctgatg

SEQ ID NO: 73653 - DNA, 75 bp, synthetic construct
  source 1..75: mol_type = other DNA
aaggcacaggcgatgcgcgccgctcaggctaagtgggataaactgcagcgaggcgttgcggagttttcaatcaca

SEQ ID NO: 73654 - DNA, 75 bp, synthetic construct
  source 1..75: mol_type = other DNA
tcagtcgcttgttgctggaagagcggatgcgtgttgctgtgaatatgttatgttcccggcatggatatggacagg

SEQ ID NO: 73655 - DNA, 75 bp, synthetic construct
  source 1..75: mol_type = other DNA
agggtttatgacgatcagccgtttgaccggcaaattgttattccggcggtggcattcagtggcgctaaacatgag

SEQ ID NO: 73656 - DNA, 75 bp, synthetic construct
  source 1..75: mol_type = other DNA
cgtgaagcggaagacgtgctggatgtggcggtggccattgccgaagcagacggcgaaatagagccggaagagcgc

SEQ ID NO: 73657 - DNA, 75 bp, synthetic construct
  source 1..75: mol_type = other DNA
ttttatgactatgactttactcgcggtcatcgtcgcttggggctgggtagcgaagcctggaccgactatctgaag

SEQ ID NO: 73658 - DNA, 75 bp, synthetic construct
  source 1..75: mol_type = other DNA
cgcctgtcggttcttctgtcctcgaacgcatccgcgatattcgcgccagcatgcgccgtgtttatttgcaggtga

SEQ ID NO: 73659 - DNA, 75 bp, synthetic construct
  source 1..75: mol_type = other DNA
tgcggtcattacgctggcgttgggctggaaggggcagtcgcttttcccgaaaggagcattcacggtggacgagat

SEQ ID NO: 73660 - DNA, 75 bp, synthetic construct
  source 1..75: mol_type = other DNA
atgagcaagaaaaaagggaaaacaccgcaacctgcggcaaaaaaaatgactgccagcgccccgaaaatggaggca

SEQ ID NO: 73661 - DNA, 75 bp, synthetic construct
  source 1..75: mol_type = other DNA
atgcgattagcaagtcgttttggtcatgtaaaccagatacgccgtgaccgccccttaactcgcgaagaactgatg

SEQ ID NO: 73662 - DNA, 75 bp, synthetic construct
  source 1..75: mol_type = other DNA
tgactggatcgctcaggataatcctgtccgtgcaatcagttttaccgaagagctttaccaacaatgtctgttgat

SEQ ID NO: 73663 - DNA, 75 bp, synthetic construct
  source 1..75: mol_type = other DNA
ctgcgcatgtttgcgatattaatgggggcttcaatcacctgtggactggcttatccctggctgaaaatgtggatg

SEQ ID NO: 73664 - DNA, 75 bp, synthetic construct
  source 1..75: mol_type = other DNA
ttatgggagcgcttgtttccttttatgccgatgccgggcgcaaaccctgttctggttcgaaaggggggatctcac

SEQ ID NO: 73665 - DNA, 75 bp, synthetic construct
  source 1..75: mol_type = other DNA
gccgacattctgacaccacgacgccgggaggattacggtaaggacctgtggagtacttatcagaccattcaggag

SEQ ID NO: 73666 - DNA, 75 bp, synthetic construct
  source 1..75: mol_type = other DNA
gtttatgtgatccggattgcgctaaacgactggggcaatatctggctgacggaaagccacggcgtcaacctgctc

SEQ ID NO: 73667 - DNA, 75 bp, synthetic construct
  source 1..75: mol_type = other DNA
gggaaggctttcagccgttcttcgcctgccagacccgtgtgcgcgacccgggccgccgggaatataccaaacaca

SEQ ID NO: 73668 - DNA, 75 bp, synthetic construct
  source 1..75: mol_type = other DNA
caccaggaaaaccgcacacccggcagcctgccggggacgaagacgcagatgaccattcgttcgaaaacctataag

SEQ ID NO: 73669 - DNA, 75 bp, synthetic construct
  source 1..75: mol_type = other DNA
tggaaaagggttaacaattccccatcatgctggaattgttgttcattttgctgttgatgctggtgaaaatctggt

SEQ ID NO: 73670 - DNA, 75 bp, synthetic construct
  source 1..75: mol_type = other DNA
ggaagacccggaagccatactgcgctacggacgcaacctgctgaagatggacgcgttcggctgtaccagccgcgg

SEQ ID NO: 73671 - DNA, 75 bp, synthetic construct
  source 1..75: mol_type = other DNA
attccatgtcccccaaatttgcaagagcaaagtgctattgctgattcattatctgatattaataattttattcta

SEQ ID NO: 73672 - DNA, 75 bp, synthetic construct
  source 1..75: mol_type = other DNA
actccgattctcgcttcatctatttttggacaactgataaaaaattcagagcatcactggaatctgaaatggtgg

SEQ ID NO: 73673 - DNA, 75 bp, synthetic construct
  source 1..75: mol_type = other DNA
tgacactgacattcaccgtatcttcatcaggagcgaataactggacaccaacaaccagtatcagcgatctgctgg

SEQ ID NO: 73674 - DNA, 75 bp, synthetic construct
  source 1..75: mol_type = other DNA
aaggcgcaggccatgcgcgcagctcaggcaaagtgggacaggatacagcgtggggtggcggagttttcgatcacg

SEQ ID NO: 73675 - DNA, 75 bp, synthetic construct
  source 1..75: mol_type = other DNA
catgaagagctgatgcaccatgtgccggggattttcggggaagagaaacacacgtcccgaagccagaactatacg

SEQ ID NO: 73676 - DNA, 75 bp, synthetic construct
  source 1..75: mol_type = other DNA
caggattgcgatgattaatcctgcgaatggcaacacaaagccgatgtttgttggtcagggcgatcagatattcat

SEQ ID NO: 73677 - DNA, 75 bp, synthetic construct
  source 1..75: mol_type = other DNA
caacctggtgggaaaatctgcttttgtggaagccagcgggcagcccagcaatgatggtgaagggtatctggaaat

SEQ ID NO: 73678 - DNA, 75 bp, synthetic construct
  source 1..75: mol_type = other DNA
ttgaattgttcattaaaaatccggttgaaaacgggcttacccgtggtgaacaaatggaactggcacggattgcgc

SEQ ID NO: 73679 - DNA, 75 bp, synthetic construct
  source 1..75: mol_type = other DNA
atcgttcacgaaactcggttttatatggaccagagtgcggaggctatgctggaggcaggtaaacgtttggttatc

SEQ ID NO: 73680 - DNA, 75 bp, synthetic construct
  source 1..75: mol_type = other DNA
cctgctggatgtgatgccggaaagaacggcagaacattaccgtaataaaattgctgtctacctgcgctggtatca

SEQ ID NO: 73681 - DNA, 75 bp, synthetic construct
  source 1..75: mol_type = other DNA
ctggacattctcgccgccagtacggacgacggttggtatttgcttgaaggtgctgacccagggagccaggaggcg

SEQ ID NO: 73682 - DNA, 75 bp, synthetic construct
  source 1..75: mol_type = other DNA
aaattcaggctaaaggtttagccgcgccgcgcgttacgccagaccatatcgagagcattattgctcaggaggcat

SEQ ID NO: 73683 - DNA, 75 bp, synthetic construct
  source 1..75: mol_type = other DNA
accatcgcacagtcgcagaaatatctgacgatgtggcgggctgaatcgctggatctgaatatggcaaaactcatc

SEQ ID NO: 73684 - DNA, 75 bp, synthetic construct
  source 1..75: mol_type = other DNA
attcgtaagggacgctatattgaattatcgccagcgggaagttacttcatcgaacatagcaaaactattcttggc

SEQ ID NO: 73685 - DNA, 75 bp, synthetic construct
  source 1..75: mol_type = other DNA
caattaccctgaatgtgccagatgatttcaccgggcgcgtactggtttacctggataaagggaaagtgaaatcac

SEQ ID NO: 73686 - DNA, 75 bp, synthetic construct
  source 1..75: mol_type = other DNA
gaaattactgaatcagaaagacagctactaattaaccaggccaacgaatacatgaacagtaagcaatggcctggt

SEQ ID NO: 73687 - DNA, 75 bp, synthetic construct
  source 1..75: mol_type = other DNA
cttttgtgaaatcggcgattgcggcaatggtgggttctgcacctgcggcactggatacactgaacgaactggcag

SEQ ID NO: 73688 - DNA, 75 bp, synthetic construct
  source 1..75: mol_type = other DNA
agctaatcagattgaaggcgatattgttaaaacggtgggtaaggctttcccccgtgactcccgggcaccggagcg

SEQ ID NO: 73689 - DNA, 75 bp, synthetic construct
  source 1..75: mol_type = other DNA
catgccgcctgatagtgaagaaaaacggtgctgaaatttataaccgtaccgcgctggataatacgctggtttaca

SEQ ID NO: 73690 - DNA, 75 bp, synthetic construct
  source 1..75: mol_type = other DNA
atgcgtactatcgttttgcatccagttactcatttctcttttttatttcctggtcgctgtggtggtcgttatacg

SEQ ID NO: 73691 - DNA, 75 bp, synthetic construct
  source 1..75: mol_type = other DNA
attgttaaaggtatggaaggcgcaatcaatgcgaagaccgtaacctatgacttcgaacgtctgatggaaggcgct

SEQ ID NO: 73692 - DNA, 75 bp, synthetic construct
  source 1..75: mol_type = other DNA
caccatgaaagcgctggaaatggcatgggaaacccgtggtaaacccggcggggtgatgttccacagcgatagtaa

SEQ ID NO: 73693 - DNA, 75 bp, synthetic construct
  source 1..75: mol_type = other DNA
ctgcctggtgttgtaacagggcgcggcgtcctgctttcaccaggaactcgctggctggatatgtcggtatccaat

SEQ ID NO: 73694 - DNA, 75 bp, synthetic construct
  source 1..75: mol_type = other DNA
tgtggtatttatccccatggctcctacgaaggcgaaattatttttgcgggagaagagattcaggcgagtcacatc

SEQ ID NO: 73695 - DNA, 75 bp, synthetic construct
  source 1..75: mol_type = other DNA
cacttttgcaatggcttaacatgttttttagtcgccgttcattatccggagctgatggacgggcgttatatgctt

SEQ ID NO: 73696 - DNA, 75 bp, synthetic construct
  source 1..75: mol_type = other DNA
atgaacaaatatgtttatagtgccagacataatgcttttttccctgtggatatgattgataaatataaatcagag

SEQ ID NO: 73697 - DNA, 75 bp, synthetic construct
  source 1..75: mol_type = other DNA
gaaaccagctcaacagtctgattccggctctagaaacttttggatacccaggattgggaggacaggagttacata

SEQ ID NO: 73698 - DNA, 75 bp, synthetic construct
  source 1..75: mol_type = other DNA
tcattcggccaacgcgtagtagccctggcggatatgcagcaggcgatcaccggatttgcagcgcgcgcagctgaa

SEQ ID NO: 73699 - DNA, 75 bp, synthetic construct
  source 1..75: mol_type = other DNA
gatggttttggtacagcgattgaagacgttcctaaagttcttcaaagtatccctgaagggttccggttaattgat

SEQ ID NO: 73700 - DNA, 75 bp, synthetic construct
  source 1..75: mol_type = other DNA
agcgtggaaagacgctgttgactgggtactcaaagaggtttgtcaggttgtaaacattcgcatcaaaggagaatg

SEQ ID NO: 73701 - DNA, 75 bp, synthetic construct
  source 1..75: mol_type = other DNA
cattatctaaaatgatgaatagctccagtgatctcatggggttgagaaggcagccccagaacttctggcggctat

SEQ ID NO: 73702 - DNA, 75 bp, synthetic construct
  source 1..75: mol_type = other DNA
ggaagtgaaatacgacacgccgatcacccgcgccatcacgtcggcaaacatcgaccgactgcgctttaccttcgg

SEQ ID NO: 73703 - DNA, 75 bp, synthetic construct
  source 1..75: mol_type = other DNA
tattaatgatgcgcccgccttacgcgctgcggatatcggcatttctgtggacggcgcggtagatattgcccgtga

SEQ ID NO: 73704 - DNA, 75 bp, synthetic construct
  source 1..75: mol_type = other DNA
gatggcccatttgctgcagcctggccgttcgtgaccagtttccttgtactggctactctcacttacattatggca

SEQ ID NO: 73705 - DNA, 75 bp, synthetic construct
  source 1..75: mol_type = other DNA
tttgcctgatgtggtgggtattccatgccaacacgccggaaacgcaaacgctgttccagtcgggctggtttgtgg

SEQ ID NO: 73706 - DNA, 75 bp, synthetic construct
  source 1..75: mol_type = other DNA
tgctcgcttcgctctcggttatttccgtcgctcaggcggggatacctgttgccattgatgccaatccggaatggg

SEQ ID NO: 73707 - DNA, 75 bp, synthetic construct
  source 1..75: mol_type = other DNA
acggttacagtcaccatcagcgatgatcataactttgaccgtcaaatcattattccgcccattatctttaacgga

SEQ ID NO: 73708 - DNA, 75 bp, synthetic construct
  source 1..75: mol_type = other DNA
tggcggcgggagcgtgacctgacggggtggatgtcgctgtcgcgtaaaccggaggtgacatggtacgggtgggac

SEQ ID NO: 73709 - DNA, 75 bp, synthetic construct
  source 1..75: mol_type = other DNA
tcgccacggcgtcactatcggcaatcgtggtgccgataacatggcatgtccacacattggcaacggcgtcgaact

SEQ ID NO: 73710 - DNA, 75 bp, synthetic construct
  source 1..75: mol_type = other DNA
atgagcattccattcacccgctggccggaagagtttgcccgtcgctatcgggaaaaaggctactggcaggatttg

SEQ ID NO: 73711 - DNA, 75 bp, synthetic construct
  source 1..75: mol_type = other DNA
ctgtagaattgaattcagatgcggcatccgaatatacattgactgatggcactaacaaaattccgttccaggctc

SEQ ID NO: 73712 - DNA, 75 bp, synthetic construct
  source 1..75: mol_type = other DNA
tgttctggtttatgaggtcgacagccagtggggaaaagtgtatatcctgcgcgtgttgcatactgcacagaagtg

SEQ ID NO: 73713 - DNA, 75 bp, synthetic construct
  source 1..75: mol_type = other DNA
tggcggctacccgaaggtaatccctatctgaggacggagaccaaaaacacgtatacatcgcgctttacagaagtg

SEQ ID NO: 73714 - DNA, 75 bp, synthetic construct
  source 1..75: mol_type = other DNA
gcggacgctggcctttcaccgggcggcggagggtgatgtggcgggcgcggtgacgggggtgacggacggcgcggg

SEQ ID NO: 73715 - DNA, 75 bp, synthetic construct
  source 1..75: mol_type = other DNA
gaaatatgtcccgacaaaagaagattgtaacgacagaccaaactatgaaattcaggcgttattcacggccccgcc

SEQ ID NO: 73716 - DNA, 75 bp, synthetic construct
  source 1..75: mol_type = other DNA
gtgcacagccaggcctttcataccgaacgggcctgccgcgatgcattgcgcgccattaaaaaggagaatgttggc

SEQ ID NO: 73717 - DNA, 75 bp, synthetic construct
  source 1..75: mol_type = other DNA
gtcggccggtgcgaacaactggacgccgacaacgtacatcagtgatttactggttgtggtcatgaaaaaatccac

SEQ ID NO: 73718 - DNA, 75 bp, synthetic construct
  source 1..75: mol_type = other DNA
tccgtcaccgacggacttaaggtgaaagtgaaccgggttcctgacggcgttgcagaatacagtgtgtgggggctg

SEQ ID NO: 73719 - DNA, 75 bp, synthetic construct
  source 1..75: mol_type = other DNA
cgatctggaaattaccgagcattacaccgataccgcaggcttcactgaacatgttttcgccctgatgcacctgct

SEQ ID NO: 73720 - DNA, 75 bp, synthetic construct
  source 1..75: mol_type = other DNA
taatcccaaaagagagaatgaaaatgcgaaggccgcatgttgttccactttctcatcagactcaaatgttattga

SEQ ID NO: 73721 - DNA, 75 bp, synthetic construct
  source 1..75: mol_type = other DNA
gtctgctttgcaatcagaacaggaacgtttgattatgccgatcgattccctgactcacctaacctgaagctattt

SEQ ID NO: 73722 - DNA, 75 bp, synthetic construct
  source 1..75: mol_type = other DNA
gtcagataacgggagtgcctgctgcctcgctgacggcaaaaggcaccatacaattgagcagtgccatcaacagca

SEQ ID NO: 73723 - DNA, 75 bp, synthetic construct
  source 1..75: mol_type = other DNA
cggatcgaggagcattacaccgacacggcgggcttcaccgatcacgtcttcgccctgatgcacctcctgggcttc

SEQ ID NO: 73724 - DNA, 75 bp, synthetic construct
  source 1..75: mol_type = other DNA
gtttcgagcagcagcgctaccgggctagcggcctcaatctggtaacggctgccgtcgtgttgtggaacacggtct

SEQ ID NO: 73725 - DNA, 75 bp, synthetic construct
  source 1..75: mol_type = other DNA
ccttcagtccgaacaaaccccggcactatgaacgttatctgcagcgtatgaaagaaaggaggaaggaatggggga

SEQ ID NO: 73726 - DNA, 75 bp, synthetic construct
  source 1..75: mol_type = other DNA
tgcccgccgacgcgccgaccgagttcatcaagccgcgctggcagaagctggtcatgaccgacaccggcatcgacc

SEQ ID NO: 73727 - DNA, 75 bp, synthetic construct
  source 1..75: mol_type = other DNA
gacgcctctcgtgtcgtgccaacagctaatgaaaaccgtccacgtaacatcgcctttaattatattgtgagggct

SEQ ID NO: 73728 - DNA, 75 bp, synthetic construct
  source 1..75: mol_type = other DNA
gagcacacctaataatgttcacgtttcaatgatcgtggatgatcaggtaacaaataccggcttttatgcccgctg

SEQ ID NO: 73729 - DNA, 75 bp, synthetic construct
  source 1..75: mol_type = other DNA
tcgttctgctctcgcaggcgctggaaaatggccgtgatagccattgtttaaccttttgtggcgaaccgctgcaac

SEQ ID NO: 73730 - DNA, 75 bp, synthetic construct
  source 1..75: mol_type = other DNA
aaatcgacggcctgtgggaagatttctgggtgggtggtatcaccaacccgctgaccgtaatcgaacagatcacct

SEQ ID NO: 73731 - DNA, 75 bp, synthetic construct
  source 1..75: mol_type = other DNA
agatgccggatatcgccgctgatgcgaaagccattgcatttggtaacttcaaacggggttacaccatcgttgacc

SEQ ID NO: 73732 - DNA, 75 bp, synthetic construct
  source 1..75: mol_type = other DNA
gtgttttggcgtgatattacgttgtcggtctggcgtaagaagacaactggcctcaaaacaaaaaagcgtttactg

SEQ ID NO: 73733 - DNA, 75 bp, synthetic construct
  source 1..75: mol_type = other DNA
gacaaacgtatcgacgcgatcgagcaggaaaagggaaaacttgctggtgaagtggaaaccctcaacggaaaactg

SEQ ID NO: 73734 - DNA, 75 bp, synthetic construct
  source 1..75: mol_type = other DNA
gcttaatcgttgaaaaagatgggggggccgtctttgtcgctatcgaaaagggaggactactggaggttaaagagg

SEQ ID NO: 73735 - DNA, 75 bp, synthetic construct
  source 1..75: mol_type = other DNA
tcgttaattccaaccttaaaggcattttttcagcgccattccttgctttataacgcagccggagagaaatcctga

SEQ ID NO: 73736 - DNA, 75 bp, synthetic construct
  source 1..75: mol_type = other DNA
cgcggttcagaaaaaagaaagagaatgcctataatgtatccaacaaccaagtaacaggaagtggtaatgatggag

SEQ ID NO: 73737 - DNA, 75 bp, synthetic construct
  source 1..75: mol_type = other DNA
tgccagcgccgccgcgctcggtgtgccgttaaaaattacccatatggcggtcggcgatggcggcggaacattgcc

SEQ ID NO: 73738 - DNA, 75 bp, synthetic construct
  source 1..75: mol_type = other DNA
atggataagaagcaagtaacggatttaaggtcggaactactcgattcacgttttggcgctaagtcgatttcaact

SEQ ID NO: 73739 - DNA, 75 bp, synthetic construct
  source 1..75: mol_type = other DNA
cccgcaatggtcaggagatttttaatcagtccacgacggatgctcagggcgtattttcctcagttatagatatgc

SEQ ID NO: 73740 - DNA, 75 bp, synthetic construct
  source 1..75: mol_type = other DNA
gatggtgtggagacatacggtgtgtggggactctccctgccgtcactgcgccgtcgcctgttccgctgtgtctcc

SEQ ID NO: 73741 - DNA, 75 bp, synthetic construct
  source 1..75: mol_type = other DNA
tacatcgacggtgaacctgattaacggcagcggtaagccggtgcgcgtggacatcactgcacaccccgcccctga

SEQ ID NO: 73742 - DNA, 75 bp, synthetic construct
  source 1..75: mol_type = other DNA
acccgcattagcacactggattcgtcaaccagtgaatcgcttaatgaggtcgacaagcgcatcactaaactggat

SEQ ID NO: 73743 - DNA, 75 bp, synthetic construct
  source 1..75: mol_type = other DNA
taccgttaccgctgccagtgagcgcgaagcgcgcgccctgcttccggcatcccgtctggtctttgttgcccgtat

SEQ ID NO: 73744 - DNA, 75 bp, synthetic construct
  source 1..75: mol_type = other DNA
ccccagaagcctggaaaatgcgttttctggccaacgggacatccggcacatggttttacactgacgacattgcag

SEQ ID NO: 73745 - DNA, 75 bp, synthetic construct
  source 1..75: mol_type = other DNA
tggcgctggatgcactgatgatggcggtctggcgacgtaaacccgacggcgaggtcatcgtgcactcagaccagg

SEQ ID NO: 73746 - DNA, 75 bp, synthetic construct
  source 1..75: mol_type = other DNA
gacgccggacgcaaagcagagtgcactggtaaatgagaaacgtcgggctgcgctgaatatgctctatatcgaccc

SEQ ID NO: 73747 - DNA, 75 bp, synthetic construct
  source 1..75: mol_type = other DNA
cattaataaacccgatgggccagcaacagcagggatagatgatttgggtgaaattttagctaagatgaaacagag

SEQ ID NO: 73748 - DNA, 75 bp, synthetic construct
  source 1..75: mol_type = other DNA
aggtggtgatgcgccaggaagccactgtgatcaccctcggtggctcggattataaaaaactggtgaatctgggcg

SEQ ID NO: 73749 - DNA, 75 bp, synthetic construct
  source 1..75: mol_type = other DNA
tgcgtctgcgccgtgacggggagataaccggacaacatgtccctgaaattattctgctcaactcccatgacggtt

SEQ ID NO: 73750 - DNA, 75 bp, synthetic construct
  source 1..75: mol_type = other DNA
tgtggctggattatctggacgcactggaactggttgattcctccagtgcgccagatattgaatggcctacgcctc

SEQ ID NO: 73751 - DNA, 75 bp, synthetic construct
  source 1..75: mol_type = other DNA
cgacgcagagtgggaagcgaaaatcctggaactggctggcttcctggattcttacattccggaaccagagcgtgc

SEQ ID NO: 73752 - DNA, 75 bp, synthetic construct
  source 1..75: mol_type = other DNA
acattcatcctcagaaagagtatttaattcgtaaggatgaaaatattcgctttgctgaacaacacggcgtgccgt

SEQ ID NO: 73753 - DNA, 75 bp, synthetic construct
  source 1..75: mol_type = other DNA
tattgcttaatcaggccaacgaacacatgaacagtaaacaatggcctggtaaagcggctattggtcgtctgaaag

SEQ ID NO: 73754 - DNA, 75 bp, synthetic construct
  source 1..75: mol_type = other DNA
caaaaccgcacgttaacgtaggtactatcggccacgttgaccatggtaaaaccacactgaccgctgcaatcacga

SEQ ID NO: 73755 - DNA, 75 bp, synthetic construct
  source 1..75: mol_type = other DNA
gattaccggtaaacaggtaccagaaattatcctgctcaactcccacgatggcaccagttcgtatcagatgttgcc

SEQ ID NO: 73756 - DNA, 75 bp, synthetic construct
  source 1..75: mol_type = other DNA
aacgcctcactacctcgcttgcgtggaaaaacttgaatcgctgatgagctgcccccgaaaaaaacgcatcttcaa

SEQ ID NO: 73757 - DNA, 75 bp, synthetic construct
  source 1..75: mol_type = other DNA
tggtgtttgtctcatttgagggagacattgtaaacggagacgcagttgaagtagaagttgagcgcggatccttta

SEQ ID NO: 73758 - DNA, 75 bp, synthetic construct
  source 1..75: mol_type = other DNA
ccattcttcgcctgccagacccgtgtgcgcgacccgggccgccggggatacacaaaacacatgctgcgtctgcgg

SEQ ID NO: 73759 - DNA, 75 bp, synthetic construct
  source 1..75: mol_type = other DNA
agtttgtaagtgacaaaacgcaacgggatgtgcttgataatggtgatctgcccggttttgttgaattgctgggat

SEQ ID NO: 73760 - DNA, 75 bp, synthetic construct
  source 1..75: mol_type = other DNA
tgttaagaatggcgattttggtgacaaaaccggcgtaattctgggccatgaaggcatcggtgtggtggcagaagt

SEQ ID NO: 73761 - DNA, 75 bp, synthetic construct
  source 1..75: mol_type = other DNA
atcatcatgttgacgttacgtataaaacactgcgctcactgaaacatggcgaagccctgctgaaaatggagtgtt

SEQ ID NO: 73762 - DNA, 75 bp, synthetic construct
  source 1..75: mol_type = other DNA
cgccatgtaccgagtatttttggggaagaccgacatacctcccgcagtgaacactatgcgtacattcccactatc

SEQ ID NO: 73763 - DNA, 75 bp, synthetic construct
  source 1..75: mol_type = other DNA
actgcgcgataccaatctacaccgcaaatctcagggacgccctctaatcaaaattggtcaactgcactacggtaa

SEQ ID NO: 73764 - DNA, 75 bp, synthetic construct
  source 1..75: mol_type = other DNA
gggaagtgcgtgttccacaccggggaaatgtagtggagaaagttgtcgaaggggcttacgaggtggtgggcgtgt

SEQ ID NO: 73765 - DNA, 75 bp, synthetic construct
  source 1..75: mol_type = other DNA
cccagtggtaattttaaagcaatagataaccacgggaaggaaataacaaacagaaaaggattacctaatgtctgc

SEQ ID NO: 73766 - DNA, 75 bp, synthetic construct
  source 1..75: mol_type = other DNA
accgtactggaaagcctgcagcgggaaggttttcagcccttctttgcctgccagacccgcgtgcgcgacccgggc

SEQ ID NO: 73767 - DNA, 75 bp, synthetic construct
  source 1..75: mol_type = other DNA
aatacctcactgaccacggcgataacgacccacggcgatgaattagctgcggtgctgtttacctccggaaccgag

SEQ ID NO: 73768 - DNA, 75 bp, synthetic construct
  source 1..75: mol_type = other DNA
gtaaggacacgttgcaggccaaagataaaacttaccactactacagcctgccgcttgctgctaaatcactgggcg

SEQ ID NO: 73769 - DNA, 75 bp, synthetic construct
  source 1..75: mol_type = other DNA
aattaattttttcgccagaaatcttgatagttttctgatcggtaagtatatgtcagcatctatacttggatctta

SEQ ID NO: 73770 - DNA, 75 bp, synthetic construct
  source 1..75: mol_type = other DNA
gggcgttttttctttcatgtgatgggtgccctggctgaaatggagcgagaactcattgtcgagcggacacgcgcc

SEQ ID NO: 73771 - DNA, 75 bp, synthetic construct
  source 1..75: mol_type = other DNA
ggctctcgaaaaccttggtttgggagaagcggcaaagaggaatgtggggacaggagaaaatcaggtaccggatat

SEQ ID NO: 73772 - DNA, 75 bp, synthetic construct
  source 1..75: mol_type = other DNA
ctgtccccggacaggcgatgaaggaggcgctgcaggctgcgggatgtacaaacaccatccgggtggtttcaccgg

SEQ ID NO: 73773 - DNA, 75 bp, synthetic construct
  source 1..75: mol_type = other DNA
acctggaaacatccattcagaattatcaggcaaaagacatatttgacacgaaaaacaaaatttttttcaataaat

SEQ ID NO: 73774 - DNA, 75 bp, synthetic construct
  source 1..75: mol_type = other DNA
tcgttacacaattataatgctttttgtgattttattgaatttaagcatgaaaatattataccgaataccagtatg

SEQ ID NO: 73775 - DNA, 75 bp, synthetic construct
  source 1..75: mol_type = other DNA
atgaagagtaaagttgacgctcatccatattatgatggtctaggaaagggtatcaagcggcattttaactattca

SEQ ID NO: 73776 - DNA, 75 bp, synthetic construct
  source 1..75: mol_type = other DNA
gctggaagactataaagcctccctgaaatatctcagcgatcacccgaaactgcagggtattgcccagcagaacag

SEQ ID NO: 73777 - DNA, 75 bp, synthetic construct
  source 1..75: mol_type = other DNA
tgattaatcaggccaacgattatatgaacagtaaacaatgggctggtaaagcggctattggtcgtctgaaaggtg

SEQ ID NO: 73778 - DNA, 75 bp, synthetic construct
  source 1..75: mol_type = other DNA
ggctctcgaaaaccttggtttgggagaaggctctgcattacctgttggtgtccctgttccgtggccttcagccac

SEQ ID NO: 73779 - DNA, 75 bp, synthetic construct
  source 1..75: mol_type = other DNA
tgtacattctgtccaaagatgaaggcggtcgtcatactccgttctttaaaggctaccgtccgcagttctacttcc

SEQ ID NO: 73780 - DNA, 75 bp, synthetic construct
  source 1..75: mol_type = other DNA
tatcggccacgttgaccatggtaaaaccactctgaccgctgcaatcactaccgtactggctaaaacctacggcgg

SEQ ID NO: 73781 - DNA, 75 bp, synthetic construct
  source 1..75: mol_type = other DNA
agtctagaaaacgtgtggctataatttatgatgtaggggtgtcgacgctatacaaaaaatttcctgcgcggcgtt

SEQ ID NO: 73782 - DNA, 75 bp, synthetic construct
  source 1..75: mol_type = other DNA
agcctcaggccgggccatttgaaattgcggctgcagatattttcgaacgggtgaagcctgaatgtcgttacaatc

SEQ ID NO: 73783 - DNA, 75 bp, synthetic construct
  source 1..75: mol_type = other DNA
gtgttcgtcctgatccagcgcgggcagtctttcgtcgatgccaacaactatccggtggaaatctgcaaggtaact

SEQ ID NO: 73784 - DNA, 75 bp, synthetic construct
  source 1..75: mol_type = other DNA
aacaggggctggcccacagggggcaattaagcgggagattttctctgacaaagagagtctgtggggatatgcagt

SEQ ID NO: 73785 - DNA, 75 bp, synthetic construct
  source 1..75: mol_type = other DNA
ttctcgcggctctgtcctcacgtcaaaggcccgcttcggggccagccaatcgatctggaaccgtggcagcagttc

SEQ ID NO: 73786 - DNA, 75 bp, synthetic construct
  source 1..75: mol_type = other DNA
agctacccggggatcgccgtttgcgtggagccggaatcggttccggcgctggtgaccggaattgaacaggcactc

SEQ ID NO: 73787 - DNA, 75 bp, synthetic construct
  source 1..75: mol_type = other DNA
cttgaaggttatggcttaaccgaatgtgcgccattggtaagtgttaacccgtacgatattgattaccacagcggc

SEQ ID NO: 73788 - DNA, 75 bp, synthetic construct
  source 1..75: mol_type = other DNA
gtgcgggactggcggctattgctctgcttgctggaggtggtggcggaagcagtcgccataaaagtgctgctggag

SEQ ID NO: 73789 - DNA, 75 bp, synthetic construct
  source 1..75: mol_type = other DNA
aaagtttgatcgcagaactggcagagtttactaccagtataaaaaccctgtgactggaaaatttcacggactcgg

SEQ ID NO: 73790 - DNA, 75 bp, synthetic construct
  source 1..75: mol_type = other DNA
ggtactggctaagccgggcaccatcaagccgcacaccaagttcgaatctgaagtgtacattctgtccaaagatga

SEQ ID NO: 73791 - DNA, 75 bp, synthetic construct
  source 1..75: mol_type = other DNA
atgtcaccgaggccacgaaaaaacagtactgacgtagcagctctttacgaaaagtttgatcgcagaactggcaag

SEQ ID NO: 73792 - DNA, 75 bp, synthetic construct
  source 1..75: mol_type = other DNA
acactatcggcaggagacacgctggttgtttggaagctggacaggttgggacgcagtatgcggcatcttgttacg

SEQ ID NO: 73793 - DNA, 75 bp, synthetic construct
  source 1..75: mol_type = other DNA
attattggcgcttatcatgccaattatcacaccacgcaatatgtttatgagcatcgcatgggcgtcaaacctggc

SEQ ID NO: 73794 - DNA, 75 bp, synthetic construct
  source 1..75: mol_type = other DNA
ctcccgcccggcgggtcaggtgattgcacagtactatgaattcctgcgcctcggtcgtgaaggctataccaaagt

SEQ ID NO: 73795 - DNA, 75 bp, synthetic construct
  source 1..75: mol_type = other DNA
cgccgctgtcgtgtggaaatccgcccaccttaccgggcgccggtgccgtgtgggaatccacccaccttgccgggc

SEQ ID NO: 73796 - DNA, 75 bp, synthetic construct
  source 1..75: mol_type = other DNA
catcgaacgggcggagcatgtcacgcaggacggcaacgcgtggcggtatgcgttacagtcgggcgaccgctggtc

SEQ ID NO: 73797 - DNA, 75 bp, synthetic construct
  source 1..75: mol_type = other DNA
agggagtacaggtgactcgtatgacaacgcgatggcggagagcatcaatggtctttacaaagcggaggtaataca

SEQ ID NO: 73798 - DNA, 75 bp, synthetic construct
  source 1..75: mol_type = other DNA
gaactcaggtcatggtattttcagcgataacgatgaacaagaaacgaaagctgacagtaaagaatcggcgcaaaa

SEQ ID NO: 73799 - DNA, 75 bp, synthetic construct
  source 1..75: mol_type = other DNA
tcgtcgtttcctgccccatctgctgaataccgttaaattttcatccgcacctgccggggttaccactctgaatgc

SEQ ID NO: 73800 - DNA, 75 bp, synthetic construct
  source 1..75: mol_type = other DNA
tgcatacctggtttcccgcctgggaaaccacccattgaaagaactggaggtaagagactttgcattaatactgga

SEQ ID NO: 73801 - DNA, 75 bp, synthetic construct
  source 1..75: mol_type = other DNA
cgacaaataaattgcctgatttacgtggtgagtttattcgcggctgggatgacggaagaggaattgatactaacc

SEQ ID NO: 73802 - DNA, 75 bp, synthetic construct
  source 1..75: mol_type = other DNA
gaagttcgtgaacttctgtctcagtacgacttcccgggcgacgacactccgatcgttcgtggttctgctctgaaa

SEQ ID NO: 73803 - DNA, 75 bp, synthetic construct
  source 1..75: mol_type = other DNA
attaccgtcctggaaaatctgcagcgggaaggctttcagccgttcttcgcctgccagacccgtgtgcgcgacccg

SEQ ID NO: 73804 - DNA, 75 bp, synthetic construct
  source 1..75: mol_type = other DNA
gtggagtgcttatcagaccatccaggaaaatatgctgaaaggcgggatttccggtcgcagcgctaaaggaaaacg

SEQ ID NO: 73805 - DNA, 75 bp, synthetic construct
  source 1..75: mol_type = other DNA
tccgctgacacacgaagaactgatgcactatgttcccggtattttcggtgaagaccggcatacttcccgcagtaa

SEQ ID NO: 73806 - DNA, 75 bp, synthetic construct
  source 1..75: mol_type = other DNA
cctccagctaccagatgctgccggggtacttcaggttcgtctgtcagaacggatgcgtctgtggtcagtctctgg

SEQ ID NO: 73807 - DNA, 75 bp, synthetic construct
  source 1..75: mol_type = other DNA
actgatagttgaacgtaccagggcggggctggctgcagctcgcgccaaaggcagagtaggtggacgccgtcctaa

SEQ ID NO: 73808 - DNA, 75 bp, synthetic construct
  source 1..75: mol_type = other DNA
caccatgtaccgggtattttcggtgaagaccggcatacctcccgcagtgagcggtatacgtacatccccaccatc

SEQ ID NO: 73809 - DNA, 75 bp, synthetic construct
  source 1..75: mol_type = other DNA
gtgcaggatgtcatgtcaggagcgatagaaaaacgctttggcgatagaccgggatggcccatccagtggctgacc

SEQ ID NO: 73810 - DNA, 75 bp, synthetic construct
  source 1..75: mol_type = other DNA
gcacccggcagatgacctggagccgctacggtcagttgctggcgttcaccgactgctcgggctaccagacccgct

SEQ ID NO: 73811 - DNA, 75 bp, synthetic construct
  source 1..75: mol_type = other DNA
gaagctggcggcggcaggcgtacaggatgcaaatttttaccctgatggtatgcacggtcagaaggtggagaactg

SEQ ID NO: 73812 - DNA, 75 bp, synthetic construct
  source 1..75: mol_type = other DNA
cgacgccaatccagctgcttcaggcgaagtacaaccgcaacaagtcgaacgggatggtgcgaagtggtaaagaag

SEQ ID NO: 73813 - DNA, 75 bp, synthetic construct
  source 1..75: mol_type = other DNA
gttaaacggtatttttctgaccttgaaaaccccctttacacgttcgatccggaggtcgtggagcggtttattgcc

SEQ ID NO: 73814 - DNA, 75 bp, synthetic construct
  source 1..75: mol_type = other DNA
ttcggcgtgacctacaccggtaactatgagttcccgcagccgctgcacgatgcgctggataaattccaggccgac

SEQ ID NO: 73815 - DNA, 75 bp, synthetic construct
  source 1..75: mol_type = other DNA
atcacagacccctgatgacgcgtctggccagaacgataaaggacaggcgggtgctgagactgatacgccgctacc

SEQ ID NO: 73816 - DNA, 75 bp, synthetic construct
  source 1..75: mol_type = other DNA
tatcggccacgttgaccaaggtaaaactaccctgaccgctgcaatcacgaccgtactggctaaaacctacggcgg

SEQ ID NO: 73817 - DNA, 75 bp, synthetic construct
  source 1..75: mol_type = other DNA
gcaaaataccttaaagcaaattccgattatgcaaacgtttataataaggtgcttaataaaaacattgctaacaag

SEQ ID NO: 73818 - DNA, 75 bp, synthetic construct
  source 1..75: mol_type = other DNA
aagaattagcaaaccctgcaactgatttggatgttacgtttgatctcttgcgtcagcacagaacagcatttagat

SEQ ID NO: 73819 - DNA, 75 bp, synthetic construct
  source 1..75: mol_type = other DNA
gcaacgtatccgcgagctggaaaagcaagttcgccgtctggaggaacaaaatacgatattaaaaaaggctactgt

SEQ ID NO: 73820 - DNA, 75 bp, synthetic construct
  source 1..75: mol_type = other DNA
tcgtttctacgactggtcatgcgttttctgttgcgcgtgtgacgctttgcactatctgcctgaaacatgaaaaaa

SEQ ID NO: 73821 - DNA, 75 bp, synthetic construct
  source 1..75: mol_type = other DNA
gctgttggtcagccgagtgatgatgcatccggctatctggattttttcaaaggcgagatagggaaaacccatctg

SEQ ID NO: 73822 - DNA, 75 bp, synthetic construct
  source 1..75: mol_type = other DNA
cgctccattcggctgaaggaaacatcaacgggcaacagattcaggcattctgtacttccttttatcgacaactgc

SEQ ID NO: 73823 - DNA, 75 bp, synthetic construct
  source 1..75: mol_type = other DNA
aggaacgaggtagagatatttgtgctgacttatcagtaatacctcaagctacagaatattatcgattcctatcac

SEQ ID NO: 73824 - DNA, 75 bp, synthetic construct
  source 1..75: mol_type = other DNA
cctgttccgtggccttcagtcacaccgccaacaggctggctgaaatgcaacggtgcggctttttctgctgaagaa

SEQ ID NO: 73825 - DNA, 75 bp, synthetic construct
  source 1..75: mol_type = other DNA
caggctccctgaacagcgtcatcccaccggcagtacagcacctgacggtggaggtgagcgcagctgacggccagt

SEQ ID NO: 73826 - DNA, 75 bp, synthetic construct
  source 1..75: mol_type = other DNA
cacagtattggctctcagcctgtcagtgattacgaatggtatcgcatgaggatgggcacaggtccgcagggggct

SEQ ID NO: 73827 - DNA, 75 bp, synthetic construct
  source 1..75: mol_type = other DNA
ggcggcggatgtggacaagtgggcgctgtatgccatcgggcagtactgcgaccagatggtgccggatggcttcgg

SEQ ID NO: 73828 - DNA, 75 bp, synthetic construct
  source 1..75: mol_type = other DNA
aaatgtggtggacagagtcattgaaggggcttacgaggtagtgggcgtttttgaccggattgaggaaaagcgtga

SEQ ID NO: 73829 - DNA, 75 bp, synthetic construct
  source 1..75: mol_type = other DNA
tgaaggacggacgcctttatattgcgggtatcggtgccggtattgagaatacgccagcaggaatgcagagtcagg

SEQ ID NO: 73830 - DNA, 75 bp, synthetic construct
  source 1..75: mol_type = other DNA
gggtaaaagcgccagcggtaaaccactaccgatgatcactatcacacgtaaggacggcgacagtcaccgttttac

SEQ ID NO: 73831 - DNA, 75 bp, synthetic construct
  source 1..75: mol_type = other DNA
atgtacagacatatgcctctgatacgtcttgttgtcagagagttatcactgaagaaatcacctgagccagaaata

SEQ ID NO: 73832 - DNA, 75 bp, synthetic construct
  source 1..75: mol_type = other DNA
ggtatggccgtttatcgccagcctggtgctgatttctctgtcgctgatcccttactggaactctgcagttatcga

SEQ ID NO: 73833 - DNA, 75 bp, synthetic construct
  source 1..75: mol_type = other DNA
acaagcctggaaagtggaacataaattgtcagatattctactgttgattattagtgccgttatttctggtgcaga

SEQ ID NO: 73834 - DNA, 75 bp, synthetic construct
  source 1..75: mol_type = other DNA
ccacctcgcagtttctggcgtcggtgattctggataatctgcctccccgtccttttaacatccggatggtccggg

SEQ ID NO: 73835 - DNA, 75 bp, synthetic construct
  source 1..75: mol_type = other DNA
atgttgagaatgaccccacttgcatcagcaatcgtagcgttattgctcggcattgaagcttatgcagctgaagaa

SEQ ID NO: 73836 - DNA, 75 bp, synthetic construct
  source 1..75: mol_type = other DNA
ctgaaacggcgcgggaagtccagagaccgagcattgatgctcaccttctgtggcttgaagcagagctgaagcgtc

SEQ ID NO: 73837 - DNA, 75 bp, synthetic construct
  source 1..75: mol_type = other DNA
gactagtcattggagaacagattattgatgtcttagggccggagaaacgcagacggcgtaccacacaggaaaaga

SEQ ID NO: 73838 - DNA, 75 bp, synthetic construct
  source 1..75: mol_type = other DNA
aatcgaaaaagaagaaacagcgaaacttgatcagcttgtccgctctaatccgcgtcttagtcattttggtaacga

SEQ ID NO: 73839 - DNA, 75 bp, synthetic construct
  source 1..75: mol_type = other DNA
gtgttggtcgcatgaatatccttcgcgaaattgaagatatcaaaaacgatccaaaagaagcggaagaagtattcg

SEQ ID NO: 73840 - DNA, 75 bp, synthetic construct
  source 1..75: mol_type = other DNA
aactccaggaagaagctgcatattgcgtaccaatttctgcaatatctgtaaaacgatgggatatgcctcttcagg

SEQ ID NO: 73841 - DNA, 75 bp, synthetic construct
  source 1..75: mol_type = other DNA
tccgctggaaagacgcaacaagcgtaccggcagaacagagaaagcccgcatctgggacatcaccgaccggacagt

SEQ ID NO: 73842 - DNA, 75 bp, synthetic construct
  source 1..75: mol_type = other DNA
gccgacattctgacaccacgacgccgggaggattacggtaaggatctgtggagtacttatcagaccatccaggag

SEQ ID NO: 73843 - DNA, 75 bp, synthetic construct
  source 1..75: mol_type = other DNA
cagcaggatatgaccgaaaccgccagagtggtgtttaatgaattaagcgtcaccgaaccggcgacagtcggggag

SEQ ID NO: 73844 - DNA, 75 bp, synthetic construct
  source 1..75: mol_type = other DNA
gtcgcagtgcaaaaggaaaacgtatccatacccgggccattcacagcattgataccgacattaagctcaatcgcg

SEQ ID NO: 73845 - DNA, 75 bp, synthetic construct
  source 1..75: mol_type = other DNA
atcgatggcatctgctaaaaaatattggcgatgcgcttgaacgaatgatgtacagacatatacctctgatacgtc

SEQ ID NO: 73846 - DNA, 75 bp, synthetic construct
  source 1..75: mol_type = other DNA
atgtcctgaatgctttaagcgtagcgactctgttcatagttgtcgtcggcgccggatacagcatctaccctgctc

SEQ ID NO: 73847 - DNA, 75 bp, synthetic construct
  source 1..75: mol_type = other DNA
ggccatcggtgctgattcagtggacaaggcagcaactccggtttccggcgctaccattaagttaaagaatggcgg

SEQ ID NO: 73848 - DNA, 75 bp, synthetic construct
  source 1..75: mol_type = other DNA
ctcacggtggaggtgagtgcctcagacggccagtatctggcgctggcgaaatgggacacgccgcgggtggtgaag

SEQ ID NO: 73849 - DNA, 75 bp, synthetic construct
  source 1..75: mol_type = other DNA
cacgccaacctgcaattgcagtcgtggagtgatggcgtaacgtcagatcgctatgacatacagtccggttctccg

SEQ ID NO: 73850 - DNA, 75 bp, synthetic construct
  source 1..75: mol_type = other DNA
agccagctaaagaaagaatcatggatcttaaaaataacactgtcggtattgcttgtggcgatttttctgccaaat

SEQ ID NO: 73851 - DNA, 75 bp, synthetic construct
  source 1..75: mol_type = other DNA
gacaacatgccgtttgatcgcaagcttatgcttatggcgtattcattttccagaggtgaattcatcatgaagata

SEQ ID NO: 73852 - DNA, 75 bp, synthetic construct
  source 1..75: mol_type = other DNA
aattccgctggaaagacgaaacaagcgcaccggcagaatggagaaggcacgtatctgggagatcacagaccgtac

SEQ ID NO: 73853 - DNA, 75 bp, synthetic construct
  source 1..75: mol_type = other DNA
tcacatgacgctggagttttcggtgtcagcatggctggtaaataactggtatcccacagcaagtatcagcgatct

SEQ ID NO: 73854 - DNA, 75 bp, synthetic construct
  source 1..75: mol_type = other DNA
tcgcttgctcccttcgccggttcacaccagcagtcttcacaggcgttacaaaatttacaacgtcaactgggatta

SEQ ID NO: 73855 - DNA, 75 bp, synthetic construct
  source 1..75: mol_type = other DNA
agtctggatttaaacgtgagcctgctgtcagtgctggctgcctgtaatagggataaggctgatattcgtaaaatt

SEQ ID NO: 73856 - DNA, 75 bp, synthetic construct
  source 1..75: mol_type = other DNA
gccgggaggattacggtaaggacctgtggagcgcatatcagaccatccaggagaatatgctgaaaggcgggattt

SEQ ID NO: 73857 - DNA, 75 bp, synthetic construct
  source 1..75: mol_type = other DNA
ggtaacgaggaaagacctctgcgaggtacgaatccgaaccggccagacggaggtcgctgtcttcgtagactacga

SEQ ID NO: 73858 - DNA, 75 bp, synthetic construct
  source 1..75: mol_type = other DNA
gattggatcgctgctgatggcgaaagcgcgcgtcgatatcagctttaaattcaacgtctttaaaacctgcctgtt

SEQ ID NO: 73859 - DNA, 75 bp, synthetic construct
  source 1..75: mol_type = other DNA
cctccagctaccagatgctgccgggttacttcaggttcgtctgccagaacgggtgcgtctgtggtcagtctctgg

SEQ ID NO: 73860 - DNA, 75 bp, synthetic construct
  source 1..75: mol_type = other DNA
aacaccaacctttcaacgctggtgctggcgcgtattctcggcgcgggcgtggcagggggatacaacctggcgtac

SEQ ID NO: 73861 - DNA, 75 bp, synthetic construct
  source 1..75: mol_type = other DNA
gtttccgctacagcttcagtgccctgaaggaccggcacacggcggtggaggtgaattacaccgacccgcagaacg

SEQ ID NO: 73862 - DNA, 75 bp, synthetic construct
  source 1..75: mol_type = other DNA
aacgcagacggcgtactacacaggaaaagatcgcaattgttcagcagagctttgaaccggggatgacggtctccc

SEQ ID NO: 73863 - DNA, 75 bp, synthetic construct
  source 1..75: mol_type = other DNA
aacgttgcggtcgtcccgccgatgaagctcaacccgattatcacccgcgtgttgttcccggcgttcgccaaaatt

SEQ ID NO: 73864 - DNA, 75 bp, synthetic construct
  source 1..75: mol_type = other DNA
ataactttgtaccgctggtctttggtgagaagtggaacagcattattccggtgctgcaattgctgtgtattgtgg

SEQ ID NO: 73865 - DNA, 75 bp, synthetic construct
  source 1..75: mol_type = other DNA
tggcgcgtattctcggcgcgggcgtggcagggggatacaacctggcgtacaacgtggccgttgtgccgccgatga

SEQ ID NO: 73866 - DNA, 75 bp, synthetic construct
  source 1..75: mol_type = other DNA
gggtacggatgaaaacgtgttggtacttaatcgcacctatgctaatcggagtaacgccgaacgggcagcgaaaat

SEQ ID NO: 73867 - DNA, 75 bp, synthetic construct
  source 1..75: mol_type = other DNA
attttagggaaacgctgaatacccgccgtgaaaaatcgtggcacaagaccactgtcggggaagtggtgaaggaaa

SEQ ID NO: 73868 - DNA, 75 bp, synthetic construct
  source 1..75: mol_type = other DNA
tgcgcaactgattgttgataagggctactcatatcgacaagccagtgaatcgatgaatgtcggctctaccactct

SEQ ID NO: 73869 - DNA, 75 bp, synthetic construct
  source 1..75: mol_type = other DNA
aggaaagacttctgcgaggtacgaatccgaaccggccagacggaggtcgctgtcttcgtagactacgaatctgag

SEQ ID NO: 73870 - DNA, 75 bp, synthetic construct
  source 1..75: mol_type = other DNA
atcgcgctggccgatatgctgtctgatttcggtattgcgaactcgattattcagcgcaaagagataagccatttc

SEQ ID NO: 73871 - DNA, 75 bp, synthetic construct
  source 1..75: mol_type = other DNA
ggctgtcattacgctggcgctgggctggaagggacagccgcttttcccgaaaggggcattcacggtggacgagat

SEQ ID NO: 73872 - DNA, 75 bp, synthetic construct
  source 1..75: mol_type = other DNA
acgtccacgacgataaagtcgatgaatttatcgacgtctttcgcctcaatcatctgggatcggtgcgtgaagagg

SEQ ID NO: 73873 - DNA, 75 bp, synthetic construct
  source 1..75: mol_type = other DNA
tcgctctaatcgtcatctgtttaaccgtcatagtgacggtactggtaacgtggaaagacctctgcgaggtgcgaa

SEQ ID NO: 73874 - DNA, 75 bp, synthetic construct
  source 1..75: mol_type = other DNA
ctgacggtgtatatcggctggaaaggttttgccctggtatgcaaagggaaatttaccgttgatgaggttgaacac

SEQ ID NO: 73875 - DNA, 75 bp, synthetic construct
  source 1..75: mol_type = other DNA
gatcagccgtttaaccggcagattgttattccggcggtggctttcagcggtgccagacatgagcgggagaacagc

SEQ ID NO: 73876 - DNA, 75 bp, synthetic construct
  source 1..75: mol_type = other DNA
ggccagtgatggtctgtatatcacgatgcaggaaggggaactggtggtgaaggatggctgggacagagcgcggga

SEQ ID NO: 73877 - DNA, 75 bp, synthetic construct
  source 1..75: mol_type = other DNA
gagggaaactgtctgcaaaccagattgaaggcgatctcgttaaaacagtgggtaaggctttcccccgtgactccc

SEQ ID NO: 73878 - DNA, 75 bp, synthetic construct
  source 1..75: mol_type = other DNA
ttgaccgtctgcgggtcaccttcggggtgcagtcactggtggagaccacctcaaagggtgaccgtaatccctctt

SEQ ID NO: 73879 - DNA, 75 bp, synthetic construct
  source 1..75: mol_type = other DNA
tgatgcaaaaagagctggagttcaacaagatcggcatgattgaaaccagcgccgtgctggcgggctttaccttca

SEQ ID NO: 73880 - DNA, 75 bp, synthetic construct
  source 1..75: mol_type = other DNA
gcaactttgtgccgctggtgtttggcgagaagtggaacagcatcatcccgatcctgcagttgctctgcgtggtgg

SEQ ID NO: 73881 - DNA, 75 bp, synthetic construct
  source 1..75: mol_type = other DNA
accagaccacacgcagacccacggagcgcccatcatggcgacacatgacgaagcggcagcgaaaaaaccgcagga

SEQ ID NO: 73882 - DNA, 75 bp, synthetic construct
  source 1..75: mol_type = other DNA
gggaagtccgtgtgccccaccggggaaatgtggtggacagagtcattgaaggggcttacgaggtagtgggcgttt

SEQ ID NO: 73883 - DNA, 75 bp, synthetic construct
  source 1..75: mol_type = other DNA
gttgtagctaacgatgggcatgattcaaaagaggaatgggagctggcaacaatcttccgaaatacatatacacag

SEQ ID NO: 73884 - DNA, 75 bp, synthetic construct
  source 1..75: mol_type = other DNA
cctgaccacggtatatgccacgaaagcacaggccatgcgcgccgctcaggcgaagtgggataaactgcaacgggg

SEQ ID NO: 73885 - DNA, 75 bp, synthetic construct
  source 1..75: mol_type = other DNA
gtataaaccagatacgtcgtgaccggcctttgacccacgaagagctgatgagccatgtgcccagcgtatttggga

SEQ ID NO: 73886 - DNA, 75 bp, synthetic construct
  source 1..75: mol_type = other DNA
gctgatgtggaaatcatgatcgaacagttccggcagaacggtatggaaaagctaatcgattatcgcaaagcgaaa

SEQ ID NO: 73887 - DNA, 75 bp, synthetic construct
  source 1..75: mol_type = other DNA
accgcgggtaatgagcatcaacagcgcaatcccgccagcctgacaaagctgatgacgggctatgtcgtggatcgc

SEQ ID NO: 73888 - DNA, 75 bp, synthetic construct
  source 1..75: mol_type = other DNA
agtggaccgggtgagcagtgaaatctcacagactgtcagccaggggcagtcagaaaatgcccgacagatagcaca

SEQ ID NO: 73889 - DNA, 75 bp, synthetic construct
  source 1..75: mol_type = other DNA
gacgctgttccggcaactaaggtttcacgttctgccgatgttacatcgtatcctgtgcaggatggtaatgatgta

SEQ ID NO: 73890 - DNA, 75 bp, synthetic construct
  source 1..75: mol_type = other DNA
ataaaaccgaaagtttcagccagccgcgacgcacgaaagccagcggcggtggtggcgatgagctgctgaccgact

SEQ ID NO: 73891 - DNA, 75 bp, synthetic construct
  source 1..75: mol_type = other DNA
ggtacccgcgatcgccgtggatggtggggtgacagcttccgggaataccccataggctcccgtctgtggttgctg

SEQ ID NO: 73892 - DNA, 75 bp, synthetic construct
  source 1..75: mol_type = other DNA
tatcggccacgttgaccatggtaaaactacgctgaccgctgcaatcacgaccgtactggctaaaacctacggcgg

SEQ ID NO: 73893 - DNA, 75 bp, synthetic construct
  source 1..75: mol_type = other DNA
tatcggccacgttgaccatggtaaaacgactctgaccgctgcaatcacaaccgtactggctaaaacctacggcgg

SEQ ID NO: 73894 - DNA, 75 bp, synthetic construct
  source 1..75: mol_type = other DNA
aacaggggcatggtgcactgcaactgaatggcgcagatcttctgacagacaatacattgcagacggcagtgatta

SEQ ID NO: 73895 - DNA, 75 bp, synthetic construct
  source 1..75: mol_type = other DNA
gttgatgctgacgacagatgccggggtgaccgaaggggtacaacttcagcgcagtgatggtgaggtgtaccgcat

SEQ ID NO: 73896 - DNA, 75 bp, synthetic construct
  source 1..75: mol_type = other DNA
gtgcggtgataggcagccgctcgttggtgacaaaagatgtggggcactgttgcaaagttagcgatgaggcagcct

SEQ ID NO: 73897 - DNA, 75 bp, synthetic construct
  source 1..75: mol_type = other DNA
tgctgcctgcacaggccaccagctttaccgaatatctgccaatgagtgacagcgaatacgcgcaaaagcgggcgc

SEQ ID NO: 73898 - DNA, 75 bp, synthetic construct
  source 1..75: mol_type = other DNA
ggttaatgaaaagtacacgcgctgggttaagacgcagccgtgtgcatgttgtggtaagccagccgacgatcctca

SEQ ID NO: 73899 - DNA, 75 bp, synthetic construct
  source 1..75: mol_type = other DNA
cagtgggcggcaggcaaaaacgatatcggctggtactcgctggatgaaggtgataaccagcaagagcgtttcgcc

SEQ ID NO: 73900 - DNA, 75 bp, synthetic construct
  source 1..75: mol_type = other DNA
ccagctttgctttgcagtttgtgaacgtcaaaattattttgtacggcattacagcactgtcgacatttgtcctgc

SEQ ID NO: 73901 - DNA, 75 bp, synthetic construct
  source 1..75: mol_type = other DNA
atggcagggatatatcgctgcattttgctgttgatagttgggctttttttctcttcgttgagttatccgaaaaac

SEQ ID NO: 73902 - DNA, 75 bp, synthetic construct
  source 1..75: mol_type = other DNA
gccggaaaaagaggccattgtggataacggggcacactttgacagtgaccggcgcggcacggtgaatggtgtcac

SEQ ID NO: 73903 - DNA, 75 bp, synthetic construct
  source 1..75: mol_type = other DNA
attattggcctgacgtcggcagccattatgatgatgctgcgtatgcggttcctgcaacgtctgccgtcagccatc

SEQ ID NO: 73904 - DNA, 75 bp, synthetic construct
  source 1..75: mol_type = other DNA
tatcggccacgttgaccatggtaaaactaccctgaccgctgcaatcaccaccgtactggctaaaacctacggcgg

SEQ ID NO: 73905 - DNA, 75 bp, synthetic construct
  source 1..75: mol_type = other DNA
tgctcgcctgctgcgagctgggtaagcggacaaattctcaccgtctccggtggtggggtacaggagctcaattaa

SEQ ID NO: 73906 - DNA, 75 bp, synthetic construct
  source 1..75: mol_type = other DNA
tatcggccacgttgaccatggtaaaactacactgaccgctgcaatcacaaccgtactggctaaaacctacggcgg

SEQ ID NO: 73907 - DNA, 75 bp, synthetic construct
  source 1..75: mol_type = other DNA
gagcaccttgcctggattgccaggcagattattccgacagaagcagacgaggctgaactgctgaaacactgttcc

SEQ ID NO: 73908 - DNA, 75 bp, synthetic construct
  source 1..75: mol_type = other DNA
cgccgctgacgatgtactttctgacgccgatgctgtttcctggcgtgcgccatatcaaacatcgtccggtttacg

SEQ ID NO: 73909 - DNA, 75 bp, synthetic construct
  source 1..75: mol_type = other DNA
cggagatggtgttgctgatagcactattgcaagctgggatgatgttgcattagctgtagttgcacatccgaatgc

SEQ ID NO: 73910 - DNA, 75 bp, synthetic construct
  source 1..75: mol_type = other DNA
acgccgccactttgcagaaaatacgcgcctccgactactgatcgacaccatcaagcctatcgaggtgaagcatgt

SEQ ID NO: 73911 - DNA, 75 bp, synthetic construct
  source 1..75: mol_type = other DNA
gcttttggttgtcggattaatggtaagttcagaatacttaaggtgcatcaggttattttctatctatatcatggt

SEQ ID NO: 73912 - DNA, 75 bp, synthetic construct
  source 1..75: mol_type = other DNA
cgggctgaggtggctgcttctgacgccttcgtggtcgcggcggatgcagaagtggctgctgattgttgtgacgct

SEQ ID NO: 73913 - DNA, 75 bp, synthetic construct
  source 1..75: mol_type = other DNA
atgaagtgtaatcgtaagcgctggtcacgcgaagaccgggaatttatcgaagccaacgtcgggaaaatgaccgtt

SEQ ID NO: 73914 - DNA, 75 bp, synthetic construct
  source 1..75: mol_type = other DNA
tctcggacgtttttgccgccttcgcagaatttgctgtcgccgttgccgaggaagctgcgctgctggcgctcgagg

SEQ ID NO: 73915 - DNA, 75 bp, synthetic construct
  source 1..75: mol_type = other DNA
gtcatggaacggctgaagatgctcgattccctgcaggcaacacagcttcagtcggccattgtgaaggccatgtat

SEQ ID NO: 73916 - DNA, 75 bp, synthetic construct
  source 1..75: mol_type = other DNA
gggcgtccggccatgctgcatattttcgagccggtggaggacgggcagacccgtggggccaatcagttttacagc

SEQ ID NO: 73917 - DNA, 75 bp, synthetic construct
  source 1..75: mol_type = other DNA
gtgagtgagctggagattgtacgggaaggggacagaatcattctgcgtcccctccgcccgagctggagctcattc

SEQ ID NO: 73918 - DNA, 75 bp, synthetic construct
  source 1..75: mol_type = other DNA
cgtggcatttgaagagaagtatggctctcagctggagctgatatttcgttttatcgatcgtgcgctggcaattgg

SEQ ID NO: 73919 - DNA, 75 bp, synthetic construct
  source 1..75: mol_type = other DNA
caaaaccgcacgttaacgtgggtactatcggccacgttgaccagggtaaaaccacactgaccgctgcaatcacga

SEQ ID NO: 73920 - DNA, 75 bp, synthetic construct
  source 1..75: mol_type = other DNA
atgccttatcagcccttaccactggcgcaactgatcacacagacacaacaggatatcagccagcgcctgcccggt

SEQ ID NO: 73921 - DNA, 75 bp, synthetic construct
  source 1..75: mol_type = other DNA
ctggcactgcgataacctgcttcgcgatcagttcacggaacgtctggaatcaatggcaacggataactgtgcccg

SEQ ID NO: 73922 - DNA, 75 bp, synthetic construct
  source 1..75: mol_type = other DNA
aggggctattgaggcggatgtgcgtcggagtgagtcagaagccgaatattatcattataaaatggaagaaacaaa

SEQ ID NO: 73923 - DNA, 75 bp, synthetic construct
  source 1..75: mol_type = other DNA
taccatcgaactgccggaaggtgtagagatggtaatgccgggcgacaacatcaaaatggttgttaccctgatcca

SEQ ID NO: 73924 - DNA, 75 bp, synthetic construct
  source 1..75: mol_type = other DNA
tatcggccacgttgaccagggtaaaactactctgaccgctgcaatcacgaccgtactggctaaaacctacggcgg

SEQ ID NO: 73925 - DNA, 75 bp, synthetic construct
  source 1..75: mol_type = other DNA
gtgcaaaaagcactggaagaacgcaatatttttagcgttatttatgatggcacccaacctaacccaaccacggaa

SEQ ID NO: 73926 - DNA, 75 bp, synthetic construct
  source 1..75: mol_type = other DNA
ctctccttctgtactgctgcctgttttttacaatagcgttacttggagtcggtttggttgtatctctgttttttt

SEQ ID NO: 73927 - DNA, 75 bp, synthetic construct
  source 1..75: mol_type = other DNA
ggcaacctgctgaatgaagagaacccgcaccagctgcagcagctcatccgcctgccgggtcagcagtatgatgag

SEQ ID NO: 73928 - DNA, 75 bp, synthetic construct
  source 1..75: mol_type = other DNA
tctttgtgttgcctttgtgcagaaagcatcacgacgagctgcatgcggataccgtggcatttgaagagatgtatg

SEQ ID NO: 73929 - DNA, 75 bp, synthetic construct
  source 1..75: mol_type = other DNA
atggcgcgttccaaaactgctcagccaaaacactcactgcgtaaaatcgcagttgtagtagccacagcggtaagc

SEQ ID NO: 73930 - DNA, 75 bp, synthetic construct
  source 1..75: mol_type = other DNA
gaaaacaatgccgatcaccacattcgttcgctcaacatcaaaacgccgggcgctgagcaactgatcatgaatctc

SEQ ID NO: 73931 - DNA, 75 bp, synthetic construct
  source 1..75: mol_type = other DNA
tctacttacgtgccggatatcagtattctgattatgaagcattcaatatcgatgagcaggagtgttgtcaggcgc

SEQ ID NO: 73932 - DNA, 75 bp, synthetic construct
  source 1..75: mol_type = other DNA
ccggatacgtactcaccatcgaaagatgatccgaccgcgcataaaggcgagtcagttcctgaacagccaggcatt

SEQ ID NO: 73933 - DNA, 75 bp, synthetic construct
  source 1..75: mol_type = other DNA
tccaatgtcacacgaattgccgctgactcctcagaggatgaatttttttcattgatacatcaagcgtttggggag

SEQ ID NO: 73934 - DNA, 75 bp, synthetic construct
  source 1..75: mol_type = other DNA
gtatccaaatcattcccgaaacaggctggtacgtggggtaacacggaaacaccaaacgggacggttacagtcacc

SEQ ID NO: 73935 - DNA, 75 bp, synthetic construct
  source 1..75: mol_type = other DNA
gctaaacaacagaccgagaaagacactgaagttcaaaacaccgaaagagataattgaaaggggtgttgcattgac

SEQ ID NO: 73936 - DNA, 75 bp, synthetic construct
  source 1..75: mol_type = other DNA
acaacagcatcgacccggaactggctcgcgaaaaatttgcggaactgcgcgctcagtacgttgtaacgcgtgaca

SEQ ID NO: 73937 - DNA, 75 bp, synthetic construct
  source 1..75: mol_type = other DNA
ctgatcggaatgctgaaattgctgaagctcaggcacaggattcaatcaatcgtgggaatattgaagcggatcagc

SEQ ID NO: 73938 - DNA, 75 bp, synthetic construct
  source 1..75: mol_type = other DNA
tggcgacggctgctaactccggcgctcggcggactggcggcgggtttgttgctgatgggctggcagaaatttacc

SEQ ID NO: 73939 - DNA, 75 bp, synthetic construct
  source 1..75: mol_type = other DNA
ttctgtcagcgaaagaagagttagctaatgaaccgcatccgattgatggcctgtccggtgaatatgcggagaaat

SEQ ID NO: 73940 - DNA, 75 bp, synthetic construct
  source 1..75: mol_type = other DNA
catgcggataccgtggcatttgaagagaagtatggctcccagctggagctgatatttcgttttatcgatcgtgcg

SEQ ID NO: 73941 - DNA, 75 bp, synthetic construct
  source 1..75: mol_type = other DNA
attgagaaagccgggatagaactgaataaagaagaacacgatcagctatataaagccatattattactggtgggc

SEQ ID NO: 73942 - DNA, 75 bp, synthetic construct
  source 1..75: mol_type = other DNA
atcagcccgcgttatccgttgccgttatctgttgtgccagccgccctgacccgcgtctgctgtgatattgccttc

SEQ ID NO: 73943 - DNA, 75 bp, synthetic construct
  source 1..75: mol_type = other DNA
gcttcgagttcggttgtgatgatggcgaaaaagtccgggttacgttcgccctggactgttgtgatcgtgaagcca

SEQ ID NO: 73944 - DNA, 75 bp, synthetic construct
  source 1..75: mol_type = other DNA
agtaagtacggggcggtttccctgcgggagcaggcccgttttctggatatcaatcatgacctcgtaatcggcgtt

SEQ ID NO: 73945 - DNA, 75 bp, synthetic construct
  source 1..75: mol_type = other DNA
cgggcgacaacatcaaaatggttgttaccctgatccacccgatcgcgatggacgacggtctgcgtttcgcaatcc

SEQ ID NO: 73946 - DNA, 75 bp, synthetic construct
  source 1..75: mol_type = other DNA
ctcacgagacgaaagactgaaggcgttactcgcgatattggatctcgccgttcgtgacgttcatttcctgctgga

SEQ ID NO: 73947 - DNA, 75 bp, synthetic construct
  source 1..75: mol_type = other DNA
gcgacaacttgaagagcttcgtcacaacttgttaagaacagatttttggagtatccctcgtgaagggtatgcgga

SEQ ID NO: 73948 - DNA, 75 bp, synthetic construct
  source 1..75: mol_type = other DNA
ttcgcaggccaacacaggattatcatttctgccaaagagctggagtcagaagtctgacgagaagagccgcacgga

SEQ ID NO: 73949 - DNA, 75 bp, synthetic construct
  source 1..75: mol_type = other DNA
cggcatagaacttaaaccatatgatgtgatggataaggatgctattaaagagcgcatggacatgtacgaggcttt

SEQ ID NO: 73950 - DNA, 75 bp, synthetic construct
  source 1..75: mol_type = other DNA
acggagatcccttcttatgaagaagggatctcgctctttgatgttgaagccactctgcaaccggatggggtgctc

SEQ ID NO: 73951 - DNA, 75 bp, synthetic construct
  source 1..75: mol_type = other DNA
atggcaaagaaagtttctaaatggtttcgcatcggcgtcgagggtgacacctgcgatggccgtgtcatcagcggt

SEQ ID NO: 73952 - DNA, 75 bp, synthetic construct
  source 1..75: mol_type = other DNA
atcccctgcccggataatccggagaaatcccttgccatccagtctgaaattgttcggattctggataagtttact

SEQ ID NO: 73953 - DNA, 75 bp, synthetic construct
  source 1..75: mol_type = other DNA
ggccgtaatgatccaaggaaaacaatgagcgaggctagcataaaccaagtatttaaacgcatcggctataacgga

SEQ ID NO: 73954 - DNA, 75 bp, synthetic construct
  source 1..75: mol_type = other DNA
acaaaaactgggggtcgatgctatctggttgacccccttttatgtctctccccaggtcgataacggttacgacgt

SEQ ID NO: 73955 - DNA, 75 bp, synthetic construct
  source 1..75: mol_type = other DNA
aacgtctttgtgagctggctgagaggctggggcgtgaaccggatgtctccggtagtgcggcagatattgcgcagc

SEQ ID NO: 73956 - DNA, 75 bp, synthetic construct
  source 1..75: mol_type = other DNA
ttccagtacagcacgtaactataacggtacctacagcgcccagcgacaggaactggttgagtccaccgatggcta

SEQ ID NO: 73957 - DNA, 75 bp, synthetic construct
  source 1..75: mol_type = other DNA
gaaccattttactgagtgcggcattaatcccagcgatttaaaccatcccgccacagatgggagggttacagttag

SEQ ID NO: 73958 - DNA, 75 bp, synthetic construct
  source 1..75: mol_type = other DNA
tacagccggcaaaaacagagaatctttattctcatggctgaatgagcaaaacgtcgtaccatggactccattaat

SEQ ID NO: 73959 - DNA, 75 bp, synthetic construct
  source 1..75: mol_type = other DNA
cacctggtcttcaccctgccggacacgcagtggccggtgttcgaaagcaaccggtggctgctgaatgacgtgtgc

SEQ ID NO: 73960 - DNA, 75 bp, synthetic construct
  source 1..75: mol_type = other DNA
cgcgcttccctgacgatctggatggcgacgggcgtcgcttctacaccgacgggccacgagtccatgagtttttgc

SEQ ID NO: 73961 - DNA, 75 bp, synthetic construct
  source 1..75: mol_type = other DNA
gcccttaaggagtatgaggatgcggaactgacagcggcgcgtattgctgcggcgctgggactgtatatccgtaaa

SEQ ID NO: 73962 - DNA, 75 bp, synthetic construct
  source 1..75: mol_type = other DNA
ctctcacgtccggtgtggatagagcaggcgtatcagcagcagatagcggagagtcgtaggccggaagaggagaca

SEQ ID NO: 73963 - DNA, 75 bp, synthetic construct
  source 1..75: mol_type = other DNA
cttgtctggtcgcctcatcttttgaagcagacgccgatgatgccgatgacgccgccgaactggcggacgatgcgg

SEQ ID NO: 73964 - DNA, 75 bp, synthetic construct
  source 1..75: mol_type = other DNA
agtgatgacggggataaaacttatgctcgtatgggtttcaaaggtgaaactcagattaatgaccagttaaccggt

SEQ ID NO: 73965 - DNA, 75 bp, synthetic construct
  source 1..75: mol_type = other DNA
tatcaccagccagacggcgggagtcagtgcagtcactgcaaccatcaacagcagtactcagagtcagaacgtgac

SEQ ID NO: 73966 - DNA, 75 bp, synthetic construct
  source 1..75: mol_type = other DNA
gctttatcactggcgatatctcgcagctgacctccaccatcaaaacggacgatgtgacatacaccgcgggtggcc

SEQ ID NO: 73967 - DNA, 75 bp, synthetic construct
  source 1..75: mol_type = other DNA
tcactctgattaaacccattaagcgcggtgagcaggttattaccgacgtcaccctgttaaaaccgtgtgccggaa

SEQ ID NO: 73968 - DNA, 75 bp, synthetic construct
  source 1..75: mol_type = other DNA
cgaaggaagcagtctgcgcgccgcgctggcggagttgcggctgttcccgccaatgatgctgtacatgatcgcttc

SEQ ID NO: 73969 - DNA, 75 bp, synthetic construct
  source 1..75: mol_type = other DNA
ccgtcaccaacacagctccgcaacatatgactgcaaccttgcaggataaaaatggcaacccactaaaagataaag

SEQ ID NO: 73970 - DNA, 75 bp, synthetic construct
  source 1..75: mol_type = other DNA
agattcctcggtatcgttaagtacccagacgttgagcgcggattcccattcaaccgccacactgacttttattgc

SEQ ID NO: 73971 - DNA, 75 bp, synthetic construct
  source 1..75: mol_type = other DNA
tgattacagagccggacggcacggtggagatctcagtcaccagccagaccgccggaaccagtgcggtcaccgcca

SEQ ID NO: 73972 - DNA, 75 bp, synthetic construct
  source 1..75: mol_type = other DNA
cggagctggtggtcattaaggatggttcagaggcggacggttcgacggcgaacacgctgcgggtgaaggtcaccg

SEQ ID NO: 73973 - DNA, 75 bp, synthetic construct
  source 1..75: mol_type = other DNA
cacaaaatgcgccattaaacctgcaaacgctggaagccatcagcgaatcagtcctgcaagatgtcgccccgcgtt

SEQ ID NO: 73974 - DNA, 75 bp, synthetic construct
  source 1..75: mol_type = other DNA
attattaaccaaagcattacatttattgaaattgaaggaaaaaaaacgcacaagcctgtatcacacttaagaatt

SEQ ID NO: 73975 - DNA, 75 bp, synthetic construct
  source 1..75: mol_type = other DNA
catcctggcggaaatcaaagcgatgggttataccggtggccgttccatgttgcgttactacatccagcccaaacg

SEQ ID NO: 73976 - DNA, 75 bp, synthetic construct
  source 1..75: mol_type = other DNA
ggggagtctgctgtttggtctgctgacgtacctgacgaacctgtatttcaagattaaagaagaccgtcgtaaggc

SEQ ID NO: 73977 - DNA, 75 bp, synthetic construct
  source 1..75: mol_type = other DNA
atgtaccagatggaaaaaataacaacaggtgtgtcatacaccacgtcagcggtggggacgggatactggctactg

SEQ ID NO: 73978 - DNA, 75 bp, synthetic construct
  source 1..75: mol_type = other DNA
ttatgggaacgcttgtttccttttatgccgatgccgggcgcaaaccctgttctggttcgaaaggggggatctcac

SEQ ID NO: 73979 - DNA, 75 bp, synthetic construct
  source 1..75: mol_type = other DNA
gccagtctaacctgtgcctggaaatcgccctgccgaccaaaccgctgaacgacgtcaacgacgagaacggtgaaa

SEQ ID NO: 73980 - DNA, 75 bp, synthetic construct
  source 1..75: mol_type = other DNA
aacgttttgacaggcgttggaatactgagcgaacggttttacttcgcttgccacaggaggatatgtgccagacat

SEQ ID NO: 73981 - DNA, 75 bp, synthetic construct
  source 1..75: mol_type = other DNA
ttacagataaatttgctactctgactaaaatgccagatgaaaatctgaatgaaaaaaatagaacgcaaaaatatt

SEQ ID NO: 73982 - DNA, 75 bp, synthetic construct
  source 1..75: mol_type = other DNA
gccgcttaactgcgggtatctgcctggtaactcaacttgcgttccctatggctgcggcagcacaaggtgtgataa

SEQ ID NO: 73983 - DNA, 75 bp, synthetic construct
  source 1..75: mol_type = other DNA
atacggcatcccgcgctgactccacgattgagacagaccaggataattacgtcgcgggtaagccgatagtcgtta

SEQ ID NO: 73984 - DNA, 75 bp, synthetic construct
  source 1..75: mol_type = other DNA
taacgatctcggcgagccagagtggttattttcgcgcgcgttgggtgtcgatatcccgctgacatcacttcatat

SEQ ID NO: 73985 - DNA, 75 bp, synthetic construct
  source 1..75: mol_type = other DNA
aacggaagccgcgtgtatggctcatgcccggagaaaaatccacgatgtgcatgcaagagtgccaaccgatatcac

SEQ ID NO: 73986 - DNA, 75 bp, synthetic construct
  source 1..75: mol_type = other DNA
ttcaggatgctctctcaaagccatcaccgattgcaggctatcgagacgaagctgaacgcttggctgatcagcaag

SEQ ID NO: 73987 - DNA, 75 bp, synthetic construct
  source 1..75: mol_type = other DNA
atggctgagccgctacaactcccgccgccgcttgagggtgatatcagcctcagaacgctgggaaaactggccggg

SEQ ID NO: 73988 - DNA, 75 bp, synthetic construct
  source 1..75: mol_type = other DNA
gtgggcggggattcgttcgccctagtgagactggaaaacaacaaaattggagtttttcaggcataaaaaaagcgg

SEQ ID NO: 73989 - DNA, 75 bp, synthetic construct
  source 1..75: mol_type = other DNA
ctgcataccggacatatctaccttatccagcgcgcctgtagccaggttgacgagctgcatatcattatgggcttt

SEQ ID NO: 73990 - DNA, 75 bp, synthetic construct
  source 1..75: mol_type = other DNA
cgacggataccacagccaatgtcggctcatccacctccctgaatgcggccaccatcaccaccggttttaacatga

SEQ ID NO: 73991 - DNA, 75 bp, synthetic construct
  source 1..75: mol_type = other DNA
agagaatgtctggaatagcgaggttatcttcgcggagattaaggcaatgggttatacgggcggacgttccatgct

SEQ ID NO: 73992 - DNA, 75 bp, synthetic construct
  source 1..75: mol_type = other DNA
atctacggtcagcggctcagcgacgatggcgctctggtttctgaggagataccgattttgccagacgttccagtg

SEQ ID NO: 73993 - DNA, 75 bp, synthetic construct
  source 1..75: mol_type = other DNA
gttgttgaggcagagtgaaaaaccgcgtcagcggaacttaatcgctgccgtgcgcaccaaggttctcgagggaca

SEQ ID NO: 73994 - DNA, 75 bp, synthetic construct
  source 1..75: mol_type = other DNA
acgggaacttcgccagttcaaagaaacgccggaacagcgcttcgcgctggagcaggaacatctgcagccgttacc

SEQ ID NO: 73995 - DNA, 75 bp, synthetic construct
  source 1..75: mol_type = other DNA
ccagcgctgattgctatcgtggcgaatacggcatcccgcgctgactccacgattgagacagaccaggataattac

SEQ ID NO: 73996 - DNA, 75 bp, synthetic construct
  source 1..75: mol_type = other DNA
atgcgaaaaggaagaaagtcagttaatggccttgttttgcaaacagataaaaaattaagatggtttactactata

SEQ ID NO: 73997 - DNA, 75 bp, synthetic construct
  source 1..75: mol_type = other DNA
gcccgacagggtgccgaactgagccgtgcattactctccaactgggttgacgcgtgctgccagttaatgactccg

SEQ ID NO: 73998 - DNA, 75 bp, synthetic construct
  source 1..75: mol_type = other DNA
aatataacggtgtgtccgtcacgctgtcggagctgtctgcgctgcagcggtttgattatatgaagtttgtttcag

SEQ ID NO: 73999 - DNA, 75 bp, synthetic construct
  source 1..75: mol_type = other DNA
tgaatatcatttctgtttcgtcatcccggactcactcgtcaattaagattgataaggaccgttatctctccggca

SEQ ID NO: 74000 - DNA, 75 bp, synthetic construct
  source 1..75: mol_type = other DNA
aatataacggtgtgtccgtcacgctttccgaattgtctgcgctgcagcggtttgattatataaagtttgtttcag

SEQ ID NO: 74001 - DNA, 75 bp, synthetic construct
  source 1..75: mol_type = other DNA
ctaagccgggcaccatcaagccgcacaccaagttcgaatctgaagtgtacattctgtccaaagatgaaggcggtc

SEQ ID NO: 74002 - DNA, 75 bp, synthetic construct
  source 1..75: mol_type = other DNA
ctggcactgtgacaatcttctccgtgaccagttcacggaacggctggaatcaatggcaacggataactgtgcccg

SEQ ID NO: 74003 - DNA, 75 bp, synthetic construct
  source 1..75: mol_type = other DNA
tcgtgccgtagcttttgtcgagagtgaagttgacgagtggattcaatcagttatcgaaacaagccgaagtaatgt

SEQ ID NO: 74004 - DNA, 75 bp, synthetic construct
  source 1..75: mol_type = other DNA
tggcgctccaaaagctttctatgcaaacggaacctatacgcgatctcctctggcccgttatgcaaaagtaacgtt

SEQ ID NO: 74005 - DNA, 75 bp, synthetic construct
  source 1..75: mol_type = other DNA
tggctgaaacactgcagtcagactcagcggccgcttacttcgaccaggtggcttcaccagaagcaaaagcacggg

SEQ ID NO: 74006 - DNA, 75 bp, synthetic construct
  source 1..75: mol_type = other DNA
gaagaagccggtgcgtgggaaacgtccacgccttacgaatccctgcttgtgaccatcagccaggccgtccgtggc

SEQ ID NO: 74007 - DNA, 75 bp, synthetic construct
  source 1..75: mol_type = other DNA
agcagggctggccggcggtctaaccggaaacagcaccgcatcagcagcagtgggagcacagagcgggaagaatgc

SEQ ID NO: 74008 - DNA, 75 bp, synthetic construct
  source 1..75: mol_type = other DNA
atgaagcaacctgattttgctaagtggtacttctatcaattacttaagtgttatgagggcgaacagctgtatctt

SEQ ID NO: 74009 - DNA, 75 bp, synthetic construct
  source 1..75: mol_type = other DNA
atcactgccgagctggcgaacggtcaggtctatgtattgtcgtcagcctggctgcacggcgaagcgaaccataat

SEQ ID NO: 74010 - DNA, 75 bp, synthetic construct
  source 1..75: mol_type = other DNA
cttcatttgaccgcaactatccggaagaaggaagttatggtcagggattccttgaagttcttgagggtggtgggt

SEQ ID NO: 74011 - DNA, 75 bp, synthetic construct
  source 1..75: mol_type = other DNA
ccggtatttcacaatacccgtgtgctggtggagcctgaaccgaaaagcatgcgcgatctgccgtccggatctgtt

SEQ ID NO: 74012 - DNA, 75 bp, synthetic construct
  source 1..75: mol_type = other DNA
ccggctgaccacgatacagaacgacagaacccgcatccagacgatttatcagccggggagcttcacgccactcat

SEQ ID NO: 74013 - DNA, 75 bp, synthetic construct
  source 1..75: mol_type = other DNA
gcgcggtctgccgtccggagtcgttcctgccgttcgccagccgctggcggaggataaatcattactgccattttt

SEQ ID NO: 74014 - DNA, 75 bp, synthetic construct
  source 1..75: mol_type = other DNA
aacgccaaaagcggtcaaggcagcaaatgacaacgcaaattcacgtctggcgaaaaatcagaacggtgcagatat

SEQ ID NO: 74015 - DNA, 75 bp, synthetic construct
  source 1..75: mol_type = other DNA
cccgctgttcgccagccgctggcgcaagacaaatcgttactgccatttttcagcgatgagcgggtgatccgtgct

SEQ ID NO: 74016 - DNA, 75 bp, synthetic construct
  source 1..75: mol_type = other DNA
ttatgaaaaacaacggcgaaatgccggttgatgctgatctcaatacatttggtccagttaaggcttatgtgggtg

SEQ ID NO: 74017 - DNA, 75 bp, synthetic construct
  source 1..75: mol_type = other DNA
atttcaaaattgacggtcagcagctatcgctgaccggcggcattgaggtgcccatgaacaggacggtcaatgatg

SEQ ID NO: 74018 - DNA, 75 bp, synthetic construct
  source 1..75: mol_type = other DNA
gcagcggttcgcgcgatattgtgatagacgccaacctgccaggtctgcgcgtcgataccgtggcgggcgatgatg

SEQ ID NO: 74019 - DNA, 75 bp, synthetic construct
  source 1..75: mol_type = other DNA
ccgctggatccagtatcgggcacagtacgctaaaggtgaggccaaggctcgaataaccttttctgacgcggtaat

SEQ ID NO: 74020 - DNA, 75 bp, synthetic construct
  source 1..75: mol_type = other DNA
cattgctgatgagtttgacgagcgcgtcgaggctgcacgcgccgccgcagacagtggcgattttgcgttgtatat

SEQ ID NO: 74021 - DNA, 75 bp, synthetic construct
  source 1..75: mol_type = other DNA
cttacccagaggtcagtattgctgaagctgcacgtactgcccggataatgcgagagcaacttgctgcaggtgatg

SEQ ID NO: 74022 - DNA, 75 bp, synthetic construct
  source 1..75: mol_type = other DNA
atgaatatactaaaaaaacttatgcagcgtctgtgtggttgcggaaagcatgatgaccgtgaacacggggagtta

SEQ ID NO: 74023 - DNA, 75 bp, synthetic construct
  source 1..75: mol_type = other DNA
attacggctgtggagttttttaattcatttcctgacatgggaagaaaccatgccgaagaaaagttacaggaagcg

SEQ ID NO: 74024 - DNA, 75 bp, synthetic construct
  source 1..75: mol_type = other DNA
gacagcccggaaatgaaagacttccgccacggtttcgacattctggtcggtcagattgacgacgcgctgaagctg

SEQ ID NO: 74025 - DNA, 75 bp, synthetic construct
  source 1..75: mol_type = other DNA
ccattggtgttgcgggcgtcggaaacctcaatattagcgatggcggtaagttcgtatcgcaaaatattacttttt

SEQ ID NO: 74026 - DNA, 75 bp, synthetic construct
  source 1..75: mol_type = other DNA
gtttactggcttcaacacggtggattgccaacagatgacttcagtaaagcgaccatctttagcgtcgccaacaaa

SEQ ID NO: 74027 - DNA, 75 bp, synthetic construct
  source 1..75: mol_type = other DNA
ttcgcttccagtatgcaggaataaaactggaagaaggaagactgaattatgagattaaaggtgcattctatgtta

SEQ ID NO: 74028 - DNA, 75 bp, synthetic construct
  source 1..75: mol_type = other DNA
ccgcgaatttgaatatatacaccagcaggtgccggataatattccgctgactttataccttgcggaagcctatcg

SEQ ID NO: 74029 - DNA, 75 bp, synthetic construct
  source 1..75: mol_type = other DNA
atggccgttaaagcctccgggcgttttgtccctccgtcagcatttgccgcaggcaccggtaaggcgtttaccggt

SEQ ID NO: 74030 - DNA, 75 bp, synthetic construct
  source 1..75: mol_type = other DNA
gtatcagggcgtcgtgcagccagacggcacctggagcgtgactgtgcccgccgccaacgtgggcgcactggctga

SEQ ID NO: 74031 - DNA, 75 bp, synthetic construct
  source 1..75: mol_type = other DNA
gtagcgttttcaagtcttgatacacgtcttcctatgagcaaatcgcgtattttgctcaatccacgcgatattgac

SEQ ID NO: 74032 - DNA, 75 bp, synthetic construct
  source 1..75: mol_type = other DNA
ggattcgattacggctgcggacgtggcagaaacactgcgtccagtctggttaaccttgtcagaaacggcaagccg

SEQ ID NO: 74033 - DNA, 75 bp, synthetic construct
  source 1..75: mol_type = other DNA
aaaacctacggcggtgctgctcgcgcattcgaccagatcgataacgcgccggaagaaaaagctcgtggtatcacc

SEQ ID NO: 74034 - DNA, 75 bp, synthetic construct
  source 1..75: mol_type = other DNA
cgtcaggccggtaaaccttacgataaagatgccgagtgggcacgggcgggtaaagttattctcccactgctgcaa

SEQ ID NO: 74035 - DNA, 75 bp, synthetic construct
  source 1..75: mol_type = other DNA
aagaaaccttgttgctggaagcctggaaaaagtatcgggtgttgctgaaccgtgttgatacatcagtagtaccgg

SEQ ID NO: 74036 - DNA, 75 bp, synthetic construct
  source 1..75: mol_type = other DNA
gttccattttcctaaaacagtggaaaaaacggcgcaaacaggaactacgccagaaggcattagaagcgttctatg

SEQ ID NO: 74037 - DNA, 75 bp, synthetic construct
  source 1..75: mol_type = other DNA
gcacaggaaatatctgccgttctccaattggtgagcgtttattaagacggctattaccaagcaaaaagattaatt

SEQ ID NO: 74038 - DNA, 75 bp, synthetic construct
  source 1..75: mol_type = other DNA
ggcaaaatcccttatacctgtcagggaaaaaattgtctcgctgaaagaacttctttccggcgctaatgagctgga

SEQ ID NO: 74039 - DNA, 75 bp, synthetic construct
  source 1..75: mol_type = other DNA
gatattgcatccgccgtggcgcttgaggatgcgagcacgacgaaaaaggggatagtacagctcagcagtgcgacc

SEQ ID NO: 74040 - DNA, 75 bp, synthetic construct
  source 1..75: mol_type = other DNA
ttcaatgtttcttcatatggtgcaaataactggacgccaacgaccagtatcagcgaccttcttgttgtcgtgatg

SEQ ID NO: 74041 - DNA, 75 bp, synthetic construct
  source 1..75: mol_type = other DNA
accgcacaggatgcaacgacagcacagaaagggatagttcagctcagcagcgcgaccaacagcacatctgaaatg

SEQ ID NO: 74042 - DNA, 75 bp, synthetic construct
  source 1..75: mol_type = other DNA
tatgggtgcaaatcaaacaaaatatgtggacaacaccaactggctataccgggcgcataactcagggctttgacg

SEQ ID NO: 74043 - DNA, 75 bp, synthetic construct
  source 1..75: mol_type = other DNA
ggacaacctgttccagatgaacagctctcttcagaagataaatatattgagggtgaagacacaaaaagcgagaat

SEQ ID NO: 74044 - DNA, 75 bp, synthetic construct
  source 1..75: mol_type = other DNA
gaaaaaccaaaagcggatgttgcgccgtctaatctcgctattgtgggtcgttacgtacttagcgcggatatttgg

SEQ ID NO: 74045 - DNA, 75 bp, synthetic construct
  source 1..75: mol_type = other DNA
gaaggggttatccgcacggatgatgagcggactcaccggtaccattacgacagtcagcaccggctggtgcactac

SEQ ID NO: 74046 - DNA, 75 bp, synthetic construct
  source 1..75: mol_type = other DNA
tagtgacgcttatccgtcgctacgccgttggcattgttcatctggatgcctttggcgaagtgctgccgggctttg

SEQ ID NO: 74047 - DNA, 75 bp, synthetic construct
  source 1..75: mol_type = other DNA
aagctatttcccgtggctgattgcgattctggcagggtatatgacattaacgcaactggtgaaagggttctatag

SEQ ID NO: 74048 - DNA, 75 bp, synthetic construct
  source 1..75: mol_type = other DNA
gttccgtttattcagagccgcgcatcgtggccgttaatgatcatgaccgtgatcgtgatggttgtggggatcgca

SEQ ID NO: 74049 - DNA, 75 bp, synthetic construct
  source 1..75: mol_type = other DNA
gtcttcgaaatgaatcattcgtggcgctggttgatgtcatgaaggacggctgcgaatgggttaacttttatggtg

SEQ ID NO: 74050 - DNA, 75 bp, synthetic construct
  source 1..75: mol_type = other DNA
ttgcaaaccgttttgcaattaacagtagtaccggcatgtggattcatatgcgtgaccagaatgttattttgggac

SEQ ID NO: 74051 - DNA, 75 bp, synthetic construct
  source 1..75: mol_type = other DNA
gcccgctgggtaatcgccctgtctgggttagctatgaccccaacggcagcagcggcaaaggcgacagcgccgggc

SEQ ID NO: 74052 - DNA, 75 bp, synthetic construct
  source 1..75: mol_type = other DNA
aggtgtacagcttgactcgtttggtccctcctggtgtgcagaaaaactcatgaaaaaaatgggtgactacacgcc

SEQ ID NO: 74053 - DNA, 75 bp, synthetic construct
  source 1..75: mol_type = other DNA
acgctactaccgcgattatatcgcggcgaacagcaatgatgatgcgtcactgcctccgccggagcaggataaact

SEQ ID NO: 74054 - DNA, 75 bp, synthetic construct
  source 1..75: mol_type = other DNA
ttccgtgtagctattccgggtggagaaaaaaataaagtccgccagatgattttcactggctttactaaatgctgt

SEQ ID NO: 74055 - DNA, 75 bp, synthetic construct
  source 1..75: mol_type = other DNA
aactccagaaataagccaacggcatcagagatcggggcgttaccgtcaggtggaacagcagtatcatcagttaat

SEQ ID NO: 74056 - DNA, 75 bp, synthetic construct
  source 1..75: mol_type = other DNA
tcctgattcaaaaatatataaagcatcgcgcacggccatgcgactttcttcgcctgaggggcgtcaggcactgca

SEQ ID NO: 74057 - DNA, 75 bp, synthetic construct
  source 1..75: mol_type = other DNA
tgctatctgcagggataccgctatgcacctccactacccgctgaacagtttattgctgagtgggtatacaacagc

SEQ ID NO: 74058 - DNA, 75 bp, synthetic construct
  source 1..75: mol_type = other DNA
cggatgaaaatccccgggttattcgcggcgtcgtcgggcttgctgccggtcttgcgattctgaaactgggattga

SEQ ID NO: 74059 - DNA, 75 bp, synthetic construct
  source 1..75: mol_type = other DNA
cgggccgcgcactgaacaacgtcccatgactcatgtggaggccgcgaaagccctgcgcgataagttcagcgccga

SEQ ID NO: 74060 - DNA, 75 bp, synthetic construct
  source 1..75: mol_type = other DNA
atgctttcaacacaatttaacagggataatcaatatcaagccatcaccaaaccgtcactacttgccggttgcata

SEQ ID NO: 74061 - DNA, 75 bp, synthetic construct
  source 1..75: mol_type = other DNA
tgcttttgcggtggtctcctttcatctgaaccagtcactctcttcgcttttttccctcgctctctctctggtcag

SEQ ID NO: 74062 - DNA, 75 bp, synthetic construct
  source 1..75: mol_type = other DNA
aatcaacattggatcactgaaaccgcagatgccagtgaaagacttttagatcttttggtggaactaagaaatttg

SEQ ID NO: 74063 - DNA, 75 bp, synthetic construct
  source 1..75: mol_type = other DNA
gtgctgacggggcatccgcaggcgaacctgaaccgggaatggcaggtggtggcaagtgaactgcacggcgaacag

SEQ ID NO: 74064 - DNA, 75 bp, synthetic construct
  source 1..75: mol_type = other DNA
ccggggcgactggggcggtagccggcgcttatattgccgatatcactgatggcgatgagcgcgcgcggcacttcg

SEQ ID NO: 74065 - DNA, 75 bp, synthetic construct
  source 1..75: mol_type = other DNA
gccaggatgcgctgaaacaccgtcgggcgaaagctgcagcccgcaagcgtgctaatcgcctgaagaaactgcctg

SEQ ID NO: 74066 - DNA, 75 bp, synthetic construct
  source 1..75: mol_type = other DNA
tggcgttcatgatgtacgtcgcgcatccagcctttctacagctaaagcacaaatagagcttttggcgcaagagtt

SEQ ID NO: 74067 - DNA, 75 bp, synthetic construct
  source 1..75: mol_type = other DNA
ccatcttcggtggaatactcacagcctttctgctgtcccgccgtcgtccatccaccccgctcgatatgctgaaaa

SEQ ID NO: 74068 - DNA, 75 bp, synthetic construct
  source 1..75: mol_type = other DNA
tgcggcaaaacatttactcagggagatgcggggggctgagtacgtcatcatcagtaagggaacgctgcatggccg

SEQ ID NO: 74069 - DNA, 75 bp, synthetic construct
  source 1..75: mol_type = other DNA
tagactgggcagcaagcacgggaggttatggcaaggctacagtgcaggatgtcatgttaggagcgatagaaaaac

SEQ ID NO: 74070 - DNA, 75 bp, synthetic construct
  source 1..75: mol_type = other DNA
agcatggtgggtaaatggctggtatcccacagcaagtatcagcgatttgctggttgtggtgatgaagaaagccac

SEQ ID NO: 74071 - DNA, 75 bp, synthetic construct
  source 1..75: mol_type = other DNA
atcctttcccgcgcctacagcagttaccggaccaggacgcccgcgccggtgggggtgttcggtcccggctggaaa

SEQ ID NO: 74072 - DNA, 75 bp, synthetic construct
  source 1..75: mol_type = other DNA
acagacactgtttctcagactgacttaacgtcagttggtcgcgatattctggccaaaacaagcgttcttgctgtt

SEQ ID NO: 74073 - DNA, 75 bp, synthetic construct
  source 1..75: mol_type = other DNA
cttcagcttctggcccaccctgtttcagtatgaagcggatgaaacattccccgcccgggggattttttatgtcgg

SEQ ID NO: 74074 - DNA, 75 bp, synthetic construct
  source 1..75: mol_type = other DNA
ccccgttctgcttcctcttctctggttttccccgacacgctgcccgccggtacaggatacggcacggataacggt

SEQ ID NO: 74075 - DNA, 75 bp, synthetic construct
  source 1..75: mol_type = other DNA
aggtatcccggcaacagatatgttcaaagttattccactggcaccgggccatgcctacgggatgtttttggcacg

SEQ ID NO: 74076 - DNA, 75 bp, synthetic construct
  source 1..75: mol_type = other DNA
ggaagcatttttattatgacaggataaataaagacgacatcgtgattaacgatatcgcagtttccctttcaaata

SEQ ID NO: 74077 - DNA, 75 bp, synthetic construct
  source 1..75: mol_type = other DNA
aaggatacggtagcgcagactgatttaacgtcagtcggtcgcgatattctggctaaaacaagcacactggccgtt

SEQ ID NO: 74078 - DNA, 75 bp, synthetic construct
  source 1..75: mol_type = other DNA
ctcggtttacaggaaacggtaaacagggctggtaacgccgtgcaaaaaaatggcgataccttgtccggtgggctt

SEQ ID NO: 74079 - DNA, 75 bp, synthetic construct
  source 1..75: mol_type = other DNA
ctcaattcacttatattaatcatggtgatgcttatgctcctggctggcgaagagactacaacacgaaaaaccagc

SEQ ID NO: 74080 - DNA, 75 bp, synthetic construct
  source 1..75: mol_type = other DNA
gctgttggctggaactggaatagcggcgtttatgatgcagatatcagtggcgcatcgacattaatcctccacttc

SEQ ID NO: 74081 - DNA, 75 bp, synthetic construct
  source 1..75: mol_type = other DNA
caaaagctgttgccctaatcgaagagctccagaagaccatcaactatatggatgcaggaatagatcgaagttcag

SEQ ID NO: 74082 - DNA, 75 bp, synthetic construct
  source 1..75: mol_type = other DNA
caagtgctaacgagtcctgggcgtactttatggggcgtcgcaagtttgtggcatcccgacaggcctgtcagatgt

SEQ ID NO: 74083 - DNA, 75 bp, synthetic construct
  source 1..75: mol_type = other DNA
acacttctacagcgtcgcccaacatgcggtgctttgcagccagctggtaccgcaggagtttgctttcgaagcgtt

SEQ ID NO: 74084 - DNA, 75 bp, synthetic construct
  source 1..75: mol_type = other DNA
agatacgcgatgaaggcctgatactcaacgacagcggtggtaggagcattcactttgagccgttgtttcccggcg

SEQ ID NO: 74085 - DNA, 75 bp, synthetic construct
  source 1..75: mol_type = other DNA
gacgccgccgggcgcatcaccacgctgactaatgagaacggcagccagtccacgttcctgtatgacccggtggac

SEQ ID NO: 74086 - DNA, 75 bp, synthetic construct
  source 1..75: mol_type = other DNA
tgcatccccgccccataaaaaaaatgtcgctcagacaccatcaggtggaaaacaagagagtcgtaaaaaaagatt

SEQ ID NO: 74087 - DNA, 75 bp, synthetic construct
  source 1..75: mol_type = other DNA
ctggtgagaacgccgtcagcctggactgaggagccccgtaaacagcatgcttatctctccggtcagttctcggaa

SEQ ID NO: 74088 - DNA, 75 bp, synthetic construct
  source 1..75: mol_type = other DNA
acgctggacacgctgaaagaaatagccgcagccattaacaatgacccgaaattcagtaccaccattaacaatgcg

SEQ ID NO: 74089 - DNA, 75 bp, synthetic construct
  source 1..75: mol_type = other DNA
ggagacgctctgcctgcgtctgtatgaacacaatggcgtggaattacagacggcatcctggtacaccatcgcccg

SEQ ID NO: 74090 - DNA, 75 bp, synthetic construct
  source 1..75: mol_type = other DNA
gctgtgggtgataaagaccgaactgctggaaacgcagacggtggatttcacgctcgggtcacaggggctgcgtca

SEQ ID NO: 74091 - DNA, 75 bp, synthetic construct
  source 1..75: mol_type = other DNA
catttatggcgatgattgtgctctcccgccacccgctggtggtggagatgaagcgccagctgtgccgtaacgaga

SEQ ID NO: 74092 - DNA, 75 bp, synthetic construct
  source 1..75: mol_type = other DNA
cggcgaaaaatgcggatatcagcggtaacgtgaacgcgaactccgggacactcaacaacgtcacgataaatgaga

SEQ ID NO: 74093 - DNA, 75 bp, synthetic construct
  source 1..75: mol_type = other DNA
tgaccggcggacgtgtcctgtccatcgatgccgccagccgtaccctgacgctggaccgggaggtgacactgccgg

SEQ ID NO: 74094 - DNA, 75 bp, synthetic construct
  source 1..75: mol_type = other DNA
tttatatgcccgtttacctgcgcagctaagtggaagtctgtctgacccaacgctgacctttgagccaggcgcgtt

SEQ ID NO: 74095 - DNA, 75 bp, synthetic construct
  source 1..75: mol_type = other DNA
ggaagcatttttattatgacaagataaataaagacgacatcgatattaacgatatcgcggtttccctttcaaata

SEQ ID NO: 74096 - DNA, 75 bp, synthetic construct
  source 1..75: mol_type = other DNA
catattgctcaactcaatcatttgtctttagaagggcataaagggcaacaatttacctcttcactaggaagacaa

SEQ ID NO: 74097 - DNA, 75 bp, synthetic construct
  source 1..75: mol_type = other DNA
agtgatgtggccgctgaatacccacgcccggctggaaattattaccggtctgttcaaccgtctgcaaaaaacgct

SEQ ID NO: 74098 - DNA, 75 bp, synthetic construct
  source 1..75: mol_type = other DNA
gatccgtatcgaaaaagtgaagaggcgtttgagctagtttataagctagtagaacaaagttgcagtggttgggcg

SEQ ID NO: 74099 - DNA, 75 bp, synthetic construct
  source 1..75: mol_type = other DNA
gatgcatacaacagggttaagtggcctgaatgaagggctggctctgattgtggcgctgacccggcatcactggtc

SEQ ID NO: 74100 - DNA, 75 bp, synthetic construct
  source 1..75: mol_type = other DNA
aagagatgatcgaggcaattgaacagcacactgcctgtatcagtaccagggatataccaggcgttattgccaact

SEQ ID NO: 74101 - DNA, 75 bp, synthetic construct
  source 1..75: mol_type = other DNA
gaactggccgccaccgtactggtgaccttctttttactacgtcttctttcgctgtttggccgccgcagctggcgt

SEQ ID NO: 74102 - DNA, 75 bp, synthetic construct
  source 1..75: mol_type = other DNA
ttgcacagtatgtaatgaaacacgcgccacaggatgcagaagctattctgacaaacaccagttcaccggagattg

SEQ ID NO: 74103 - DNA, 75 bp, synthetic construct
  source 1..75: mol_type = other DNA
aaagttattccactgtcgccaggccatgcctatgggatgtttatagaacgcttcaacgagttatcggagttacgc

SEQ ID NO: 74104 - DNA, 75 bp, synthetic construct
  source 1..75: mol_type = other DNA
agctgcaaatcctcagggatgaattactctcaggccactaccagcccttgcccgccagacgggtttacatcccta

SEQ ID NO: 74105 - DNA, 75 bp, synthetic construct
  source 1..75: mol_type = other DNA
aacatactccagctatggtggcaggtagtctgatatttctgttcattattctgctgacatttttctggaaaaaag

SEQ ID NO: 74106 - DNA, 75 bp, synthetic construct
  source 1..75: mol_type = other DNA
cacacgaagaacacatcacagatatagccaaagttaacacttatgttgaagtattgggaaaaattaagaaccata

SEQ ID NO: 74107 - DNA, 75 bp, synthetic construct
  source 1..75: mol_type = other DNA
acagcttcagcgccctgaaggaccgccacacggcggtggaggtgaattacaccgacccgcagaacggctggcaga

SEQ ID NO: 74108 - DNA, 75 bp, synthetic construct
  source 1..75: mol_type = other DNA
tatgggaccgccaataatacgaaaatcaatcctggcggagaacagcatataaaagaatttggtgtaagtaataat

SEQ ID NO: 74109 - DNA, 75 bp, synthetic construct
  source 1..75: mol_type = other DNA
attacccgtcagcaactgaagacactggcagggaatgatgagaatgcggtggaaaagatttttccttcagcacag

SEQ ID NO: 74110 - DNA, 75 bp, synthetic construct
  source 1..75: mol_type = other DNA
tctcgtcggcaaaaggcaccgccggtaatacaacctcaaccaccactgccattctcagcacgacgccatcgggcc

SEQ ID NO: 74111 - DNA, 75 bp, synthetic construct
  source 1..75: mol_type = other DNA
tataaccgggcaatacgtgatgaggcagagcgtaaatttccctttaacgtggaatgcagaacgtcacatcagctg

SEQ ID NO: 74112 - DNA, 75 bp, synthetic construct
  source 1..75: mol_type = other DNA
gtgctgatggtgcacgaccacgcattaatggactggattggggccaactcctaccgtacctcgcattacccttac

SEQ ID NO: 74113 - DNA, 75 bp, synthetic construct
  source 1..75: mol_type = other DNA
aaaaaaccatgactccgacagaatatcctgaaacatcacccgatacagggcacagccatgaccagggaccttctc

SEQ ID NO: 74114 - DNA, 75 bp, synthetic construct
  source 1..75: mol_type = other DNA
agccaaacttacaagttgaaccagctatcgggcaactctccggcaactccggatggttggataagctgtagtgag

SEQ ID NO: 74115 - DNA, 75 bp, synthetic construct
  source 1..75: mol_type = other DNA
tgcgagtgagtatttacgaaaaggttctcaggtctacatcgaagggaaacttaaaacccgtaagtggacagatga

SEQ ID NO: 74116 - DNA, 75 bp, synthetic construct
  source 1..75: mol_type = other DNA
ttttccatatccacaaatggatatccatcttgttcgctccgggaagcaggcagagtcggtaacccataacagtcg

SEQ ID NO: 74117 - DNA, 75 bp, synthetic construct
  source 1..75: mol_type = other DNA
gcgccagattgaagagcagatcgaaaaaccgactgcggaactgcatcagatgtgccttgaggtggtggatcgcgc

SEQ ID NO: 74118 - DNA, 75 bp, synthetic construct
  source 1..75: mol_type = other DNA
gttcttctactaaccaacgccgtattactaacgttgccgcaggtaaaaatgctaccgatgctgttaacgttgcgc

SEQ ID NO: 74119 - DNA, 75 bp, synthetic construct
  source 1..75: mol_type = other DNA
tcgatgaagatttccaaatggaacagcaggccaatgctgaattcatcgctgcagccaatccggctaccgtgctgg

SEQ ID NO: 74120 - DNA, 75 bp, synthetic construct
  source 1..75: mol_type = other DNA
atactcagtattaaatgacggttatcaaattgttcaaatgggtggcgcggcaaaccagactacgctcaataatgg

SEQ ID NO: 74121 - DNA, 75 bp, synthetic construct
  source 1..75: mol_type = other DNA
cgcatgaagaacaaatatcggctattgctaaggttaatcctgatattgaagtgctggttgaaatagttaataaca

SEQ ID NO: 74122 - DNA, 75 bp, synthetic construct
  source 1..75: mol_type = other DNA
gcaacctgttcagagcacatcaccttctgataatacttcatcgtttctcgacaaagcgcgtggcttttttacgcg

SEQ ID NO: 74123 - DNA, 75 bp, synthetic construct
  source 1..75: mol_type = other DNA
atgagaatattcattgtattagctggtcttctcttgggatgctggaacttatttgataactacagatcctataaa

SEQ ID NO: 74124 - DNA, 75 bp, synthetic construct
  source 1..75: mol_type = other DNA
aaactggatgaaggtcaccggctggccgcactctggcaggcgctgccggaagaactccgcttaagtccgcatcgt

SEQ ID NO: 74125 - DNA, 75 bp, synthetic construct
  source 1..75: mol_type = other DNA
gcggagatccagacgctgcgtaatcaactgcgcgatattctcggcgctgcgctgtctggcaaggaggttaactga

SEQ ID NO: 74126 - DNA, 75 bp, synthetic construct
  source 1..75: mol_type = other DNA
gacagttcgggatgcaaaaggcaacctgctcaatgacgtcaaggtcaccttcaatgttaattcagcagcagcgaa

SEQ ID NO: 74127 - DNA, 75 bp, synthetic construct
  source 1..75: mol_type = other DNA
tctccgacttctggtacgtcagccagctgcagacgatggtggcaacactgaaaatctccatggaacggcgtaata

SEQ ID NO: 74128 - DNA, 75 bp, synthetic construct
  source 1..75: mol_type = other DNA
tcaacagcagtgggctcatgggctgctgcggacggtaaacaaagtacagctctgggagtgggaacatatgcttat

SEQ ID NO: 74129 - DNA, 75 bp, synthetic construct
  source 1..75: mol_type = other DNA
tccgcaggcgacactaccaatctgtatattgaggtgaaggataattacggcaacggtgtaccccagcaggaggta

SEQ ID NO: 74130 - DNA, 75 bp, synthetic construct
  source 1..75: mol_type = other DNA
cacttgtagaccgaaaatcacgttatacgatcatcctcagactcaggggcaaagattctgtctcagtaaatcagg

SEQ ID NO: 74131 - DNA, 75 bp, synthetic construct
  source 1..75: mol_type = other DNA
ggtaacgctgaagctgagcaacggcgcagagagacccgacagcggcttggtacacaggcggcgacaatgggggcg

SEQ ID NO: 74132 - DNA, 75 bp, synthetic construct
  source 1..75: mol_type = other DNA
gaaacgccggaagcaatgcagcaggagctgctgcaacgcatcgacaacgttttcgattttttccttaaccagtaa

SEQ ID NO: 74133 - DNA, 75 bp, synthetic construct
  source 1..75: mol_type = other DNA
cattgtttttttcttcagggttttttacatttgccgtatcggcagataaaaatcccggaagtgaaaacatgacta

SEQ ID NO: 74134 - DNA, 75 bp, synthetic construct
  source 1..75: mol_type = other DNA
caatcagcaggcgaaaaacgggaataacgcaggcgggattggctggatttcggatgaggatgggatcccgtgtat

SEQ ID NO: 74135 - DNA, 75 bp, synthetic construct
  source 1..75: mol_type = other DNA
tctccgactcctggtacgtcagccagctgcagacgatggtggcaacactgaaaatccccatggaacggcgtaata

SEQ ID NO: 74136 - DNA, 75 bp, synthetic construct
  source 1..75: mol_type = other DNA
caatacaaagcacctgaacggtgttggtaataagttacagaatttacctaaccttgataatatcggtgcagggtt

SEQ ID NO: 74137 - DNA, 75 bp, synthetic construct
  source 1..75: mol_type = other DNA
gcaggataccctgcttcatccgctgttgatgcgtaatggtgacagccgtccgttgcataaaccgacgacgccgct

SEQ ID NO: 74138 - DNA, 75 bp, synthetic construct
  source 1..75: mol_type = other DNA
agcgtcgttctcgtgtaacaaatcctgatggaacaataaaccttcctccggaatatctgatgaaaatccgtgtct

SEQ ID NO: 74139 - DNA, 75 bp, synthetic construct
  source 1..75: mol_type = other DNA
cctggcttgccgtgcctgcagatgaaatagaagatctcaaacaagcgcatcccccgatgaacgggcacacacccg

SEQ ID NO: 74140 - DNA, 75 bp, synthetic construct
  source 1..75: mol_type = other DNA
ccgcccagaaatttttagattatcgagactggagatcacaaattcatcactttgatgattttgacgaaaatgaat

SEQ ID NO: 74141 - DNA, 75 bp, synthetic construct
  source 1..75: mol_type = other DNA
tgctgggcagggtgccggtaaacggcacggtgaccgatccgtatccgttcaagatcctcgtggggcgcgataacc

SEQ ID NO: 74142 - DNA, 75 bp, synthetic construct
  source 1..75: mol_type = other DNA
gtttgtaattatgactcagaaaggcaagttttaaccagtcatcacggaataataagagatgaagaaaaaaaatgt

SEQ ID NO: 74143 - DNA, 75 bp, synthetic construct
  source 1..75: mol_type = other DNA
atgtcgaattcttatgactcctccagtatcaaagtcctgaaagggctggatgcggtgcgtaagcgcccgggtatg

SEQ ID NO: 74144 - DNA, 75 bp, synthetic construct
  source 1..75: mol_type = other DNA
accatgcccgggatgccgctcagcttcctgttaccatcgattatccggcagcgctggcactccgccagatgtcga

SEQ ID NO: 74145 - DNA, 75 bp, synthetic construct
  source 1..75: mol_type = other DNA
atgaatatattacgcggaaagttaagggagtaacgcagactaacgcaataacaacagacgagtgcgacgcgtttt

SEQ ID NO: 74146 - DNA, 75 bp, synthetic construct
  source 1..75: mol_type = other DNA
cggtgatttacctgatggctggcatggctggggcaaccagtgcaatggaggtatccagttgcatgatgctctctg

SEQ ID NO: 74147 - DNA, 75 bp, synthetic construct
  source 1..75: mol_type = other DNA
gccgcagcgagtcactctggctggcgcggggcggagtagcggcgcagcacagttcgcagccgctaagcgcgctct

SEQ ID NO: 74148 - DNA, 75 bp, synthetic construct
  source 1..75: mol_type = other DNA
tgcgcaacttccttgcggcccactattggatcgtaaaggcccacgcctgatgctgggactggggatgttcttctg

SEQ ID NO: 74149 - DNA, 75 bp, synthetic construct
  source 1..75: mol_type = other DNA
ttctgatctcgcttgggttcaaagttgatgaggctggcgccagaaaattcgatgccgtcgttgccgggacaacgc

SEQ ID NO: 74150 - DNA, 75 bp, synthetic construct
  source 1..75: mol_type = other DNA
accggaacaatggaaggttttgttgatcagcggtcatgcagtggcaacaaaacaggaagctgatgttttgcccgg

SEQ ID NO: 74151 - DNA, 75 bp, synthetic construct
  source 1..75: mol_type = other DNA
ggagtgcaactgaaattaaaggcgttgacgttaatggcacttcaacaagtgaggtttatcgatatgattttaaat

SEQ ID NO: 74152 - DNA, 75 bp, synthetic construct
  source 1..75: mol_type = other DNA
ggcgagttaggattatcggcgacagagtttggtgttttgctttctgcattttctctgtcttatggtttttcacaa

SEQ ID NO: 74153 - DNA, 75 bp, synthetic construct
  source 1..75: mol_type = other DNA
accagaacaatggaaggttttgttgatcagcggtcatgcagtggcaacaaagcaggaagctgatgttttgcccgg

SEQ ID NO: 74154 - DNA, 75 bp, synthetic construct
  source 1..75: mol_type = other DNA
ttttttggcctggggctgtttatggtgtcattgaacccgacatccgtgaacattcagaccatcgtcctgggcaat

SEQ ID NO: 74155 - DNA, 75 bp, synthetic construct
  source 1..75: mol_type = other DNA
gtacaagcagaacaatttcagtttatctcgatgaagatacaaataaccggcttatcagagcaaaagatcggagcg

SEQ ID NO: 74156 - DNA, 75 bp, synthetic construct
  source 1..75: mol_type = other DNA
agtttgatctcagcaacccgctggtccaggcgaagctcaaagaacgctacggtaaaaatattccgcttgaggaaa

SEQ ID NO: 74157 - DNA, 75 bp, synthetic construct
  source 1..75: mol_type = other DNA
tgggcaccattctttgcgtaggcgaaggcgtgcgtgcggttcgtgacctgaaagcgctgtacccgcacaaaatcg

SEQ ID NO: 74158 - DNA, 75 bp, synthetic construct
  source 1..75: mol_type = other DNA
caacacaagagttccggtgcatttggtggcacgaacacgagcattttccctaatggttataccgcgatttcaaat

SEQ ID NO: 74159 - DNA, 75 bp, synthetic construct
  source 1..75: mol_type = other DNA
tccaatctcacgcgtattgctgctgatgcctcagaagatgattttttttcatctatacatcaagcgtttagggaa

SEQ ID NO: 74160 - DNA, 75 bp, synthetic construct
  source 1..75: mol_type = other DNA
acaaaaacaggcgagctatgctataaaaaagacatgttattacaaagacttaaacccattaagtacgatctagac

SEQ ID NO: 74161 - DNA, 75 bp, synthetic construct
  source 1..75: mol_type = other DNA
aggcgattaatgctgagattcagtcgttgattgctgcctgccaacgttgccccgcaaaggttgtattagtgacta

SEQ ID NO: 74162 - DNA, 75 bp, synthetic construct
  source 1..75: mol_type = other DNA
ggagcgggaagagtcgccacgcagaggcgcttattggggactcttcacaggttctgtatatcgctacctcgcaaa

SEQ ID NO: 74163 - DNA, 75 bp, synthetic construct
  source 1..75: mol_type = other DNA
tgtttgaacggcgcaccctgccgcatcagtcaatgcagtattcgaaggactaccgctgggtgtcaaatgaccgta

SEQ ID NO: 74164 - DNA, 75 bp, synthetic construct
  source 1..75: mol_type = other DNA
cctggggccgtatccagctaaccgacgccattgccgaactggcgaagaagcagtccgttgacgcgatgctgatga

SEQ ID NO: 74165 - DNA, 75 bp, synthetic construct
  source 1..75: mol_type = other DNA
ttaaggctgccggtttattcccactggcgctgatgctttcaggctgtatctcgtatgctctggtttcccataccg

SEQ ID NO: 74166 - DNA, 75 bp, synthetic construct
  source 1..75: mol_type = other DNA
ggtgacgttgagaaagcggcgagggtgtttttcatcaacgagctgcaacctgtcatggaggccatgaagcatgtc

SEQ ID NO: 74167 - DNA, 75 bp, synthetic construct
  source 1..75: mol_type = other DNA
aatacatgcgacgcggaagcgatcttgaatcatggtggtatgtgcaggatggcaaggacgcgttccagtttcgcc

SEQ ID NO: 74168 - DNA, 75 bp, synthetic construct
  source 1..75: mol_type = other DNA
taaacctgaacgtcgcaaggcagaacgaatcgactacgaatccttcctgaacgcctacaacaccgaagtcggtga

SEQ ID NO: 74169 - DNA, 75 bp, synthetic construct
  source 1..75: mol_type = other DNA
ttaattattgaaggtagccttgctcttcttaagaagagaaaaccgtacgaacattctttgattgtggctcattac

SEQ ID NO: 74170 - DNA, 75 bp, synthetic construct
  source 1..75: mol_type = other DNA
gagtcgctaaacagcgtgatccgccatgcgatcaaaaagcgtaaagtgttcccgacagacgactcggtgaaaaaa

SEQ ID NO: 74171 - DNA, 75 bp, synthetic construct
  source 1..75: mol_type = other DNA
gcagaaaacacactgcgttgtgtcgccctagggcgacgcaactggctattcttcggctcagacacgggaggtcag

SEQ ID NO: 74172 - DNA, 75 bp, synthetic construct
  source 1..75: mol_type = other DNA
cacgatcttctgccaatttttcgctcttccgcatcgcttttgcggtttttctcacctacatgaccgtagggctgc

SEQ ID NO: 74173 - DNA, 75 bp, synthetic construct
  source 1..75: mol_type = other DNA
ggcggtccaaaaacgaatcgagggaaaaaaacaacgacgggaacgcaatcaccggctctttctcgcggctgggct

SEQ ID NO: 74174 - DNA, 75 bp, synthetic construct
  source 1..75: mol_type = other DNA
ggccgcactgatggccatcggggatgagctgcgccggctgcgtctggccgtcagggaacaggggacgcgggatga

SEQ ID NO: 74175 - DNA, 75 bp, synthetic construct
  source 1..75: mol_type = other DNA
agggctacaaggtcgatggctataccaccgtggatctgctcggcagttatcagcttccggtgggtacactcagct

SEQ ID NO: 74176 - DNA, 75 bp, synthetic construct
  source 1..75: mol_type = other DNA
ttcgtaacgggcttgatgtcgtgcgtatgattgcgctcggtgccgacaccgtactgctggggcgcgcttttctgt

SEQ ID NO: 74177 - DNA, 75 bp, synthetic construct
  source 1..75: mol_type = other DNA
cactgattactccgatcatcctcgcaaacttgtcacactaaacccgaaacttaaatcaacagcagctggtcgtta

SEQ ID NO: 74178 - DNA, 75 bp, synthetic construct
  source 1..75: mol_type = other DNA
catcctggcggtcggtttttgccggatttaagccgccgtgggtatttatcgacaaaatcttcaagggcaaatttt

SEQ ID NO: 74179 - DNA, 75 bp, synthetic construct
  source 1..75: mol_type = other DNA
taaccaggcgggagagtcactggcagccctggtcagtgccggtgtgcgtggtggtgaacagtttgatgccattaa

SEQ ID NO: 74180 - DNA, 75 bp, synthetic construct
  source 1..75: mol_type = other DNA
cagtatgctgcttatttgatgctaatgcatttgaacgtttagttcgtgaagacttacctcatccattgacacgag

SEQ ID NO: 74181 - DNA, 75 bp, synthetic construct
  source 1..75: mol_type = other DNA
taccgttatacaaaaaacaacgccccgcagtggtggctcacatatggggcgtctaaccaaaccattaattgaggt

SEQ ID NO: 74182 - DNA, 75 bp, synthetic construct
  source 1..75: mol_type = other DNA
tcaaatcaacagctgcaggccgttatcaacttctttcacgttggtgggatgcttaccgcaagcagcttgggctga

SEQ ID NO: 74183 - DNA, 75 bp, synthetic construct
  source 1..75: mol_type = other DNA
aaaggaacttcctgacccatagtgaaatagaatcactccttaaagcagcaaataccgggcctcatgctgcacgta

SEQ ID NO: 74184 - DNA, 75 bp, synthetic construct
  source 1..75: mol_type = other DNA
ttattgatatgccagctggtcgcggccacatgacgctggagttttcggtgtcatcatggctggtaaatgactggt

SEQ ID NO: 74185 - DNA, 75 bp, synthetic construct
  source 1..75: mol_type = other DNA
aaagtctgcctgtcgatccggcagcgtatccggaagactgggacttattgctgacggatgtgttccataaaacct

SEQ ID NO: 74186 - DNA, 75 bp, synthetic construct
  source 1..75: mol_type = other DNA
tgcatatggcgtctggaaagctgacttcagtgatactgccggacggcaggacggtgcggtatggctataacagcc

SEQ ID NO: 74187 - DNA, 75 bp, synthetic construct
  source 1..75: mol_type = other DNA
aaactgctggcggcagaagaagagtatgagcgaaccggcagtgaagagaccctgaaagcggtggtgaacaccgat

SEQ ID NO: 74188 - DNA, 75 bp, synthetic construct
  source 1..75: mol_type = other DNA
atgcacagaattgacactccgacagcagttaaagataaatttggcccgggcaagaacggatttactgacgggaat

SEQ ID NO: 74189 - DNA, 75 bp, synthetic construct
  source 1..75: mol_type = other DNA
ggcgtctaaccaaaccattaattgaggtaacgattatggctataaaagagcatagcttactctttatacacacac

SEQ ID NO: 74190 - DNA, 75 bp, synthetic construct
  source 1..75: mol_type = other DNA
taatctcatttttattgggaatatgcattcacttcaaaatatggatgcggtcctttggttcgcaaagtgtatttt

SEQ ID NO: 74191 - DNA, 75 bp, synthetic construct
  source 1..75: mol_type = other DNA
gaataaaagaagctgatgaaataaaattatcaaaatactcaaatgtaaaaataattggcgctgtaaataatgtgg

SEQ ID NO: 74192 - DNA, 75 bp, synthetic construct
  source 1..75: mol_type = other DNA
gcaggagtgcaaaataaaatattagaatatatggcattaggtttaccgtgtattacatcaagtgttggatatgag

SEQ ID NO: 74193 - DNA, 75 bp, synthetic construct
  source 1..75: mol_type = other DNA
atggtgatgctttttgaacctcaaccactggaactgtttgctaccgataaagccccggcacggctgacccggctg

SEQ ID NO: 74194 - DNA, 75 bp, synthetic construct
  source 1..75: mol_type = other DNA
ctgcgtaaaaaaatacgcaatgagcagcgatttgcgtcgctggacgaactgaaagcgcagattgcgcgtgatgaa

SEQ ID NO: 74195 - DNA, 75 bp, synthetic construct
  source 1..75: mol_type = other DNA
tcgccggccagtgatattgttccggcgatgggacaggctccatggtgtcgctcagtcacactgaacaaggtggag

SEQ ID NO: 74196 - DNA, 75 bp, synthetic construct
  source 1..75: mol_type = other DNA
cgaacctctgcacgcgatggttaaagcgatgggactgccgctgctggcggtttctggcgtagaagcggacgacgt

SEQ ID NO: 74197 - DNA, 75 bp, synthetic construct
  source 1..75: mol_type = other DNA
ggcgaagcaggtcccacgacgcgcacgccggaagtggcgttaagtcgtctgacggaagcaggcgtcacgtcagtg

SEQ ID NO: 74198 - DNA, 75 bp, synthetic construct
  source 1..75: mol_type = other DNA
atcgcggtgatattcgtcaggctattgatcgttgcagcaatatttgggcttcattgcccggtgctggctacggtc

SEQ ID NO: 74199 - DNA, 75 bp, synthetic construct
  source 1..75: mol_type = other DNA
aaacttgtcacgctaaatccgaaactcaagtcaacagctgcaggccgttatcaacttctttcccgttggtgggat

SEQ ID NO: 74200 - DNA, 75 bp, synthetic construct
  source 1..75: mol_type = other DNA
cgataaatgagaactgtcagattaaagggaaactgtcagccaaccagattgaaggcgatattgtcaaaacagtgg

SEQ ID NO: 74201 - DNA, 75 bp, synthetic construct
  source 1..75: mol_type = other DNA
cgccaagacccgtgcgctcaatgaagaaggcatcagcgcctggatgctgaccggcgcttatcatgtcccttcccg

SEQ ID NO: 74202 - DNA, 75 bp, synthetic construct
  source 1..75: mol_type = other DNA
tccggggagcatgggaggacagagcgaatgcgcaacttggactttcagccgccacgttgcaggccgatcttgaaa

SEQ ID NO: 74203 - DNA, 75 bp, synthetic construct
  source 1..75: mol_type = other DNA
gatacaaataataacctgaacagcatgtgggctgtgaagctgcagcagatgcaggacggacgcctttatatcgcg

SEQ ID NO: 74204 - DNA, 75 bp, synthetic construct
  source 1..75: mol_type = other DNA
cagggctgagcgtgaggcgtcacagctgaagtataccggagaggcgcagaaagcgtatgaacgcctgctgtcgcc

SEQ ID NO: 74205 - DNA, 75 bp, synthetic construct
  source 1..75: mol_type = other DNA
gtagctatggattatccggcataccgctgtttatccatgtgatcctgcctggtgccctgccctcaattatggtcg

SEQ ID NO: 74206 - DNA, 75 bp, synthetic construct
  source 1..75: mol_type = other DNA
gataacgcggctactgtcccggaaatacccggagctggtaataccggatgaactggcagtggaaggaaacagcaa

SEQ ID NO: 74207 - DNA, 75 bp, synthetic construct
  source 1..75: mol_type = other DNA
acaatattcgtatacttcgcgcacaggctcgtgaaactgatctggaaacgctggaagagatgctggaaaaactct

SEQ ID NO: 74208 - DNA, 75 bp, synthetic construct
  source 1..75: mol_type = other DNA
caactggacgccgacaacgtacatcagtgatttactggttgtggtcatgaaaaaatccacggcagggatcagtat

SEQ ID NO: 74209 - DNA, 75 bp, synthetic construct
  source 1..75: mol_type = other DNA
ccagctgcctcaaagttaccagcgtatgcctgacttccgccgccgcttcctgcaggtctgtgttaatgagatcaa

SEQ ID NO: 74210 - DNA, 75 bp, synthetic construct
  source 1..75: mol_type = other DNA
ggatattgtgcagggttcagcgggggtgctgataggtgcgccgacgggagtggcctgctcggtgtgtcccaacag

SEQ ID NO: 74211 - DNA, 75 bp, synthetic construct
  source 1..75: mol_type = other DNA
tgcggagatgagcggagaggctgccggtatagcggcctgcctgatggcatacagccaccacgcttgtcgcaccga

SEQ ID NO: 74212 - DNA, 75 bp, synthetic construct
  source 1..75: mol_type = other DNA
atgaaaactgaactgaccctgaatgccctgcagtccatgaacgcacaggaatatgaagatatccgggctgccgga

SEQ ID NO: 74213 - DNA, 75 bp, synthetic construct
  source 1..75: mol_type = other DNA
atgtgacgcgatgactgagcactattatcgcttacgtgactacgcgctaaaccatccggaatgcagcgccattat

SEQ ID NO: 74214 - DNA, 75 bp, synthetic construct
  source 1..75: mol_type = other DNA
aacaatacacagattgccactacagcttttgtgaaatcagcgattgcagcaatggtgggttctgcacccgcggca

SEQ ID NO: 74215 - DNA, 75 bp, synthetic construct
  source 1..75: mol_type = other DNA
ccgtccgactgctgattcagttacagcgtaacggtaactgggtgacggaaaaggatgtcaccattaacggcaaga

SEQ ID NO: 74216 - DNA, 75 bp, synthetic construct
  source 1..75: mol_type = other DNA
cgttgaccagatcagaaaatctgatggcaccctacaggaacatgacggtatctgcgagatccatgttgctaaata

SEQ ID NO: 74217 - DNA, 75 bp, synthetic construct
  source 1..75: mol_type = other DNA
cttagtgaaacaaaagaaatcaccaatccgtatgccatgcgtttatacgaatccctgtgtcagtatcgtaagccg

SEQ ID NO: 74218 - DNA, 75 bp, synthetic construct
  source 1..75: mol_type = other DNA
acggcattgccacaaaagctggtgatatgaccgtctataactttgatggcgagacgcgcgaatatttatcggcat

SEQ ID NO: 74219 - DNA, 75 bp, synthetic construct
  source 1..75: mol_type = other DNA
tatcggtgccatcaaagacggttatgtcacgctttcaccgttaacgccatacgataaatgggatggtgagaaatg

SEQ ID NO: 74220 - DNA, 75 bp, synthetic construct
  source 1..75: mol_type = other DNA
acacaccgctggtggatttcacccgcgaccgcctgcaccgggaaacgctgcgcagcttcggtcgttatgaactca

SEQ ID NO: 74221 - DNA, 75 bp, synthetic construct
  source 1..75: mol_type = other DNA
tggcctgttcggtgtgccccggcggagtgacgtccggccatccggtcaatcctctgctcggtgcaaaggtccttc

SEQ ID NO: 74222 - DNA, 75 bp, synthetic construct
  source 1..75: mol_type = other DNA
tcagatcgacggcgacaaggcggtcgtgaacaacgacggtgacaatgccatcagcaacggcggcaccggcacgca

SEQ ID NO: 74223 - DNA, 75 bp, synthetic construct
  source 1..75: mol_type = other DNA
cccttggccggggcaggagtgggaaacggcgagccggttgctgacagaacgtaagttaagcctggagccattaat

SEQ ID NO: 74224 - DNA, 75 bp, synthetic construct
  source 1..75: mol_type = other DNA
tggccatacgcggcatggcagaaccgacaactctggataatgccgccctgctccgcctgactgatgcaattaagg

SEQ ID NO: 74225 - DNA, 75 bp, synthetic construct
  source 1..75: mol_type = other DNA
agctggataaactccgccggatgaacttcggcagtcgttccgaaaaagtctcccgccgtatcgcacaaatggaag

SEQ ID NO: 74226 - DNA, 75 bp, synthetic construct
  source 1..75: mol_type = other DNA
gataacacggttgctgtcacggaaataccctgacctggtgatgccggatgcgctggcagcagaaggaagcagtaa

SEQ ID NO: 74227 - DNA, 75 bp, synthetic construct
  source 1..75: mol_type = other DNA
tgggcgtatgttcgtgatgaccgcaatgccgggtcagcgttggcacctgcagtgtggttcgcttacagcccggac

SEQ ID NO: 74228 - DNA, 75 bp, synthetic construct
  source 1..75: mol_type = other DNA
aaatgcccgtctgggtctggcagcggccacgctgcagtcggatatggaaaaagccggtgaactggcggcaaggga

SEQ ID NO: 74229 - DNA, 75 bp, synthetic construct
  source 1..75: mol_type = other DNA
agcagtgaaatcatgacgacaacggaccagaagctgggagatcaggaggccaccatccagcagatacaaaaggtt

SEQ ID NO: 74230 - DNA, 75 bp, synthetic construct
  source 1..75: mol_type = other DNA
aggtgacactgccggagaccggtgccgccacggtgaacctgattaacggcagcggtaagccggtgagtgtggaca

SEQ ID NO: 74231 - DNA, 75 bp, synthetic construct
  source 1..75: mol_type = other DNA
gtaaagggccggaactcctggtggaactggcacagcatacctctgagaccgttcgcgagattattgatattgagc

SEQ ID NO: 74232 - DNA, 75 bp, synthetic construct
  source 1..75: mol_type = other DNA
ctgtgggacatgctgactcacccgcgctacggcatgggaaaacgcctgggggcggcggatgtggacaagtgggcg

SEQ ID NO: 74233 - DNA, 75 bp, synthetic construct
  source 1..75: mol_type = other DNA
cacattaagcccgggaaggatttctggttttacgtgcgcagcgtcaacctggtggggaaatctgcttttgtggaa

SEQ ID NO: 74234 - DNA, 75 bp, synthetic construct
  source 1..75: mol_type = other DNA
gcttacggctgcgaactgaaagagatcacgcaatattgtgactcgttcaccatttgcctgtcaaaaggtcttggg

SEQ ID NO: 74235 - DNA, 75 bp, synthetic construct
  source 1..75: mol_type = other DNA
cacaagacttattggaatcttatgccattcgtttgttgagcggaccattgaatggatgcgagtatgaaatactta

SEQ ID NO: 74236 - DNA, 75 bp, synthetic construct
  source 1..75: mol_type = other DNA
cgtttcagctgcgtttcctgtttgccagccggcccgagatcatggggtgggtgctgggcatcgtttaccgcgtca

SEQ ID NO: 74237 - DNA, 75 bp, synthetic construct
  source 1..75: mol_type = other DNA
acgcgttacttaggatcaatcaaacactctgattcgccattagccgcaggtaaaccattaactcgcgcgacggac

SEQ ID NO: 74238 - DNA, 75 bp, synthetic construct
  source 1..75: mol_type = other DNA
gagttatgggatcccggtattaatgccggattgctcaattataatttcagcggaaatagtgtacagaatcgaatt

SEQ ID NO: 74239 - DNA, 75 bp, synthetic construct
  source 1..75: mol_type = other DNA
cagtaatgccgcatatgaactgaccagcacatacacccccgcaggccagttacagagccagcacctgaacagcct

SEQ ID NO: 74240 - DNA, 75 bp, synthetic construct
  source 1..75: mol_type = other DNA
cacgtaacggcgaatatgaagcgttcggtgtacccgcgacgattcttgctaacttcctgcgcgaaaatggcgtag

SEQ ID NO: 74241 - DNA, 75 bp, synthetic construct
  source 1..75: mol_type = other DNA
accgaaagtctgacccagcagcgccgcagcaaggccaccggcggtggcggtgatgccctgatgacgaactgctga

SEQ ID NO: 74242 - DNA, 75 bp, synthetic construct
  source 1..75: mol_type = other DNA
cagcagatacagaaggttcaggttgatacaaataataacctgaacagcatgtgggctgtgaagctgcagcagatg

SEQ ID NO: 74243 - DNA, 75 bp, synthetic construct
  source 1..75: mol_type = other DNA
tgaccatctgagggggtatgtgaagccccatgcgcagcgcaccgcttttacagaggcctggctgggcgagatgga

SEQ ID NO: 74244 - DNA, 75 bp, synthetic construct
  source 1..75: mol_type = other DNA
atgcgcagacagaaagcgcgatgtcattgctgcggtgcacatgcagtgattgagaaaacagcctggaaaaccgat

SEQ ID NO: 74245 - DNA, 75 bp, synthetic construct
  source 1..75: mol_type = other DNA
acacgcatcagcgcttctccgcaacgggcgctgacgcacctgctcacactggcgtaaccggcggcggcattgctt

SEQ ID NO: 74246 - DNA, 75 bp, synthetic construct
  source 1..75: mol_type = other DNA
atgagcgaatatttcagaatacttcaggggctgccagacggtccttttacccgaaaacaggccgaagccgttgcc

SEQ ID NO: 74247 - DNA, 75 bp, synthetic construct
  source 1..75: mol_type = other DNA
ccgaaattatcggtgttggtgagatcagggataacgaaaccgccgacgcagcggtacaggcaggcaacaccgggc

SEQ ID NO: 74248 - DNA, 75 bp, synthetic construct
  source 1..75: mol_type = other DNA
atggccaactggcgcgcgctaaaacaggtacttcaacacggcgatccacgtcgcgtcgcgtgggataaaacaacg

SEQ ID NO: 74249 - DNA, 75 bp, synthetic construct
  source 1..75: mol_type = other DNA
ctgcaatagagattgaatcatttgagatggcctataaaactcagccagaagagaaacacgaatttacatcatatt

SEQ ID NO: 74250 - DNA, 75 bp, synthetic construct
  source 1..75: mol_type = other DNA
tcatgcacatgctctatcaccgccagccccggaaagtcatccaggcactggctggtcacagggatccacgttcga

SEQ ID NO: 74251 - DNA, 75 bp, synthetic construct
  source 1..75: mol_type = other DNA
ctgtatctgaaatccctgtgcctgtccgttgcctgctgttgtggggtattcagtcgtatttttaattattacagc

SEQ ID NO: 74252 - DNA, 75 bp, synthetic construct
  source 1..75: mol_type = other DNA
gcaccgctgggatggtggtaaggctgcccgcagccgtctgtctccggttacagccgtggcacagtcgggagcact

SEQ ID NO: 74253 - DNA, 75 bp, synthetic construct
  source 1..75: mol_type = other DNA
acaaactgagaaaattatccatgaacgagggtatctcaaatgatcgggttattgaaagtgctctggacatgattt

SEQ ID NO: 74254 - DNA, 75 bp, synthetic construct
  source 1..75: mol_type = other DNA
gcataaaataattttactttgcgatgaaatgaaaatagtaacgaagcgaatttctgatgtatataatgaaatgga

SEQ ID NO: 74255 - DNA, 75 bp, synthetic construct
  source 1..75: mol_type = other DNA
tcggaagtcgaagaatggatagagacgcgtaaagcgtctggaatccaggctgctcgacctggcaccaccatagag

SEQ ID NO: 74256 - DNA, 75 bp, synthetic construct
  source 1..75: mol_type = other DNA
gtgatttaatccagtatttagatacaatcaaagaactaaaaaatcatatttcgatagaagaatacagaaatgaat

SEQ ID NO: 74257 - DNA, 75 bp, synthetic construct
  source 1..75: mol_type = other DNA
atggagaagcgtttcggggaatctgtagatcgccgcagggcgaaaaatggcgatagagaatacatggcatgggat

SEQ ID NO: 74258 - DNA, 75 bp, synthetic construct
  source 1..75: mol_type = other DNA
gaccaaggaagccggtaaaagcagctgggtgctggagtacgccgcgggcaacggtgcggctctgttacagaaagg

SEQ ID NO: 74259 - DNA, 75 bp, synthetic construct
  source 1..75: mol_type = other DNA
agcggattctgcagccagggggacggagcctgttttgaagggcgctggcactggcagccagcgacagtcaggaga

SEQ ID NO: 74260 - DNA, 75 bp, synthetic construct
  source 1..75: mol_type = other DNA
aggtggagtatgtggctggtattttgaagcaatctcgccacctagatgacatcgaggcaagggaatggattaaaa

SEQ ID NO: 74261 - DNA, 75 bp, synthetic construct
  source 1..75: mol_type = other DNA
ctacgcggtgcctgcttttaacattcataacgccgagacgatccaggcgatcctcgaagtgtgcagtgaaatgcg

SEQ ID NO: 74262 - DNA, 75 bp, synthetic construct
  source 1..75: mol_type = other DNA
agtgcggggttacttgcacggatcctggtcagcaaatatgtggaacatatccctttatatcgccagtcagaaata

SEQ ID NO: 74263 - DNA, 75 bp, synthetic construct
  source 1..75: mol_type = other DNA
caaaagcggaagtaatggcggagcgtattcgccagattaacccggagtgccgtgtaacggtggtggatgacttcg

SEQ ID NO: 74264 - DNA, 75 bp, synthetic construct
  source 1..75: mol_type = other DNA
tgatgataatcgtgccgtcgaatgtaaagccgaaggcagtcaacatattagctaccagttcagcggggaatggag

SEQ ID NO: 74265 - DNA, 75 bp, synthetic construct
  source 1..75: mol_type = other DNA
cttgaggccgaagaccgcccgctgcccgagtatgtgcgcgaggagttcgagacctacctgcgttgcggcgtgctc

SEQ ID NO: 74266 - DNA, 75 bp, synthetic construct
  source 1..75: mol_type = other DNA
gtgacaacccgctacacaggaatgaacccggacgggacgggaaacctgaacgatatggagcacctgaaacagtca

SEQ ID NO: 74267 - DNA, 75 bp, synthetic construct
  source 1..75: mol_type = other DNA
cagtcagtggactgtccaggggagccggattaagccggggacggatttctggttttatgtgcgcagcgtcaatct

SEQ ID NO: 74268 - DNA, 75 bp, synthetic construct
  source 1..75: mol_type = other DNA
cggctgggacggcgaccggctgaccacgatacagaacgacagaacccgcatccagacgatttatcagccggggag

SEQ ID NO: 74269 - DNA, 75 bp, synthetic construct
  source 1..75: mol_type = other DNA
tgcgcgagctgctgggcctgaacgaaaaagacaaacagcaaatcacagaaaccgtgattgccggactggggaaag

SEQ ID NO: 74270 - DNA, 75 bp, synthetic construct
  source 1..75: mol_type = other DNA
cctttgacccgcgtgtctatggttgccgcattaacctggaacatctgcgcggcatcctgcctgacggtattttta

SEQ ID NO: 74271 - DNA, 75 bp, synthetic construct
  source 1..75: mol_type = other DNA
ttgccatcacggcggtgcagcacgtaccggaaaaagaagccatcgtggataacggtgcccgctttgagccgcagt

SEQ ID NO: 74272 - DNA, 75 bp, synthetic construct
  source 1..75: mol_type = other DNA
tacttggcaatagtaatttgaaaagaggtgagataatcaggatgcttgaggcgagaaattatgatggtgcaccag

SEQ ID NO: 74273 - DNA, 75 bp, synthetic construct
  source 1..75: mol_type = other DNA
atgaaaaagatagctgctatatcattaattagtatttttattatgtctggttgtgctgtgcataatgatgagaca

SEQ ID NO: 74274 - DNA, 75 bp, synthetic construct
  source 1..75: mol_type = other DNA
caagtatatctcaattatctcctgcaggagtacagtctttgcaggatgctgccagacttgaaagtggaataagaa

SEQ ID NO: 74275 - DNA, 75 bp, synthetic construct
  source 1..75: mol_type = other DNA
aacaaatacagcgttagccctgaaaaatatctcaaggcggctatagcaattttgtacgctgacaatattttggtg

SEQ ID NO: 74276 - DNA, 75 bp, synthetic construct
  source 1..75: mol_type = other DNA
attacatggcgtcgctcgtctgacattcaaatgtggagagggagaatattttttggtaagcgtcaaacatgcgcg

SEQ ID NO: 74277 - DNA, 75 bp, synthetic construct
  source 1..75: mol_type = other DNA
acgctggcggtttttggcggtagcgaagccaacctgcgcgtcgggctggaaaccttgctcggcgtgctcaatgcc

SEQ ID NO: 74278 - DNA, 75 bp, synthetic construct
  source 1..75: mol_type = other DNA
tggcgatgatgaccgacgccggacgtagcgccatgctcaaccctggcccgcatggttttagcgaagtgctgtacg

SEQ ID NO: 74279 - DNA, 75 bp, synthetic construct
  source 1..75: mol_type = other DNA
tcaacgaccgcttaccgcacaagccgtacttctcggatgatttacactttggtgtacgcattgcagggaaagaac

SEQ ID NO: 74280 - DNA, 75 bp, synthetic construct
  source 1..75: mol_type = other DNA
ttatgcccgcggaaaggctgatacagaatacaatctttttaaggacgactgggtgcgagctgacatgaagaatga

SEQ ID NO: 74281 - DNA, 75 bp, synthetic construct
  source 1..75: mol_type = other DNA
aaaaacggtgaatgcgctgatggacacctttccggagggaacggtgatgtgcatgaccatcgtggtgcagcccca

SEQ ID NO: 74282 - DNA, 75 bp, synthetic construct
  source 1..75: mol_type = other DNA
ccgcctgtcccgcccggggcacagcccctgaaacgtcccgggcagatgacgcaggaagaggaggtccgggtttat

SEQ ID NO: 74283 - DNA, 75 bp, synthetic construct
  source 1..75: mol_type = other DNA
ctctgctgcgcgatgacgacatcctgatcctcactgctgaccacggttgtgatccgacctggaccggtactgacc

SEQ ID NO: 74284 - DNA, 75 bp, synthetic construct
  source 1..75: mol_type = other DNA
cacatggatgaaacctacgtgaaggtcaatggccgctgggcgtatctgtaccgggccgtcgacagccggggccgc

SEQ ID NO: 74285 - DNA, 75 bp, synthetic construct
  source 1..75: mol_type = other DNA
ctatggccgcggagctgcagactcccattatacactggatacatggcattctccgatgggggatggtggtcggga

SEQ ID NO: 74286 - DNA, 75 bp, synthetic construct
  source 1..75: mol_type = other DNA
gcggtgaagacagccgtctggtgaccaccgccatcactgcagacacggcgcaccgtttcagtggtctgccactgg

SEQ ID NO: 74287 - DNA, 75 bp, synthetic construct
  source 1..75: mol_type = other DNA
cgcggaaaccacagacgaaggtgaatcagaagataatgatgattccgcttttgaacagctttgcaaaattcgcac

SEQ ID NO: 74288 - DNA, 75 bp, synthetic construct
  source 1..75: mol_type = other DNA
ccatgtttgagcagcttcggacaaaccgctttctgaaggtaaaaaccgatcccggcggcgtcagcgtgggatttg

SEQ ID NO: 74289 - DNA, 75 bp, synthetic construct
  source 1..75: mol_type = other DNA
attttcactacgttgcttcctgcaggaattttaaaccaaaacatgatgttttaaatagctggtgtgtgggaatca

SEQ ID NO: 74290 - DNA, 75 bp, synthetic construct
  source 1..75: mol_type = other DNA
catagaggctgcagacgcaatggtgaagtcggctaatgtgatgctgatcggctacgaaaaaataggttcagggct

SEQ ID NO: 74291 - DNA, 75 bp, synthetic construct
  source 1..75: mol_type = other DNA
acgctggcacaacggctgcccgtaacgtgggagaagtagaagctgtacatgttattccacgtccgcatactgatg

SEQ ID NO: 74292 - DNA, 75 bp, synthetic construct
  source 1..75: mol_type = other DNA
gtggggcatatctgtgaacccgtaatggcgctgtggggattacccggtgaagcggcaaccgtccttttagccgca

SEQ ID NO: 74293 - DNA, 75 bp, synthetic construct
  source 1..75: mol_type = other DNA
gggggtgattaccgtggccgatttaccggcgggctggggggtgctgtatgcgattaacgggcgggtcaggaaagt

SEQ ID NO: 74294 - DNA, 75 bp, synthetic construct
  source 1..75: mol_type = other DNA
ccgaaggtggtgaagggcgtgagctttatgcttcgcctgaccgtggcagcggatgacggcagtgagcggctggtc

SEQ ID NO: 74295 - DNA, 75 bp, synthetic construct
  source 1..75: mol_type = other DNA
gtgataagtccgggcggacaatgccgggtggaaaggtgttttcaggttacccggggtgatacaccagagcaatac

SEQ ID NO: 74296 - DNA, 75 bp, synthetic construct
  source 1..75: mol_type = other DNA
gccagcgggcaggccagcaatgatgcaaaagggtatctggaatttttccgtggtctgatagatgagacgctgctg

SEQ ID NO: 74297 - DNA, 75 bp, synthetic construct
  source 1..75: mol_type = other DNA
aacagccagtgtcttctgtcatcaatgataagaagtcagatgcaggtgtgagtgttccggcaggggggatcgagc

SEQ ID NO: 74298 - DNA, 75 bp, synthetic construct
  source 1..75: mol_type = other DNA
gtgctggcgagcctcggtgggctggtttcctgtgcggcaaaggttcatttcgaagtagcaggtaacgccatgaat

SEQ ID NO: 74299 - DNA, 75 bp, synthetic construct
  source 1..75: mol_type = other DNA
gcgcatggtacggcgaccgatcgcggtgatatggcagaaagtctggcgacagcaaccatttacggtgataatgtg

SEQ ID NO: 74300 - DNA, 75 bp, synthetic construct
  source 1..75: mol_type = other DNA
atgttccgtcacccggaaaacgagtacgaccagatgacctcagacgccgctgtggatgaggcccttctcatcaat

SEQ ID NO: 74301 - DNA, 75 bp, synthetic construct
  source 1..75: mol_type = other DNA
gattttcgacaagaaacagatttactaccgcatggactttagtggcttcgttatgctggttatgggatttaacgg

SEQ ID NO: 74302 - DNA, 75 bp, synthetic construct
  source 1..75: mol_type = other DNA
ggtgggcaagtctgcatttgtggaagccagcgggcaggccagcaatgatgcaaaagggtatctggaatttttccg

SEQ ID NO: 74303 - DNA, 75 bp, synthetic construct
  source 1..75: mol_type = other DNA
ggttatggtaccggcgatcgttttatgcgtgccggggtggaaatcaaccggtacggaaaagcactggcctaccat

SEQ ID NO: 74304 - DNA, 75 bp, synthetic construct
  source 1..75: mol_type = other DNA
aggattgcgccaggtagtgccgcgtccggcggtcttccgtgcgctgacgcaggtagggctggtgctgcgaccgtt

SEQ ID NO: 74305 - DNA, 75 bp, synthetic construct
  source 1..75: mol_type = other DNA
acccgaccctccgtcttcccgatttacgcggtgagtttatccgtggatgggacgacgggcgcaaagttgatacag

SEQ ID NO: 74306 - DNA, 75 bp, synthetic construct
  source 1..75: mol_type = other DNA
cagggcgacatgacgcagtatggcggtagcattgttcagggttcagccggggtgcgcattggtgcccccaccggc

SEQ ID NO: 74307 - DNA, 75 bp, synthetic construct
  source 1..75: mol_type = other DNA
tcagagctttaagccacaggagagtatccccggctataacgcgaatccggacgagacaaaatattacggtggcgt

SEQ ID NO: 74308 - DNA, 75 bp, synthetic construct
  source 1..75: mol_type = other DNA
gaataccggcacgctcaataatgtcaccattaacgagaactgtgtcatcagagggaaactgtctgcaaaccagat

SEQ ID NO: 74309 - DNA, 75 bp, synthetic construct
  source 1..75: mol_type = other DNA
tcaaatcggatggcactgtgcaaacggctctcgaaaaccttggtttgggagaaggttcggcattacccgttggtg

SEQ ID NO: 74310 - DNA, 75 bp, synthetic construct
  source 1..75: mol_type = other DNA
atgaaaccggaagaagagatggaacagcaactgccacccgggatcagtgaatccggtgaagtggtggatatggcc

SEQ ID NO: 74311 - DNA, 75 bp, synthetic construct
  source 1..75: mol_type = other DNA
atgcctcgcctgttaaccaaacgcggctgctggataacgctggcagctgcgccctttctcctttttcttgcagcg

SEQ ID NO: 74312 - DNA, 75 bp, synthetic construct
  source 1..75: mol_type = other DNA
tgggcggcggcatacctggcaccgtagagatgtagaggcatggttagataaacaacgagaacaggccaatcccca

SEQ ID NO: 74313 - DNA, 75 bp, synthetic construct
  source 1..75: mol_type = other DNA
gtcaggcgtcatttttccggtacggaaagtgatgcgaaaaaaacagcggcagtcgttgaacagtcgatgaaccgg

SEQ ID NO: 74314 - DNA, 75 bp, synthetic construct
  source 1..75: mol_type = other DNA
cgtctgagagatgcgttccggtatatccggaagcactgggttgcgttgtgcaacttctgtgatgatggtctggcg

SEQ ID NO: 74315 - DNA, 75 bp, synthetic construct
  source 1..75: mol_type = other DNA
cctcgcgtctgggtgctggattttaaaggcagcatggacgcccatgaagtgaactcgctacgtgaagagataacg

SEQ ID NO: 74316 - DNA, 75 bp, synthetic construct
  source 1..75: mol_type = other DNA
aagcccgcccggccaatggctgggatgtacgcgcagaaggctggctacccgcctggccgcaccttggcggtaaac

SEQ ID NO: 74317 - DNA, 75 bp, synthetic construct
  source 1..75: mol_type = other DNA
tgataccgccagtgttattccgcggtggtaagcatgagaatttcaacagtaataaccaacagtcatactggtatt

SEQ ID NO: 74318 - DNA, 75 bp, synthetic construct
  source 1..75: mol_type = other DNA
tttaatcattttaataaaactgacaatgtttcagattgttggcaaattctctttttttcaccagatcattttaat

SEQ ID NO: 74319 - DNA, 75 bp, synthetic construct
  source 1..75: mol_type = other DNA
gcattgatgcttcagcgctgcgtacggaggtcacgcaactggaagaagacatccgtcagcggatggacacggata

SEQ ID NO: 74320 - DNA, 75 bp, synthetic construct
  source 1..75: mol_type = other DNA
atgtgctacaaaccgccacgcggggtgaatggtataagggcgatttttttgcgccgcaaccgtggcagcagttcg

SEQ ID NO: 74321 - DNA, 75 bp, synthetic construct
  source 1..75: mol_type = other DNA
tttacgtggtgagtttattcgtggctgggatgatgggcgtggagtggacagtgggcgagcgttattgagtgctca

SEQ ID NO: 74322 - DNA, 75 bp, synthetic construct
  source 1..75: mol_type = other DNA
agagcacaccccgctgtatcgccagtcagaaatatacggccggcaaggtgtggagctgagccgttcactgctgtc

SEQ ID NO: 74323 - DNA, 75 bp, synthetic construct
  source 1..75: mol_type = other DNA
ctggaacgtgaaaatcgtgaactgcgccgcagtaacgatatccttcgccaggcttccgcttatttgcgaaggcgg

SEQ ID NO: 74324 - DNA, 75 bp, synthetic construct
  source 1..75: mol_type = other DNA
aaagacatcaccattaaaggcaaaaccacctcacagtatctggcatcggtggtggtgggtaacctgccgccgcgc

SEQ ID NO: 74325 - DNA, 75 bp, synthetic construct
  source 1..75: mol_type = other DNA
ctgccagatggtcagccagtggcagacattcaccacgggctggaatcgttatgtcagcaggcccctgcccatcct

SEQ ID NO: 74326 - DNA, 75 bp, synthetic construct
  source 1..75: mol_type = other DNA
aggctctgcattacctgttggtgtccctgttccgtggccttcagccactccgccaacaggctggctgaaatgcaa

SEQ ID NO: 74327 - DNA, 75 bp, synthetic construct
  source 1..75: mol_type = other DNA
ctgtccggttgctgattcagcttgagcgtagcgggcactgggtgacagagaaggatatcaccattaacggtaaga

SEQ ID NO: 74328 - DNA, 75 bp, synthetic construct
  source 1..75: mol_type = other DNA
gtcaatttctggtgcaaacagggattcaggaattactggatatggatgatgttaccgaaatcgccgtaaatcagc

SEQ ID NO: 74329 - DNA, 75 bp, synthetic construct
  source 1..75: mol_type = other DNA
attactggggaaaatcctcaaaaagcttgacgaaaggaaatgatattcatctgttaatttatcattgccttgatg

SEQ ID NO: 74330 - DNA, 75 bp, synthetic construct
  source 1..75: mol_type = other DNA
gcaaccgctacagaacagcaggtgcagcaactggccgccaccccggcgacacaacctgttgtgccacagaccgta

SEQ ID NO: 74331 - DNA, 75 bp, synthetic construct
  source 1..75: mol_type = other DNA
acaaaactcatgaagcagattagcaaattcaactgtgttcatatgaacatggttgccgctgatgggaagcttcgt

SEQ ID NO: 74332 - DNA, 75 bp, synthetic construct
  source 1..75: mol_type = other DNA
aatatacctgaaatggttgagttttttatcatttttttattaatgatactaatgagtctgtctttttatttttgc

SEQ ID NO: 74333 - DNA, 75 bp, synthetic construct
  source 1..75: mol_type = other DNA
ccagcaaatgtggcggttgttcatcaaacaaaatcattaacaggggccagcatctggcaggcaggtcccggggga

SEQ ID NO: 74334 - DNA, 75 bp, synthetic construct
  source 1..75: mol_type = other DNA
ccattaatggaacgatgagcgctgaccgaatcattggtgatatcgtcaagggatacacggttgatatggggcagg

SEQ ID NO: 74335 - DNA, 75 bp, synthetic construct
  source 1..75: mol_type = other DNA
atcttggatttcctgtcggcaccaatgtaagacacataactttcccccggtcgtttacaacaacgaactattcaa

SEQ ID NO: 74336 - DNA, 75 bp, synthetic construct
  source 1..75: mol_type = other DNA
acgaaatcgaccgtcgcacgcattttgttgacgctggatatgcaaaagaatgcgcgctggaaggtatggcgagaa

SEQ ID NO: 74337 - DNA, 75 bp, synthetic construct
  source 1..75: mol_type = other DNA
tgtgtatgtcattttcgaagatggcaccgatccgtactgggcgcgctcgcgggtgctggagtacctcaaccaggt

SEQ ID NO: 74338 - DNA, 75 bp, synthetic construct
  source 1..75: mol_type = other DNA
tgcgatctccacattatttctgcaacgccatccaggtgtatgtgacgccattgcgctaactgcgccaatgtttgg

SEQ ID NO: 74339 - DNA, 75 bp, synthetic construct
  source 1..75: mol_type = other DNA
aatagaggtccaatacctcaaggggtatggagctggaatgttaatggtcctggagcaaccaatagaaaacctaat

SEQ ID NO: 74340 - DNA, 75 bp, synthetic construct
  source 1..75: mol_type = other DNA
cggtgctggtggttcaccattccggcaaggatgaaacaaagggggcgcgtggttccagtgcatttcgtgcatctc

SEQ ID NO: 74341 - DNA, 75 bp, synthetic construct
  source 1..75: mol_type = other DNA
tgtcgatgctgagtatgcaaaagaatgcgcgctggaaggtatggcgagaacacaggttatctggctgaaagaggg

SEQ ID NO: 74342 - DNA, 75 bp, synthetic construct
  source 1..75: mol_type = other DNA
atcgccagtcagaaatatacggccggcaaggtgtggagctgagccgttcactgctgtcgggctgggtggatgcat

SEQ ID NO: 74343 - DNA, 75 bp, synthetic construct
  source 1..75: mol_type = other DNA
ggcttgggtatgacgtgaaaaacatgcggcgatggttagcaaaactggagaaagacgagactatacgcattgacg

SEQ ID NO: 74344 - DNA, 75 bp, synthetic construct
  source 1..75: mol_type = other DNA
gtgaacggggaactggtggatattcatgggcagcctttacggcaaagcatgggatattctggtggtggttccggg

SEQ ID NO: 74345 - DNA, 75 bp, synthetic construct
  source 1..75: mol_type = other DNA
aaaattccgcaccttttccccggtgatgatctgaaactgcagactgcgcaggattcagacaatggattttcggcg

SEQ ID NO: 74346 - DNA, 75 bp, synthetic construct
  source 1..75: mol_type = other DNA
ccaccgagtttgtctcattcagcgagccgaccaaaagcctgtcagagcaaatcgctgtccgctcgcgctcgattg

SEQ ID NO: 74347 - DNA, 75 bp, synthetic construct
  source 1..75: mol_type = other DNA
gaatgctgatgctggtttcagttcgctggaaaaatcactcctgcgttacgttgccgctggcgtcggcgcgtcata

SEQ ID NO: 74348 - DNA, 75 bp, synthetic construct
  source 1..75: mol_type = other DNA
gttttctgcgggccggggtggaggtcgatcgatatggccgtgccgttgcgtaccatatctgtgaggatgattttc

SEQ ID NO: 74349 - DNA, 75 bp, synthetic construct
  source 1..75: mol_type = other DNA
tttcctgctggctggaagaggcacttcttcgggggattattcgtccgccacgggcacgttttgatttttatcagg

SEQ ID NO: 74350 - DNA, 75 bp, synthetic construct
  source 1..75: mol_type = other DNA
tggcgcgttttgcgtctgcctccggtgtggaggtggacaaggttgcagaggctttcggaaaactgaccaccgacc

SEQ ID NO: 74351 - DNA, 75 bp, synthetic construct
  source 1..75: mol_type = other DNA
cacgcagggtgaaggcgggctgaagcgggtggtgaaaaaggaacacgcggacggcagcgtcacgcagagtcagtt

SEQ ID NO: 74352 - DNA, 75 bp, synthetic construct
  source 1..75: mol_type = other DNA
gcgcagaatcctcaaaaacggctgccgcatcgtccgccagttcggcggcgtcatcggcatcatcggcgtctgctt

SEQ ID NO: 74353 - DNA, 75 bp, synthetic construct
  source 1..75: mol_type = other DNA
tttttttagcactgtgctcttgttgttatatagcaagtgccggtaccgatgatcacgtcggctatgttgttggga

SEQ ID NO: 74354 - DNA, 75 bp, synthetic construct
  source 1..75: mol_type = other DNA
gataaacagctacggccagcagggcgaacctgccaccaccacgttccggattaacgcaccggcagcaccggccag

SEQ ID NO: 74355 - DNA, 75 bp, synthetic construct
  source 1..75: mol_type = other DNA
atgcgttcggctgtaccagccgcggtcaggcccaccgtgccggactgtgggtgataaagacagaactgctggaaa

SEQ ID NO: 74356 - DNA, 75 bp, synthetic construct
  source 1..75: mol_type = other DNA
gataatccgcttattaatattctggagaagttctccacctggtatgacacgaatagcgtgacgctgggcggtgtc

SEQ ID NO: 74357 - DNA, 75 bp, synthetic construct
  source 1..75: mol_type = other DNA
gggtatcgccggaccggggctgctggcccgcgtgctgacctcgaagtatgcagagcacaccccgctgtatcgcca

SEQ ID NO: 74358 - DNA, 75 bp, synthetic construct
  source 1..75: mol_type = other DNA
ccactgagcgcagttttgacgggcgaatgacggtcacgttaaccggccagcacaacgacaccggccagccacttt

SEQ ID NO: 74359 - DNA, 75 bp, synthetic construct
  source 1..75: mol_type = other DNA
gagtgccatcgggatcttcagttacgtacagttaggcgttgaacccaaaatcatgtgggcgggaccaaacgcggt

SEQ ID NO: 74360 - DNA, 75 bp, synthetic construct
  source 1..75: mol_type = other DNA
atgctgaagagtggggttattttaaaattatccatctggaaggatcgccattaacccgcatcgacgggatgatga

SEQ ID NO: 74361 - DNA, 75 bp, synthetic construct
  source 1..75: mol_type = other DNA
ctggccagagtctacccgaccctccgtcttcccgatttacgcggtgagtttatccgtggatgggacgacgggcgc

SEQ ID NO: 74362 - DNA, 75 bp, synthetic construct
  source 1..75: mol_type = other DNA
atgcttagcccatcccaatcccttcaataccagaaagaaagcgtcgagcgggctttaacgtgcgctaactgcggt

SEQ ID NO: 74363 - DNA, 75 bp, synthetic construct
  source 1..75: mol_type = other DNA
aggctctgcactacctgttggtgtgcctgttccatggccgtcagccacaccgccaacagggtggctgaaatgtaa

SEQ ID NO: 74364 - DNA, 75 bp, synthetic construct
  source 1..75: mol_type = other DNA
tacccaaaactggcaaaggcttacccaaagttaaaattaccggatttgcgcggtgagtttattcgcgggtgggat

SEQ ID NO: 74365 - DNA, 75 bp, synthetic construct
  source 1..75: mol_type = other DNA
tgccggaggagtatggcccagccttcccagcaatcgtcgattgttataccagtccacccacgttagtgtggccag

SEQ ID NO: 74366 - DNA, 75 bp, synthetic construct
  source 1..75: mol_type = other DNA
ttaactatggcgttgatgtcgcacagccagctccgcagccagcaaagcctgctcgtatcagtctggaaaagaaac

SEQ ID NO: 74367 - DNA, 75 bp, synthetic construct
  source 1..75: mol_type = other DNA
ccagataggggccgacgcactactgattctcactgatgccgacgcggtttacctcgattggggcaaaccgaccca

SEQ ID NO: 74368 - DNA, 75 bp, synthetic construct
  source 1..75: mol_type = other DNA
acaccccatacggggtatttccggcatcagtgcgaatacatcgtctggggcagtaaaggccatttaggtaaatcg

SEQ ID NO: 74369 - DNA, 75 bp, synthetic construct
  source 1..75: mol_type = other DNA
ccttacagttcgggtgcgacacacaaggccggacgcaccaaccagggcagccatgcaaaatatctgaacggcgag

SEQ ID NO: 74370 - DNA, 75 bp, synthetic construct
  source 1..75: mol_type = other DNA
ccttcgggaccgttcgacggctgcatgacgttcccggttatcccgtcaaagaaaatgcacccgaccggaaaacca

SEQ ID NO: 74371 - DNA, 75 bp, synthetic construct
  source 1..75: mol_type = other DNA
gatgtttgttggtcagggcgatcagatattcatgaatgaagtgttcctgaaatatctgacggctcccaccattac

SEQ ID NO: 74372 - DNA, 75 bp, synthetic construct
  source 1..75: mol_type = other DNA
gttcacgggaatggcccacaagttggacttctggcacttcaaaatagcgcctatgcccatgtcgctccctatcca

SEQ ID NO: 74373 - DNA, 75 bp, synthetic construct
  source 1..75: mol_type = other DNA
tcgctctcggcggtaatgccctgcttaaacgaggcgaaccactcgaagcagaaatccaacgtaaaaatatcgatc

SEQ ID NO: 74374 - DNA, 75 bp, synthetic construct
  source 1..75: mol_type = other DNA
cggaaggtcaacattaccacgatggccgtcggggatggcggtggtaaattgcctgtcccggatgccggacagacc

SEQ ID NO: 74375 - DNA, 75 bp, synthetic construct
  source 1..75: mol_type = other DNA
ctcctgaaacgggcggattctggatccgggaaattggtgtatttgatgagcacggcgatttgatcgcggtgggca

SEQ ID NO: 74376 - DNA, 75 bp, synthetic construct
  source 1..75: mol_type = other DNA
tcgaaagagtggaaggacgctaacgataaatggaatgccatgtggggcgtcaaaattgagcagaccaaagacggc

SEQ ID NO: 74377 - DNA, 75 bp, synthetic construct
  source 1..75: mol_type = other DNA
acgaacgcagcctcgagcgccagcagcgcagcttcctcggcaacggcggcagcaaattctgcgaaggcggcaaaa

SEQ ID NO: 74378 - DNA, 75 bp, synthetic construct
  source 1..75: mol_type = other DNA
cggtggcgaaccgttttttggtgctgatgggcgcgttgtttctgagcatctggggcacctggaccatcattaata

SEQ ID NO: 74379 - DNA, 75 bp, synthetic construct
  source 1..75: mol_type = other DNA
ctgaaatgcaacggtgcagctttttctgccgaagagtatccggaactggcaaaagtttatccgacaaataaattg

SEQ ID NO: 74380 - DNA, 75 bp, synthetic construct
  source 1..75: mol_type = other DNA
acgattaagggcatgctggaggcgacccaggtcagaggggatttcgttaaagctgtatcaaaagccttcccgaaa

SEQ ID NO: 74381 - DNA, 75 bp, synthetic construct
  source 1..75: mol_type = other DNA
aaagctcctttagcaagtcctgcattaacgggaatacctactgcgcctaccgctgcacagggtacgaataacacg

SEQ ID NO: 74382 - DNA, 75 bp, synthetic construct
  source 1..75: mol_type = other DNA
ccaacatctccggcgtcacggtggtgttccgggccggtgagcaggagcagacaccgccggagggatttgaatcct

SEQ ID NO: 74383 - DNA, 75 bp, synthetic construct
  source 1..75: mol_type = other DNA
actccgccggaggggtttgaatcctccggttccgagacggtgctcggtacagaagtgaaatatgacacgccgatc

SEQ ID NO: 74384 - DNA, 75 bp, synthetic construct
  source 1..75: mol_type = other DNA
tcctgcagaccatgaacgcacaggaatatgaagatatccgggctgccggaagtgatgaacgccgtgaactgactc

SEQ ID NO: 74385 - DNA, 75 bp, synthetic construct
  source 1..75: mol_type = other DNA
gccgccagcagtgcagcacctgactgccgaagtcaccgcagacagcggggagtatcaggtactggcccgctggga

SEQ ID NO: 74386 - DNA, 75 bp, synthetic construct
  source 1..75: mol_type = other DNA
ggtgcccataaccacactatcggcattggtgctcatgcccattctgtcattattggtccccacggacacaccatc

SEQ ID NO: 74387 - DNA, 75 bp, synthetic construct
  source 1..75: mol_type = other DNA
aggtgctgctggcggcggacaggattgcgatgattaatcctgcgaatggcaacacaaagccgatgtttgttgggc

SEQ ID NO: 74388 - DNA, 75 bp, synthetic construct
  source 1..75: mol_type = other DNA
ggcttcccgacgctgaaagacaaaattcccgctgaacaatggcaggacaagcgcgtcgtctgggatgcacgggta

SEQ ID NO: 74389 - DNA, 75 bp, synthetic construct
  source 1..75: mol_type = other DNA
aactctcggcttattcctggtgaagtgttgtccgcaatccgggaggttgccaagattcgtgccgatttcgatgat

SEQ ID NO: 74390 - DNA, 75 bp, synthetic construct
  source 1..75: mol_type = other DNA
gcatacccatagtattagcgggaccgcaaatagtgccggtgcgcaccaacacaagagttccggtgcatttggtgg

SEQ ID NO: 74391 - DNA, 75 bp, synthetic construct
  source 1..75: mol_type = other DNA
ccgaaaactgggcggatgttctggagaatggcacaaatctcgtgctgactggcagttgtggcaccggtaaaaatc

SEQ ID NO: 74392 - DNA, 75 bp, synthetic construct
  source 1..75: mol_type = other DNA
gttgataccggttcggtgctggtcgaaagcgccggggaaacaatgaacaatatcgtcaatgctgtcactcgcgtg

SEQ ID NO: 74393 - DNA, 75 bp, synthetic construct
  source 1..75: mol_type = other DNA
tgcgcaggttggtgaaaaagtcaaagactggaaagtggggcaacgcgtcgtgtcggataacagcggtcacgtctg

SEQ ID NO: 74394 - DNA, 75 bp, synthetic construct
  source 1..75: mol_type = other DNA
gatatttattcgtcatgccgcctgatagtacggaaaaacggtgctgaaatttataaccgtaccgcgctggataat

SEQ ID NO: 74395 - DNA, 75 bp, synthetic construct
  source 1..75: mol_type = other DNA
atgattaaccgtatccgcgtagtcacgctgttggtaatggtgctgggggtattcgcactgttacagcttatttcc

SEQ ID NO: 74396 - DNA, 75 bp, synthetic construct
  source 1..75: mol_type = other DNA
accggcagttctcaaatccgccaacaccctctggttgctgcgttaccgccctgacgaaattccgtttctgcggga

SEQ ID NO: 74397 - DNA, 75 bp, synthetic construct
  source 1..75: mol_type = other DNA
gtgctgatgccgggtaaagtgcatgccgatgacacgccggtaaatgtactggagccgggtcagggtaaaacccgt

SEQ ID NO: 74398 - DNA, 75 bp, synthetic construct
  source 1..75: mol_type = other DNA
tggacgacgacatacctggcaccgtagagatgtagaagcatggttagataaacaacgagaacaggccaatcccca

SEQ ID NO: 74399 - DNA, 75 bp, synthetic construct
  source 1..75: mol_type = other DNA
tacgccggagactctgcgtgtctgggttcgccagtatgagcggaataccggaggggtgagggtgggcttaccacc

SEQ ID NO: 74400 - DNA, 75 bp, synthetic construct
  source 1..75: mol_type = other DNA
gcgaataaagcgggttataccaagtggtattttcagcggctgttcaaaaaagtaacaggggtcacactggctagc

SEQ ID NO: 74401 - DNA, 75 bp, synthetic construct
  source 1..75: mol_type = other DNA
cacctggccactgtttaactgcatgaacggcaacagcgcggacatgagcgctgaggctgccgggatcaccgcctg

SEQ ID NO: 74402 - DNA, 75 bp, synthetic construct
  source 1..75: mol_type = other DNA
aggatttatgacgatcagccttttgacaggcaaattgttattccggcggtggcattctgcggcgctaaacatgag

SEQ ID NO: 74403 - DNA, 75 bp, synthetic construct
  source 1..75: mol_type = other DNA
atcagtgtcatcaacacctggcctgccaaccgcgtgaaagagttgttgccctggaacgtcactctatctgtaaac

SEQ ID NO: 74404 - DNA, 75 bp, synthetic construct
  source 1..75: mol_type = other DNA
catcgatcaagtcgcattggcggtttcggaaatggatcgcgtcacgcaacagaacgcatcgctggtgcaggaatc

SEQ ID NO: 74405 - DNA, 75 bp, synthetic construct
  source 1..75: mol_type = other DNA
gggatcgcatacggtccggaaatggcagcgaaagcacagtctgacgcaaaagcagccatcgacagcattgtttct

SEQ ID NO: 74406 - DNA, 75 bp, synthetic construct
  source 1..75: mol_type = other DNA
aaagcagccgaggagatcgggcaactcgtcaccgtcgcgcgtgaagaactccagcggcgcaaggccaaagaacag

SEQ ID NO: 74407 - DNA, 75 bp, synthetic construct
  source 1..75: mol_type = other DNA
tacccggaactggcaaaggcttacccgaccaataaattgcctgatttacgtggtgagtttattcgtggctgggat

SEQ ID NO: 74408 - DNA, 75 bp, synthetic construct
  source 1..75: mol_type = other DNA
aacaatcccatagtatctttttcagatacaaccttcatcaatggtgaacagatgttgagttatgactcgcattca

SEQ ID NO: 74409 - DNA, 75 bp, synthetic construct
  source 1..75: mol_type = other DNA
cgacaatatcaaaacggtagagggggtttggtgtttcgaagtgacggaaggcaagacgcgcaatgcggcccgcct

SEQ ID NO: 74410 - DNA, 75 bp, synthetic construct
  source 1..75: mol_type = other DNA
gaatggttacatcctcctggttcaggacgcagagccaaacttcgatgtaaatggcaactctccggtaactccgga

SEQ ID NO: 74411 - DNA, 75 bp, synthetic construct
  source 1..75: mol_type = other DNA
gacgcaatgaccgcgcactattaccgcctgcgggactatgccctgcagcattctgaagcccacgccattttgcgt

SEQ ID NO: 74412 - DNA, 75 bp, synthetic construct
  source 1..75: mol_type = other DNA
aagatgttcacttctcggcggcaaatgttgttccaacagcaaatgaaaatcgtccacgtaacatcgcctttaatt

SEQ ID NO: 74413 - DNA, 75 bp, synthetic construct
  source 1..75: mol_type = other DNA
atttaatgtctggcttgagcctgaagtccgctttattggtgcatcaggtgaagtgagcgcagtggagacaatttc

SEQ ID NO: 74414 - DNA, 75 bp, synthetic construct
  source 1..75: mol_type = other DNA
gcaagcggacgttattcctgtttatgctgccgcgcctgcgtcggttgtgccggatgatgcatcagggtcgcttgc

SEQ ID NO: 74415 - DNA, 75 bp, synthetic construct
  source 1..75: mol_type = other DNA
atgggcaaaggtggcggcaaggcgcacacgccggtagaggcaaaggacaatcttaagtccacgcagatgatgagc

SEQ ID NO: 74416 - DNA, 75 bp, synthetic construct
  source 1..75: mol_type = other DNA
tgtcattggaattacttgatgcagccagaaatgctttggaagtaataccagattttccagaaagagatgatcata

SEQ ID NO: 74417 - DNA, 75 bp, synthetic construct
  source 1..75: mol_type = other DNA
gggttctgggaaaactgtccgcgaaccagattgaaggcgatctcgttaaaacagtgggcaaagctttcccccggg

SEQ ID NO: 74418 - DNA, 75 bp, synthetic construct
  source 1..75: mol_type = other DNA
aatccaaaaaacttgaggcacgagtaccccatgcaatagctgacgctgtagaaaatttaaaggaagaaggcgaaa

SEQ ID NO: 74419 - DNA, 75 bp, synthetic construct
  source 1..75: mol_type = other DNA
gcgcggggattatgagcacaacaagcggtagtggccagactcgtaatgcagggaagacatcatcagatggtgctc

SEQ ID NO: 74420 - DNA, 75 bp, synthetic construct
  source 1..75: mol_type = other DNA
tttatgcttcgcctgaccgtggtcgcggatgacggcagtgagcggctggtcagcacggcccggacgacggaaacc

SEQ ID NO: 74421 - DNA, 75 bp, synthetic construct
  source 1..75: mol_type = other DNA
tcacaactcgaaacggcagtgaaagatctgggcgcagtggtatccttcaaggggtattacggcgatctggccatt

SEQ ID NO: 74422 - DNA, 75 bp, synthetic construct
  source 1..75: mol_type = other DNA
ctgccagtggccacacggcgattatcatcacagcgaaaccgtcattcaccgttatggtaccggcgcgatggtgtt

SEQ ID NO: 74423 - DNA, 75 bp, synthetic construct
  source 1..75: mol_type = other DNA
catgcaatgaatggctcgcaggaacgggaattatcgctggctgaattatcctggtgggcggtccgcaatcaggtg

SEQ ID NO: 74424 - DNA, 75 bp, synthetic construct
  source 1..75: mol_type = other DNA
tgatcggcacctgccgtctgaacggtatcgatccggaagcgtatctgcgccatattctgagcatactgccggaat

SEQ ID NO: 74425 - DNA, 75 bp, synthetic construct
  source 1..75: mol_type = other DNA
tggttacatcctcctggttcaggacgcagagccaaacttcgatgtaaatggcaactctccgggaactccggatag

SEQ ID NO: 74426 - DNA, 75 bp, synthetic construct
  source 1..75: mol_type = other DNA
gggaatacggcagcagagggcattcgttgctatggtgccattcaggatgcgcaggcgttgtccgaaggtgtggtg

SEQ ID NO: 74427 - DNA, 75 bp, synthetic construct
  source 1..75: mol_type = other DNA
acctttcggcgcggagatgcaacgattaagccgggtaatggtattgagcaagcaactcactggatgccgctaccg

SEQ ID NO: 74428 - DNA, 75 bp, synthetic construct
  source 1..75: mol_type = other DNA
agtgatgaattatattcaatcagtgacagggaaaaatacttatcattactcattgaaagatttagtcttcttaaa

SEQ ID NO: 74429 - DNA, 75 bp, synthetic construct
  source 1..75: mol_type = other DNA
gctggttacttcgtgaaaagggctgtcagtggcctcattccgactggcacagcgagaacatgaccacaatgcggc

SEQ ID NO: 74430 - DNA, 75 bp, synthetic construct
  source 1..75: mol_type = other DNA
aatttgccggttagtcagaaaaaacaggacattctcgaagcgattcgtgatcaccaggtggtgatcgtcgccggg

SEQ ID NO: 74431 - DNA, 75 bp, synthetic construct
  source 1..75: mol_type = other DNA
gagtgcttatcagaccatccaggaaaatatgctgaaaggcgggatttccggtcgcagcgctaaaggaaaacgtat

SEQ ID NO: 74432 - DNA, 75 bp, synthetic construct
  source 1..75: mol_type = other DNA
gtgctggcactgcgacaaccagctgcgtgaccagacatccgaatcactcgggcagcttgctcaacaaaatctgac

SEQ ID NO: 74433 - DNA, 75 bp, synthetic construct
  source 1..75: mol_type = other DNA
ggcagaaatgattgcgaaatatgaagcggataccggcaaaacgttgtacccggcacaggcagaacgtctgctgat

SEQ ID NO: 74434 - DNA, 75 bp, synthetic construct
  source 1..75: mol_type = other DNA
aataacattgagcaggccgacggtaaaaaatggtctgagcaggaccgtgatacgtttgatccgacgcatgatatt

SEQ ID NO: 74435 - DNA, 75 bp, synthetic construct
  source 1..75: mol_type = other DNA
tcgattttctaaaacgctctcagcaattcgttattcccatttatcagcgtacttattcatggtcagaggaacagt

SEQ ID NO: 74436 - DNA, 75 bp, synthetic construct
  source 1..75: mol_type = other DNA
acgatatgaaaaagctggggtatgacacaaaacaccttaaacgatggttagccaaactggaaaaagacgacgtga

SEQ ID NO: 74437 - DNA, 75 bp, synthetic construct
  source 1..75: mol_type = other DNA
cggtcttgtgaatattgccattatggacggtaccgtctggcgtcttctgaatggttttaagctgttccgcgaaaa

SEQ ID NO: 74438 - DNA, 75 bp, synthetic construct
  source 1..75: mol_type = other DNA
atgacgtataccaaaagcaaaacgtttaaaaccgaaaatggtgcccgtcgctggctggaaagaaactcaggtgag

SEQ ID NO: 74439 - DNA, 75 bp, synthetic construct
  source 1..75: mol_type = other DNA
gagccatgatggatgtggaacaaggagcactgactccatttggtcgtgaaacgcttgctgaacttcacaacagct

SEQ ID NO: 74440 - DNA, 75 bp, synthetic construct
  source 1..75: mol_type = other DNA
gaaaccatgaaaaatggcagcttcagtggattaagtgggggtaatgtggcctgtaccctctggttgcataggtat

SEQ ID NO: 74441 - DNA, 75 bp, synthetic construct
  source 1..75: mol_type = other DNA
ggaacgctatctgcatcatgtacttgatgtcatcgccgactggcctgtgaaccgggtgggtgctctgctcccgtg

SEQ ID NO: 74442 - DNA, 75 bp, synthetic construct
  source 1..75: mol_type = other DNA
gcgggacaacggccagcgtcccgtggatttgcggtgataccacgtactactggaaggaaaggtatgcagcgccgt

SEQ ID NO: 74443 - DNA, 75 bp, synthetic construct
  source 1..75: mol_type = other DNA
attgaaccattattgttgaaggccatttctgccggggaatcttcattgaagccgggcgcaattaacataaataag

SEQ ID NO: 74444 - DNA, 75 bp, synthetic construct
  source 1..75: mol_type = other DNA
gcagcctatgtctccccggttgttgaaggaaaagtgctgcgtcatcgtggtggtgaaacccgcgtgttacgtccg

SEQ ID NO: 74445 - DNA, 75 bp, synthetic construct
  source 1..75: mol_type = other DNA
attcatacagcaccgggaatgccgcacaggcaatgctggagaaactgctgcaaatttatgatgttaaaacgctgg

SEQ ID NO: 74446 - DNA, 75 bp, synthetic construct
  source 1..75: mol_type = other DNA
atgtctaacaaaatgactggtttagtgaaatggtttaaccctgaaaaaggttttggtttcatcacgccgaaagat

SEQ ID NO: 74447 - DNA, 75 bp, synthetic construct
  source 1..75: mol_type = other DNA
gtgaaagcagtgattatttcaaaacaacaattaaaactactcaactttcgggagagctactgaagaaattgccat

SEQ ID NO: 74448 - DNA, 75 bp, synthetic construct
  source 1..75: mol_type = other DNA
acaggaagagcacgcgattgtccaggtggaagaaatgcaggcggtaaatgctgtgttgtatggcaaatacaccat

SEQ ID NO: 74449 - DNA, 75 bp, synthetic construct
  source 1..75: mol_type = other DNA
atcgcccttctccgcgacgatatgaaaaagctggggtatgagatgaagcacttccggcgctggctgtacaagctg

SEQ ID NO: 74450 - DNA, 75 bp, synthetic construct
  source 1..75: mol_type = other DNA
tgatcggcacctgccgtctgaacggtatcgatccggaagcgtatctgcgccatatgctgagcttactgccggaat

SEQ ID NO: 74451 - DNA, 75 bp, synthetic construct
  source 1..75: mol_type = other DNA
gggagacgtagtggagaaagttattgaaggggcttacgaggtggtgggcgtgtttgaccggatagaggagaagcg

SEQ ID NO: 74452 - DNA, 75 bp, synthetic construct
  source 1..75: mol_type = other DNA
agggacaacggaaaccaaacgaaaacccaaaggcggtgtgagaaaagcgaaatatatctttgaggatgagaacgg

SEQ ID NO: 74453 - DNA, 75 bp, synthetic construct
  source 1..75: mol_type = other DNA
gtgaaggacggcaagattgtttcttcaacaggcgcgctggcgaaaaccataccgaactccttacagtctacggcg

SEQ ID NO: 74454 - DNA, 75 bp, synthetic construct
  source 1..75: mol_type = other DNA
tataagtcgttccttgccatttcgtgggcgtgtcatgttgccactggaatgaaatggggaggccgcagggtgtgt

SEQ ID NO: 74455 - DNA, 75 bp, synthetic construct
  source 1..75: mol_type = other DNA
acactggatgtggcttacgaaggttccggctctggcgactggcgcacgagtggaattactgctggcattggcctg

SEQ ID NO: 74456 - DNA, 75 bp, synthetic construct
  source 1..75: mol_type = other DNA
tggtcatacagcgaaagaaaaccgcctgtcacaaagtaaattcagatgccaggtatgtggatatacagcgaacgc

SEQ ID NO: 74457 - DNA, 75 bp, synthetic construct
  source 1..75: mol_type = other DNA
ggaagatatagaggattttggggaaacacatctcgattttttgaagcaatatggtgattttgaaaatggtattcc

SEQ ID NO: 74458 - DNA, 75 bp, synthetic construct
  source 1..75: mol_type = other DNA
tacaaaaacagggaggtgattatttattcgcggtaaaaggaaaccaggggcggctaaataaagcctttgaggaaa

SEQ ID NO: 74459 - DNA, 75 bp, synthetic construct
  source 1..75: mol_type = other DNA
gtgcagaaagttgggaagatatagaggattttggggaaacacatctcgatttcttgaagcaatatggtgattttg

SEQ ID NO: 74460 - DNA, 75 bp, synthetic construct
  source 1..75: mol_type = other DNA
atgacaaccatttttatcaaacccgcgccgggatgcctgattcgtgatcccgacacaatgcgcccgctggcacag

SEQ ID NO: 74461 - DNA, 75 bp, synthetic construct
  source 1..75: mol_type = other DNA
actctgctggaaaaccttaaacgggaaggctttgaaccgttcttcgcctgtcagacccgcgtcagagaccagagc

SEQ ID NO: 74462 - DNA, 75 bp, synthetic construct
  source 1..75: mol_type = other DNA
tttaattctgttaatgaactataaccatccgtataccttcaaagcgcaaaaagcggttatttctattcctgttgt

SEQ ID NO: 74463 - DNA, 75 bp, synthetic construct
  source 1..75: mol_type = other DNA
gttgatccggagtctccggaatccttcatgaaacgacctaaacgtcgccgctgggtaaatgagaaatacacacgc

SEQ ID NO: 74464 - DNA, 75 bp, synthetic construct
  source 1..75: mol_type = other DNA
atgtaaaccagatacgccgtgaccgtccgctgacacatgaagaactgatacgccatgtacccagtatttttgggg

SEQ ID NO: 74465 - DNA, 75 bp, synthetic construct
  source 1..75: mol_type = other DNA
gccagcgatggcactgggggattatttactgaattattgcttttagggttcaataatgggcctcaagctcttggc

SEQ ID NO: 74466 - DNA, 75 bp, synthetic construct
  source 1..75: mol_type = other DNA
ggggcttacgaggtggtggaggtttttgaccggattgaggaaaagcgtgatgccatgcagtcgctgattctgccg

SEQ ID NO: 74467 - DNA, 75 bp, synthetic construct
  source 1..75: mol_type = other DNA
gtacaagcagctctggagtggcggtcaggtgcttgctgttccgccagcgtacacaagccagcgttgcgcgtgctg

SEQ ID NO: 74468 - DNA, 75 bp, synthetic construct
  source 1..75: mol_type = other DNA
catgagcgcagcttgcaggcggatttggcgttggcgctgttactcgatgtgcaacaaggtctgcgtgatgacctt

SEQ ID NO: 74469 - DNA, 75 bp, synthetic construct
  source 1..75: mol_type = other DNA
cacccgcagcgtggctgcgatgggggatcggcagtacaactatatcgtcatgccgtataaagatgcagccaatct

SEQ ID NO: 74470 - DNA, 75 bp, synthetic construct
  source 1..75: mol_type = other DNA
ttaaatgaagcattgccaagaaaggtagaaggcccaaaaagaaagaggaaattagtaaaagaaagagaaatcatt

SEQ ID NO: 74471 - DNA, 75 bp, synthetic construct
  source 1..75: mol_type = other DNA
agagaagaaatccgtcttcatattgtttgcgatgtccctgatgaacttattgatttcacgtttgaatggaaagga

SEQ ID NO: 74472 - DNA, 75 bp, synthetic construct
  source 1..75: mol_type = other DNA
cgctggggaaatcgtttatctcccaggcggaagaatccattgaagaaacccagggcgtgcgcatgctggaacagc

SEQ ID NO: 74473 - DNA, 75 bp, synthetic construct
  source 1..75: mol_type = other DNA
gtagcaacgcgcaggatcgctggcatcttggcgtgatggcaggctacgccaatcagcacagtaatactcagagta

SEQ ID NO: 74474 - DNA, 75 bp, synthetic construct
  source 1..75: mol_type = other DNA
ctggcgaacggtgccaggttattgttcctccggcctgtgagcgcgatacggtgtctgtcaccatccgtaagccct

SEQ ID NO: 74475 - DNA, 75 bp, synthetic construct
  source 1..75: mol_type = other DNA
tggttctcttctgcgctgtggaccttctctacccttggctggccggaaaataccgacgccctgcgtcagttccac

SEQ ID NO: 74476 - DNA, 75 bp, synthetic construct
  source 1..75: mol_type = other DNA
acggtcaaaaaagcggaaatcaaggtggaactgctgccgaaatacgccgcctgggcagagggtgtcctggctggc

SEQ ID NO: 74477 - DNA, 75 bp, synthetic construct
  source 1..75: mol_type = other DNA
tcagggcggcatcgccgtcagaccttgcggagcgactgacacaaaaactgaaggaggggtggcagccatttggca

SEQ ID NO: 74478 - DNA, 75 bp, synthetic construct
  source 1..75: mol_type = other DNA
gtggatattgaagagaaaacagttaatgacttctttaaaaacaatacactctcacctttttctgtaagaagattt

SEQ ID NO: 74479 - DNA, 75 bp, synthetic construct
  source 1..75: mol_type = other DNA
acgttcaacgcgacgctgggcggcgataattcgcccaccgataagatgaacgtgaaaggcgatacccaagggaac

SEQ ID NO: 74480 - DNA, 75 bp, synthetic construct
  source 1..75: mol_type = other DNA
atgaaactggcaccgaatgtaaaactgttaccgaaagataaacacaccgaagcggttatttttgcgggtgataat

SEQ ID NO: 74481 - DNA, 75 bp, synthetic construct
  source 1..75: mol_type = other DNA
gtatacaggtaagaattcccaaaataaaatcaaaatgtttcttatggggaggcgggaaaacagcaattatatcaa

SEQ ID NO: 74482 - DNA, 75 bp, synthetic construct
  source 1..75: mol_type = other DNA
cgtcttggatttaccttaacggacgttcccgacagccatctgtgctgcggttcagcgggaacatatgcgttaacg

SEQ ID NO: 74483 - DNA, 75 bp, synthetic construct
  source 1..75: mol_type = other DNA
tcccgtcagatgttcgcgttcctctgacgtatatcgaatttgataacagtaatgccgtcagcggaacaccggcac

SEQ ID NO: 74484 - DNA, 75 bp, synthetic construct
  source 1..75: mol_type = other DNA
gacagagatatcagcggtatttctggctctgctgcggatcgcagcagtaaaaatcattctcaaatcagtgcgctg

SEQ ID NO: 74485 - DNA, 75 bp, synthetic construct
  source 1..75: mol_type = other DNA
gggagagcagaccgccaccagcatactgaagcagcgcacaaaaaatcttgcgccgctgcctcacgcccaccagca

SEQ ID NO: 74486 - DNA, 75 bp, synthetic construct
  source 1..75: mol_type = other DNA
tttctggctgaaattcgtgcggaagcacgcaacgaggggattaactataccgccagccgtcttgctgctgcgttc

SEQ ID NO: 74487 - DNA, 75 bp, synthetic construct
  source 1..75: mol_type = other DNA
ctggtccggtaacgtgctgagtccggccaaactccgcgacaagtggacccagctcgaaatcaaccggaacaagca

SEQ ID NO: 74488 - DNA, 75 bp, synthetic construct
  source 1..75: mol_type = other DNA
gatgaggggaaaaaatatctgaagtctccggaacggcctgatttttgcgttggtcattataaggtggatgagata

SEQ ID NO: 74489 - DNA, 75 bp, synthetic construct
  source 1..75: mol_type = other DNA
atacggtcggtgcggttctcacgccgctgtctgttccggcctttacgttaattgcgggcgaccgcagcgtctctg

SEQ ID NO: 74490 - DNA, 75 bp, synthetic construct
  source 1..75: mol_type = other DNA
ctccagtggaggcagcgccacaaataccactataaacggtggatcccaatttgtttatggcggtagtgccacaaa

SEQ ID NO: 74491 - DNA, 75 bp, synthetic construct
  source 1..75: mol_type = other DNA
ccacacccgggccattcacagcatcgacacggacattaagctcaatcgcgcattgtgggtgatggcagaaacgct

SEQ ID NO: 74492 - DNA, 75 bp, synthetic construct
  source 1..75: mol_type = other DNA
cgcaatggcacgatgaactggcaggtgccctgaaaaatattgccggaggttcgccactgaccggtcagaccggta

SEQ ID NO: 74493 - DNA, 75 bp, synthetic construct
  source 1..75: mol_type = other DNA
cggataccaccattaacggtggcgggaggcagtggctcgacgacggagccactgctacgaacaccattattaaca

SEQ ID NO: 74494 - DNA, 75 bp, synthetic construct
  source 1..75: mol_type = other DNA
gcatcagcttctggccgcagcattttggcctcattccacagtgggtaaccctggagccccgtgtcttcggctgga

SEQ ID NO: 74495 - DNA, 75 bp, synthetic construct
  source 1..75: mol_type = other DNA
cctgtactggcggcagcctatgacaatcagacaattggaagtggtggaacaagctcatccatgtccctgggtacg

SEQ ID NO: 74496 - DNA, 75 bp, synthetic construct
  source 1..75: mol_type = other DNA
ctcgccgttgacagtaaaacacatgaaatcatctgcgctgacctgtcgctgaacaacgttacggactcagaggcc

SEQ ID NO: 74497 - DNA, 75 bp, synthetic construct
  source 1..75: mol_type = other DNA
tctctttcaccgaaacaccgccaaaaagcattattgaagccgctgcgacaggggcaatgaccgggctgaaaatcg

SEQ ID NO: 74498 - DNA, 75 bp, synthetic construct
  source 1..75: mol_type = other DNA
tggtgctacaggaaataaaatatattcctgtgagcattattccggtggtgcaacatgggatattcgaaagccgta

SEQ ID NO: 74499 - DNA, 75 bp, synthetic construct
  source 1..75: mol_type = other DNA
ggtttccgccgtcaggtccaggacagctttggtaaagaagcccaagaacgtcataccctgactcacgaaatccgc

SEQ ID NO: 74500 - DNA, 75 bp, synthetic construct
  source 1..75: mol_type = other DNA
gccgggaaattattctgggctttaacggatgaaagcaataaagagcaagcggacgttattcctgtttatgccgcc

SEQ ID NO: 74501 - DNA, 75 bp, synthetic construct
  source 1..75: mol_type = other DNA
tatcgacgagttacgtgataaggttgacctcaccgtggcgctggttcatgaaggcgtaccggcgcgtcagtccag

SEQ ID NO: 74502 - DNA, 75 bp, synthetic construct
  source 1..75: mol_type = other DNA
gtatttacagtaaacggaggaaaagtggatgcaggagtttgggaatattatctgagtaaagataatactaactgg

SEQ ID NO: 74503 - DNA, 75 bp, synthetic construct
  source 1..75: mol_type = other DNA
ggatggaatcctccggaggctacccgtaaaccgatccctaaagtaaccagagccagactcaccctggaagactgg

SEQ ID NO: 74504 - DNA, 75 bp, synthetic construct
  source 1..75: mol_type = other DNA
ttgcaggagagaaccaaaggcgagctgaaattaaaattgtttccggatagcaccctcggtaacgcgcaggcgatg

SEQ ID NO: 74505 - DNA, 75 bp, synthetic construct
  source 1..75: mol_type = other DNA
cttcgcagggcgttgtatatgcccgcaatggtagccaccagtaagactgagtggggacgggcgttccgcgaccgt

SEQ ID NO: 74506 - DNA, 75 bp, synthetic construct
  source 1..75: mol_type = other DNA
ggtcgcttttcttatcaggtaaacctgatgccgtttgggtgtagcaacccactaacccagatgttcaaccagcta

SEQ ID NO: 74507 - DNA, 75 bp, synthetic construct
  source 1..75: mol_type = other DNA
aaaaaatgcgccgggagaagcggaagattatcccgctatgtccgtttgcgaaacacgagttcgataaaacgcgcg

SEQ ID NO: 74508 - DNA, 75 bp, synthetic construct
  source 1..75: mol_type = other DNA
tttacgcacctattcgttccggtacggacattacgttcctgtctggcgttttgcgctacctgatcgaaaacaaca

SEQ ID NO: 74509 - DNA, 75 bp, synthetic construct
  source 1..75: mol_type = other DNA
agattcatgagttgcgttctaaatgtgttgatatacagaatgactactttatgcaggtgttctttatctcaatgc

SEQ ID NO: 74510 - DNA, 75 bp, synthetic construct
  source 1..75: mol_type = other DNA
gcgtaaatcaaatccgtcgcgatcgcccattaacgcatgacgaattgatgcagtatgtccccagcgtattcgggg

SEQ ID NO: 74511 - DNA, 75 bp, synthetic construct
  source 1..75: mol_type = other DNA
atgcagatcttctttatgtcaatgcttgcacctgagtttgtcagtatattttttggattaaagtctgctaccgta

SEQ ID NO: 74512 - DNA, 75 bp, synthetic construct
  source 1..75: mol_type = other DNA
ccggaaaactggtcctgaagaacagccttgccggcggcaataccaccgtaaccggaacggatgtctcactttcag

SEQ ID NO: 74513 - DNA, 75 bp, synthetic construct
  source 1..75: mol_type = other DNA
catcttccccgtgaaatacaccgtctggagcctgaagaaagttgttgcccggagtgtggcagtgagctggattat

SEQ ID NO: 74514 - DNA, 75 bp, synthetic construct
  source 1..75: mol_type = other DNA
ctggccgtgtttgctgaacgtcgtaaggacagttttggcccgtatgtccggctgatgagcgtcactctgaactga

SEQ ID NO: 74515 - DNA, 75 bp, synthetic construct
  source 1..75: mol_type = other DNA
gccgggaggattacggtaaggacctgtggagtgcttatcagaccattcaggagaatatgctgaaaggcggaattt

SEQ ID NO: 74516 - DNA, 75 bp, synthetic construct
  source 1..75: mol_type = other DNA
gaatatgcagaccgtaaccgtgctgttgcgaatcagcggctgaccgggagtaatgcgcggtggaaatggacaaca

SEQ ID NO: 74517 - DNA, 75 bp, synthetic construct
  source 1..75: mol_type = other DNA
tttattgattccattttttctctgatgaacgttccgctacgctgcccggattacagctgtgtcagcaggcgggca

SEQ ID NO: 74518 - DNA, 75 bp, synthetic construct
  source 1..75: mol_type = other DNA
acagctgttcggaggttcactgacactgcgtgactacgatggtcaggttgcagaggctatggccctggtacgagc

SEQ ID NO: 74519 - DNA, 75 bp, synthetic construct
  source 1..75: mol_type = other DNA
cctgctggatgtaccaattgcatgactcctgaaagcgtatgtaaatttggagacggctatctttgcactcagtgt

SEQ ID NO: 74520 - DNA, 75 bp, synthetic construct
  source 1..75: mol_type = other DNA
gtaaagaagttcaggccatgatgcaggcggtgtgttacggggcaacgggagccagagattattgtcttattctgt

SEQ ID NO: 74521 - DNA, 75 bp, synthetic construct
  source 1..75: mol_type = other DNA
agcattaccggtgccaccggacgtgatgcagaccttcttcccgaatatcccggtggccacaccgaccaccttcct

SEQ ID NO: 74522 - DNA, 75 bp, synthetic construct
  source 1..75: mol_type = other DNA
cgccggggatacaccaaacacatgctgcgtctgcgccgtgacggggagataaacggacaacatgtccctgaaatc

SEQ ID NO: 74523 - DNA, 75 bp, synthetic construct
  source 1..75: mol_type = other DNA
gactatgttatcaaaccgtttgatctcgatgagttgaatttaatcgttcagcgcgctttacaactccagtcaatg

SEQ ID NO: 74524 - DNA, 75 bp, synthetic construct
  source 1..75: mol_type = other DNA
gttcagtggtgtactgcaggcggatgcatacgccgggttcaacgagctgtaccgggatggccggataacggaagc

SEQ ID NO: 74525 - DNA, 75 bp, synthetic construct
  source 1..75: mol_type = other DNA
attgaccgtatccggcgtgaacgtctgcccggagaactggcatacgcgctgaaacaacaacttaggattgcgata

SEQ ID NO: 74526 - DNA, 75 bp, synthetic construct
  source 1..75: mol_type = other DNA
gcagcggcttgctgaacgtcagcgaaaaacgaaaccgctgttgaaatccctggaaagctggttgcgtgaaaagat

SEQ ID NO: 74527 - DNA, 75 bp, synthetic construct
  source 1..75: mol_type = other DNA
atattacaggaatgagctttggctttcgcgcattatgcgaggagtggaatatcgcgcaaaaaccgtatctgcgta

SEQ ID NO: 74528 - DNA, 75 bp, synthetic construct
  source 1..75: mol_type = other DNA
gctgtttggcctgctgacgtatctgacaaacctttatttcaagattaaagaagataagcgcaaggctgcgagagg

SEQ ID NO: 74529 - DNA, 75 bp, synthetic construct
  source 1..75: mol_type = other DNA
tggcccaggtgtcacctcattaaaaccaggcgatcgtgccagcgtggcgtggttctacgaaggatgcggtcattg

SEQ ID NO: 74530 - DNA, 75 bp, synthetic construct
  source 1..75: mol_type = other DNA
atgaaaaacaccgattttgaaatccgtacatctgaactgaccgccagcgataaaaaactggtgggttatgccgtt

SEQ ID NO: 74531 - DNA, 75 bp, synthetic construct
  source 1..75: mol_type = other DNA
atggattattcacagttaagtgattttgaaattaacgtggcggtattcgaagccattcataacggatcaccggat

SEQ ID NO: 74532 - DNA, 75 bp, synthetic construct
  source 1..75: mol_type = other DNA
gcggcctatgtctccccggttgttgaaggaaaagtgctgcgtcatcgtggtggtgaaacccgcgtgttgcgtccg

SEQ ID NO: 74533 - DNA, 75 bp, synthetic construct
  source 1..75: mol_type = other DNA
ccctcagccacgcgttgtgtttcctgtcagtcagtctttgaagcaaaaaacaaacattaccggagaacggcatga

SEQ ID NO: 74534 - DNA, 75 bp, synthetic construct
  source 1..75: mol_type = other DNA
tggttgccgggcatgaggtgattgggcgcgtggtggcactcgggagcgccgcgcaggataaaggtttgcaggtcg

SEQ ID NO: 74535 - DNA, 75 bp, synthetic construct
  source 1..75: mol_type = other DNA
ggtttttggcctgctgacgtatctgacaaacctttatttcaagattaaagaagacaagcgtaaggttgcgagaag

SEQ ID NO: 74536 - DNA, 75 bp, synthetic construct
  source 1..75: mol_type = other DNA
ggcctgctgacgtatctgacaaatctttatttcaagattaaagaagacaggcgtaaggctgcgagaggagagtaa

SEQ ID NO: 74537 - DNA, 75 bp, synthetic construct
  source 1..75: mol_type = other DNA
cgggcatcgcctacagcacctctgcaggcagtgctggctactggtttttacagttgctcgataaagtcacaccct

SEQ ID NO: 74538 - DNA, 75 bp, synthetic construct
  source 1..75: mol_type = other DNA
gctgtttgggctgctgacatatctgacgaacctgtatttcaagattaaagaagaccggcgtaaggcggcgcgggg

SEQ ID NO: 74539 - DNA, 75 bp, synthetic construct
  source 1..75: mol_type = other DNA
caggtgtgtcatacaccacgtcagcggtggggacgggctactggttcctgcagctgctggacagggtttccccgt

SEQ ID NO: 74540 - DNA, 75 bp, synthetic construct
  source 1..75: mol_type = other DNA
tcgagagaggaattgcttaagagaaatagtttcggttctgttaatgacaacaaatatctgaatgcgatgtggcgc

SEQ ID NO: 74541 - DNA, 75 bp, synthetic construct
  source 1..75: mol_type = other DNA
gcactgaagcgtataccggtcgtgaagtgcaggatattcccggcgtgctggctgtgtttgccgaacgccgtaagg

SEQ ID NO: 74542 - DNA, 75 bp, synthetic construct
  source 1..75: mol_type = other DNA
cgtttatatccaggaccgtaatgacgcctggaccgtacttcgtgatctggcgggtatatttcgcggcatgacgta

SEQ ID NO: 74543 - DNA, 75 bp, synthetic construct
  source 1..75: mol_type = other DNA
gacatcccgtcttttcccgttctgtaccggcaaataccgctggcacggcagcactgaagcgtataccggtcgtga

SEQ ID NO: 74544 - DNA, 75 bp, synthetic construct
  source 1..75: mol_type = other DNA
atgaaaattatcactcgtggtgaagccatgcgtattcaccaacaacatccggcatcccgtctttttccgttctgt

SEQ ID NO: 74545 - DNA, 75 bp, synthetic construct
  source 1..75: mol_type = other DNA
atgaagtcctcagtgtttttgaccaggttgaagagaaacgcgatgccatgcagtcgctgatgctgcctccccctg

SEQ ID NO: 74546 - DNA, 75 bp, synthetic construct
  source 1..75: mol_type = other DNA
tgtttgaccggatagaggagaagcatgatgccatgcagtcgctggtcctgccgccaccggcacgccaggcgctgg

SEQ ID NO: 74547 - DNA, 75 bp, synthetic construct
  source 1..75: mol_type = other DNA
atgtaaatcagatacgccgtgaccgtccgctgacacacgaagaactgatgcgccatgtaccgagtatttttgggg

SEQ ID NO: 74548 - DNA, 75 bp, synthetic construct
  source 1..75: mol_type = other DNA
gttgcaaaactgcagcgcatgcagttcggtaaaagctcagaaaaacttcgcgctaaaaccgaacggcagatacag

SEQ ID NO: 74549 - DNA, 75 bp, synthetic construct
  source 1..75: mol_type = other DNA
atgattaacctgttaatcatcgttctcagagccgtagtcgccgttgcaaacgcgctgattgcggttctggaactg

SEQ ID NO: 74550 - DNA, 75 bp, synthetic construct
  source 1..75: mol_type = other DNA
ggatggcgcactggcgcggcgcagagggcttaccgacgcgggcggctttctcgatatttctctcgattttctctt

SEQ ID NO: 74551 - DNA, 75 bp, synthetic construct
  source 1..75: mol_type = other DNA
catgccggcagcggtgtggttctcatactctcccgaccgcaaaggtatccacccgcagcaacatctggcggacta

SEQ ID NO: 74552 - DNA, 75 bp, synthetic construct
  source 1..75: mol_type = other DNA
gtaaatcgccgtttatggatatggatctggtgccgaaatatgccgatgaagagagttctgcgtctggtgtgcgca

SEQ ID NO: 74553 - DNA, 75 bp, synthetic construct
  source 1..75: mol_type = other DNA
cgggtgtcgcctatggcacctcagcaggtagtgccgggtactggtttttacagctgctcgataaagtcacgccct

SEQ ID NO: 74554 - DNA, 75 bp, synthetic construct
  source 1..75: mol_type = other DNA
caagctgaaactgttattactgcgggtaacaaggcggttgcggcgaatgcaagtttctttaaacaatactatgct

SEQ ID NO: 74555 - DNA, 75 bp, synthetic construct
  source 1..75: mol_type = other DNA
ggtgatggataccattctggtagtacgaccacgtcaggttcagtttaaatggtccttcgatcaggtgaccggaac

SEQ ID NO: 74556 - DNA, 75 bp, synthetic construct
  source 1..75: mol_type = other DNA
ctcggatacggcgaaagcgttcacctatctgctgaagcaatgggacgccctgaacgaatactgccgcaatggctg

SEQ ID NO: 74557 - DNA, 75 bp, synthetic construct
  source 1..75: mol_type = other DNA
gggagcgaaaagcattaagtaactttgaagagtgtgctgcgatggctgaacgtatcgaagagatgagtaagcaaa

SEQ ID NO: 74558 - DNA, 75 bp, synthetic construct
  source 1..75: mol_type = other DNA
ccgcatcaacctcgaacacctgcgcggcattctgcccgacagtgtgctcaaacgttatggcgacgtgaccgaagt

SEQ ID NO: 74559 - DNA, 75 bp, synthetic construct
  source 1..75: mol_type = other DNA
gtgttcagtgggattatggaacggctggctccgttgcgcgaaacctttgaacggttcggtcctgtttttgatgtc

SEQ ID NO: 74560 - DNA, 75 bp, synthetic construct
  source 1..75: mol_type = other DNA
gaaccagcctcatgcacagttctggctggtttttgacgttgaccgcgagggggctgcgattgactggagcgaccg

SEQ ID NO: 74561 - DNA, 75 bp, synthetic construct
  source 1..75: mol_type = other DNA
attggttgcggcaaagaacgtgagctggatgagcgtcagtacaagcaggttattcagaaaaccattaatacgctg

SEQ ID NO: 74562 - DNA, 75 bp, synthetic construct
  source 1..75: mol_type = other DNA
cacaggcggcactgacttaccgttatggtaatgagcatcagcccgtcaccaccgctgatattctgacaccgcgac

SEQ ID NO: 74563 - DNA, 75 bp, synthetic construct
  source 1..75: mol_type = other DNA
ccccggcgatattgtctttaagaacctgccccgcgcacttgctgttcgtggggagtggcaggagcggaagattgc

SEQ ID NO: 74564 - DNA, 75 bp, synthetic construct
  source 1..75: mol_type = other DNA
gtcgaagcgtctgcgaattcccgggcagcagaaccagcaaggcaaggccatcacagattacgatccctatgctta

SEQ ID NO: 74565 - DNA, 75 bp, synthetic construct
  source 1..75: mol_type = other DNA
tggcttgatgccgtgatccagcgtgtcgaaatgtacaacgcatctcttcccgttccgctttctccggctgaatgt

SEQ ID NO: 74566 - DNA, 75 bp, synthetic construct
  source 1..75: mol_type = other DNA
gtgattcagcgtgtcgaaatgtacaacgcatcgcttcccgttccgctttcaccgcctgaatgtcgggctattggc

SEQ ID NO: 74567 - DNA, 75 bp, synthetic construct
  source 1..75: mol_type = other DNA
tgtttaattacttcatcagaaagggtgccgtgcagcaagaaacagaagacggaatttggttcgtaatgaacgtaa

SEQ ID NO: 74568 - DNA, 75 bp, synthetic construct
  source 1..75: mol_type = other DNA
gtggcgcgaggaagcctataccctcgatgaactggctgattatctcgatttgagcgcctcagcgcgccgtagcat

SEQ ID NO: 74569 - DNA, 75 bp, synthetic construct
  source 1..75: mol_type = other DNA
ggctcctgccccgaacattctccttgcaccactttgcctgctgctgacatgtcctctcgtacaccgcaccggcag

SEQ ID NO: 74570 - DNA, 75 bp, synthetic construct
  source 1..75: mol_type = other DNA
actatgctcgccgccgtggaatcgaacttcaactcgaagatgagcaggttagattctgggagatagaacaagatt

SEQ ID NO: 74571 - DNA, 75 bp, synthetic construct
  source 1..75: mol_type = other DNA
ttaatgatctatcggcgttgtatggtgtatctactgtgacgatccgcaacgatctggcgtttctggaaaagcagg

SEQ ID NO: 74572 - DNA, 75 bp, synthetic construct
  source 1..75: mol_type = other DNA
tgactgaaaccgatcatgccacccctgatccggaaatcgtggatattgcctgtggtcgctcctctgccccgatgc

SEQ ID NO: 74573 - DNA, 75 bp, synthetic construct
  source 1..75: mol_type = other DNA
ttgccatcacggcagtgcagcatgtgccggaaaaagaagccatcgtggataacggggccagctttgagccgcagt

SEQ ID NO: 74574 - DNA, 75 bp, synthetic construct
  source 1..75: mol_type = other DNA
cgggctattggcaagagcattgcgaaatacacgcacaggaacttcacgccggaaactttcgcacagtatgtggct

SEQ ID NO: 74575 - DNA, 75 bp, synthetic construct
  source 1..75: mol_type = other DNA
acccaccattgctgtacctgtcgtgttgttagggacatttgccatactcgccgcttttggttactccatcaatac

SEQ ID NO: 74576 - DNA, 75 bp, synthetic construct
  source 1..75: mol_type = other DNA
atgatgcacttaaaaaacattactgctggcaatcctaaaacgaaagaacaataccagctaacaaagcaatttaac

SEQ ID NO: 74577 - DNA, 75 bp, synthetic construct
  source 1..75: mol_type = other DNA
ggcttttaaaaaggccagggaaaaatgtggcataaaatgggagcaaggaactgcgcccacatttcatgagcagcg

SEQ ID NO: 74578 - DNA, 75 bp, synthetic construct
  source 1..75: mol_type = other DNA
gtgaaagcgatggataaggcattcacccgcgtggatgaaacctttgaggccatccgcgacagcctgaatcagcag

SEQ ID NO: 74579 - DNA, 72 bp, synthetic construct
  source 1..72: mol_type = other DNA
atcgacaccgatattaagctcaaccgcgcattgtgggtaatggcagaaacgctgctggagagcctgcgctga

SEQ ID NO: 74580 - DNA, 75 bp, synthetic construct
  source 1..75: mol_type = other DNA
acgcaactgaacatcatcaggacacgcagccgctggatgctcagtcacaggtaaattctgttgatgcgaaatatc

SEQ ID NO: 74581 - DNA, 75 bp, synthetic construct
  source 1..75: mol_type = other DNA
ccccacgctggcccgggaaaaactggaggaagttcacggtctggtcctgggcaaggaaaccatcagacgccttat

SEQ ID NO: 74582 - DNA, 75 bp, synthetic construct
  source 1..75: mol_type = other DNA
aagatgcgccgtgaccatgtgatccccctttgcggtcaggctatggctgtactggaaaccatgaagccaatcagc

SEQ ID NO: 74583 - DNA, 75 bp, synthetic construct
  source 1..75: mol_type = other DNA
acccatgcgctcgcggaactcctcccgcaatttcacctgaccgcgcctcttgaacgacgcatcactcacgaaagt

SEQ ID NO: 74584 - DNA, 75 bp, synthetic construct
  source 1..75: mol_type = other DNA
ttatcatcaaccagcgatatttccagcgtgtgctatgcctttccggtcggtaaaaccattatgctggtttcccgt

SEQ ID NO: 74585 - DNA, 75 bp, synthetic construct
  source 1..75: mol_type = other DNA
catcaggagcgaataactggacaccaacaaccagtatcagcgatctgctggttgtggtgatgaagaaagccaccg

SEQ ID NO: 74586 - DNA, 75 bp, synthetic construct
  source 1..75: mol_type = other DNA
catctatcgccagtgggtaaaagcgggctggatacgaaccacccccggcgactgtatcgactatgaccgcatccg

SEQ ID NO: 74587 - DNA, 75 bp, synthetic construct
  source 1..75: mol_type = other DNA
tccaccagcaggacgtgtgaccatctaatgatcgaccttgaaaccatgggaaaaaatcctgatgccccgattatc

SEQ ID NO: 74588 - DNA, 75 bp, synthetic construct
  source 1..75: mol_type = other DNA
tgaaacgtatagcctctacaggagaaatctccttgagaaaagcgatgaagaaataattgccttagtcataaaaca

SEQ ID NO: 74589 - DNA, 75 bp, synthetic construct
  source 1..75: mol_type = other DNA
gggccaatgaagccagggctaagcaggctgaaaatctgtccgctctggagcaggatatcaccaggctggaaaaag

SEQ ID NO: 74590 - DNA, 75 bp, synthetic construct
  source 1..75: mol_type = other DNA
aatgatggcgaggttgatcaacgggcgctgggcgttaaccgggtgaagatattcgaacgctggaaagctatcgac

SEQ ID NO: 74591 - DNA, 75 bp, synthetic construct
  source 1..75: mol_type = other DNA
gtcgttgaattacctgatattacagcaaatcgccgggctgatatttcggggaaatggatgttcaaagatggcgta

SEQ ID NO: 74592 - DNA, 75 bp, synthetic construct
  source 1..75: mol_type = other DNA
cctatctgaaattcagtccggtagcgaaatcttttgaggtttttgttaaccgcaaggtggtgcgccatcgtggcg

SEQ ID NO: 74593 - DNA, 75 bp, synthetic construct
  source 1..75: mol_type = other DNA
gggaaatgacctggctgacccggcagtcgtgacgatgaggagacaatgtgatgaatcagactttacccactgctg

SEQ ID NO: 74594 - DNA, 75 bp, synthetic construct
  source 1..75: mol_type = other DNA
ggctggaaagtgaaatcctggctgaccgggtgagtgaggaaagccgccgctggctggcatcgtgcggcctgacgg

SEQ ID NO: 74595 - DNA, 75 bp, synthetic construct
  source 1..75: mol_type = other DNA
tgatgcagctgatgcccaggctatttgtgaggctgtccgtcgcccgcatatgcggttcgtgccagtgaaggatga

SEQ ID NO: 74596 - DNA, 75 bp, synthetic construct
  source 1..75: mol_type = other DNA
gttataacctggatgcacattatttcagggttaggactgattatttgtggttttattatgttaagttggatgctt

SEQ ID NO: 74597 - DNA, 75 bp, synthetic construct
  source 1..75: mol_type = other DNA
ggataatggctttggtctgctggctccccgtggtttaatgcatatgtccgatacaagcggattcaaatacaagat

SEQ ID NO: 74598 - DNA, 75 bp, synthetic construct
  source 1..75: mol_type = other DNA
atgcactaaatttcatgataatggaaaaaaacacatttcatgaaaaaatcttaaacagcaatgacaatttgcaaa

SEQ ID NO: 74599 - DNA, 75 bp, synthetic construct
  source 1..75: mol_type = other DNA
atgggctgaccggcttccctgaagcgataaacagcatttatccgcagacagaggtacagttgtgcgtcattcacc

SEQ ID NO: 74600 - DNA, 75 bp, synthetic construct
  source 1..75: mol_type = other DNA
acggaagggacaacagcgtggtacgcagaatacgatgaatggggtaacctgctgaatgaagagaacccgcatcag

SEQ ID NO: 74601 - DNA, 75 bp, synthetic construct
  source 1..75: mol_type = other DNA
cgtgcagcaggcgtatcagacgctggagacgatgaagctcatcactccgcagccgcgttcgggttattttgtcgc

SEQ ID NO: 74602 - DNA, 75 bp, synthetic construct
  source 1..75: mol_type = other DNA
ccacccaaattatccaatacgctggcaaaacatttcttatcgacccgttactcgcgcctaaaggaagttatccgg

SEQ ID NO: 74603 - DNA, 75 bp, synthetic construct
  source 1..75: mol_type = other DNA
cggttcaatcctggcgtcgttattatgaatacgggctgggcgcatgttctcggattcggccccattattttcggc

SEQ ID NO: 74604 - DNA, 75 bp, synthetic construct
  source 1..75: mol_type = other DNA
cggtggtggcaaaaacccgccgtaacctggaggcggatgtgacgttgttctgtgatgttctgtgtgataaggaca

SEQ ID NO: 74605 - DNA, 75 bp, synthetic construct
  source 1..75: mol_type = other DNA
cgctgtcaacgatggcggggtttcgtcataagacagtggtggtaccggaatgggacggtgctacggtagtgctga

SEQ ID NO: 74606 - DNA, 75 bp, synthetic construct
  source 1..75: mol_type = other DNA
gccgttatggccggtcacggatgagacaatgcgcaactggctgaaacaagcggtgaagcgggctgaagctgatgg

SEQ ID NO: 74607 - DNA, 75 bp, synthetic construct
  source 1..75: mol_type = other DNA
tatcattaatgaaagtgttccagccggaccgttctcatttccaataaccaatctcatgtatactggggggcaact

SEQ ID NO: 74608 - DNA, 75 bp, synthetic construct
  source 1..75: mol_type = other DNA
atggcgaaaaattttgtacaggacggtaccaccattgaactggtgaatgccggagatcagaccatcctgagcggt

SEQ ID NO: 74609 - DNA, 75 bp, synthetic construct
  source 1..75: mol_type = other DNA
tacagcagcgggctgctgaacgtggctcacgaacaccggagaaagtttttaaaaacgtggcgctggcgtggcata

SEQ ID NO: 74610 - DNA, 75 bp, synthetic construct
  source 1..75: mol_type = other DNA
atgccaatcataaagaactgcttatcattaattagtaatgcattaagaaacgaaaaaacatcatattccctaata

SEQ ID NO: 74611 - DNA, 75 bp, synthetic construct
  source 1..75: mol_type = other DNA
cagtcactgcgaacgcggcgaagagtatattgtcggtcaggccgcgcataactatctgtttgaagccggtggcgc

SEQ ID NO: 74612 - DNA, 75 bp, synthetic construct
  source 1..75: mol_type = other DNA
tctggggaattaacaccctgtttggcccgtttgttctggatctgttcactgacggtgataacgccaaatgtgctg

SEQ ID NO: 74613 - DNA, 75 bp, synthetic construct
  source 1..75: mol_type = other DNA
atgagagtattcattgcagaaaaaccaagtgttgcgaaagccatcgctgaaatattaggcgcaaccaataaaaaa

SEQ ID NO: 74614 - DNA, 75 bp, synthetic construct
  source 1..75: mol_type = other DNA
gatgaaaatcaaacccgacgatatccatttcgcccgcaccaaattactcagtctggaaaacacccacaacggcaa

SEQ ID NO: 74615 - DNA, 75 bp, synthetic construct
  source 1..75: mol_type = other DNA
tggtgacgcatcttgacgtctcgcgcgctcagctggcggaagtcgccgcccactggcgcgcattcctggcgcgtt

SEQ ID NO: 74616 - DNA, 75 bp, synthetic construct
  source 1..75: mol_type = other DNA
atgaacatcggtaaagcaatcatcaactacgcagcacgtcgcaacatggacattaccttgattggcgatgagacc

SEQ ID NO: 74617 - DNA, 75 bp, synthetic construct
  source 1..75: mol_type = other DNA
cctctctggaagaggctgtcgagattaaacaaggtttaaaagaacctgcacgggtgacccgctacgaaattgcgg

SEQ ID NO: 74618 - DNA, 75 bp, synthetic construct
  source 1..75: mol_type = other DNA
ccaatgaggctattgattttaacgatgaactgagaaatcgccgcgaaaaactggcggcactacgtcagcaaggtg

SEQ ID NO: 74619 - DNA, 75 bp, synthetic construct
  source 1..75: mol_type = other DNA
attggtggtattgaccgccccgacagtggaaagatcatcaccaataaaacaatatcatggccagtcggcctcgcc

SEQ ID NO: 74620 - DNA, 75 bp, synthetic construct
  source 1..75: mol_type = other DNA
gcaaaaatgctactggatacgctggcgtggatacttgaaaaacttggcgtccttccggatgaagcggaaagggcg

SEQ ID NO: 74621 - DNA, 75 bp, synthetic construct
  source 1..75: mol_type = other DNA
ttcaggtaccagaatcacccgacgccccggaggcgctgccggggtgtcgttccatttctgatgatgacctgtgca

SEQ ID NO: 74622 - DNA, 75 bp, synthetic construct
  source 1..75: mol_type = other DNA
atggaaaaagtttatgataccactagaattagtaatcttgctaacgacccgaaacagttttgttcttttttttgt

SEQ ID NO: 74623 - DNA, 75 bp, synthetic construct
  source 1..75: mol_type = other DNA
tagttctcattcacaagcgtgagaaccacgactcctatgcggtggcgatcaccaatgggagtcacgattattacg

SEQ ID NO: 74624 - DNA, 75 bp, synthetic construct
  source 1..75: mol_type = other DNA
cgaccgttttcatctggtcaacggtgaaaactggtttgaccgtacggtcagcgccgatgccgcaggcatcattgt

SEQ ID NO: 74625 - DNA, 75 bp, synthetic construct
  source 1..75: mol_type = other DNA
tcaccggccatctggtactctcaacactccacactaacagtgcatcaggcgcagtgacccggctccgcgacatgg

SEQ ID NO: 74626 - DNA, 75 bp, synthetic construct
  source 1..75: mol_type = other DNA
tgacagttccggcggtgatgctggaaaaagtgatggcgctggcaggcagtgaaatgaagcgcctgtatgccgtcg

SEQ ID NO: 74627 - DNA, 75 bp, synthetic construct
  source 1..75: mol_type = other DNA
ccagttgggcgctggcacaacgaattggttatctctattcagagggcgagattatttatctcgccggtacgccat

SEQ ID NO: 74628 - DNA, 75 bp, synthetic construct
  source 1..75: mol_type = other DNA
ataaaaacaattttaatgatgttctggcagatatctccccgtctgtacatctgaatgtggagaacacgcttgccg

SEQ ID NO: 74629 - DNA, 75 bp, synthetic construct
  source 1..75: mol_type = other DNA
atggaacttaaaaaattgatgggacatatttctattatccccgattacagacaagcctggaaaatggaacataag

SEQ ID NO: 74630 - DNA, 75 bp, synthetic construct
  source 1..75: mol_type = other DNA
catgtcgaatggggatttattgaaaaatatggcgaagctgaaggcatggggcgagttctgtttctctatcaaaaa

SEQ ID NO: 74631 - DNA, 75 bp, synthetic construct
  source 1..75: mol_type = other DNA
ggagagtggtggtagtgcaactgttcgtctgaactctctggactggcttggtggtcagtgccgggagcaggcaga

SEQ ID NO: 74632 - DNA, 75 bp, synthetic construct
  source 1..75: mol_type = other DNA
aattaaacaccttgagccaaatttcatcatctttgcatccggagcccagagaacagactacatcataaaacaagt

SEQ ID NO: 74633 - DNA, 75 bp, synthetic construct
  source 1..75: mol_type = other DNA
taagaaaaaaactgctcgataacgccgcagaaccttatcgcattaaaactgtgcgtaacaaaggctatctttttg

SEQ ID NO: 74634 - DNA, 75 bp, synthetic construct
  source 1..75: mol_type = other DNA
gattcttgacaacgtagcctacgggctgatggtcaaaggcgtgaataaaaagcagcggcacgcaatggcgcaaga

SEQ ID NO: 74635 - DNA, 75 bp, synthetic construct
  source 1..75: mol_type = other DNA
aacttggaataaataattatcaccgtatgatagcctgtgttatgcaggacgaccggctattttcaggatcaattc

SEQ ID NO: 74636 - DNA, 75 bp, synthetic construct
  source 1..75: mol_type = other DNA
atcgtgtatgccaatctactggcgtgggattacgacggactgacccctctcaatcgccctcaaaatgaagtgcag

SEQ ID NO: 74637 - DNA, 75 bp, synthetic construct
  source 1..75: mol_type = other DNA
cgaggtcatactttgctggctcctgcggaggtgcgccgctggaagttgttaggcaatacattcaacatcagcgtg

SEQ ID NO: 74638 - DNA, 75 bp, synthetic construct
  source 1..75: mol_type = other DNA
gagaatatcggtaccaccaaagaccgccgcgtactggaactggaactgaacacctggatccgcacactggtgacg

SEQ ID NO: 74639 - DNA, 75 bp, synthetic construct
  source 1..75: mol_type = other DNA
tcagtggcctcattccgactggcacagcgagaacatgaccacaatgcgacacgcgccgggcgcaattcgtctgtg

SEQ ID NO: 74640 - DNA, 75 bp, synthetic construct
  source 1..75: mol_type = other DNA
attctcgacgtcgccagcgggaagaagaaaaccttctcggatcaatgggggctgcataaccagctggcagtgttt

SEQ ID NO: 74641 - DNA, 75 bp, synthetic construct
  source 1..75: mol_type = other DNA
ccatcaggcgcagtttcctcacacaccgtcaggtgtgcagggagcgcaggtcacggcgcgacaggggcggcgcga

SEQ ID NO: 74642 - DNA, 75 bp, synthetic construct
  source 1..75: mol_type = other DNA
gacaagaagggaaagggccttcccgagagtggtaaaggagaggccctggaaataccccacagccccgaaaaagag

SEQ ID NO: 74643 - DNA, 75 bp, synthetic construct
  source 1..75: mol_type = other DNA
ccggcggcatcacaaccgctggcggatgatcctgccgttcgggccgtgttccgcaatgaggaagtgatccgtcgt

SEQ ID NO: 74644 - DNA, 75 bp, synthetic construct
  source 1..75: mol_type = other DNA
cctgccgttcgccagccgctggcggaagataaatcattgctgccatttttcagcgacgaacgggtgattcgtgct

SEQ ID NO: 74645 - DNA, 75 bp, synthetic construct
  source 1..75: mol_type = other DNA
cccatcaatgattgttaaaccagaagagtgtaaatatgaccctgcaaggggaagctttattataaaagatagtta

SEQ ID NO: 74646 - DNA, 75 bp, synthetic construct
  source 1..75: mol_type = other DNA
atttttgatgattactattgtggtgcgatatggtcagccaccgtattacaggagcaaggtgttgcagccctgccc

SEQ ID NO: 74647 - DNA, 75 bp, synthetic construct
  source 1..75: mol_type = other DNA
ggcatcaatggttgtaagtgctgataaatgtttttatgaccatggtaagggtagcttcgttataaaagatagtta

SEQ ID NO: 74648 - DNA, 75 bp, synthetic construct
  source 1..75: mol_type = other DNA
tactgcgattagattattggtaaataatcaaagtaatgatcttaagtcctggaaaggctattttatgttacgtaa

SEQ ID NO: 74649 - DNA, 75 bp, synthetic construct
  source 1..75: mol_type = other DNA
attgtttgcgatgtccctgatgaacttattgatttcacgtttgaatggaaagggctgaagaaattatgcgtggca

SEQ ID NO: 74650 - DNA, 75 bp, synthetic construct
  source 1..75: mol_type = other DNA
ccagtgccaatatgagcgtcgggtttgatgtgctcggggcggcggtgacacctgttgatggtgcattgctcggag

SEQ ID NO: 74651 - DNA, 75 bp, synthetic construct
  source 1..75: mol_type = other DNA
ggagcgattcatgtcattagtgcgttctcaacaatgcacagtctggtcatcggacagatcaagacggatgagaaa

SEQ ID NO: 74652 - DNA, 75 bp, synthetic construct
  source 1..75: mol_type = other DNA
gcgtaatctgccgtccggggtcgttcctgccgctcgccagccgctggtggaagacaaaacattgctgccgttttt

SEQ ID NO: 74653 - DNA, 75 bp, synthetic construct
  source 1..75: mol_type = other DNA
ccagcaatacatcaaacgccgcgaccaagagaacgaggatattgcgttaacggtagggaagttgcgcgttgagct

SEQ ID NO: 74654 - DNA, 75 bp, synthetic construct
  source 1..75: mol_type = other DNA
ggtatcaatgattgtaagtcaagaacaatgtatttatgaccaaaccaaaggaaactttgtcataaaggataagtg

SEQ ID NO: 74655 - DNA, 75 bp, synthetic construct
  source 1..75: mol_type = other DNA
gtaaaagccgctaggatatgttttgatgcttatatagatcataaaagcaaatcatttagaacttcaaggcgatat

SEQ ID NO: 74656 - DNA, 75 bp, synthetic construct
  source 1..75: mol_type = other DNA
tcgccaacgcgtaaagccaatgccatcgagagaggaattgcttaagagaaagagtttcggttctgttaatgacaa

SEQ ID NO: 74657 - DNA, 75 bp, synthetic construct
  source 1..75: mol_type = other DNA
tgatgaccttctacctgagcctgattgcctagagaaattaatccaagataggccagaaggaattgttcagccggt

SEQ ID NO: 74658 - DNA, 75 bp, synthetic construct
  source 1..75: mol_type = other DNA
cgtttagtttgtgaagatttacctcatccattgacacgagaggaaataacggtatcaatgattgtaagacctgaa

SEQ ID NO: 74659 - DNA, 75 bp, synthetic construct
  source 1..75: mol_type = other DNA
gatctagatgtggctctaaaagtatgtagggcttatagagattcttactatttgagtaacaatgacagatttaag

SEQ ID NO: 74660 - DNA, 75 bp, synthetic construct
  source 1..75: mol_type = other DNA
gtgagcaagattgactatcaggtactgcgtgaaaaggcagaaaaagcaacgtgtggtgagtggtctctcgaatat

SEQ ID NO: 74661 - DNA, 75 bp, synthetic construct
  source 1..75: mol_type = other DNA
attttttccacgatgcgttagcaccgtttcacaaataccgacaaaatgctttgctggatgccaccatcgctctca

SEQ ID NO: 74662 - DNA, 75 bp, synthetic construct
  source 1..75: mol_type = other DNA
gggaaatgtggtgcagaaagtcattgaaggggcttacgaggtggtgggcgtgtttgaccggatagaggagaagcg

SEQ ID NO: 74663 - DNA, 75 bp, synthetic construct
  source 1..75: mol_type = other DNA
tcgagagaggaattgcttaagagaaagagtttcggttctgttaatgacaacaaatatctgaatgcgatgttgcgc

SEQ ID NO: 74664 - DNA, 75 bp, synthetic construct
  source 1..75: mol_type = other DNA
tgtgtgccaactgacgaatccacgaaaagcgacgaaagagcaggttatcgaactctatcgtcaggcgtatgaagg

SEQ ID NO: 74665 - DNA, 75 bp, synthetic construct
  source 1..75: mol_type = other DNA
ctattggagtgtacccgctaatcagcctcaaggaagcccgtaaacgcgctacagagagccgatctctgattgcta

SEQ ID NO: 74666 - DNA, 75 bp, synthetic construct
  source 1..75: mol_type = other DNA
tccggcaatcccccgacgttttccctgacgccggagggcaggctgaccgcaagaaatgctgatatcagcggtaac

SEQ ID NO: 74667 - DNA, 75 bp, synthetic construct
  source 1..75: mol_type = other DNA
tccgtttattccggtgctgcgtcagttgggattcagtggtagcgatgagcaggtactggaaaaagttgcacgcca

SEQ ID NO: 74668 - DNA, 75 bp, synthetic construct
  source 1..75: mol_type = other DNA
ttgtcgttggtaatatcagccttacgattagtgagccagactttgaatttgacgtatacgcacaagcagaggaat

SEQ ID NO: 74669 - DNA, 75 bp, synthetic construct
  source 1..75: mol_type = other DNA
tgcttcaggcatcgagacaacgtaacagatacaactcctacagctacacagacacccccaccagctacgaattac

SEQ ID NO: 74670 - DNA, 75 bp, synthetic construct
  source 1..75: mol_type = other DNA
atgcgattagcaagtcgttttggttatgctgcaaaccagatacgccgtgaccgtccgctgacacacgaagaactg

SEQ ID NO: 74671 - DNA, 75 bp, synthetic construct
  source 1..75: mol_type = other DNA
ctaatgaatctataagatataacgccattcagtatcttaggacatgcgatttagacatcattgtcgagtttaagc

SEQ ID NO: 74672 - DNA, 75 bp, synthetic construct
  source 1..75: mol_type = other DNA
gaagccccatccatcagcagaacgccattcaagccatccagcaaatccttccagacccaaccaaaccaatcgtag

SEQ ID NO: 74673 - DNA, 75 bp, synthetic construct
  source 1..75: mol_type = other DNA
acattaaagcgcagatgggcgggctggtgtatcgcggttttgtcactggtaacggcttcaaacgactgggcgaca

SEQ ID NO: 74674 - DNA, 75 bp, synthetic construct
  source 1..75: mol_type = other DNA
ctgtccgtctgctgattcagttacagcgtaacggtaactgggtgacagaaaaggatgtcaccattaacggcaaga

SEQ ID NO: 74675 - DNA, 75 bp, synthetic construct
  source 1..75: mol_type = other DNA
ttcacgccagagcaggtcgcccgacagattcggcagctgaagctgctccctgaagactctccgcaacgtcagcag

SEQ ID NO: 74676 - DNA, 75 bp, synthetic construct
  source 1..75: mol_type = other DNA
aatatgctgaaaggcgggatttccggtcgcagtgccagaggaaaacgtatccatacccgggccattcacagcatt

SEQ ID NO: 74677 - DNA, 75 bp, synthetic construct
  source 1..75: mol_type = other DNA
aaacggagaacatgtccctgaaattattctgctcaactctcatgacggtacctccagctaccagatgctgccggg

SEQ ID NO: 74678 - DNA, 75 bp, synthetic construct
  source 1..75: mol_type = other DNA
gtattgttgattttattatccggcttttgattacagcgattgtcatttctccggtaattatctggtcgtgggata

SEQ ID NO: 74679 - DNA, 75 bp, synthetic construct
  source 1..75: mol_type = other DNA
cagacgcagtttgcactggctaaggaaagggatgtttcgcattaccgcgaaatcttattcgcttacctggaagaa

SEQ ID NO: 74680 - DNA, 75 bp, synthetic construct
  source 1..75: mol_type = other DNA
cagcatcccttgcaggaaaaccggctacagttgaagcggcagcaactgatgataaaaaaacggctgcaccgttgc

SEQ ID NO: 74681 - DNA, 75 bp, synthetic construct
  source 1..75: mol_type = other DNA
cggtctgtttctggtgaaacacaaaaatgccagcctgcgcgcctcgctggacagggcgaataacgtcgccagtga

SEQ ID NO: 74682 - DNA, 75 bp, synthetic construct
  source 1..75: mol_type = other DNA
tcaaaaaattactgaaggataaagataaagacaaaaaagatgaacatggcggcattggtacgccagctacccgcg

SEQ ID NO: 74683 - DNA, 75 bp, synthetic construct
  source 1..75: mol_type = other DNA
cgataaccagctgcgcgatcagttcacggaacggctggaatcaatggcaacggataactgtgcccgctgggtgtt

SEQ ID NO: 74684 - DNA, 75 bp, synthetic construct
  source 1..75: mol_type = other DNA
gcatcacaacgagcttcatgcggatcctctggcgttcgaagaaaagcatggttctcaggttgatttaatttttcg

SEQ ID NO: 74685 - DNA, 75 bp, synthetic construct
  source 1..75: mol_type = other DNA
ttggcaacgattttatggtcgtcgacgcggtaacgcagaatgtctttttttcaccggagctgattcgtcgcctgg

SEQ ID NO: 74686 - DNA, 75 bp, synthetic construct
  source 1..75: mol_type = other DNA
gcgcagttacatcttgagcagatattctcatggtggagcgccgggcgatatgcgtcattttcccctgccggacgt

SEQ ID NO: 74687 - DNA, 75 bp, synthetic construct
  source 1..75: mol_type = other DNA
gttattgttaatgagaagaaaacaacaccgccgccgttattcaccgaagcctccttgcttgctgcgcttgttcgt

SEQ ID NO: 74688 - DNA, 75 bp, synthetic construct
  source 1..75: mol_type = other DNA
tcggcatgaaagatgccgataaacaagaatataccggcgcacgtaacgcgcgtttctccatcttccccggttctg

SEQ ID NO: 74689 - DNA, 75 bp, synthetic construct
  source 1..75: mol_type = other DNA
cgcgtatggtgctggaagcgcagaaacatggctgcgtgcgtgaggcgatgattatcacgtccgcgctctccattc

SEQ ID NO: 74690 - DNA, 75 bp, synthetic construct
  source 1..75: mol_type = other DNA
gtccttcatgcggcaaacaaattgttatcaggccgaaaggctatttctgtaccggatgtgaatttaaaatatgga

SEQ ID NO: 74691 - DNA, 75 bp, synthetic construct
  source 1..75: mol_type = other DNA
atgaaagttatattcacttctaatcgtcttgttgattttcttatccggctttcgattacagcgattgtcatttcc

SEQ ID NO: 74692 - DNA, 75 bp, synthetic construct
  source 1..75: mol_type = other DNA
tcattgaggatttgaaggtcagcaacatgtcaaagtcagcagcgggtacggtcagccagccggggcgcaatgtcc

SEQ ID NO: 74693 - DNA, 75 bp, synthetic construct
  source 1..75: mol_type = other DNA
ttgccatgcaaaactatatgctgcaacgcggtcatactgaacaagcggatttgttttatggtgtgctgagagaca

SEQ ID NO: 74694 - DNA, 75 bp, synthetic construct
  source 1..75: mol_type = other DNA
ccatacccgtgccattcacagcatcgacaccgatattaagctcaaccgcgcattgtgggtgatggcagaaacgct

SEQ ID NO: 74695 - DNA, 75 bp, synthetic construct
  source 1..75: mol_type = other DNA
atgcgattagccagttgttttggttatgctgcgaaccagatacgccgtgaccgtccactgacacatgaagagctg

SEQ ID NO: 74696 - DNA, 75 bp, synthetic construct
  source 1..75: mol_type = other DNA
atgcatcagaaaacagcagaacacgagcaaaccagagtattgctgaccatcaaaaacgggaaagtaatattaatt

SEQ ID NO: 74697 - DNA, 75 bp, synthetic construct
  source 1..75: mol_type = other DNA
tttctgccaccacgatgctgttttcacttggagccagcatgattctgggcggtgtggcccagatgctggccccga

SEQ ID NO: 74698 - DNA, 75 bp, synthetic construct
  source 1..75: mol_type = other DNA
gtactgccactgcatggcctgacgggcgtgggctggagtgactcctggagcgaatacgcctgggtgcgtgaacag

SEQ ID NO: 74699 - DNA, 75 bp, synthetic construct
  source 1..75: mol_type = other DNA
caaaagctgaatacttcaatctgaccgtaaaaggtctggggtacctcagtaatgtacgtcaggttaaccatcaga

SEQ ID NO: 74700 - DNA, 75 bp, synthetic construct
  source 1..75: mol_type = other DNA
atgatgaaaattactatctggatggaacaaactcacaacgcgccatcttcaggaaaagcgatcttgaatttgttc

SEQ ID NO: 74701 - DNA, 75 bp, synthetic construct
  source 1..75: mol_type = other DNA
cagtattcagttttgatgaaaggaaaaaactctttttctggatatttgagcgccttctgaaagaagggcgcatca

SEQ ID NO: 74702 - DNA, 75 bp, synthetic construct
  source 1..75: mol_type = other DNA
ttttattctttgggttcaataccgcgttgctgtaattcttttcggattattcgttttatccaagcagctaaagag

SEQ ID NO: 74703 - DNA, 75 bp, synthetic construct
  source 1..75: mol_type = other DNA
tcatccatgttactggcttggtttgaatctaaatcgtaatgcacttgctccagaggaagcagaggagataaatga

SEQ ID NO: 74704 - DNA, 75 bp, synthetic construct
  source 1..75: mol_type = other DNA
tgaaagaatacagcatcaagtttcgtccaaataagccagcctcacctcatcttaatggcaaagttgaacgttctc

SEQ ID NO: 74705 - DNA, 75 bp, synthetic construct
  source 1..75: mol_type = other DNA
acagacgtggacgcagcagtgtgatgaacgcggcctgccggtaagtctggtgtcgccacagggcgaagagacccg

SEQ ID NO: 74706 - DNA, 75 bp, synthetic construct
  source 1..75: mol_type = other DNA
tattgcagaaaaggcaggatatgacgttattgcaccagcagatgaagatgaagatgaagatgaagatgaagatga

SEQ ID NO: 74707 - DNA, 75 bp, synthetic construct
  source 1..75: mol_type = other DNA
ttgtatcgtgaaattactgacggaaaaagcatcacgtgcatgatcgccgggttaaacaaagaatatggcgatgtg

SEQ ID NO: 74708 - DNA, 75 bp, synthetic construct
  source 1..75: mol_type = other DNA
ggacacggcgctctgcgacaaggagaacaaaccaccgaggatagcccagggcagcagcaacgtctttatcaacaa

SEQ ID NO: 74709 - DNA, 75 bp, synthetic construct
  source 1..75: mol_type = other DNA
tcccatccaaatggtaacgcagttcagagacgagatattataggcaccaatggtggcaaatctgatttttggaaa

SEQ ID NO: 74710 - DNA, 75 bp, synthetic construct
  source 1..75: mol_type = other DNA
tgaacacggcagcggaggccatccgtgccctgtcgcagcaggtgccgggattccgctgtcagatgaacgaaggct

SEQ ID NO: 74711 - DNA, 75 bp, synthetic construct
  source 1..75: mol_type = other DNA
tcccatttcgatatgccggtatcttctttagtatttttttcagaatcgttaggtacgcaggggcgtttatctaag

SEQ ID NO: 74712 - DNA, 75 bp, synthetic construct
  source 1..75: mol_type = other DNA
aagcaacctatattaacaaatctggtgtgctgacagaggctgccattgacgagccacgatttgaacgtgatggcc

SEQ ID NO: 74713 - DNA, 75 bp, synthetic construct
  source 1..75: mol_type = other DNA
attttccgaatttagcccttaaatcatcaacaatgcgcgtggatgccatttcgcagacggcgcgaaaatggtact

SEQ ID NO: 74714 - DNA, 75 bp, synthetic construct
  source 1..75: mol_type = other DNA
ggatgtctgaaaacaataatgcacaggtagctttgttaaatacacagttaagcgagtttgccccaaccatgcccc

SEQ ID NO: 74715 - DNA, 75 bp, synthetic construct
  source 1..75: mol_type = other DNA
ggattacctggacgcactggagctggttgatacctccagtgtgccagatattgaatggcctacgcctccggcagt

SEQ ID NO: 74716 - DNA, 75 bp, synthetic construct
  source 1..75: mol_type = other DNA
atgaagctacaatgtttcgaaaattgatcgagaactgtgacaaaaagaacaccagccttgttatagactgttttc

SEQ ID NO: 74717 - DNA, 75 bp, synthetic construct
  source 1..75: mol_type = other DNA
tgccctacggtgaaatgctggttggttcacgacgtatctctcaggacatcagcacccgtgatgaaggcgggggcg

SEQ ID NO: 74718 - DNA, 75 bp, synthetic construct
  source 1..75: mol_type = other DNA
cgtatatcccaggacatcagtacccgtgatgaaggcggtgacgggaaggtggtggttatcgggcggcaggcataa

SEQ ID NO: 74719 - DNA, 75 bp, synthetic construct
  source 1..75: mol_type = other DNA
atggaaggcaggctgcagcaaatccgggcggaaggcgctgaccttcctgcccgcaccctgaagatggttttttcg

SEQ ID NO: 74720 - DNA, 75 bp, synthetic construct
  source 1..75: mol_type = other DNA
atgcaacaactttcctttctgccaggagagatgacgcccggcgagcgcagtctcattctgcgggccctgaaaacc

SEQ ID NO: 74721 - DNA, 75 bp, synthetic construct
  source 1..75: mol_type = other DNA
gatggcccgtttgctgcagcctggccgtttgtgatcagtttctttgtactggcagccctgacttacattatggct

SEQ ID NO: 74722 - DNA, 75 bp, synthetic construct
  source 1..75: mol_type = other DNA
tcgtctccggcagccatgctgtctccgggtgaccgcagtgcaattcagcagcaacagcagcagttgctggatgaa

SEQ ID NO: 74723 - DNA, 75 bp, synthetic construct
  source 1..75: mol_type = other DNA
gtcaagaggacagtaaaccgcagcagggccagccggtcgagaatgctgccggtcaaacatcagggagcgccatgc

SEQ ID NO: 74724 - DNA, 75 bp, synthetic construct
  source 1..75: mol_type = other DNA
ggttaaggctgacggcatgacatgctcatttgcaaataagcatataagcacagaaacaaaaacagtatggaaata

SEQ ID NO: 74725 - DNA, 75 bp, synthetic construct
  source 1..75: mol_type = other DNA
tggcgaacagaaatttgttgcctggtatggtttccggtcagtgcgcattcaggctccgcactttctctccggtgg

SEQ ID NO: 74726 - DNA, 75 bp, synthetic construct
  source 1..75: mol_type = other DNA
taatcgtctgcgtacggagccggtacagattgaaatatcgcccggtgaccgtgagggatggtcggtggtgacact

SEQ ID NO: 74727 - DNA, 75 bp, synthetic construct
  source 1..75: mol_type = other DNA
gatgattcttctgtatcatcatatgtaaatgatgtcttttacttatatagcaccggaatcagtcataatgctata

SEQ ID NO: 74728 - DNA, 75 bp, synthetic construct
  source 1..75: mol_type = other DNA
aaaggtggcgaatatgccaacctggacgctgtggtgatggatgcggtcaatgagcttatcgacgtggtttaccag

SEQ ID NO: 74729 - DNA, 75 bp, synthetic construct
  source 1..75: mol_type = other DNA
gccgcaggtaggcactaaatttgggcgctggctggatctgacatttatgcagttgcaactcgacgagcgcactga

SEQ ID NO: 74730 - DNA, 75 bp, synthetic construct
  source 1..75: mol_type = other DNA
gggcgtgcagctgcatgaaagcgccgtcgtttccgtccgtcacggtgcccgcgtgcgcctggctgacggacgcac

SEQ ID NO: 74731 - DNA, 75 bp, synthetic construct
  source 1..75: mol_type = other DNA
atctgttatctgttttattgggtgtttttatgagcgttgatgtaattaaacaaattcagagtatacaggacaaag

SEQ ID NO: 74732 - DNA, 75 bp, synthetic construct
  source 1..75: mol_type = other DNA
gggaaccttctgcagaagcctggttgcgctggcaggagatcgttaaagccagggaagatgatacatcgccatctg

SEQ ID NO: 74733 - DNA, 75 bp, synthetic construct
  source 1..75: mol_type = other DNA
tcgtaatggacgatgccgatcttgaactggcagtcaaagccatcgttgattcacgcgtcattaatagtgggcaag

SEQ ID NO: 74734 - DNA, 75 bp, synthetic construct
  source 1..75: mol_type = other DNA
cagatagccgtattccagcggcgtggagatacgctgctgaccttcactttcagcacctccttatccctgaagaac

SEQ ID NO: 74735 - DNA, 75 bp, synthetic construct
  source 1..75: mol_type = other DNA
ccatactgattggttaaatatgatttacccacgtttaaaacttgcaagaaacttgttgaaagaagatggagttat

SEQ ID NO: 74736 - DNA, 75 bp, synthetic construct
  source 1..75: mol_type = other DNA
atggcatttaaacactatgacgtggtcagggcggtatcgccgtcagaccttgcgaaacgactgacacaaaaactg

SEQ ID NO: 74737 - DNA, 75 bp, synthetic construct
  source 1..75: mol_type = other DNA
gaatctatggtcactcccgtttttgcaacaccgattttgacgacaagttggcttgcttgaatctatccggcgtct

SEQ ID NO: 74738 - DNA, 75 bp, synthetic construct
  source 1..75: mol_type = other DNA
ttctggaaattccagtatccggtcaggatgcgtctggtcggtcagaccagcacccgccccgagcaggccttcacc

SEQ ID NO: 74739 - DNA, 75 bp, synthetic construct
  source 1..75: mol_type = other DNA
gtaccgtggatttgtggtgacacgacgtattactggaaaaatacatacgctacccagtacgacaccgtgtacgga

SEQ ID NO: 74740 - DNA, 75 bp, synthetic construct
  source 1..75: mol_type = other DNA
catacgggtttcctggatggggttcgtttatcacgtagtcaaataaacaatattgctaaagaaatggagaagcta

SEQ ID NO: 74741 - DNA, 75 bp, synthetic construct
  source 1..75: mol_type = other DNA
gtacagggcagtttgtaacagcagcattaaagcgagaagttgaataccgccagcgacgcaaggctaaagagcaag

SEQ ID NO: 74742 - DNA, 75 bp, synthetic construct
  source 1..75: mol_type = other DNA
tggatcttgctgggaaacgtgtatttatccgtgcggatctgaacgtaccagtaaaagacgggaaagtaaccagcg

SEQ ID NO: 74743 - DNA, 75 bp, synthetic construct
  source 1..75: mol_type = other DNA
ggatgactggtggcgcaacggtcagaacctgtacctggacaatatggaggccaccggcttttgccgggtgtccct

SEQ ID NO: 74744 - DNA, 75 bp, synthetic construct
  source 1..75: mol_type = other DNA
atcccggctgaccactgtctgcatgatgtgcaggatatgagtacgctgaatcatccgaaggcggacctgagcaaa

SEQ ID NO: 74745 - DNA, 75 bp, synthetic construct
  source 1..75: mol_type = other DNA
cattattccggatcgtctggcaaccgctattctgaacgcagccgggcgcacctcagccttcatcagtggtaaggc

SEQ ID NO: 74746 - DNA, 75 bp, synthetic construct
  source 1..75: mol_type = other DNA
ttatgccgaatcggatgtgcagcgtgcggactggcagaaagggctgcaggagggattcagtaactgggtggataa

SEQ ID NO: 74747 - DNA, 75 bp, synthetic construct
  source 1..75: mol_type = other DNA
ggtaacgacggtatcgccgcgttcgttcagcgtctgccgggtgcaattggttacgttgaatatgcttacgcgaag

SEQ ID NO: 74748 - DNA, 75 bp, synthetic construct
  source 1..75: mol_type = other DNA
gacggtttgccacaaaccttctggccagatcactgtgtgcagaacagtgaaggcgcacaattacatccgttactg

SEQ ID NO: 74749 - DNA, 75 bp, synthetic construct
  source 1..75: mol_type = other DNA
gacctgatgttaccgataagcgatctgtgggccggaaggctgcaaaaaatgggctgcccgagggaaaaaattgcc

SEQ ID NO: 74750 - DNA, 75 bp, synthetic construct
  source 1..75: mol_type = other DNA
cacaccgggcgcagtgaaagtcggcaaaggtggcgaatatgccaacctggacgctgtagtgatggatgcggtcaa

SEQ ID NO: 74751 - DNA, 75 bp, synthetic construct
  source 1..75: mol_type = other DNA
gaaaactaaaagtccgaattataatccaggagctgcaaatgatactcatataccattgcctacaggaactattcc

SEQ ID NO: 74752 - DNA, 75 bp, synthetic construct
  source 1..75: mol_type = other DNA
gacggttcgcgcacaggctgaaaaagaagcagccgaactccaggcagcagcaattattgaactggcggaggccac

SEQ ID NO: 74753 - DNA, 75 bp, synthetic construct
  source 1..75: mol_type = other DNA
ctggatatgggaaccgcattgcactgtctgcttctggagcctggagaattcgacaaacgcttcattgtttcaccg

SEQ ID NO: 74754 - DNA, 75 bp, synthetic construct
  source 1..75: mol_type = other DNA
ggtaaggcaccggaaatcaaaccctcgcccggcggcgacacgccatcggggccgtctgaagatgcatccgtacgc

SEQ ID NO: 74755 - DNA, 75 bp, synthetic construct
  source 1..75: mol_type = other DNA
cttgcgtggtgcacgcagaaggcaaatttttagtcgttgaagagacgattaatggtaaagcgttatggaaccaac

SEQ ID NO: 74756 - DNA, 75 bp, synthetic construct
  source 1..75: mol_type = other DNA
gaccagctcaccatcacgctggatgatgcggatggtcagttgcagctaccgccacggggcgcgcgtctgacggtt

SEQ ID NO: 74757 - DNA, 75 bp, synthetic construct
  source 1..75: mol_type = other DNA
aaatcaaaccctcgcccggcggcaacacgccatcgggtccgtctgcagatacgtccgttcgcacaatctccctgc

SEQ ID NO: 74758 - DNA, 75 bp, synthetic construct
  source 1..75: mol_type = other DNA
gtcattgaggccgctgacaatatcaccctgaaaaccagtgagtttgtgctggaggctgaccgcacgcgtattaac

SEQ ID NO: 74759 - DNA, 75 bp, synthetic construct
  source 1..75: mol_type = other DNA
cgccagtggggaacccgggaggatttgacatgtgcgcagtggatctgggggcgggttgtaaacctgtacgaacag

SEQ ID NO: 74760 - DNA, 75 bp, synthetic construct
  source 1..75: mol_type = other DNA
aatttccgctgtcgtcggaaaccttcgtcctcaaccaaatcactgcgtttattgatatgggctttgaggtggaga

SEQ ID NO: 74761 - DNA, 75 bp, synthetic construct
  source 1..75: mol_type = other DNA
tgtggcgcggttctgcgcagcgttgtgtgaatcacatttctgaaccggacaccgaaattccgccgggattcaggg

SEQ ID NO: 74762 - DNA, 75 bp, synthetic construct
  source 1..75: mol_type = other DNA
ggtcatccgtctggggcgttcgtctgtacagcgttgtgtgaatcatatttctgaaccggatacagaaattccgcc

SEQ ID NO: 74763 - DNA, 75 bp, synthetic construct
  source 1..75: mol_type = other DNA
acaaacgtttcgccactggtacttacgcactgtggtatccggtggtgctgcgtcagcaaattaagcgcatgatcc

SEQ ID NO: 74764 - DNA, 75 bp, synthetic construct
  source 1..75: mol_type = other DNA
agcgggaaaaaattaagaggcaggttgttgaactcgtgcgccagagcgggcgcgaaacgttacgacaactggaag

SEQ ID NO: 74765 - DNA, 75 bp, synthetic construct
  source 1..75: mol_type = other DNA
aagaacaataacaagcacggtaaccacagaaaaataacatcagaaaaaaacattccggacacatcacaaacagga

SEQ ID NO: 74766 - DNA, 75 bp, synthetic construct
  source 1..75: mol_type = other DNA
acgcatccgcgatatgcgcgccagcatgtgccgtgtttatttgcaggtgatttgccccctgctggctctcagcca

SEQ ID NO: 74767 - DNA, 75 bp, synthetic construct
  source 1..75: mol_type = other DNA
ggcgtcagaacataatctgccgtgagtgccggaagagcgaagttatgcagcgtgtactggcgttttatcagggga

SEQ ID NO: 74768 - DNA, 75 bp, synthetic construct
  source 1..75: mol_type = other DNA
ttccaaaggagcggatgaaacgccgtaacccgcacctggtatttctgtcccagcaggctctggatattttcattg

SEQ ID NO: 74769 - DNA, 75 bp, synthetic construct
  source 1..75: mol_type = other DNA
tccggaccttatctggtcactacctgatggagaaatacgtcgctacgacagtcgtctaaacataatctgtcgcga

SEQ ID NO: 74770 - DNA, 75 bp, synthetic construct
  source 1..75: mol_type = other DNA
tatcaaaacttgacagtatcattacaaagccaaatcagtatcagtctgatttactgaataaagagttaaacgccg

SEQ ID NO: 74771 - DNA, 75 bp, synthetic construct
  source 1..75: mol_type = other DNA
acacatttgaacctgaaaatacaattaattttatttatgatttttatagtaaaaaacaaaatgatttacttagcg

SEQ ID NO: 74772 - DNA, 75 bp, synthetic construct
  source 1..75: mol_type = other DNA
ccttggtgctcttacaggtcaggcaaacgccgggcagaactacgctaacaacgtcagccaattgtatcaacagca

SEQ ID NO: 74773 - DNA, 75 bp, synthetic construct
  source 1..75: mol_type = other DNA
agcagtacggggtcggaccggtatgcagtgaacagcatattgccccgtcaacgtattaccactgtcagcaacagc

SEQ ID NO: 74774 - DNA, 75 bp, synthetic construct
  source 1..75: mol_type = other DNA
cgcgagacgttgcggcaactggaagccaagacaggtgcgacaagatatctgatgagtgttctcgccagagagctg

SEQ ID NO: 74775 - DNA, 75 bp, synthetic construct
  source 1..75: mol_type = other DNA
ggaaaagcgggaagctgctgggggcaaagctcggcgcgttgctggggaaaacaggtaagtcgttaaaaagtattg

SEQ ID NO: 74776 - DNA, 75 bp, synthetic construct
  source 1..75: mol_type = other DNA
gacgctacctgtcaccggagataataatgcccgggcaggcacatttgttttcagaattcaggctgtgggggtgtt

SEQ ID NO: 74777 - DNA, 75 bp, synthetic construct
  source 1..75: mol_type = other DNA
ccgaaaaggtatagaaatattagttaagcagggagaattgttatcatcattaataaatgatgacaaagaaaacag

SEQ ID NO: 74778 - DNA, 75 bp, synthetic construct
  source 1..75: mol_type = other DNA
ttgcatccgaccttgacgatgcaacacgtaagcagcttgaccacggtcagaaagtgaccgaactgctgaaacaga

SEQ ID NO: 74779 - DNA, 75 bp, synthetic construct
  source 1..75: mol_type = other DNA
ggggggataccgataacagcggaggaaaagccgctgaacaggcttctgcccgtgtggagctggttgccccggatg

SEQ ID NO: 74780 - DNA, 75 bp, synthetic construct
  source 1..75: mol_type = other DNA
tcgcttcacgaccacgccgatgagctttaccgcagctgcctcgcacgcttcggggatgacggtgaaaaccactga

SEQ ID NO: 74781 - DNA, 75 bp, synthetic construct
  source 1..75: mol_type = other DNA
atgacgggccattgtgatattgcgccggatcggaaaaccgatcccggtcctgcatttgattgggcacggtttcgt

SEQ ID NO: 74782 - DNA, 75 bp, synthetic construct
  source 1..75: mol_type = other DNA
cataaatatggtgcacatatttttcataccaatgataaatatatatgggattacgttaatgatttagtagaattt

SEQ ID NO: 74783 - DNA, 75 bp, synthetic construct
  source 1..75: mol_type = other DNA
aaccagctatattgcacgctttgacatagatgcggcagaacgtttatggaaacgcttaaggacttgcgttcagcc

SEQ ID NO: 74784 - DNA, 75 bp, synthetic construct
  source 1..75: mol_type = other DNA
gtcgcccgactgaggcgaaaatcaacagcacaagcaacgatagcaacggtagaacaactaaagggggtaacggct

SEQ ID NO: 74785 - DNA, 75 bp, synthetic construct
  source 1..75: mol_type = other DNA
cgttacgcaatagtcaccggccgtgctgagtataaccctgctccggatctcaccagtgcgatgcaagggcatgac

SEQ ID NO: 74786 - DNA, 75 bp, synthetic construct
  source 1..75: mol_type = other DNA
tgggtatgcctcagatattattgaggcgttccaaaatgatatttttccgtatgtagggacgaggcctgtagggga

SEQ ID NO: 74787 - DNA, 75 bp, synthetic construct
  source 1..75: mol_type = other DNA
ttggttatctcgccacaaatggcctaaataacttagttccagacttccagattctagataatgctgatcactatg

SEQ ID NO: 74788 - DNA, 75 bp, synthetic construct
  source 1..75: mol_type = other DNA
gttaggcggtgatgtccgcctcaccagcgaaaccttaaaactggcgctggcgaaaggtttacaggatgcgggcgt

SEQ ID NO: 74789 - DNA, 75 bp, synthetic construct
  source 1..75: mol_type = other DNA
ccgttctgacgcaggccacaacggacagcgaggcggatttgtctgtgtacaccgccatgcttgatgagctgaacc

SEQ ID NO: 74790 - DNA, 75 bp, synthetic construct
  source 1..75: mol_type = other DNA
aaaatatcagggaataatcgatggcgatcttgcacaagatcataacgtgagaaaaatggttccaatatcagcgag

SEQ ID NO: 74791 - DNA, 75 bp, synthetic construct
  source 1..75: mol_type = other DNA
tcaggggatttctttcatgggttgacagtgccaaatctgatggcagttaccattccctggcggaaagcacggcat

SEQ ID NO: 74792 - DNA, 75 bp, synthetic construct
  source 1..75: mol_type = other DNA
atgaacaccttgtttttactgatggctgaattcaataccccaaacattgaactctcagcagttagccaaaagtac

SEQ ID NO: 74793 - DNA, 75 bp, synthetic construct
  source 1..75: mol_type = other DNA
accgacaaattcctgagtttaccgtcagaactcagaaaatcactgttatacccgcctgggattaagattactgca

SEQ ID NO: 74794 - DNA, 75 bp, synthetic construct
  source 1..75: mol_type = other DNA
ctggtttgtttggtgccgtttgtgcgaatgagttaaaaaagctaaacaaaaaagttttagtgattgagaaaagaa

SEQ ID NO: 74795 - DNA, 75 bp, synthetic construct
  source 1..75: mol_type = other DNA
cgcaatgaagcaggcggtgatcgaccgtgacatacttccggttcttggcaacaaaatgatggctgaaattaccac

SEQ ID NO: 74796 - DNA, 75 bp, synthetic construct
  source 1..75: mol_type = other DNA
tccgggccttatctggacattacccgacggagaaatacgccgctacgacaggcgtatgaacataatctgtcgcga

SEQ ID NO: 74797 - DNA, 75 bp, synthetic construct
  source 1..75: mol_type = other DNA
gaagcgaacggtcgtgaacaactggcggcaacgctggcggcgatgccggagatgacggtggaaaaagcccgcccg

SEQ ID NO: 74798 - DNA, 75 bp, synthetic construct
  source 1..75: mol_type = other DNA
ggggtggatttccgttatcgcattctcggtatcggcccgtgggagcgtcgtctgcgtacgcttattgaacagtat

SEQ ID NO: 74799 - DNA, 75 bp, synthetic construct
  source 1..75: mol_type = other DNA
ggtgccgggtaaaccgctgcagattatctccgttgcccgactgaccgagaaaaaagggctgcatgtggcgattga

SEQ ID NO: 74800 - DNA, 75 bp, synthetic construct
  source 1..75: mol_type = other DNA
aatcgcgttattactgacgtggcgattaaaaaaacggcctccggaacacgtccctgaggccgcctcatcatctta

SEQ ID NO: 74801 - DNA, 75 bp, synthetic construct
  source 1..75: mol_type = other DNA
atgccatcagcgtgatggctgcggcgctgaacacacatgatacaggaggcactatgccgcaattaactgcaacgg

SEQ ID NO: 74802 - DNA, 75 bp, synthetic construct
  source 1..75: mol_type = other DNA
aaaaacagttacgcaggtttatccctgatgctctggatctcattctgacgccatttctgactgtcgtcatttctg

SEQ ID NO: 74803 - DNA, 75 bp, synthetic construct
  source 1..75: mol_type = other DNA
atgagtctgaatatgttctggtttttaccgacccatggtgacgggcactatctgggaacggaagaaggttcacgt

SEQ ID NO: 74804 - DNA, 75 bp, synthetic construct
  source 1..75: mol_type = other DNA
catgaacagtaagcaatggcccggtaaagccgctattggtcgtctgaaaggtgatgaactggcgcaatataattt

SEQ ID NO: 74805 - DNA, 75 bp, synthetic construct
  source 1..75: mol_type = other DNA
agccacatcgggaactcgtcatctattcggccatttgagaaatcttcgtctctggcataaagaattaactgatgc

SEQ ID NO: 74806 - DNA, 75 bp, synthetic construct
  source 1..75: mol_type = other DNA
gcgcgctctggcaggtgctgccggagagtctccgcttaagcccgcatgtgtacctggcgacaaacagccttcagg

SEQ ID NO: 74807 - DNA, 75 bp, synthetic construct
  source 1..75: mol_type = other DNA
cagtacaatttgcaggcgaaaacgcgctggctacaggatgagccacaggggaaagtggcgaagttacgacaccgt

SEQ ID NO: 74808 - DNA, 75 bp, synthetic construct
  source 1..75: mol_type = other DNA
gtggctggtctgccggggggaaattcataaattctgctgtgtgccacatctgacaggacggcgctttgagcacgg

SEQ ID NO: 74809 - DNA, 75 bp, synthetic construct
  source 1..75: mol_type = other DNA
gaagaagagccagagcaacaggataacggccagagcagcgcggggggaacagggcaggcggctgccccgccagaa

SEQ ID NO: 74810 - DNA, 75 bp, synthetic construct
  source 1..75: mol_type = other DNA
gcagccagagagtatgcaagccaggctgcggagccgtataaacaagttttgcagccgcttcccgatgtgtggata

SEQ ID NO: 74811 - DNA, 75 bp, synthetic construct
  source 1..75: mol_type = other DNA
atggacgtgacaaacgatgattacatccgtctgttgtcggcactgctgccgcccggtccggcgtggtcagccagc

SEQ ID NO: 74812 - DNA, 75 bp, synthetic construct
  source 1..75: mol_type = other DNA
cggcaacgctggcggcgatgccggagatgacggtggaaaaagcccgcccgatcctggctgcttcaccgcaggcga

SEQ ID NO: 74813 - DNA, 75 bp, synthetic construct
  source 1..75: mol_type = other DNA
gcaaaatatggcacaagcggaaaattccaggccggaggatggcaacaagttgaaggcagggcaagagttgaagcc

SEQ ID NO: 74814 - DNA, 75 bp, synthetic construct
  source 1..75: mol_type = other DNA
gatgccaggttatatccaacagcccggcatggtgtgttcccgtcagaggaagcctggctggcctggaggagtgaa

SEQ ID NO: 74815 - DNA, 75 bp, synthetic construct
  source 1..75: mol_type = other DNA
gccacggcagtggaaaatggaaaaggggaccaccctgaaagacggactggcccgctggacatcatccgaaaaatg

SEQ ID NO: 74816 - DNA, 75 bp, synthetic construct
  source 1..75: mol_type = other DNA
caaaacactttgtctgcaatcacagggcagggtgccgaactggtagcaatgctgactaattctaaaactggggga

SEQ ID NO: 74817 - DNA, 75 bp, synthetic construct
  source 1..75: mol_type = other DNA
ggcaagccatcaacgttcacgatgctatccatcacgtctggcaattactgcgtatgccccagcaattcccggcga

SEQ ID NO: 74818 - DNA, 75 bp, synthetic construct
  source 1..75: mol_type = other DNA
ctccgtctgccgggacagcagtatgatgaggagtcggggctgtactacaaccgcaaccggtactatgatccgttg

SEQ ID NO: 74819 - DNA, 75 bp, synthetic construct
  source 1..75: mol_type = other DNA
ggatggtatcagccgttaccgcgtgaggtcatttatctgaaccggtttaccggacggatatcccgtcgcaggaca

SEQ ID NO: 74820 - DNA, 75 bp, synthetic construct
  source 1..75: mol_type = other DNA
ggcgtctgaatataatctgtagcgagtgccgtaagagcgaagttatgaagcgtgtactgatgttttatcgaggaa

SEQ ID NO: 74821 - DNA, 75 bp, synthetic construct
  source 1..75: mol_type = other DNA
gatccggcgattgccggtgcggcaccgtcattaacccgtgttcatcagcgtgcggatgccctgatgcgggagctg

SEQ ID NO: 74822 - DNA, 75 bp, synthetic construct
  source 1..75: mol_type = other DNA
gagtgccggaagagcgaagctatgcagcgtgtactggctttctatcagggtaattttcagaaggtgctgttgtga

SEQ ID NO: 74823 - DNA, 75 bp, synthetic construct
  source 1..75: mol_type = other DNA
gcgatccctgtgattccgcactgcgtatctggggcgacaccgttgtcgagtgtgtgcttaacaaactctgcccgt

SEQ ID NO: 74824 - DNA, 75 bp, synthetic construct
  source 1..75: mol_type = other DNA
cagtgccagctacagcatgtcacacgatctcaacggtcggatgaccaatctggccggtgtatacggtacgttgct

SEQ ID NO: 74825 - DNA, 75 bp, synthetic construct
  source 1..75: mol_type = other DNA
ataatttgatgccatatacgcaacaaagcatacttaatacggttaaaaacaatcagttaccagaggatatcaaaa

SEQ ID NO: 74826 - DNA, 75 bp, synthetic construct
  source 1..75: mol_type = other DNA
tacccagggcgatattttcgatggtattaactttcgcggcgcacaattggcctcagatgacaatatgttacccga

SEQ ID NO: 74827 - DNA, 75 bp, synthetic construct
  source 1..75: mol_type = other DNA
ttcaggttaagccgaaattcaccgactattacaatctcgcttataacaaacgcgggaaattacaactcaccgtta

SEQ ID NO: 74828 - DNA, 75 bp, synthetic construct
  source 1..75: mol_type = other DNA
tttgtgttacgcaagacttatcagaacgagcaggcagcaagacgcgcagcggcggcaaagtggcagcaactacaa

SEQ ID NO: 74829 - DNA, 75 bp, synthetic construct
  source 1..75: mol_type = other DNA
acgaatctctggtatgtggcgtgtttccaaaccaggacggcgcgttcaccgcgatgacgtataccagaagcaaaa

SEQ ID NO: 74830 - DNA, 75 bp, synthetic construct
  source 1..75: mol_type = other DNA
taacgagtggggtcttcgcatttctggtacctgcgtcttgcctgaaccagaaaggctcagacacccgccgcgata

SEQ ID NO: 74831 - DNA, 75 bp, synthetic construct
  source 1..75: mol_type = other DNA
cagatacggaagtggagtgagtggggaacgtgcctgagttttgttacgttgggtatgatggcgtgggctttacgg

SEQ ID NO: 74832 - DNA, 75 bp, synthetic construct
  source 1..75: mol_type = other DNA
atggctcgttcttttaaagtcttatcgccaacggcaatcctcgggtatggattcccggaagagagcttccgcaaa

SEQ ID NO: 74833 - DNA, 75 bp, synthetic construct
  source 1..75: mol_type = other DNA
atgatgacatccagctggcaaaagctgctttatcggaattgccagatctcaccgctcaacggaaaacattgcgtg

SEQ ID NO: 74834 - DNA, 75 bp, synthetic construct
  source 1..75: mol_type = other DNA
caccgctgaacgtcagcgtctgaaagagccggaacgtgaaaatcgtgaactgcgccgtagtaacgatatccttcg

SEQ ID NO: 74835 - DNA, 75 bp, synthetic construct
  source 1..75: mol_type = other DNA
atgcggatggtcagttgcagctaccgccacggggcgcgcgcctgacggttctcattggctggaaaggagaaccgc

SEQ ID NO: 74836 - DNA, 75 bp, synthetic construct
  source 1..75: mol_type = other DNA
tcgagtacaaacctcgtcaggtaatgctggcggatgggatggatggcaaggtcatggtccccgctgtcactcatg

SEQ ID NO: 74837 - DNA, 75 bp, synthetic construct
  source 1..75: mol_type = other DNA
ttaagttcctggcggaagtgcgtcagcacacctggtcatccggtaccaacggcgtggtggctgcaacgttctcac

SEQ ID NO: 74838 - DNA, 75 bp, synthetic construct
  source 1..75: mol_type = other DNA
ataaaagctattcaggcgatgggagcaaccccaacgccaatgccattaggtgaagtttatcctgcgttaacccag

SEQ ID NO: 74839 - DNA, 75 bp, synthetic construct
  source 1..75: mol_type = other DNA
ttcagcacctcaggaaaataagtgctgtgctgctcaggctgataagcagaacattaaaattatttccttttggtc

SEQ ID NO: 74840 - DNA, 75 bp, synthetic construct
  source 1..75: mol_type = other DNA
gtgcctgcgctgatgtatgccagctataaggcgagtgattatgtggaggagaaacagaaccagcttgaatcatgg

SEQ ID NO: 74841 - DNA, 75 bp, synthetic construct
  source 1..75: mol_type = other DNA
tgggatcttaaaactctccctgaggggcaatacagtcttgttgccgcagcagaggagatgcacgggcctttaacg

SEQ ID NO: 74842 - DNA, 75 bp, synthetic construct
  source 1..75: mol_type = other DNA
atggcaacaccaaatcccctggcgccggtaaaaggtgccggtaccacactgtgggtttacaccggcacgggtgat

SEQ ID NO: 74843 - DNA, 75 bp, synthetic construct
  source 1..75: mol_type = other DNA
cgccgtcgttcggttatcgacaacccaaaacgtgaccggattgaaaattttgaatccgttaacgaagcctatgtg

SEQ ID NO: 74844 - DNA, 75 bp, synthetic construct
  source 1..75: mol_type = other DNA
ccagaaagctacccagtcggcgcaccaatcccgtggccatcagataccgttccgtctggttatgccctgatgcag

SEQ ID NO: 74845 - DNA, 75 bp, synthetic construct
  source 1..75: mol_type = other DNA
caactaattattatgcccctgccagtgatagaggcattgcatggaatgatcctacaattggtattaggtggcccg

SEQ ID NO: 74846 - DNA, 75 bp, synthetic construct
  source 1..75: mol_type = other DNA
cggagagcgaggagaaaaaggtgaccccggacccgccggacctcagggggtaccgggacctcagggtccaaaagg

SEQ ID NO: 74847 - DNA, 75 bp, synthetic construct
  source 1..75: mol_type = other DNA
ccggggattcgcactcctgcttatcggcaaatcatcagcgcaatagacaacatgactcacagtgagcaggaaaaa

SEQ ID NO: 74848 - DNA, 75 bp, synthetic construct
  source 1..75: mol_type = other DNA
tcgaagtcaagtaaaggtgttttacgtggtcttcattaccagttagaaccctatgctcaagcaaaactggtgcgc

SEQ ID NO: 74849 - DNA, 75 bp, synthetic construct
  source 1..75: mol_type = other DNA
gctgtaaataatcaagttcagtttggcgttgtgaatgtaaacgagactaaaaataaagactttaaaatttctctc

SEQ ID NO: 74850 - DNA, 75 bp, synthetic construct
  source 1..75: mol_type = other DNA
cggtgcaggtgattctaatcgttgtcatcactggtttagcgacgatttcggtggtgtccggcctggacaagggaa

SEQ ID NO: 74851 - DNA, 75 bp, synthetic construct
  source 1..75: mol_type = other DNA
gagtaaagaagatttacttaaacctgtaaatagcaatcagtatcggtattgtgcaaaacataaatttaaacaaaa

SEQ ID NO: 74852 - DNA, 75 bp, synthetic construct
  source 1..75: mol_type = other DNA
ctgggacgatacatcgctgaattttgaccaccacgattttctgtggtgcccgagacataaaaacactgaccggca

SEQ ID NO: 74853 - DNA, 75 bp, synthetic construct
  source 1..75: mol_type = other DNA
cctattctgagcataaaatggccgacgatagaacataataattatattttatcgattaaagatgcaagggctaaa

SEQ ID NO: 74854 - DNA, 75 bp, synthetic construct
  source 1..75: mol_type = other DNA
aggtgttgcggccggtaaagcgcagatccctgttgtcactggcaatggtgagtttgcggcggtggcggagatcac

SEQ ID NO: 74855 - DNA, 75 bp, synthetic construct
  source 1..75: mol_type = other DNA
atggcaacaccaaatcccctggagccggtaaaaggtgccggtaccacactgtgggtttacaccggcaagggtgat

SEQ ID NO: 74856 - DNA, 75 bp, synthetic construct
  source 1..75: mol_type = other DNA
cgtcgttactgttctggaagcacaggcttacagccgcaaagttgaagcccgctttctgatcacccgtaagataga

SEQ ID NO: 74857 - DNA, 75 bp, synthetic construct
  source 1..75: mol_type = other DNA
actcggtcggtacgcgtaccattgttgatgtgttggatgcgaccaccacgctgtacaacgccaagcaagagctgg

SEQ ID NO: 74858 - DNA, 75 bp, synthetic construct
  source 1..75: mol_type = other DNA
tcattgtagtgcaggaaatttttggcgtgcatgaacatatccgcgacatttgtcgccgtctggcgctggaggggt

SEQ ID NO: 74859 - DNA, 75 bp, synthetic construct
  source 1..75: mol_type = other DNA
cgcttgacgaggccgagtccaccgcaggccaactaacaggactgccaaccatccagagatgtcattggtgtatat

SEQ ID NO: 74860 - DNA, 75 bp, synthetic construct
  source 1..75: mol_type = other DNA
ggatgtgttccgtggctgggtgagcgccattggtaaagcggtgaccgccaaagaggtgatcacccgtacggtaaa

SEQ ID NO: 74861 - DNA, 75 bp, synthetic construct
  source 1..75: mol_type = other DNA
cagatgtactgatttttgaaccgaaagtttttagtgatgagcgtggtttctttttcgagagctttaaccagaaga

SEQ ID NO: 74862 - DNA, 75 bp, synthetic construct
  source 1..75: mol_type = other DNA
tttttgacaatcaacgctccaccaaacgcggagacttctcctccggtagtcacttcgtcactctgtatttttacc

SEQ ID NO: 74863 - DNA, 75 bp, synthetic construct
  source 1..75: mol_type = other DNA
ttacgacatcctgctgcagtacattcaggagctgatacagcaggcccgggcgatggtggccacaggaaattatga

SEQ ID NO: 74864 - DNA, 75 bp, synthetic construct
  source 1..75: mol_type = other DNA
acaatttaggtactggacagggatattctgttcttgatgtcattaatacatttcaaaaaatatccggaatagcaa

SEQ ID NO: 74865 - DNA, 75 bp, synthetic construct
  source 1..75: mol_type = other DNA
tgcctattactgaagaatgtgctataggttgcactttaaatccttatggtacatcgaaatatatatcagagttga

SEQ ID NO: 74866 - DNA, 75 bp, synthetic construct
  source 1..75: mol_type = other DNA
ttttaggctggaaagccaagtacaatattgaagatatgatggctcatacctggaattggcaaaagcaaaacccta

SEQ ID NO: 74867 - DNA, 75 bp, synthetic construct
  source 1..75: mol_type = other DNA
aatctggatcgaaacgcccactaacccactgttggaattagttgatattgaagcagtatgccaggttgccaaaag

SEQ ID NO: 74868 - DNA, 75 bp, synthetic construct
  source 1..75: mol_type = other DNA
ggtatcgaaccggtggtggttgccgccagtgatgacgatgccgacgtgcagctggcggacgccatccgggcgctg

SEQ ID NO: 74869 - DNA, 75 bp, synthetic construct
  source 1..75: mol_type = other DNA
taccgtgataacgccatcgcctataaagaacagcgtgataaaaaagtcagtgagctgaagcaggcgaccgccacc

SEQ ID NO: 74870 - DNA, 75 bp, synthetic construct
  source 1..75: mol_type = other DNA
gatattaaagtatataagggggatgtagcagatcttcgtttattgaatcttattttttctaatcatgatattcat

SEQ ID NO: 74871 - DNA, 75 bp, synthetic construct
  source 1..75: mol_type = other DNA
ctgcgttacgacggcaaaactaaccagcaactggtgcgcgagatgatggcgctgggcgacaaaatcgaactgcat

SEQ ID NO: 74872 - DNA, 75 bp, synthetic construct
  source 1..75: mol_type = other DNA
aacttggatggaaagcgaagcgcggactggaagacatggttcgagatgcctggaattggcaacaaaagaatccaa

SEQ ID NO: 74873 - DNA, 75 bp, synthetic construct
  source 1..75: mol_type = other DNA
gaaatcccgctggtcaccttcctgacgattatgttcaagaagaaccctctggggacgttcaaacagcacgagaac

SEQ ID NO: 74874 - DNA, 75 bp, synthetic construct
  source 1..75: mol_type = other DNA
atgaatgtcaaaatccgaaatgaaattcaggcattaatccgaattcaggaacgcaataacaacggtggtgaatta

SEQ ID NO: 74875 - DNA, 75 bp, synthetic construct
  source 1..75: mol_type = other DNA
gcatcgtctggctggcagacagtgctggagcatcacgccccgctctggcagcaggtcagtcaggtggaacatcga

SEQ ID NO: 74876 - DNA, 75 bp, synthetic construct
  source 1..75: mol_type = other DNA
ttcaggaagagcatcaggtacgtgtagtgatgattaacggcgatccgtggtttgtggcgaatgatatttgcaatg

SEQ ID NO: 74877 - DNA, 75 bp, synthetic construct
  source 1..75: mol_type = other DNA
gcatcagcaaaagcctctgaggcatcaaaaagtgctgctgctgcagagtcatcaaaaagcgcggcagctaccagc

SEQ ID NO: 74878 - DNA, 75 bp, synthetic construct
  source 1..75: mol_type = other DNA
cgtgggtggactggtataacaatcgacgattgctggaaaggctgggccatactcctccggcagaagcagaaaaag

SEQ ID NO: 74879 - DNA, 75 bp, synthetic construct
  source 1..75: mol_type = other DNA
aagataaaaaaattacgtggtgatattagagatagacatatattaaaaaatatcttttcaaaatataatgtttct

SEQ ID NO: 74880 - DNA, 75 bp, synthetic construct
  source 1..75: mol_type = other DNA
cgcccgtcggggccaacgccaattgagttgctgaaacaggaatatgaacgccggaaagcggctgggtttgtttga

SEQ ID NO: 74881 - DNA, 75 bp, synthetic construct
  source 1..75: mol_type = other DNA
tgcagcgggtgttcactccggacgaccgtgagcaggtgctggccgtctatggtccggtacatgcccggttgctgc

SEQ ID NO: 74882 - DNA, 75 bp, synthetic construct
  source 1..75: mol_type = other DNA
cgttcagcaaagggggttttgcgcgggttacattttcaaacgaatcaaccgcaaggcaagttagtttctgttacc

SEQ ID NO: 74883 - DNA, 75 bp, synthetic construct
  source 1..75: mol_type = other DNA
gttgaggactaccgctgcgctgcactggtggaaaacatccagattggcgatttcagcgccgccgcagcagaagcc

SEQ ID NO: 74884 - DNA, 75 bp, synthetic construct
  source 1..75: mol_type = other DNA
cattcgacgtgtttcatattggacatgttaatatattaaaaagggcgaaggagtttggtgatttgctgattgtgg

SEQ ID NO: 74885 - DNA, 75 bp, synthetic construct
  source 1..75: mol_type = other DNA
atggcaaaacgcgttacaaaattaaaggctgtagccgaggccgcaccgcagacccgcgaagaagtcagccgcgat

SEQ ID NO: 74886 - DNA, 75 bp, synthetic construct
  source 1..75: mol_type = other DNA
ccccaaccaggacggcacgtttaccgcgatgacgtataccagaagcaaaacgtttaaaactgaagctggcgcgcg

SEQ ID NO: 74887 - DNA, 75 bp, synthetic construct
  source 1..75: mol_type = other DNA
cccgtccggacagatgaagagctgatgtttctgggggaaggtatcgcgggaggaataagaattgagccagatagc

SEQ ID NO: 74888 - DNA, 75 bp, synthetic construct
  source 1..75: mol_type = other DNA
cgtgtttcccaaccaggacggcacgttcaccgcgatgacgtataccagaagcaaaacgtttaaaaccgaagctgg

SEQ ID NO: 74889 - DNA, 75 bp, synthetic construct
  source 1..75: mol_type = other DNA
tcacccgagccggtgcggaaaaactggcggcggcgacgctcccgaacgggaagaaagtcaattttgctgtgatgg

SEQ ID NO: 74890 - DNA, 75 bp, synthetic construct
  source 1..75: mol_type = other DNA
gattatgtcgacgacaaactcgcagagcatgagcagtcccgccgccatcctgacgccacgctgaaagaaaaaggg

SEQ ID NO: 74891 - DNA, 75 bp, synthetic construct
  source 1..75: mol_type = other DNA
agctaagttgggttgctaaaaggactcttaataatatggtggaagatgcatggagatggcaaacaatgaatccaa

SEQ ID NO: 74892 - DNA, 75 bp, synthetic construct
  source 1..75: mol_type = other DNA
aaatcgttgagaaaggcaaaacggcaccgcgcgttacgccagaccatatcgaaggaattattgctcaggaggcat

SEQ ID NO: 74893 - DNA, 75 bp, synthetic construct
  source 1..75: mol_type = other DNA
tgcgtccatctcgaagaaaaagagtgggatcgtctcagcgaaaccaaatccagcattgctttctgtccgacctcc

SEQ ID NO: 74894 - DNA, 75 bp, synthetic construct
  source 1..75: mol_type = other DNA
atcaacggggacaaattttaaccctggcagatgcgggtcactatgacactgcactggttaaacttcagcagatta

SEQ ID NO: 74895 - DNA, 75 bp, synthetic construct
  source 1..75: mol_type = other DNA
tgcagtaacccgacaagatatgcatatgaaaccgccttggctgagttggaaggaggtatctatgctacggcaacc

SEQ ID NO: 74896 - DNA, 75 bp, synthetic construct
  source 1..75: mol_type = other DNA
attgccggtgagagcaatatttttgctgactgggccgcgtcccgtcagggctgcacggtcggaggacagtcatcg

SEQ ID NO: 74897 - DNA, 75 bp, synthetic construct
  source 1..75: mol_type = other DNA
ccggcgaaagcaaagaaaatggctgctctgatagaaaactggactccacctgatggttggtgcaatgggaatgat

SEQ ID NO: 74898 - DNA, 75 bp, synthetic construct
  source 1..75: mol_type = other DNA
cgctgactcacttaaagttaacagccgtgtcagcgacccggacagtgcccggattaaagcggattcagcactggc

SEQ ID NO: 74899 - DNA, 75 bp, synthetic construct
  source 1..75: mol_type = other DNA
aggttgcgcagcgtgcagataaaatgttgctcgccctaacaaaacagattcaggagcaaaagcaggagtttcagg

SEQ ID NO: 74900 - DNA, 75 bp, synthetic construct
  source 1..75: mol_type = other DNA
gctttcaagcatgcgtatcgtcagcaatatcaatattactttgcagataaacaaatgtctgccaggggttcgtat

SEQ ID NO: 74901 - DNA, 75 bp, synthetic construct
  source 1..75: mol_type = other DNA
aaaagagtggacgttcaccctgaaggacaatgctaaatttgccgatggcacacctgtcactgccgaagcagtaaa

SEQ ID NO: 74902 - DNA, 75 bp, synthetic construct
  source 1..75: mol_type = other DNA
cgggcattaggtgttgagcttgagacagaacggttcaataagaccattcaggaaatcagtatgttatcagcaaat

SEQ ID NO: 74903 - DNA, 75 bp, synthetic construct
  source 1..75: mol_type = other DNA
aaatgggttatcagggcgagaagctgctgtcctgcggtacgttctctatagacgagatcgaggtgagttcgcccg

SEQ ID NO: 74904 - DNA, 75 bp, synthetic construct
  source 1..75: mol_type = other DNA
aggaagaagtggggcgattgggtaacgtgcttaagtttggcgattttagctcaggggccgttattcaattattta

SEQ ID NO: 74905 - DNA, 75 bp, synthetic construct
  source 1..75: mol_type = other DNA
tcagctggtttaaccctgaagatcttgccactaagcgtaaagcgatgaaccgtggactacggaaaattttgctcg

SEQ ID NO: 74906 - DNA, 75 bp, synthetic construct
  source 1..75: mol_type = other DNA
gggaatattaccgttaatgcggcaattaacaaaagcaacggaagtgatgccagcctgacgctgcaggctggcggc

SEQ ID NO: 74907 - DNA, 75 bp, synthetic construct
  source 1..75: mol_type = other DNA
cttcaggctgcacagagccttgcccccatcagcgtcatgatggatcagatggggatgaacggggagtcggcaggt

SEQ ID NO: 74908 - DNA, 75 bp, synthetic construct
  source 1..75: mol_type = other DNA
aagcctggtgatgtggtggctgatttctttatggggtccggttcgaccgtgaaaatcgcgctggaacttggccgc

SEQ ID NO: 74909 - DNA, 75 bp, synthetic construct
  source 1..75: mol_type = other DNA
catttcctggaaaacagcatatgatgcttttagatattccagttgatgttgttgaagatggttggtggaataaat

SEQ ID NO: 74910 - DNA, 75 bp, synthetic construct
  source 1..75: mol_type = other DNA
tgacgagcttatagaaaaagctattgctttcaagcatgcgtatcgtcagcaataccaacaaaaagctggatggaa

SEQ ID NO: 74911 - DNA, 75 bp, synthetic construct
  source 1..75: mol_type = other DNA
tgggatctcaaactatgttggcgagttccttacgttggagcaggctaaagagcagaccataagctgggtgaaagc

SEQ ID NO: 74912 - DNA, 75 bp, synthetic construct
  source 1..75: mol_type = other DNA
cagggcaacaccatcaccggtgcaatgggcggcagggtcaaaaatccggagctgaccgccaaaaaagaacaggag

SEQ ID NO: 74913 - DNA, 75 bp, synthetic construct
  source 1..75: mol_type = other DNA
ccagctttgaaaaggcgctgagcgagctggaacagattgtaacccgtctggaaagtggcgacctgccgctggaag

SEQ ID NO: 74914 - DNA, 75 bp, synthetic construct
  source 1..75: mol_type = other DNA
ggacgtcgtgcaactggcgttgaactggagactgaacgttttgagcagacggtgcgggaagtacaggatttaatc

SEQ ID NO: 74915 - DNA, 75 bp, synthetic construct
  source 1..75: mol_type = other DNA
attatcaacgtattcagacacagtcagcaggtgctcatacccactcgctgtctggtactgcagcaagttctggcg

SEQ ID NO: 74916 - DNA, 75 bp, synthetic construct
  source 1..75: mol_type = other DNA
gaaaactggtttgaccgcactgtgagtgctgatgccgcaggtatcatcctgacttcccttgtgattaaccgccag

SEQ ID NO: 74917 - DNA, 75 bp, synthetic construct
  source 1..75: mol_type = other DNA
tggaaggcgctctggctgttattgctgttgtgggtgtttactgcctggttgtgtttttgatggagcgcctgggga

SEQ ID NO: 74918 - DNA, 75 bp, synthetic construct
  source 1..75: mol_type = other DNA
acagccatgctgacacagtttcgtgctgacctctccgtgtttaacgcgcagtgccatggtggcagtgctgcagat

SEQ ID NO: 74919 - DNA, 75 bp, synthetic construct
  source 1..75: mol_type = other DNA
cccggctgaccactgcctgcatgatgtgcaggatatgagtacgctgaatcatccgaaggcagacctgagcaaagg

SEQ ID NO: 74920 - DNA, 75 bp, synthetic construct
  source 1..75: mol_type = other DNA
ccatcatcaactcaatgtatggcaatcctgaatttgttgtgatgccttgtcgtgatcatggcgatttcaacgtgg

SEQ ID NO: 74921 - DNA, 75 bp, synthetic construct
  source 1..75: mol_type = other DNA
tgcctgggcttatgaattgtctgctgacatccggttaggaaaagttagtgatgatttgatggaactattacgtta

SEQ ID NO: 74922 - DNA, 75 bp, synthetic construct
  source 1..75: mol_type = other DNA
gcaaactggtttgaccgtaccgtgagtgctgatgccgcaggtgtcattctgacttctcttgtgattaaccgccag

SEQ ID NO: 74923 - DNA, 75 bp, synthetic construct
  source 1..75: mol_type = other DNA
tcgataaaggaaaggatggttacgatcagatccagcagaagatgaataaacaggccagcctgaataaacgtgttc

SEQ ID NO: 74924 - DNA, 75 bp, synthetic construct
  source 1..75: mol_type = other DNA
gcctcacgagcctactggcccttatgggacagatcgcgatcctgctcagcctgcccgcgcagctggttggcgcgg

SEQ ID NO: 74925 - DNA, 75 bp, synthetic construct
  source 1..75: mol_type = other DNA
gcaggcaataaagtcgccgtcgcccgcgttgaattacacaatgaagaacagctttatattgccagtgccaccgcc

SEQ ID NO: 74926 - DNA, 75 bp, synthetic construct
  source 1..75: mol_type = other DNA
ggagcgggtgccgggggcggacgaggtgctgccgccggagccgcccgcataccgggtgctgacgggcgtggtgga

SEQ ID NO: 74927 - DNA, 75 bp, synthetic construct
  source 1..75: mol_type = other DNA
ccatgcattgcacagcaacatgcggcaaaagtgtttaatgccgataaaacatacttcgttctaaatggcacttca

SEQ ID NO: 74928 - DNA, 75 bp, synthetic construct
  source 1..75: mol_type = other DNA
tgtttatcgtgttcagattgtttggtcgtgaatggtcgtttgacctcaaggacagaggccgtgaagacaaccaca

SEQ ID NO: 74929 - DNA, 75 bp, synthetic construct
  source 1..75: mol_type = other DNA
ttgttgttccggacaatctgaaaagcgccacatccagggcatgtaagtatgatcctgacgttaaccctacctacc

SEQ ID NO: 74930 - DNA, 75 bp, synthetic construct
  source 1..75: mol_type = other DNA
cgtgcaactggcgttgaactggagactgaacgttttgagcagacggtgcgggaagtacaggatttaatcattcgt

SEQ ID NO: 74931 - DNA, 75 bp, synthetic construct
  source 1..75: mol_type = other DNA
atatcaccctgggcgttcaggccggttatgcccacagcatcaacggcagcagcgctgaaggttatagcagtcagg

SEQ ID NO: 74932 - DNA, 75 bp, synthetic construct
  source 1..75: mol_type = other DNA
ctcaaccgacgttgaaggcgatctggcaagtagctggaaagcgtctgacgatcaaaaagagtggacgttcaccct

SEQ ID NO: 74933 - DNA, 75 bp, synthetic construct
  source 1..75: mol_type = other DNA
ggccaggataacgccagttatgtgaagttcgggcatggcagtgcacaacatgtgcgtgccggcttccgtctgggc

SEQ ID NO: 74934 - DNA, 75 bp, synthetic construct
  source 1..75: mol_type = other DNA
ttcagcccagtgggatgcaggccattaccgtacaacagctgcggcacctcagctcagatttgatgaacgcaatat

SEQ ID NO: 74935 - DNA, 75 bp, synthetic construct
  source 1..75: mol_type = other DNA
ggggagaatccccaggttatctggaaaaagataaacattacagagaagccgatgcggctttacttaatgttattt

SEQ ID NO: 74936 - DNA, 75 bp, synthetic construct
  source 1..75: mol_type = other DNA
ggctggaccagtgtctggcgcagttctggcgggtactgaagcctgccggaagtctttacctgttctgtggtcatc

SEQ ID NO: 74937 - DNA, 75 bp, synthetic construct
  source 1..75: mol_type = other DNA
ttttggcttttttcatttctgacaggatattacaaaccacagtttaagaaagaatatgaaatgattaattataat

SEQ ID NO: 74938 - DNA, 75 bp, synthetic construct
  source 1..75: mol_type = other DNA
acgagattggtgtggtgtttaaataccttggtattgataacgtctcattcaaccacgacggtacattttcacctg

SEQ ID NO: 74939 - DNA, 75 bp, synthetic construct
  source 1..75: mol_type = other DNA
ttcacctgttggcgaatactcatctgcccccgttaaaaaacaatatgagtaccctgttttttctcatgttcaggc

SEQ ID NO: 74940 - DNA, 75 bp, synthetic construct
  source 1..75: mol_type = other DNA
atgactctgggcgccaacctggggcgatgggtactttccagcaatatgaacctttcccatcgttccggtgagaca

SEQ ID NO: 74941 - DNA, 75 bp, synthetic construct
  source 1..75: mol_type = other DNA
cagtcagggcacaccgcaggcagaacacctgccggagccaaaaccccgcctgccatcttccgaaggcgactggtc

SEQ ID NO: 74942 - DNA, 75 bp, synthetic construct
  source 1..75: mol_type = other DNA
tttctttgttagcgatgagtatttatacgcatctcggatatgctacggacttaaatctggattttatccagggaa

SEQ ID NO: 74943 - DNA, 75 bp, synthetic construct
  source 1..75: mol_type = other DNA
tgccactaagcgtaaagcgatggcccgtggactacgaaaaattttgctcgcccgccacgccttgttcgatgaagt

SEQ ID NO: 74944 - DNA, 75 bp, synthetic construct
  source 1..75: mol_type = other DNA
gcctcggtgtggctaaacaaactgttaaccgttggatcagagaaaaaggctggaaaacggaaaaatttcctggcg

SEQ ID NO: 74945 - DNA, 75 bp, synthetic construct
  source 1..75: mol_type = other DNA
acgccatgactgacgcctgcccatggtgtcgcgccaacccggagaaattcactgtgtatgtgaataacggaggca

SEQ ID NO: 74946 - DNA, 75 bp, synthetic construct
  source 1..75: mol_type = other DNA
aacgctattgctgtaaagaccgcatcacctaagagcacaggcggacaggtaaaaagccgagtgccaaccaatgca

SEQ ID NO: 74947 - DNA, 75 bp, synthetic construct
  source 1..75: mol_type = other DNA
attaatcggcgaaatttgtctgctggaaaaaggcgtcaataccgcggtcaccaaagcacaaaatctgtttcgcca

SEQ ID NO: 74948 - DNA, 75 bp, synthetic construct
  source 1..75: mol_type = other DNA
caacctgacgccattcttatcccgcaacaaggcgttagccgcacaccgcgtggtgatgcaaccgtgctgattgtt

SEQ ID NO: 74949 - DNA, 75 bp, synthetic construct
  source 1..75: mol_type = other DNA
tgcgatgggcacactggtaccgacattcgccgcggtcaccgatataccgacaaagagtgtgacaacctgcttaag

SEQ ID NO: 74950 - DNA, 75 bp, synthetic construct
  source 1..75: mol_type = other DNA
tggtggatacgtatacgtcactgaaccggcagtatgtggagctgcagagtgaatataagcatctgcggcggtatt

SEQ ID NO: 74951 - DNA, 75 bp, synthetic construct
  source 1..75: mol_type = other DNA
ttgttgcagaccacaactgatgaggcagcggagtttaccgggatgattcctgtttatcattttctggtcagtgcc

SEQ ID NO: 74952 - DNA, 75 bp, synthetic construct
  source 1..75: mol_type = other DNA
tccggataaaggggcttttatcgataacgtcggtttacgggaaacggtaaacagggcggcgaatgccctgccatc

SEQ ID NO: 74953 - DNA, 75 bp, synthetic construct
  source 1..75: mol_type = other DNA
atgttggcatttaaagctatttcttcagataaagaagaagaatggtctcaagctttaactacatgtcgtaggctt

SEQ ID NO: 74954 - DNA, 75 bp, synthetic construct
  source 1..75: mol_type = other DNA
caggctatcggcgtagaactggaagaggaacgtttcaaccagacggtaagtgaggtaaggcagctggcaggggaa

SEQ ID NO: 74955 - DNA, 75 bp, synthetic construct
  source 1..75: mol_type = other DNA
ccggacgttggaatgggtgtaataaagaaagtctgcgcgcatattttcctgccacagagcgcgttctgtttgctg

SEQ ID NO: 74956 - DNA, 75 bp, synthetic construct
  source 1..75: mol_type = other DNA
cgaagtggatgctgttaccggcgacagcacgccggtgagcgttctgggcattattgctgtcgaggccggggccgc

SEQ ID NO: 74957 - DNA, 75 bp, synthetic construct
  source 1..75: mol_type = other DNA
cgtatctgatttacgagctggggccatcccgcgagcaccgggcggagcatgtgaaatgggcgcgtctgtgtctgc

SEQ ID NO: 74958 - DNA, 75 bp, synthetic construct
  source 1..75: mol_type = other DNA
accccggtgagtgtgaccgggatccttgcagttgaaacgggagcggcagtttccagaggggcactggtacagtct

SEQ ID NO: 74959 - DNA, 75 bp, synthetic construct
  source 1..75: mol_type = other DNA
cgaccaggtgatctggttgctgatttttttatgggatccggttccacaataaaagcagcaatggcgctggggcgt

SEQ ID NO: 74960 - DNA, 75 bp, synthetic construct
  source 1..75: mol_type = other DNA
aggcccggcgatgtggtagctgatttctttatgggctcgggatcaactgttaaagcagccattgaactgggccgc

SEQ ID NO: 74961 - DNA, 75 bp, synthetic construct
  source 1..75: mol_type = other DNA
ttccggtgagtccggtcggtgcaagagttaagtttatccgatctgagattatggaattctacaaaaacaaaggcg

SEQ ID NO: 74962 - DNA, 75 bp, synthetic construct
  source 1..75: mol_type = other DNA
accaccgctctcgccggtggtctgctggctgttcccctgcagatcaaaaacattcagcagaacgggatcacacca

SEQ ID NO: 74963 - DNA, 75 bp, synthetic construct
  source 1..75: mol_type = other DNA
gggaccgtacacattgtctttaagcgtcctgaccttgttgaaaaactgaatgatattattgcacggcattatcct

SEQ ID NO: 74964 - DNA, 75 bp, synthetic construct
  source 1..75: mol_type = other DNA
ggtatttctatcaattacttaaagattatgagggcgaacagctgtatcttaatgagttaggatatgtttatggta

SEQ ID NO: 74965 - DNA, 75 bp, synthetic construct
  source 1..75: mol_type = other DNA
agggaattatatcatcttcattgtatgaaagggcgctcaataccttgataaatatccgtgatttattgcagggcg

SEQ ID NO: 74966 - DNA, 75 bp, synthetic construct
  source 1..75: mol_type = other DNA
atgcttattggctatgtacgcgtgtcaacaaatgaccagaacacggaattgcagcgtaacgcgctggagtgtgca

SEQ ID NO: 74967 - DNA, 75 bp, synthetic construct
  source 1..75: mol_type = other DNA
caacaaatgaccagaacacggaattgcagcgtaacgcactggagtgtgcaggatgtgagctgatttttgaggaca

SEQ ID NO: 74968 - DNA, 75 bp, synthetic construct
  source 1..75: mol_type = other DNA
tgattctcagggtaacctgaatattggaggccttttcagtgttacgtcacaagggcaactgacaattcgttactc

SEQ ID NO: 74969 - DNA, 75 bp, synthetic construct
  source 1..75: mol_type = other DNA
cgggtattgagattgacagtactttaatgactgttgattttcccacaaaaccgctgaattttaaggcgacaggtg

SEQ ID NO: 74970 - DNA, 75 bp, synthetic construct
  source 1..75: mol_type = other DNA
gcaggatcggaggtcgtaggccgaagctgacgcctgatgaatgggctcaggctggccggttgattgcggccggag

SEQ ID NO: 74971 - DNA, 75 bp, synthetic construct
  source 1..75: mol_type = other DNA
tcggctttgcgactaactgcgacgcggcacatattacccagccgcagcgcgaaaccatgcagtattgtatggagc

SEQ ID NO: 74972 - DNA, 75 bp, synthetic construct
  source 1..75: mol_type = other DNA
atgtcgtggaacgatacgctggatgaacgtaatagctggggcatgtctgccggactgcaatccgaccgtcctgac

SEQ ID NO: 74973 - DNA, 75 bp, synthetic construct
  source 1..75: mol_type = other DNA
ctccgcaacgcaatgaaaagcgccaaaggtccaggcaacttccgcaacctgtttatgtactcacctaacggcaaa

SEQ ID NO: 74974 - DNA, 75 bp, synthetic construct
  source 1..75: mol_type = other DNA
cgctgccgtacatcacagctccccgattgcagtaaagtgcaacattctgtccagcacctatatccctcacccgct

SEQ ID NO: 74975 - DNA, 75 bp, synthetic construct
  source 1..75: mol_type = other DNA
tatgcctaataatgttggagggtttggggatgtggagaaggccagccgggtatttgttcggaatgaactgatgcc

SEQ ID NO: 74976 - DNA, 75 bp, synthetic construct
  source 1..75: mol_type = other DNA
caacttaatgccggtgatactctcgttgtctggaagctcgacaggctcgggcgtagcatgcgccatcttgtctct

SEQ ID NO: 74977 - DNA, 75 bp, synthetic construct
  source 1..75: mol_type = other DNA
ggcaggcgaccagttctcgcccgtctcctgttgaaatctggcagatactgctgtcccgactgctggaccagcact

SEQ ID NO: 74978 - DNA, 75 bp, synthetic construct
  source 1..75: mol_type = other DNA
agctgggcaaagtacaggcttcagtgctggtccgttcattgctgaaaagtgaacgtccttccggactgactcagg

SEQ ID NO: 74979 - DNA, 75 bp, synthetic construct
  source 1..75: mol_type = other DNA
accggcctgatgacccgcgacaattacagaacggtaaataacattacccgggggaagcatccggaggcgaaacaa

SEQ ID NO: 74980 - DNA, 75 bp, synthetic construct
  source 1..75: mol_type = other DNA
tttggcggcggctatatcgcgttttccaaactatcagggagtaacagcgatatgcagtcagccgtgaacattaac

SEQ ID NO: 74981 - DNA, 75 bp, synthetic construct
  source 1..75: mol_type = other DNA
ccaccggggcctgccgctggcgctcatcagcgaagacggcaatacggcgtggcgcggggagtatgatgaatgggg

SEQ ID NO: 74982 - DNA, 75 bp, synthetic construct
  source 1..75: mol_type = other DNA
acattatcggaaggtgacactctggttgtctggaagctggatcggctggggcgtagtatgcggcatctggtcatt

SEQ ID NO: 74983 - DNA, 75 bp, synthetic construct
  source 1..75: mol_type = other DNA
cagcatattgaggccggcatttcactgtgcgatgcagtgaactttcttgttgaaaaatacgcactggtgcgtacc

SEQ ID NO: 74984 - DNA, 75 bp, synthetic construct
  source 1..75: mol_type = other DNA
gtctctggcgtggggagctggcgtgcagtttaacccgaccgaatccgtggccattgatattgcttatgaaggctc

SEQ ID NO: 74985 - DNA, 75 bp, synthetic construct
  source 1..75: mol_type = other DNA
gctgattttgaagataatgacttcagcggcaaacgctccctgatggaatctgtcgaagcgaagaccaaagacatt

SEQ ID NO: 74986 - DNA, 75 bp, synthetic construct
  source 1..75: mol_type = other DNA
ggcctgaaggtgaccgccgggagtgttattcagcgcgatgacctggttcagtacacggcaactgccgatgcaacc

SEQ ID NO: 74987 - DNA, 75 bp, synthetic construct
  source 1..75: mol_type = other DNA
atttgaatttaaatgcgttccgtttgaaggtctgaaagaacgtccgtttaaattacgcctcagcattatcactgg

SEQ ID NO: 74988 - DNA, 75 bp, synthetic construct
  source 1..75: mol_type = other DNA
atgcttattggctatgtacgtgtgtcaacaaatgaccagaacaccgatttgcaacgtaatgcactgaactgcgcg

SEQ ID NO: 74989 - DNA, 75 bp, synthetic construct
  source 1..75: mol_type = other DNA
ggtggtgccgcatatgcccttaatccggggattgagatggacagctctgtaatggtcgttgatttcccatcgaaa

SEQ ID NO: 74990 - DNA, 75 bp, synthetic construct
  source 1..75: mol_type = other DNA
agccgaatcacgcagctctggcagcgcctgagccgtaatcacggcgtaagcagcacggagatccgccataacccg

SEQ ID NO: 74991 - DNA, 75 bp, synthetic construct
  source 1..75: mol_type = other DNA
gggcagattccttcggccctatcgcttatgtacaaccaaccacctttggtgccgctgccggtgccgccaatgcca

SEQ ID NO: 74992 - DNA, 75 bp, synthetic construct
  source 1..75: mol_type = other DNA
atgcaacacagcattaaagacttgtggttgtatccctttccagaaattgatgtggttcatacacaggagccactg

SEQ ID NO: 74993 - DNA, 75 bp, synthetic construct
  source 1..75: mol_type = other DNA
gggcgctttttctttcatgtgatgggtgccctggctgaaatggaacgagaactgattgttgaacgaacaaaagct

SEQ ID NO: 74994 - DNA, 75 bp, synthetic construct
  source 1..75: mol_type = other DNA
acaacgtaatgcgctgaactgtgcaggatgcgagctgatttttgaagacaagataagcggtacaaagtccgaaac

SEQ ID NO: 74995 - DNA, 75 bp, synthetic construct
  source 1..75: mol_type = other DNA
aatacacccgccgcgggaccgacctcgacacttactggtttgtgcaatacggcatgaccacgcagccctacgagt

SEQ ID NO: 74996 - DNA, 75 bp, synthetic construct
  source 1..75: mol_type = other DNA
aaacgtctttattgttacagatgaccgagcgcctggcgctttccgacgcgcattttcggcggataagtcaattga

SEQ ID NO: 74997 - DNA, 75 bp, synthetic construct
  source 1..75: mol_type = other DNA
atgaaacgctgggacaacgatgtacaacttcttggtacagaaatcccgaaaattacatggaaaaagattgaaaga

SEQ ID NO: 74998 - DNA, 75 bp, synthetic construct
  source 1..75: mol_type = other DNA
atgaaaaatcacaaggtatacggtgtgcgtaaagtctggcgtcagttgttacgggaaggtatcagagtggccaga

SEQ ID NO: 74999 - DNA, 75 bp, synthetic construct
  source 1..75: mol_type = other DNA
gcctgtcgcggcggtgacctggcccgctggcaggggtatgaggccgggaaaaatgcctcactgcatcatggtgtg

SEQ ID NO: 75000 - DNA, 75 bp, synthetic construct
  source 1..75: mol_type = other DNA
gatgttgttccctgagttagctatggcttctgctggtaaaggcacggacctgatggctaaaggtaacgatacggt

SEQ ID NO: 75001 - DNA, 75 bp, synthetic construct
  source 1..75: mol_type = other DNA
aggggattgttatccgggaaatcacgcgcatttctcgtctgtatgacgtcagcccggtgacatatccggcctatc

SEQ ID NO: 75002 - DNA, 75 bp, synthetic construct
  source 1..75: mol_type = other DNA
tttgatgatgtactgaatgatgatgtacgtggcttgtttaatcatgatcctaatttcattctcggacgaagttct

SEQ ID NO: 75003 - DNA, 75 bp, synthetic construct
  source 1..75: mol_type = other DNA
gaccttcggtaaggactccagtatcgttaaatgggttgttctggctgaggtgctggtcggtgcggtcatgtacat

SEQ ID NO: 75004 - DNA, 75 bp, synthetic construct
  source 1..75: mol_type = other DNA
tttgcagaaaagactagttgagctaaacacctggataaatcaaaatattgtgtcatttaatgactacatccttga

SEQ ID NO: 75005 - DNA, 75 bp, synthetic construct
  source 1..75: mol_type = other DNA
atcaaaggcgatcaggacatgatcctgctgttgtcgaagaaaaatgccgaggaacgtctggctgcattcatctac

SEQ ID NO: 75006 - DNA, 75 bp, synthetic construct
  source 1..75: mol_type = other DNA
cacaatctcgaaacgatgcaagtggtggtggaaaccgctgccaacctgcatgcgccggtcatcatcgccggaacg

SEQ ID NO: 75007 - DNA, 75 bp, synthetic construct
  source 1..75: mol_type = other DNA
gacatcatccggataaacgcagtgcccgtgcgcagcgcgatgactggctgaagagagagatacagcgcgtatacg

SEQ ID NO: 75008 - DNA, 75 bp, synthetic construct
  source 1..75: mol_type = other DNA
agaagaagtttgttgttgggcatgagtatcttgtgtcactttcaaatctatcagattcgctttacgataaaattc

SEQ ID NO: 75009 - DNA, 75 bp, synthetic construct
  source 1..75: mol_type = other DNA
tcactgacctatacggagcgactaaaagaagcaaaactgctggcatcaacagggagtacaggtgactcgtatgac

SEQ ID NO: 75010 - DNA, 75 bp, synthetic construct
  source 1..75: mol_type = other DNA
tgaaaaaagtggtgtggctggcaatccagtctgcgtcccggaaatggacgatgccgttgaaggactggcgaatgg

SEQ ID NO: 75011 - DNA, 75 bp, synthetic construct
  source 1..75: mol_type = other DNA
attgatctgacagaggtcggcggagatcgttatttcttctgtaatgagcagaacgaaaaaggtgaaccagtcacc

SEQ ID NO: 75012 - DNA, 75 bp, synthetic construct
  source 1..75: mol_type = other DNA
cagaagtggaactggccacactaacgtgggtggactggtataacaatcgacgattgctgggaaggctgggccata

SEQ ID NO: 75013 - DNA, 75 bp, synthetic construct
  source 1..75: mol_type = other DNA
atgccgttgaaggactggcgaatggcaatgagccgctttattatcgagttcggtgaccgcctggacggtcacttc

SEQ ID NO: 75014 - DNA, 75 bp, synthetic construct
  source 1..75: mol_type = other DNA
cggtgcagtattacagccggatcattatgaatccgccgttcagtcacgggcaggatatccggcatatcctgcggg

SEQ ID NO: 75015 - DNA, 75 bp, synthetic construct
  source 1..75: mol_type = other DNA
gcacattatcagaaatgaacacctacgtttatgacgcgaaaggctccatgaatgcacaggaaggctgttttgatg

SEQ ID NO: 75016 - DNA, 75 bp, synthetic construct
  source 1..75: mol_type = other DNA
gcgtgggtggtgatttttacgagatgagtaaccgagcacaggagatcactgcatcaggcttattgctgacggcac

SEQ ID NO: 75017 - DNA, 75 bp, synthetic construct
  source 1..75: mol_type = other DNA
tttgcaaaaacgtttcgaagaattaaatttatggctaaaaaataatattattacattcaaagaatatcaactatc

SEQ ID NO: 75018 - DNA, 75 bp, synthetic construct
  source 1..75: mol_type = other DNA
tgtgtgatgcggtgaactttctcgtggaaaaatacgcactggtacgaaccgaccagccgggattcagcgcaggaa

SEQ ID NO: 75019 - DNA, 75 bp, synthetic construct
  source 1..75: mol_type = other DNA
tatggaaacgacattcgtgctggatgcactggagcaggcgttgtgggcccgtcggccgtccggcacaatccatca

SEQ ID NO: 75020 - DNA, 75 bp, synthetic construct
  source 1..75: mol_type = other DNA
gtttatgtactcacctaacggcaaaaaggatggtcttcagattatcccgttgtcagaagtcgcggcaaaggatga

SEQ ID NO: 75021 - DNA, 75 bp, synthetic construct
  source 1..75: mol_type = other DNA
tcggtaagctgttagaaggggaatattttacggtgcgtggctaccagaaagggaccgtacacattgtctttaagc

SEQ ID NO: 75022 - DNA, 75 bp, synthetic construct
  source 1..75: mol_type = other DNA
ggggatgtggagaaggctagtcgagtgtttgtccgcaatgaactgatgccactgcaaaagcggctgcaagagctg

SEQ ID NO: 75023 - DNA, 75 bp, synthetic construct
  source 1..75: mol_type = other DNA
aatgcctaataatgtcggggggtttggggatgtagaaaaggcaagccgtgtctttgtccgcaacgagttgatacc

SEQ ID NO: 75024 - DNA, 75 bp, synthetic construct
  source 1..75: mol_type = other DNA
atgaacgtggtttgcgttacgacattgttgcaccggatacgccgacgatttgtgacctggtgctgtcaccaatgt

SEQ ID NO: 75025 - DNA, 75 bp, synthetic construct
  source 1..75: mol_type = other DNA
tatgcctaataatgttggagggtttggggatgtggaaaaagccgcgaaggtttttgtcagaaatgagttggttcc

SEQ ID NO: 75026 - DNA, 75 bp, synthetic construct
  source 1..75: mol_type = other DNA
cgatgaaaatcatcaggtgtacggtgtgcgtaaagtctggcgtcagttgttacgggaaggaatcagggtggccag

SEQ ID NO: 75027 - DNA, 75 bp, synthetic construct
  source 1..75: mol_type = other DNA
tcatcatgtacatgaccgacgccgcgcagaaccaggaagatgtgaacaacctccgtaatgcgatgaaaagcgcca

SEQ ID NO: 75028 - DNA, 75 bp, synthetic construct
  source 1..75: mol_type = other DNA
attgcaaaaaagatttgaagagttaaatgtttggttaaaagaaaaagtgatacagttcgaagaatataaacttca

SEQ ID NO: 75029 - DNA, 75 bp, synthetic construct
  source 1..75: mol_type = other DNA
ttacgggaatagattccgtttacgaagcgcctgaatcggcagaaattcatctcaatggtgaacaattagtaacaa

SEQ ID NO: 75030 - DNA, 75 bp, synthetic construct
  source 1..75: mol_type = other DNA
gaacatattgatgccgggattaccctggccgatgcagtcaacttcttggtagataagtacgaactggttcgtatc

SEQ ID NO: 75031 - DNA, 75 bp, synthetic construct
  source 1..75: mol_type = other DNA
ccccgacagttggttaaggcattaccacaatatccggcctatgcagcggcaaattatataaagggacgggttgat

SEQ ID NO: 75032 - DNA, 75 bp, synthetic construct
  source 1..75: mol_type = other DNA
aaaaagagctggcaggcggaacgctatgcacgcggaaccctgcgcaaaatattcgaacgtctggatcgcactgac

SEQ ID NO: 75033 - DNA, 75 bp, synthetic construct
  source 1..75: mol_type = other DNA
acggtcatccgaatcccaaatggaacggggccaccatgcgcgactccagcgattacctggttaacacgttttttg

SEQ ID NO: 75034 - DNA, 75 bp, synthetic construct
  source 1..75: mol_type = other DNA
gtggagccagaaagctacctccgctatgtccttgacgtcatagccgactggccgataaaccgggtcggcgaactg

SEQ ID NO: 75035 - DNA, 75 bp, synthetic construct
  source 1..75: mol_type = other DNA
agctcgaattcttcccctatcctgacctcgacccagctacgagctcgttcggctgttgcctgcggttggatgatc

SEQ ID NO: 75036 - DNA, 75 bp, synthetic construct
  source 1..75: mol_type = other DNA
tactgacagacatgaataaccggccaatgaaggggtacggcaatcaaacccgtgcagaacgcttccgcatactgg

SEQ ID NO: 75037 - DNA, 75 bp, synthetic construct
  source 1..75: mol_type = other DNA
ccaatgcaaaaggcggcgtgtatacctcggcaaacctgagtgcgtacagcaacagtattgtggatacgcccacgt

SEQ ID NO: 75038 - DNA, 75 bp, synthetic construct
  source 1..75: mol_type = other DNA
atggcgtcaggatcatggttttgttccgggcagtattcttaccctgcatggcgatctggcacgcagcattaccac

SEQ ID NO: 75039 - DNA, 75 bp, synthetic construct
  source 1..75: mol_type = other DNA
caaaaggcacaccgaccagctacatcgccacctacatcgggaaaaacctggacagccgtgccgtggatggcatcg

SEQ ID NO: 75040 - DNA, 75 bp, synthetic construct
  source 1..75: mol_type = other DNA
aaaagcgccttgaagtcgtgaatcactacttcactactgatgatggttacaggatcatctcggcacgttttggtg

SEQ ID NO: 75041 - DNA, 75 bp, synthetic construct
  source 1..75: mol_type = other DNA
catttcattttcactaatgctggttgctctttttctttccatgggctggatgatgttatcttcgtcggggatgct

SEQ ID NO: 75042 - DNA, 75 bp, synthetic construct
  source 1..75: mol_type = other DNA
ctgtgtacttgtcggcatttcattttcactaatgctggttgccattttcttttccaccgcctggcgagtcctgac

SEQ ID NO: 75043 - DNA, 75 bp, synthetic construct
  source 1..75: mol_type = other DNA
aattacgatccctccaacgtgattatgctcaccggacgcgcctccgttgtggagcgcctgacggaagtgatccag

SEQ ID NO: 75044 - DNA, 75 bp, synthetic construct
  source 1..75: mol_type = other DNA
ggtggggaaatctgcgtttgtggaagtcagcgggcagcccagcaatgatggtgaagggtatctggaatttttccg

SEQ ID NO: 75045 - DNA, 75 bp, synthetic construct
  source 1..75: mol_type = other DNA
gtcattgccccggacggcagcagaaacgggacacagtacgatgcgtggggaaaggccatctgtaccacgcagggc

SEQ ID NO: 75046 - DNA, 75 bp, synthetic construct
  source 1..75: mol_type = other DNA
gctttttatgccgaatcggatgcgcagcgtgctgactggcagaaagggctgcaggaagggctaagtaactgggtg

SEQ ID NO: 75047 - DNA, 75 bp, synthetic construct
  source 1..75: mol_type = other DNA
atcagggaccattaccgtcagggtttatgacgatcagccgtttgaccggcaaattgttattccggcggtggcatt

SEQ ID NO: 75048 - DNA, 75 bp, synthetic construct
  source 1..75: mol_type = other DNA
ggggcgacggcctggtacacgatgtatcagaatcaggagcaggccagagaatctgcacgccagtatgccgcaaca

SEQ ID NO: 75049 - DNA, 75 bp, synthetic construct
  source 1..75: mol_type = other DNA
tgtcaaaattccgcaccttttccccggtgatgatctgaaactgcagactgcgcaggattcagacaatggattttc

SEQ ID NO: 75050 - DNA, 75 bp, synthetic construct
  source 1..75: mol_type = other DNA
taacgttacagaaataccagccagaccctgaagatttatgctcactgtgtggcggaaatcatggtaaagccgcca

SEQ ID NO: 75051 - DNA, 75 bp, synthetic construct
  source 1..75: mol_type = other DNA
ttgatgaagaatgttcgcaacgggtggatttattgcaacagacctggaaggtgataagcgctggcggacaatgcc

SEQ ID NO: 75052 - DNA, 75 bp, synthetic construct
  source 1..75: mol_type = other DNA
gccacgctgcagtcggatatggaaaaagccggtgaactggccgccagggaccgggccgaacgggacgcatcacag

SEQ ID NO: 75053 - DNA, 75 bp, synthetic construct
  source 1..75: mol_type = other DNA
attttctacgcaatgctgatatgactcaaaacgatgtgaaagatacagagtcagcttatcgtggatggctggaga

SEQ ID NO: 75054 - DNA, 75 bp, synthetic construct
  source 1..75: mol_type = other DNA
cagtggcagtgtgaatgcgaactcaggaacgctcaacaatgtcacgattaaccagaactgtacgattaagggcat

SEQ ID NO: 75055 - DNA, 75 bp, synthetic construct
  source 1..75: mol_type = other DNA
ccacagcccgctatcttggcacggggctgtactggatagccgccagtatcaatatcaaaccgggccatgattatt

SEQ ID NO: 75056 - DNA, 75 bp, synthetic construct
  source 1..75: mol_type = other DNA
ttgcaactgcgggtcaaggatctggatttcgatcacggcacgatcatcgtgcgggagggcaagggctccaaggat

SEQ ID NO: 75057 - DNA, 75 bp, synthetic construct
  source 1..75: mol_type = other DNA
ccggggtgatacatccggtcagtatgttgcgttaaaaacagtcgcattgtctctggggttaccggttgtgaccgc

SEQ ID NO: 75058 - DNA, 75 bp, synthetic construct
  source 1..75: mol_type = other DNA
ttcagtaaatgcccgtctgaagcaggcctcacagtccagtgatgattttcaggtatcacaacgtgaattaatggc

SEQ ID NO: 75059 - DNA, 75 bp, synthetic construct
  source 1..75: mol_type = other DNA
ttatgccagcttataatgctgaagaaactattaaagatagtattttgtcaattttaaaacaaacgtatgaggatt

SEQ ID NO: 75060 - DNA, 75 bp, synthetic construct
  source 1..75: mol_type = other DNA
acgagctggccgcccgccgcacccttgtccgcgaatacgtgctttcccttgccgcccgtctgccggttctggagg

SEQ ID NO: 75061 - DNA, 75 bp, synthetic construct
  source 1..75: mol_type = other DNA
cagacgtcactttgtgtctcctgtccgcaatcgcatatcatgctgtcatgtcaatggtagctcaggcggggcagc

SEQ ID NO: 75062 - DNA, 75 bp, synthetic construct
  source 1..75: mol_type = other DNA
cctgttccgtggccttcagccactccgccgacaggctggctgaaatgcaacggggcggctttttctgctgaagaa

SEQ ID NO: 75063 - DNA, 75 bp, synthetic construct
  source 1..75: mol_type = other DNA
gaaatttagtacccgaatgcaaaaaatcgatccagcactgaatgtcacctctggcccactgataagccatgtgtt

SEQ ID NO: 75064 - DNA, 75 bp, synthetic construct
  source 1..75: mol_type = other DNA
agcaattaccgcgaataccggcacgctcaataatgtcaccattaacgagaactgtgtcatcagagggaaactgtc

SEQ ID NO: 75065 - DNA, 75 bp, synthetic construct
  source 1..75: mol_type = other DNA
ggatgtgagctgatttttgaggacaaaatcagcggcacgaagtccgacaggccgggactgaaaaaactgctcagg

SEQ ID NO: 75066 - DNA, 75 bp, synthetic construct
  source 1..75: mol_type = other DNA
attatggacaggggacggactcgccgcaggaagtgcacgggaaggagtaaacccaggaatactggctacatacgg

SEQ ID NO: 75067 - DNA, 75 bp, synthetic construct
  source 1..75: mol_type = other DNA
tcttcctgaagaaattgtgtctctccgggataagaagaataaagccagaaatattgcaatccgtgaaattataac

SEQ ID NO: 75068 - DNA, 75 bp, synthetic construct
  source 1..75: mol_type = other DNA
atgaaaacattatccgacacacatgtacgggaggcatctcgctgcccgtctcccgtcaccatctggcagacactg

SEQ ID NO: 75069 - DNA, 75 bp, synthetic construct
  source 1..75: mol_type = other DNA
atccaaggttatcgcaaccattcccgctggcccctgggcaggggcaacgctgttcagtccgggagtcaaactggt

SEQ ID NO: 75070 - DNA, 75 bp, synthetic construct
  source 1..75: mol_type = other DNA
accggcctgatgacccgcgacaattacagaacggtaaataacattaccctgggtaagcacccggaggtgaaacga

SEQ ID NO: 75071 - DNA, 75 bp, synthetic construct
  source 1..75: mol_type = other DNA
gcggtcaaggctgcatacgatctggcaaacggaaaacaaccggcagatgccacgctcactgctctggcaggactt

SEQ ID NO: 75072 - DNA, 75 bp, synthetic construct
  source 1..75: mol_type = other DNA
tggtcgcgctattatcgctaagggcagtataaaagatgtcctcaattaccttggtttgggggaaggctctgcatt

SEQ ID NO: 75073 - DNA, 75 bp, synthetic construct
  source 1..75: mol_type = other DNA
gcgttgagaaccacggaaagtcactccgcatatggttcatttttaaaggtaagcgtgtcagggaaaacctcggtg

SEQ ID NO: 75074 - DNA, 75 bp, synthetic construct
  source 1..75: mol_type = other DNA
aacaacaaaagcgcgcggatataccgtattgccatcagtgctattgatagcccgggcagcagtgaattgcgcacc

SEQ ID NO: 75075 - DNA, 75 bp, synthetic construct
  source 1..75: mol_type = other DNA
ttgtctggaagctggacaggttggggcgcagtatgcggcatcttgttactctgatagaagagttgcgccagcgcg

SEQ ID NO: 75076 - DNA, 75 bp, synthetic construct
  source 1..75: mol_type = other DNA
tatttgctgcgcgtgccggaagatgacgaagaacaacagcttgaggcgctgcgtcagttcaaacaggcgcagctg

SEQ ID NO: 75077 - DNA, 75 bp, synthetic construct
  source 1..75: mol_type = other DNA
tcactgctgtcgggctgggtggatgcatgctgccggctgctgtctccgctggaagaggcgcttcatggctatgtc

SEQ ID NO: 75078 - DNA, 75 bp, synthetic construct
  source 1..75: mol_type = other DNA
atgcagcaccggcaggataacttactggcgaacagaacgtcgtttcctggtatggtttccggtcagtacgcattc

SEQ ID NO: 75079 - DNA, 75 bp, synthetic construct
  source 1..75: mol_type = other DNA
tggctgtgcttttgctaagtgcaaatacatgggcagccattgaaattaataaccaccaggccagaaatatggatg

SEQ ID NO: 75080 - DNA, 75 bp, synthetic construct
  source 1..75: mol_type = other DNA
aatcacaattgaagcgaaccagaccgctgattttgaagacaatgacttcagcggcaaacgctccctgatggagtc

SEQ ID NO: 75081 - DNA, 75 bp, synthetic construct
  source 1..75: mol_type = other DNA
atgaatgatggcagacagacgcctccgtcccctgaggcatggaaaatccggtttctggcgaacggtacacccggc

SEQ ID NO: 75082 - DNA, 75 bp, synthetic construct
  source 1..75: mol_type = other DNA
tgaccatggtggtgagcggggagcgctactgtacagcctgatcgggacgtgcaaactgaatgacgtggatccaga

SEQ ID NO: 75083 - DNA, 75 bp, synthetic construct
  source 1..75: mol_type = other DNA
gacctacgttcgtgatgaccgtaacgccgggtcaacgctggcgccggcggtgtggttcgcttacagcccggacag

SEQ ID NO: 75084 - DNA, 75 bp, synthetic construct
  source 1..75: mol_type = other DNA
cggtgctgtccatgctgacagagatttttctgaagcaggcgatggtggggatagtcgggagtatcggcagcgcca

SEQ ID NO: 75085 - DNA, 75 bp, synthetic construct
  source 1..75: mol_type = other DNA
ggtaacgaggaaagacctctgcgaggtgcgaatccgaaccggtcagacggaggtcgctgtcttcacagcttacga

SEQ ID NO: 75086 - DNA, 75 bp, synthetic construct
  source 1..75: mol_type = other DNA
gattataaatatactcaataaatttccagctttttgtcgtcaattaaagcaacgggtaatgactccaacttattg

SEQ ID NO: 75087 - DNA, 75 bp, synthetic construct
  source 1..75: mol_type = other DNA
aacaccctgcagagcgatgctgataatcttgccgaattacaaactcaggcaagcggcgcacaagggcaaatggaa

SEQ ID NO: 75088 - DNA, 75 bp, synthetic construct
  source 1..75: mol_type = other DNA
aaccttgctgacttacaaactcaagtaactggagcacaggggcaaatggaagctattcaggccgctaaccagctt

SEQ ID NO: 75089 - DNA, 75 bp, synthetic construct
  source 1..75: mol_type = other DNA
gcccccgtcagccacactcacccatggagtcagataacgggagtgcctgctgcctcgctgacggcaaaaggcacc

SEQ ID NO: 75090 - DNA, 75 bp, synthetic construct
  source 1..75: mol_type = other DNA
agaatatggaaaatggtggatagatgttgaatacatttcatggggtgttcccgggaaaacaagactgatgtttga

SEQ ID NO: 75091 - DNA, 75 bp, synthetic construct
  source 1..75: mol_type = other DNA
agggctgctgcctcagacagaaaacccgttatgtgaggcatcggtggcaaaggaggcgaaaaagaagaagacgct

SEQ ID NO: 75092 - DNA, 75 bp, synthetic construct
  source 1..75: mol_type = other DNA
attgcggtggcaaactgcccggaaacgtacaaaccgcagttgcaggaaggcagtggacgcacccagactatccgc

SEQ ID NO: 75093 - DNA, 75 bp, synthetic construct
  source 1..75: mol_type = other DNA
ggtggcgcttgcgctctccgaattgaaaaagtttactcgtgctgatttcggcttatatcatccaggaggtgcgct

SEQ ID NO: 75094 - DNA, 75 bp, synthetic construct
  source 1..75: mol_type = other DNA
ggcaggcggccagttctcgcccgtctcctgttgaaatctggcagatactgctgtcacggttgctgggccagcatt

SEQ ID NO: 75095 - DNA, 75 bp, synthetic construct
  source 1..75: mol_type = other DNA
tcttctgaaaagtacccaaatctggcaaaggtttacccaacgttaaaattacctgatttacgcggtgagtttatc

SEQ ID NO: 75096 - DNA, 75 bp, synthetic construct
  source 1..75: mol_type = other DNA
gtatcaaccacaatgggatatgtggaaatgaatctggagattgctgcacaggcactggagcatgagctggaggtg

SEQ ID NO: 75097 - DNA, 75 bp, synthetic construct
  source 1..75: mol_type = other DNA
gacctctgcgaggtacgaatccgaaccggtcagacggaggttgctgtcttcacagcttacaaacctgaggagtaa

SEQ ID NO: 75098 - DNA, 75 bp, synthetic construct
  source 1..75: mol_type = other DNA
ggcactccagcgccagcatggtctacaatgtttatggtgcatggatgcctgagtgcagcgtgactcaagttgcca

SEQ ID NO: 75099 - DNA, 75 bp, synthetic construct
  source 1..75: mol_type = other DNA
tcgccctgatcgtcatctgtattaccgtcgtagtgatagcactggtaacgaggaaagacttctgcgaggtacgaa

SEQ ID NO: 75100 - DNA, 75 bp, synthetic construct
  source 1..75: mol_type = other DNA
caaactggccgacgatattcatcttgccagctccggctggccgcaggcgcagtggtggaaacaactcaatgaccc

SEQ ID NO: 75101 - DNA, 75 bp, synthetic construct
  source 1..75: mol_type = other DNA
tcgcctccatgcggctgtttgcccgcttatccctggatagcgccttgccggagcgcaccaccatcatgaatttcc

SEQ ID NO: 75102 - DNA, 75 bp, synthetic construct
  source 1..75: mol_type = other DNA
aataactatgtcgaaaccgtgatttcactggcaccgaacctgttctttggcaccaccattgccgtaaacattctg

SEQ ID NO: 75103 - DNA, 75 bp, synthetic construct
  source 1..75: mol_type = other DNA
ttaattgacgatagtaagtttaccaaaacagctggtattgataccgacgacatcgtcgctgtaggtctggtttat

SEQ ID NO: 75104 - DNA, 75 bp, synthetic construct
  source 1..75: mol_type = other DNA
atgttcgctggagtcgagaattaccatctgcgccgtcaaccgttaccatttccagagatagcgctggcaggtact

SEQ ID NO: 75105 - DNA, 75 bp, synthetic construct
  source 1..75: mol_type = other DNA
ggtttaatcgacaccgcagaaaaatcagcacaagtattagtgaaggtttattcgatgggcggcatgaaacagacc

SEQ ID NO: 75106 - DNA, 75 bp, synthetic construct
  source 1..75: mol_type = other DNA
tcgcctccatgcggctgtttgcccgcttatccctggatagcgccgtgccggatcgcaccaccatcatgaatttcc

SEQ ID NO: 75107 - DNA, 75 bp, synthetic construct
  source 1..75: mol_type = other DNA
gccgggcggtcagtggtcgccattgaccagtatttaccgtcctcaaaatgctgtagttgctgcggtttcaccatg

SEQ ID NO: 75108 - DNA, 75 bp, synthetic construct
  source 1..75: mol_type = other DNA
caatcgcgaagaaacgcaggtgctcagatggaactataagaaaggagctgcaaactgcattaggctttattgatg

SEQ ID NO: 75109 - DNA, 75 bp, synthetic construct
  source 1..75: mol_type = other DNA
accgcatagcacgatggtgtttattgggatccagttgccggaggaagagataagggcagcgtttgcggggttgag

SEQ ID NO: 75110 - DNA, 75 bp, synthetic construct
  source 1..75: mol_type = other DNA
cgcgattgaaattgaagcgttacgcaacgtctatgcgcctcgcccgcaggatcagcgctgtgcgctcggttccgt

SEQ ID NO: 75111 - DNA, 75 bp, synthetic construct
  source 1..75: mol_type = other DNA
gtcaccgcgggtggtgctctgggaaatcgacctgacggtgcagggcggtgagcggtattttttctgtaatgagct

SEQ ID NO: 75112 - DNA, 75 bp, synthetic construct
  source 1..75: mol_type = other DNA
accgcatagcaccatggtgtttatcgggattcagctgccggaggataagattcgggcggcgtttgctgggttgag

SEQ ID NO: 75113 - DNA, 75 bp, synthetic construct
  source 1..75: mol_type = other DNA
ctctccgccctacattttgatttatcggtttacgacatttttggcgtactgcgcgcgggcggcgcgctggtgatg

SEQ ID NO: 75114 - DNA, 75 bp, synthetic construct
  source 1..75: mol_type = other DNA
tagaggaattgcgccatcctggcaaatgaaacgcgatatgctctcccctgcgtacaccactcgctggagagatat

SEQ ID NO: 75115 - DNA, 75 bp, synthetic construct
  source 1..75: mol_type = other DNA
gccatcaggactaaaggttacttcatctacccgagccagctgttctgcaacgttgccgctaaagcgaacaccaac

SEQ ID NO: 75116 - DNA, 75 bp, synthetic construct
  source 1..75: mol_type = other DNA
ttgcgtgtgccctgacaacgattatctatcatcttcctgcatattcttcattagaatataaaggttcctttggct

SEQ ID NO: 75117 - DNA, 75 bp, synthetic construct
  source 1..75: mol_type = other DNA
tgccgccatggccgccatttccgggaaagatgcttatgcgctggcggtttttgagcgtgaacaccctgagcaata

SEQ ID NO: 75118 - DNA, 75 bp, synthetic construct
  source 1..75: mol_type = other DNA
atggctgatgcaatggatctcgtacagcagcgagttgaagaagaacgccaacgtcatatccgtgttgcccgtgcc

SEQ ID NO: 75119 - DNA, 75 bp, synthetic construct
  source 1..75: mol_type = other DNA
atggtaagcctgttattcctggcatgaaactgacgaaggaaaaatgcgaccaggttaacgctattgaacgtgata

SEQ ID NO: 75120 - DNA, 75 bp, synthetic construct
  source 1..75: mol_type = other DNA
tcgcctctgttctgctgaaagccgggccggggctgattcgttccgtcgggcgctggtttggtggcagtacatctg

SEQ ID NO: 75121 - DNA, 75 bp, synthetic construct
  source 1..75: mol_type = other DNA
atcggttcgcttgcagcaatataaagagatctttatttccagcgtgatgatgctgttttgtatcggtattgcgct

SEQ ID NO: 75122 - DNA, 75 bp, synthetic construct
  source 1..75: mol_type = other DNA
acggttgaatggtatttaaagaactcagaatggtgtgaatcagttcaaaataataaatataatagagaaagacta

SEQ ID NO: 75123 - DNA, 75 bp, synthetic construct
  source 1..75: mol_type = other DNA
agcagcgcgttgaagaagaacgccagcgtcatatccgtgctgcccgcgccaaaacgccgggcgtgtcccgcgtgc

SEQ ID NO: 75124 - DNA, 75 bp, synthetic construct
  source 1..75: mol_type = other DNA
catccatctggcttgccacgaaaaaagataaacgctttgacgctgtggttgtcgctgtatccgctaacaacatgg

SEQ ID NO: 75125 - DNA, 75 bp, synthetic construct
  source 1..75: mol_type = other DNA
cctggagtgcagctttgcattacctgtcaggaaatcgcagagctgaaaggcaaacattacaacggaggtgctgta

SEQ ID NO: 75126 - DNA, 75 bp, synthetic construct
  source 1..75: mol_type = other DNA
accgcttttctgaataccatggctcagacttcatccggactgagtgagttgatgcaaatcaatactgcggtgccg

SEQ ID NO: 75127 - DNA, 75 bp, synthetic construct
  source 1..75: mol_type = other DNA
ttgctggtgctggaatgcgtaccggttgagctggcaaaacgtattaccgaggcgctggcgattccggttatcggt

SEQ ID NO: 75128 - DNA, 75 bp, synthetic construct
  source 1..75: mol_type = other DNA
gaactatctttctgccaaaggtcgtgctgcgattgtctgcttcccgggtattttttaccgtggcggcgcggagca

SEQ ID NO: 75129 - DNA, 75 bp, synthetic construct
  source 1..75: mol_type = other DNA
cgtggatggtgcccggcacggacgaaatcggccaggcgaccgcacaagagatgcaaaaacattcgctggtgttgt

SEQ ID NO: 75130 - DNA, 75 bp, synthetic construct
  source 1..75: mol_type = other DNA
tcggttttgcaaaagactgtcatcaacgtaatgacgaaatcggctatcgaaatgctatagcaagatcctactatg

SEQ ID NO: 75131 - DNA, 75 bp, synthetic construct
  source 1..75: mol_type = other DNA
aggcattaccccatttccggttcattggtgaagtgctgtccggcttcgtccctgaaccacatcaacccataacag

SEQ ID NO: 75132 - DNA, 75 bp, synthetic construct
  source 1..75: mol_type = other DNA
tgttgctggatgataatacagatgttccagatctcaggcaggttatcttcaagtgcgtacccaaaaacagactgg

SEQ ID NO: 75133 - DNA, 75 bp, synthetic construct
  source 1..75: mol_type = other DNA
aaaacaccgggcgtgtctcgcgtgctttgcattgaatgtgaagtgccaattccgccagcacgccgccgcgccatt

SEQ ID NO: 75134 - DNA, 75 bp, synthetic construct
  source 1..75: mol_type = other DNA
gttccgtaagcacctggagctgtacaaagatatcgacaaagccaaactgcgcgaaaactttgccgtcttcctgaa

SEQ ID NO: 75135 - DNA, 75 bp, synthetic construct
  source 1..75: mol_type = other DNA
atcgttgaagacgcaggcctggtgtggtctgtcgtagaaagcgtgccaattcacgaagatatcaaaacccacact

SEQ ID NO: 75136 - DNA, 75 bp, synthetic construct
  source 1..75: mol_type = other DNA
ggataagctgctggttatctctgataacaagagctactcaccgtgggacccgatcgagaaagacgagatgaaccg

SEQ ID NO: 75137 - DNA, 75 bp, synthetic construct
  source 1..75: mol_type = other DNA
gatctgctgttcgttgatatcacggttaaatctttcgacggtgatggtatctatgcgtttctgtacgacgacaca

SEQ ID NO: 75138 - DNA, 75 bp, synthetic construct
  source 1..75: mol_type = other DNA
gaaagtcgggtggaaatggaaacgctcagacgtcaggaacaggcctctgccaaagttgtagacttttatcgtctc

SEQ ID NO: 75139 - DNA, 75 bp, synthetic construct
  source 1..75: mol_type = other DNA
caccgctgaaaacacctttaaactcctgttggcgaagcgaacgcttgcctccgtactggctgaagcgagggcaca

SEQ ID NO: 75140 - DNA, 75 bp, synthetic construct
  source 1..75: mol_type = other DNA
aatgtggagccagaaaagtggctgcgttacgtcattgaacatatccaggactggccggcaaaccgggtacgcgat

SEQ ID NO: 75141 - DNA, 75 bp, synthetic construct
  source 1..75: mol_type = other DNA
atccagaaagctaccttcgccatgtgcttggcgtcatagcagactggccggtcaaccgggtcagcgaactgcttc

SEQ ID NO: 75142 - DNA, 75 bp, synthetic construct
  source 1..75: mol_type = other DNA
aacctacaaaatccgtccgcaggccactgccggtgtgtcctggcacaacgacctgttcaccaccgcacttgatgt

SEQ ID NO: 75143 - DNA, 75 bp, synthetic construct
  source 1..75: mol_type = other DNA
cgcactgacagaggcgcagccgggcgatgtgctgctgtgctgttttggttcatcggtgccgaatcatgccgccat

SEQ ID NO: 75144 - DNA, 75 bp, synthetic construct
  source 1..75: mol_type = other DNA
aaaagcctcaagggcaaatcgtgttggcctggtgagtggcagtggattaagtaacaacctcctttgccgttgtgc

SEQ ID NO: 75145 - DNA, 75 bp, synthetic construct
  source 1..75: mol_type = other DNA
ataccatctggcggggattgagatgccggattttcaccgcgaggatgagtggtggcgcaatggccagaacctgta

SEQ ID NO: 75146 - DNA, 75 bp, synthetic construct
  source 1..75: mol_type = other DNA
ctttaatgcccttaattcttattcaggaagtccaattgtattgttgggggcgcatttacttatcctgacaggtct

SEQ ID NO: 75147 - DNA, 75 bp, synthetic construct
  source 1..75: mol_type = other DNA
tgaacatcgtgccggggcgctacgccggtcgcgacggcgcggcggtgctggagctgggtggcaatgtgttgcgtc

SEQ ID NO: 75148 - DNA, 75 bp, synthetic construct
  source 1..75: mol_type = other DNA
ccggtatcattttctcctttatgctgatcaacctatttgattcatcaggaacattaattggtgtaactgataaag

SEQ ID NO: 75149 - DNA, 75 bp, synthetic construct
  source 1..75: mol_type = other DNA
tagcggaagtggaggctctaaaacgccaggtaccggcgctaacgctattcagaatcgggctcagaactggaggct

SEQ ID NO: 75150 - DNA, 75 bp, synthetic construct
  source 1..75: mol_type = other DNA
gtggtcaaagtgcagggcaaattgcagaacaggctggtcgtggtctggtaaacataccatttgacgtattgcagg

SEQ ID NO: 75151 - DNA, 75 bp, synthetic construct
  source 1..75: mol_type = other DNA
ccgcgtgctggatcaatttggcctcgaacatccccacgccaggcgctggcaaggattgccgcaggcccggaattt

SEQ ID NO: 75152 - DNA, 75 bp, synthetic construct
  source 1..75: mol_type = other DNA
atgtacggaacatgcgaaacactctgccgggagctggcagcgcagtatccgggagacacgccgctgatgctggtt

SEQ ID NO: 75153 - DNA, 75 bp, synthetic construct
  source 1..75: mol_type = other DNA
gttttactggcgaatggttactggacgttggctgtggaaataccctcgatccgaaccgcaaaagtgtgaaaaaaa

SEQ ID NO: 75154 - DNA, 75 bp, synthetic construct
  source 1..75: mol_type = other DNA
ggaatttgatttcattgccgttatagaccctaaggcaatgcagaaagaatttatttcggcctggtctgaggttga

SEQ ID NO: 75155 - DNA, 75 bp, synthetic construct
  source 1..75: mol_type = other DNA
gatggacagaaaaatgcagagaacaacgctcgttatgttgccgcgttcaacccaaaggttgcactggagctgctt

SEQ ID NO: 75156 - DNA, 75 bp, synthetic construct
  source 1..75: mol_type = other DNA
ttagtgccaaatctcgtggatttcatctggtaacggatgaaatcctgaatcaactggctgatatgccgcgtgtta

SEQ ID NO: 75157 - DNA, 75 bp, synthetic construct
  source 1..75: mol_type = other DNA
gacatcaaaggtttgtttgctgatttcgataccaccagtaaccgcctgggtaacaccgttaaagataaaaatgcc

SEQ ID NO: 75158 - DNA, 75 bp, synthetic construct
  source 1..75: mol_type = other DNA
cggtggcgtggtttgaactcgctcttaaaaagaaatttaatgcttttagtatcaaagtatcccccacaaaaatca

SEQ ID NO: 75159 - DNA, 75 bp, synthetic construct
  source 1..75: mol_type = other DNA
cgtggatggtgcccggcacggacgaaatcggccaggcgaccgcacaggaaatgcaaaaacattcgctggtgttgt

SEQ ID NO: 75160 - DNA, 75 bp, synthetic construct
  source 1..75: mol_type = other DNA
atgtacggaacatgcgaaacgctctgccgggcgctggcagcaaagtatccgggagacacgccgctgatgctggtt

SEQ ID NO: 75161 - DNA, 75 bp, synthetic construct
  source 1..75: mol_type = other DNA
tctttatgggcggtctgggcattgtcatcagctttatctggttgaaagtcatccacgagccaaatcaacatccgg

SEQ ID NO: 75162 - DNA, 75 bp, synthetic construct
  source 1..75: mol_type = other DNA
agcggtattttttctgcaatgagctgaatgaaaaaggggaggcggtcacctggcaggggcggcaatatcaggcat

SEQ ID NO: 75163 - DNA, 75 bp, synthetic construct
  source 1..75: mol_type = other DNA
cgtcccggaattcgtcacccgccgtcaggcggtggttaatcaggcccgcagcctgctgaaaaacaacacacacga

SEQ ID NO: 75164 - DNA, 75 bp, synthetic construct
  source 1..75: mol_type = other DNA
ggcgcagtgcggcattcgcaccgtgtgctacaacttcatgccggtgctcgactggacccgtactgacctcgaata

SEQ ID NO: 75165 - DNA, 75 bp, synthetic construct
  source 1..75: mol_type = other DNA
ctggggaaaatcccgcacctgcgcacgccgggtttgctggtgatggacatggattccaccgccatccagattgaa

SEQ ID NO: 75166 - DNA, 75 bp, synthetic construct
  source 1..75: mol_type = other DNA
cctgtccgatcatgaaatcaggaccgtcctggcgtgtctggaggacatcccggaagaccagcggactgaatccgg

SEQ ID NO: 75167 - DNA, 75 bp, synthetic construct
  source 1..75: mol_type = other DNA
ttcgatcgcctgctgaagaaaatcagcgttgaggcagctctcaacgctgaaatgtcccaccatctgggctacgat

SEQ ID NO: 75168 - DNA, 75 bp, synthetic construct
  source 1..75: mol_type = other DNA
ttacagccatcggtcaccgaaacgaaagcagatgacctgattctaccatcgctgcatgtggctaaccgcgagctg

SEQ ID NO: 75169 - DNA, 75 bp, synthetic construct
  source 1..75: mol_type = other DNA
atgttgcgtgatattcagctggttatggagcggtggggagcatgggcagcaaataatcatgaagatgtaacatgg

SEQ ID NO: 75170 - DNA, 75 bp, synthetic construct
  source 1..75: mol_type = other DNA
ggcgctgatttaccggcagagccggaagctgcatccgtagcggaaaccgatggtaaagcctttcctcagccagca

SEQ ID NO: 75171 - DNA, 75 bp, synthetic construct
  source 1..75: mol_type = other DNA
agtgggagcgagtctgtgccgcgctgcgggaactgaacaaacacagggatattctccgggatattaccgccacca

SEQ ID NO: 75172 - DNA, 75 bp, synthetic construct
  source 1..75: mol_type = other DNA
ggtaaaaaggtccgcactactgtcagccggaaagccgttgccgcaggcgaccgcgtaaaccgtcagtttgtggca

SEQ ID NO: 75173 - DNA, 75 bp, synthetic construct
  source 1..75: mol_type = other DNA
tataaaagctatggcagtctcacctcagatgacgaacatatgggacaaacaattggcaggatatgttgctgcagg

SEQ ID NO: 75174 - DNA, 75 bp, synthetic construct
  source 1..75: mol_type = other DNA
gtgcttcccgtcgacgttttataaacgaattaatgcaggcgatcgaaaaggtgcctgtgaggcgattcgctggtg

SEQ ID NO: 75175 - DNA, 75 bp, synthetic construct
  source 1..75: mol_type = other DNA
atttgcccaacttctcggcacgcttcgtgtgggtgatatgtacacatcaagcgatatttttgattctgttcgctt

SEQ ID NO: 75176 - DNA, 75 bp, synthetic construct
  source 1..75: mol_type = other DNA
gaacccaccggttactactgccgtcagacttccttcagtgtcccgggtaagccgctggttgatgccctggagaat

SEQ ID NO: 75177 - DNA, 75 bp, synthetic construct
  source 1..75: mol_type = other DNA
gcgggagctgaacaagcaccgggatattgttcgacagattactgattcttcccgctgtgttgcatcggaaaagtg

SEQ ID NO: 75178 - DNA, 75 bp, synthetic construct
  source 1..75: mol_type = other DNA
aatgacaacgcaaattcacgtctggcgaaaaatcagaatggtgcagatatccaggataaatcagcttttctggac

SEQ ID NO: 75179 - DNA, 75 bp, synthetic construct
  source 1..75: mol_type = other DNA
aggggtacatgatgttagccgggcatcaagcctttcaacagcgaaagcacagattgaactcgtggctcaggaaat

SEQ ID NO: 75180 - DNA, 75 bp, synthetic construct
  source 1..75: mol_type = other DNA
atccgtaaggacagatgcagcaagtgcatgcgcgggtgtgagatgcgcggcatggtggctaattttggcggtttc

SEQ ID NO: 75181 - DNA, 75 bp, synthetic construct
  source 1..75: mol_type = other DNA
cggctgaatgccggtgatcgtaagggtgcatgcgaggcgattcgctggtggataaaagatggtgggcgcgattgc

SEQ ID NO: 75182 - DNA, 75 bp, synthetic construct
  source 1..75: mol_type = other DNA
ataattagtttttatggccttagtgaacattgttgcagttatatagttgaagatagttttttaaaaaacagaaaa

SEQ ID NO: 75183 - DNA, 75 bp, synthetic construct
  source 1..75: mol_type = other DNA
gtgctggatgctctggagcaggcgttatgggcccgtcgaccgtccggcacagtccatcacagtgataaaggttct

SEQ ID NO: 75184 - DNA, 75 bp, synthetic construct
  source 1..75: mol_type = other DNA
tttctggcacatggaatggttcagacggtccgtggagttactggcgtcaggttcagtctgcaacacgccccctga

SEQ ID NO: 75185 - DNA, 75 bp, synthetic construct
  source 1..75: mol_type = other DNA
atgtctgaaccacaaaacgggcgcggtgcgctcttcgccggcgggctggccgccattcttgcatcgacctgctgc

SEQ ID NO: 75186 - DNA, 75 bp, synthetic construct
  source 1..75: mol_type = other DNA
atggacgcacgcagcgttatacaacccgtaacgggactatgtatattcgcggcctgacagctaaatgggatgcag

SEQ ID NO: 75187 - DNA, 75 bp, synthetic construct
  source 1..75: mol_type = other DNA
ataataataaagttgatggtatatatatagatccaccttataataccaatgcgtctgagattttatacaaaaacg

SEQ ID NO: 75188 - DNA, 75 bp, synthetic construct
  source 1..75: mol_type = other DNA
gacatcatcctgataaacgcagtgcccgtgctcagcgcgatgactggctgaagagagagatacagcgcgtatacg

SEQ ID NO: 75189 - DNA, 75 bp, synthetic construct
  source 1..75: mol_type = other DNA
taatcatgaagatgtgacctggtcgtccattgccgccggttttaagggattaattacttcaaaagtaaaatctcg

SEQ ID NO: 75190 - DNA, 75 bp, synthetic construct
  source 1..75: mol_type = other DNA
atgagcgcaaaaatcaaatacggcctgtcagctgctgttctggcgctgattgctgcaggcgcgtctgctcctcaa

SEQ ID NO: 75191 - DNA, 75 bp, synthetic construct
  source 1..75: mol_type = other DNA
gaagtggaactggccacactaacgtgggtggactggtataacaatcgacgattgctgggaaggctgggccatact

SEQ ID NO: 75192 - DNA, 75 bp, synthetic construct
  source 1..75: mol_type = other DNA
atcgttggggagcatgggcggcgagtgatagttcaggagtagattattctcctatagctgctgggtttaaagggc

SEQ ID NO: 75193 - DNA, 75 bp, synthetic construct
  source 1..75: mol_type = other DNA
acgtattaccactgtcagcaacagcgacatcatccttataaacgcagtgcccgtgcgcagcgcgatgactggctg

SEQ ID NO: 75194 - DNA, 75 bp, synthetic construct
  source 1..75: mol_type = other DNA
tgcatgtgaccaggatgaagccagacagatttgcacagcatcaaatgcacctgctgcgcgtggcagacgatatgc

SEQ ID NO: 75195 - DNA, 75 bp, synthetic construct
  source 1..75: mol_type = other DNA
ccggtgttctccggggtaaaaaggtccgtacgaccatcagccggaaagccgttgccgcaggcgaccgcgtaaacc

SEQ ID NO: 75196 - DNA, 75 bp, synthetic construct
  source 1..75: mol_type = other DNA
ggcgatatcaaaggtgcatgtgatcaactacgtcgctggacatatgctggcggtaagcaatggaaagggctgatg

SEQ ID NO: 75197 - DNA, 75 bp, synthetic construct
  source 1..75: mol_type = other DNA
gaacgtcctgaccagttgtgggtggctgattttacttacgtcagcacatggcaggggggcgtctatgtggcgttc

SEQ ID NO: 75198 - DNA, 75 bp, synthetic construct
  source 1..75: mol_type = other DNA
aggaagccggattactggcatcaacaggaagtacaggcgactcgtatgacaacacgatggcggagagcatcaatg

SEQ ID NO: 75199 - DNA, 75 bp, synthetic construct
  source 1..75: mol_type = other DNA
ttgagcgctggggcgcgtgggtggctaataatcatgaggatgtgacctggtcgtccattgctgccggttttaagg

SEQ ID NO: 75200 - DNA, 75 bp, synthetic construct
  source 1..75: mol_type = other DNA
atggtgcgtgatattcagcaggttatggagcggtggggagcatgggctgcgaacaatcacgaagatgtgtcatgg

SEQ ID NO: 75201 - DNA, 75 bp, synthetic construct
  source 1..75: mol_type = other DNA
ggtgccgctgaccgaaccgcaaaaggccggaatagcttctttctgcccgtataacatcgggcccggtaagtgctt

SEQ ID NO: 75202 - DNA, 75 bp, synthetic construct
  source 1..75: mol_type = other DNA
atgcgtgatatccggcaggttcttgagcgctggggggcatgggcggcaaataaccatgaggatgttacatggtcg

SEQ ID NO: 75203 - DNA, 75 bp, synthetic construct
  source 1..75: mol_type = other DNA
ttcacccgactggtgcatgtgtggagcgcgccgtttgagtactttactcgtcggtatcagattgtgcgttcgcgg

SEQ ID NO: 75204 - DNA, 75 bp, synthetic construct
  source 1..75: mol_type = other DNA
caaagcagaatgcaaagccctcctgaataaagaccttgccacggtcgccagacaaattaacccgtacataaaagt

SEQ ID NO: 75205 - DNA, 75 bp, synthetic construct
  source 1..75: mol_type = other DNA
tggacaaccgctcagtttattgaatggctggattcccgtggtgcatttaatcatccgtactggatgtgcaaatgt

SEQ ID NO: 75206 - DNA, 75 bp, synthetic construct
  source 1..75: mol_type = other DNA
agatggccgtcgatttaaccccagtgtttttaaagatacttatcaatatggttatacaagctcaggtcaaaatac

SEQ ID NO: 75207 - DNA, 75 bp, synthetic construct
  source 1..75: mol_type = other DNA
gaaactgacgaaggaaaaatgcgatcaggttaatgccattgaacgggataaggcgctggcatgggtggagcgcaa

SEQ ID NO: 75208 - DNA, 75 bp, synthetic construct
  source 1..75: mol_type = other DNA
tgctggcggtaagcaatggaaaggtctcatgactcgtcgtgagattgagcgtgaaatctgtttgtggggtcagca

SEQ ID NO: 75209 - DNA, 75 bp, synthetic construct
  source 1..75: mol_type = other DNA
atgaaactgtcgaaggaaaaatgcgaccaggtcaacgccattgagcgtgataaggcgctggcatgggtggagcgc

SEQ ID NO: 75210 - DNA, 75 bp, synthetic construct
  source 1..75: mol_type = other DNA
gcggaaactgatggtaaagcctttcctcagccagccggtgttgcgttaccagtacaggaagcggcaacacaggaa

SEQ ID NO: 75211 - DNA, 75 bp, synthetic construct
  source 1..75: mol_type = other DNA
ttgctgctgctattggtggtggggctgttgccatagcgtctgtgctcatcactggtccgagtggtaacgatggtc

SEQ ID NO: 75212 - DNA, 75 bp, synthetic construct
  source 1..75: mol_type = other DNA
aacaacgtattaccccgcacatcatcagccagattatggagtttgctgcaacgcgcaaaggggtgatgattttcg

SEQ ID NO: 75213 - DNA, 75 bp, synthetic construct
  source 1..75: mol_type = other DNA
gctgatgtgaaacagctcatagcctccatcttccatgaacaccggggatgttatgggtaccggcggatccattgt

SEQ ID NO: 75214 - DNA, 75 bp, synthetic construct
  source 1..75: mol_type = other DNA
ggtagtggcggcccgccttggaatcagccgtgaagatgcggtcaacgaactgtggaaactgaagcgccgtggtga

SEQ ID NO: 75215 - DNA, 75 bp, synthetic construct
  source 1..75: mol_type = other DNA
ttgcttctcgcatgactgcgtcggtgggcagtatccagaactttgccagcttcatctgcgcctcttttgcgccga

SEQ ID NO: 75216 - DNA, 75 bp, synthetic construct
  source 1..75: mol_type = other DNA
gagcgtgtctgcgccgcgctgcgggagctgaacaagtaccgggatattatacggcagatgaattgttccagagag

SEQ ID NO: 75217 - DNA, 75 bp, synthetic construct
  source 1..75: mol_type = other DNA
tatgatcttgctaacgggaaatacactgcgcaggatgccaccacagcgcgaaaaggccttgtccagctcagtagc

SEQ ID NO: 75218 - DNA, 75 bp, synthetic construct
  source 1..75: mol_type = other DNA
aggcgctggcatgggtggagaaaaacatcagagtgccactgaccgaaccccagaaagcggggattgcgtcattct

SEQ ID NO: 75219 - DNA, 75 bp, synthetic construct
  source 1..75: mol_type = other DNA
gccggaagaaaccaccacagcaacagtagcgaaaatctcagagtgcgatttaaccgcaacgattgaacaacgcgg

SEQ ID NO: 75220 - DNA, 75 bp, synthetic construct
  source 1..75: mol_type = other DNA
ggagtgcagctttgcattacctgtcaggaaatcgcagaactgaaaggcaaacattacaacggaggtgctgtatga

SEQ ID NO: 75221 - DNA, 75 bp, synthetic construct
  source 1..75: mol_type = other DNA
aaaatatgccatacgccttgacgcagcgaagcataccgcagatcttgccgctgccgtcagaggcaaaacaaccaa

SEQ ID NO: 75222 - DNA, 75 bp, synthetic construct
  source 1..75: mol_type = other DNA
ctgctgacgctatcatttgttcatggtgataaaatcttttctattattaacaatcacaaagatgccattagccta

SEQ ID NO: 75223 - DNA, 75 bp, synthetic construct
  source 1..75: mol_type = other DNA
cacgtatcctgcgcgtactcaaagccctgaaaggctactcgctcactgggttgtccaatggcgaattggcggcgg

SEQ ID NO: 75224 - DNA, 75 bp, synthetic construct
  source 1..75: mol_type = other DNA
tggagatgcaaaaactaaaggaggtactctctgtagagggtgttaatatcccatcattattacaagtcataaagc

SEQ ID NO: 75225 - DNA, 75 bp, synthetic construct
  source 1..75: mol_type = other DNA
atggccgaaaaactgaaacttctcgagaagctgggcatcacccttgatgacctggaaaaactcttcaaatcccgc

SEQ ID NO: 75226 - DNA, 75 bp, synthetic construct
  source 1..75: mol_type = other DNA
atggtaagcctgtcgtccccggcatgaagttgtcgaaggaaaaatgcgaccaggttaacgccattgagcgtgata

SEQ ID NO: 75227 - DNA, 75 bp, synthetic construct
  source 1..75: mol_type = other DNA
tggctgggaacgctgctgattctgtcatcggtgattttgatttcaatggattcccgccgccgcgccagaaaaata

SEQ ID NO: 75228 - DNA, 75 bp, synthetic construct
  source 1..75: mol_type = other DNA
cgggtgtattgaaaagtactctgtcaattaatcttcatacttattatgcgattcgtttgtgggaaggtcgcaagc

SEQ ID NO: 75229 - DNA, 75 bp, synthetic construct
  source 1..75: mol_type = other DNA
tatgtggatgacaaaatatcagagcacgaacagtcacgacgtcacccggacgcctcgctgaccgcaaaaggtttt

SEQ ID NO: 75230 - DNA, 75 bp, synthetic construct
  source 1..75: mol_type = other DNA
ctaaatatatacaatttagcgatcatataattgcaccacgaaaatcatctcattttcacatttttatgggtaatg

SEQ ID NO: 75231 - DNA, 75 bp, synthetic construct
  source 1..75: mol_type = other DNA
tcggtgatggcggcggaacattgccaacgccggacgcaaagcagactgggctggtgaatgagaaacgccgggctg

SEQ ID NO: 75232 - DNA, 75 bp, synthetic construct
  source 1..75: mol_type = other DNA
tgttgataaaacgggtcacacctggtttctggctgtcgaaggtgaagccggggtaaccgaagggcaggcactaca

SEQ ID NO: 75233 - DNA, 75 bp, synthetic construct
  source 1..75: mol_type = other DNA
gcatcggtagcagaaaccgatggtaaagcctttcctcagccagcaggtgttgcgttaccggtacaggaagctgca

SEQ ID NO: 75234 - DNA, 75 bp, synthetic construct
  source 1..75: mol_type = other DNA
atgtcgataaaacaaatgccagggagggtattaatatcgctattgttgagcgttacaggattattaagtggctgt

SEQ ID NO: 75235 - DNA, 75 bp, synthetic construct
  source 1..75: mol_type = other DNA
aattgcccgaatccctgattgcccactatcccatgcctgaacgcagtagctgtcgtttactgtcgctggacgggc

SEQ ID NO: 75236 - DNA, 75 bp, synthetic construct
  source 1..75: mol_type = other DNA
accgcggcagactcgtcagcgataacgtgctgacgctcagtgccacgcagataaacaacagcggtaccctctccg

SEQ ID NO: 75237 - DNA, 75 bp, synthetic construct
  source 1..75: mol_type = other DNA
taacaatcaaattgtggcacgcaccggaattacggttgtcggtgattttcgccgtcgcgatattgccttgggagg

SEQ ID NO: 75238 - DNA, 75 bp, synthetic construct
  source 1..75: mol_type = other DNA
aatccaattttcaagggaatgctgtaattaattatattgattctcaatacccatacactagaattattgagcata

SEQ ID NO: 75239 - DNA, 75 bp, synthetic construct
  source 1..75: mol_type = other DNA
tctgagctttagctatcagcgtcacgacggtgacgcccgccacaccgccagtagcgggaagatccgcctatgtcg

SEQ ID NO: 75240 - DNA, 75 bp, synthetic construct
  source 1..75: mol_type = other DNA
ctgagaacaccaaatcgtcagcagagaaacggaggcccgttaaaacctaatgaaattgcgccatcggcaaggctg

SEQ ID NO: 75241 - DNA, 75 bp, synthetic construct
  source 1..75: mol_type = other DNA
cttaccttgatgagttagccgcgcagcagtggaaagcgaaagcgaagcaactggccgagcgtggcgatctgacac

SEQ ID NO: 75242 - DNA, 75 bp, synthetic construct
  source 1..75: mol_type = other DNA
agatgttccctgatcgcgttataatttctgactttaacatttccatacaaaaaaatgaatttgttgttataaccg

SEQ ID NO: 75243 - DNA, 75 bp, synthetic construct
  source 1..75: mol_type = other DNA
caaagaatattggctcaaatctgcaaataaaatagtttatactggtccaatagataggttttttggttttgaatt

SEQ ID NO: 75244 - DNA, 75 bp, synthetic construct
  source 1..75: mol_type = other DNA
tgctgagtataaatattatgatatgcatcaggttattgcctcagcattaaccgcggttgaaaaggaattatgtac

SEQ ID NO: 75245 - DNA, 75 bp, synthetic construct
  source 1..75: mol_type = other DNA
gctgctgggctttgatccggtaagccgccgccggaacccggtggaaacggaggaggaagacgagcttgaccgtct

SEQ ID NO: 75246 - DNA, 75 bp, synthetic construct
  source 1..75: mol_type = other DNA
aaagctgccgaggaaatcgggcaactcgtcaccgtcgcgcgtgaagaactccagcggcgcaaagctaaagagcag

SEQ ID NO: 75247 - DNA, 75 bp, synthetic construct
  source 1..75: mol_type = other DNA
aaggtacagaaaacaaaaaatggcataccctatgttgccggtattggagcggggattgaggatactgatggccag

SEQ ID NO: 75248 - DNA, 75 bp, synthetic construct
  source 1..75: mol_type = other DNA
gaccgttatcacaggcgacggtccactggaactgcgtactccgcgcgatcgtgacggtaccttcgaaccacaact

SEQ ID NO: 75249 - DNA, 75 bp, synthetic construct
  source 1..75: mol_type = other DNA
gcgagcgtaaaatctcctggatggaaatttacaccggtgaaaaatccacacaggtttatggtcaggacgtctggc

SEQ ID NO: 75250 - DNA, 75 bp, synthetic construct
  source 1..75: mol_type = other DNA
atggaaagtaaagtagttgttccggcacaaggcaagaagatcaccctgcaaaacggcaaactcaacgttcctgaa

SEQ ID NO: 75251 - DNA, 75 bp, synthetic construct
  source 1..75: mol_type = other DNA
taaccggggcggtgctgcggggtatatcgcgaaatacatctcaaaaaacatcgacggctatgcactggatggtca

SEQ ID NO: 75252 - DNA, 75 bp, synthetic construct
  source 1..75: mol_type = other DNA
taaaggtaatctgctaaaccgctttgtttatgttatttcaggtatttttacgcctctgatcggtttgatggcggc

SEQ ID NO: 75253 - DNA, 75 bp, synthetic construct
  source 1..75: mol_type = other DNA
tgcgcatatggaagcgaatctggagatggagattgtcccgcagggattacgcgtgctgattaaagacgaccagaa

SEQ ID NO: 75254 - DNA, 75 bp, synthetic construct
  source 1..75: mol_type = other DNA
cgaccgtaaattataacgggaaaaaattcacgtatccggtcgctgatgagtggccgggctttactggcagtacca

SEQ ID NO: 75255 - DNA, 75 bp, synthetic construct
  source 1..75: mol_type = other DNA
cattgcggaggcagaaggcgaaattgagccggaagagcgcaaggtgctggaagagattgccggtgttctgggtct

SEQ ID NO: 75256 - DNA, 75 bp, synthetic construct
  source 1..75: mol_type = other DNA
ccagtgtgaacacgtactggcgacaccccaacaaaggggcatttgctggtaagagcctgataagcgaggcggggc

SEQ ID NO: 75257 - DNA, 75 bp, synthetic construct
  source 1..75: mol_type = other DNA
tttacctttgataataactatttctctgatcgctatcaaggcattccgatcggtggatattctggattagtagaa

SEQ ID NO: 75258 - DNA, 75 bp, synthetic construct
  source 1..75: mol_type = other DNA
ttattttccgggctagcccgtgacactctcatttacgcaggtggtgaccagtcggtacacggaagggccctgaat

SEQ ID NO: 75259 - DNA, 75 bp, synthetic construct
  source 1..75: mol_type = other DNA
actccactggagaacagcgttccttcaggtgtttcgccctttgcagatttggtctatggcatgcttccccatccg

SEQ ID NO: 75260 - DNA, 75 bp, synthetic construct
  source 1..75: mol_type = other DNA
agcacgacgcgtgttatttatgatggcggcaagaaagaagcgtcgctgaccgttgaaaaccataataaaaatgaa

SEQ ID NO: 75261 - DNA, 75 bp, synthetic construct
  source 1..75: mol_type = other DNA
agcagaagcgcagcctagcggcctttcaccgcgaagtcactcaggtgtgcaaggctcaaaaactgcgagtgccgg

SEQ ID NO: 75262 - DNA, 75 bp, synthetic construct
  source 1..75: mol_type = other DNA
aaaccgacaagggcatcgtgctggccagagccttgatcgagcacctgcggcggcagtcggtcattgtgcccgccc

SEQ ID NO: 75263 - DNA, 75 bp, synthetic construct
  source 1..75: mol_type = other DNA
tgaatccggcggcgattttgcctccgtcaccggcggcacgcgtattctttctgactggctggtgattgagtgtag

SEQ ID NO: 75264 - DNA, 75 bp, synthetic construct
  source 1..75: mol_type = other DNA
tgattttgagtgtgggggcgtcatcggtcttcgcggcgggaaccgtcaaggtattcagcaatggcagcagtgagg

SEQ ID NO: 75265 - DNA, 75 bp, synthetic construct
  source 1..75: mol_type = other DNA
gtaatcagattcctctatttattcgcccgcgtacatatggaaataatgtctcaagcgggcaaataatgagccgag

SEQ ID NO: 75266 - DNA, 75 bp, synthetic construct
  source 1..75: mol_type = other DNA
gcggaggtgctggttcgcctggggaaggcggagtacatcacagtgcgacgtccggcaggtcagaaaaagaaacgt

SEQ ID NO: 75267 - DNA, 75 bp, synthetic construct
  source 1..75: mol_type = other DNA
cgctggcgggagattaaaaagcagttcacccatgcttgcggattgaaaaatatctggcaaccgcgtttttgggag

SEQ ID NO: 75268 - DNA, 75 bp, synthetic construct
  source 1..75: mol_type = other DNA
cctctgtactacagcccgggttacggccctgcttcactgtacgactacaaaggccggggccgaacctttggtctg

SEQ ID NO: 75269 - DNA, 75 bp, synthetic construct
  source 1..75: mol_type = other DNA
catgaagatctgcaagccaatgcgcaaaccgttcttgaggtactgcgcagtggttccgcttacgacagagtcacc

SEQ ID NO: 75270 - DNA, 75 bp, synthetic construct
  source 1..75: mol_type = other DNA
gaatggaacgcccgtcacacagaaggctggcacgaaggacatgatgctcctaggacggatagccactccagtcta

SEQ ID NO: 75271 - DNA, 75 bp, synthetic construct
  source 1..75: mol_type = other DNA
ttttggatgcggacgacgaactcgttgcttttctggagaagcagggcgaggattgtatacgcgaaattcaccagt

SEQ ID NO: 75272 - DNA, 75 bp, synthetic construct
  source 1..75: mol_type = other DNA
ttccgttccaggcgcgttattttgcaaccggtgccgcaaccccgggtgctgctaatgcggatgcgaccttcaagg

SEQ ID NO: 75273 - DNA, 75 bp, synthetic construct
  source 1..75: mol_type = other DNA
gatggcggaggcaatcacttaccgtgcgaagttctccgcgcgtgagctgatgctgctgtggcctgacttcattgc

SEQ ID NO: 75274 - DNA, 75 bp, synthetic construct
  source 1..75: mol_type = other DNA
acgcgatagataatatgacagacattgagcaggaaaaagtcgcgcaatttttgtcacgtgaaggaattcgcaatt

SEQ ID NO: 75275 - DNA, 75 bp, synthetic construct
  source 1..75: mol_type = other DNA
aattcgaccgtgccagcaaaaaatatcagctgtttaccctctaccagatccgcaataaacgcatgacctggcgca

SEQ ID NO: 75276 - DNA, 75 bp, synthetic construct
  source 1..75: mol_type = other DNA
ctggcgcagttgcaatggctctggtttcttttggtgctaatgctgcaaatcagggacagggtattgttaacttca

SEQ ID NO: 75277 - DNA, 75 bp, synthetic construct
  source 1..75: mol_type = other DNA
aaatcttctcatcgtcggtattgctgcaacaggggccgcttttgtccctgatatgtactggctcatcttctttcg

SEQ ID NO: 75278 - DNA, 75 bp, synthetic construct
  source 1..75: mol_type = other DNA
gcattagaacgggttcaccagttgaccgctcgtgttgtcgattatgttggcgaatggcactcccatccacaaggc

SEQ ID NO: 75279 - DNA, 75 bp, synthetic construct
  source 1..75: mol_type = other DNA
ggtgccaccgcttgaagatcttgagcttcaccagacgtttaccgatgaattctttgcgggtgcatttgcatcact

SEQ ID NO: 75280 - DNA, 75 bp, synthetic construct
  source 1..75: mol_type = other DNA
atgtttgtgaaacccctgaaagggcggtcagttcctgaccctgcccgtggagaccttttgccttctgacgggcga

SEQ ID NO: 75281 - DNA, 75 bp, synthetic construct
  source 1..75: mol_type = other DNA
tttctgaatttgaaaccattgaacaagaaaacagttacaacgaatggctgcgtgcgaaagtagcaacgagccttg

SEQ ID NO: 75282 - DNA, 75 bp, synthetic construct
  source 1..75: mol_type = other DNA
ttcatgagagggctgatatacggtgcaggattagtgctggcacttctgacagcggtaacagccggatatatttta

SEQ ID NO: 75283 - DNA, 75 bp, synthetic construct
  source 1..75: mol_type = other DNA
gaatatgatcatacattaaagctatcaagcagtgatgtagccaaagttgtggtgtggtgtgaaataattggagag

SEQ ID NO: 75284 - DNA, 75 bp, synthetic construct
  source 1..75: mol_type = other DNA
cagggtgaagtatcgtctccggtaatccttccggctcaggcactccggtctgatgctccggacgtacagggacat

SEQ ID NO: 75285 - DNA, 75 bp, synthetic construct
  source 1..75: mol_type = other DNA
cacccgtctggaaaatcagccggtgcagggcgaagcgtcgtctccggtaacccttccggctcaggcactccggtc

SEQ ID NO: 75286 - DNA, 75 bp, synthetic construct
  source 1..75: mol_type = other DNA
tgtattacaaagagtctgcactttttctgcatgattgtttagaaagtatagcaagcaatacatgcgcacctgatc

SEQ ID NO: 75287 - DNA, 75 bp, synthetic construct
  source 1..75: mol_type = other DNA
acgtaacggcttccgtttctggggtaaccggactctcgacaccactacctacacctttgagacctacacgcgtac

SEQ ID NO: 75288 - DNA, 75 bp, synthetic construct
  source 1..75: mol_type = other DNA
gcgatcaacaaatggaacggtacattaccgcagtatatgaccagtaataccgctgttccgtttgttccggtgaaa

SEQ ID NO: 75289 - DNA, 75 bp, synthetic construct
  source 1..75: mol_type = other DNA
gaactatctttcggccaaaggtcgtgctgcgattgtctgcttcccgggtattttttaccgtggcggcgcggagca

SEQ ID NO: 75290 - DNA, 75 bp, synthetic construct
  source 1..75: mol_type = other DNA
cgccctggaatgtatccgatacatcgcaacgcggtcgctgaatgacgctaaaaatattcttgttgctgattgtga

SEQ ID NO: 75291 - DNA, 75 bp, synthetic construct
  source 1..75: mol_type = other DNA
tgcacatgcagccaatcaagggcaaggtgttgttaattttaaagggacggtaattgatgccccatgtggtattgc

SEQ ID NO: 75292 - DNA, 75 bp, synthetic construct
  source 1..75: mol_type = other DNA
acattgcggtatcggtattaagccgtgttcggaagaaggcaccaaacgtctggttcgtgcagcgatcgaatacgc

SEQ ID NO: 75293 - DNA, 75 bp, synthetic construct
  source 1..75: mol_type = other DNA
tagccgcgcggcacaagctgaagatggtactgggtaaagacctgtcggataagctcgtggagcatatagaccaga

SEQ ID NO: 75294 - DNA, 75 bp, synthetic construct
  source 1..75: mol_type = other DNA
taacacagttaaagacaaaaacagccgtcttgccgccgttctgaaaggcgttgaagggctaaagctcggggattt

SEQ ID NO: 75295 - DNA, 75 bp, synthetic construct
  source 1..75: mol_type = other DNA
tcgtctgcggatgtggcggatgtcatggtggatgatgccgcattaatgatggcttcagcggggattccgggaggt

SEQ ID NO: 75296 - DNA, 75 bp, synthetic construct
  source 1..75: mol_type = other DNA
gtgaataaaacaggtaatcagaacacaaccggtaatgcagcgacagcgaccaagttacaaaccgctcgaactata

SEQ ID NO: 75297 - DNA, 75 bp, synthetic construct
  source 1..75: mol_type = other DNA
gctgaagccgatgatgccggattactgggacgattttcagtcgatatgaagattgctcaatggcgatggctgtat

SEQ ID NO: 75298 - DNA, 75 bp, synthetic construct
  source 1..75: mol_type = other DNA
ctcgtttcttccctctgccgcaggggcaaattgccgtcaccctgcgcgacgcacaggcctgctttaacctgaatg

SEQ ID NO: 75299 - DNA, 75 bp, synthetic construct
  source 1..75: mol_type = other DNA
accacttcgcattgccctgcaaaaccatgtcgaatggggatttattgaaaaatatggcgaagctgaaggcatggg

SEQ ID NO: 75300 - DNA, 75 bp, synthetic construct
  source 1..75: mol_type = other DNA
caggagataaatcatacaacctttaacctggcgcgtatgaacatgttcctgcacaacatcaactacgacaaattt

SEQ ID NO: 75301 - DNA, 75 bp, synthetic construct
  source 1..75: mol_type = other DNA
gatttacaggtagttaaaacatggaatgggcctactgagattatgcaggaaatagaaagcaaaatgcacgatgct

SEQ ID NO: 75302 - DNA, 75 bp, synthetic construct
  source 1..75: mol_type = other DNA
gtgaacgtcagcgacagcaagctggaaggcgtgaaagtcgattcttatgagctgggctggcgctttactggcaat

SEQ ID NO: 75303 - DNA, 75 bp, synthetic construct
  source 1..75: mol_type = other DNA
tggcaggttgttaaggcaggtggtgctgtcggtaacaccaccataaatcagaacggtgaactgagggtacatgcc

SEQ ID NO: 75304 - DNA, 75 bp, synthetic construct
  source 1..75: mol_type = other DNA
ttttttaccgtggcggcgcggagcagaaaatccgtcagtatctggtcgataataactatgtcgaaaccgtgattt

SEQ ID NO: 75305 - DNA, 75 bp, synthetic construct
  source 1..75: mol_type = other DNA
atgaaactggaagatttaccgaaatactactccccaaaatcccccggcctgaccgatgcgtccgcctcgacatca

SEQ ID NO: 75306 - DNA, 75 bp, synthetic construct
  source 1..75: mol_type = other DNA
acgggcaaaaccaggtaaaaagttttgcagatgctgcggcgacggaaaaagcggaactgaagctgattgccgaga

SEQ ID NO: 75307 - DNA, 75 bp, synthetic construct
  source 1..75: mol_type = other DNA
atgaataatgacaataccgattacgtgagtaatgaatcagggacgctttcgcgattatttaaactacctcagcat

SEQ ID NO: 75308 - DNA, 75 bp, synthetic construct
  source 1..75: mol_type = other DNA
gtgtaccagaggagctcatagtggactgcctttttatcgggtggatggaccgttgcagacgatgaaaataacggg

SEQ ID NO: 75309 - DNA, 75 bp, synthetic construct
  source 1..75: mol_type = other DNA
gcgtcagttggctactcaatatccagaccagattgaatccgttcgtaaaggcatgggattcattgatgaagatca

SEQ ID NO: 75310 - DNA, 75 bp, synthetic construct
  source 1..75: mol_type = other DNA
tttacccgcaaagataataatatcagcctcaataaagccggtcaggaactgtatcaaaaactgttcccggtttat

SEQ ID NO: 75311 - DNA, 75 bp, synthetic construct
  source 1..75: mol_type = other DNA
ggtatcttcatgcccggacgaacgctcccggcagcgataatcttaacgggattaacgtgaaataccgttatgaat

SEQ ID NO: 75312 - DNA, 75 bp, synthetic construct
  source 1..75: mol_type = other DNA
agcggaatcggattatttatcgccttaatgggattaaaaaatactggcgttattgtcgccaataaagacaccctg

SEQ ID NO: 75313 - DNA, 75 bp, synthetic construct
  source 1..75: mol_type = other DNA
gtcgatgatgatggcgaaacgatggttgtcactgcatcttccgttgaacaaaaccttaaagatgctcccgccagt

SEQ ID NO: 75314 - DNA, 75 bp, synthetic construct
  source 1..75: mol_type = other DNA
aaccgtgccaaaatcgggaatatgcccgccaggcactcctcctgctagtgaaattaaaccagcgagaaacgattg

SEQ ID NO: 75315 - DNA, 75 bp, synthetic construct
  source 1..75: mol_type = other DNA
atgccgttaacatcagctattgcatccaattcattttccaccggaatgcaggttcttcgtgctcaaatggccgcc

SEQ ID NO: 75316 - DNA, 75 bp, synthetic construct
  source 1..75: mol_type = other DNA
tttgacgtggcgcagttcgttgagaaaccgaatctggaaaccgcgcaggcctacgttgccagcggtgaatactac

SEQ ID NO: 75317 - DNA, 75 bp, synthetic construct
  source 1..75: mol_type = other DNA
ttctgattgagctaggttttagctctcagaaggttttaaaaggtctggaaaaagccgagaaacaaacgatgcagg

SEQ ID NO: 75318 - DNA, 75 bp, synthetic construct
  source 1..75: mol_type = other DNA
accgattaatcgtcctccagcaaactggaaacggctttactcaggctctacttcgctacatttcatcgccaaata

SEQ ID NO: 75319 - DNA, 75 bp, synthetic construct
  source 1..75: mol_type = other DNA
aaaacagctatgtgtatgccgaatctggcctggtcaccaccgtcggggtgaaagatctggtggtagtgcagacca

SEQ ID NO: 75320 - DNA, 75 bp, synthetic construct
  source 1..75: mol_type = other DNA
cccagccattgccctggcggcgctggcggcaaaacgcagcagcccggattgcgatccgctgatgctggtcctggc

SEQ ID NO: 75321 - DNA, 75 bp, synthetic construct
  source 1..75: mol_type = other DNA
ttcgatgtggcgcagtttgtcgaaaaaccgaatctcgataccgcccaggcgtatgtctccagcggggaatattac

SEQ ID NO: 75322 - DNA, 75 bp, synthetic construct
  source 1..75: mol_type = other DNA
atgtttgctctggccggaaataaatggaataccacgctgcccggcggaaatatgcaatttcagggcgtcattatt

SEQ ID NO: 75323 - DNA, 75 bp, synthetic construct
  source 1..75: mol_type = other DNA
ctcagaaaacggaatctatggtcactcccgtttttgcaacaccgattttgacgacaagttggcttgcttgaatct

SEQ ID NO: 75324 - DNA, 75 bp, synthetic construct
  source 1..75: mol_type = other DNA
attttgccgaacgcttaccggaaatggcgagaaatggtgagctggaaagttgcctggatgtgcacagaactctgg

SEQ ID NO: 75325 - DNA, 75 bp, synthetic construct
  source 1..75: mol_type = other DNA
accgcgatgacgtataccaaaagcaaaacgtttaaaaccgaagctggcgcgcgtcgctggttatccagaaatact

SEQ ID NO: 75326 - DNA, 75 bp, synthetic construct
  source 1..75: mol_type = other DNA
tgcattatcacagttacgtggctgggattatcgtgatcgtcgcaaagacaagcgacgaacaacgaatgccgaccg

SEQ ID NO: 75327 - DNA, 75 bp, synthetic construct
  source 1..75: mol_type = other DNA
tttggcccccggcctgctgtgcgcagacgggcaataccgccagatagtcaccgtggaagatgcggtgcgcggcgg

SEQ ID NO: 75328 - DNA, 75 bp, synthetic construct
  source 1..75: mol_type = other DNA
acgtataccaaaagcaaaacgtttaaaaccgaagttggcgcgcgtcgctggttggagaagtacacagtaagctaa

SEQ ID NO: 75329 - DNA, 75 bp, synthetic construct
  source 1..75: mol_type = other DNA
tcgcctgttgtttggccggggcgttctgaccggcacacatgacgaactgaaaatgcagaatgtgcagctcaccgg

SEQ ID NO: 75330 - DNA, 75 bp, synthetic construct
  source 1..75: mol_type = other DNA
tgctgaatatggcggaatggtgggtgtgtctgacgatgccaccggaggaagtgaacaacattgcacgctttaaat

SEQ ID NO: 75331 - DNA, 75 bp, synthetic construct
  source 1..75: mol_type = other DNA
atctcacccgcgacgagggactgtttctcgataacaccgtcacccgtacccgctggcgggcgacgtggcggcgca

SEQ ID NO: 75332 - DNA, 75 bp, synthetic construct
  source 1..75: mol_type = other DNA
ctggttgaacctgcaggatattccgccagcccttgaggggagtggtcttgcaattgctttgcgtacaaaactgaa

SEQ ID NO: 75333 - DNA, 75 bp, synthetic construct
  source 1..75: mol_type = other DNA
ttctggggaacgctgaaaaatgagagcctgagccactatcgttttaataaccgggatgaagccatctcagtaata

SEQ ID NO: 75334 - DNA, 75 bp, synthetic construct
  source 1..75: mol_type = other DNA
atcttgatgccatgattcgccacatcacaaaggcggagttatcccgcgtggagatagtcgagttgctcagtcagg

SEQ ID NO: 75335 - DNA, 75 bp, synthetic construct
  source 1..75: mol_type = other DNA
caccggaggtacagcttaccgtcagtggttgtccgcgagtgacgccgtgtcggctggatcaggcaacgccgcgca

SEQ ID NO: 75336 - DNA, 75 bp, synthetic construct
  source 1..75: mol_type = other DNA
cggaaaaacggtgctgaaatttataaccgtaccgcgctggataatacgctgatttacagtggcgttattgatatg

SEQ ID NO: 75337 - DNA, 75 bp, synthetic construct
  source 1..75: mol_type = other DNA
gcagccgaccggcgaacatgaaacatcgctacttcccgtgacgttaacgccggagccggataataaaatcccggc

SEQ ID NO: 75338 - DNA, 75 bp, synthetic construct
  source 1..75: mol_type = other DNA
acgccgtcaacgaacagatcaacagtacaattgaagatgcgattgcccgcgctcggggtgaaattccgcgtggcg

SEQ ID NO: 75339 - DNA, 75 bp, synthetic construct
  source 1..75: mol_type = other DNA
gattctggaataaaaccggatacggccaggagttcttctggtggtggttgatgttcggtgctggcgggcggcaac

SEQ ID NO: 75340 - DNA, 75 bp, synthetic construct
  source 1..75: mol_type = other DNA
caagtgatcaattccgcaccgactttcctgagtttgccaacaccacccgctatccagacgccgcggtaaattttt

SEQ ID NO: 75341 - DNA, 75 bp, synthetic construct
  source 1..75: mol_type = other DNA
cgcaaccgcatacatctttgagctaaagggcaagtgcttcactctcatcaataccggctgcggttcagtagccgt

SEQ ID NO: 75342 - DNA, 75 bp, synthetic construct
  source 1..75: mol_type = other DNA
cacccagaccggcctgcagcactccaatcggctggacatcatgggaaccggtacgctgaacatcgatgaatcccg

SEQ ID NO: 75343 - DNA, 75 bp, synthetic construct
  source 1..75: mol_type = other DNA
cccttaatattgataacgtcatggctgaaaaagggatgctggaacgtgttcgcgctatcgttgaatatggtatta

SEQ ID NO: 75344 - DNA, 75 bp, synthetic construct
  source 1..75: mol_type = other DNA
aaagtctgccagcggtaagtgattttcgccgcgacttcccgcagtttgctgaccctgccaaatatcccgaagcgc

SEQ ID NO: 75345 - DNA, 75 bp, synthetic construct
  source 1..75: mol_type = other DNA
cactcttaaatccatcgccatacctgaacttgatttaataattgatagcgaatcattgtctgtgggaagaccgtg

SEQ ID NO: 75346 - DNA, 75 bp, synthetic construct
  source 1..75: mol_type = other DNA
catagagggtttaataaatcattcaatttaatcccatatgatacagaagttagtcagataagacagcgcatgtgt

SEQ ID NO: 75347 - DNA, 75 bp, synthetic construct
  source 1..75: mol_type = other DNA
atggtcttattttacaaacagataaaaaattaagatggtttactaccagatacacctgggatattgaaaatatgg

SEQ ID NO: 75348 - DNA, 75 bp, synthetic construct
  source 1..75: mol_type = other DNA
tccattactgagccagcaggcattcagccgctttgtgcaggactatttggtgtttggtaacgcttatctggagaa

SEQ ID NO: 75349 - DNA, 75 bp, synthetic construct
  source 1..75: mol_type = other DNA
cgcgactggtaccgtcagcatcatgctgacagcaactggtatgaaaacgtgtatgaggacttcagggaggtctga

SEQ ID NO: 75350 - DNA, 75 bp, synthetic construct
  source 1..75: mol_type = other DNA
caatctgtttctggtatcacaaatacttcgggcagcattagtttggggacttcatttgctgataataaagatgct

SEQ ID NO: 75351 - DNA, 75 bp, synthetic construct
  source 1..75: mol_type = other DNA
gtcggctccaccgcggtgaaatcaccagaaatggtgaaaggctggtttgaacgcttcggtgccgatgccttagtg

SEQ ID NO: 75352 - DNA, 75 bp, synthetic construct
  source 1..75: mol_type = other DNA
gtagcgcggcgagcaaaaaacagtgctcctgctgtcacggaaaaaaatttattgaaagcgaggtttttacaaaca

SEQ ID NO: 75353 - DNA, 75 bp, synthetic construct
  source 1..75: mol_type = other DNA
aactgcatcgcggtaacttcaccgctatcggtcagcagatccagccttatctggaggacggcaaatgctttcgca

SEQ ID NO: 75354 - DNA, 75 bp, synthetic construct
  source 1..75: mol_type = other DNA
ccgatcagcaaagaggtgtttaaagagcatttcttcattctgagtaaaactttttctgccattttttctgaaggt

SEQ ID NO: 75355 - DNA, 75 bp, synthetic construct
  source 1..75: mol_type = other DNA
aacgcctgacacgccagacgctgtatcgcgccaatcgcctgttcatggaggcgtataccgaaattctggaactgg

SEQ ID NO: 75356 - DNA, 75 bp, synthetic construct
  source 1..75: mol_type = other DNA
gtggattttttgacgttttctaagttttttcaggtagttgtattttttctaaaaacccatgatctcgattttgct

SEQ ID NO: 75357 - DNA, 75 bp, synthetic construct
  source 1..75: mol_type = other DNA
catcttcctgtgcaaagtcgaagcctgggcgatgaatatcggctgccacctgacaattccgcagagctgtgaata

SEQ ID NO: 75358 - DNA, 75 bp, synthetic construct
  source 1..75: mol_type = other DNA
gcaggacaccgaccagtacggcatgaaactgactctgaacagcaaaccgatggacggctggcaaatcacctgggg

SEQ ID NO: 75359 - DNA, 75 bp, synthetic construct
  source 1..75: mol_type = other DNA
tcctttgcgacaagttaaccgctggttcaaagatcactacggagtgcccgtcagagtcattcgttgggaaccgga

SEQ ID NO: 75360 - DNA, 75 bp, synthetic construct
  source 1..75: mol_type = other DNA
tcctttgcgacaagttaaccgctggttcaaagatcactacggagtacccgtcagagtcattcgttgggagccgga

SEQ ID NO: 75361 - DNA, 75 bp, synthetic construct
  source 1..75: mol_type = other DNA
ttgattatgcggtgatggaaaaaacccaggatgccgttgttttaccgatgaacgtgggctggagcgatgtcggct

SEQ ID NO: 75362 - DNA, 75 bp, synthetic construct
  source 1..75: mol_type = other DNA
acctgacaagagcaatcacaacgttaggtacaagagctaatcaggtggctggtcaggtagctactggtaaaggtg

SEQ ID NO: 75363 - DNA, 75 bp, synthetic construct
  source 1..75: mol_type = other DNA
cgatattttaatccagtgggggcgcatgagtctgggttaataggtgaaaatcccagaggtactcctgctaactta

SEQ ID NO: 75364 - DNA, 75 bp, synthetic construct
  source 1..75: mol_type = other DNA
tctttcaggcgttcgataccctgaatctgcaacgggtaaaaacatttagcgttccaccggtgacgctttgcggtc

SEQ ID NO: 75365 - DNA, 75 bp, synthetic construct
  source 1..75: mol_type = other DNA
agatgaactggtcgatgacttagtcattcgctgtggtctggaaagtgccgttgaaatcgcccttctcgctcttca

SEQ ID NO: 75366 - DNA, 75 bp, synthetic construct
  source 1..75: mol_type = other DNA
gatgtgctcaatcatgatggagaaaatagttttatttactctgagtcaagtctggttgcgacagtcggagtaagt

SEQ ID NO: 75367 - DNA, 75 bp, synthetic construct
  source 1..75: mol_type = other DNA
caataaagatgatgtacaggatgtgaaaaaaatcgtcgaacaaattaaaaccgatggcagaaaagaacatcatat

SEQ ID NO: 75368 - DNA, 75 bp, synthetic construct
  source 1..75: mol_type = other DNA
gagaagccggaccgcgagcgcgccgaggtctacctcgcctccggggagtactactggaacagcggcatgtttatg

SEQ ID NO: 75369 - DNA, 75 bp, synthetic construct
  source 1..75: mol_type = other DNA
ctgatgcggtggtggtcggtctcgatgctgactggagcgacgttggctcctggtccgcactatgggaggtcagcc

SEQ ID NO: 75370 - DNA, 75 bp, synthetic construct
  source 1..75: mol_type = other DNA
ccggatgacgcgaccgtccgcaacacgttctacaacctcgataatcacccggaccgtctgagtcttgaaccactg

SEQ ID NO: 75371 - DNA, 75 bp, synthetic construct
  source 1..75: mol_type = other DNA
gccggtgcgaacaactggacgccgacaacgtacatcagtgatttactggttgtggtcatgaaaaaatccacggca

SEQ ID NO: 75372 - DNA, 75 bp, synthetic construct
  source 1..75: mol_type = other DNA
cgctggtatgaaccgccagtaagctttgacggactggcgcgcaccttccgcgctgccgtgcatcacagttcacca

SEQ ID NO: 75373 - DNA, 75 bp, synthetic construct
  source 1..75: mol_type = other DNA
agttcttctatcgctggtgatgctatcggtggacttatcgacatgcttaaagctggtgtagatgacatccgtatc

SEQ ID NO: 75374 - DNA, 75 bp, synthetic construct
  source 1..75: mol_type = other DNA
gaaccgattcggtgaagttatcgctcttgagcctgcgcttgcaaaatacacccgacgcggattagacctggatac

SEQ ID NO: 75375 - DNA, 75 bp, synthetic construct
  source 1..75: mol_type = other DNA
acggtcgccacagcaacacgtctctggcgtggggggctggcgtgcagtttaacccgaccgaatccgtggccattg

SEQ ID NO: 75376 - DNA, 75 bp, synthetic construct
  source 1..75: mol_type = other DNA
atgagaactttgggggtgaatattgaaacagtatctcgttttcgaggtatggaatcatctgtcgtgattacattg

SEQ ID NO: 75377 - DNA, 75 bp, synthetic construct
  source 1..75: mol_type = other DNA
gacgcgccgcttctctcgccgtcagcttatcgagtgcttgcgcaccggagcggataaatttggctggaagcagcg

SEQ ID NO: 75378 - DNA, 75 bp, synthetic construct
  source 1..75: mol_type = other DNA
acgcattccccagcgtgactttggcattccgcgcttcacctatgatgaaggactggcgcagttatatggcgatcc

SEQ ID NO: 75379 - DNA, 75 bp, synthetic construct
  source 1..75: mol_type = other DNA
tgttgtgccgtctgtcacccgggaaagtgaccttgtgccttcggttcctgccaccagcatcatccaggataaggc

SEQ ID NO: 75380 - DNA, 75 bp, synthetic construct
  source 1..75: mol_type = other DNA
taagctacagccgcagcgagtcgttctggctggcgcggtgcggggtgctgaaacagcacaaaggccacccgcttg

SEQ ID NO: 75381 - DNA, 75 bp, synthetic construct
  source 1..75: mol_type = other DNA
cggcgcgggccgctgttttcacctggcgctgagcacgcaggcgcagcgggcggaagccttccgtaaacagcgcgc

SEQ ID NO: 75382 - DNA, 75 bp, synthetic construct
  source 1..75: mol_type = other DNA
ctaagcgcgccgctgctgattacgggtgacacaggtacaggtaaagatctctttgcctacgcctgccatcaggca

SEQ ID NO: 75383 - DNA, 75 bp, synthetic construct
  source 1..75: mol_type = other DNA
gtgaagagcgcctgctgggcgtaaaacgcattccccagcgtgactttggcattccgcgcttcacctatgatgaag

SEQ ID NO: 75384 - DNA, 75 bp, synthetic construct
  source 1..75: mol_type = other DNA
cgatgctgctggtactggtgctgattggtcttaatatgcgaccactgctcacctccgtcgggccactgctaccgc

SEQ ID NO: 75385 - DNA, 75 bp, synthetic construct
  source 1..75: mol_type = other DNA
gttgaccgcggcgcggaaaacgtcgagtgcctggagttgattactatgccttggctccgggctgtgcgaggaaac

SEQ ID NO: 75386 - DNA, 75 bp, synthetic construct
  source 1..75: mol_type = other DNA
tgcgaaggcggagttcgaccgcctctggaaaaaataatgccactgctggataagctgcgtgagcagtacggggtc

SEQ ID NO: 75387 - DNA, 75 bp, synthetic construct
  source 1..75: mol_type = other DNA
aggtattgacgaggctcagttgtatcaggcgtttcagccgtttatgaccacccgcaaagaaggtatgggactagg

SEQ ID NO: 75388 - DNA, 75 bp, synthetic construct
  source 1..75: mol_type = other DNA
ataacagggtttggtgatgatagttattttgtgcaaccgctatctgcacatgccaggaatgttttttttggcggt

SEQ ID NO: 75389 - DNA, 75 bp, synthetic construct
  source 1..75: mol_type = other DNA
atgaagaaaaaccccgtaagtataccacacaccgtctggcacgccgacgatatccgccgcggagaacgtgaggcg

SEQ ID NO: 75390 - DNA, 75 bp, synthetic construct
  source 1..75: mol_type = other DNA
actcaaatttgccaaccagatgtatatcgatactggcgcagtgttctgcggaaacctcacattgattcaggtaca

SEQ ID NO: 75391 - DNA, 75 bp, synthetic construct
  source 1..75: mol_type = other DNA
agaggcgttatgggcgctggtctggcaaggcgtcatcaccagcgacatttgggcaccgttacgcgccctcacccg

SEQ ID NO: 75392 - DNA, 75 bp, synthetic construct
  source 1..75: mol_type = other DNA
tacagaatacggtgccgataacggtatccggctggaggcggtgtggctgacacacgacccggcatacccggatga

SEQ ID NO: 75393 - DNA, 75 bp, synthetic construct
  source 1..75: mol_type = other DNA
ccaactggcagaagaacagcagaaaactgaaggttaccgggggaccgggtacgacatctcaggtctggttcagga

SEQ ID NO: 75394 - DNA, 75 bp, synthetic construct
  source 1..75: mol_type = other DNA
gaattaccggtccgtttaaaagagcaactggcacgggtgctttttcaactcaaaacctggggaatggcggagatt

SEQ ID NO: 75395 - DNA, 75 bp, synthetic construct
  source 1..75: mol_type = other DNA
ttgtcgatatcgctgcgccgcgggcagatctccagggtgcggcctggcagtttttgctggggctactacaaacca

SEQ ID NO: 75396 - DNA, 75 bp, synthetic construct
  source 1..75: mol_type = other DNA
tttattcccagacattaataaacccgatgggccagcaacagcagggatagatgatttgggtgaaattttagctaa

SEQ ID NO: 75397 - DNA, 75 bp, synthetic construct
  source 1..75: mol_type = other DNA
tgcgggcgcgttaccgcgaggatttgctcaggccgttactggctgtgccccgttcggatgagccggacacgcgca

SEQ ID NO: 75398 - DNA, 75 bp, synthetic construct
  source 1..75: mol_type = other DNA
tggttccggaactcgggctggtggtccttacgcccggtcgtgaatcactgccggtttttcattgcggcagggtgc

SEQ ID NO: 75399 - DNA, 75 bp, synthetic construct
  source 1..75: mol_type = other DNA
atgacgtgtggcaatcaggcagatgatccgcatcacatcattggtcatggactgggagggatgggaacaaaggct

SEQ ID NO: 75400 - DNA, 75 bp, synthetic construct
  source 1..75: mol_type = other DNA
tgccgagacagaatattaagtccatatctaatccatagtcggcaccagaaacaaccgaagccgatgagtaaagac

SEQ ID NO: 75401 - DNA, 75 bp, synthetic construct
  source 1..75: mol_type = other DNA
cgtcatgggctggctgtgcaaaagaggcgcgcaaggatggctggcgaataagcaaagacaaaacgcgtgcttttg

SEQ ID NO: 75402 - DNA, 75 bp, synthetic construct
  source 1..75: mol_type = other DNA
tggctcctacagcaccgcgcaaatttcctgtgccatgccctacacctacggcagtaatgatggcaacagcaccac

SEQ ID NO: 75403 - DNA, 75 bp, synthetic construct
  source 1..75: mol_type = other DNA
ctggactgtcggtcttgttgcccagaacatcattccacgcagtattgatactaaagtcgtcaatggctttaaaga

SEQ ID NO: 75404 - DNA, 75 bp, synthetic construct
  source 1..75: mol_type = other DNA
gggaattatcgctggctgaattgtactgctgggctgctgtaaatgatgtagtggatgccatgaccgaaaatatgg

SEQ ID NO: 75405 - DNA, 75 bp, synthetic construct
  source 1..75: mol_type = other DNA
aaaaatggcatcaacgccgacatcggcgccagcatggacctggatgacaactggacgctgggactggtcgcacag

SEQ ID NO: 75406 - DNA, 75 bp, synthetic construct
  source 1..75: mol_type = other DNA
ctccggtgcaaaagtgcagaccagcacatcaaccggaaatcagcataaataccagacccgtgtggtatctaatgc

SEQ ID NO: 75407 - DNA, 75 bp, synthetic construct
  source 1..75: mol_type = other DNA
ggcacagaccgtatggatgtgactctgaacaacggcagcaagtgggttggcgctgcaatgtctgttcatatggtt

SEQ ID NO: 75408 - DNA, 75 bp, synthetic construct
  source 1..75: mol_type = other DNA
cggcgtcccggcaggctgcgacgaacgtgagtatttgcgtgagctgcaaaatgcattgctgtggattaactttcg

SEQ ID NO: 75409 - DNA, 75 bp, synthetic construct
  source 1..75: mol_type = other DNA
taactgaaaaacgcagcggtatgcgctggccggttaaactgaaagggtatatgacagttcaggtgtgggaggacg

SEQ ID NO: 75410 - DNA, 75 bp, synthetic construct
  source 1..75: mol_type = other DNA
atgaccacacgtaagaaaaaaacggcagtttccgaggcagccgtgatggaggcaatccgggaagcacttgagggg

SEQ ID NO: 75411 - DNA, 75 bp, synthetic construct
  source 1..75: mol_type = other DNA
cggcgctgtttacaaaaaaagagcagtccgacgatgcccggttttctgatgtgcataaggccgtggaactggtcg

SEQ ID NO: 75412 - DNA, 75 bp, synthetic construct
  source 1..75: mol_type = other DNA
gtctggaacagcattaacctgaaacgtgtgcgtccggtggtactgcccggtattcgctatgccgtgatgtgtgtg

SEQ ID NO: 75413 - DNA, 75 bp, synthetic construct
  source 1..75: mol_type = other DNA
cgaccgttttcatctggttaacggtgaaaactggtttgaccgtaccgtgagtgctgatgccgcaggaatcattct

SEQ ID NO: 75414 - DNA, 75 bp, synthetic construct
  source 1..75: mol_type = other DNA
tgcaaatcttcaactcgctgaaagcgaatatggcagattacctgctacttgatggtgagttatgcgccaacgtgc

SEQ ID NO: 75415 - DNA, 75 bp, synthetic construct
  source 1..75: mol_type = other DNA
gcaaactggtttgaccgtaccgtgagtgctgatgccgcaggcatcatcctgacctcccttgtgattaaccgccag

SEQ ID NO: 75416 - DNA, 75 bp, synthetic construct
  source 1..75: mol_type = other DNA
gtcgctggctacagagatgcacgacatggctgtggcggcatcgctgacgcaagaacgggggcgagtggctgcggt

SEQ ID NO: 75417 - DNA, 75 bp, synthetic construct
  source 1..75: mol_type = other DNA
agcctggatgattgacgtcatccgtcacgcaatgaatggcacgcaggggcgtgaattatcactggctgaactgta

SEQ ID NO: 75418 - DNA, 75 bp, synthetic construct
  source 1..75: mol_type = other DNA
ttgcacatacgttcggaataactcttgaagaacaaactaacgccctatctttccatgatcacgatggtcatgaat

SEQ ID NO: 75419 - DNA, 75 bp, synthetic construct
  source 1..75: mol_type = other DNA
ttgcacatacgtttgggatagctcttgaagagcaaactgacgtgctctctttccacgataacgatggccatgaat

SEQ ID NO: 75420 - DNA, 75 bp, synthetic construct
  source 1..75: mol_type = other DNA
tcgtgagttgtcagtacaagcaactaatggctctaactctgattcagacttgtcctcgattcaggatgagattac

SEQ ID NO: 75421 - DNA, 75 bp, synthetic construct
  source 1..75: mol_type = other DNA
gatggtgagcttctatggctggaaccgtattgaccgctttatggcagcctggaaacgcgccggattcagcgttgt

SEQ ID NO: 75422 - DNA, 75 bp, synthetic construct
  source 1..75: mol_type = other DNA
acgatccgcatcatctgattggtcacgggcagggcggaatgggaaccaaagcacatgatctctttgtgttgcctt

SEQ ID NO: 75423 - DNA, 75 bp, synthetic construct
  source 1..75: mol_type = other DNA
aaaaagccgttatccccgtagcgggattaggaaccaggatgttgccggcgacgaaagccatcccgaaagagatgc

SEQ ID NO: 75424 - DNA, 75 bp, synthetic construct
  source 1..75: mol_type = other DNA
aattatacccagagtgcagtggatgccttgtatcgtttcaggtcagataaactgtgtgcagatatagccagtgat

SEQ ID NO: 75425 - DNA, 75 bp, synthetic construct
  source 1..75: mol_type = other DNA
taagttttaaaggcatcagcgaggcgcagaagaaagcagcgtatcggttcctgacctatctggtgagccccgagg

SEQ ID NO: 75426 - DNA, 75 bp, synthetic construct
  source 1..75: mol_type = other DNA
ttgttgctggcgtagcaatgattctttccaataacgtatttgctgacgaaggtcacggcattgttaaatttaaag

SEQ ID NO: 75427 - DNA, 75 bp, synthetic construct
  source 1..75: mol_type = other DNA
tgttttcgacggttctgcaaatattaaccttccaggtgtaaacactacgggtaatcagaacaccactggtaatgc

SEQ ID NO: 75428 - DNA, 75 bp, synthetic construct
  source 1..75: mol_type = other DNA
gagcattccctatccagatttttgctgaggaaggattaaatgtgattgttccaacggctgattatgcagttggtc

SEQ ID NO: 75429 - DNA, 75 bp, synthetic construct
  source 1..75: mol_type = other DNA
tggttgcttgcagtcaggtgtttcgggtctgtggctttttgtgttctctggtaagtggttgctattcttttgtgt

SEQ ID NO: 75430 - DNA, 75 bp, synthetic construct
  source 1..75: mol_type = other DNA
gaactggatttagtccgccagctggcgcttaacggtaagacgcgcgcaatacgggaacaagcgatgagaaaactt

SEQ ID NO: 75431 - DNA, 75 bp, synthetic construct
  source 1..75: mol_type = other DNA
ttactggtggtacaggttcctttggtaacactgttcttaagcgttttctgaaaacagatgttaaagaaatcattg

SEQ ID NO: 75432 - DNA, 75 bp, synthetic construct
  source 1..75: mol_type = other DNA
gtaaggcactgagattaccgaagcctgttgtgccgtctgtcacccgggaaagtgaccttgttccttcggttcctg

SEQ ID NO: 75433 - DNA, 75 bp, synthetic construct
  source 1..75: mol_type = other DNA
agggccgcttcctgagtaacattaatgtttacagcaaaggtgaagtggataagaaaaaggggatgcgaaaataca

SEQ ID NO: 75434 - DNA, 75 bp, synthetic construct
  source 1..75: mol_type = other DNA
taacgcgggcgcgtgagcggtattcgcgcgcgcaggaaaccgcgggaaaactgaaaacaggtggtgcgctggcaa

SEQ ID NO: 75435 - DNA, 75 bp, synthetic construct
  source 1..75: mol_type = other DNA
taaataaatccatccgcctgcaggctgaagctgaaacctggcaggacgcggtgaaaatcggcgtcgatctgctgg

SEQ ID NO: 75436 - DNA, 75 bp, synthetic construct
  source 1..75: mol_type = other DNA
cgtgctggaaaaagtttcttccggcagaccagcaggcggctatcaccaccggtatacagggtatacatggtttgt

SEQ ID NO: 75437 - DNA, 75 bp, synthetic construct
  source 1..75: mol_type = other DNA
gacgagcaacaatttcgtgactggttgtcagttcacttgtctacttatgcaattgagaaaggccatttctgcccg

SEQ ID NO: 75438 - DNA, 75 bp, synthetic construct
  source 1..75: mol_type = other DNA
caggaagaacgcctgtctgagctggagactgctctgcaggagcagcaaaccgcctttaacgaactggtgaataag

SEQ ID NO: 75439 - DNA, 75 bp, synthetic construct
  source 1..75: mol_type = other DNA
ttaagaaaatcggtgattcagcttctcttctaagtaaacctaaatctattctaagacgcaaagactttaaagagc

SEQ ID NO: 75440 - DNA, 75 bp, synthetic construct
  source 1..75: mol_type = other DNA
cttgctaacggtaatgagcaaagaccgctggtgctgtctctgcgcgacgccgaggggcagccagtcacgggcatg

SEQ ID NO: 75441 - DNA, 75 bp, synthetic construct
  source 1..75: mol_type = other DNA
ggaaaaaatccgctccgtataccgtgagagtgacatcgtaccgggagaacagacagccatcagcatactgaagca

SEQ ID NO: 75442 - DNA, 75 bp, synthetic construct
  source 1..75: mol_type = other DNA
tactggcggcagaaattgatcccgagtggtggattgtggcgatgaataatccccgttttccagttgatgtattaa

SEQ ID NO: 75443 - DNA, 75 bp, synthetic construct
  source 1..75: mol_type = other DNA
gttatggtaccggcgcaatggtgttgtgctggcactgcgacaaccagttgcgtgaccagacctccgaatcactcg

SEQ ID NO: 75444 - DNA, 75 bp, synthetic construct
  source 1..75: mol_type = other DNA
cgatgagcacactcctcggagatcgggtgatggaccgtatgaccatgaatggtggtcgttgggtgaattttaact

SEQ ID NO: 75445 - DNA, 75 bp, synthetic construct
  source 1..75: mol_type = other DNA
gtgaaaataccttcgaaccacaactggtgaagaaaaatcagacccgcattaccggcatggacaaccagatcctgg

SEQ ID NO: 75446 - DNA, 75 bp, synthetic construct
  source 1..75: mol_type = other DNA
ggttaacgaaaagtacacgcgctgggttaagacgcagccgtgcgcatgttgtggaaagtctgctgatgatcctca

SEQ ID NO: 75447 - DNA, 75 bp, synthetic construct
  source 1..75: mol_type = other DNA
gatgttaatgatggtgtttttaaagaaattcacagaatctatttgccaagatttatatcttatctcaatacaatt

SEQ ID NO: 75448 - DNA, 75 bp, synthetic construct
  source 1..75: mol_type = other DNA
taagtataaaaaaaaattagaagaacttttaccaaagcatgatgctgtgtttgcccatcttattagaactgggga

SEQ ID NO: 75449 - DNA, 75 bp, synthetic construct
  source 1..75: mol_type = other DNA
gcgcatccagtactgatttggggacgaaaaccacatcgtcgtttgattacggtactaaaacgaccagttcatttg

SEQ ID NO: 75450 - DNA, 75 bp, synthetic construct
  source 1..75: mol_type = other DNA
accaggagagccagctcgcgtgattagcagaggtgacgttgtaattcttgtataccggagtgaagagaaagcata

SEQ ID NO: 75451 - DNA, 75 bp, synthetic construct
  source 1..75: mol_type = other DNA
gacaatgtgaaacgcactattgaaacattagccaaaggtggcgttgtccggtctcctcaaattgaggtttccgaa

SEQ ID NO: 75452 - DNA, 75 bp, synthetic construct
  source 1..75: mol_type = other DNA
cctcccgtgccgcaataatgaccggtcgagctcccgcccgctttggtgtctattccaataccgatgctcaggatg

SEQ ID NO: 75453 - DNA, 75 bp, synthetic construct
  source 1..75: mol_type = other DNA
cgcattgtgggaactgaccatccacagtatgccggaatgacctggctggagctgctggagcgcggtaaccgtatg

SEQ ID NO: 75454 - DNA, 75 bp, synthetic construct
  source 1..75: mol_type = other DNA
ggcctggcacaggaaaaaaccacctggctgcggcgataggcaatcggctgatggagaaggggggcagcgtaatta

SEQ ID NO: 75455 - DNA, 75 bp, synthetic construct
  source 1..75: mol_type = other DNA
aaaaactcgggcgaaaaatttttgcagggattgtgtggcgttgacctgctggtactggatgaaattggcatgcaa

SEQ ID NO: 75456 - DNA, 75 bp, synthetic construct
  source 1..75: mol_type = other DNA
tcaatttgtctctgggacatgaattgaatgagtggctggcagagagaggttatgccggacaggcggataacagaa

SEQ ID NO: 75457 - DNA, 75 bp, synthetic construct
  source 1..75: mol_type = other DNA
ggcacactttataaagatgccaacacgcaggttattcagggtaactatggcacggttaccggacgcgtgggaatg

SEQ ID NO: 75458 - DNA, 75 bp, synthetic construct
  source 1..75: mol_type = other DNA
atgaaatggtctatatgcatgatattgtaaattcggactcgaaaaagaaaccaaggattccgttaaaaaaattcc

SEQ ID NO: 75459 - DNA, 75 bp, synthetic construct
  source 1..75: mol_type = other DNA
gcagactggaggcgctgtctgcatcaccggggaacgatttgccacgcacatggtggcgacgtcttttacggaagg

SEQ ID NO: 75460 - DNA, 75 bp, synthetic construct
  source 1..75: mol_type = other DNA
aacacttacatagcatttaatattaaaaaggcatcttttcgcgccgggagtttaatcgaccataggtacttccaa

SEQ ID NO: 75461 - DNA, 75 bp, synthetic construct
  source 1..75: mol_type = other DNA
atatgtacaaaaaaattcaagctgaagcggctactaccgacatcaaaacactggaacagtttttgaagaagttcc

SEQ ID NO: 75462 - DNA, 75 bp, synthetic construct
  source 1..75: mol_type = other DNA
gccaagggctaccgcaaccgggagcgctttaagctgggagtgatgttccactatgggaaactgaatatggcgttc

SEQ ID NO: 75463 - DNA, 75 bp, synthetic construct
  source 1..75: mol_type = other DNA
tgacactatgttcaccagtcaccgtcaggatgtgttcaacactttaacaaataaagttatgttaaaggattattg

SEQ ID NO: 75464 - DNA, 75 bp, synthetic construct
  source 1..75: mol_type = other DNA
cgttacgacactatgtttacgtgtcaccgtcaggatgtgtttaactcattagcaaataaagtgctcttgaaggat

SEQ ID NO: 75465 - DNA, 75 bp, synthetic construct
  source 1..75: mol_type = other DNA
caaggccagatcttcagaaggttaagttatggcatgaaataaccggatgggatttcgaagagtcgttctggttta

SEQ ID NO: 75466 - DNA, 75 bp, synthetic construct
  source 1..75: mol_type = other DNA
tcagctatgagcagatgacgcagatggcagaagaggaaataaagcaatgcgattttcgcagggatggcacccatt

SEQ ID NO: 75467 - DNA, 75 bp, synthetic construct
  source 1..75: mol_type = other DNA
aatgccacgtcttgatggttttgagagaagcggcgagtcgtttgataccgtgatatctgcgaatcctgttactta

SEQ ID NO: 75468 - DNA, 75 bp, synthetic construct
  source 1..75: mol_type = other DNA
ctatgcacatcgtggcattcctaaatatcgcgatcgttatagtgaggcatattccatattcatcggtagtctaaa

SEQ ID NO: 75469 - DNA, 75 bp, synthetic construct
  source 1..75: mol_type = other DNA
agaaatccgggcagaccgcgtgagcagtgaaagccgggcgtggcttgcgcagtgcgggctgacggtggagcaact

SEQ ID NO: 75470 - DNA, 75 bp, synthetic construct
  source 1..75: mol_type = other DNA
ggcggagatgcgtcatcgtatcgggcaactgatgggcaccagccagggcggcatgtgggtcggcaccttccacgg

SEQ ID NO: 75471 - DNA, 75 bp, synthetic construct
  source 1..75: mol_type = other DNA
attaggcattgagccaatctgttatctgacagaagaaatcagtaatcaacttttggcgaaatatatctggtattc

SEQ ID NO: 75472 - DNA, 75 bp, synthetic construct
  source 1..75: mol_type = other DNA
tcgttaccgcatacagacgacacttgaaaatgaactggatttctttgaccaggaactgctgatgatgaatcgttg

SEQ ID NO: 75473 - DNA, 75 bp, synthetic construct
  source 1..75: mol_type = other DNA
acttcggaacccagcgtgctgttgctaaagcactaggcattagcgatgcagcagtctctcagtggaaagaagtta

SEQ ID NO: 75474 - DNA, 75 bp, synthetic construct
  source 1..75: mol_type = other DNA
aacctggtaccgggaagaatcacttagcggcagctatcgggaatcgcctgctgaaagacggtcagacagtgattg

SEQ ID NO: 75475 - DNA, 75 bp, synthetic construct
  source 1..75: mol_type = other DNA
agcagggaggcgcactggtcaccagtacggcggcaaccgtcaccggcagcaaccgtctgggcaatttcactgtgg

SEQ ID NO: 75476 - DNA, 75 bp, synthetic construct
  source 1..75: mol_type = other DNA
ggggccgcgctgacgcgccgccccttacattacgcggatattctgctgtgggcttctgtctcttcagacctgtta

SEQ ID NO: 75477 - DNA, 75 bp, synthetic construct
  source 1..75: mol_type = other DNA
gaaaaaagtggtgtggctggcaatccagtctgcgtcccagaaatggacgatgccgttgaaggactggcgaatggc

SEQ ID NO: 75478 - DNA, 75 bp, synthetic construct
  source 1..75: mol_type = other DNA
ggaatgcgtctggcgttaccgcttacactacgctgtgatgccattgggataacgttaaaagaagttattgatggg

SEQ ID NO: 75479 - DNA, 75 bp, synthetic construct
  source 1..75: mol_type = other DNA
gggccatcaatactggttctaaaaatgtaaacattaacggaaagcccgctgccagggccgccgtcacccttcccc

SEQ ID NO: 75480 - DNA, 75 bp, synthetic construct
  source 1..75: mol_type = other DNA
ggagaaaatccgctcgctttaccgcgagagcgacatcataccgggagaacagacagccaccagcatactgaagca

SEQ ID NO: 75481 - DNA, 75 bp, synthetic construct
  source 1..75: mol_type = other DNA
ctgagtggctggatgtaacagagaacgcattatttaaccgccttcgtgccgatggcgatcagattttcccgctgg

SEQ ID NO: 75482 - DNA, 75 bp, synthetic construct
  source 1..75: mol_type = other DNA
gaaagaagcgggcaatatggtggatctcgactctaacccgaccaagttgatcgaggtggtgcacattggcaaaca

SEQ ID NO: 75483 - DNA, 75 bp, synthetic construct
  source 1..75: mol_type = other DNA
aatggcgtactgaaaggtgcagctgttggcgctggtgttggtgcagtaacagaaaaaggccgcgacggtaaaaat

SEQ ID NO: 75484 - DNA, 75 bp, synthetic construct
  source 1..75: mol_type = other DNA
cctgccgtccgccagccgctggcggaagatgactcattactgccatttttcagcaacgaacgggtgattcgcgct

SEQ ID NO: 75485 - DNA, 75 bp, synthetic construct
  source 1..75: mol_type = other DNA
attggtggagtcaaaaagctaactcagcttagatatgagaaaggagatagctttcctgatgctgcgtatttggca

SEQ ID NO: 75486 - DNA, 75 bp, synthetic construct
  source 1..75: mol_type = other DNA
actggctgttgcgtcatgtcaaatcctgccagtggcctcatggtgactatcatcacagtgaaatcgtcatacatc

SEQ ID NO: 75487 - DNA, 75 bp, synthetic construct
  source 1..75: mol_type = other DNA
cgcaaggctgccgatgaactgtcctgtatgaccgcgcgaattaaccgtggtgaggcgatacctgaaccagtaaaa

SEQ ID NO: 75488 - DNA, 75 bp, synthetic construct
  source 1..75: mol_type = other DNA
ctggtctacaaaattttctgcgctccagaaaagagtgacgcccgcgagtgtgcagctccgggcgtcgtggcgttt

SEQ ID NO: 75489 - DNA, 75 bp, synthetic construct
  source 1..75: mol_type = other DNA
ctggactaccacctgttttatgagtacgacgctgcggaccggatcatccgctggtccgataacgaccagacgtgg

SEQ ID NO: 75490 - DNA, 75 bp, synthetic construct
  source 1..75: mol_type = other DNA
tggtggagccggaaccgaaaagcatgcgtggtctgccgtccggcatcgtccctgccgttcgccagccgctggcgg

SEQ ID NO: 75491 - DNA, 75 bp, synthetic construct
  source 1..75: mol_type = other DNA
cgcccacgcttagcgtagaagctcttaagcactctatcgcttacaagctgatgtttacgattggaaaggacccgg

SEQ ID NO: 75492 - DNA, 75 bp, synthetic construct
  source 1..75: mol_type = other DNA
atcgcattgcgaacggactaccaacacctgcaactgaaacgctggatactcaattattgaactcgttaaatattt

SEQ ID NO: 75493 - DNA, 75 bp, synthetic construct
  source 1..75: mol_type = other DNA
ctctaaatcgtgcacaggctctggcgaagatcgcagaaatcaaagctaagtttgggctgaaagggggaaaagcat

SEQ ID NO: 75494 - DNA, 75 bp, synthetic construct
  source 1..75: mol_type = other DNA
gaattgcgaagggactaccaacgcctgcaacagaaacactggatactcaattattgaactcgttaaatattctgg

SEQ ID NO: 75495 - DNA, 75 bp, synthetic construct
  source 1..75: mol_type = other DNA
tggcgaaatacttcgccattattccggcggcgttcgcggcaacgtatccgcagttaaatgcgctgaacatcatgc

SEQ ID NO: 75496 - DNA, 75 bp, synthetic construct
  source 1..75: mol_type = other DNA
agcaggttggcaggctgctgctctcttatcttctcaatgacctgaaaaaacgccgtaattatgcagtggtgatta

SEQ ID NO: 75497 - DNA, 75 bp, synthetic construct
  source 1..75: mol_type = other DNA
gtgagagcactactgacccctgaaatagccccgcgtatggggatcgtattgttcagaccaggttcagagctgatg

SEQ ID NO: 75498 - DNA, 75 bp, synthetic construct
  source 1..75: mol_type = other DNA
gcgggatcaacatcgacaaccgcatgatccgtaaaggttctgtcgatgccattcgccgccatgttgaggctaacg

SEQ ID NO: 75499 - DNA, 75 bp, synthetic construct
  source 1..75: mol_type = other DNA
gcaggatcttcaacacgagttgacttcttgttaaagaatgaaaaaatcattatcgagttaaagaaaacgagaaaa

SEQ ID NO: 75500 - DNA, 75 bp, synthetic construct
  source 1..75: mol_type = other DNA
aaatggttgctgcgatggctcttgaagccgttcgtcagcagaaacggatcactcaggtggaagaaaaagtcagcc

SEQ ID NO: 75501 - DNA, 75 bp, synthetic construct
  source 1..75: mol_type = other DNA
agctgcggcattgggagcatggatgggttggcaggcattaccctcaatacttttgtttgcctcagtcagtgggtt

SEQ ID NO: 75502 - DNA, 75 bp, synthetic construct
  source 1..75: mol_type = other DNA
gacctgcgcgatacaaaaggtgaaaccggcgcatgggctcggttgatgaactcttctggctcaggttatggcggt

SEQ ID NO: 75503 - DNA, 75 bp, synthetic construct
  source 1..75: mol_type = other DNA
ttatggaggaagcagaaccgcgagggactcgctggtattacccgaaaatgggggtatttcaggttattggttggc

SEQ ID NO: 75504 - DNA, 75 bp, synthetic construct
  source 1..75: mol_type = other DNA
gaaggtcaggatgcggatgaattactcagcaaatggaataaggaaatttggttattcgcgcgtcaggattttgac

SEQ ID NO: 75505 - DNA, 75 bp, synthetic construct
  source 1..75: mol_type = other DNA
gcacagcaaatgctcgtttgcgaattatcaggtgcagaacgacgggcaaaaatacgcgctgagccaggccaaatc

SEQ ID NO: 75506 - DNA, 75 bp, synthetic construct
  source 1..75: mol_type = other DNA
agcgtgcctcctgaaaccaattataatgaaaatatattatctgttgaaagtagtgttaacatcaaaggaggaaca

SEQ ID NO: 75507 - DNA, 75 bp, synthetic construct
  source 1..75: mol_type = other DNA
taccgcatggactttagtggcttcgttatgctggttatgggatttaacggggcaaaagccgatgctgttaaagaa

SEQ ID NO: 75508 - DNA, 75 bp, synthetic construct
  source 1..75: mol_type = other DNA
accattgcatgttctgcctgccacgacgaaatcgaccgtcgcacgcattttgttgacgctggatatgcaaaagaa

SEQ ID NO: 75509 - DNA, 75 bp, synthetic construct
  source 1..75: mol_type = other DNA
acactgactcgtcagtacgttatcgataatgagaagttagaaaacttctctgttgatactcagttgcaaagcaaa

SEQ ID NO: 75510 - DNA, 75 bp, synthetic construct
  source 1..75: mol_type = other DNA
tgaacgaggtagccgctttattcggcgttacccgacgcactatattccgctggatgaacaagattaaaggttggc

SEQ ID NO: 75511 - DNA, 75 bp, synthetic construct
  source 1..75: mol_type = other DNA
tcatcacgccggaaggcaaaacgcagtatgcctatgacaaatccggcaggctgacgggtatcttcagcccggacg

SEQ ID NO: 75512 - DNA, 75 bp, synthetic construct
  source 1..75: mol_type = other DNA
gccacgtcttgataaagccaataacaaggagtggtatgtggcagcggcgaagggtatggacacgatagaggtcgc

SEQ ID NO: 75513 - DNA, 75 bp, synthetic construct
  source 1..75: mol_type = other DNA
tcacgacggatatcccaggacatcagcacccgtgatgaaggcgggggcggaaaggtcgtggttatcgggcggcag

SEQ ID NO: 75514 - DNA, 75 bp, synthetic construct
  source 1..75: mol_type = other DNA
cgccgggctctggctgagctgaacagccagttgacggaaatccgcgcttcggctgtcggaatgaccggtgcgttt

SEQ ID NO: 75515 - DNA, 75 bp, synthetic construct
  source 1..75: mol_type = other DNA
cgggcaagtttatttaagtggtgcgccattgtctggtgaattactggttcagtggggagacggcgcgaactcacg

SEQ ID NO: 75516 - DNA, 75 bp, synthetic construct
  source 1..75: mol_type = other DNA
gcgattggcgcactgcgcgggccgaaacacggcggggcgaatgaagtgtcgctggagatccagcaacgctacgaa

SEQ ID NO: 75517 - DNA, 75 bp, synthetic construct
  source 1..75: mol_type = other DNA
tgcagaggcgttcgagcattataacgaatggcatccgcatagtgcactgggttatcgctcgccacgggaatatct

SEQ ID NO: 75518 - DNA, 75 bp, synthetic construct
  source 1..75: mol_type = other DNA
tgttaccgttcacgcaattggtaggacccgcagtatcgagcgtatcaacaaagcgctggcttttattgctgaacg

SEQ ID NO: 75519 - DNA, 75 bp, synthetic construct
  source 1..75: mol_type = other DNA
caaccgaacgagaagcgcgtaactattgcccgtccggttgtgttgccgtattcgctgcccgtattcgtcaggggg

SEQ ID NO: 75520 - DNA, 75 bp, synthetic construct
  source 1..75: mol_type = other DNA
tctcaaaggcgaggccagagaacgcgtgcgtctcggatatgctgctgatgatcttggctttgtcggcgacaaata

SEQ ID NO: 75521 - DNA, 75 bp, synthetic construct
  source 1..75: mol_type = other DNA
atgtttgcatgcacattctttttcttgcatggtgccgggtgcctcccggtgaattcagtatcagcacctgaatcc

SEQ ID NO: 75522 - DNA, 75 bp, synthetic construct
  source 1..75: mol_type = other DNA
agccgatgaagctggcgctcaccggcgtggcgctttctgcatgctgggccagcctgacggattatctgatgctct

SEQ ID NO: 75523 - DNA, 75 bp, synthetic construct
  source 1..75: mol_type = other DNA
gtgggcgacagcgtatgcggctacggcccgctctccgagacggtcatcattaacgcggtgaataactacaagctg

SEQ ID NO: 75524 - DNA, 75 bp, synthetic construct
  source 1..75: mol_type = other DNA
gcttttaccgggtgcccctgtcctctgcacaggcgggcgatattctgctgtgctgctttggtgcttcggtaccga

SEQ ID NO: 75525 - DNA, 75 bp, synthetic construct
  source 1..75: mol_type = other DNA
tgacaccgtggcaaccgctgccggtgctctggttgccgtcggggtagcccgatattttggcaatatggcgtcttc

SEQ ID NO: 75526 - DNA, 75 bp, synthetic construct
  source 1..75: mol_type = other DNA
atgcgtaaagtttgtgccgccattttttccgcagccatttgtctggccgtatccggtgcgcctgcatgggcatct

SEQ ID NO: 75527 - DNA, 75 bp, synthetic construct
  source 1..75: mol_type = other DNA
gagcagaataaggtgtaccagtccatgctggttatgaatggtcagcatacggaattcaaccgtctgctggggctg

SEQ ID NO: 75528 - DNA, 75 bp, synthetic construct
  source 1..75: mol_type = other DNA
caccaccacgttccggattaacgcaccggcagcgcctgccggtgttgaactgacgccggggtattttcagataac

SEQ ID NO: 75529 - DNA, 75 bp, synthetic construct
  source 1..75: mol_type = other DNA
gtgccccttcagaggagcgaaagctcctcctgccgtccacttcttcggggtttctccccgcagtggacctttccg

SEQ ID NO: 75530 - DNA, 75 bp, synthetic construct
  source 1..75: mol_type = other DNA
tgacgggacggcgctttgagcacggggtgacggactgttacaccctgttccgggatgcataccatctggcgggga

SEQ ID NO: 75531 - DNA, 75 bp, synthetic construct
  source 1..75: mol_type = other DNA
tgctgctttggcgcatcggtggccaatcatgccgccatatactgcggcaacggtgaactgcttcaccatctgcct

SEQ ID NO: 75532 - DNA, 75 bp, synthetic construct
  source 1..75: mol_type = other DNA
acggcaacggtgctgcaattcctctcaccgacgattatcgtcgcctggttctcactggtgcgtaaatcgcgcccg

SEQ ID NO: 75533 - DNA, 75 bp, synthetic construct
  source 1..75: mol_type = other DNA
ttctgccgtcactcctcaccggctgcgccggcttcacctcgccgcccgcacctgagaacgctgccaccgccctgg

SEQ ID NO: 75534 - DNA, 75 bp, synthetic construct
  source 1..75: mol_type = other DNA
tcagtcagcaggcttgcagacgttttctcagccaggtattggtgatgcttttgttcgggcagggacagaggcaat

SEQ ID NO: 75535 - DNA, 75 bp, synthetic construct
  source 1..75: mol_type = other DNA
cggtatatcactcaggatccgattgggctgaaggggggatggaatttttatcagtatccgttgaatccgatctca

SEQ ID NO: 75536 - DNA, 75 bp, synthetic construct
  source 1..75: mol_type = other DNA
tttgggcggggctactcacgcttgttgttctcgaaattgtgctgggtatcgataacctggtcttcatcgccattc

SEQ ID NO: 75537 - DNA, 75 bp, synthetic construct
  source 1..75: mol_type = other DNA
agtggcgcgtgttttcaggcgtcacggcgtgcttacgttaatggtcagggagtatgaaaacgcgcttcttcatca

SEQ ID NO: 75538 - DNA, 75 bp, synthetic construct
  source 1..75: mol_type = other DNA
ccagaagaacagattgatccgcgcaaagcggcagttgctgcggctattgcccgcgttcaggccaaaaaagccgcc

SEQ ID NO: 75539 - DNA, 75 bp, synthetic construct
  source 1..75: mol_type = other DNA
cctcggtcaggttaaaaaagcgtttgccgattcgcaaaaaggtcatatgaaggccagcgaactggaacgcatgtt

SEQ ID NO: 75540 - DNA, 75 bp, synthetic construct
  source 1..75: mol_type = other DNA
cgcaagaactcgaggcttatggtatcagtgacgtacatgatatcgtttacaacccaagctacgacctgctgtatc

SEQ ID NO: 75541 - DNA, 75 bp, synthetic construct
  source 1..75: mol_type = other DNA
ttttctgccaccacgatgctgttttcactgggtgccagcatgatactgggcggtgtggctcagatgctggccccg

SEQ ID NO: 75542 - DNA, 75 bp, synthetic construct
  source 1..75: mol_type = other DNA
gtgatgttaggagcgatagaaaaacgctttggtgataaagtaccggaacagtccatccagtggctgacagataac

SEQ ID NO: 75543 - DNA, 75 bp, synthetic construct
  source 1..75: mol_type = other DNA
cggcagcaaagaaccttgcagaggcgttcgagcattataacgaatggcatccgcatagtgcgctgggttatcgct

SEQ ID NO: 75544 - DNA, 75 bp, synthetic construct
  source 1..75: mol_type = other DNA
gatttttattattagtgcagtaaccaatatgacatggttaaaaattttgctggctccaaagctttaccttatcga

SEQ ID NO: 75545 - DNA, 75 bp, synthetic construct
  source 1..75: mol_type = other DNA
aatatgacttggttaaaaatttggctggccccaaagctttaccttatcgaatatgcagcatcattggttaagtaa

SEQ ID NO: 75546 - DNA, 75 bp, synthetic construct
  source 1..75: mol_type = other DNA
gagtgtgagaaacacgggaaatacacacgtctggtgttgaaagggccagatgttcgtggggaaaccatcaaacgg

SEQ ID NO: 75547 - DNA, 75 bp, synthetic construct
  source 1..75: mol_type = other DNA
acgcacaacacgacaaagcgcaattgctcaaccgcagggcggaactggaggaggagatgcagtttgcccgtgccg

SEQ ID NO: 75548 - DNA, 75 bp, synthetic construct
  source 1..75: mol_type = other DNA
atcagcgcgtcagtatgccgcaacaatcgacgaaattcgccagaaaacgtctgcaatgtcacttcctgaagcggc

SEQ ID NO: 75549 - DNA, 75 bp, synthetic construct
  source 1..75: mol_type = other DNA
aacgtccggcggcgctgtggggggtgccaatggtgcccctgctgactgtcgtgggcgtgacaattattgttgcta

SEQ ID NO: 75550 - DNA, 75 bp, synthetic construct
  source 1..75: mol_type = other DNA
caagcgggtaaagagctgagcgttgatgtgacctacgacgggccgacagaacccagtgtttctggtcaggtacag

SEQ ID NO: 75551 - DNA, 75 bp, synthetic construct
  source 1..75: mol_type = other DNA
aaaatgccgatatcagcggtaacgtgaatgcgaactccgggacgctcaacaacgtcacgattaacgagaactgtc

SEQ ID NO: 75552 - DNA, 75 bp, synthetic construct
  source 1..75: mol_type = other DNA
gcaatccaggccgcgtcacagaaatggacaatgccgttaagggactggcgaatggcaatgagccgctttattatc

SEQ ID NO: 75553 - DNA, 75 bp, synthetic construct
  source 1..75: mol_type = other DNA
agacgatctgggacctaaactggctgaatttacgttcagtgtacttgtgatgggggatgatgttcagacgcagcg

SEQ ID NO: 75554 - DNA, 75 bp, synthetic construct
  source 1..75: mol_type = other DNA
ccatcactccagttattgatatggtgcgccagttatttaacgtttacacggtctggtttgtaaccgggcgctgtg

SEQ ID NO: 75555 - DNA, 75 bp, synthetic construct
  source 1..75: mol_type = other DNA
tggcgtggaaagactataaagcggtaacccgtgacctgaaacaggtttaccgcgcagccacggaagaaggcgcgt

SEQ ID NO: 75556 - DNA, 75 bp, synthetic construct
  source 1..75: mol_type = other DNA
gtttccaaagtattgatacacaacttagtaccaatatggatggtaataatcagttcaacatgagcagtagcggtt

SEQ ID NO: 75557 - DNA, 75 bp, synthetic construct
  source 1..75: mol_type = other DNA
gatttcaggactggtgaataacatcacggagatgctgaacggaaacaaagtggaatggcgcaactgggcctcatc

SEQ ID NO: 75558 - DNA, 75 bp, synthetic construct
  source 1..75: mol_type = other DNA
tgtcctgttttttatttctggtgtaggttctgcctggccagaacttggttttacctctataaacccggacaacac

SEQ ID NO: 75559 - DNA, 75 bp, synthetic construct
  source 1..75: mol_type = other DNA
cgtgatacccgcaatatgtcgaaagccttacccgagtggcaccgcccggaagagctgctggaaatgctcggcagc

SEQ ID NO: 75560 - DNA, 75 bp, synthetic construct
  source 1..75: mol_type = other DNA
atgatttgacatccttcattgttaacaatcttgggatcactgatgtgggggcaagtcttaatggtcgtgccgtgt

SEQ ID NO: 75561 - DNA, 75 bp, synthetic construct
  source 1..75: mol_type = other DNA
acaatgtttatttcagcaattctactctgctgggtgatgttgttttcgcaagtactttcaacgcaaacttctatc

SEQ ID NO: 75562 - DNA, 75 bp, synthetic construct
  source 1..75: mol_type = other DNA
ttctgcaaaacggccttgccggtgcggccaccagtctggtgacgatgttcgcaatcgccgccaccatgttctggc

SEQ ID NO: 75563 - DNA, 75 bp, synthetic construct
  source 1..75: mol_type = other DNA
gacatgaataaaaacacagaaacattaaaatattgtccagcttattttcaatcgtatacaaaaaaagaattcgag

SEQ ID NO: 75564 - DNA, 75 bp, synthetic construct
  source 1..75: mol_type = other DNA
atccggtgcgcctgcatgggcgtctgagcagcaggccacgctgagcgcggggtatcttcatgcccggacgaacgc

SEQ ID NO: 75565 - DNA, 75 bp, synthetic construct
  source 1..75: mol_type = other DNA
aggtggaaaacgcctttatggcctgggtgggcggagtgaatgaggccagcggggtgacaaaaacgctctccggcg

SEQ ID NO: 75566 - DNA, 75 bp, synthetic construct
  source 1..75: mol_type = other DNA
gatttcccattgccgggttaattatcgtcaattggttgccgcggacaaacccggcctggtgcttgatattgccgc

SEQ ID NO: 75567 - DNA, 75 bp, synthetic construct
  source 1..75: mol_type = other DNA
tgcccttgagttgctgggaggtttcactccagacctgatgatatgtgatatcgcgatgccacgaatgaacgggct

SEQ ID NO: 75568 - DNA, 75 bp, synthetic construct
  source 1..75: mol_type = other DNA
ggctcttttatttatggctttattccctctgcatggattgccgctcatgcagggacagataatcccttcgccatc

SEQ ID NO: 75569 - DNA, 75 bp, synthetic construct
  source 1..75: mol_type = other DNA
atcgttgaccggacatctggtgctttctacgttacataccaatagtgcgacaggggcgttgtcacgtcttcagga

SEQ ID NO: 75570 - DNA, 75 bp, synthetic construct
  source 1..75: mol_type = other DNA
tgggaaaatggctcttcaaaacctgacggtgagaatttgcatctactgtcaaaattgctttccaaatctcctgaa

SEQ ID NO: 75571 - DNA, 75 bp, synthetic construct
  source 1..75: mol_type = other DNA
ctgccttcacggggatttacaacgatttggccgccgcctcagcctgtatgtgaacacggcagcggaagccatccg

SEQ ID NO: 75572 - DNA, 75 bp, synthetic construct
  source 1..75: mol_type = other DNA
gctctggttgcaattggtgtagcccgatattttggcaatatggcgtcttctgcgggctctgcaactgccgggtta

SEQ ID NO: 75573 - DNA, 75 bp, synthetic construct
  source 1..75: mol_type = other DNA
cagatatttatcgccgctccacaactgtcagcagtggctctcccctgggccgaatggcgtgaggagccacaggcg

SEQ ID NO: 75574 - DNA, 75 bp, synthetic construct
  source 1..75: mol_type = other DNA
cagaagtttgaccggcaggtcatgataccgccagtgttattccgcggtggtaagcatgagaatttcaacagtaat

SEQ ID NO: 75575 - DNA, 75 bp, synthetic construct
  source 1..75: mol_type = other DNA
tggttagctgagtgctatccaacctgtctgtcaccatctgattggacacgggacaccgcgatcgcttgggtgacc

SEQ ID NO: 75576 - DNA, 75 bp, synthetic construct
  source 1..75: mol_type = other DNA
aggcggaaaagcagatttcatacggcacaatgccgatgaaatggcgttgtatcagatggcgattgaattgataaa

SEQ ID NO: 75577 - DNA, 75 bp, synthetic construct
  source 1..75: mol_type = other DNA
tgaaaaccgttctggcagtcagtcgcgggcaaattcctcccttactgaattttcacacccccaacccggcgctga

SEQ ID NO: 75578 - DNA, 75 bp, synthetic construct
  source 1..75: mol_type = other DNA
aacctttacctggacaatatggaggcgactggtttttacaggatttccctgccttccgcacagcctggcgatatc

SEQ ID NO: 75579 - DNA, 75 bp, synthetic construct
  source 1..75: mol_type = other DNA
cgcgctaatgcagcagtgcgcaagcggcgcgatggtggcggtatttgcagacgaagacacgctgatgccgctggc

SEQ ID NO: 75580 - DNA, 75 bp, synthetic construct
  source 1..75: mol_type = other DNA
gaacgtgacgtttgtcgccgatgtcaggacggcgaagatcgctgatctggtagtcacccgggataactcagtggc

SEQ ID NO: 75581 - DNA, 75 bp, synthetic construct
  source 1..75: mol_type = other DNA
cgggcttaccattcgcgatgtgctttctgcggttacgatctacgactcgatggtgcgctggttggtattgaagcc

SEQ ID NO: 75582 - DNA, 75 bp, synthetic construct
  source 1..75: mol_type = other DNA
gcgctgctgtcaggcgatccgattatctcggtgatcctctccagcgcggtcaacaacgacggcaacagaaaggtc

SEQ ID NO: 75583 - DNA, 75 bp, synthetic construct
  source 1..75: mol_type = other DNA
aatggcagttggctttacctgattgacctggaacacgcattacgcgtcgctggcattcgcatcaaaggagaggag

SEQ ID NO: 75584 - DNA, 75 bp, synthetic construct
  source 1..75: mol_type = other DNA
ctggcgtagtgcaccggaactcgacaatgactatgaagcacgtccggcgaacgggtgggatcttcgcgccgaagg

SEQ ID NO: 75585 - DNA, 75 bp, synthetic construct
  source 1..75: mol_type = other DNA
aatggcgaacacgctgcgggcgagggtgaccgatgcattcggtaatacgttgggcgggcagacggtcagcgtgtt

SEQ ID NO: 75586 - DNA, 75 bp, synthetic construct
  source 1..75: mol_type = other DNA
tgcctggacggaagaaagtgagggaatttacaaagcaagctatacggcccatctcattggcgacaaattaacggc

SEQ ID NO: 75587 - DNA, 75 bp, synthetic construct
  source 1..75: mol_type = other DNA
agcaggcgaagcagtttttcatggatgttgctgccgggttatgtgaaggggatggtccgttaccggaaaagcgtc

SEQ ID NO: 75588 - DNA, 75 bp, synthetic construct
  source 1..75: mol_type = other DNA
gcactcaaaccaaccacggtatcggctggcgttatttcaccccgagctggatgtctggcgtcaatatgtttatcg

SEQ ID NO: 75589 - DNA, 75 bp, synthetic construct
  source 1..75: mol_type = other DNA
tgcctgcgccgcagattgtggatgtgccggactttgagacgctgcttgccgaacgcaaggcagaatttgtggcgc

SEQ ID NO: 75590 - DNA, 75 bp, synthetic construct
  source 1..75: mol_type = other DNA
ggatgactggtggtgcaacggtcagaacctttacctggacaatatggaggcaacgggcttttaccgggtgcccct

SEQ ID NO: 75591 - DNA, 75 bp, synthetic construct
  source 1..75: mol_type = other DNA
cagatattctcactcgcaaatacaacgccgataagtttgaaaagcgattatcagatctggatgacgttgctgaag

SEQ ID NO: 75592 - DNA, 75 bp, synthetic construct
  source 1..75: mol_type = other DNA
tgcggttttttcgtgtcatgagcattgctacgcccaaattatggtggggcgtacagggccgacttcggtcgggcc

SEQ ID NO: 75593 - DNA, 75 bp, synthetic construct
  source 1..75: mol_type = other DNA
tgatatgcgtaaatccttcaacggtctgggtgaacaggtacaacatgtgctggatgagaaccccttctccggtca

SEQ ID NO: 75594 - DNA, 75 bp, synthetic construct
  source 1..75: mol_type = other DNA
atgaggattgcgggtgatgatggttatcccgtatggagtgatattccgccactggcacctgaagaactgataaag

SEQ ID NO: 75595 - DNA, 75 bp, synthetic construct
  source 1..75: mol_type = other DNA
aacgggtggtgcagaacacgctgcgtccgaagccggtggaggggctgcagacagacacccggtcgcacacacacc

SEQ ID NO: 75596 - DNA, 75 bp, synthetic construct
  source 1..75: mol_type = other DNA
atgttgaatgtagctattgaaaaccagaacgggtggaattatagtgcacctgcacctcataaagcgggtgccggg

SEQ ID NO: 75597 - DNA, 75 bp, synthetic construct
  source 1..75: mol_type = other DNA
agaaaaagaataatggaaccagtgtcagtgcgttagcgcgtgaatacggcgtttccagggccactatagctgcga

SEQ ID NO: 75598 - DNA, 75 bp, synthetic construct
  source 1..75: mol_type = other DNA
tttcaacaacgcagcaggatactgaaaaccagcgtctggaactcgggcaggctggttggcaaattgattactggt

SEQ ID NO: 75599 - DNA, 75 bp, synthetic construct
  source 1..75: mol_type = other DNA
ggttatcaaaccagatgagcaattacaacaatctggcaaacgttgggcttggtgcgctgcaaggtcaggcaaacg

SEQ ID NO: 75600 - DNA, 75 bp, synthetic construct
  source 1..75: mol_type = other DNA
gtggggcaaaacctggtcgtggatctttcgacgcaaatcttttgccataacgattatccggaaaccattacagac

SEQ ID NO: 75601 - DNA, 75 bp, synthetic construct
  source 1..75: mol_type = other DNA
gcccgcagccattcagcgtaggagaagagtatccgtggctggcggagcgtgatgaagacggtgcggtagtcacct

SEQ ID NO: 75602 - DNA, 75 bp, synthetic construct
  source 1..75: mol_type = other DNA
ttgattctgcaattccgggacgttacactgttcaggcaccttataaagcgggtgccgggattggcgtcctgaaat

SEQ ID NO: 75603 - DNA, 75 bp, synthetic construct
  source 1..75: mol_type = other DNA
actggcgctgctcttggctctattgttcccggacttggcactggattaggtgcggcaattggcggcggacttggc

SEQ ID NO: 75604 - DNA, 75 bp, synthetic construct
  source 1..75: mol_type = other DNA
ctggatgacccgaatgtctgcgctcctatctcgttttatctgctgtaccggataaccagcctgctggatggcaga

SEQ ID NO: 75605 - DNA, 75 bp, synthetic construct
  source 1..75: mol_type = other DNA
gcgtcaacaacagcagccagagccagaacgtgacatttattgcggatatcaggacggcgcagatcgcggatctgg

SEQ ID NO: 75606 - DNA, 75 bp, synthetic construct
  source 1..75: mol_type = other DNA
ggatggcgaaacgttctggcaaaatctgctggaaggtcgtgaatgcagccgacgctttacgcgcgaagagcttct

SEQ ID NO: 75607 - DNA, 75 bp, synthetic construct
  source 1..75: mol_type = other DNA
tggctgggggaaaaggaagatcggcggcatctgtcagaagtgatagagcaatggcactcactatacgggcagacg

SEQ ID NO: 75608 - DNA, 75 bp, synthetic construct
  source 1..75: mol_type = other DNA
cttgtaggaaagcttttgaacgtgcggtaaaacgagctggtatcgagctaccagaagggcaatgcacacacgtat

SEQ ID NO: 75609 - DNA, 75 bp, synthetic construct
  source 1..75: mol_type = other DNA
gtgaaatcctggctgaccgggtgagtgaggaaagccgccgctggctggcatcgtgcggcctgaccgtggagcaga

SEQ ID NO: 75610 - DNA, 75 bp, synthetic construct
  source 1..75: mol_type = other DNA
gctttacgaagagatcatggcgctcgatgggttcaatttcttcacagactgctattttcaatttttatccgtgat

SEQ ID NO: 75611 - DNA, 75 bp, synthetic construct
  source 1..75: mol_type = other DNA
ttcgtcaggaccaaaggcaaaaagaaccgaagcattccgattagcaaagagctgtatgaggaaatcattgcccta

SEQ ID NO: 75612 - DNA, 75 bp, synthetic construct
  source 1..75: mol_type = other DNA
tgagcgtcaccagtggcgcggaatggactttcgcgcccaggctgacgccatcaaaaaactgaccgaacagtataa

SEQ ID NO: 75613 - DNA, 75 bp, synthetic construct
  source 1..75: mol_type = other DNA
tggatatttacccgcaggaccctgttccggtcagccgggcggcaccggtggcgcgggaatggcgggaaattcccc

SEQ ID NO: 75614 - DNA, 75 bp, synthetic construct
  source 1..75: mol_type = other DNA
acagaagcatccctatcagtaaagagctttacgaagagatcatggcgcttgatgggttcaatttcttcacagact

SEQ ID NO: 75615 - DNA, 75 bp, synthetic construct
  source 1..75: mol_type = other DNA
ctgtcaccagtccgtctccggcctgcgtcaccatctctgtgctgtcacgtgaaaataacggcgtcgcatccgaag

SEQ ID NO: 75616 - DNA, 75 bp, synthetic construct
  source 1..75: mol_type = other DNA
tccggtcagccgggcggcaccggtggcgcgggaatggcgggaaattccccgcacggagcctgacccggaaaccac

SEQ ID NO: 75617 - DNA, 75 bp, synthetic construct
  source 1..75: mol_type = other DNA
acccatgagcagattgttgaattactagctgattgcaaacgtcaggacccaattctggcactggtagttaagata

SEQ ID NO: 75618 - DNA, 75 bp, synthetic construct
  source 1..75: mol_type = other DNA
gtgcttaaaaccttccgtgtatttgccagcgctgttaacccactaggccacacaattggtatcgctcagaatgtg

SEQ ID NO: 75619 - DNA, 75 bp, synthetic construct
  source 1..75: mol_type = other DNA
acggcgctccgtttcaatccactggcaacgttaccaaatggcgacaaagtggcggcagcggttggcattaccccg

SEQ ID NO: 75620 - DNA, 75 bp, synthetic construct
  source 1..75: mol_type = other DNA
gcatctggcaccggatcatttggaaacggcgctccgtttcaatccactggcaacgttaccaaatggcgacaaagt

SEQ ID NO: 75621 - DNA, 75 bp, synthetic construct
  source 1..75: mol_type = other DNA
gtgcactgctgaaacagtatggtatccgcctgacggctaatcaggcatatcaccagatggcgaagctggggatcg

SEQ ID NO: 75622 - DNA, 75 bp, synthetic construct
  source 1..75: mol_type = other DNA
gacagttcgtgctggatccgtgtggcacaggcgtgggcaggcaccggttttggccacctggcgataccgcgtgtg

SEQ ID NO: 75623 - DNA, 75 bp, synthetic construct
  source 1..75: mol_type = other DNA
atggaactgtggctgacggtgaacggtaaacgcacctgcgccagcgcacaactggatccgctgacccgcgccgtg

SEQ ID NO: 75624 - DNA, 75 bp, synthetic construct
  source 1..75: mol_type = other DNA
atgcttaaaaccttccgtgtatttgcccgagctgttaacccaataggccacacaattggtatcgctcagaatgtg

SEQ ID NO: 75625 - DNA, 75 bp, synthetic construct
  source 1..75: mol_type = other DNA
tgatgaacgtcgcctcaatgatgctgtaaatgccgtcatgagtgatgaacctcaatatcgcgtctacggcataac

SEQ ID NO: 75626 - DNA, 75 bp, synthetic construct
  source 1..75: mol_type = other DNA
tctctggcgtcgtgacggaccggtaatgatttctttagatgatctgtggagtgcgataacgcatggcggacagtg

SEQ ID NO: 75627 - DNA, 75 bp, synthetic construct
  source 1..75: mol_type = other DNA
gtatatcacggcacagcaccggctggggcgcgacatccgactgtctgccatttatgccgctttgcatgtggaagg

SEQ ID NO: 75628 - DNA, 75 bp, synthetic construct
  source 1..75: mol_type = other DNA
tgatcaagtccgtcaacggtcagccgtaccgcatcaacaccaccgggctgaataacgttcgcgcacagccagata

SEQ ID NO: 75629 - DNA, 75 bp, synthetic construct
  source 1..75: mol_type = other DNA
gtggctggtctgccggggtgacattcacaaattccgctgcgtgccgcacctgacgggacggcgctttgagcacgg

SEQ ID NO: 75630 - DNA, 75 bp, synthetic construct
  source 1..75: mol_type = other DNA
tattttcagataacggcggtcccgcgtcttgcggtgtatgacccgacggtacagtttgaattctggttctcagaa

SEQ ID NO: 75631 - DNA, 75 bp, synthetic construct
  source 1..75: mol_type = other DNA
ggacgccaacgaccagtatcagcgaccttcttgttgtcgtgatgaagaaatcaacagccggtatcagtatcagct

SEQ ID NO: 75632 - DNA, 75 bp, synthetic construct
  source 1..75: mol_type = other DNA
acggcaccggcacaccgctgggcgatgcgattgaaatagaagcgttacgcaacgtctatgcgccgcgcccgcagg

SEQ ID NO: 75633 - DNA, 75 bp, synthetic construct
  source 1..75: mol_type = other DNA
cagcaggtgttcgtgttgtcctgcttgatgctcctgagcagacgcaggatacatttttcggggtacttcccgcag

SEQ ID NO: 75634 - DNA, 75 bp, synthetic construct
  source 1..75: mol_type = other DNA
taccggaacccgccatcatcgcggagcctgactttgaagcaattctggctgacacaaaggccatgatgattgcgg

SEQ ID NO: 75635 - DNA, 75 bp, synthetic construct
  source 1..75: mol_type = other DNA
ttacccgtaatattgcggccagaacagcagcacagacaacgctgaatactgtcacgtcagtgggaagtcgtctgt

SEQ ID NO: 75636 - DNA, 75 bp, synthetic construct
  source 1..75: mol_type = other DNA
tgttggtcagggcgatcagatattcatgaacgacgtgttcctgaaacgcctgacggctcccaccattaccagcgg

SEQ ID NO: 75637 - DNA, 75 bp, synthetic construct
  source 1..75: mol_type = other DNA
gcttcggttagctcatggcctcctgcagctcctgatggcctgctctgaccaaaacatagatgatatgacactcac

SEQ ID NO: 75638 - DNA, 75 bp, synthetic construct
  source 1..75: mol_type = other DNA
gtgcaaccagcccagcacctgcagaggtggtgctgactgtccttagccgcgaaggcgatggaactgcagaaaaag

SEQ ID NO: 75639 - DNA, 75 bp, synthetic construct
  source 1..75: mol_type = other DNA
atcaacgacggcgaggcgacgggccgcattaacaccttccagccgaccgcggaagaacttaccaccctgtttcaa

SEQ ID NO: 75640 - DNA, 75 bp, synthetic construct
  source 1..75: mol_type = other DNA
ttagcaataaggaaagaacatctgctattaatgccttatatgtgtaatgaatcgatttcatacttacttggtgaa

SEQ ID NO: 75641 - DNA, 75 bp, synthetic construct
  source 1..75: mol_type = other DNA
ccgtattggagaatctgctggagcaggacttcagcgccagcggcccgaaccagaagtgggcgggtgacatcacgt

SEQ ID NO: 75642 - DNA, 75 bp, synthetic construct
  source 1..75: mol_type = other DNA
gcttcgatcgtcgtcactggataatctccgtcaggctcccttattccgaacgcccaccgcgtccgtcccgcacat

SEQ ID NO: 75643 - DNA, 75 bp, synthetic construct
  source 1..75: mol_type = other DNA
ctttattgaaaagccacgttgatcgtgatgatcagcgtttcttttctattgctttgcaggtggcagctaaggaag

SEQ ID NO: 75644 - DNA, 75 bp, synthetic construct
  source 1..75: mol_type = other DNA
tgcactggtggtatgggatggttcgagcgtaggtaaagcggtttatgtttccgctgtacaaatcgacaccgcgaa

SEQ ID NO: 75645 - DNA, 75 bp, synthetic construct
  source 1..75: mol_type = other DNA
gaaaagtgagcattcgaaccctaactaggatacctgtaggaagattaaaaatctcagacaattatttatcgtttg

SEQ ID NO: 75646 - DNA, 75 bp, synthetic construct
  source 1..75: mol_type = other DNA
tttgccagtcgcattccggtggttagcgctgtcgggcatgaaaccgatgtcaccatagctgatttcattgctgac

SEQ ID NO: 75647 - DNA, 75 bp, synthetic construct
  source 1..75: mol_type = other DNA
acgactggcacgggtaaaccgctacagccagaccggcaacgaggcagaccttaatccgaacatcgctaaccgcaa

SEQ ID NO: 75648 - DNA, 75 bp, synthetic construct
  source 1..75: mol_type = other DNA
ttggtacagaagctgactcagcgcggcgtgcgcatcgagttcctgaaggagggcctggtgttcactggcgaggac

SEQ ID NO: 75649 - DNA, 75 bp, synthetic construct
  source 1..75: mol_type = other DNA
tggtcagcctggtaagtgcggctcctctctacgctgctgacgttcccgccaacacaccgctcgccccgcaacaag

SEQ ID NO: 75650 - DNA, 75 bp, synthetic construct
  source 1..75: mol_type = other DNA
tttacaggcccaacagttagtggtcatcctagtgagttagctactaacggcggtacgggcacagctattatgatt

SEQ ID NO: 75651 - DNA, 75 bp, synthetic construct
  source 1..75: mol_type = other DNA
tagcaaaatatcaattattgaatttgaaaatgttatttacctaatcaatagcgattttgaagaagtaaacgatgg

SEQ ID NO: 75652 - DNA, 75 bp, synthetic construct
  source 1..75: mol_type = other DNA
cgtcgaatacatcggtattgatgccaccggcctcggtgtcggcgtgttccagctcgtgcgctcgttctatcccgc

SEQ ID NO: 75653 - DNA, 75 bp, synthetic construct
  source 1..75: mol_type = other DNA
gcaatagaaacgggccattctattgaatggatttcatttggtacaggagaaatgaaaaacgcaaaaaataaagat

SEQ ID NO: 75654 - DNA, 75 bp, synthetic construct
  source 1..75: mol_type = other DNA
gtgagaactaactcttcaggtcaggctccagtcgttttgaccagcaataaagtcggtacatatacggtgactgca

SEQ ID NO: 75655 - DNA, 75 bp, synthetic construct
  source 1..75: mol_type = other DNA
gttctggtccggtgcgctgtttaaccggggccgcgccaaagcggacaaggtggatattgacctgacccacagcaa

SEQ ID NO: 75656 - DNA, 75 bp, synthetic construct
  source 1..75: mol_type = other DNA
atcagagcaatattctgaaaaacatgccgttaatggcctttgcaatgaagtatacattcccactataaagttcga

SEQ ID NO: 75657 - DNA, 75 bp, synthetic construct
  source 1..75: mol_type = other DNA
acgtttcacaaaccgcgaaatccccggcagagcgcaagagagcgcagcgcgagagggaaaaattacgaaaacaga

SEQ ID NO: 75658 - DNA, 75 bp, synthetic construct
  source 1..75: mol_type = other DNA
gggatgttattaatgttcactacggaaaagcattaaaagctgatcagcgagtatcgaatggaagtgtccatgttt

SEQ ID NO: 75659 - DNA, 75 bp, synthetic construct
  source 1..75: mol_type = other DNA
tttccgatgaccgatggctggcatccgtcgccggattttcgacgacgggcggctctgtggggagtggctctgccg

SEQ ID NO: 75660 - DNA, 75 bp, synthetic construct
  source 1..75: mol_type = other DNA
ggcggaggggaaggttttcacgcaggttcagtgggagcagaaatttgcccgccacgtgcagcacgtcagggcaca

SEQ ID NO: 75661 - DNA, 75 bp, synthetic construct
  source 1..75: mol_type = other DNA
tcctggcagcgatgaactgaacgggattaacgtgaaataccgttatgagtttacggacactctgggaatggtgac

SEQ ID NO: 75662 - DNA, 75 bp, synthetic construct
  source 1..75: mol_type = other DNA
acatttgtgatcaaaaattttctgaagtacttgatggaaactggttaatcaatatcgacggaacctattccattc

SEQ ID NO: 75663 - DNA, 75 bp, synthetic construct
  source 1..75: mol_type = other DNA
ggtcgccacagcaacacgtctctggcgtggggggctggcgtgcagtttaacccgaccgaatccgtggccattgac

SEQ ID NO: 75664 - DNA, 75 bp, synthetic construct
  source 1..75: mol_type = other DNA
gtgatcgcagggcagcccttgaactgatgacgcaaatcgaatcgaccgtgaccagcctgcaccgtgaggctgaag

SEQ ID NO: 75665 - DNA, 75 bp, synthetic construct
  source 1..75: mol_type = other DNA
cagaaagtgatcgtcaaacatctggatgccattcagaactttggcgcaatggatattctgtgcactgataaaacc

SEQ ID NO: 75666 - DNA, 75 bp, synthetic construct
  source 1..75: mol_type = other DNA
gcagctcgggattaaacagggggctgacagtacattgtcggcccgcaagaaggtgtttaacggaggtgaaatgtg

SEQ ID NO: 75667 - DNA, 75 bp, synthetic construct
  source 1..75: mol_type = other DNA
atgcgggatcaactgcagaaagcctctgcggttctggctgtgatggattacacccagatgaactcaaaagcggat

SEQ ID NO: 75668 - DNA, 75 bp, synthetic construct
  source 1..75: mol_type = other DNA
gtgggaaggctcacttatcgatcaactgataacggaagtcatactgagttcacactccagagctgcggcactggc

SEQ ID NO: 75669 - DNA, 75 bp, synthetic construct
  source 1..75: mol_type = other DNA
cctgccggatgaagatccgcagaacctggctgacccggcttaccgtcgtcgccgtattattcggcagaatatgct

SEQ ID NO: 75670 - DNA, 75 bp, synthetic construct
  source 1..75: mol_type = other DNA
tattactgaataatggcgggacatcaacgccgaagagttttgatattaagcttactgattgtgatattactaact

SEQ ID NO: 75671 - DNA, 75 bp, synthetic construct
  source 1..75: mol_type = other DNA
ctgagtttctcaattcggttattgattataatcataaaatagaagcagaaaatctttgtctggatattgcttatg

SEQ ID NO: 75672 - DNA, 75 bp, synthetic construct
  source 1..75: mol_type = other DNA
accgacattgcgcagtcattcatggcaatccgtcgcgccaccaccgccagcggcaaccgcccgacctatgaagcc

SEQ ID NO: 75673 - DNA, 75 bp, synthetic construct
  source 1..75: mol_type = other DNA
tttatatttatccggaacgaaatgcagctgatcgggtagctgacaggtttcttgaaaaattgcctcagaaagaac

SEQ ID NO: 75674 - DNA, 75 bp, synthetic construct
  source 1..75: mol_type = other DNA
ttatttgtcagggaactatagaaccacttatcaattacacgttttctgaacatacagtcgcaatggttgttacag

SEQ ID NO: 75675 - DNA, 75 bp, synthetic construct
  source 1..75: mol_type = other DNA
ctattgctttttcattgtgtgctgttgcacatgcagccaatcaaggacaaggtgttgttaactttaaagggacgg

SEQ ID NO: 75676 - DNA, 75 bp, synthetic construct
  source 1..75: mol_type = other DNA
aggacagcaagtcgcacagaccctgcagcaaaccggggatacccgcgaactgctggatattctggcggatgatgt

SEQ ID NO: 75677 - DNA, 75 bp, synthetic construct
  source 1..75: mol_type = other DNA
tttgtgttgggggtgccgctggcgttaacgctcggttcgccaatatcgggagctttacttgaactacatggctgg

SEQ ID NO: 75678 - DNA, 75 bp, synthetic construct
  source 1..75: mol_type = other DNA
aggcatcgggcaaggacacccagcgcccccagctcgaagcgctgctgagcttcgtccgcgaaggcgatacagtgg

SEQ ID NO: 75679 - DNA, 75 bp, synthetic construct
  source 1..75: mol_type = other DNA
gaacatcagtccacactgagcgcggggtatcttcatgcccggaccaacgtacccggcagcgatgatctgaacggg

SEQ ID NO: 75680 - DNA, 75 bp, synthetic construct
  source 1..75: mol_type = other DNA
acatgcgttttgagcggacagcgttgtacgctgctgaaaatggtttcagtgtgatcagcagttcactgggcattt

SEQ ID NO: 75681 - DNA, 75 bp, synthetic construct
  source 1..75: mol_type = other DNA
tgctggagaatcataccgatatctccggtaaaaccagcgaacgcgtgctgcatagcgcgtggttgaacagtcatt

SEQ ID NO: 75682 - DNA, 75 bp, synthetic construct
  source 1..75: mol_type = other DNA
tgccgaaagggttccggggcggcaacgctattaaagtgcaattgtggtgggcagtacaggcaacaatatttgcct

SEQ ID NO: 75683 - DNA, 75 bp, synthetic construct
  source 1..75: mol_type = other DNA
tctgcgcgataccaatctacaccgcaaatctcagggacgccctcttatcaaaattggtcaactccactacgataa

SEQ ID NO: 75684 - DNA, 75 bp, synthetic construct
  source 1..75: mol_type = other DNA
tcacaggacagactcgccattcagttgatccgcgaacgcggtgcactggatgacatccgggcgggacgcattgag

SEQ ID NO: 75685 - DNA, 75 bp, synthetic construct
  source 1..75: mol_type = other DNA
tgaacaaaaacagtttacatccttgcttctgcgggaagggattatcggattattacaacgcttagggattcgcga

SEQ ID NO: 75686 - DNA, 75 bp, synthetic construct
  source 1..75: mol_type = other DNA
caactggtttgaacgtgccaaaggaatggaatgggagcctgagagggggatccgttgtaccatgtgttttgacat

SEQ ID NO: 75687 - DNA, 75 bp, synthetic construct
  source 1..75: mol_type = other DNA
gatgaatatttctggataccgaaatttcaggagctacgcaaagtggcttccggtatggctattcacaagaaatgg

SEQ ID NO: 75688 - DNA, 75 bp, synthetic construct
  source 1..75: mol_type = other DNA
atgacaaactgcagtttaaggccttcctgtcatctcttgactgggaggaggatgaagacctccagaataaactgt

SEQ ID NO: 75689 - DNA, 75 bp, synthetic construct
  source 1..75: mol_type = other DNA
aagacggatattttgtaaacgtgcgcatcattaatgattcgcaaatatcgtcattattcgatgaatacgtggttg

SEQ ID NO: 75690 - DNA, 75 bp, synthetic construct
  source 1..75: mol_type = other DNA
ggaccggcgggaaaggtaacgcttccccccatgccgattacatttcgcgtgagggaaagtatgcccgcaaaaaag

SEQ ID NO: 75691 - DNA, 75 bp, synthetic construct
  source 1..75: mol_type = other DNA
tgcgttcgtcagccaggaaatcggcgaccgtcatgcgtatcagtttgccatccataacccgacagcggcgattgc

SEQ ID NO: 75692 - DNA, 75 bp, synthetic construct
  source 1..75: mol_type = other DNA
tactctttacgcaaaacttggatataaaggaaatatgcagagtttgagggcgggaacattttctgcaacggcaac

SEQ ID NO: 75693 - DNA, 75 bp, synthetic construct
  source 1..75: mol_type = other DNA
ccttttactacggaagataaagtaacgcatttcttttcacgcggtaaaaaacaaaaagatatctttaaagagcct

SEQ ID NO: 75694 - DNA, 75 bp, synthetic construct
  source 1..75: mol_type = other DNA
acgaatctctggtatgcggcgtgtttcccaaccaagacggcacgttcaccgcgatgacgtataccaaaagcaaaa

SEQ ID NO: 75695 - DNA, 75 bp, synthetic construct
  source 1..75: mol_type = other DNA
accgacattgcgcagtcatttatggcaatccgtcgcgcaaccaccgccagtggcaaccgcccaacctatgaagcc

SEQ ID NO: 75696 - DNA, 75 bp, synthetic construct
  source 1..75: mol_type = other DNA
ggcactgtttgcgctttcggtcgcggtaggcttaacgccggaaatgttgccgatgattgttacctcgacgctggc

SEQ ID NO: 75697 - DNA, 75 bp, synthetic construct
  source 1..75: mol_type = other DNA
cggttatgctcactgataaaatactggcatacaatcctgaagataatcagggggctcgctggttgttgggttcag

SEQ ID NO: 75698 - DNA, 75 bp, synthetic construct
  source 1..75: mol_type = other DNA
gtattgagacaaaagaagtgaacggtatcacggaaaccttcaggatccgcccgcaggtgacggccggtgtctcct

SEQ ID NO: 75699 - DNA, 75 bp, synthetic construct
  source 1..75: mol_type = other DNA
cgctggagcaggatgcggacctcatcatgtttatttaccgggatgaggtttataaccccggcacccctgatgccg

SEQ ID NO: 75700 - DNA, 75 bp, synthetic construct
  source 1..75: mol_type = other DNA
cgccttgatccgcgagcggcagcgcgagggcatcgcgctcgccaagcagcgcggggcctaccgtggcaggaagaa

SEQ ID NO: 75701 - DNA, 75 bp, synthetic construct
  source 1..75: mol_type = other DNA
atgcagaccttgccaactattacgaccgcatcagttcgttgcaggagagacgtttacgtcttccggtgcggcgga

SEQ ID NO: 75702 - DNA, 75 bp, synthetic construct
  source 1..75: mol_type = other DNA
caccattgatgaactgtggcgggatatgcgctgggcagtggcgcgcatccaggacaagccgcgctgcatcgtgag

SEQ ID NO: 75703 - DNA, 75 bp, synthetic construct
  source 1..75: mol_type = other DNA
agcggtttcacctccgacagcaaccgtcagtttgccgccattggcgcagaatttaatgcctggaaatgggcacag

SEQ ID NO: 75704 - DNA, 75 bp, synthetic construct
  source 1..75: mol_type = other DNA
aagaatggatagcgatgatatctctttaccagacagattattcttacaggaaaaatttttagatatgaataaatc

SEQ ID NO: 75705 - DNA, 75 bp, synthetic construct
  source 1..75: mol_type = other DNA
atgaaactgacaacacatcatctacggacaggggccgcattattgctggccggaattctgctggcaggttgcgac

SEQ ID NO: 75706 - DNA, 75 bp, synthetic construct
  source 1..75: mol_type = other DNA
cgctggataccaataccctggctgataacgtcgatttagataacgcggtcgctaacgttgttcccacccgtgggg

SEQ ID NO: 75707 - DNA, 75 bp, synthetic construct
  source 1..75: mol_type = other DNA
gtagtggaaatgcgcagcaggaaaaaccccgctttttccagagtacattactccacggccttccggctggctgga

SEQ ID NO: 75708 - DNA, 75 bp, synthetic construct
  source 1..75: mol_type = other DNA
aagccgaaagcggcgaagaaagacgcgagaaaagcgaaaaagccatcggcgaaaacgcagaaaatagctgcagcg

SEQ ID NO: 75709 - DNA, 75 bp, synthetic construct
  source 1..75: mol_type = other DNA
cgcgtaactgacaacaaggggaaaacgcacgatgtgctgaccggaagtgatgacggtcgccacagcaacacgtct

SEQ ID NO: 75710 - DNA, 75 bp, synthetic construct
  source 1..75: mol_type = other DNA
caactagcctgtgacagaagtaaaaaattatctcgtctgaaaggcatcatggaacattccctaatgttaactctg

SEQ ID NO: 75711 - DNA, 75 bp, synthetic construct
  source 1..75: mol_type = other DNA
gaaaatgcgtcctcttggcctgccaacatggagtgataagctgctccaggaggtcatgcgtatgatccttgaggc

SEQ ID NO: 75712 - DNA, 75 bp, synthetic construct
  source 1..75: mol_type = other DNA
atatcgccgcatttctggacatgctggcctattccgaagggacggcgacgcatccgctgacgaaaaatcgtggtt

SEQ ID NO: 75713 - DNA, 75 bp, synthetic construct
  source 1..75: mol_type = other DNA
gctgatgcaaagtattcagtcactgcaggcgcatatcaccagcctgcttgaggatatccgggaaatagcagactg

SEQ ID NO: 75714 - DNA, 75 bp, synthetic construct
  source 1..75: mol_type = other DNA
gtgtggtttccgcactggctgaacgactggaaggtggacgttatattgatgtggacattaaccgggaaaaagctt

SEQ ID NO: 75715 - DNA, 75 bp, synthetic construct
  source 1..75: mol_type = other DNA
tgcaggactggttcctgaagtttgagctgaaaaccattcctaatgtcgctgaagttgcatccgtaggcggcgtgg

SEQ ID NO: 75716 - DNA, 75 bp, synthetic construct
  source 1..75: mol_type = other DNA
aaggatacgggacaacagtatgttgtcatatttacggataacaataaaattcgtgactataagaccggaattgtt

SEQ ID NO: 75717 - DNA, 75 bp, synthetic construct
  source 1..75: mol_type = other DNA
tggtgggatgatcacggctccgctgctgtccctgttcattattcctgccgcctacaaattaatctggctgcgcag

SEQ ID NO: 75718 - DNA, 75 bp, synthetic construct
  source 1..75: mol_type = other DNA
aattacgttgattggtggcgcgggatttaacgtggggtcacctcaacaggcaggtatatctgaacttgttttgcg

SEQ ID NO: 75719 - DNA, 75 bp, synthetic construct
  source 1..75: mol_type = other DNA
atgatggcaaaaattcacgaggtaaagctgcacgcaaaatattttgaccttgtgctggaaggaaagaaacgcgca

SEQ ID NO: 75720 - DNA, 75 bp, synthetic construct
  source 1..75: mol_type = other DNA
atgagtgaaggaccaggcgggccacagggagcgaccgcaggcggtacgctggcaatgcggatgctgtcgcagcgg

SEQ ID NO: 75721 - DNA, 75 bp, synthetic construct
  source 1..75: mol_type = other DNA
gataatgaagtgatgaaaagatcgataactaaatttgcagaagatcaggtacggattttctttccagaagaggag

SEQ ID NO: 75722 - DNA, 75 bp, synthetic construct
  source 1..75: mol_type = other DNA
accggtatatacaaatggtggtttcctaaccggaggtactatcagtgctttaagctcatataacaatggccaaat

SEQ ID NO: 75723 - DNA, 75 bp, synthetic construct
  source 1..75: mol_type = other DNA
gcgttcccctggcggggcgggctgtcgtgaacggagccagcggagctgtctccgcccaggcgggcttccatccct

SEQ ID NO: 75724 - DNA, 75 bp, synthetic construct
  source 1..75: mol_type = other DNA
gtcgttatttgctggacatcaggccgaacggacgcaagggaaagcgcgtgcgtaaggtatttgacaaaaaatcgg

SEQ ID NO: 75725 - DNA, 75 bp, synthetic construct
  source 1..75: mol_type = other DNA
cgaacaactggacgccgacaacgtacatcagtgatttactggttgtggtcatgaaaaaatccacggcagggatca

SEQ ID NO: 75726 - DNA, 75 bp, synthetic construct
  source 1..75: mol_type = other DNA
caaactatctaaataaaggtgatagtggctctcctttatttgcgtatgactctctggacaaaaaatgggttttag

SEQ ID NO: 75727 - DNA, 75 bp, synthetic construct
  source 1..75: mol_type = other DNA
aagagcagcatattgccgaaatggcggcctttttccgtgagcaggtggagagcaaaaaacatctcggtatgttgg

SEQ ID NO: 75728 - DNA, 75 bp, synthetic construct
  source 1..75: mol_type = other DNA
ttatgttggtggttattgcgagccgctttccagaaacagaaaaaccattacccctgaaaaccgaaaaatgccaca

SEQ ID NO: 75729 - DNA, 75 bp, synthetic construct
  source 1..75: mol_type = other DNA
aaggcgctaccattaccgatgaggcctcggcgctggaatattgcggttttcatccgcaacttgttgaaggccgcg

SEQ ID NO: 75730 - DNA, 75 bp, synthetic construct
  source 1..75: mol_type = other DNA
aggtaaggtctcgctcaacctggaaatcgaaccgtttgatgagaaccgtgtgaaaatcaaacacaaactctcata

SEQ ID NO: 75731 - DNA, 75 bp, synthetic construct
  source 1..75: mol_type = other DNA
cttgatgcggggatcattcagtcgtttacatcgcctcgtctggagcattctcggaagcctgatgtggttcgtgac

SEQ ID NO: 75732 - DNA, 75 bp, synthetic construct
  source 1..75: mol_type = other DNA
agattgttgatgaaatctgcgattttgtggcgaatcagcaggcggttttccttggcggtcagtacatcctgcagg

SEQ ID NO: 75733 - DNA, 75 bp, synthetic construct
  source 1..75: mol_type = other DNA
tcagggtgtctttctgaccatgattcagttacccgctggcgcgacgcaagagcggacgcaaaaagtgttggatca

SEQ ID NO: 75734 - DNA, 75 bp, synthetic construct
  source 1..75: mol_type = other DNA
atggcttataacatcactataggaaacaaaactattgaaataactgaaagcggatacaacattttaaaagctatt

SEQ ID NO: 75735 - DNA, 75 bp, synthetic construct
  source 1..75: mol_type = other DNA
gtcccagaaatggacagtgccattgaaggactggcgtatggcaatgagccgctttattatcgagtttggtgaccg

SEQ ID NO: 75736 - DNA, 75 bp, synthetic construct
  source 1..75: mol_type = other DNA
gggtcagggtgaaagcatagacctgaaacaagcaagacattactatgagcggtcatgtaataatgggcttaagaa

SEQ ID NO: 75737 - DNA, 75 bp, synthetic construct
  source 1..75: mol_type = other DNA
caccgactggatgaaaaaattaagacgtaaagaccagaccgcagcgttaaaggtggattccagaattgcccgcgc

SEQ ID NO: 75738 - DNA, 75 bp, synthetic construct
  source 1..75: mol_type = other DNA
aagcgagccctgaataaagatgaacctgtttttacgcccatcaaaggtgttgagccaccggagtggttcgctgaa

SEQ ID NO: 75739 - DNA, 75 bp, synthetic construct
  source 1..75: mol_type = other DNA
ggcgtcgccctaagccaacggcgcgcaaggcgctggccggaaaccccggcaagcgagccctgaacaaagatgaac

SEQ ID NO: 75740 - DNA, 75 bp, synthetic construct
  source 1..75: mol_type = other DNA
accaggcacaacagtcagagtggcaaccaaaggtgatctgatgatcatgatgttccgacaggagaaagcagagaa

SEQ ID NO: 75741 - DNA, 75 bp, synthetic construct
  source 1..75: mol_type = other DNA
aagcagatccatgactggaacgatctgattaaaccgggtgtttcggtgatcacgcctaatccgaaaagctctggt

SEQ ID NO: 75742 - DNA, 75 bp, synthetic construct
  source 1..75: mol_type = other DNA
cgatagtggtggtggagaacgtcgagcgcgtgatgatggaggataagctcccgccaaaagaagcgacggaaaaat

SEQ ID NO: 75743 - DNA, 75 bp, synthetic construct
  source 1..75: mol_type = other DNA
agtaaaaatttattcaatgaagcggaaatagctcatgccataaaatatgttgagggattgagagaaaaattcatg

SEQ ID NO: 75744 - DNA, 75 bp, synthetic construct
  source 1..75: mol_type = other DNA
gggggcactggcaggggccgtgctgggggcgatagtgaccatcgcagaaggttgcctgattatggccgcctgtgc

SEQ ID NO: 75745 - DNA, 75 bp, synthetic construct
  source 1..75: mol_type = other DNA
taccgtcattagattctgttccggcatgggtatatggtgtgacagggaaaataatatctgaattgtctgaacgtt

SEQ ID NO: 75746 - DNA, 75 bp, synthetic construct
  source 1..75: mol_type = other DNA
tctggatgaagcagggcgttacagcatggacgttgagtacggtcagtacagcgttattctgttggtggaaggctt

SEQ ID NO: 75747 - DNA, 75 bp, synthetic construct
  source 1..75: mol_type = other DNA
gtcagcatggctggtaaataactggtatcccacagcaagtatcagcgatttgctggttgtggtgatgaagaaagc

SEQ ID NO: 75748 - DNA, 75 bp, synthetic construct
  source 1..75: mol_type = other DNA
acgaatacgcagttctgcaatggaaaaatcatgttttacatgcgaaagctcaacaagaagggcgagagtcaatat

SEQ ID NO: 75749 - DNA, 75 bp, synthetic construct
  source 1..75: mol_type = other DNA
accattaaacatggcgggcaggcaaccggaaccatcgtcaacaccggtgcagaaggtggtccggagtctgaaaat

SEQ ID NO: 75750 - DNA, 75 bp, synthetic construct
  source 1..75: mol_type = other DNA
tttaccgtcagttactgccggaagtggatttgattatctggatcctgcgggcagatgaacgcgcgtatgccgccg

SEQ ID NO: 75751 - DNA, 75 bp, synthetic construct
  source 1..75: mol_type = other DNA
tcaccgcgcggtacgctggttcacttcgcaaccggaacacgccagcaatactgaaccgcaggttaccgtcagtgt

SEQ ID NO: 75752 - DNA, 75 bp, synthetic construct
  source 1..75: mol_type = other DNA
agctcgtgcgctcgttcttcccggcggcgcgcgccattcgctacacgccggaaatgaaaaccgcgatggtgctga

SEQ ID NO: 75753 - DNA, 75 bp, synthetic construct
  source 1..75: mol_type = other DNA
tttggtaataaagaaaatttgtttattgaagtactggaatatacctggaacgatattcgcgaaaaagagagagag

SEQ ID NO: 75754 - DNA, 75 bp, synthetic construct
  source 1..75: mol_type = other DNA
aggaaaacttattgataccgggttctgtatttttgccctcagcaagctggcaatggcgttatccagtacgcttga

SEQ ID NO: 75755 - DNA, 75 bp, synthetic construct
  source 1..75: mol_type = other DNA
tccggcctggatgttacagcttctgcgtaaagcccgggcccgcattatccacctgctggtcacactgtgggatca

SEQ ID NO: 75756 - DNA, 75 bp, synthetic construct
  source 1..75: mol_type = other DNA
atgcagaatgcagaaaatgtcagcgaatatctgtcattacgccatcaggggctgcagcaaagcattcagtcactg

SEQ ID NO: 75757 - DNA, 75 bp, synthetic construct
  source 1..75: mol_type = other DNA
tgctgaccggaagtgatgacggtcgccacagcaacacgtctctggcgtggggagctggcgtgcagtttaacccga

SEQ ID NO: 75758 - DNA, 75 bp, synthetic construct
  source 1..75: mol_type = other DNA
ggttgactctgccgccgcaaaactgatgcagaatgcagaaaatgtcagcgaatatctgtcattacgccatcaggg

SEQ ID NO: 75759 - DNA, 75 bp, synthetic construct
  source 1..75: mol_type = other DNA
tgctgcggcaatggggactgaatttccttttgatgaatacgcagaagtgcagaaactgccggtgatcgacgtgga

SEQ ID NO: 75760 - DNA, 75 bp, synthetic construct
  source 1..75: mol_type = other DNA
gctcatcgccttacccttcagttaggtgaacgcagaatgacgctggtcgatctgcccggcattggtgagacactg

SEQ ID NO: 75761 - DNA, 75 bp, synthetic construct
  source 1..75: mol_type = other DNA
atatcaaaacagacgcagttgagctgcgtaagaaagcactcgagctgtcacgcctgatgcgtcatcgtggcccgg

SEQ ID NO: 75762 - DNA, 75 bp, synthetic construct
  source 1..75: mol_type = other DNA
atactggaaggaatgccacagaggacctgcaatggacgatctgttgttgctgatggctgtaagtgtcagtgcggt

SEQ ID NO: 75763 - DNA, 75 bp, synthetic construct
  source 1..75: mol_type = other DNA
gcgaacaggtggatgagtcggcgctgttccgcatgatcggccagatgcgtgagattgtgaccagcgcgcagaagg

SEQ ID NO: 75764 - DNA, 75 bp, synthetic construct
  source 1..75: mol_type = other DNA
aaggacgtcaccattaacggcaagaccacctcacagttcctggcctcggtgattctggagaatctgcctccccgg

SEQ ID NO: 75765 - DNA, 75 bp, synthetic construct
  source 1..75: mol_type = other DNA
agcgctggggggaactgccaccactcaaagccttggcccggtatcgtctgtatctggccttggtgctgtctgcaa

SEQ ID NO: 75766 - DNA, 75 bp, synthetic construct
  source 1..75: mol_type = other DNA
aggaaattccgcgaaggcggcaaaaacgtccgagacgaacgccaggtcttctgagacggcagcgggacagagcgc

SEQ ID NO: 75767 - DNA, 75 bp, synthetic construct
  source 1..75: mol_type = other DNA
accaacactggcatcgctccagcttgaatcactcaaccccaaatggtcccagcaacaacaaaattctttcaagtg

SEQ ID NO: 75768 - DNA, 75 bp, synthetic construct
  source 1..75: mol_type = other DNA
ctgggagaacaggtacaacatgtgctgaatgataatcccttctccggccacctgtttatcttccgtggccgacgg

SEQ ID NO: 75769 - DNA, 75 bp, synthetic construct
  source 1..75: mol_type = other DNA
ggtcgttctccggctgaaaacagcacggaaaatgagcctcaacccgtagagcaaccagagccggttcagcccgga

SEQ ID NO: 75770 - DNA, 75 bp, synthetic construct
  source 1..75: mol_type = other DNA
atgatctcactcccatcaggtacccgcatctggctcgttgccggcgttaccgatatgcgtaaatccttcaacgga

SEQ ID NO: 75771 - DNA, 75 bp, synthetic construct
  source 1..75: mol_type = other DNA
tcttgaagttacgaagggcagaagtgccagcgacatgatgacgggaatgccgaaatcagcccctaactattatct

SEQ ID NO: 75772 - DNA, 75 bp, synthetic construct
  source 1..75: mol_type = other DNA
ctgtaacctgttcgacctcgaccagctacgcatggagtacagcccagacgaataccagaacctgctgatgtgcga

SEQ ID NO: 75773 - DNA, 75 bp, synthetic construct
  source 1..75: mol_type = other DNA
tggggagttcggtttattaccatgcttggttttttgtcagtgtgttcaaatcgtcaggtgatatatttatagttt

SEQ ID NO: 75774 - DNA, 75 bp, synthetic construct
  source 1..75: mol_type = other DNA
ggggatattatttgatcaaccagcatacgcttggcctggtttatctggtgcgccgtaaaaccccgtccttcaggg

SEQ ID NO: 75775 - DNA, 75 bp, synthetic construct
  source 1..75: mol_type = other DNA
tttttctcgggacaaattccaacacagcgcagagtcataacggcgacctgtatgtcgatgaaatcttctggatcc

SEQ ID NO: 75776 - DNA, 75 bp, synthetic construct
  source 1..75: mol_type = other DNA
atgatatctctccctgccggttcgcgtatctggctggtagccggtatcaccgacatgcgaaatggttttaacggc

SEQ ID NO: 75777 - DNA, 75 bp, synthetic construct
  source 1..75: mol_type = other DNA
caattcatcattgccaaaatatggtgttggcacgcccggccatcagggcgctggccaggaaggggcaaggctata

SEQ ID NO: 75778 - DNA, 75 bp, synthetic construct
  source 1..75: mol_type = other DNA
aggcgatatctgcgcgattgtgagcctttatggggacatgacgtggattaccaccctatagcacaatattgctca

SEQ ID NO: 75779 - DNA, 75 bp, synthetic construct
  source 1..75: mol_type = other DNA
ctttatggggacatgacgtggattaccaccctatagcacaatattgctcaggagctgcgttgttgaaggctgggc

SEQ ID NO: 75780 - DNA, 75 bp, synthetic construct
  source 1..75: mol_type = other DNA
ccatctcccctgcgccagtcttcagcccgtaaaccgttacctgcctcacttccccgtgaaacccgggtcatccgt

SEQ ID NO: 75781 - DNA, 75 bp, synthetic construct
  source 1..75: mol_type = other DNA
ggggatgtagagaaagctgctaatgtttttgtgaggaatgaactcatccctttacaaaaaagactagaagagctg

SEQ ID NO: 75782 - DNA, 75 bp, synthetic construct
  source 1..75: mol_type = other DNA
tcagcgcgtgcagccagcacgtcagccggacaggccgcgacttcggctcaggaggcgtcttccagcgcaggaacg

SEQ ID NO: 75783 - DNA, 75 bp, synthetic construct
  source 1..75: mol_type = other DNA
atgcgtagcagtatgcggctgacttgggcgaatatgcgtctggtggcacccgcagtactgagctggttgctggca

SEQ ID NO: 75784 - DNA, 75 bp, synthetic construct
  source 1..75: mol_type = other DNA
gcatcaacaaaggccactgaagcctcaaaaagtgctgccgctgcagagtcctcaaaaagcgcggcggccaccagt

SEQ ID NO: 75785 - DNA, 75 bp, synthetic construct
  source 1..75: mol_type = other DNA
aagttctccctgagcgttcggctgaccaactccgtccgtactctgtctgtgaaagaggtggagcgaggaatgcgc

SEQ ID NO: 75786 - DNA, 75 bp, synthetic construct
  source 1..75: mol_type = other DNA
gggcaaaagcgccactggtaaaccactgccagtgatcactatcacacgcaaggacggcgacagtcaccgatttac

SEQ ID NO: 75787 - DNA, 75 bp, synthetic construct
  source 1..75: mol_type = other DNA
atacgtggaagctggttgacgttccgggctggattgacaaaaaagccttcgccagcgttaaaggaatgaatgaac

SEQ ID NO: 75788 - DNA, 75 bp, synthetic construct
  source 1..75: mol_type = other DNA
tgacattgttcattcgagagaaaatcagacaagattttctcagtgcagaagttggtgtaacgggatgtaactttg

SEQ ID NO: 75789 - DNA, 75 bp, synthetic construct
  source 1..75: mol_type = other DNA
cagacaagattttctgagtgctgaagttggcgtaacggggtgtaactttgccgttgcagaaacagggtcagtttg

SEQ ID NO: 75790 - DNA, 75 bp, synthetic construct
  source 1..75: mol_type = other DNA
tgtcagaagtcgcggcgaaggatgagtttctgaatatcaagaacgtgagccgggatgacatgatggctgcgcacc

SEQ ID NO: 75791 - DNA, 75 bp, synthetic construct
  source 1..75: mol_type = other DNA
cggaaatcgccctcagccagtcgcgcagccagaaggagctggaagatgtgctctactctaatctcgaagagctga

SEQ ID NO: 75792 - DNA, 75 bp, synthetic construct
  source 1..75: mol_type = other DNA
gcacctggcacggctgggacggcagggacggaagtcgctgtcgttctcaaaatcggtggagctgcatgacaaagt

SEQ ID NO: 75793 - DNA, 75 bp, synthetic construct
  source 1..75: mol_type = other DNA
agccagtgccaccgccgccggaaaatcggcagaaagcgccgcatcgtccgcttcaacagccacaacgaaggctgg

SEQ ID NO: 75794 - DNA, 75 bp, synthetic construct
  source 1..75: mol_type = other DNA
gttgcgtcattctcgctacaactggcagaaggtcgggcagatctctacacggaaatgcctgtgaaggtcagtggc

SEQ ID NO: 75795 - DNA, 75 bp, synthetic construct
  source 1..75: mol_type = other DNA
taaagttatatttttctatggaggaaatataggtcatgctcaagacatggcaaatttaatgagattggcaatagg

SEQ ID NO: 75796 - DNA, 75 bp, synthetic construct
  source 1..75: mol_type = other DNA
cggctgtgggtctacgtccgtgatgaccgtaacgccggttcacagatgcctgcggcggtctggttcgcgtacagc

SEQ ID NO: 75797 - DNA, 75 bp, synthetic construct
  source 1..75: mol_type = other DNA
ccatgcgtattcaccaacaacatcctgcatcccgtctttttccgttctgtaccggcaaataccgctggcacggca

SEQ ID NO: 75798 - DNA, 75 bp, synthetic construct
  source 1..75: mol_type = other DNA
cctgcctgctggccgtgattccggggcttaaccttgccaccagtgatgccgcggctgcagccggtcttgtgatga

SEQ ID NO: 75799 - DNA, 75 bp, synthetic construct
  source 1..75: mol_type = other DNA
gatgaacgggaaagggagcagtgcccgcccgtcactgacggtgtcgaatctgttcgggctggttaccgggatggc

SEQ ID NO: 75800 - DNA, 75 bp, synthetic construct
  source 1..75: mol_type = other DNA
tcgacggcctggcgcgaaccttccgcgccgccgtacaccacagctcaccgattgcagtaaagtgcaacattctga

SEQ ID NO: 75801 - DNA, 75 bp, synthetic construct
  source 1..75: mol_type = other DNA
gtccggacgcttcgcaaccggacggacagacagcagaacaggattttttaacccgacatcctgatgcagttgtgt

SEQ ID NO: 75802 - DNA, 75 bp, synthetic construct
  source 1..75: mol_type = other DNA
tccttcgggatgacctgtgcctcgcctgcggcgattggcctagtgattgccgacgctgcggcgaaatccgccgtg

SEQ ID NO: 75803 - DNA, 75 bp, synthetic construct
  source 1..75: mol_type = other DNA
ctaacacggtaaaaaccagctcacctctttctcccagcaacagtcctgccagtgcaacaactatttttaaggtaa

SEQ ID NO: 75804 - DNA, 75 bp, synthetic construct
  source 1..75: mol_type = other DNA
cacggatatgcccctgggcagctactggttccggggattcctgaagcagccacccagaacgaagccggagtggct

SEQ ID NO: 75805 - DNA, 75 bp, synthetic construct
  source 1..75: mol_type = other DNA
acggggcgctgtttcccggtcgcatcatgctggcgaacacctgtatgtggacctaccgctctgatgagtgtggtt

SEQ ID NO: 75806 - DNA, 75 bp, synthetic construct
  source 1..75: mol_type = other DNA
ggctcatgcccggagaaaaatccacgatgtgcatgcaagagtgcccaccgatatcacccctgcagcgtatcggtg

SEQ ID NO: 75807 - DNA, 75 bp, synthetic construct
  source 1..75: mol_type = other DNA
atgatcactcactatgatataaaaacggagacacagaaactaaaggatgtactctctgtagagggggttaatatc

SEQ ID NO: 75808 - DNA, 75 bp, synthetic construct
  source 1..75: mol_type = other DNA
gaaatacaactcttacagaggccggtatgggaaagtggcgggtaatgtgctgaaccggcagttcagtgcggataa

SEQ ID NO: 75809 - DNA, 75 bp, synthetic construct
  source 1..75: mol_type = other DNA
tttgcaaaaattgatgcaagcgcttaattgttggctggatgaaaatataattacatttaataaatatattttgta

SEQ ID NO: 75810 - DNA, 75 bp, synthetic construct
  source 1..75: mol_type = other DNA
tgttgttaatattccagaggatatacagcaacacattccggaatgcggtgaaacaacagctctgttgggtttaat

SEQ ID NO: 75811 - DNA, 75 bp, synthetic construct
  source 1..75: mol_type = other DNA
atggtaaatctccctcctgaactggggtcacctgatgtatgggctggtggaggtatcgggctgattgcaggtctg

SEQ ID NO: 75812 - DNA, 75 bp, synthetic construct
  source 1..75: mol_type = other DNA
tcaaaaaactcaccgaacagtacaacgttacgtatatcggtatcgactcgaccggcgttggtcacggggtttatg

SEQ ID NO: 75813 - DNA, 75 bp, synthetic construct
  source 1..75: mol_type = other DNA
gcgccatatcctgagtgtactgccagaatggccttccaaccgtgttgacgaactcctgccatggaacgtagcact

SEQ ID NO: 75814 - DNA, 75 bp, synthetic construct
  source 1..75: mol_type = other DNA
gaagcgcgcgaaggtgaatacatggccggtgaggctgacaatgtttttgccctgaccacggtatatgccacgaaa

SEQ ID NO: 75815 - DNA, 75 bp, synthetic construct
  source 1..75: mol_type = other DNA
ccggaatcaccacacaaaacaatcaacataatcaggcagaacaagcgccccctgcacaaataccgcaatccgaat

SEQ ID NO: 75816 - DNA, 75 bp, synthetic construct
  source 1..75: mol_type = other DNA
agacatccgaaacgaacgcgaaagcgtcggaaacccgtgcagaatcctcaaaaacggcagcggcatcgtccgcca

SEQ ID NO: 75817 - DNA, 75 bp, synthetic construct
  source 1..75: mol_type = other DNA
ttgaagaaggatccataggaaaaaaaacattggatatgtttggtttattcaatgttacccaaatggcattagaga

SEQ ID NO: 75818 - DNA, 75 bp, synthetic construct
  source 1..75: mol_type = other DNA
caatccatggtttggagtaacagctcaagttgttcgtaaccacggcatagaactacctatagtcaaaacagataa

SEQ ID NO: 75819 - DNA, 75 bp, synthetic construct
  source 1..75: mol_type = other DNA
tattgatttactgcccgagagcaaaaagcagttgtacaactaccagcgtaaatccaaagtgttgatggcggattt

SEQ ID NO: 75820 - DNA, 75 bp, synthetic construct
  source 1..75: mol_type = other DNA
aacccaacgctgccgaagccaccattattctgcgcggtctgtcggcggtctatgaacagtctcacggcgtgctga

SEQ ID NO: 75821 - DNA, 75 bp, synthetic construct
  source 1..75: mol_type = other DNA
caaattatacggaagaatgggtcatcagacctggtgagtttgacttaaagtatggcagcactccgttgcagagca

SEQ ID NO: 75822 - DNA, 75 bp, synthetic construct
  source 1..75: mol_type = other DNA
cggttgtgttccgttatgccgcgctggaatcttcaaaacaggttcctgttacgtatgaatggttgcgtctcgaag

SEQ ID NO: 75823 - DNA, 75 bp, synthetic construct
  source 1..75: mol_type = other DNA
aagggaaagctgcacgttatcagcaagcgttacactcagcgcattgagcgacataatctgaatctgagacaacat

SEQ ID NO: 75824 - DNA, 75 bp, synthetic construct
  source 1..75: mol_type = other DNA
ctgcggcgacgaatcagctcaagcataaaagccagacttcagccgaagcattcagcttcggtgatcccgttcctg

SEQ ID NO: 75825 - DNA, 75 bp, synthetic construct
  source 1..75: mol_type = other DNA
gtgaacgcacgttggccacgctggagcgtcttctgggcctgctgtcggcctttgaggtcgtggtatggatgacgg

SEQ ID NO: 75826 - DNA, 75 bp, synthetic construct
  source 1..75: mol_type = other DNA
agaagctggaagaaatcttccattcctccatgttcaactaccagcaccactggtgggaagctggaaaaaccaacc

SEQ ID NO: 75827 - DNA, 75 bp, synthetic construct
  source 1..75: mol_type = other DNA
tgaacaccggggcgcgccggatgtggtcaccatccgcgcccggagtgcagattttcgcgggacgctcaattcccg

SEQ ID NO: 75828 - DNA, 75 bp, synthetic construct
  source 1..75: mol_type = other DNA
tagccgcgcggcacaagctgaagatggcactgggtaaagacctgtcggataagcccgtggagcatatagaccaga

SEQ ID NO: 75829 - DNA, 75 bp, synthetic construct
  source 1..75: mol_type = other DNA
gaactcattatgagtctcctcttagaatgcacatcgatagcgacatactaacgccttcatcagagcctattaatc

SEQ ID NO: 75830 - DNA, 75 bp, synthetic construct
  source 1..75: mol_type = other DNA
gcgcgctggccatgaactggctggcgaaatatatggcgacaatgcctccggttgtgttgcctgcgcctgcgggcg

SEQ ID NO: 75831 - DNA, 75 bp, synthetic construct
  source 1..75: mol_type = other DNA
tactcgaccgccgtgacattctggattacgtcgaatgcatcagtaacggcagatggtatgagccaccggtcagct

SEQ ID NO: 75832 - DNA, 75 bp, synthetic construct
  source 1..75: mol_type = other DNA
gaactcaataacgtcgtcggtaaaaacatttgctgggctacttctgtattaagagatggttctgaattttatgat

SEQ ID NO: 75833 - DNA, 75 bp, synthetic construct
  source 1..75: mol_type = other DNA
gtgggaaaggaactggatgatatctgcaccagctgtccgtatatcgatgctgtaaaacggcacaaacaacagctc

SEQ ID NO: 75834 - DNA, 75 bp, synthetic construct
  source 1..75: mol_type = other DNA
gattgccggtcccagagaaaagccgatgcgcaccgtgcatccggataaaatctaccgtgaaattatatggttctg

SEQ ID NO: 75835 - DNA, 75 bp, synthetic construct
  source 1..75: mol_type = other DNA
tggtggggtgaagatggcaatggtgacgccttccttacggcatgggcatggtacgccgactggcaggccagccag

SEQ ID NO: 75836 - DNA, 75 bp, synthetic construct
  source 1..75: mol_type = other DNA
ttaccggtctggcaaaaagcctgcgggctgccgtgcatcacagctcgccgatttacgtcaaacgcaatattctgg

SEQ ID NO: 75837 - DNA, 75 bp, synthetic construct
  source 1..75: mol_type = other DNA
aacggtgtttctaacggtgaactggcatcagccctagatgagtccccggcgaacatcaatcgagcactcaatacc

SEQ ID NO: 75838 - DNA, 75 bp, synthetic construct
  source 1..75: mol_type = other DNA
acaggcgcatcagcagtcagccagtggtcacaaaatgggtcagtacataaggtagtgtctgcggccagtgtgaat

SEQ ID NO: 75839 - DNA, 75 bp, synthetic construct
  source 1..75: mol_type = other DNA
aacactgaaccagttttgccaacatggaaccatcagtggttgcctgacagtaaaactctctgccgaagtgtgcga

SEQ ID NO: 75840 - DNA, 75 bp, synthetic construct
  source 1..75: mol_type = other DNA
cggctctttgtgaatccggactggtaaaaaaagtttcccggaaaggtgaaaaagggaactcgagcaatatttatc

SEQ ID NO: 75841 - DNA, 75 bp, synthetic construct
  source 1..75: mol_type = other DNA
gcaaggcagcagggggacaaaaaagcaggtgcgccggtactggataacccacgccttgatgccatcctggctgct

SEQ ID NO: 75842 - DNA, 75 bp, synthetic construct
  source 1..75: mol_type = other DNA
caataaccggcaggcggaaaaccctgcgctgaccagcctgatggacgagtacgtctgctttgcgtggcgaacgac

SEQ ID NO: 75843 - DNA, 75 bp, synthetic construct
  source 1..75: mol_type = other DNA
tgccttgcttcagggggacctggcgaaaatcaatccgccgaagcctgtggaaaatggcaatggcaccggaggtga

SEQ ID NO: 75844 - DNA, 75 bp, synthetic construct
  source 1..75: mol_type = other DNA
cggatttatacctggataaagagcagtaaaggcatccgggttccgaccacgaagaaatcactttcccaaattaac

SEQ ID NO: 75845 - DNA, 75 bp, synthetic construct
  source 1..75: mol_type = other DNA
ctgttcaatgccatgaacggcaaccgcgctgaaatgagcccggaagccgccggtattgctgcctgtctgatgacg

SEQ ID NO: 75846 - DNA, 75 bp, synthetic construct
  source 1..75: mol_type = other DNA
ttaagccatgtctggaacgactggagcatgtacgcgacagccagctatctgcatcttttcgttttatggcaagcc

SEQ ID NO: 75847 - DNA, 75 bp, synthetic construct
  source 1..75: mol_type = other DNA
cgttaagccagaagaaatccgcaaaacatgggaaaaggtggcagcggaaaccctgcgtctggatgttattccgcc

SEQ ID NO: 75848 - DNA, 75 bp, synthetic construct
  source 1..75: mol_type = other DNA
aggcttacgaagaatacttcgaaggccttgccgaaggcgaagaagctctcagcttcagtgagtttaaacaggcac

SEQ ID NO: 75849 - DNA, 75 bp, synthetic construct
  source 1..75: mol_type = other DNA
taatactcagagtaatcgtgtgggttataaatcggatgggcgcatcagcggttacagcgctgggctgtacgcgac

SEQ ID NO: 75850 - DNA, 75 bp, synthetic construct
  source 1..75: mol_type = other DNA
atgaagcccctcctcctggcaaataattctaatgaatatcccggtttgttttcagcgatacagcataaacaacaa

SEQ ID NO: 75851 - DNA, 75 bp, synthetic construct
  source 1..75: mol_type = other DNA
gaaagaggtcgatttactccttcgcggcggcagtattccgtcaggagcaggcttgcgtatcttctatcggaacca

SEQ ID NO: 75852 - DNA, 75 bp, synthetic construct
  source 1..75: mol_type = other DNA
tgcgtttgagcaactccgtcggaaaagaaaccgccgtaaacccgtgctctatgaactcattccgggttcgctggc

SEQ ID NO: 75853 - DNA, 75 bp, synthetic construct
  source 1..75: mol_type = other DNA
atgagtatggagctgatggttaaagcgatgaaaattcgagtgggaaatccattgcgaaaactggttctgattaag

SEQ ID NO: 75854 - DNA, 75 bp, synthetic construct
  source 1..75: mol_type = other DNA
tgattattcctgcctgtactgtacaaaatgctgaagttaactggggtgatattgaaattcagaagctggtacaga

SEQ ID NO: 75855 - DNA, 75 bp, synthetic construct
  source 1..75: mol_type = other DNA
ggcgcgaacgacgggcagaaaggaattggtctggtgatgctggtgctggtggggattgctcccgccgggtttgtc

SEQ ID NO: 75856 - DNA, 75 bp, synthetic construct
  source 1..75: mol_type = other DNA
atgaacaagcagcagcaaactgtactcaacatggcgggattcataaaaagccagagcctgacactgctcgaaaag

SEQ ID NO: 75857 - DNA, 75 bp, synthetic construct
  source 1..75: mol_type = other DNA
agcaggttgaatgcgattacatgttgtctgcattaaggcgcatggagttgagagggcaccttaatgaaatatatg

SEQ ID NO: 75858 - DNA, 75 bp, synthetic construct
  source 1..75: mol_type = other DNA
ctgacttgttggcagatagaaaaaagcgttttcgtaaaaatccatctcttggaatgggcgactggcgattcttta

SEQ ID NO: 75859 - DNA, 75 bp, synthetic construct
  source 1..75: mol_type = other DNA
gctgggatatcatccgcatgctgcgcactgccggaaagggtatgccggtcttactgctgacagccctcggcacga

SEQ ID NO: 75860 - DNA, 75 bp, synthetic construct
  source 1..75: mol_type = other DNA
atgaagaaaccgggaaatttttcacagcagaattttcgaacaagtgccgaacgccacgttgcacgccagcacttc

SEQ ID NO: 75861 - DNA, 75 bp, synthetic construct
  source 1..75: mol_type = other DNA
acccgccccggccggtacgggcactgcgcgccgtcgcggcagtgggctcgccagccgtatcagcgaacagtccga

SEQ ID NO: 75862 - DNA, 75 bp, synthetic construct
  source 1..75: mol_type = other DNA
atcgagttcagcggcccggagccgctgggcgctgatgatctgcgcatcctgcaagggctggtggccatggctggg

SEQ ID NO: 75863 - DNA, 75 bp, synthetic construct
  source 1..75: mol_type = other DNA
ccagagcctgacgctgctcgaaaaactggacgcactcgatgctgacgaacaggccgccatgtgtgagaagctgca

SEQ ID NO: 75864 - DNA, 75 bp, synthetic construct
  source 1..75: mol_type = other DNA
atgaatgcctggcttgtccccgatcgcattgaagagcagtcatgggcacaacactaccggaaaattgcccgtgaa

SEQ ID NO: 75865 - DNA, 75 bp, synthetic construct
  source 1..75: mol_type = other DNA
tgcgtgctgccagttaatgactccgctgaatgatgccctgtacagttatgtgatgaacacccgcaaggttcacac

SEQ ID NO: 75866 - DNA, 75 bp, synthetic construct
  source 1..75: mol_type = other DNA
agatattttgcctccgtaactattgaaggcaggcttgagatggacatcacatacgactttgacttccggtcagaa

SEQ ID NO: 75867 - DNA, 75 bp, synthetic construct
  source 1..75: mol_type = other DNA
tcccggaccgatgatggattgcttatttatctgtacaatcgtcatcaaaatggcagtatcggtgattctataact

SEQ ID NO: 75868 - DNA, 75 bp, synthetic construct
  source 1..75: mol_type = other DNA
ttacttcacgttgttaacggaagagtacggaaagtacatggatggcccaagggtaattgctgttggggtaatcct

SEQ ID NO: 75869 - DNA, 75 bp, synthetic construct
  source 1..75: mol_type = other DNA
gtggcggaaatcagaaagactttactgtccagatgacatgtccttatcatttgggaacaatgaaggttacgatat

SEQ ID NO: 75870 - DNA, 75 bp, synthetic construct
  source 1..75: mol_type = other DNA
tcgcccggacagcatacttaaagccggtcagcatcggtatcagcgggcatttattcagcgattaaaaaatggtcg

SEQ ID NO: 75871 - DNA, 75 bp, synthetic construct
  source 1..75: mol_type = other DNA
tcgggcaatccccgccagtgcgcaagattccacccggctggagcacagcctggcaacgcttgccgagcaactgaa

SEQ ID NO: 75872 - DNA, 75 bp, synthetic construct
  source 1..75: mol_type = other DNA
acgtctgaatatactggctggtctgatgaatatattaatactggtgtaagtatgcccgcctgttccactggtatt

SEQ ID NO: 75873 - DNA, 75 bp, synthetic construct
  source 1..75: mol_type = other DNA
tgcgccatattctgagcgtactgccggaatggccttccaaccgagttggcgaactcctgccatggaacgtagtac

SEQ ID NO: 75874 - DNA, 75 bp, synthetic construct
  source 1..75: mol_type = other DNA
gatagcactgctgcggcatggtccgaatgggcacagatctatacgtcaaaagattccgttcccggcgttaatacc

SEQ ID NO: 75875 - DNA, 75 bp, synthetic construct
  source 1..75: mol_type = other DNA
atggtgataaaagggcttgatcaggctattgacaatctgagccggtttcgtaaaaacgccattcctgctgcttca

SEQ ID NO: 75876 - DNA, 75 bp, synthetic construct
  source 1..75: mol_type = other DNA
atcttggtacaggaaaaggttattcagtgcttgaattaatcactacatttgaaaaattaacaaacattaaggtca

SEQ ID NO: 75877 - DNA, 75 bp, synthetic construct
  source 1..75: mol_type = other DNA
ctggatgcgaaacgtgacgcgctggatatgtggacggagcggttagggatactggcgggaacacatgaaaacgta

SEQ ID NO: 75878 - DNA, 75 bp, synthetic construct
  source 1..75: mol_type = other DNA
tccgcaatgaactcattccattacaggagagaataaagtcaataaatgaatggttagatatggaagtaataaaat

SEQ ID NO: 75879 - DNA, 75 bp, synthetic construct
  source 1..75: mol_type = other DNA
acagcgagcataccctgcccgaccttgcccgactgctcagcgccgatcgctggctgaacccagtacgtccgctgc

SEQ ID NO: 75880 - DNA, 75 bp, synthetic construct
  source 1..75: mol_type = other DNA
ctattatctggtggatgcgtcttatcagcaggcggtgaatttgctgccggaagaaaaacgtaaattgctggtgca

SEQ ID NO: 75881 - DNA, 75 bp, synthetic construct
  source 1..75: mol_type = other DNA
ggaacgcaaacacatttccgaaagcgaaacccgctttcggaacgcgatggaatattcgccatcggcatggcatta

SEQ ID NO: 75882 - DNA, 75 bp, synthetic construct
  source 1..75: mol_type = other DNA
tgatgaaacctggatactgttcagtgccatgaacggtaaccgcgctgaaatgagcccgaaagcagctggcattac

SEQ ID NO: 75883 - DNA, 75 bp, synthetic construct
  source 1..75: mol_type = other DNA
tttactattttgcgtcgccacgttctgcataacgcgttacctccggttattcctcgcctgggcttacagttttcc

SEQ ID NO: 75884 - DNA, 75 bp, synthetic construct
  source 1..75: mol_type = other DNA
cgcatgggccaatgacgtgcgcacaatgcggatgctggatggcagaagccacagacaaatttgcgaaatgtttgg

SEQ ID NO: 75885 - DNA, 75 bp, synthetic construct
  source 1..75: mol_type = other DNA
tctcggtaaaggatttcgctggcagcccatccacacccaacggctgtacgactgcctgcaaccggaagccgcacg

SEQ ID NO: 75886 - DNA, 75 bp, synthetic construct
  source 1..75: mol_type = other DNA
gtttttctctcctgaccggatcaatgaatgctgtcagggtcctgccagcactatggggaatggtgacgggttccg

SEQ ID NO: 75887 - DNA, 75 bp, synthetic construct
  source 1..75: mol_type = other DNA
atgggaaagagtaagaagaaccgcgctgtgtcgacgaaccagattcagcacaaaagccagacttcagccgaagca

SEQ ID NO: 75888 - DNA, 75 bp, synthetic construct
  source 1..75: mol_type = other DNA
ctgctgcgacgctactggagcgggacgaaaaagcgtgaccgtattcaccgcattccggaagatcgcaaaaagaaa

SEQ ID NO: 75889 - DNA, 75 bp, synthetic construct
  source 1..75: mol_type = other DNA
actgcacttgatgacgatgagaagggagtaactttaagttacacccttggtggtgagcagaatttaagcattgtg

SEQ ID NO: 75890 - DNA, 75 bp, synthetic construct
  source 1..75: mol_type = other DNA
tgaacagcactacgccctggtaaccggcaataaaaaactcatcaataccctggcgcaacagatactcgaagcgca

SEQ ID NO: 75891 - DNA, 75 bp, synthetic construct
  source 1..75: mol_type = other DNA
taaatgttcatggagttaacaaccctcaggaggcggctaatctgatcgctgacaagcagggggctgtaaatgcca

SEQ ID NO: 75892 - DNA, 75 bp, synthetic construct
  source 1..75: mol_type = other DNA
tagaagtggcatgtcgaatggcgaaagtgctcgtcgctatttatccttcttcattaagccttgaacggcttattt

SEQ ID NO: 75893 - DNA, 75 bp, synthetic construct
  source 1..75: mol_type = other DNA
ggcaataacactgggccgcgctttaagtctgagttgattaacccgcgcaaaggaacgccgacaagctacatcgcg

SEQ ID NO: 75894 - DNA, 75 bp, synthetic construct
  source 1..75: mol_type = other DNA
atgtcgggaaatgtcaccactgcaggtgatgtgaacgttatgcctggggggacactgcgtgtcgctaaaaccaca

SEQ ID NO: 75895 - DNA, 75 bp, synthetic construct
  source 1..75: mol_type = other DNA
tgtcagcattgatgagcagtattatccagcatgaaaatggaagaaatatctattcccgagagctgattaataagg

SEQ ID NO: 75896 - DNA, 75 bp, synthetic construct
  source 1..75: mol_type = other DNA
agaaccgcttatgaaatcaacgaagagccgaccgcctatggcgatcacggcattcgtatttatggcatctggtca

SEQ ID NO: 75897 - DNA, 75 bp, synthetic construct
  source 1..75: mol_type = other DNA
gctgccagagcaaacgcagcgacagtatcggtgttctctgctctgcggtcttctggtcacaaaacaatggcctgc

SEQ ID NO: 75898 - DNA, 75 bp, synthetic construct
  source 1..75: mol_type = other DNA
tctgacgcccgggtgggtgtcattcaatggtgaaaaaccggagattgccatcgttccccgtagtctgcaccggct

SEQ ID NO: 75899 - DNA, 75 bp, synthetic construct
  source 1..75: mol_type = other DNA
gtgacgtttgtaccgctgagcccgatcccattaaaagatcgcacttccatgatcttcctccagtacggtcaaatc

SEQ ID NO: 75900 - DNA, 75 bp, synthetic construct
  source 1..75: mol_type = other DNA
ttggcgcgcccggaatgcctgctacaacaaaaggtattcgccaggcattacaacgttacgtacaagggaaaagct

SEQ ID NO: 75901 - DNA, 75 bp, synthetic construct
  source 1..75: mol_type = other DNA
tgtttacctgaagtgacgcagcaggcattacgtgaacgctacgccctgcaactgatgacgcaaaaagccgatgaa

SEQ ID NO: 75902 - DNA, 75 bp, synthetic construct
  source 1..75: mol_type = other DNA
gatacgccgcatcgcaaaccggtgccagcgccgagtcggctatgtcctccctcgaagggctggccggtttcatgc

SEQ ID NO: 75903 - DNA, 75 bp, synthetic construct
  source 1..75: mol_type = other DNA
caaccccgagaaagttcgtgctgacatccgcgataaactgattcagtaccaggaagaatgctttactgtgctgca

SEQ ID NO: 75904 - DNA, 75 bp, synthetic construct
  source 1..75: mol_type = other DNA
atgaaaagtatagcaaaggcacaaaacgatttcaccatcttcaaattcggcgacagtgaaatccgcgtcatcaac

SEQ ID NO: 75905 - DNA, 75 bp, synthetic construct
  source 1..75: mol_type = other DNA
tagcttcatggctcggctggctgaaatggaaaaggaactcagtgaggcaaaacaggctgtcattctcaacgcacc

SEQ ID NO: 75906 - DNA, 75 bp, synthetic construct
  source 1..75: mol_type = other DNA
attgtggatgccaatcgcacgcgtaaggatttcatttctgattccatcctcgcgcttcagccgaaagtggtgggc

SEQ ID NO: 75907 - DNA, 75 bp, synthetic construct
  source 1..75: mol_type = other DNA
agcgaccaaaagggacgcctgtataccgtgacccggagaatccatttaacacctggagcgggtacggaaagcgcc

SEQ ID NO: 75908 - DNA, 75 bp, synthetic construct
  source 1..75: mol_type = other DNA
cccgtaagccgttccctgaatcactaccccgtgacgaaaagcgactgttgcctgcggcgccgtgctgcccgaact

SEQ ID NO: 75909 - DNA, 75 bp, synthetic construct
  source 1..75: mol_type = other DNA
aacacctatctggcgctgcgtgttgcctatttcaacgaactcgacagctatgctgaaagccaggggttgaacagc

SEQ ID NO: 75910 - DNA, 75 bp, synthetic construct
  source 1..75: mol_type = other DNA
tgcgatggacacgataacagggatagcttcgtctattgttctcaatgttacggtggtaacaccaggggaggttgc

SEQ ID NO: 75911 - DNA, 75 bp, synthetic construct
  source 1..75: mol_type = other DNA
tacagtgggcgtgaggatgacccactggttccccgccagttgcgacagtcgcgccatcgtcgtccgttaccggca

SEQ ID NO: 75912 - DNA, 75 bp, synthetic construct
  source 1..75: mol_type = other DNA
tcacgttctgcgcgacggtcatccttatcatctggatgttgcacggttcgctgtgtgaaatacggatgagcttct

SEQ ID NO: 75913 - DNA, 75 bp, synthetic construct
  source 1..75: mol_type = other DNA
atgccatgacggttcattattaccgtctgcgggactacgccctgcagcatccggaatgcagcgccattatgcgca

SEQ ID NO: 75914 - DNA, 75 bp, synthetic construct
  source 1..75: mol_type = other DNA
attcgcgatgtcacagagatcaacccgaacgcggtgatgatcattaaatcgaccatcccggtggggttcacccgc

SEQ ID NO: 75915 - DNA, 75 bp, synthetic construct
  source 1..75: mol_type = other DNA
cgtctggataccgacaccccactgacgctgatggccgaaaacggcgcgggactttttggctcgccggggctggag

SEQ ID NO: 75916 - DNA, 75 bp, synthetic construct
  source 1..75: mol_type = other DNA
atgaaaacattgtctcagaacaccacctcttcggcctgtgcaccggagactgacctgcaacaactggtagccact

SEQ ID NO: 75917 - DNA, 75 bp, synthetic construct
  source 1..75: mol_type = other DNA
tatcggtgaactgtatgccatcgaggcagaggtccggggctgttcagcagaacagcgtctggcggcaagaaaaac

SEQ ID NO: 75918 - DNA, 75 bp, synthetic construct
  source 1..75: mol_type = other DNA
aagaagacgaagaccgggcggttgtgggcgtatgttcgtgatgaccgcaatgccgggtcagcgttggcacctgca

SEQ ID NO: 75919 - DNA, 75 bp, synthetic construct
  source 1..75: mol_type = other DNA
cctgattgcgcaaaaccacgaagtggttgccctggatatcgtacaggctaaagtggatatgcttaaccagaagat

SEQ ID NO: 75920 - DNA, 75 bp, synthetic construct
  source 1..75: mol_type = other DNA
agccagaaagctacctccgctatgtccttgacgtcatagccgactggccgataaaccgggtcggcgaactgctcc

SEQ ID NO: 75921 - DNA, 75 bp, synthetic construct
  source 1..75: mol_type = other DNA
ctgacctgtttcgtcttcatcctgactgggtattgtcaatgcctggatattcccagccaaccggaagatatcagt

SEQ ID NO: 75922 - DNA, 75 bp, synthetic construct
  source 1..75: mol_type = other DNA
ataacacagcagaaagagcgcttcgtgccgtctgtctcgggaaaaagaattacatgttcttcggcaacgatcatg

SEQ ID NO: 75923 - DNA, 75 bp, synthetic construct
  source 1..75: mol_type = other DNA
aatcacgcctgaagggagaactgcacgttatcagcaagcgatatacgcagcgcattgagcggcataacctgaatc

SEQ ID NO: 75924 - DNA, 75 bp, synthetic construct
  source 1..75: mol_type = other DNA
gtgagggtgagagtttatattgccggtccaatgacgggatatgaaaatttcaaccgtgaggcgtttcacaaggcg

SEQ ID NO: 75925 - DNA, 75 bp, synthetic construct
  source 1..75: mol_type = other DNA
ggcagcggctggcgactggctccacgtaataacttcatggtggaaactcttgaaaagaaccgcagctggacacgc

SEQ ID NO: 75926 - DNA, 75 bp, synthetic construct
  source 1..75: mol_type = other DNA
tacccgttctgaaaaactgcgtcgtgaagttgaactggctgaggctctgctgaaacaacgtgaacaggacagcga

SEQ ID NO: 75927 - DNA, 75 bp, synthetic construct
  source 1..75: mol_type = other DNA
gatagagggattctgggaagaatgccagcccggggaaacacagtgtacggcggtatttaatattgttggggaaga

SEQ ID NO: 75928 - DNA, 75 bp, synthetic construct
  source 1..75: mol_type = other DNA
cgtccggtccatcgttttttctccattgtttttctcattattctattagtttgcattcattcactgataacaact

SEQ ID NO: 75929 - DNA, 75 bp, synthetic construct
  source 1..75: mol_type = other DNA
atactggctggccttccgggatgtcggccttgcgtggtggcaactgaatatcctgttcacctttgctgttgtcat

SEQ ID NO: 75930 - DNA, 75 bp, synthetic construct
  source 1..75: mol_type = other DNA
ctgaatgatgccctgtacagttatgtgatgaacacccgcaaggttcacactgatgacacaccagtaaaagtactg

SEQ ID NO: 75931 - DNA, 75 bp, synthetic construct
  source 1..75: mol_type = other DNA
cctatgcatggaggctttgattcagcgggaaatacttttgggactcgttggcaggactattatgacaggcaataa

SEQ ID NO: 75932 - DNA, 75 bp, synthetic construct
  source 1..75: mol_type = other DNA
gtacagtcatcatgcctgtcgcacggagtgttatgccatgacggttcattattaccgtctgcgggactacgccct

SEQ ID NO: 75933 - DNA, 75 bp, synthetic construct
  source 1..75: mol_type = other DNA
ttatgatgccttaacggtgcttcagcatcgcggtcaggatgccgccggcatcatcaccatagatgccaataactg

SEQ ID NO: 75934 - DNA, 66 bp, synthetic construct
  source 1..66: mol_type = other DNA
tttgctgaacgccgtaaggacagttttggcccgtatgtccggctgatgagcgtcactctgaactga

SEQ ID NO: 75935 - DNA, 75 bp, synthetic construct
  source 1..75: mol_type = other DNA
ctctctccattattaagcctgatggtttttatcattggtacactatacgaattaaggcgagttagtggttgtgta

SEQ ID NO: 75936 - DNA, 75 bp, synthetic construct
  source 1..75: mol_type = other DNA
tggtaacggtgatacagtttatcgcctgttatctggctgattgggggaatgccgaaacagtttttatgctgttct

SEQ ID NO: 75937 - DNA, 75 bp, synthetic construct
  source 1..75: mol_type = other DNA
gcttctggccgcaacattttggcctcattccacaatgggtgaccctggaaccccgtgtcttcggctggatggacc

SEQ ID NO: 75938 - DNA, 75 bp, synthetic construct
  source 1..75: mol_type = other DNA
acgagttgcgtaaaaaactgtttgaagaaaaacgccgccacatcaacaccacttccgactcggaaattctgctta

SEQ ID NO: 75939 - DNA, 75 bp, synthetic construct
  source 1..75: mol_type = other DNA
aagactttattgccgatgccattttgtcacgcaaaccgcaagtggtgggtatttatcgtctgattatgaagagcg

SEQ ID NO: 75940 - DNA, 75 bp, synthetic construct
  source 1..75: mol_type = other DNA
ccgaaaacacggtcgttgctgacactgtgaaagaaaccagtgagcgtggcgtaaaacttacccaaccaattgagc

SEQ ID NO: 75941 - DNA, 75 bp, synthetic construct
  source 1..75: mol_type = other DNA
caatgagcgcgtgggcagcaacccgatgatccagcctgcagacaatactgacagtcgtgtccgggcactggacat

SEQ ID NO: 75942 - DNA, 75 bp, synthetic construct
  source 1..75: mol_type = other DNA
aaagtggctgcgctacgtcattgagcatatccaggactggccggcaaaccgggtacgcgatctgttgccctggaa

SEQ ID NO: 75943 - DNA, 75 bp, synthetic construct
  source 1..75: mol_type = other DNA
cagagcagcggcttgctgaacgtcagcgaaaaacgaaaccgttgttgaaatccctggaaagctggttgcgtgaaa

SEQ ID NO: 75944 - DNA, 75 bp, synthetic construct
  source 1..75: mol_type = other DNA
atcgaagaagatgaacgggaaatagaacatctgcgggctcagatagaaaaactgcgccggatgctgttcggtacc

SEQ ID NO: 75945 - DNA, 75 bp, synthetic construct
  source 1..75: mol_type = other DNA
ctgacaccattacccgtctgacgatcggcagtggtacggacctggcttccggcatcgtggaggggaactatcccc

SEQ ID NO: 75946 - DNA, 75 bp, synthetic construct
  source 1..75: mol_type = other DNA
tggcaatcttcgtggccgtaatgggggcgtccaactatacctacgttgaagcgtgcgaaggtcaggacatgatgt

SEQ ID NO: 75947 - DNA, 75 bp, synthetic construct
  source 1..75: mol_type = other DNA
gggtaatcagcttaacggcgtgactgaaggctttaaaaatctgatgggggatgtgattcagggggcgaccggcgc

SEQ ID NO: 75948 - DNA, 75 bp, synthetic construct
  source 1..75: mol_type = other DNA
tcgatgaactgaaacgtctccttgccgaacaggaggcgctgaaccgtgcccttctggaaaagctgaacgagcgtg

SEQ ID NO: 75949 - DNA, 75 bp, synthetic construct
  source 1..75: mol_type = other DNA
cgttccggggctgattagaggcgcagagatatgcgtaagtattgctgaacagcttcgtaaaggagtcgaagagtg

SEQ ID NO: 75950 - DNA, 75 bp, synthetic construct
  source 1..75: mol_type = other DNA
agagcacacaccgctgtatcgccagtcggagatctatgcccgccagggtgtagtgttgagtcgttctgtactgtc

SEQ ID NO: 75951 - DNA, 75 bp, synthetic construct
  source 1..75: mol_type = other DNA
tgacattgtcacggaagttggacattatcaatgccgcaactacctgtaaggatttaagatcaccaccaggtaatc

SEQ ID NO: 75952 - DNA, 75 bp, synthetic construct
  source 1..75: mol_type = other DNA
ctgtatgactggatacagcaacagatgaaaacactgtcgcgtcactcggatacggcaaaagcgttcgcatacctg

SEQ ID NO: 75953 - DNA, 75 bp, synthetic construct
  source 1..75: mol_type = other DNA
gcggagaatgcagccctgaaagaatctgagcgagcattcgatgcgatgtgtgccgaggaacacggagataattgg

SEQ ID NO: 75954 - DNA, 75 bp, synthetic construct
  source 1..75: mol_type = other DNA
tgccttcggtgggtcagtaagcacaacaacaggaaactggacgactgcacagtttatcgagtggctggattctca

SEQ ID NO: 75955 - DNA, 75 bp, synthetic construct
  source 1..75: mol_type = other DNA
taaaaatgagcttacaaaatcagcgctcaaaccaacagatgttttagttattagaaaaggagatatgggaaatgc

SEQ ID NO: 75956 - DNA, 75 bp, synthetic construct
  source 1..75: mol_type = other DNA
ttttttagcagagtataatggtctttgcagtgctgatatgtatccattagactgttacattaatccaaattactt

SEQ ID NO: 75957 - DNA, 75 bp, synthetic construct
  source 1..75: mol_type = other DNA
aagtagcgataaaaatcttgtaagaagtaaagataataatcttgaagcattttatctcgcaacacctgatggacg

SEQ ID NO: 75958 - DNA, 75 bp, synthetic construct
  source 1..75: mol_type = other DNA
ccatgcgtattcaccgtcagcatcctgcatcccgtctttttccgttctgtaccggtaagtaccgctggcacggca

SEQ ID NO: 75959 - DNA, 75 bp, synthetic construct
  source 1..75: mol_type = other DNA
ggtcagtctctggaattgcgcattgacggtcagcctgtgatcactggctggctggatcaggtccggcagcgcatc

SEQ ID NO: 75960 - DNA, 75 bp, synthetic construct
  source 1..75: mol_type = other DNA
tgaccagcaataaagtcggtacatatacggtgactgcatcgttccataacggcgtaacaatacagacacagacaa

SEQ ID NO: 75961 - DNA, 75 bp, synthetic construct
  source 1..75: mol_type = other DNA
tggttacgttgttcttgctgcatggatcgccttaactgtttgtggttgcgcagagcagatttttgaatggtggat

SEQ ID NO: 75962 - DNA, 75 bp, synthetic construct
  source 1..75: mol_type = other DNA
cgtgaaaggagcgatgacaggtagcgtcacggtaagcgcagtcacgaccgctggtggaatgcaaacagtagatat

SEQ ID NO: 75963 - DNA, 75 bp, synthetic construct
  source 1..75: mol_type = other DNA
accatcctcgaaagcctgcagcgtgaaggctttgagccgttctttgcctgccagacaaaggtccgtgaccagagc

SEQ ID NO: 75964 - DNA, 75 bp, synthetic construct
  source 1..75: mol_type = other DNA
accaccttgctgacgctgggaatgctggtattcagcgccacccaggccatcagcagttttggcattgtgctggtg

SEQ ID NO: 75965 - DNA, 75 bp, synthetic construct
  source 1..75: mol_type = other DNA
gggttcagtggtgtactgcaggcggatgcatacgccgggttcaacgagctgtaccgggatggccggataacggaa

SEQ ID NO: 75966 - DNA, 75 bp, synthetic construct
  source 1..75: mol_type = other DNA
ggtaaaattgtgacttactcagttgacaaagagttcatttatcactatttatctacaagaattgaagaaaatcta

SEQ ID NO: 75967 - DNA, 75 bp, synthetic construct
  source 1..75: mol_type = other DNA
gtggcgcacgtcttcggtgaacgcactctggccacactggaacgtcttctgagcctgctgtcggcctttgaggtc

SEQ ID NO: 75968 - DNA, 75 bp, synthetic construct
  source 1..75: mol_type = other DNA
acagagcatgcgaggaaaatagacgacatttttggtgataatgtcccaaatatgtcccactctggaattatggag

SEQ ID NO: 75969 - DNA, 75 bp, synthetic construct
  source 1..75: mol_type = other DNA
aacgccgaggaactggctgaaaactggacgcgtattagcgagtatttcgacacactatttactaccgaagccagc

SEQ ID NO: 75970 - DNA, 75 bp, synthetic construct
  source 1..75: mol_type = other DNA
aaacatggtcaaaacccggcagcaagatgaaggctatatacacactaaaaagaaggggttacaaacctcttccgc

SEQ ID NO: 75971 - DNA, 75 bp, synthetic construct
  source 1..75: mol_type = other DNA
cgatcctgaaacgatggctgaaagccggatatattgatttggggaaattatacccaaccagtgcaggaactccac

SEQ ID NO: 75972 - DNA, 75 bp, synthetic construct
  source 1..75: mol_type = other DNA
gcactgaagcgtataccggtcgtgaagtgcaggatattcccggtgtactggccgtgtttgcagaacgccgtaagg

SEQ ID NO: 75973 - DNA, 75 bp, synthetic construct
  source 1..75: mol_type = other DNA
gggtgaggtggctgtctatgacgatcaggggcagtccgtgacgctgacccgggaggggatcgtggtggacggtgc

SEQ ID NO: 75974 - DNA, 75 bp, synthetic construct
  source 1..75: mol_type = other DNA
tggcatttggtgacaagctgccgaggcaccgcaatgcgcaacaactggcggggctggctgccggggcgttccggg

SEQ ID NO: 75975 - DNA, 75 bp, synthetic construct
  source 1..75: mol_type = other DNA
ccgatggtgttttctgggtaacgcccaaagtggataagcagtcaggcgaaattatccggcctgagacgtggttat

SEQ ID NO: 75976 - DNA, 75 bp, synthetic construct
  source 1..75: mol_type = other DNA
ctggtcgtcgcttcccagaccttaaaacatgccgtgctcttgttgcgtgcctaaacaagttaggcgcaaaagtca

SEQ ID NO: 75977 - DNA, 75 bp, synthetic construct
  source 1..75: mol_type = other DNA
accacaccctacagcgaaacgccggaggctgaatgtaactggggtgtggactctgacgatctgtttatagcgctt

SEQ ID NO: 75978 - DNA, 75 bp, synthetic construct
  source 1..75: mol_type = other DNA
gatgcgcttgccgttctgcatggttacgaaaagatccgctggccctccgcaccggactgggcacagcgggaaacg

SEQ ID NO: 75979 - DNA, 75 bp, synthetic construct
  source 1..75: mol_type = other DNA
gaacgtgggaaaatctttataaagcacataaccacacacgccgaatacgacaagctgacagatttttaccggaga

SEQ ID NO: 75980 - DNA, 75 bp, synthetic construct
  source 1..75: mol_type = other DNA
acggaaaaatcgtgctgccgcgccgtggtgcggtcattacgctggcgctgggctggaaggggcagccgcttttcc

SEQ ID NO: 75981 - DNA, 75 bp, synthetic construct
  source 1..75: mol_type = other DNA
acaacctgcaaatcgtaccggacggacgctatcgcgtgcgtctctatcaggcggggttattgcgtccggggcttg

SEQ ID NO: 75982 - DNA, 75 bp, synthetic construct
  source 1..75: mol_type = other DNA
tgtggctaacgataccactccttatcttatggtgctgctacttaataacgatgtctggtgtaagagtcgtgaggt

SEQ ID NO: 75983 - DNA, 75 bp, synthetic construct
  source 1..75: mol_type = other DNA
aacgacatgaggtttctcagggatatttctctggtgctctcgggcgtattcagcgtacccatcaggcggtaaaca

SEQ ID NO: 75984 - DNA, 75 bp, synthetic construct
  source 1..75: mol_type = other DNA
agccgatctgaaccggcttcagaaagagagcgatacgctgactggtagggtgtatgacccggctgtacagcgtcc

SEQ ID NO: 75985 - DNA, 75 bp, synthetic construct
  source 1..75: mol_type = other DNA
actaagaagcagaagaaagagccggaaacgaagcagggcgattatctggtgggtacggatgaaaacgtgctggta

SEQ ID NO: 75986 - DNA, 75 bp, synthetic construct
  source 1..75: mol_type = other DNA
gctggcagcacgaaaagaagctggcttaacccaggctgaagttgctgaacgtatgggaacaaaagcgactgcgat

SEQ ID NO: 75987 - DNA, 75 bp, synthetic construct
  source 1..75: mol_type = other DNA
tggtgtatgcatatttgacctacatgggcctcgggctttgctacagcctggtgaatattccttatggttcacttg

SEQ ID NO: 75988 - DNA, 75 bp, synthetic construct
  source 1..75: mol_type = other DNA
gaagctctgggggtacaaacgtgaagaagtcattggcaataacattgatatgctgattccgcgggatttgcgtcc

SEQ ID NO: 75989 - DNA, 75 bp, synthetic construct
  source 1..75: mol_type = other DNA
catcaatcatctgttctccaatgactagtctaaaaactagtattaagactatcacttatttaagtgatactggtt

SEQ ID NO: 75990 - DNA, 75 bp, synthetic construct
  source 1..75: mol_type = other DNA
gctcagccagcaggctttttcgcgttttgtgcaggactatctggtatttggtaacgcctacctggagaaacgcac

SEQ ID NO: 75991 - DNA, 75 bp, synthetic construct
  source 1..75: mol_type = other DNA
tgcctggcgggtgctgctggtactggatgaaagtgtcattacccagacgtggaacatcccgttcccggaacttga

SEQ ID NO: 75992 - DNA, 75 bp, synthetic construct
  source 1..75: mol_type = other DNA
aatgagttgggagagtttgatttttacagacaaatttatcctgtgacaggaggagagcacctggttgaagctttg

SEQ ID NO: 75993 - DNA, 75 bp, synthetic construct
  source 1..75: mol_type = other DNA
tgaaacagaagaagaactacatcaggcatatatcgacgataagaaaaactatgaccgaatgatggagatgtggac

SEQ ID NO: 75994 - DNA, 75 bp, synthetic construct
  source 1..75: mol_type = other DNA
gcacgcaatacctccggattccgtgaacaggtcgctgcatggctggaaaaactcagtgcctctgcggagcttcga

SEQ ID NO: 75995 - DNA, 75 bp, synthetic construct
  source 1..75: mol_type = other DNA
agccggaagagtttaaagcagtgcgtacagtccaggatgttgtcgaggctgtagaacgcctgctacaagaaggct

SEQ ID NO: 75996 - DNA, 75 bp, synthetic construct
  source 1..75: mol_type = other DNA
cggccggaacaccaccaggcacatctcagggacgagggcaacgttttataaactttcttaccggggtaaatccgg

SEQ ID NO: 75997 - DNA, 75 bp, synthetic construct
  source 1..75: mol_type = other DNA
gtcttgctgctcttgtatcgggatgcggtgaaaaaggcgattttgaaaaagcgatcaacgcaaaaatatcacaat

SEQ ID NO: 75998 - DNA, 75 bp, synthetic construct
  source 1..75: mol_type = other DNA
cgggatgttaattatgaacgaaataaacgggcactggctgctatattctttatagcaaaaattccagctgaacgt

SEQ ID NO: 75999 - DNA, 75 bp, synthetic construct
  source 1..75: mol_type = other DNA
ggatttcagccgcctcgtgctggattatctggtctttgcgaacggttatcttgagaagcgcatgagtgttaccgg

SEQ ID NO: 76000 - DNA, 75 bp, synthetic construct
  source 1..75: mol_type = other DNA
cctgttggtcacactggcgcggggaatggtgtatcagccggttataacgctgcgttaggtactggtaccacgtcg

SEQ ID NO: 76001 - DNA, 75 bp, synthetic construct
  source 1..75: mol_type = other DNA
ccactccttctgtttccgtaaccgctgcatcagggaatgaccagcctcagctggttgccaccctcgtccctgatg

SEQ ID NO: 76002 - DNA, 75 bp, synthetic construct
  source 1..75: mol_type = other DNA
tcggcaccaatgcccgtactgcgcagagctaccacggcaacctgtatcttgatgagtatttctggataccgaaat

SEQ ID NO: 76003 - DNA, 75 bp, synthetic construct
  source 1..75: mol_type = other DNA
caggatacgcatgaagttgaactttccggaggacagcgtaccagccttcagatatttatgtgtctttcatcagca

SEQ ID NO: 76004 - DNA, 75 bp, synthetic construct
  source 1..75: mol_type = other DNA
ggcgtaggggaaattcccggcggcgagaaaatccgtaaaacgctggaagatgcgattccgctggtggtaggtaaa

SEQ ID NO: 76005 - DNA, 75 bp, synthetic construct
  source 1..75: mol_type = other DNA
tcaccacggaagccctgcagcgtatcggtgaactgtatgccatcgaggcagaggtccggggctgttcagcagaac

SEQ ID NO: 76006 - DNA, 75 bp, synthetic construct
  source 1..75: mol_type = other DNA
tatggttcagcgctcaccattaagacggggcatggcaacatactggcttctgaaaggagagaagcaggcggggca

SEQ ID NO: 76007 - DNA, 75 bp, synthetic construct
  source 1..75: mol_type = other DNA
tgcactggcacgtgccgaagaaaagatcgaagaggaggagcgggaaacagaacatctgagggcccagatagaaaa

SEQ ID NO: 76008 - DNA, 75 bp, synthetic construct
  source 1..75: mol_type = other DNA
ggtgaacgcactctggccacactggagcgtcttctaagcctgctgtcggcctttgaggtcgtggtatggatgacg

SEQ ID NO: 76009 - DNA, 75 bp, synthetic construct
  source 1..75: mol_type = other DNA
aggcgaggcatggcaacatactggtttctgaaaggagagatgcaggcgggacaaaactgttcttccacaacttaa

SEQ ID NO: 76010 - DNA, 75 bp, synthetic construct
  source 1..75: mol_type = other DNA
cccgtacaccaataaaccgtttgtcggtttttataccaccaagcgcaccggcgggatgctggtcgattcgcaggc

SEQ ID NO: 76011 - DNA, 75 bp, synthetic construct
  source 1..75: mol_type = other DNA
tgagtccaccgatgaagatgacaaaacccgtaagtttggcaaacttcagcatatcgcttccggtgcggcttccgg

SEQ ID NO: 76012 - DNA, 75 bp, synthetic construct
  source 1..75: mol_type = other DNA
gactgacgcgcgctcccagactgccacctcaaaactgggcctgattgaacctttcatgggggaaatctacggtaa

SEQ ID NO: 76013 - DNA, 75 bp, synthetic construct
  source 1..75: mol_type = other DNA
aacctgaataaatacatctggcgttttatcgccctgagcacggcacaaccgcgcgtgattaccattgaggccacc

SEQ ID NO: 76014 - DNA, 75 bp, synthetic construct
  source 1..75: mol_type = other DNA
ctgcctaccggtgttggctatgactggacggggatgtcctatcaggaacgtctctccggcaaccaggcaccttca

SEQ ID NO: 76015 - DNA, 75 bp, synthetic construct
  source 1..75: mol_type = other DNA
aactggatgaactgacaaaaaacatttatcagaataatgaaatgggtttttatattgaaagagactggttcttaa

SEQ ID NO: 76016 - DNA, 75 bp, synthetic construct
  source 1..75: mol_type = other DNA
cgtacggagaattatgccatgacggtccattattaccggttgcgggattacgccctgcagcatccggaatgcagc

SEQ ID NO: 76017 - DNA, 75 bp, synthetic construct
  source 1..75: mol_type = other DNA
gccgcaggcggcgctgaactatatcaagcgtattgaagagctgactggtgtgccgatcgatatcatctctaccgg

SEQ ID NO: 76018 - DNA, 75 bp, synthetic construct
  source 1..75: mol_type = other DNA
taccttcgccatgtgcctggcgtcatagcagactggccggtcaaccgggtcagcgaactgcttccgtggcgcata

SEQ ID NO: 76019 - DNA, 75 bp, synthetic construct
  source 1..75: mol_type = other DNA
gacagaagttgcgtgctgggctcatgcccggagaaaaatccacgatgtatacatcagcagcaaaagtgcgacggc

SEQ ID NO: 76020 - DNA, 75 bp, synthetic construct
  source 1..75: mol_type = other DNA
aaatccgcaggccagaatcagggttaaccggggggatttgcccgtaataaagctgggtaacgcgcggattgtcct

SEQ ID NO: 76021 - DNA, 75 bp, synthetic construct
  source 1..75: mol_type = other DNA
atgccgatgaaacgctgtttacctttgactcattcaccggcctgcagcggatgtttcttgattacagcgtcacct

SEQ ID NO: 76022 - DNA, 75 bp, synthetic construct
  source 1..75: mol_type = other DNA
ggttggaagaaaaaattatctcttcttcggctcagacaagggaggagaaagtgcggcgatcatctacagtctgct

SEQ ID NO: 76023 - DNA, 75 bp, synthetic construct
  source 1..75: mol_type = other DNA
ggaagcacgccagcaatctccggctggctgcgtgatggtattcgctgcccgtattcgtcaggaggtgtgccatgt

SEQ ID NO: 76024 - DNA, 75 bp, synthetic construct
  source 1..75: mol_type = other DNA
tgcggcggtgttgtactcgctgatcggcacatgccgtctgaacaatgtggagccagaaaagtggctgcgttacgt

SEQ ID NO: 76025 - DNA, 75 bp, synthetic construct
  source 1..75: mol_type = other DNA
ggaacacaccatcgatggaagcgcgtttacctcgcagcttgagcttgaagcaaaaatcccggaatggatagcaga

SEQ ID NO: 76026 - DNA, 75 bp, synthetic construct
  source 1..75: mol_type = other DNA
gactggctggcagagcagcaactggtcaccgtggaaaacctgcgcggcttttatgtcgtaacgctgacctcccga

SEQ ID NO: 76027 - DNA, 75 bp, synthetic construct
  source 1..75: mol_type = other DNA
acatttctggcatcgtcacgccaatcgcaattggttatatcgttggcacgactggctcctttaatggggcgctga

SEQ ID NO: 76028 - DNA, 75 bp, synthetic construct
  source 1..75: mol_type = other DNA
atgacgacaccaaccagacggataagtttctatctgaagcccgtcgccgtcaagaacgaaggcgaagcatgtgcc

SEQ ID NO: 76029 - DNA, 75 bp, synthetic construct
  source 1..75: mol_type = other DNA
tgcggtcaacttccttaaggccaatgccgtagaagcgccggacacgtcatttaaccgtgtatttgaggatgacga

SEQ ID NO: 76030 - DNA, 75 bp, synthetic construct
  source 1..75: mol_type = other DNA
acagaacgccccgcgtcacagccagtaccaacctcacagataaccagtcggatggccggaaatatcagggcgtta

SEQ ID NO: 76031 - DNA, 75 bp, synthetic construct
  source 1..75: mol_type = other DNA
tggctggacagccttacaccagaagcccgcaaaagcggccaacgcgtggcttttctggccgggctggcacttctg

SEQ ID NO: 76032 - DNA, 75 bp, synthetic construct
  source 1..75: mol_type = other DNA
atgaccatccactacactgcaacactgaataataaacacctgtccctgaccgccctgtaccctgacggtaatcgg

SEQ ID NO: 76033 - DNA, 75 bp, synthetic construct
  source 1..75: mol_type = other DNA
atgttgaagaagattaatatctacggcgttaacgatcagtccggtgaaaaaatcggtctgggtgtgagcgggccg

SEQ ID NO: 76034 - DNA, 75 bp, synthetic construct
  source 1..75: mol_type = other DNA
gagccgtaatacgatggggcgctgggttgatattatgggagagcaactccgtccgctgtatgatgaactgaacca

SEQ ID NO: 76035 - DNA, 75 bp, synthetic construct
  source 1..75: mol_type = other DNA
ctacagttcgtcaaatgatgcctatgttgttgaagattacggcttcggctgtctgatcgaaggcattaccgccgc

SEQ ID NO: 76036 - DNA, 75 bp, synthetic construct
  source 1..75: mol_type = other DNA
ctactgcggtggtatctggaatctgtacaccctgaacaacggcggggcatttatggcccccgaaccggatgacga

SEQ ID NO: 76037 - DNA, 75 bp, synthetic construct
  source 1..75: mol_type = other DNA
agtgcaggatattcccggtgtgctggccgtgtttgcagaacgccgtaaggacagttttggcccgtatgtccgtct

SEQ ID NO: 76038 - DNA, 75 bp, synthetic construct
  source 1..75: mol_type = other DNA
ccacgccttctgtttccgtaaccactgcatcagggaataaccagtctcaactggttgccactcccgtccctgatg

SEQ ID NO: 76039 - DNA, 75 bp, synthetic construct
  source 1..75: mol_type = other DNA
tactggaacccggtcagggtaaaacccgtaccgggcggctgtgggtctatgttcgtgacgatcgcaacgccggct

SEQ ID NO: 76040 - DNA, 75 bp, synthetic construct
  source 1..75: mol_type = other DNA
tcagaaaatccagatcggtaccgctgatgcagtcgttgtatgactggctccaggggcagatgaacatgctgtcgc

SEQ ID NO: 76041 - DNA, 75 bp, synthetic construct
  source 1..75: mol_type = other DNA
acaagaaaattataatcgggtcattgaacgccttatcaaacttaaagcggacggagtattaaataaggtatatag

SEQ ID NO: 76042 - DNA, 75 bp, synthetic construct
  source 1..75: mol_type = other DNA
cccgaattttgcgaccaccatgactagcgcgcttgcgggtaagcaaccgaaagatgccaccctgacggcgctggc

SEQ ID NO: 76043 - DNA, 75 bp, synthetic construct
  source 1..75: mol_type = other DNA
tgctggtggtcgatgaatctcacgtcaccattccacaaattggcggcatgtatcgcggtgaccgggcgcgtaaag

SEQ ID NO: 76044 - DNA, 75 bp, synthetic construct
  source 1..75: mol_type = other DNA
tggaaaaccccttcccggattcggcatgttgtctgacatggcagcaaaatgatatgtcgcctgcgttaacctggc

SEQ ID NO: 76045 - DNA, 75 bp, synthetic construct
  source 1..75: mol_type = other DNA
ccgaagtccgtcaacgggcagttcgtatggttctggaaagccagggcgaatatgactcacaatgggcggcaattt

SEQ ID NO: 76046 - DNA, 75 bp, synthetic construct
  source 1..75: mol_type = other DNA
aggtaaatatactttctgtactcctggtcacatgggcggtactgcattccagaaaagcccggtaggtagcctgtt

SEQ ID NO: 76047 - DNA, 75 bp, synthetic construct
  source 1..75: mol_type = other DNA
gtgccctgtcgctgcagctgccgggattccgccgtcagatgaacgaaggctggtaccgggtacgtattgccggtg

SEQ ID NO: 76048 - DNA, 75 bp, synthetic construct
  source 1..75: mol_type = other DNA
gaggcggcaggcagtcttgtgcagctgattgaccagcgggtgcaggcggtgatgctgtccatgcgacgtgacgga

SEQ ID NO: 76049 - DNA, 75 bp, synthetic construct
  source 1..75: mol_type = other DNA
cagtttgatgcgtggctgatggaaaacgcgctaccatcggggtttgaggcggggtttgatgggatggagattgag

SEQ ID NO: 76050 - DNA, 75 bp, synthetic construct
  source 1..75: mol_type = other DNA
tattattctgggccgtagcaggcttcccgaaaaaagtaaccggggccgaccacgactgaacggcatcctgccagg

SEQ ID NO: 76051 - DNA, 75 bp, synthetic construct
  source 1..75: mol_type = other DNA
ctgggcggtgtagacgttaaccagatgaacaatattgagcaatgggcgtataaaaacggcgttgattcaatgatg

SEQ ID NO: 76052 - DNA, 75 bp, synthetic construct
  source 1..75: mol_type = other DNA
taattagcggaggggatcagtatatttccgatggtggcagtgcgactaataccgttatcgatgggggaactcaat

SEQ ID NO: 76053 - DNA, 75 bp, synthetic construct
  source 1..75: mol_type = other DNA
atggcagccagaccacgtaaaaataatgtttcagtcccgaacttgtatccgctttatagtagaaaagtaaataaa

SEQ ID NO: 76054 - DNA, 75 bp, synthetic construct
  source 1..75: mol_type = other DNA
ggaaatatagatctgggagtggtaggcgtgggttattttgctggcaacatttctcccgagagttatcagccaggt

SEQ ID NO: 76055 - DNA, 75 bp, synthetic construct
  source 1..75: mol_type = other DNA
atcctgctctggatatggctggcgcattgaccacggtaaaacgccagcatcgccccgctcttgatctttctcgcc

SEQ ID NO: 76056 - DNA, 75 bp, synthetic construct
  source 1..75: mol_type = other DNA
taggttgttgtctaacttgtcaggtagtcgtcagattatgaaaaatgcaagtcgctatcttaaaggctttgccct

SEQ ID NO: 76057 - DNA, 75 bp, synthetic construct
  source 1..75: mol_type = other DNA
gcactggcggcgcacagggcgttcccgcatggggctgtgagtgcgcggcctgcgccagagcgcggcgctcaccgc

SEQ ID NO: 76058 - DNA, 75 bp, synthetic construct
  source 1..75: mol_type = other DNA
acgttgcaccgctgatgcgtaccgactcaccggatgaaaaacgcattcaggcgatcctcgatcagttaacggatg

SEQ ID NO: 76059 - DNA, 75 bp, synthetic construct
  source 1..75: mol_type = other DNA
gtggcacgcgtctttggtgagcgtactctggccacgctggagcgtcttccgggcctgctgtcggcctttgaggtc

SEQ ID NO: 76060 - DNA, 75 bp, synthetic construct
  source 1..75: mol_type = other DNA
tatctgaaagaaatctgggattatctgacccatgatgaacaggaactgtttgaagtcattaataaaaaattactg

SEQ ID NO: 76061 - DNA, 75 bp, synthetic construct
  source 1..75: mol_type = other DNA
catggtcaagaaagaaaaaaataaaggccgcgtaagccttcgttatctgatgtacaaaactgatcaggtccgtga

SEQ ID NO: 76062 - DNA, 75 bp, synthetic construct
  source 1..75: mol_type = other DNA
ccaggttcgtgagcttgctgctccgttggcaaaaaacgcctatgggcaatatttattaaaaatgattgataaggc

SEQ ID NO: 76063 - DNA, 75 bp, synthetic construct
  source 1..75: mol_type = other DNA
tcaggaaaggctttattaccgcagaaaaggtattggaacttgcgtatccgttgtctaaaaattcatacggagaat

SEQ ID NO: 76064 - DNA, 75 bp, synthetic construct
  source 1..75: mol_type = other DNA
tctgcacaggcttttggagcggatgccatcattaaacgccaccgcgtgcataaagcatcaggcacactgcaataa

SEQ ID NO: 76065 - DNA, 75 bp, synthetic construct
  source 1..75: mol_type = other DNA
atcgccagaagtttattagtgccgaccaggttcgtgagcttgctgctccgttggcaaaaaacgcctatgggcaat

SEQ ID NO: 76066 - DNA, 75 bp, synthetic construct
  source 1..75: mol_type = other DNA
gatgggacgcggttatgcatggctggataccgggacacatcaaagtttaattgaagcaagtaactttatttctac

SEQ ID NO: 76067 - DNA, 75 bp, synthetic construct
  source 1..75: mol_type = other DNA
agcctgacacaagacgtaacccaaacgcatcagcagttaagcaacacgcaaaaacgagtagcggataatagccag

SEQ ID NO: 76068 - DNA, 75 bp, synthetic construct
  source 1..75: mol_type = other DNA
tgaaagttatttttataatctttttattcttgggttaccatgttgtagcctatgctgaaatgggccgggatcgtg

SEQ ID NO: 76069 - DNA, 75 bp, synthetic construct
  source 1..75: mol_type = other DNA
gatgtgacccagcgcgatattcagcgctggcgacgtcaggttctgaaaacgcagtcactttcaacatacacgtgg

SEQ ID NO: 76070 - DNA, 75 bp, synthetic construct
  source 1..75: mol_type = other DNA
ccttcccgacatccttcaacaggagaacaaacccatgaatgaaacgctgcgcaagctgcttgcgcgtcttggggt

SEQ ID NO: 76071 - DNA, 75 bp, synthetic construct
  source 1..75: mol_type = other DNA
atcacaagttgacaaagaaagtaaaaatatattggtgtttacacaagaaagatataactcatttttatatgaaaa

SEQ ID NO: 76072 - DNA, 75 bp, synthetic construct
  source 1..75: mol_type = other DNA
tggcgcagacggatattgatgccaataaagccgccatcgccgacacccgtaatgatgtctccgcagtgcagtcag

SEQ ID NO: 76073 - DNA, 75 bp, synthetic construct
  source 1..75: mol_type = other DNA
cgcactttggttttcagaccgtcgcgaaggaacaaaaagcggatatggtcgcccacgttttccattccgtggcat

SEQ ID NO: 76074 - DNA, 75 bp, synthetic construct
  source 1..75: mol_type = other DNA
gcgctgggtctgtatactgacacacgaacggtcagtgaggtttgtaaagcgggagagaacagagaagaagagacg

SEQ ID NO: 76075 - DNA, 75 bp, synthetic construct
  source 1..75: mol_type = other DNA
ttttttttgtaagtcgttacggagagccacggagtggagttatcgcaaggtgttgtcggggttccggaagtttgt

SEQ ID NO: 76076 - DNA, 75 bp, synthetic construct
  source 1..75: mol_type = other DNA
gatgttaacgtgaaagccactactacggaaaaacttggatttaccggacgtggggaagggattgcctgtgaagcg

SEQ ID NO: 76077 - DNA, 75 bp, synthetic construct
  source 1..75: mol_type = other DNA
agtgcaggatattcccggtgtgctggccgtgtttgctgaacgccataaggacagttttggcccgtatgtccggct

SEQ ID NO: 76078 - DNA, 75 bp, synthetic construct
  source 1..75: mol_type = other DNA
gtgaggcgctgtaccagacagcccgtcatggtgggtttatggccgtcatcggtgagtccggtgcgggtaaatcca

SEQ ID NO: 76079 - DNA, 75 bp, synthetic construct
  source 1..75: mol_type = other DNA
tatcaaccgcgagaatgcgccggtaattattatcgagccatacgtcatcgccatggaagacaacgatgtgaaagg

SEQ ID NO: 76080 - DNA, 75 bp, synthetic construct
  source 1..75: mol_type = other DNA
agcgtcgccccacaggactgaatcctcaactgaagacgtttcaggcggtgttccgggtgacggatgagtcaaccc

SEQ ID NO: 76081 - DNA, 75 bp, synthetic construct
  source 1..75: mol_type = other DNA
acaacccagccgtatcagttcacgaaaggaagcatttttcatctgatggaaccggacattaaccaggagatctac

SEQ ID NO: 76082 - DNA, 75 bp, synthetic construct
  source 1..75: mol_type = other DNA
cccgctgttatcgcgtcaggatttcagccggttcgtgctcgattatctggtatttggcaacgcctttctcgaaga

SEQ ID NO: 76083 - DNA, 75 bp, synthetic construct
  source 1..75: mol_type = other DNA
ggcgatattgagaaagtggcaaaagtatttgttcgcaatgaattaactccattgcaagataggattcgtgaatta

SEQ ID NO: 76084 - DNA, 75 bp, synthetic construct
  source 1..75: mol_type = other DNA
aactagaaaacacgatgcataaggcttttagcaattataaaattaactttcctgtaaaatttgatggtagcaatg

SEQ ID NO: 76085 - DNA, 75 bp, synthetic construct
  source 1..75: mol_type = other DNA
aactttacatcatggttgatgatcttgaagtgcctacacaaatgaaaattggtgtaagcgtaaaagagaacgaaa

SEQ ID NO: 76086 - DNA, 75 bp, synthetic construct
  source 1..75: mol_type = other DNA
ctgttaagtttgatggtagcactgaatttttttattacaggccggaagtattcgacatggtagaagaaacatata

SEQ ID NO: 76087 - DNA, 75 bp, synthetic construct
  source 1..75: mol_type = other DNA
gaccggaaacgccgcatcctgaccaactggtccctcaccgacgacatcctgccccgcacacctgctacagacaac

SEQ ID NO: 76088 - DNA, 75 bp, synthetic construct
  source 1..75: mol_type = other DNA
ttgaaggatttatatcttctggtttagaagtgtgcgcgtcaagaataggtggcaccgctgggcgttatcttagca

SEQ ID NO: 76089 - DNA, 75 bp, synthetic construct
  source 1..75: mol_type = other DNA
ggcctgcccggttatctttctgctattccgtcagccctgctcaacgagtccgccacgttgttccgccgtaagtat

SEQ ID NO: 76090 - DNA, 75 bp, synthetic construct
  source 1..75: mol_type = other DNA
caattcttacctctatctggtcacgtaaagtcaaagccagagcggcgaaaatcgaaattttaggtacggtgaaat

SEQ ID NO: 76091 - DNA, 75 bp, synthetic construct
  source 1..75: mol_type = other DNA
acaacgcgaacaggaaagcgatcgttacagtgggcgtgaggatgacccgcaggttccccgccagttgcgacagtc

SEQ ID NO: 76092 - DNA, 75 bp, synthetic construct
  source 1..75: mol_type = other DNA
gccaccagtactttgaagaacgacgggcagccctggaactgtgggcggggcttctggtttcgcttgaacgagggg

SEQ ID NO: 76093 - DNA, 75 bp, synthetic construct
  source 1..75: mol_type = other DNA
ttcaaactgattagtgtgctgcgccctgaagaagtggtgctggacgcagaagacgcggatataacagacaaataa

SEQ ID NO: 76094 - DNA, 75 bp, synthetic construct
  source 1..75: mol_type = other DNA
ccaacgggcaatatctcgtttgccttgagtgccggtatcgaccgaaaggtaaagatttcggtgcttcggtcggat

SEQ ID NO: 76095 - DNA, 75 bp, synthetic construct
  source 1..75: mol_type = other DNA
cgcgcaaatgctgcgttgcaacgtcgatcgggaatgcctgtgcaaattagttctggttcaagacagatgttttaa

SEQ ID NO: 76096 - DNA, 75 bp, synthetic construct
  source 1..75: mol_type = other DNA
tgacagactactgagtattttgttaggtaacacgaaaaacaacccgtttctgataaaacaacgtccatacgaaaa

SEQ ID NO: 76097 - DNA, 75 bp, synthetic construct
  source 1..75: mol_type = other DNA
caaactgggccgtagctcccgatggctgaaaagtgaagtggaaacctggctgcaggcgcgtattgcacagtcccg

SEQ ID NO: 76098 - DNA, 75 bp, synthetic construct
  source 1..75: mol_type = other DNA
atgactcagtcactttccctcaccgaagaccagttcgttgacatggcatttattaccagcctgaccggactcacg

SEQ ID NO: 76099 - DNA, 75 bp, synthetic construct
  source 1..75: mol_type = other DNA
aatttagcgatatttgggatgatcatcttcatgtcattcaggaaaagaccgggagcaaaatcgcaattcctcttt

SEQ ID NO: 76100 - DNA, 75 bp, synthetic construct
  source 1..75: mol_type = other DNA
atgaccagatggtcgacatggcgtttatcactcaactgaccggcctgagcgataagtggttttacaaactcatcc

SEQ ID NO: 76101 - DNA, 75 bp, synthetic construct
  source 1..75: mol_type = other DNA
ggtgatgtggaaaaagccagccgcgtctttgtccgtaatgagttaataccgctacaaaaaagactcgaagaacta

SEQ ID NO: 76102 - DNA, 75 bp, synthetic construct
  source 1..75: mol_type = other DNA
cgacgcaattgatatgctgatcgaaaaagaaacggtggaagcctatcatatgaaagggaagagccatgactgcgg

SEQ ID NO: 76103 - DNA, 75 bp, synthetic construct
  source 1..75: mol_type = other DNA
agcaacggctggatgcgaaggttaacctggcgggcggcatcaacgaggatttttaccttgcacagcttgctgccc

SEQ ID NO: 76104 - DNA, 75 bp, synthetic construct
  source 1..75: mol_type = other DNA
agcatttcaggcggtagccgctgggtgcttccggcccgcaaaatgcaacagcgcatgattccacacatacaggaa

SEQ ID NO: 76105 - DNA, 75 bp, synthetic construct
  source 1..75: mol_type = other DNA
cgtgctgattgttgacgatattaaaccgtataaagaacgcaaagtggcaatcctcaacggtgcgcacaccgcgct

SEQ ID NO: 76106 - DNA, 75 bp, synthetic construct
  source 1..75: mol_type = other DNA
atgactgatatgaaaaaaacagatgatttagttgatgatgcgaatcagtcaaagctggaaagtaaacccgttcat

SEQ ID NO: 76107 - DNA, 75 bp, synthetic construct
  source 1..75: mol_type = other DNA
ccgtattcaggacgccgactatgcgaccgaagtgtccaacatgtcgaaagcgcagattatccagcaggccggtaa

SEQ ID NO: 76108 - DNA, 75 bp, synthetic construct
  source 1..75: mol_type = other DNA
ggacggtcagggtggtgtgccgggagtggagtattacggataacgcccggtacagtgatttcagttgtacgatag

SEQ ID NO: 76109 - DNA, 75 bp, synthetic construct
  source 1..75: mol_type = other DNA
tcccggcgaatctctcaggacatcagtacccgtgatgaaggcggtggcgggaaggtcgtggttatcgggcggcag

SEQ ID NO: 76110 - DNA, 75 bp, synthetic construct
  source 1..75: mol_type = other DNA
tggcgcgtgccggccacggttctcgccgtgaaatcgaatctattattgaagccggtcgtgtgagtgttgatggca

SEQ ID NO: 76111 - DNA, 75 bp, synthetic construct
  source 1..75: mol_type = other DNA
gttgaggactaccgctgcgccgcacttgtggaaaacatccagattggcgacttcagcgccgccgcagcagaagcc

SEQ ID NO: 76112 - DNA, 75 bp, synthetic construct
  source 1..75: mol_type = other DNA
gagagaagcataagaagtatccaaacgtcactctggacaatctggacacgtatattcagtcgattcgaggggctg

SEQ ID NO: 76113 - DNA, 75 bp, synthetic construct
  source 1..75: mol_type = other DNA
aaaatatcaaaatcaatattggtgtaatgagatttgtggaaccaagatagcactcgaacgacgaagtaaagaacg

SEQ ID NO: 76114 - DNA, 75 bp, synthetic construct
  source 1..75: mol_type = other DNA
atctcaaaatctgttgttgataaaataggtaaacctgagtccaaattttttatttttaatgatgatttggattat

SEQ ID NO: 76115 - DNA, 75 bp, synthetic construct
  source 1..75: mol_type = other DNA
tccaggcggacgcctttccgtaaaccgacatcatctgatgctcgcccttcttccgatgatacgcctttgtcgggt

SEQ ID NO: 76116 - DNA, 75 bp, synthetic construct
  source 1..75: mol_type = other DNA
attcaattcccggcgtcaatgccaaaggggatcaggacacctctggtaatgcggctacagcgaccaagttgcaga

SEQ ID NO: 76117 - DNA, 75 bp, synthetic construct
  source 1..75: mol_type = other DNA
ttaaccgctgcgcatgttgctgcttttgccagaagagcaacggatacgtatgccgatgcggatgggggcgttccc

SEQ ID NO: 76118 - DNA, 75 bp, synthetic construct
  source 1..75: mol_type = other DNA
gagggaaaactgaatcattccgcacctatagccaaggtgccagtatgaaggagttagcaacctatgttaatttgg

SEQ ID NO: 76119 - DNA, 75 bp, synthetic construct
  source 1..75: mol_type = other DNA
gctgtgcggaaatttgcatccatttcctcttgctgtatggcataactattctgccgggccggatactgccgaaga

SEQ ID NO: 76120 - DNA, 75 bp, synthetic construct
  source 1..75: mol_type = other DNA
gcaaagttaactttgcggttaatacgctggggttctcccgccgcttccatgtcttcgccgcaccaaaacaggatg

SEQ ID NO: 76121 - DNA, 75 bp, synthetic construct
  source 1..75: mol_type = other DNA
tcagccgaaagccagccgtgattctattgtcggtttacatggcgacgaggtaaaagtcgccattaccgcgccgcc

SEQ ID NO: 76122 - DNA, 75 bp, synthetic construct
  source 1..75: mol_type = other DNA
gatgcgcgatgaatggcgtgatgtcctgaccagaggtatccgggatgaactggtccgtcgcggggtaatgaaaat

SEQ ID NO: 76123 - DNA, 75 bp, synthetic construct
  source 1..75: mol_type = other DNA
actttgccgccccccgttacaacctgctggccatcactgctaacaacgcggcaaccatcactttcagccagtggc

SEQ ID NO: 76124 - DNA, 75 bp, synthetic construct
  source 1..75: mol_type = other DNA
gaataacaacgggaaagtcgtgttcaactccggattcctgttgctggccgaccactataacttcctgccacgggc

SEQ ID NO: 76125 - DNA, 75 bp, synthetic construct
  source 1..75: mol_type = other DNA
cgacgccgaaatgctgtcgatggcggggaaaggctgcattatgggcagtgcgcaccagcgtctgaaagatctgca

SEQ ID NO: 76126 - DNA, 75 bp, synthetic construct
  source 1..75: mol_type = other DNA
ctttcagttcaatggcaggatgacagtgttgcttatataacgaaacaaatgactgttctgaaaaatgttgctatc

SEQ ID NO: 76127 - DNA, 75 bp, synthetic construct
  source 1..75: mol_type = other DNA
aaaggtggcgaatatgccaacctggatgccgtggtgatggatgccgttaacgagcttatcgacgtggtctatcag

SEQ ID NO: 76128 - DNA, 75 bp, synthetic construct
  source 1..75: mol_type = other DNA
cacgcaatgaatggcacgcaggagcgggaattatcgctggctgaattatcctggtgggcggtttgcaatcagatg

SEQ ID NO: 76129 - DNA, 75 bp, synthetic construct
  source 1..75: mol_type = other DNA
cggtaccggaacttgggctggtggtgctaaagccgggccgtgaatccatgcaggtatttcataaccctcgagtgc

SEQ ID NO: 76130 - DNA, 75 bp, synthetic construct
  source 1..75: mol_type = other DNA
ggtaaagacacagccgtgtgcgtgttgtggtaagccagctgacgatccgcatcacctgattggtcatggtcaggg

SEQ ID NO: 76131 - DNA, 75 bp, synthetic construct
  source 1..75: mol_type = other DNA
tgggggcaatatccggaagcattgctgtttgtaaactggctctataatcattcctctgtgctgcatgaacgggca

SEQ ID NO: 76132 - DNA, 75 bp, synthetic construct
  source 1..75: mol_type = other DNA
gaagacggtgatacgtaccgtgcgtgatgctgtggtgtctgtagcccgcgcggtctgggactgggtcttcttctg

SEQ ID NO: 76133 - DNA, 75 bp, synthetic construct
  source 1..75: mol_type = other DNA
gcgacacagttgcacgggaggctctgcacggagccggtaaagtcgcaggcccgtgacggcttcggtgaggcggtg

SEQ ID NO: 76134 - DNA, 75 bp, synthetic construct
  source 1..75: mol_type = other DNA
ggattacaatcccgaagataatcatggtgcacgctggctactgggaccggaactgttacgcactggcgctcatga

SEQ ID NO: 76135 - DNA, 75 bp, synthetic construct
  source 1..75: mol_type = other DNA
gacagacgatgagctggaaaccgtcatgcagcggctggacgatgcctttgagcatggtgcggatgtcagcattgt

SEQ ID NO: 76136 - DNA, 75 bp, synthetic construct
  source 1..75: mol_type = other DNA
ttaacggaaaccgtgatgaattaattgatacaactcaggcaaggccaattcagtattgcattaatggaacgtggt

SEQ ID NO: 76137 - DNA, 75 bp, synthetic construct
  source 1..75: mol_type = other DNA
gctgaaatggtcggcagtatgggggcatggttcggcaatgcatggaacacaatccaggacggctggaatgcactg

SEQ ID NO: 76138 - DNA, 75 bp, synthetic construct
  source 1..75: mol_type = other DNA
cgacagtcaatgcactgaggatatttaattcatcttttggtgccatttttcgccgttctgaagaatgcctgcata

SEQ ID NO: 76139 - DNA, 75 bp, synthetic construct
  source 1..75: mol_type = other DNA
atcgttcagtcatttaccgcaccgcggcttgagcattcaagaaaaccagatgtcgttcgtgaaaaacttgtgcaa

SEQ ID NO: 76140 - DNA, 75 bp, synthetic construct
  source 1..75: mol_type = other DNA
ttgcaacagtgccatatcctcatttctgaccatgtcattgaacgtatcaactgtaccaacggcaacgtgaactgg

SEQ ID NO: 76141 - DNA, 75 bp, synthetic construct
  source 1..75: mol_type = other DNA
ggttatgcagcaatccgcgacgggacccgcgcttaagatgcacttcgatctccgtcaggatgtgcgcggcaagtt

SEQ ID NO: 76142 - DNA, 75 bp, synthetic construct
  source 1..75: mol_type = other DNA
ttgcttggcatggcggcgcaacatcctgccagcttagtcagcgtgcgtcctaatggcctggaagacaccgcgcag

SEQ ID NO: 76143 - DNA, 75 bp, synthetic construct
  source 1..75: mol_type = other DNA
aaagcggggtttgtggcaatttttgattcagagaagcaaagatggatttcccgtgaggatcatcgtggtgaggtg

SEQ ID NO: 76144 - DNA, 75 bp, synthetic construct
  source 1..75: mol_type = other DNA
ccgatctctctgccggtatctccggtgaagtggtccacgttgacggcggtttcagcatcgctgcaatgaacgaac

SEQ ID NO: 76145 - DNA, 75 bp, synthetic construct
  source 1..75: mol_type = other DNA
agaaaaagtttgttgtagagacaaactatatatttaccgtagataagttaccagaggaattatattcaattgtca

SEQ ID NO: 76146 - DNA, 75 bp, synthetic construct
  source 1..75: mol_type = other DNA
ataagccagaaactgcagtttaccagaactaatattacccgcattacagattttttagaaaaaaccggatatgta

SEQ ID NO: 76147 - DNA, 75 bp, synthetic construct
  source 1..75: mol_type = other DNA
gtgaaagatgcagaagcagaaaaactgttccggatccgagaggcggaagaaacaaaaaacagcctgatgcaggta

SEQ ID NO: 76148 - DNA, 75 bp, synthetic construct
  source 1..75: mol_type = other DNA
cttatgctggccttgcgccggtaactcggcgatccggctcgtcaatacgcggtgagcatccctcgcgacggggta

SEQ ID NO: 76149 - DNA, 75 bp, synthetic construct
  source 1..75: mol_type = other DNA
atgaaaagcatattaattgaaaaaccgaatcaactggcgattgtcgaacgtgaaatacccaccccgtcagcgggt

SEQ ID NO: 76150 - DNA, 75 bp, synthetic construct
  source 1..75: mol_type = other DNA
aagcagtaaaggctgcgggaaaatctttatctgaagtagcccgtcgctttggttttaagtccactcaatccgtcg

SEQ ID NO: 76151 - DNA, 75 bp, synthetic construct
  source 1..75: mol_type = other DNA
caatggcaaatcaaaagaaaagctggtggacccgcatgcgcacggccatcaaaacgggtgacgctgacaccatga

SEQ ID NO: 76152 - DNA, 75 bp, synthetic construct
  source 1..75: mol_type = other DNA
aaaatcgtgtacgacagtcttgtttggccgcgctggctggttgttcgcaatcaatgattagcctcgttgctactg

SEQ ID NO: 76153 - DNA, 75 bp, synthetic construct
  source 1..75: mol_type = other DNA
gcaaatgcagataatagcctctaaattatcaaagagcagttatgggtactatttatcatctgtggtgaataaata

SEQ ID NO: 76154 - DNA, 75 bp, synthetic construct
  source 1..75: mol_type = other DNA
aaagagtaattacgccgttacaggtctgtacttctatgataacgacgtggttcagatggcgaaaaacttgaagcc

SEQ ID NO: 76155 - DNA, 75 bp, synthetic construct
  source 1..75: mol_type = other DNA
cgaaacaagcatactggcacatctgcaacagaaaacagtcacagtaagagccagttaaaaaggaacattcaggag

SEQ ID NO: 76156 - DNA, 75 bp, synthetic construct
  source 1..75: mol_type = other DNA
ccgtgaacagacggagtcaatgttcaacgaagaggccaaggcaatccggcgggtgacaaatggcattcatcttcg

SEQ ID NO: 76157 - DNA, 75 bp, synthetic construct
  source 1..75: mol_type = other DNA
attggaacactgaatggaaaaccagcactgatagatattcctcagccgaccaaaaaggaattaatagctattgct

SEQ ID NO: 76158 - DNA, 75 bp, synthetic construct
  source 1..75: mol_type = other DNA
gattcaaaggttaaattctatatcggcgatactcgctgctatacaagtattgagcaagcgatgcgtggcgtagat

SEQ ID NO: 76159 - DNA, 75 bp, synthetic construct
  source 1..75: mol_type = other DNA
attatcgacaatattgacggggttaattaccgcaaagatgttccgtaccagataacgtgtgaccctgatattacc

SEQ ID NO: 76160 - DNA, 75 bp, synthetic construct
  source 1..75: mol_type = other DNA
cttttagacaaagcgattgcacaggttgatactttccgctcctccctcggtgcggtgcaaaaccgtctggattcc

SEQ ID NO: 76161 - DNA, 75 bp, synthetic construct
  source 1..75: mol_type = other DNA
ggtggcgtgaacgcacagggccagccgttgccatcgttcgccatcacacgcagcagcggcgatcgccatcagttc

SEQ ID NO: 76162 - DNA, 75 bp, synthetic construct
  source 1..75: mol_type = other DNA
cgggtaacaggcgaggaaaaaacggagacgcacgacgaggaattaattgcattgtacaatacaaaaaacattcct

SEQ ID NO: 76163 - DNA, 75 bp, synthetic construct
  source 1..75: mol_type = other DNA
atggatttcagaatgagtgaacaatcacggaccataaaaatttataacctgctggccggaactaatgaatttatt

SEQ ID NO: 76164 - DNA, 75 bp, synthetic construct
  source 1..75: mol_type = other DNA
tcacacgcagcagcggcgatcgccatcagttccgcattgctgaccgcgaagcgtatacgggggtacgcgcttact

SEQ ID NO: 76165 - DNA, 75 bp, synthetic construct
  source 1..75: mol_type = other DNA
tggtaatccgctcacaggtgagctggggaccattgttgatgctgagcatctgaataacgtgcagggagctgtcag

SEQ ID NO: 76166 - DNA, 75 bp, synthetic construct
  source 1..75: mol_type = other DNA
tcaggtcgttgattaccgcgttgtgaagatgcccgttaccaaaggtgggaagctggagctgaccatcaccgaact

SEQ ID NO: 76167 - DNA, 75 bp, synthetic construct
  source 1..75: mol_type = other DNA
tgcgcgggctggcgaatatttaccgccagcagtcgccagaaaaagctgaagcgtttatcgcctcgctctctgcca

SEQ ID NO: 76168 - DNA, 75 bp, synthetic construct
  source 1..75: mol_type = other DNA
aaatgtccgccgtatgaatgacatttatttccgtccaattcatcgaaaccagtattttgaggaaatgaaagcatg

SEQ ID NO: 76169 - DNA, 75 bp, synthetic construct
  source 1..75: mol_type = other DNA
gcttcgctctgtgattcacatgaatgtgatattaaagaagatgactttctttctttggatgaattaaatgatttt

SEQ ID NO: 76170 - DNA, 75 bp, synthetic construct
  source 1..75: mol_type = other DNA
cgacgctaagcactgcacggtgattaacgccttgtcacgcaatggctggaaagagttcgcagaggattacggtat

SEQ ID NO: 76171 - DNA, 75 bp, synthetic construct
  source 1..75: mol_type = other DNA
ctgatgcgatgggttgccagaaagatattgcagagaagatacaaaaacagggaggtgattatttattcgcggtaa

SEQ ID NO: 76172 - DNA, 75 bp, synthetic construct
  source 1..75: mol_type = other DNA
ataaaagcggcaatgatgcttatatcattcagaccaaagatgtaacaactaatcaatcaactttcaatgccgcta

SEQ ID NO: 76173 - DNA, 75 bp, synthetic construct
  source 1..75: mol_type = other DNA
gtcgaaagcgcagatcatccagcaggcgggtaactctgtgctgtctaaagctaaccaggtaccgcagcaggttct

SEQ ID NO: 76174 - DNA, 75 bp, synthetic construct
  source 1..75: mol_type = other DNA
cgagcttatcgacgtggtctatcaggacgatgacgatctggttgtgatttgcggtcgtgaactgctgtctgacaa

SEQ ID NO: 76175 - DNA, 75 bp, synthetic construct
  source 1..75: mol_type = other DNA
actcagttaagcagtgcaattaacagtgaatcagaaacactggccgcaacaccgaaagcagttaaggctgcatat

SEQ ID NO: 76176 - DNA, 75 bp, synthetic construct
  source 1..75: mol_type = other DNA
aacggtacacgtccatcgcgccaatctgatggaaaaactgggcgtcagtaacgacgttgaactggcgcgccgcat

SEQ ID NO: 76177 - DNA, 75 bp, synthetic construct
  source 1..75: mol_type = other DNA
gaaaaagtatcgggtgttgctgaaccgtgttgatacatcactatctccagatatcgagtggccaagtcaaccata

SEQ ID NO: 76178 - DNA, 75 bp, synthetic construct
  source 1..75: mol_type = other DNA
atgcccacgcaatccgtttaccggaaaccgcatttttgcactgagcagcggcgacaatcagttcgggcaggattt

SEQ ID NO: 76179 - DNA, 75 bp, synthetic construct
  source 1..75: mol_type = other DNA
gcgcttcagcagtccggcggcgaagacggtggcagtgtggtgttcccgccggtgctggtgcagatgctcgaccgg

SEQ ID NO: 76180 - DNA, 75 bp, synthetic construct
  source 1..75: mol_type = other DNA
tgcgcgcgtcaaactgaatgtcgataaaaatttctcgctgaaggactcttcgctggaaatgctttatccgattta

SEQ ID NO: 76181 - DNA, 75 bp, synthetic construct
  source 1..75: mol_type = other DNA
caatcccaggtgagcgtgagcaactggaaggagtcaagcattctcagcgtggctcgaagatgcggacaccacacc

SEQ ID NO: 76182 - DNA, 75 bp, synthetic construct
  source 1..75: mol_type = other DNA
ggtgagccggtcagtctcgcttcgcgcgtgacgacggcaaccagtgccatttatcatgcgattaccgaaggctgg

SEQ ID NO: 76183 - DNA, 75 bp, synthetic construct
  source 1..75: mol_type = other DNA
tgaaccttttactggcgttgatgtgaaaaccgaagccaaaatcatcagcctgttgagggagttacgcgcggaagg

SEQ ID NO: 76184 - DNA, 75 bp, synthetic construct
  source 1..75: mol_type = other DNA
ttgtgttgttatcactggcggtggccggtctgtttctggtgaaacacaaaaatgccagcctgcgcgcctcgctgg

SEQ ID NO: 76185 - DNA, 75 bp, synthetic construct
  source 1..75: mol_type = other DNA
atgacaacctcttcgcataattccaccacaccttctgtttccgtaaccactgcatcagggaataaccagtctcaa

SEQ ID NO: 76186 - DNA, 75 bp, synthetic construct
  source 1..75: mol_type = other DNA
tggcgtcaccgggcatggcacgcatctgcctttacggggatttgcaacgatttggccaccgcatcgaccttcgtg

SEQ ID NO: 76187 - DNA, 75 bp, synthetic construct
  source 1..75: mol_type = other DNA
tccggagcaacaccttcgtcccttccgggtatcctgcaggcagatgcgttcgcaggttacgatcggctgttcagt

SEQ ID NO: 76188 - DNA, 75 bp, synthetic construct
  source 1..75: mol_type = other DNA
atgaatggattcagaaacagttcacggaacggtcaggtctggcgctggcagcgtgccggaagccgggccgttatt

SEQ ID NO: 76189 - DNA, 75 bp, synthetic construct
  source 1..75: mol_type = other DNA
ttaaccagatgggagccagccagcgcggggaagttctgcttgctcattacgatggcaatctggcgatccatgctg

SEQ ID NO: 76190 - DNA, 75 bp, synthetic construct
  source 1..75: mol_type = other DNA
aactgggaccgttataacccggcagaccaagacagttcgtgctggatccgtgtggcacaggcgtgggcaggcacc

SEQ ID NO: 76191 - DNA, 75 bp, synthetic construct
  source 1..75: mol_type = other DNA
atgtgcgcttttttattgagcttagtgctgcctgcgcaggctaccagctttaccgaatatctaccgatgagtgac

SEQ ID NO: 76192 - DNA, 75 bp, synthetic construct
  source 1..75: mol_type = other DNA
atgtcaaagctgatgattgtgctggtcgtgttgctatcgctggcggtggccggtctgtttctggcgaagcatgaa

SEQ ID NO: 76193 - DNA, 75 bp, synthetic construct
  source 1..75: mol_type = other DNA
gttctggcccgccagtaatcaccagtcgttatgcgctgcctgtcatggacggaagacaaccacaacagacccggt

SEQ ID NO: 76194 - DNA, 75 bp, synthetic construct
  source 1..75: mol_type = other DNA
gtggaatgtaccggctgtatgacttgcgtagagtcatgtccggtagcctcaacattgaccttttcactgcaaaaa

SEQ ID NO: 76195 - DNA, 75 bp, synthetic construct
  source 1..75: mol_type = other DNA
gtttcgccagaaactgaatgagggctggtatcaggtgcgcattgccgggcgtgatgcaggcgaaaacgaattatc

SEQ ID NO: 76196 - DNA, 75 bp, synthetic construct
  source 1..75: mol_type = other DNA
tggctgtcagaacgctttatgcttcctgcatcacagagatcaaacttcgctgaaatgaagcgaacgttcatcaat

SEQ ID NO: 76197 - DNA, 75 bp, synthetic construct
  source 1..75: mol_type = other DNA
taagattcgtcgcaatgccgaaagttgtatcgactgtggcaaatgcgcaaaaaattgcccatcacggatcccggt

SEQ ID NO: 76198 - DNA, 75 bp, synthetic construct
  source 1..75: mol_type = other DNA
ccccgtgttttcggctggatggaccgtctttgcgaagactactgtggtggtatctggaatctgtataccctgaac

SEQ ID NO: 76199 - DNA, 75 bp, synthetic construct
  source 1..75: mol_type = other DNA
atggtcagagaggcatatttcgacgcccctaatctggggcgtttgattcaggatgtctggaacaatccgggcttt

SEQ ID NO: 76200 - DNA, 75 bp, synthetic construct
  source 1..75: mol_type = other DNA
gacttgcgtagagtcatgtccggtagcctcaacattgaccttttcactgcaaaaacctgcggcaaataaaaaagc

SEQ ID NO: 76201 - DNA, 75 bp, synthetic construct
  source 1..75: mol_type = other DNA
tgggctggacgccggaacggattcaggaggcaaccggactttccggtgaagaactgaaaaaactgtttcctgatg

SEQ ID NO: 76202 - DNA, 75 bp, synthetic construct
  source 1..75: mol_type = other DNA
tatggttctggaaagtcagggagaatatgactcacaatgggcgacaatttgttccattgccccaaagattggctg

SEQ ID NO: 76203 - DNA, 75 bp, synthetic construct
  source 1..75: mol_type = other DNA
agcccggacgcccacagcgaccagcacggataacggcaaacagaacacctatttttcttcgctagataatatggt

SEQ ID NO: 76204 - DNA, 75 bp, synthetic construct
  source 1..75: mol_type = other DNA
ccacacaactcatttcttacgctggtaaaaaatttcttgtcgatccgatgcttgcgaaaaaagaagcctatccgg

SEQ ID NO: 76205 - DNA, 75 bp, synthetic construct
  source 1..75: mol_type = other DNA
cgctttctctcaataaggaagtcgaaaatttgttggattatcttgaatacctttcagacgagaaagagatttgct

SEQ ID NO: 76206 - DNA, 75 bp, synthetic construct
  source 1..75: mol_type = other DNA
ccattctactggccggatttgtgctcctgctccgtcaggctggtcgggccaggcatccacttctgcagtcgttgc

SEQ ID NO: 76207 - DNA, 75 bp, synthetic construct
  source 1..75: mol_type = other DNA
tcggtatctccggtattcacagttcttgttgctgattatcaaaagtatttcaaagtgtctgttgatacagcgtca

SEQ ID NO: 76208 - DNA, 75 bp, synthetic construct
  source 1..75: mol_type = other DNA
gttactttgttgctgttgcagaagagctgcatttcgggcgcgccgctgcccgcctgaatatttcgcaaccaccgc

SEQ ID NO: 76209 - DNA, 75 bp, synthetic construct
  source 1..75: mol_type = other DNA
cctcccctgcccggaaccctgtgtggaagaggccattgaagggcttcgacgggacatgctggggctgggcctgat

SEQ ID NO: 76210 - DNA, 75 bp, synthetic construct
  source 1..75: mol_type = other DNA
cattccacagtgggtgaccctggagctccgtgtcttcggctggatggaccgtctttgcgaagactactgcggtgg

SEQ ID NO: 76211 - DNA, 75 bp, synthetic construct
  source 1..75: mol_type = other DNA
ggattaccccagctatctggttgcggatattaatcctgatttaatcaacctctataaaaaggttgctgctgattg

SEQ ID NO: 76212 - DNA, 75 bp, synthetic construct
  source 1..75: mol_type = other DNA
gtgctgatggtatcccttatgttctggtgttgctgggcgtgtgtacggggagtaacagcgttgagcgttatctgc

SEQ ID NO: 76213 - DNA, 75 bp, synthetic construct
  source 1..75: mol_type = other DNA
tctgcgccagctttgatgaaacgctgacgatgttgaaggcgggagatgtggtgtattgcgatccgccatatgacg

SEQ ID NO: 76214 - DNA, 75 bp, synthetic construct
  source 1..75: mol_type = other DNA
tttgtaagcaggagacagtgaataaagcgtgggcgctggagcaaaccacggaagtacaggaaaaaatcagtgatg

SEQ ID NO: 76215 - DNA, 75 bp, synthetic construct
  source 1..75: mol_type = other DNA
tatgtgattggcgatcgcgcgaccgacattcaactggcggaaaacatgggcattaatggtttacgctacgaccgc

SEQ ID NO: 76216 - DNA, 75 bp, synthetic construct
  source 1..75: mol_type = other DNA
cgccagaaccagagacgtcttgcctacgcatcagaggtttaccggatttataccgggataaaaagcagtaaaggt

SEQ ID NO: 76217 - DNA, 75 bp, synthetic construct
  source 1..75: mol_type = other DNA
gtgaaaagatgcttgctgaggaacgccgtaagaaatggaatcagcagcaattaaacgctccaacacttgatttaa

SEQ ID NO: 76218 - DNA, 75 bp, synthetic construct
  source 1..75: mol_type = other DNA
atattcaactggcagaaaacatgggcattaatggtttacgctacgaccgcgaagccctgaactggccgatgattg

SEQ ID NO: 76219 - DNA, 75 bp, synthetic construct
  source 1..75: mol_type = other DNA
gtgatgatcactaatcaggatggtcttggaacacaaagtttcccgcaggcggatttcgatggcccgcacaacctg

SEQ ID NO: 76220 - DNA, 75 bp, synthetic construct
  source 1..75: mol_type = other DNA
cgttctgaaaaactgcgtcgtgaagttgaacaggctgaggccctgctgaaacaacgcgaacaggacagcgatcgt

SEQ ID NO: 76221 - DNA, 75 bp, synthetic construct
  source 1..75: mol_type = other DNA
aatttaaactgcgtattcgtcagcagatagaagatccgattatgcgcaaagccgtagctaatgcgcaggagcgta

SEQ ID NO: 76222 - DNA, 75 bp, synthetic construct
  source 1..75: mol_type = other DNA
gatctgcctgatgctgacggcgagagcttccgcagctggtttaagaaacatcaggcgcaggagaaaaagaatgga

SEQ ID NO: 76223 - DNA, 75 bp, synthetic construct
  source 1..75: mol_type = other DNA
gcaaaatatgcaaagaatggtttcacccggcattctcaaatcagtggtggtgctgcccggaacacggaactcaat

SEQ ID NO: 76224 - DNA, 75 bp, synthetic construct
  source 1..75: mol_type = other DNA
gcagcaacagaacgcgaaacccgcgcacaacttccgcatacccatctgatttttgtcgcccgtattcgtcagggg

SEQ ID NO: 76225 - DNA, 75 bp, synthetic construct
  source 1..75: mol_type = other DNA
tgatacaggcgaaaacgaattatcagcccgtcttaatgaaccgctggaaaatggtgccgtgatccacatcgtacc

SEQ ID NO: 76226 - DNA, 75 bp, synthetic construct
  source 1..75: mol_type = other DNA
gtcatctcctccggcggtctggttcgcgtactcaccgaaccggcaggggaaacacccggagcaacacctccgccc

SEQ ID NO: 76227 - DNA, 75 bp, synthetic construct
  source 1..75: mol_type = other DNA
gcagttgggcctggaggtggcggtgctggattatgtcctaattcatcaacgggtcagtcgggtgccggagcagat

SEQ ID NO: 76228 - DNA, 75 bp, synthetic construct
  source 1..75: mol_type = other DNA
ccgacagcggtggtgaacatgcggcggtgttgtactcgctgatcggcacatgccgtctgaacaatgtggagccag

SEQ ID NO: 76229 - DNA, 75 bp, synthetic construct
  source 1..75: mol_type = other DNA
ttaatgccatcgggcaaaagctggcggtggcaggtgtacgggatgcgaattattaccctgagggaatgcacagcc

SEQ ID NO: 76230 - DNA, 75 bp, synthetic construct
  source 1..75: mol_type = other DNA
tatcagtatccgttgaatccggtcataaatgtagatccgcaaggtttggttgatataaatttataccccgaaagt

SEQ ID NO: 76231 - DNA, 75 bp, synthetic construct
  source 1..75: mol_type = other DNA
gtcgtgctggctgatgagcaacttaaagatattggcaatctgcaaattgtacccgacgggcgcaaatcagcgcgt

SEQ ID NO: 76232 - DNA, 75 bp, synthetic construct
  source 1..75: mol_type = other DNA
agccttgaaagcaattgaatatgtaaggcagttatatgggatcgatgttagactaaaaatttgtggatgtactcc

SEQ ID NO: 76233 - DNA, 75 bp, synthetic construct
  source 1..75: mol_type = other DNA
tcgtttgtggtcatccattcagggggcgtggacatcgtcgggccgaaaatcaatctcaatagcggcggtagtccg

SEQ ID NO: 76234 - DNA, 75 bp, synthetic construct
  source 1..75: mol_type = other DNA
ctgtacaactattcgtatactgatacacgcggcacgaaagtaaatgctgaaccgtccagagaatatctaaacccg

SEQ ID NO: 76235 - DNA, 75 bp, synthetic construct
  source 1..75: mol_type = other DNA
aagtggtaagctcgaattgttaaacaacgaaattgaaacgcagaaaattcttctgtccagaggaaacagcttagt

SEQ ID NO: 76236 - DNA, 75 bp, synthetic construct
  source 1..75: mol_type = other DNA
gacgcaacaggacaccatccgccagatggccgaatataaccgcctgctctcacagcgggtggcggcttatgcttc

SEQ ID NO: 76237 - DNA, 75 bp, synthetic construct
  source 1..75: mol_type = other DNA
ggaaaaactggctgttcgcgggttccgacagcggtggtgaacatgcggcggtgttgtactcgctgatcggcacat

SEQ ID NO: 76238 - DNA, 75 bp, synthetic construct
  source 1..75: mol_type = other DNA
tctataaaaaggttgctgctgattgtgaggcgtttatatctagcgccagaattttgtttgaggaagcaaacaggg

SEQ ID NO: 76239 - DNA, 75 bp, synthetic construct
  source 1..75: mol_type = other DNA
cagcattggcgtgtcagctggcgagagtaaatctgcaacagaaatcattgccaccaaatcagctgggtggtttgg

SEQ ID NO: 76240 - DNA, 75 bp, synthetic construct
  source 1..75: mol_type = other DNA
acaccgcgcagccgatattgccagcgcaaaatcaggccttaccgccggaagttcgtgcgtttcttaatgccggga

SEQ ID NO: 76241 - DNA, 75 bp, synthetic construct
  source 1..75: mol_type = other DNA
gatattaatcctgatttaatcaacctctataaaaaggttgccgctgattgtgaatcgtttatatctcgcgccaga

SEQ ID NO: 76242 - DNA, 75 bp, synthetic construct
  source 1..75: mol_type = other DNA
ggagcataacgctgaccagatacttacagctattgattcctgcctgcgccttgaatatctgatggaacgccgctt

SEQ ID NO: 76243 - DNA, 75 bp, synthetic construct
  source 1..75: mol_type = other DNA
tggaagccctgcatgaacgccatgaagaagttcaggcgctgctgggtgatgcgcaaaccatcgctgaccaggaac

SEQ ID NO: 76244 - DNA, 75 bp, synthetic construct
  source 1..75: mol_type = other DNA
aagagacggaggccttcctgcgttctgcgctggcacgtgccgaagaaaagatcgaagaagatgaacgggaaatag

SEQ ID NO: 76245 - DNA, 75 bp, synthetic construct
  source 1..75: mol_type = other DNA
atgaaaatcatcccccgtggtgaagccatgcgtattcaccgtcagcatcctgcatcccgtctttttccgttctgt

SEQ ID NO: 76246 - DNA, 75 bp, synthetic construct
  source 1..75: mol_type = other DNA
gatgacgtacagtcatcacgcctgccgtacggagtgttatgccatgacggtccactattaccgtctgcgggatta

SEQ ID NO: 76247 - DNA, 75 bp, synthetic construct
  source 1..75: mol_type = other DNA
tctttatacacacacaaacgccccggaaacggaataatccgtttcatagttcggttttgtgtactcatcctggcg

SEQ ID NO: 76248 - DNA, 75 bp, synthetic construct
  source 1..75: mol_type = other DNA
tagcttcatggctcggctggctgaaatggaaaaggaactcagtgaggcaaagcaggcggtcattctcaacgcacc

SEQ ID NO: 76249 - DNA, 75 bp, synthetic construct
  source 1..75: mol_type = other DNA
cgccatcagcgggagcagcacaccatacgtcagtaaggggctgaattctgaccgcattcccggcactgagcggca

SEQ ID NO: 76250 - DNA, 75 bp, synthetic construct
  source 1..75: mol_type = other DNA
ccgcgccctgttcagtctgaaactgttccgcactcgtaccttttcgctgggcctggcggggagctttgccggacg

SEQ ID NO: 76251 - DNA, 75 bp, synthetic construct
  source 1..75: mol_type = other DNA
atggagaagatagcaatattcagcctgaccaccagcaaaccgcaaatgctcactgcaatactgaaagacggtgct

SEQ ID NO: 76252 - DNA, 75 bp, synthetic construct
  source 1..75: mol_type = other DNA
atgcgcaaaaagtatatgccccgggctcttggtccgctgcttcttgtcgtgctgtcaccagctgtcgcccagcaa

SEQ ID NO: 76253 - DNA, 75 bp, synthetic construct
  source 1..75: mol_type = other DNA
acctttgggcgttatggtgtcggtggcatcaccctggccgaagcccgcgagctgttgggtgacgccaagaagatg

SEQ ID NO: 76254 - DNA, 75 bp, synthetic construct
  source 1..75: mol_type = other DNA
atcagcaaaaggggatgataagtttatcaccaccgactatttgcaacagtgccgccgatatgatccaactgataa

SEQ ID NO: 76255 - DNA, 75 bp, synthetic construct
  source 1..75: mol_type = other DNA
ccccgactgcccgtggcagcatattgtgttcacacttccctgccagtactggtccctggtgttccacaaccggtg

SEQ ID NO: 76256 - DNA, 75 bp, synthetic construct
  source 1..75: mol_type = other DNA
atttcgtcagaaactgagcgacggctggtaccaggtacgcattgccgggcgtgatgcaggtgaaaccgaattgtc

SEQ ID NO: 76257 - DNA, 75 bp, synthetic construct
  source 1..75: mol_type = other DNA
aatgaccgtggtcatggtttgtttaatcctgcggctgacattaaaccttcgtctatcgccatatttaaaccacga

SEQ ID NO: 76258 - DNA, 75 bp, synthetic construct
  source 1..75: mol_type = other DNA
tcgagcacttacgcccgatgaaatcggcttgatgtaccagtacatggagcgcattggcaccacaccttcgatccg

SEQ ID NO: 76259 - DNA, 75 bp, synthetic construct
  source 1..75: mol_type = other DNA
gacgagccactggtgttagatcgttatcagcaaaatccggttaccggtgggctgatttttatcgatcgcctgagc

SEQ ID NO: 76260 - DNA, 75 bp, synthetic construct
  source 1..75: mol_type = other DNA
ttctggttaagaagctcgaccgtcttggccgcgacactgccgatatgatccaactgataaaggaatttgacgctc

SEQ ID NO: 76261 - DNA, 75 bp, synthetic construct
  source 1..75: mol_type = other DNA
catgccgcctggttattaatgttgccaaccataaatatccagggcggggcgttactggtgttatttcttttggcg

SEQ ID NO: 76262 - DNA, 75 bp, synthetic construct
  source 1..75: mol_type = other DNA
ccagtacctacatcccccacccgctgctcagccagcaggctttttcgcgttttgtgcaggactatctggtatttg

SEQ ID NO: 76263 - DNA, 75 bp, synthetic construct
  source 1..75: mol_type = other DNA
taaaatgagagaaatcactctcggagaaaaccccaacgtcaccattcccctgcttggttttatgggcgtaccgac

SEQ ID NO: 76264 - DNA, 75 bp, synthetic construct
  source 1..75: mol_type = other DNA
tttctgccgcgtccggcaaccggaaaccggtggtgaaaatcgcatcttctgccggcgcttcggcacagtcaataa

SEQ ID NO: 76265 - DNA, 75 bp, synthetic construct
  source 1..75: mol_type = other DNA
tgctcgttgcgattcttggtgttaacgcccccgattacatcacatcgaacgtgaactctcgtgaatatcattcac

SEQ ID NO: 76266 - DNA, 75 bp, synthetic construct
  source 1..75: mol_type = other DNA
atggattgtcgagccgtcttactgattgaggacaggaaaggcaaaataataatgagaatattcatcgtattagct

SEQ ID NO: 76267 - DNA, 75 bp, synthetic construct
  source 1..75: mol_type = other DNA
tgaaacaagaattttccggcgtatctgatgatgcgagtgatgcgctttctgcaatatccgaactgattagagcat

SEQ ID NO: 76268 - DNA, 75 bp, synthetic construct
  source 1..75: mol_type = other DNA
ttgcgacggaggcaatccactggcctgaacgtgtggatgaacacaaaaaggccaacgcctttgtcggcacagccc

SEQ ID NO: 76269 - DNA, 75 bp, synthetic construct
  source 1..75: mol_type = other DNA
aataaaagtattatgccgctgcaaggtttgtgatcatgagtggtattctacacctaaaagccttaagatcgggag

SEQ ID NO: 76270 - DNA, 75 bp, synthetic construct
  source 1..75: mol_type = other DNA
atattatgggacatttagtgcctgtcagttttatttatgacattggaggggtcattaatggcaacagaataagtg

SEQ ID NO: 76271 - DNA, 75 bp, synthetic construct
  source 1..75: mol_type = other DNA
cgcttttaatgggctttactggtgtggcgatggcgcaaagtgtcaccgtcgatgtgccgagtggatacaaagtgg

SEQ ID NO: 76272 - DNA, 75 bp, synthetic construct
  source 1..75: mol_type = other DNA
tcggacttgccggtattattgaagtttgtaatatctttatcacgccaacaatttaccttctgctcaacattttta

SEQ ID NO: 76273 - DNA, 75 bp, synthetic construct
  source 1..75: mol_type = other DNA
cgcaacctgcggcaaaaaaaatgaccgccagcgccccgaaaatggaggcattcacctttggtgagccggtgccgg

SEQ ID NO: 76274 - DNA, 75 bp, synthetic construct
  source 1..75: mol_type = other DNA
ataaaacagaggcattatctcagaataataaatataatgaagaaaaatcgggtcaggaaagaatgcccggggctg

SEQ ID NO: 76275 - DNA, 75 bp, synthetic construct
  source 1..75: mol_type = other DNA
aagtcgcaatatccgacatactcctggaatgaaaacagatcgtcttaaagataaaggaagtgacgacaaggacgg

SEQ ID NO: 76276 - DNA, 75 bp, synthetic construct
  source 1..75: mol_type = other DNA
gccgttgttgctgtaggaacaatcctgaacaagctctttgctgttgcactcacaaacattcaggcagattcgctg

SEQ ID NO: 76277 - DNA, 75 bp, synthetic construct
  source 1..75: mol_type = other DNA
cacgaaccgctttggtgaagttatcgcccttgagccagctttggcaaaatacacccgacgcggattagacctgga

SEQ ID NO: 76278 - DNA, 75 bp, synthetic construct
  source 1..75: mol_type = other DNA
ccagcacctacatccctcacccgcttctcagccagcaggctttttcgcgttttgtgctggactatctggtatttg

SEQ ID NO: 76279 - DNA, 75 bp, synthetic construct
  source 1..75: mol_type = other DNA
ttccgtccgccctgctcaatgagtccgccacgctgttccgccgtaagtattacatcaacggcagtcatgcaggct

SEQ ID NO: 76280 - DNA, 75 bp, synthetic construct
  source 1..75: mol_type = other DNA
cgaacgccgaatgatagagcttataagggaacaaaaagatttaattccagaaaaatatttacatcaatcaggtat

SEQ ID NO: 76281 - DNA, 75 bp, synthetic construct
  source 1..75: mol_type = other DNA
gcctgtcgtacggagaattatgccatgacggtccattattatcggttgcgggattacgccctgcagcatccggaa

SEQ ID NO: 76282 - DNA, 75 bp, synthetic construct
  source 1..75: mol_type = other DNA
atgatgtcagataccacactctcccgcccggaggtggtcagcgggcatacggacgttatctattccacctcagtc

SEQ ID NO: 76283 - DNA, 75 bp, synthetic construct
  source 1..75: mol_type = other DNA
atgagcctgaccctcacacttactggcactggcggcgcacagggcgttcccgcatggggctgtgagtgcgtggcc

SEQ ID NO: 76284 - DNA, 75 bp, synthetic construct
  source 1..75: mol_type = other DNA
gcgaaactgaagcttatcgcggagaaaacgaaaaaaggctatgtggaaaatgcttcagcaaacgtgcatatcccc

SEQ ID NO: 76285 - DNA, 75 bp, synthetic construct
  source 1..75: mol_type = other DNA
tgcgcttcttcagtgggaacaagagcagacagaaggcgtctcagatccatttgccggactggaaaacgcgctttt

SEQ ID NO: 76286 - DNA, 75 bp, synthetic construct
  source 1..75: mol_type = other DNA
actcaaatataaaccagtaaaaggcgcagtaaccaccatcattccacctaatcacgaagcagaatcgctacctag

SEQ ID NO: 76287 - DNA, 75 bp, synthetic construct
  source 1..75: mol_type = other DNA
gaagaagctctgaagcgcatcagtgaactgtacgccattgaggatgaaatacggggcttaccggagtctgaacgt

SEQ ID NO: 76288 - DNA, 75 bp, synthetic construct
  source 1..75: mol_type = other DNA
gattttggcggtacgccggcaaatcacgcagcacagtttggtgcgctggttgataaattccgtgcagacctggcg

SEQ ID NO: 76289 - DNA, 75 bp, synthetic construct
  source 1..75: mol_type = other DNA
atgcccgataaagccaaaacccttctgttttcagtcctgctgttaccggccacggcaatggccacaaccggaaat

SEQ ID NO: 76290 - DNA, 75 bp, synthetic construct
  source 1..75: mol_type = other DNA
aaagtgattccacaggcaccgagccatgcctacgggatgtttatggaacgttttaacgagttatcggagttacgc

SEQ ID NO: 76291 - DNA, 75 bp, synthetic construct
  source 1..75: mol_type = other DNA
ttaatggcggtaatttcgttgcaaaaaatgaaaaaggtagtgcgacagggatatctctggaaggggccaagggaa

SEQ ID NO: 76292 - DNA, 75 bp, synthetic construct
  source 1..75: mol_type = other DNA
gacagcctgccgccggtggagtggctgacctacggcagcggttacctggcgggcatgaagctgggcgggacgccg

SEQ ID NO: 76293 - DNA, 75 bp, synthetic construct
  source 1..75: mol_type = other DNA
cggactaatcgggagctgtcggttgaacggtatcgatccagaagcgtatctgcgccatatcctgagcgtactgcc

SEQ ID NO: 76294 - DNA, 75 bp, synthetic construct
  source 1..75: mol_type = other DNA
tatttatacccgtgccatgcaaccacagcttgctgtagtcatggcggcattttttaacttttttggcgtattgct

SEQ ID NO: 76295 - DNA, 75 bp, synthetic construct
  source 1..75: mol_type = other DNA
aaggacaattaattgagatacctgtaccaatcccctgcccggataatccggaaaaatcccttgccatccagtctg

SEQ ID NO: 76296 - DNA, 75 bp, synthetic construct
  source 1..75: mol_type = other DNA
gctggtggttcgggcggttcaaccaatggtgttcaggcctcaaagtccgtggataaggtaagcgtcagttatgac

SEQ ID NO: 76297 - DNA, 75 bp, synthetic construct
  source 1..75: mol_type = other DNA
accgctatggctcactcacggcacatcaagtcagcacttaaagcaatccacgcagacaaccctaacgcctcttat

SEQ ID NO: 76298 - DNA, 75 bp, synthetic construct
  source 1..75: mol_type = other DNA
agtctaaaagagggatgaaaagtaaaggaggtggacgaccatcgttgggtgagccatggaaggatttaggtatta

SEQ ID NO: 76299 - DNA, 75 bp, synthetic construct
  source 1..75: mol_type = other DNA
gattctgacgtacccatgagtagtgcaactctgaatcgggtgatggcgatgacttacaagctggcccagaaagag

SEQ ID NO: 76300 - DNA, 75 bp, synthetic construct
  source 1..75: mol_type = other DNA
ttggcctgttcttccgcacgctggatgccattggtgctatgggcactatgaaaatggctttaaaactggtgctta

SEQ ID NO: 76301 - DNA, 75 bp, synthetic construct
  source 1..75: mol_type = other DNA
tcctgaaaaccagattcaggtttatgtggagaacgaagacggctctcacgttcctgtttcgcaaccaatcatcat

SEQ ID NO: 76302 - DNA, 75 bp, synthetic construct
  source 1..75: mol_type = other DNA
aggctgtagccatactggcagaacttcagacatgggcaggtgaaaatggtctgatctttacgggagcacacgacc

SEQ ID NO: 76303 - DNA, 75 bp, synthetic construct
  source 1..75: mol_type = other DNA
aggccgatatttgtgaatcacttcacgaccacgccgacgagctttaccgcagctgcctcgcacgcttcggggatg

SEQ ID NO: 76304 - DNA, 75 bp, synthetic construct
  source 1..75: mol_type = other DNA
ctcaacgaactggacgcggatgaacaggcagatatctgtgaatcgcttcacgaccacgccgatgagctttaccgc

SEQ ID NO: 76305 - DNA, 75 bp, synthetic construct
  source 1..75: mol_type = other DNA
ttttgaccgcaaatattgatggtcaagatgttcaatttactattgacagtaatgcacccacgggtgccggcgcaa

SEQ ID NO: 76306 - DNA, 75 bp, synthetic construct
  source 1..75: mol_type = other DNA
tgtttcgcgaagaggcatttaattgcccgcactgtgaggcttatgcaaagcaagagtggtttaccttaagctttc

SEQ ID NO: 76307 - DNA, 75 bp, synthetic construct
  source 1..75: mol_type = other DNA
ggatgccgggggtaggaataatggcgagtaatctgctgttttctctcggtgccagtatgacactgggtggtgttg

SEQ ID NO: 76308 - DNA, 75 bp, synthetic construct
  source 1..75: mol_type = other DNA
aattgcctgttggctatgtggtgggtgcctacacaaccacttgaagcattgaaggttgtagaagcgtggggcttt

SEQ ID NO: 76309 - DNA, 75 bp, synthetic construct
  source 1..75: mol_type = other DNA
agctactcaaggggtgtgatgtcgaatggatttctctggggaatattggcaaattcatccgtggcaatgggctac

SEQ ID NO: 76310 - DNA, 75 bp, synthetic construct
  source 1..75: mol_type = other DNA
ggaatggggtgttgatgatagtcagcgtgggtacttcgttcgctatggcgtgagcaaggcgaattatggctctcc

SEQ ID NO: 76311 - DNA, 75 bp, synthetic construct
  source 1..75: mol_type = other DNA
accaggagctggtgaaactggttactgaacgcagcaatcaacctctgcatgaggtggacctggacagctatttat

SEQ ID NO: 76312 - DNA, 75 bp, synthetic construct
  source 1..75: mol_type = other DNA
atacctgtatgacgatggagcaggccaatgagaaggccaaaaaactggagcagtcctcagaagcaaagccggttg

SEQ ID NO: 76313 - DNA, 75 bp, synthetic construct
  source 1..75: mol_type = other DNA
ttatattgataaccaggatgtttatcatcagccatccagcgtgttttttgttattaaaccgtctgcgtggggaaa

SEQ ID NO: 76314 - DNA, 75 bp, synthetic construct
  source 1..75: mol_type = other DNA
ccctggagcgctgcaccatacaacgtggcatgagttactttttccctcctgaggtgatgggggcgcatattggcc

SEQ ID NO: 76315 - DNA, 75 bp, synthetic construct
  source 1..75: mol_type = other DNA
tgccggagacatatgaccaccccgaaccgcgtattatgcagttagcccgtcgcagtacagtcacgccgggaggta

SEQ ID NO: 76316 - DNA, 75 bp, synthetic construct
  source 1..75: mol_type = other DNA
taacccggctctggatatggctggtgcattgaccacggtaaaacgccagcatcgccctgctctggatctttcacg

SEQ ID NO: 76317 - DNA, 75 bp, synthetic construct
  source 1..75: mol_type = other DNA
cctcttcgcagataaggacggagaaaaatacggtcgcgcaaacaaactttctggtctggataaggcactggctgc

SEQ ID NO: 76318 - DNA, 75 bp, synthetic construct
  source 1..75: mol_type = other DNA
gctggatctcctgcgcgaacgttttccccgtgttgagtttgagtcctgcgcttccggcggtggacgtatcgactt

SEQ ID NO: 76319 - DNA, 75 bp, synthetic construct
  source 1..75: mol_type = other DNA
gcagtcctcgctctgatttaattattaaaacccgtccacatgcagaaattatctggtggggctctgcactgaaac

SEQ ID NO: 76320 - DNA, 75 bp, synthetic construct
  source 1..75: mol_type = other DNA
aaaaataggtccgaggtgtgtcgcttttgttgaaagtgagattgatgaatggattgaagcggctattcgacactc

SEQ ID NO: 76321 - DNA, 75 bp, synthetic construct
  source 1..75: mol_type = other DNA
atgaccaataatcccccttcagcacagattaagcccggcgagtatggttttcctcttaagttaaaagcccgttat

SEQ ID NO: 76322 - DNA, 75 bp, synthetic construct
  source 1..75: mol_type = other DNA
cgggtgcacatgacccgcgtaaaccaatcagtgaaaatactgtaaataaagccctgagggtgatggggtatgaca

SEQ ID NO: 76323 - DNA, 75 bp, synthetic construct
  source 1..75: mol_type = other DNA
tcgttcacgacgggatacgaccgacgcaaactggtcgccgtgggcgcagctttacacctcggctcatcctcctgc

SEQ ID NO: 76324 - DNA, 75 bp, synthetic construct
  source 1..75: mol_type = other DNA
tgaggcgtgagtcggcgaattacataggggctcgcagcttccgggctgcaataaagccggatataaagctgcaac

SEQ ID NO: 76325 - DNA, 75 bp, synthetic construct
  source 1..75: mol_type = other DNA
taccaggacaagagccattacgggtattgatggtgatatccgaatcaacaaagcattatggatgattgccgaaca

SEQ ID NO: 76326 - DNA, 75 bp, synthetic construct
  source 1..75: mol_type = other DNA
aagaatctgcccgcagaaaaaaaagccgaatttctggcaactctgattgcaatgaaattaaaaggtgaaatctga

SEQ ID NO: 76327 - DNA, 75 bp, synthetic construct
  source 1..75: mol_type = other DNA
agcacctacagcggcacagtcggccaacaatacacagattgccaccacggcttttgtgaaatcagcaattgcggc

SEQ ID NO: 76328 - DNA, 75 bp, synthetic construct
  source 1..75: mol_type = other DNA
acactcgatgtggcagctacggcagcagcatgtacgaatgccacaagtaatacattagttttcacgtctatttaa

SEQ ID NO: 76329 - DNA, 75 bp, synthetic construct
  source 1..75: mol_type = other DNA
cacaaggtaaaacgaggttgcagattcaggaagagctaggaatctctagagcaacttattacagacttgctaaat

SEQ ID NO: 76330 - DNA, 75 bp, synthetic construct
  source 1..75: mol_type = other DNA
ctcgcggttatgctgaatttactggtttttattcgttccagtgaactcagataagcccgttggtctgaaattgat

SEQ ID NO: 76331 - DNA, 75 bp, synthetic construct
  source 1..75: mol_type = other DNA
cgccaaaaaattgctgccgtttataccggcgaatgcgggcattctgctggttccgtgctgtcgtggtggttcagc

SEQ ID NO: 76332 - DNA, 75 bp, synthetic construct
  source 1..75: mol_type = other DNA
agttgggcgggatattcttgcgaaatcgaccgttgccgccgttatcgaatacctcggtttacgagaactcggcac

SEQ ID NO: 76333 - DNA, 75 bp, synthetic construct
  source 1..75: mol_type = other DNA
ctggccgttatgctgaatttactggtttttattcgttccagtgaactcagataagcccgttggtctgaaattgat

SEQ ID NO: 76334 - DNA, 75 bp, synthetic construct
  source 1..75: mol_type = other DNA
ccgtgatgcataaacgtgagcagcgccgtaagtcgctggagtttttccgttctcatgaactggtgaacgaagacg

SEQ ID NO: 76335 - DNA, 75 bp, synthetic construct
  source 1..75: mol_type = other DNA
gcaatagaagtatttggaactggtggttccaatgataatgggctggctaaagtcgtttatccaattgcactacct

SEQ ID NO: 76336 - DNA, 75 bp, synthetic construct
  source 1..75: mol_type = other DNA
ccataacgctctgaacgatgcacgttaccaggcgaaatacgtttcagccatctggcaaaaactgctcccgagtca

SEQ ID NO: 76337 - DNA, 75 bp, synthetic construct
  source 1..75: mol_type = other DNA
aaagcccgacattgaccggaacacccaaagcgccaacgccagcggaggggaataacaccacgcagattgcgacca

SEQ ID NO: 76338 - DNA, 75 bp, synthetic construct
  source 1..75: mol_type = other DNA
atgcgactggcttcccgttttggccgatataattccattcgccgtgagcgcccgttaacggatgacgaattaatg

SEQ ID NO: 76339 - DNA, 75 bp, synthetic construct
  source 1..75: mol_type = other DNA
gcgaatccctgcgctggagtctgctggttgccctgaacaagacccgcccttacaccgccagcgagacgctgctgc

SEQ ID NO: 76340 - DNA, 75 bp, synthetic construct
  source 1..75: mol_type = other DNA
tattttatggacataaaacaccaaagagcgttgagatatatctttctgaaaaaaatattatttataaaataatta

SEQ ID NO: 76341 - DNA, 75 bp, synthetic construct
  source 1..75: mol_type = other DNA
aagcagaagagcgaatccacttaccagacggtgtacggcagttacaaaaacaaaacggaaaagaatattcacttt

SEQ ID NO: 76342 - DNA, 75 bp, synthetic construct
  source 1..75: mol_type = other DNA
gtgatgatcactaatcaggatggtctgggaacacaaagtttcccgcaggcggatttcgatggcccgcacaacctg

SEQ ID NO: 76343 - DNA, 75 bp, synthetic construct
  source 1..75: mol_type = other DNA
tgggcagattttctggatgcaaacagggaggagtgtatcagtccgtttgaatatgcaaaagttaacaatccactg

SEQ ID NO: 76344 - DNA, 75 bp, synthetic construct
  source 1..75: mol_type = other DNA
aacatctggaagaacggcgactgatgttgcaatggtgggccgattttctggatgcgaaccgggagaagggtatca

SEQ ID NO: 76345 - DNA, 75 bp, synthetic construct
  source 1..75: mol_type = other DNA
atttcagttcatgggcgcgcaggagcattattccggatcgtatggcaaccgctattctgaacgcagccgggcgca

SEQ ID NO: 76346 - DNA, 75 bp, synthetic construct
  source 1..75: mol_type = other DNA
tggcgaaaaaaaaggcaacattgctacgcgctttgatgaaaatggcgacatttgtcttgatcaggcatttctgca

SEQ ID NO: 76347 - DNA, 75 bp, synthetic construct
  source 1..75: mol_type = other DNA
atattgccgggtctggttattacggttcggcatcccgaacgaacaaaaactgggtatcatcaaatcgcccgacgc

SEQ ID NO: 76348 - DNA, 75 bp, synthetic construct
  source 1..75: mol_type = other DNA
gatagctccatttggacacaacatggagttatataaacacatgaggaaaaagtatccttatgagttattcagagc

SEQ ID NO: 76349 - DNA, 75 bp, synthetic construct
  source 1..75: mol_type = other DNA
ggctatatcgtcggttccgccattgccaaaggacgcctcaccgcccttgatacggacgccgcgcaaaaagcgccg

SEQ ID NO: 76350 - DNA, 75 bp, synthetic construct
  source 1..75: mol_type = other DNA
atcactgtctccatgatgtggaggatatgacagggcttaatcatcccaaagcggatttatcgaaaggtcagtacg

SEQ ID NO: 76351 - DNA, 75 bp, synthetic construct
  source 1..75: mol_type = other DNA
atggcatttaaacactacgatgtggtcagggcggcatcgccgtcagaccttgctgaacgactgacacaaaaactg

SEQ ID NO: 76352 - DNA, 75 bp, synthetic construct
  source 1..75: mol_type = other DNA
gatggtctcggacaggtggacagccatttgtttgccggactgtatgagcttcttggagcgaagccgggtcaggcg

SEQ ID NO: 76353 - DNA, 75 bp, synthetic construct
  source 1..75: mol_type = other DNA
atggaggtaaaattgataaacagttagcgaataaaatttttaaacaatatcaccacgagttaataactgaagtaa

SEQ ID NO: 76354 - DNA, 75 bp, synthetic construct
  source 1..75: mol_type = other DNA
ctacagctcacaggttgcaacgccggataatatggagctgatgtaccagctctacgcgctggctagccgaaaacc

SEQ ID NO: 76355 - DNA, 75 bp, synthetic construct
  source 1..75: mol_type = other DNA
gaaccgtggggcaggggctgcatatcgccaaaaaactgctgccgtttataccggcgaatgcgggcattctgctgg

SEQ ID NO: 76356 - DNA, 75 bp, synthetic construct
  source 1..75: mol_type = other DNA
gcagacggacgcggcgggacggcggacagagtacggtctgaatgtggtgtccggcgatatcacggacatcaccac

SEQ ID NO: 76357 - DNA, 75 bp, synthetic construct
  source 1..75: mol_type = other DNA
taaggcgctgctggctcaggacagaacaattgcggcaagtcagatgcaactggagcagttaaacaaattgcctgc

SEQ ID NO: 76358 - DNA, 75 bp, synthetic construct
  source 1..75: mol_type = other DNA
aaagtactcggcaggcacattcccgtgccaccctcagtcatgcggcaggcctacagacagcttgccagccagttc

SEQ ID NO: 76359 - DNA, 75 bp, synthetic construct
  source 1..75: mol_type = other DNA
aaatcttctacgatcacggcgaccacatttggggtggccctccgggaagtccggaagaagacggcgaccgctaca

SEQ ID NO: 76360 - DNA, 75 bp, synthetic construct
  source 1..75: mol_type = other DNA
cttacttcgaggcttctgaagaagatcgaaaggagttcctacgggttcttagtcatttttataaggataaccgaa

SEQ ID NO: 76361 - DNA, 75 bp, synthetic construct
  source 1..75: mol_type = other DNA
acgagcatcattgctatgcaacgcggaggttttgtttgggatggtgatgacaattattcaataaacagagatctt

SEQ ID NO: 76362 - DNA, 75 bp, synthetic construct
  source 1..75: mol_type = other DNA
ccccaaatcgggaaatcaaaggtcgaggaggcgatcgccgtagcaaagactatcacctcaccctcgatacggcca

SEQ ID NO: 76363 - DNA, 75 bp, synthetic construct
  source 1..75: mol_type = other DNA
accaacgagaacggcagccacagcgtcttcagttacgatgcgctggaccggctggtacagcagggcggctttgac

SEQ ID NO: 76364 - DNA, 75 bp, synthetic construct
  source 1..75: mol_type = other DNA
aatcaatagtgttatttttgatgacgataagatctattatagattcggattttacgccttaaaattattgaaaaa

SEQ ID NO: 76365 - DNA, 75 bp, synthetic construct
  source 1..75: mol_type = other DNA
acaatattcgtacacttcgcgcacaggctcgtgaaacagatctggcaactctggaagagatgctggaaaaactca

SEQ ID NO: 76366 - DNA, 75 bp, synthetic construct
  source 1..75: mol_type = other DNA
aggcgtgaagcagggcagtgtcagcattgtgggcatgacttctgacggcgattttgtggcagtggctgcggtggc

SEQ ID NO: 76367 - DNA, 75 bp, synthetic construct
  source 1..75: mol_type = other DNA
ccggagcggcaatggcgctctcgtcgattacggtggtgagtaacgctaaccgattgctgcggtttaaaccgaagg

SEQ ID NO: 76368 - DNA, 75 bp, synthetic construct
  source 1..75: mol_type = other DNA
ataatattcgtacacttcgcgcacaggctcgtgaaactgatctggaaacgctggaagagatgctggaaaaactct

SEQ ID NO: 76369 - DNA, 75 bp, synthetic construct
  source 1..75: mol_type = other DNA
gcctggcgtcagcagggctatgaagacacgatgctgacgatggagcatatccggaaaccgctggcagcacgtcag

SEQ ID NO: 76370 - DNA, 75 bp, synthetic construct
  source 1..75: mol_type = other DNA
ttgcagagtcaggcaatcacccgcatgtttcagcgaagcctgaagcagcgccggaatattactatgtgattgcgc

SEQ ID NO: 76371 - DNA, 75 bp, synthetic construct
  source 1..75: mol_type = other DNA
gcactgacccggtcagaggcggtattgcagaaaagcctggatataactgaaggtgcagattcggcactgagaaac

SEQ ID NO: 76372 - DNA, 75 bp, synthetic construct
  source 1..75: mol_type = other DNA
agatgcagccagagagtacgcaagccaggctgcggagccgtataaatatgtcttacagccgctgcctgatgtgtg

SEQ ID NO: 76373 - DNA, 75 bp, synthetic construct
  source 1..75: mol_type = other DNA
ggtgatgggcgacgcaacataccaggaaacattcgatgaagagaatcaggttgaagttcaggaaaatgatccgga

SEQ ID NO: 76374 - DNA, 75 bp, synthetic construct
  source 1..75: mol_type = other DNA
gtgttgcagaaaagtctggagataacggaagaggcagattcggcactgagaaacgcgatggcccggattaaataa

SEQ ID NO: 76375 - DNA, 75 bp, synthetic construct
  source 1..75: mol_type = other DNA
gggtattcccacgcgacaggcgttacagaaaaacctggttgcctacgtccctcagtcagaagaggttgactggtc

SEQ ID NO: 76376 - DNA, 75 bp, synthetic construct
  source 1..75: mol_type = other DNA
gacttttgttgatatccacatcctgcgcttatgcctcctcagaagggtgtggagctgacagcactagcggtgcga

SEQ ID NO: 76377 - DNA, 75 bp, synthetic construct
  source 1..75: mol_type = other DNA
tatcgctgttaatgctttcaggttgtgcaactgaagcattgaaaaatgaacaagctgaaactgttattactgcgg

SEQ ID NO: 76378 - DNA, 75 bp, synthetic construct
  source 1..75: mol_type = other DNA
acagcggcctgtttaccactatggtgcagcagttcagggctgatatggctgcatattctgcacagtgtgttggcg

SEQ ID NO: 76379 - DNA, 75 bp, synthetic construct
  source 1..75: mol_type = other DNA
aaaaaacacgtaaacagcattcgcctgaattttgcagtgaagccctgaagcttgctgaacgcatcggtgttgctg

SEQ ID NO: 76380 - DNA, 75 bp, synthetic construct
  source 1..75: mol_type = other DNA
tcgccggtaacaacagtattgaggtgacgccggtcattgatggtaaggacgggacgccgttcatgctgtcgcagt

SEQ ID NO: 76381 - DNA, 75 bp, synthetic construct
  source 1..75: mol_type = other DNA
caagttgcgtgtgaccgatatcactaatggtgcaacatacccggtgctgattgacagcattgtggtggaagtgaa

SEQ ID NO: 76382 - DNA, 75 bp, synthetic construct
  source 1..75: mol_type = other DNA
gcgatgcagttgaacgtcagatgagccatcaggaacgtaacggtgtacgtgctgcttacattcataaagcagaac

SEQ ID NO: 76383 - DNA, 75 bp, synthetic construct
  source 1..75: mol_type = other DNA
atgaacaaaatatttaaagttatctggaatccggcgacgggcagttacaccgttgccagcgaaacggcgaagagc

SEQ ID NO: 76384 - DNA, 75 bp, synthetic construct
  source 1..75: mol_type = other DNA
atgggctggaataacgtctccgtttacgacggcggctggtacgaatggagcagcgatccaaaaaatccggtagca

SEQ ID NO: 76385 - DNA, 75 bp, synthetic construct
  source 1..75: mol_type = other DNA
aaccagcgtagctaaagtctggcaaaattatgagctggaaaaagcaaaactccacaacataatgactgtagctaa

SEQ ID NO: 76386 - DNA, 75 bp, synthetic construct
  source 1..75: mol_type = other DNA
cgatggctaccgtgctattcaggtgaccaccggtgctaaaaaagctaaccgtgtgaccaagcctgaagctggcca

SEQ ID NO: 76387 - DNA, 75 bp, synthetic construct
  source 1..75: mol_type = other DNA
gcgcagcttcctcggcaacggcgacagcaaattctgcgaaggcggcaaaaacgtccgagacgaacgccaaggctt

SEQ ID NO: 76388 - DNA, 75 bp, synthetic construct
  source 1..75: mol_type = other DNA
tcaggtgatgacagtccggcattcaccagacagaccgatgatggctctcagctctggcggcatgaaacgattgag

SEQ ID NO: 76389 - DNA, 75 bp, synthetic construct
  source 1..75: mol_type = other DNA
cggagactggcgggtgcgccagcagctgcctgtcggagtcgggcctgacgaccggatgccgccaggcagccggga

SEQ ID NO: 76390 - DNA, 75 bp, synthetic construct
  source 1..75: mol_type = other DNA
gtaacaacgagggtggcacggtgattgtgcaggcggcactggaagatctcgtttacccgccaggcgaagtggtgt

SEQ ID NO: 76391 - DNA, 75 bp, synthetic construct
  source 1..75: mol_type = other DNA
ggccgtggtctgtgggaattccgcctggctgaaggcgaagagttcactgtaggtcagagcattagcgttgaactg

SEQ ID NO: 76392 - DNA, 75 bp, synthetic construct
  source 1..75: mol_type = other DNA
agagcaccatggcaacgcgctatatgcgtgatatttttccagcagattgggtaatccagtgcgcccttgaaacgg

SEQ ID NO: 76393 - DNA, 75 bp, synthetic construct
  source 1..75: mol_type = other DNA
acatttgtgatcaaaaattttctgaagtacttgatggacactggttaatcaacatcgacggaacctattccattc

SEQ ID NO: 76394 - DNA, 75 bp, synthetic construct
  source 1..75: mol_type = other DNA
aaggtttccagccattctttgcctgtcagagtcgggttcgtgatttgggacgtcgcgaatacagtaaacatatgt

SEQ ID NO: 76395 - DNA, 75 bp, synthetic construct
  source 1..75: mol_type = other DNA
ggtaatacaaatactatggaagttgctaaatatgtattatctgatggtgccttgcgtgaagacggtttttatatt

SEQ ID NO: 76396 - DNA, 75 bp, synthetic construct
  source 1..75: mol_type = other DNA
gtgaatacttactgcatcacactaccctggccgccgagcaataatcgctattaccgccataatcgcggacgcacg

SEQ ID NO: 76397 - DNA, 75 bp, synthetic construct
  source 1..75: mol_type = other DNA
aactcgggatctctgtcaccacagtcagccgggcgcttggcggattttcggacgtttccgcttcgacccgtgcac

SEQ ID NO: 76398 - DNA, 75 bp, synthetic construct
  source 1..75: mol_type = other DNA
agttttattgatgacgacctgcggcaatattattccgacctcttgtggtctgtgaaaacgcaggagggagtgggt

SEQ ID NO: 76399 - DNA, 75 bp, synthetic construct
  source 1..75: mol_type = other DNA
atgaacgaacatcatcaaccttttgaagaaatacggcattatggcactgaagggcaagaattttggtcagcgaga

SEQ ID NO: 76400 - DNA, 75 bp, synthetic construct
  source 1..75: mol_type = other DNA
cgtggcaagaaatccgggcgcagtaagctgttaatttctgccctggttgctgggggaatgttgtcgtcgtttggg

SEQ ID NO: 76401 - DNA, 75 bp, synthetic construct
  source 1..75: mol_type = other DNA
gaaaagttaatgaaaacactcgatgaactgaaccagtcgggaaaagggaaagtgtggtttgcggggcgaggaacc

SEQ ID NO: 76402 - DNA, 75 bp, synthetic construct
  source 1..75: mol_type = other DNA
cttatttttctttaaaaaaagataaagaagatgataaaggtttaacattattagaaattgccggcgcaatgatta

SEQ ID NO: 76403 - DNA, 75 bp, synthetic construct
  source 1..75: mol_type = other DNA
ccgggacccgcatcctacgtgtactcaaagctctacgcggtcactctctgaacggtgtttctaacggtgaactgg

SEQ ID NO: 76404 - DNA, 75 bp, synthetic construct
  source 1..75: mol_type = other DNA
tgaaaaacctgcagacaattgcaaccaaaatgaagcaatacaagttccagggaagatataccggaacggattata

SEQ ID NO: 76405 - DNA, 75 bp, synthetic construct
  source 1..75: mol_type = other DNA
agattgctgagattaaacgactggccagcggtgcagtcacaccgttttatcgccgcgccacaaatgaaggtattc

SEQ ID NO: 76406 - DNA, 75 bp, synthetic construct
  source 1..75: mol_type = other DNA
atgatattcctgctgaaacgccgtatgcgccgggagaacacattaagggagggcagcaataatgcttcgcattaa

SEQ ID NO: 76407 - DNA, 75 bp, synthetic construct
  source 1..75: mol_type = other DNA
tgccgatgggaggactggggctatccgctctggtcgccctgatcccgataatattcttcttcgttgcactcgcgg

SEQ ID NO: 76408 - DNA, 75 bp, synthetic construct
  source 1..75: mol_type = other DNA
tcacatcgggttctgatagtttattgcaggcaatacagaaacgagaattcaaaccatacattcagcctattgttt

SEQ ID NO: 76409 - DNA, 75 bp, synthetic construct
  source 1..75: mol_type = other DNA
tgacaataaatctgtcacttttgccgaacttgatgtgtttgatttgagtgaagcgttaagcgcacccgacgtcat

SEQ ID NO: 76410 - DNA, 75 bp, synthetic construct
  source 1..75: mol_type = other DNA
aacaggatttggttgctcatatccggaaagaccgggggagtttcaagaagctgagtgactattcccggatcatgc

SEQ ID NO: 76411 - DNA, 75 bp, synthetic construct
  source 1..75: mol_type = other DNA
cgccgtccatgacagtcgtggcagactcattgatcagcatacggtcgatatgattagtaatactatacttgatgc

SEQ ID NO: 76412 - DNA, 75 bp, synthetic construct
  source 1..75: mol_type = other DNA
aaatattgagttttggaaggggttattcgtttctggttggcagattgcaaccaaccagcaccctgagattatatc

SEQ ID NO: 76413 - DNA, 75 bp, synthetic construct
  source 1..75: mol_type = other DNA
ccagacccaaccaaaccaatcgtagtaaccattcaggaacgcaaccgcagcattcggcaaaatgcacgccttcac

SEQ ID NO: 76414 - DNA, 75 bp, synthetic construct
  source 1..75: mol_type = other DNA
tgacggcgttaatcagcatggccgctcaggccattgtggcaaccaacggaaaggcggctgccctgcaggtactga

SEQ ID NO: 76415 - DNA, 75 bp, synthetic construct
  source 1..75: mol_type = other DNA
ctccgttaattcttggttttgttattgtgccgttgttggtgtggccgacggtggttgcgctggctgcttgtgtta

SEQ ID NO: 76416 - DNA, 75 bp, synthetic construct
  source 1..75: mol_type = other DNA
cagaaggtaaaaaaccgatctgcgtcgaatcttgcccgctacgggcgctggatttcggacctatcgacgagctgc

SEQ ID NO: 76417 - DNA, 75 bp, synthetic construct
  source 1..75: mol_type = other DNA
taaaatcattactgatactggctgcggtaatattcatctcgcaggagccgtcattgaagtaatggggataaagtc

SEQ ID NO: 76418 - DNA, 75 bp, synthetic construct
  source 1..75: mol_type = other DNA
gatggttgccagccacgtggggcatacaccttcgggtgccggaatactatctgcttccgcaatcacaaaaagcgg

SEQ ID NO: 76419 - DNA, 75 bp, synthetic construct
  source 1..75: mol_type = other DNA
agacgcagccagagagtatgcaagccaggctgcggagccgtataaacaagttttgcagccgcttcccgatgtgtg

SEQ ID NO: 76420 - DNA, 75 bp, synthetic construct
  source 1..75: mol_type = other DNA
acgtatgctttgcgccgactggtggtatcgaaaattgtggaagatacgttgcgaatggcgggaagagcagttgcg

SEQ ID NO: 76421 - DNA, 75 bp, synthetic construct
  source 1..75: mol_type = other DNA
gcaattcctggaacattatccggctgctcaggactgcgcttataaatttcttgtctgcgaggataaacccggcat

SEQ ID NO: 76422 - DNA, 75 bp, synthetic construct
  source 1..75: mol_type = other DNA
tgggcgatggcggcggaacattgccaacgccggacgcaaagcagactgcactggtaaatgagaaacgccgggctg

SEQ ID NO: 76423 - DNA, 75 bp, synthetic construct
  source 1..75: mol_type = other DNA
acagggtgacaaaaaagcaggtgcgccggtactggataacccgcgtcttgatgccattctggctgctgctgatgc

SEQ ID NO: 76424 - DNA, 75 bp, synthetic construct
  source 1..75: mol_type = other DNA
attaatgctctggctgtttcagatcctctagttgttccgctgtcatttacacgaaactttggtaaagaacccgca

SEQ ID NO: 76425 - DNA, 75 bp, synthetic construct
  source 1..75: mol_type = other DNA
gtccggcactcactggaacgccaacagcccccactgcggcgcagtcggtcaataatacacagattgccactacgg

SEQ ID NO: 76426 - DNA, 75 bp, synthetic construct
  source 1..75: mol_type = other DNA
catcataatctcacatccaccagcagagcggggattcatctgatgatcgaccttgaaaccatgggaaaaaatccc

SEQ ID NO: 76427 - DNA, 75 bp, synthetic construct
  source 1..75: mol_type = other DNA
ggtaaacgccagtagtagcaacccggcgcatcgccgcaatgagatgatggcatgtgttaaaggtctggagcttat

SEQ ID NO: 76428 - DNA, 75 bp, synthetic construct
  source 1..75: mol_type = other DNA
atatcgcgatgcaaatgtgcgacggcgcgcgagtgaaaaaactggtccatcaactggcggacaccacctgttcgg

SEQ ID NO: 76429 - DNA, 75 bp, synthetic construct
  source 1..75: mol_type = other DNA
aagcgggcatctcggggtggggtatagcaacggtgccggtgtggaatccccgtggaacgcggtggctggtgtgaa

SEQ ID NO: 76430 - DNA, 75 bp, synthetic construct
  source 1..75: mol_type = other DNA
agttcactggcacctgttgtgtttcatgcgcaaaaaagaccgccgcgccattactgcattgttgcgtaagtttgc

SEQ ID NO: 76431 - DNA, 75 bp, synthetic construct
  source 1..75: mol_type = other DNA
gcaacggggttgagtaccagtattgtcggtgcagcagagacacgcccacgtaatatttcatttaattacattgtg

SEQ ID NO: 76432 - DNA, 75 bp, synthetic construct
  source 1..75: mol_type = other DNA
ccagaactatacgtacatccccaccatcaccgtactggaaagcctgcagcgggaaggctttcagccattcttcgc

SEQ ID NO: 76433 - DNA, 75 bp, synthetic construct
  source 1..75: mol_type = other DNA
catccgtgaagaccgcgaggaactgggtaataacactggtccacgctttaaatctgagctgataaacccgcgcaa

SEQ ID NO: 76434 - DNA, 75 bp, synthetic construct
  source 1..75: mol_type = other DNA
ttgtctgcgaggataaacctggcataccccgccctgccctcgattcatgggatgctgaatatatgcaggaaaacc

SEQ ID NO: 76435 - DNA, 75 bp, synthetic construct
  source 1..75: mol_type = other DNA
agtccaggggatttgatggcagcgagaaagaggtcgatttactccttcgcggcggcagtattccgtcaggagcag

SEQ ID NO: 76436 - DNA, 75 bp, synthetic construct
  source 1..75: mol_type = other DNA
cgctgaacggacaaaattacaccgctaccaccgatagcagtggcaactggagcgccacggtgccagtgtcagcgg

SEQ ID NO: 76437 - DNA, 75 bp, synthetic construct
  source 1..75: mol_type = other DNA
acaatatcaccctgaaaatcgaccctgctgtagtgctggcaacccgtaaatacgtggatgataaagtcctggaat

SEQ ID NO: 76438 - DNA, 75 bp, synthetic construct
  source 1..75: mol_type = other DNA
atgccatcctggctgctgctgatgctggctgttttgcgacctacatcatgaagcagggcggcgtgctggttcccc

SEQ ID NO: 76439 - DNA, 75 bp, synthetic construct
  source 1..75: mol_type = other DNA
cgctgactaatttgagtggaaaggatgtagctggtcttctcacataccttggtttgggagaaggttcagcattac

SEQ ID NO: 76440 - DNA, 75 bp, synthetic construct
  source 1..75: mol_type = other DNA
agaatggtgtgttaaagctgttgattgagcggatgcgtccggaagaaaaacaaatggctctggagttgttgcagg

SEQ ID NO: 76441 - DNA, 75 bp, synthetic construct
  source 1..75: mol_type = other DNA
tgaaggatgcttttatggccgctgcaaaaagcatggaccgtaatggctctcagttaatccgggattttatgcgcc

SEQ ID NO: 76442 - DNA, 75 bp, synthetic construct
  source 1..75: mol_type = other DNA
gaaagaagtcgatttgctccttcgcggtggcagtattccgtcaggagcaggcttgcgtatcttctatcggaacca

SEQ ID NO: 76443 - DNA, 75 bp, synthetic construct
  source 1..75: mol_type = other DNA
gccaatgactcgtttgcatttagcgtactgggtacagtaggtcatgtggttaacaacggcacggtggtgattgcc

SEQ ID NO: 76444 - DNA, 75 bp, synthetic construct
  source 1..75: mol_type = other DNA
cacctttgccgataccgcggcgggtggattagcgcccgtggagctgaccgctcagactaccgcaattgaaagcat

SEQ ID NO: 76445 - DNA, 75 bp, synthetic construct
  source 1..75: mol_type = other DNA
gagaacctgattaagggcgggctcagtggccgtaatgccaaaggaggacggtcacatacccgtgccgttcgcggt

SEQ ID NO: 76446 - DNA, 75 bp, synthetic construct
  source 1..75: mol_type = other DNA
gaggaactgggttatatcttcagcctacaggcgaagcgcgttctgtctaaaaatctcactttccagtacaaaagc

SEQ ID NO: 76447 - DNA, 75 bp, synthetic construct
  source 1..75: mol_type = other DNA
gcatctccttatgtcagctatgaagccgtgatgcataaacgtgagcagcgtcgtaagtcgctggagtttttccgt

SEQ ID NO: 76448 - DNA, 75 bp, synthetic construct
  source 1..75: mol_type = other DNA
acggtggcttcagcgccggtgatccgtgttgagcagaaactggagaaggggattggtttcgcccgctttgccaaa

SEQ ID NO: 76449 - DNA, 75 bp, synthetic construct
  source 1..75: mol_type = other DNA
atgaactcatcccgggttcgctggcgcgtatgttgtgtgccgactggtggtatcggaaattatggaagatgcgtt

SEQ ID NO: 76450 - DNA, 75 bp, synthetic construct
  source 1..75: mol_type = other DNA
tttgatgcttccagagttgttccaactgcaaacgaaaaccgtccgcgtaatattgcatttaactatatcgtgagg

SEQ ID NO: 76451 - DNA, 75 bp, synthetic construct
  source 1..75: mol_type = other DNA
ctgtcaggtaagcaaccactggatgagacgctgactcatttgagtggaaaagatgtggctggtcttctcgcatac

SEQ ID NO: 76452 - DNA, 75 bp, synthetic construct
  source 1..75: mol_type = other DNA
gatggagaggaaacatcaaaatataaaggcggtgatggccatgatacggtattcagtggcggtatcgcggccggt

SEQ ID NO: 76453 - DNA, 75 bp, synthetic construct
  source 1..75: mol_type = other DNA
tggcttttgaaaggtttgatgatcatttaactgttaattttttattaaatgatgttgaaaatatcgaaagtgaat

SEQ ID NO: 76454 - DNA, 75 bp, synthetic construct
  source 1..75: mol_type = other DNA
cgttgacttcacccaggttagcaacaatgtggatattaagggcgcgacggtatccgccgaagatatgaacactgc

SEQ ID NO: 76455 - DNA, 75 bp, synthetic construct
  source 1..75: mol_type = other DNA
atttactgaagagcctgataccaagcctcattattcttacagttttttatctgggatggaaagataaccaggaaa

SEQ ID NO: 76456 - DNA, 75 bp, synthetic construct
  source 1..75: mol_type = other DNA
ctgaagctgtatatgcttcaaagccgcatctacttgttaaaaaagaaccatttttaacaatgttaagggacaatg

SEQ ID NO: 76457 - DNA, 75 bp, synthetic construct
  source 1..75: mol_type = other DNA
aaatatgattccattgacacaggggagcgttatcaggtcaaacgtataacagtaaatcctggtgaaggactttct

SEQ ID NO: 76458 - DNA, 75 bp, synthetic construct
  source 1..75: mol_type = other DNA
gctggcttcgttactcgtgacgctcgtcaggttgaacgtaagaaagtcggtctgcgtaaagcacgtcgtcgtccg

SEQ ID NO: 76459 - DNA, 75 bp, synthetic construct
  source 1..75: mol_type = other DNA
acaacaccactaccaacctgtctgaagcgcagtcccgtattcaggacgccgactatgcgaccgaagtgtccaaca

SEQ ID NO: 76460 - DNA, 75 bp, synthetic construct
  source 1..75: mol_type = other DNA
cccaaaacaaagagttaaagcttcaaaaccaaaaactttcaagcaaaattcaacaaaataaaattgacgaaaaag

SEQ ID NO: 76461 - DNA, 75 bp, synthetic construct
  source 1..75: mol_type = other DNA
atgcgtgtcatcaccctggcgggtagtcctcgctttccttctcgctccagctccttgctggaatatgcgcgggaa

SEQ ID NO: 76462 - DNA, 75 bp, synthetic construct
  source 1..75: mol_type = other DNA
gttaatgctcacatttttgtttgcccttatgatgaaagtgcaacccttttgccttgtgctgattttggcacttac

SEQ ID NO: 76463 - DNA, 75 bp, synthetic construct
  source 1..75: mol_type = other DNA
cgcaacagtttgcacagtatgtgatgaaacacgcgccgcaggatgccgaagctattctgacaaacaccagttcac

SEQ ID NO: 76464 - DNA, 75 bp, synthetic construct
  source 1..75: mol_type = other DNA
aataaaaaagagagtggtgttatatcgactgatccaataactatcgagtggatgaaagaacgtacagggctaaca

SEQ ID NO: 76465 - DNA, 75 bp, synthetic construct
  source 1..75: mol_type = other DNA
gcggagagaaaaccacatggaccctgaagggattcaatgctgtagccaatcagcagtcagctgaaaaagcggaaa

SEQ ID NO: 76466 - DNA, 75 bp, synthetic construct
  source 1..75: mol_type = other DNA
gcattatctcagaataataaatataatgaagaaaagtcggctcaggaaagaatgcccggggctgacagtccacag

SEQ ID NO: 76467 - DNA, 75 bp, synthetic construct
  source 1..75: mol_type = other DNA
tatcggccacgttgaccaaggtaaaactaccctgaccgctgcaatcacaaccgtactggctaaaacctacggcgg

SEQ ID NO: 76468 - DNA, 75 bp, synthetic construct
  source 1..75: mol_type = other DNA
acactggagatgggaaatataacgacagtaaaaaatatacggcattttatagagctggggttggtgaccagtata

SEQ ID NO: 76469 - DNA, 75 bp, synthetic construct
  source 1..75: mol_type = other DNA
gaaacagcaaacgcatggttgccgacctttattgaagcctataacaaccggtttgctacgccgcctcgtattgct

SEQ ID NO: 76470 - DNA, 75 bp, synthetic construct
  source 1..75: mol_type = other DNA
gactggcgggaaatctttgtcgctgcacggggtatcagatgattgtaaatacagttctggattgcgagaaaacga

SEQ ID NO: 76471 - DNA, 75 bp, synthetic construct
  source 1..75: mol_type = other DNA
ttggtggtggggtggggctgattggtgttgatgctattcgtggtgcggcaatgagggtcatcggtaacaagttcg

SEQ ID NO: 76472 - DNA, 75 bp, synthetic construct
  source 1..75: mol_type = other DNA
gcgcagccacagttcagcttattttcgggagctggtggagacgcgggagcgactggtgagagacgctgatgattt

SEQ ID NO: 76473 - DNA, 75 bp, synthetic construct
  source 1..75: mol_type = other DNA
caggaagccattgtggtggtgcgtattgagggtgccggactggcccggcagtatcatgtactccagcccggggga

SEQ ID NO: 76474 - DNA, 75 bp, synthetic construct
  source 1..75: mol_type = other DNA
aagctacagttacaattggtggcaaagatcaagatgtaaacatcgataaatccggtaatttaactgctgctgatg

SEQ ID NO: 76475 - DNA, 75 bp, synthetic construct
  source 1..75: mol_type = other DNA
ctgaaagcgctggaaggcgacgcggagtgggaagcgaaaatcctggaactggctggcttcctggattcctacatt

SEQ ID NO: 76476 - DNA, 75 bp, synthetic construct
  source 1..75: mol_type = other DNA
gatgctgaaacaaaagcagctacgacagccgatcccctgaaagctctggacgaagccatcagctccatcgacaaa

SEQ ID NO: 76477 - DNA, 75 bp, synthetic construct
  source 1..75: mol_type = other DNA
tacaccagccgctgctgtaacctatacctacaataaagacactaattcatattccgccgcttctgatgatatttc

SEQ ID NO: 76478 - DNA, 75 bp, synthetic construct
  source 1..75: mol_type = other DNA
acaaagttggtggcgtggagacacaccgctgggcgcagtgattatgtcgatcgttatggctggtttgcgcatcgc

SEQ ID NO: 76479 - DNA, 75 bp, synthetic construct
  source 1..75: mol_type = other DNA
gtacgacgacagccatccggaagccctgtctcgtaatacccagaaaattttccgctgggtagaaaaaaacacccc

SEQ ID NO: 76480 - DNA, 75 bp, synthetic construct
  source 1..75: mol_type = other DNA
taccggtgcggttccagttggggttgcaactacaattacaattacttctggtacagcttccggaatgtctgttca

SEQ ID NO: 76481 - DNA, 75 bp, synthetic construct
  source 1..75: mol_type = other DNA
ggcagtaagactgtggtgctgtgggctctgggaggatatggcgtaagctttaccctgcttgggctgggaagcgtg

SEQ ID NO: 76482 - DNA, 75 bp, synthetic construct
  source 1..75: mol_type = other DNA
tatcggccacgttgaccaaggtaaaaccactctgaccgctgcaatcaccaccgtactggctaaaacctacggcgg

SEQ ID NO: 76483 - DNA, 75 bp, synthetic construct
  source 1..75: mol_type = other DNA
atggaaaagatcgcaatattcagcctgaccaccagcaagcctcaaatgctcactgcaatactgaaagacggtgct

SEQ ID NO: 76484 - DNA, 75 bp, synthetic construct
  source 1..75: mol_type = other DNA
catcggatctggacttaaataacgctaaaaaagtgggtagttctttagttgtaaatggcgctgattatgaagtta

SEQ ID NO: 76485 - DNA, 75 bp, synthetic construct
  source 1..75: mol_type = other DNA
ctgcagaaattgatggtaagtcagtgacatttactgtgacagatgctgacaaaaaagcttctttgattacgagtg

SEQ ID NO: 76486 - DNA, 75 bp, synthetic construct
  source 1..75: mol_type = other DNA
tacagaaaccgtagtctgaaaactatatcatgtcagaagagtaaactatataataagctcggtattgaaagtgat

SEQ ID NO: 76487 - DNA, 75 bp, synthetic construct
  source 1..75: mol_type = other DNA
ttttcattcccgacgtcttgggctttatgaagatcatggggttgtttattcagatcagttatctctgttccagta

SEQ ID NO: 76488 - DNA, 75 bp, synthetic construct
  source 1..75: mol_type = other DNA
gcagcctatgaattatttatggagaagcgtttcggagaatctgtagatcgccgcagagcaaaaaatggcgataga

SEQ ID NO: 76489 - DNA, 75 bp, synthetic construct
  source 1..75: mol_type = other DNA
gcacgcggcgcggcggcggtgtttggcccgcaaaaaggggcaacgccggaaatggtcgaagagctggaacagggg

SEQ ID NO: 76490 - DNA, 75 bp, synthetic construct
  source 1..75: mol_type = other DNA
aactggggatgacgttcccggaactgtacgacgacagccatccggaagccctggcccgtaatacccagaaaattt

SEQ ID NO: 76491 - DNA, 75 bp, synthetic construct
  source 1..75: mol_type = other DNA
gtctgaagaccacgaccactgcgcagacgcaaggcaacagtgtcagcgtggatgtgcagaacgcacagcttgacg

SEQ ID NO: 76492 - DNA, 75 bp, synthetic construct
  source 1..75: mol_type = other DNA
tttcactattcacgacttccgtcgtacagcacgcacacatttagccgcgcttggtgttgatccggtagtcgctga

SEQ ID NO: 76493 - DNA, 75 bp, synthetic construct
  source 1..75: mol_type = other DNA
cggtcatgtggcgatgcggacactgcccatgacgcagaccatcctgacggggatcgccatcggtattttcccgct

SEQ ID NO: 76494 - DNA, 75 bp, synthetic construct
  source 1..75: mol_type = other DNA
ccggaactcaccacgccagccggtcagtaccgcagctccagcgacaccggcaactgggtacagcctgacggcacc

SEQ ID NO: 76495 - DNA, 75 bp, synthetic construct
  source 1..75: mol_type = other DNA
ctttgtccgcagcttattggtcgcgatgcacaccgtatcgaagatatctggcagtttttctataaaggtgcttac

SEQ ID NO: 76496 - DNA, 75 bp, synthetic construct
  source 1..75: mol_type = other DNA
gttatgcaatctgccgctctgcagattttaactcatgggaatatgtaccagaccatcgcggtgaaatcgtctata

SEQ ID NO: 76497 - DNA, 75 bp, synthetic construct
  source 1..75: mol_type = other DNA
atcgccactacgtcatcgatggagaagcagcggctggcgcatgcgacggtcggtcaggtggcattacgctcacta

SEQ ID NO: 76498 - DNA, 75 bp, synthetic construct
  source 1..75: mol_type = other DNA
tgcaatatttcagaacaaaagatatgaactatgatatatttacgcattactgcaccaatcttgttagtatttaca

SEQ ID NO: 76499 - DNA, 75 bp, synthetic construct
  source 1..75: mol_type = other DNA
gtaaatgactctgatcaggacatttctgttgttgattttggtgatgtatatatttctgaaatcaatgccaagacc

SEQ ID NO: 76500 - DNA, 75 bp, synthetic construct
  source 1..75: mol_type = other DNA
tgacccgcagccatgaatatgctgaaatggcatcccgtactgagagtatgagtgggcagatgagtgaagagctgt

SEQ ID NO: 76501 - DNA, 75 bp, synthetic construct
  source 1..75: mol_type = other DNA
attatgtgcagcagttatttggcggcagaccggaccctgacctgttattcagggaactgctcagtgacagttaca

SEQ ID NO: 76502 - DNA, 75 bp, synthetic construct
  source 1..75: mol_type = other DNA
ccttttactacggaagataaagtaacacatttcttttcacgcagtaaaaaacaaaaagatatctttaaagagcct

SEQ ID NO: 76503 - DNA, 75 bp, synthetic construct
  source 1..75: mol_type = other DNA
gccacctacagcaagacaggcatgctgttcggggcgaacctgattgtgaaaagcaccgattttctgtcccggaat

SEQ ID NO: 76504 - DNA, 75 bp, synthetic construct
  source 1..75: mol_type = other DNA
tcagcccagccctttacgtcaggtgccgaataataattacagttttctgcacagctcagagccgtttgtgtcctg

SEQ ID NO: 76505 - DNA, 75 bp, synthetic construct
  source 1..75: mol_type = other DNA
gcatggcgatgaatacctgggcgcatccggacggtgagaaagtaccggctgcagagattaccaaagcgtattttg

SEQ ID NO: 76506 - DNA, 75 bp, synthetic construct
  source 1..75: mol_type = other DNA
tgcagccctgaactcagcgaaacagagttacgaccagtacacgacgaatatgacccgcagccatgaatatgctga

SEQ ID NO: 76507 - DNA, 75 bp, synthetic construct
  source 1..75: mol_type = other DNA
acaacgtccagcaggcgctgagtattgcccgccagtttggctgtagcgacgacgcgtttattcatcgcgccgaaa

SEQ ID NO: 76508 - DNA, 75 bp, synthetic construct
  source 1..75: mol_type = other DNA
acggaacgcttattattaatggcacagggaaaaatgaaggaggactgaagattggggctggtactgtaatccttg

SEQ ID NO: 76509 - DNA, 75 bp, synthetic construct
  source 1..75: mol_type = other DNA
ttctgacaaacaccagttcaccggagattgcagaacgtcgtcgggcaatggcctggtcttttgttcaggaacagg

SEQ ID NO: 76510 - DNA, 75 bp, synthetic construct
  source 1..75: mol_type = other DNA
tggccgctataaaggagactgccggtcttgctaaggttattaatgacgcgaaaacggatgcagaagttaaagctg

SEQ ID NO: 76511 - DNA, 75 bp, synthetic construct
  source 1..75: mol_type = other DNA
ggttctgctctgaaagcgctggaaggcgacgcagagtgggaagcgaaaatcctggaactggctggcttcctggat

SEQ ID NO: 76512 - DNA, 75 bp, synthetic construct
  source 1..75: mol_type = other DNA
agttagcaacagactatcacgcaggcgtaaagagtacgagcaaagtacatctgatagcgttagagatgtccaaac

SEQ ID NO: 76513 - DNA, 75 bp, synthetic construct
  source 1..75: mol_type = other DNA
cgttaccgtgaagccgacaaaacccccacatggagattccgctataaactcgcagggaagtcccgcgccatgcta

SEQ ID NO: 76514 - DNA, 75 bp, synthetic construct
  source 1..75: mol_type = other DNA
gtgcgtgttctggatggcgataccattgacgtcatgttatctcagcatccggtgcgtgtccgtcttgttaatatt

SEQ ID NO: 76515 - DNA, 75 bp, synthetic construct
  source 1..75: mol_type = other DNA
aaagccgtacgcgaaaactatgcccgccacgtccatggctgcttgttccgcctggtcggtatcgttttacatacg

SEQ ID NO: 76516 - DNA, 75 bp, synthetic construct
  source 1..75: mol_type = other DNA
gcggcaggcagtgtggttgacggtaattactcctacggcaacatgcagacggaaaacgtgaacggcttcagctgg

SEQ ID NO: 76517 - DNA, 75 bp, synthetic construct
  source 1..75: mol_type = other DNA
accagtgcacaggagacgaaggagagcagtgacagccgtctgaaagccctgcaggccacaaagacagcgctgtct

SEQ ID NO: 76518 - DNA, 75 bp, synthetic construct
  source 1..75: mol_type = other DNA
tggcgggcaaacagtcgttgctgattggcgttgccacctccagtctggccctgcacgcgccgtcgcaaattgtcg

SEQ ID NO: 76519 - DNA, 75 bp, synthetic construct
  source 1..75: mol_type = other DNA
ggtgtcgacgttcattgcggttgtcggaagttttgtccggttggtaggcgaaggtaaagacctggtgggtgtgct

SEQ ID NO: 76520 - DNA, 75 bp, synthetic construct
  source 1..75: mol_type = other DNA
acggttggggcacttactttgaagatcctaatggcgaagatggcgacgatgaagattacgtcgatgaagacgatg

SEQ ID NO: 76521 - DNA, 75 bp, synthetic construct
  source 1..75: mol_type = other DNA
tcccgaactgataagcgcattcatgaccacagcggcggcaaactttgccacgctgacagaacgggagattgccga

SEQ ID NO: 76522 - DNA, 75 bp, synthetic construct
  source 1..75: mol_type = other DNA
ctttcagtccgtgacctgctgcctcacatgcaggggatgcgcaaggcagatatcatcaggcgtctggaaaatgaa

SEQ ID NO: 76523 - DNA, 75 bp, synthetic construct
  source 1..75: mol_type = other DNA
tagctatactggtaggccgttaacccgatgggcgacagaactcactttgctgatctttattcggtccagtgagct

SEQ ID NO: 76524 - DNA, 75 bp, synthetic construct
  source 1..75: mol_type = other DNA
aagcgcattcatgaccacggcggcggcaaactttgccacgctgacagaacgggagattgccgaagcggaacaggt

SEQ ID NO: 76525 - DNA, 75 bp, synthetic construct
  source 1..75: mol_type = other DNA
tggcgcggggagtatgatgaatggggcaaccagcttaatgaagagaacccgtattacctgcaccagccataccgt

SEQ ID NO: 76526 - DNA, 75 bp, synthetic construct
  source 1..75: mol_type = other DNA
aacagcgtgaagaaacacgtttgattattgaagaattactggaagatggcagcgatccggacgcgctgtacacca

SEQ ID NO: 76527 - DNA, 75 bp, synthetic construct
  source 1..75: mol_type = other DNA
ataatagttgtgtggagaactgtttaaaagggaagtttaaagaggtaaggccgcgttattctgtattgcctgata

SEQ ID NO: 76528 - DNA, 75 bp, synthetic construct
  source 1..75: mol_type = other DNA
tcaggtccatcgtctggttcccctttccgatcaccactacgtcagtcagctgcagatgatggtggccaccctgaa

SEQ ID NO: 76529 - DNA, 75 bp, synthetic construct
  source 1..75: mol_type = other DNA
cttattcgccaacaagcacaagctgaacgtattagaagagaaaaagcagcatctgccgctgctgcacgcgaaaaa

SEQ ID NO: 76530 - DNA, 75 bp, synthetic construct
  source 1..75: mol_type = other DNA
aagcaatagataaccacgggaaggaaataacaaacagaaaaggattacctaatgtctgcagagttcatggtaata

SEQ ID NO: 76531 - DNA, 75 bp, synthetic construct
  source 1..75: mol_type = other DNA
gtcaatacatctggtgatacttacgatatttacgttgcaatcggaaattatgcgactggtgtaaatattcaatgg

SEQ ID NO: 76532 - DNA, 75 bp, synthetic construct
  source 1..75: mol_type = other DNA
atgaggggctgtacattactcttattttccgaagcccctttcttacgcgaacaggaggttgctgtcataacagct

SEQ ID NO: 76533 - DNA, 75 bp, synthetic construct
  source 1..75: mol_type = other DNA
agacctggtacgggtgggacggtgacaggctgaccactgtacagacccaacagacaagaatccagacggtatacc

SEQ ID NO: 76534 - DNA, 75 bp, synthetic construct
  source 1..75: mol_type = other DNA
gcctaccggctgggctcggtggtgtttcatcagcacaccgatagtgagcagggcgagatgcttgatatcgtcgat

SEQ ID NO: 76535 - DNA, 75 bp, synthetic construct
  source 1..75: mol_type = other DNA
gtacgctgaatgattttctcggtgccatgacggaggatgatgcccgtccggaggcactgcgacgttttgaactga

SEQ ID NO: 76536 - DNA, 75 bp, synthetic construct
  source 1..75: mol_type = other DNA
agatgcaaagccagatggacccggtatacacgccggcgcgaaaaattcacctgtaccactgcgaccatcgcggcc

SEQ ID NO: 76537 - DNA, 75 bp, synthetic construct
  source 1..75: mol_type = other DNA
tcagccactatgtctttgaagcgccagtccgcatctggcactggctgacggtgttatgcatggcggtgttgatgg

SEQ ID NO: 76538 - DNA, 75 bp, synthetic construct
  source 1..75: mol_type = other DNA
cgctgacagagcgggagattgcggaagctgaacaggtgacaaccatcaacgttaaaaacgtagaggtggaatcat

SEQ ID NO: 76539 - DNA, 75 bp, synthetic construct
  source 1..75: mol_type = other DNA
aacagatgtattcatgactggtcgcaccacaggtgttgcaacttatcgtaacaacgacttctttggtctggttga

SEQ ID NO: 76540 - DNA, 75 bp, synthetic construct
  source 1..75: mol_type = other DNA
gtcaacgattccagacgatgtgcgagctgaagcaatcgctacagccagggcgaaatgccgtgcggcgattgcaga

SEQ ID NO: 76541 - DNA, 75 bp, synthetic construct
  source 1..75: mol_type = other DNA
atgatgcataaatcagtagccggtgagtttcagaaggaagtcgataataccactgatctattggacgatatttta

SEQ ID NO: 76542 - DNA, 75 bp, synthetic construct
  source 1..75: mol_type = other DNA
aggggacattcagtgcggacacgggggccagccaggattcggcacgctggggtgtgggtaaaccgttatatcagg

SEQ ID NO: 76543 - DNA, 75 bp, synthetic construct
  source 1..75: mol_type = other DNA
acggtggcttgctcataatctagatcctaaagaccagtttgaccaagagtcagcaaaaaccatgaaacctgtcac

SEQ ID NO: 76544 - DNA, 75 bp, synthetic construct
  source 1..75: mol_type = other DNA
tctctcgatcatcgtgctttttttcaaatggaaagatcttatggtgacctttttcgacgagaatcacgctcgtgc

SEQ ID NO: 76545 - DNA, 75 bp, synthetic construct
  source 1..75: mol_type = other DNA
agcacatcccgaactgataagcgcattcatgacaacggcggctgcaaactttgccacgctgaccgaacgggagat

SEQ ID NO: 76546 - DNA, 75 bp, synthetic construct
  source 1..75: mol_type = other DNA
atgcatggggcggtcaaatatctcggctacgctgatgaacacagtgcagagcctgatcaggtgatccttatcgaa

SEQ ID NO: 76547 - DNA, 75 bp, synthetic construct
  source 1..75: mol_type = other DNA
atgaagaaaacaatgatggcagccaccctggtcctgagtgcactcagtattcagtcagcactggccgctgaatac

SEQ ID NO: 76548 - DNA, 75 bp, synthetic construct
  source 1..75: mol_type = other DNA
tgccgaaatagtccgggataattacgggcggtttagctatatcagtcagtccagagttatgccagcaccacgcag

SEQ ID NO: 76549 - DNA, 75 bp, synthetic construct
  source 1..75: mol_type = other DNA
atggcggattcgaatctcaatgtgccggtaatcattcaggctacacgactcgacacatcagtccttccacgcaat

SEQ ID NO: 76550 - DNA, 75 bp, synthetic construct
  source 1..75: mol_type = other DNA
aaagcgatattgcgtcgcttgataccagagttcagtcgctggaatcgcaggtttcagaccatgaaacgcgcattg

SEQ ID NO: 76551 - DNA, 75 bp, synthetic construct
  source 1..75: mol_type = other DNA
agcagcggaaagcactcttgcagatcatgaaacaaggattacggctgctgaaacagagctggctgatcacgagac

SEQ ID NO: 76552 - DNA, 75 bp, synthetic construct
  source 1..75: mol_type = other DNA
aaaaagaaaggtgaaatgttatctgatatttgtatttatgctacagcatgcggacatgcaggaattggtggtggg

SEQ ID NO: 76553 - DNA, 75 bp, synthetic construct
  source 1..75: mol_type = other DNA
acacaatccgaagtcgcagctctcgctacaggtttgcagcaggcgcggcagcgtattctggcgcttgaaacagca

SEQ ID NO: 76554 - DNA, 75 bp, synthetic construct
  source 1..75: mol_type = other DNA
gtgaccgaggaattactgcagtctttaaaaaaacagcgttatccggagatgaagaaagtattgagttactgcata

SEQ ID NO: 76555 - DNA, 75 bp, synthetic construct
  source 1..75: mol_type = other DNA
gccatcaataaatggaacggcacactgccgcaatacatgaccagcggtgccaatacaccatttatccaggttaaa

SEQ ID NO: 76556 - DNA, 75 bp, synthetic construct
  source 1..75: mol_type = other DNA
acggcggcagctcagagcaaaagtacggcggaatccgcggcaacgcgcgccgagacagcggcaaaacgggcagag

SEQ ID NO: 76557 - DNA, 75 bp, synthetic construct
  source 1..75: mol_type = other DNA
acaggctgatgcgattcgcacaaaagcccaggccgaagccgatgctattcgtttacgcggtgaagctctgcgcca

SEQ ID NO: 76558 - DNA, 75 bp, synthetic construct
  source 1..75: mol_type = other DNA
cactgatgcggcatctgttcgcctgcatttccagattcgttaccgtgcaacggcaattgatccgctacgttactt

SEQ ID NO: 76559 - DNA, 75 bp, synthetic construct
  source 1..75: mol_type = other DNA
aggaaattccgcgaaggcggcaaagacgtctgagacaaacgctaagtcctctgaaacggcagcagcacagagtgc

SEQ ID NO: 76560 - DNA, 75 bp, synthetic construct
  source 1..75: mol_type = other DNA
gagtcaacctttgttggggtgagtaactatgtgcgtatcctctccgatcccggcttctggcactcgctgtggatg

SEQ ID NO: 76561 - DNA, 75 bp, synthetic construct
  source 1..75: mol_type = other DNA
gaagattatcttcgtggccaggcagtattagaagcaaagctggatgccttatatagcaaaatagagctattacaa

SEQ ID NO: 76562 - DNA, 75 bp, synthetic construct
  source 1..75: mol_type = other DNA
cgatgcactgaccaaaatcagggagtatcacgaaacagaggatgaacaacgttcgagtattgatggttcgtttcg

SEQ ID NO: 76563 - DNA, 75 bp, synthetic construct
  source 1..75: mol_type = other DNA
gtaggcaaggacgaggcccggcaacaaattagcggttatatcctgaattattacaatagcgtcaggcctcaccat

SEQ ID NO: 76564 - DNA, 75 bp, synthetic construct
  source 1..75: mol_type = other DNA
gtcacggcagagaagaaacccgtcttcatattgtttgcgatgtccctgatgagcttattgatttcacgtttgaat

SEQ ID NO: 76565 - DNA, 75 bp, synthetic construct
  source 1..75: mol_type = other DNA
tatgaaaataaccaactcacccgcaccgagctagtaccgtttaccaaaacaggcggtctgacggacggaaatgcg

SEQ ID NO: 76566 - DNA, 75 bp, synthetic construct
  source 1..75: mol_type = other DNA
atcacttatccgcgttccgattgtcgctatctgccagaagagcattttgccggacgccacgcagtgatgaatgcc

SEQ ID NO: 76567 - DNA, 75 bp, synthetic construct
  source 1..75: mol_type = other DNA
tggcgaataataacagagagtaatatacggacagatatcaggttaaccgctatcccctctcttttatcaggtatg

SEQ ID NO: 76568 - DNA, 75 bp, synthetic construct
  source 1..75: mol_type = other DNA
caaaagatgaggcgaccagacaggcgtcagcagcgaagggcagcgccacgacggcatccacgaaggcgacagagg

SEQ ID NO: 76569 - DNA, 75 bp, synthetic construct
  source 1..75: mol_type = other DNA
gctggaaaacaccgcgtttgccgtgtttagcctcggcgatagctcttatgaatttttctgccagtccgggaaaga

SEQ ID NO: 76570 - DNA, 75 bp, synthetic construct
  source 1..75: mol_type = other DNA
gggtaacacaggaacaactgccggtgatactggtagttggtgtgaaactcggctgtattaatcacgcgatgttga

SEQ ID NO: 76571 - DNA, 75 bp, synthetic construct
  source 1..75: mol_type = other DNA
ccttgctgtttttggcgaagcggaagcaaagactattagaccagaacatgtaaggcggtatatggatgccagagg

SEQ ID NO: 76572 - DNA, 75 bp, synthetic construct
  source 1..75: mol_type = other DNA
ctggccggaaattatcaagtggtcgaaccttgctatcacgaaagactggtttacctgtaccgctaccgcgatgta

SEQ ID NO: 76573 - DNA, 75 bp, synthetic construct
  source 1..75: mol_type = other DNA
tgcccgaaggccctttctcacgcaaccaggcacttgccgtcacaacggcttaccttaatgtgcttattgaagatg

SEQ ID NO: 76574 - DNA, 75 bp, synthetic construct
  source 1..75: mol_type = other DNA
gtagcttcacgctttctgtttcaggtactggatatcaaaaattaccatcaggttttattcttcagtggggctcaa

SEQ ID NO: 76575 - DNA, 75 bp, synthetic construct
  source 1..75: mol_type = other DNA
gtaaattttgaacatatcagtaattcagcgtggcgtgtggcaaccagtgatatctcacagcaatacagattcagt

SEQ ID NO: 76576 - DNA, 75 bp, synthetic construct
  source 1..75: mol_type = other DNA
gaggtctacacgaaggtgtttgcactggatgtggctgcacggcaccgggtgcagttttcgatgcctgagtccgat

SEQ ID NO: 76577 - DNA, 75 bp, synthetic construct
  source 1..75: mol_type = other DNA
gtgaatggtaaggcgctttcagcggatataacactgacgccgaaagatattggtacgcttaactcaacaacaatg

SEQ ID NO: 76578 - DNA, 75 bp, synthetic construct
  source 1..75: mol_type = other DNA
tggggtcgtacatggcaacttgttccgttcggtggcgcgtctactgacccgcagatgctcaacaagcgtggggag

SEQ ID NO: 76579 - DNA, 75 bp, synthetic construct
  source 1..75: mol_type = other DNA
tgaccgtttttcttataacgggtaagccacaaaatgtgattaccggaatttatgacagtaagtcatcctgcattc

SEQ ID NO: 76580 - DNA, 75 bp, synthetic construct
  source 1..75: mol_type = other DNA
caggaacaacaggacgcagaaacgcggctggttgcgctgaatgagaaacgcaaacgtcagcgtcgggcagcaaag

SEQ ID NO: 76581 - DNA, 75 bp, synthetic construct
  source 1..75: mol_type = other DNA
tttccgcaaggtggagcactggttcggcgattacgcacagcgttttcagagtgaaagccgcgtgttattgcgtca

SEQ ID NO: 76582 - DNA, 75 bp, synthetic construct
  source 1..75: mol_type = other DNA
gctggcggtattcaacttcccgctttaatgcagctgtaacaaactgccctgtactttcgccgggcatttttaccg

SEQ ID NO: 76583 - DNA, 75 bp, synthetic construct
  source 1..75: mol_type = other DNA
atgagcagaagccggttcagcctgaaggcggtcaggaggctggaaaaacagatgtatcatccacaggctcaattg

SEQ ID NO: 76584 - DNA, 75 bp, synthetic construct
  source 1..75: mol_type = other DNA
ataagcagtgccctgcggatggcgtatgaggtgcgtggtcagccgcgggacgtcatgttccatagcgaccaggga

SEQ ID NO: 76585 - DNA, 75 bp, synthetic construct
  source 1..75: mol_type = other DNA
caagcgcggcccggcgtcacggctggaacagcagatcgagatcatcagccagttaccgcgaacgaagcagaagct

SEQ ID NO: 76586 - DNA, 75 bp, synthetic construct
  source 1..75: mol_type = other DNA
tgacggtttttcttataacaggtgagccacagaatgtgattaccggaatttatgccagtaaagaatcctgccatc

SEQ ID NO: 76587 - DNA, 75 bp, synthetic construct
  source 1..75: mol_type = other DNA
atacccgctggcatgaagattccgtgcgtaaccgctggttcagcgtgatggcggggccatctgtacgcgtgaatg

SEQ ID NO: 76588 - DNA, 75 bp, synthetic construct
  source 1..75: mol_type = other DNA
aagcgtccaccaaagaaacgtgaaacattttgcgaacttcatgatgcggtaaacaagactgtcgacgatatggga

SEQ ID NO: 76589 - DNA, 75 bp, synthetic construct
  source 1..75: mol_type = other DNA
ccatcctgaatcacagtatgacttgctcgaaacacgacacgccctggaaggtatcgccgcttattacgccgcgct

SEQ ID NO: 76590 - DNA, 75 bp, synthetic construct
  source 1..75: mol_type = other DNA
acttgagcgttcaggccttgacggagctttccatcaggatcctgccactttgtctggcggtcagcgagcgcgcgt

SEQ ID NO: 76591 - DNA, 75 bp, synthetic construct
  source 1..75: mol_type = other DNA
ggtcgccacagcgacacctctctggcgtggggagctggcgtgcagtttaacccgaccgaatccgtggccattgat

SEQ ID NO: 76592 - DNA, 75 bp, synthetic construct
  source 1..75: mol_type = other DNA
atgatctgggcattcgtaaaagcataccggaaacagttgattatcatggcggtgcttgctgttctggtcatatca

SEQ ID NO: 76593 - DNA, 75 bp, synthetic construct
  source 1..75: mol_type = other DNA
gatgcttgctgttctggtcatatcaggagttgtagcctggaatgcacacggcagtcgtcagtacgacgccgggta

SEQ ID NO: 76594 - DNA, 75 bp, synthetic construct
  source 1..75: mol_type = other DNA
agtttatgaggttattggtaactggatctggattagtggaaatactatcgagcataaagaagcattaaaagaaat

SEQ ID NO: 76595 - DNA, 75 bp, synthetic construct
  source 1..75: mol_type = other DNA
cgaacgaccatgttaacaaatgtcagtccactaacgacgcctacccgaccggtttccgtatcgcagtttactctt

SEQ ID NO: 76596 - DNA, 75 bp, synthetic construct
  source 1..75: mol_type = other DNA
gccagcaatttgcgggaatatgagtctgtcagggagtttatgaccagcgccacgctgctggcttttgtggatttg

SEQ ID NO: 76597 - DNA, 75 bp, synthetic construct
  source 1..75: mol_type = other DNA
gcaatgaagaggtaggtatagacgctgcctatgtattgcgacggctgactgaaatcgatcagatggacgtgcttg

SEQ ID NO: 76598 - DNA, 75 bp, synthetic construct
  source 1..75: mol_type = other DNA
aatgatgacccacataaccgaataaccatgggggcactgattgccgcggttattctttccggtcgtgcgctggca

SEQ ID NO: 76599 - DNA, 75 bp, synthetic construct
  source 1..75: mol_type = other DNA
cccgcaatctccgccagccgaagacatggccggagtctttctgtcttggagaagaccgccagccagccatgccat

SEQ ID NO: 76600 - DNA, 75 bp, synthetic construct
  source 1..75: mol_type = other DNA
tacccgtcaggacagagactggggcgaagcattcagcagcgagcaggagccttacgcactggtcgtgaccgcgac

SEQ ID NO: 76601 - DNA, 75 bp, synthetic construct
  source 1..75: mol_type = other DNA
acccgctccgatgatgcccagactaaccgtgttgtatcagcccaacagcgggaacgcgggacggtacagtcgtcg

SEQ ID NO: 76602 - DNA, 75 bp, synthetic construct
  source 1..75: mol_type = other DNA
acaggctgcatttgaacgactgaatatccataagcgaaaagataatcagcgtttttatcatgcgcgaattgctga

SEQ ID NO: 76603 - DNA, 75 bp, synthetic construct
  source 1..75: mol_type = other DNA
cgctgaaacgtctgttcacggccaaccagtgctggacatccttcctggatgcgggcggtctgcgcgatatcgagg

SEQ ID NO: 76604 - DNA, 75 bp, synthetic construct
  source 1..75: mol_type = other DNA
atctgttctgaatgtgctgtggaactggattctgttccgtaaattctcctctcaggaggaagttgaaaatgtggc

SEQ ID NO: 76605 - DNA, 75 bp, synthetic construct
  source 1..75: mol_type = other DNA
taaatttccgtgccaccacggacaagcacgacgcctatcgtaatgccgactacgtgatcattgcgacgccgaccg

SEQ ID NO: 76606 - DNA, 75 bp, synthetic construct
  source 1..75: mol_type = other DNA
cgagttctttaactcgcgcgtcgtgcgcgacctggatgccttcaaacaagaagcggatgtgatcatctctaaccg

SEQ ID NO: 76607 - DNA, 75 bp, synthetic construct
  source 1..75: mol_type = other DNA
attcgcgatgttacagagatcaacccgaacgctgtgatgatcatcaaatcgaccatcccggtggggggcacccgc

SEQ ID NO: 76608 - DNA, 75 bp, synthetic construct
  source 1..75: mol_type = other DNA
ggtattcaggaatgtgataccaggaatcagaaaaacgggggcttatggtatcccgtggggcgcattacaggactt

SEQ ID NO: 76609 - DNA, 75 bp, synthetic construct
  source 1..75: mol_type = other DNA
ggacggtgagggtggtgtgtcgggagtggagcgtcacggataacgcccggtacagtgatttcagctgtacgattg

SEQ ID NO: 76610 - DNA, 75 bp, synthetic construct
  source 1..75: mol_type = other DNA
ctccgcgtaactgacaacaaggggaaaacgcacgatgtgctgaccggaagtgatgacggtcgccacagcaacacg

SEQ ID NO: 76611 - DNA, 75 bp, synthetic construct
  source 1..75: mol_type = other DNA
atgtcccccacgggggtgcgcagtgggcgccgcgcgcctgcgcgcgggaacggcggcccgccttcgggtcgcggc

SEQ ID NO: 76612 - DNA, 75 bp, synthetic construct
  source 1..75: mol_type = other DNA
ctgaggcgcaactcggtaaccagaatcgtaacagcctgaacattcagcaacccggcgaaactgacagctatgaag

SEQ ID NO: 76613 - DNA, 75 bp, synthetic construct
  source 1..75: mol_type = other DNA
aagcggatgttatcgtttctaaccgtatggccgaggagttaaccgacgtagcagaaaaaatctacacgcgcgatc

SEQ ID NO: 76614 - DNA, 75 bp, synthetic construct
  source 1..75: mol_type = other DNA
tttccctcgatctctctctggtcagccagcagtttctctcccttgaatttgcgcaggtgctggacaaaatggcct

SEQ ID NO: 76615 - DNA, 75 bp, synthetic construct
  source 1..75: mol_type = other DNA
cggtcataaggttgcggggggctttaatacttctgcactgggtagcgctctttctacggcgggcggttcttttgg

SEQ ID NO: 76616 - DNA, 75 bp, synthetic construct
  source 1..75: mol_type = other DNA
ggcaagctcttcgaactgccggaagtcctggcaaccgcgggaagccacacgctgaatgtgatgcaaaaaggcggg

SEQ ID NO: 76617 - DNA, 75 bp, synthetic construct
  source 1..75: mol_type = other DNA
gttacagcgcttgctgggtaagaaaaccatggaagttgagatcctcaaagaagcggtggagtatggtcagtcgcg

SEQ ID NO: 76618 - DNA, 75 bp, synthetic construct
  source 1..75: mol_type = other DNA
tgattggcgagcaatccgaccgcgcagaacgttttgcagcgttattacaggaaggcgctattaagcaagacatac

SEQ ID NO: 76619 - DNA, 75 bp, synthetic construct
  source 1..75: mol_type = other DNA
ctttcaatcaacagcagatcactgatttgcgggcgaagctggataaggagacgggccgactcaataacgaaaagg

SEQ ID NO: 76620 - DNA, 75 bp, synthetic construct
  source 1..75: mol_type = other DNA
gcgcaaccgctggttcagcgtgatggcggggccgtctgtgcgcgtgaatgaatggttcagcgcgtatgtgatggc

SEQ ID NO: 76621 - DNA, 75 bp, synthetic construct
  source 1..75: mol_type = other DNA
tatatcgctagtggcaggcccagcagacgcctcgcagtccatccttaagaacaaccagtcatcactgaaagggga

SEQ ID NO: 76622 - DNA, 75 bp, synthetic construct
  source 1..75: mol_type = other DNA
aggttttgcttggttagatacaggaactcacgatagcttgcttgaagcctctagctttgttgaaaccatagaaaa

SEQ ID NO: 76623 - DNA, 75 bp, synthetic construct
  source 1..75: mol_type = other DNA
tggtggccatggcctttttccgcaatgagccaattaccgatgtggttcgccgtctgaacctgagcgcggatggcg

SEQ ID NO: 76624 - DNA, 75 bp, synthetic construct
  source 1..75: mol_type = other DNA
aggtgtggcttacagccgtgtgtcgactttctccggggattatctccgcgtaactgacaacaaggggaaaacgca

SEQ ID NO: 76625 - DNA, 75 bp, synthetic construct
  source 1..75: mol_type = other DNA
gaaatcgaagagctgaaagaaaaaaacaactcactgtcgcaggaagttcaaaatgcccagcatcagcgcgaagag

SEQ ID NO: 76626 - DNA, 75 bp, synthetic construct
  source 1..75: mol_type = other DNA
atggattttgaatttacgggtgaagaaaccccggaacaactggaaaaaatgctggaaggacttggggatgtggat

SEQ ID NO: 76627 - DNA, 75 bp, synthetic construct
  source 1..75: mol_type = other DNA
gctgtcgttgtttacgctggcggaatcattagggggagtggaaagtttaatctctcacgccgcaaccatgacaca

SEQ ID NO: 76628 - DNA, 75 bp, synthetic construct
  source 1..75: mol_type = other DNA
cctatatttccagacatctgttatcacttaacccattacaagcccgctgccgcagatattcccgtggcgagcgat

SEQ ID NO: 76629 - DNA, 75 bp, synthetic construct
  source 1..75: mol_type = other DNA
atatttattttgggaggcatgcccaaaatatgaatttaatccggcatcattacctgatggtgaatttataattaa

SEQ ID NO: 76630 - DNA, 75 bp, synthetic construct
  source 1..75: mol_type = other DNA
gtgatgggaaaaaacccgacagatgtgacgtacttcaggaactaattgattgtggtgatattagtgctaaagatg

SEQ ID NO: 76631 - DNA, 75 bp, synthetic construct
  source 1..75: mol_type = other DNA
ctgaagatgctggcaaagacccaccagccgatgaagctggcgctcaccggcgtggcgctttctgcatgctgggcc

SEQ ID NO: 76632 - DNA, 75 bp, synthetic construct
  source 1..75: mol_type = other DNA
tcccggcagcgatgatctgaacgggattaacgtgaaataccgttatgagtttacggacacactggggctggtgac

SEQ ID NO: 76633 - DNA, 75 bp, synthetic construct
  source 1..75: mol_type = other DNA
ggagcagattgctgcgcaaatgcgcaacaagaagctgccgatggttgacgatctgcgcgatgaatctgaccacga

SEQ ID NO: 76634 - DNA, 75 bp, synthetic construct
  source 1..75: mol_type = other DNA
cggccatatggggtatgaaggcttttttgttgatgaagaaaccggagcctgccttgaagatgaggacggacaggt

SEQ ID NO: 76635 - DNA, 75 bp, synthetic construct
  source 1..75: mol_type = other DNA
tctcttggcgatgcgatccgccttcgtgatgaagaggtgatgcatctcaaagcaaaaattgcagagtttgaagat

SEQ ID NO: 76636 - DNA, 75 bp, synthetic construct
  source 1..75: mol_type = other DNA
tgtggtgatattagtgctaaagatgcaaaaagcacacagaaagcctggaattgtcgtcactccagacagtcaaac

SEQ ID NO: 76637 - DNA, 75 bp, synthetic construct
  source 1..75: mol_type = other DNA
gaccttctctggaaatacagtaaatggcactgctacagaattggcaactgcggggcaaaccaatactgctatcgt

SEQ ID NO: 76638 - DNA, 75 bp, synthetic construct
  source 1..75: mol_type = other DNA
atgcgtaaactttatgccgccattttgtccgcagccatttgtctgaccgtatccggtgcgcctgcatgggcgtct

SEQ ID NO: 76639 - DNA, 75 bp, synthetic construct
  source 1..75: mol_type = other DNA
ttcttaagcccggcattacaaaatccgctggcattaggtgccgatctggtgttgcattcatgtacgaaatatctg

SEQ ID NO: 76640 - DNA, 75 bp, synthetic construct
  source 1..75: mol_type = other DNA
acatcgcggggccgatgactggttatccagattacaaccgtgcggcgtttaatgcgaaagcgagcgagctgatgg

SEQ ID NO: 76641 - DNA, 75 bp, synthetic construct
  source 1..75: mol_type = other DNA
gacaacgcagccaggccgatacgttaatgcgcaatctggcgcagcagaagccgaacgacccggagcaggtttacg

SEQ ID NO: 76642 - DNA, 75 bp, synthetic construct
  source 1..75: mol_type = other DNA
gcacaccccggaaaattgattttacgctgtcgctcacccgcgttgatgaatcactggccgcgctttatggcgata

SEQ ID NO: 76643 - DNA, 75 bp, synthetic construct
  source 1..75: mol_type = other DNA
gggctaaagtcggctattcttgaactagaaaataatggtggattatcccctgaacttctggatacagcatttgag

SEQ ID NO: 76644 - DNA, 75 bp, synthetic construct
  source 1..75: mol_type = other DNA
ccactggtggggctggcaggccgcgatgctgacaccggggataatcagcatggcattagggatctggttaacgct

SEQ ID NO: 76645 - DNA, 75 bp, synthetic construct
  source 1..75: mol_type = other DNA
tcgtacctgggacgaatggcggcgcgaggaagatgcaagaacacacaccaccgagaggagacatgatcgcggttg

SEQ ID NO: 76646 - DNA, 75 bp, synthetic construct
  source 1..75: mol_type = other DNA
gacggttttgcgtttcttgccatgggcttcactggtaaacgtgcagccaggttcaaagaggcatacatcaatgcc

SEQ ID NO: 76647 - DNA, 75 bp, synthetic construct
  source 1..75: mol_type = other DNA
cgtttgccctttccgaaaataaagacattactctggtcgtctgcggtggcacggtccgccataaaacgcgatcta

SEQ ID NO: 76648 - DNA, 75 bp, synthetic construct
  source 1..75: mol_type = other DNA
cccagccatttcctgctctatgtacgttattccgccgccggatggcagggtgacatggatttaccactgcagcca

SEQ ID NO: 76649 - DNA, 75 bp, synthetic construct
  source 1..75: mol_type = other DNA
atgaactatgccggacacgaaaaacttcgcgccgaagtggcggaggtggccaatgccatgtgtgaccttcgggcc

SEQ ID NO: 76650 - DNA, 75 bp, synthetic construct
  source 1..75: mol_type = other DNA
cagccgccgaagccatcaaaacgctgatggatgcgctgattgatatttcatgcacggcagcaaccgcagaaaaac

SEQ ID NO: 76651 - DNA, 75 bp, synthetic construct
  source 1..75: mol_type = other DNA
ggtgataattttgaacggttacttggcgcttctcattcagaggcagaggcgattatgcgtggtatgacgaatgct

SEQ ID NO: 76652 - DNA, 75 bp, synthetic construct
  source 1..75: mol_type = other DNA
ctgacaaccaggcagacaaaacggatatccggaaaacggcggaagagaaagtgaagaccgctgaacaggagcagg

SEQ ID NO: 76653 - DNA, 75 bp, synthetic construct
  source 1..75: mol_type = other DNA
caaacgcccatggctggctgatgatgcagccattccgctaaccgacgatattaaccgatttgcttttccacatcg

SEQ ID NO: 76654 - DNA, 75 bp, synthetic construct
  source 1..75: mol_type = other DNA
caatgataatgttatattcaaatggctcagactctggcaaaacgaagggtgtatatcgcagcgtcttccggtgac

SEQ ID NO: 76655 - DNA, 75 bp, synthetic construct
  source 1..75: mol_type = other DNA
atcgataaccgtgcaaacctgaattatcttctgacccattccggtctggactataaacgcaatattctgaatgac

SEQ ID NO: 76656 - DNA, 75 bp, synthetic construct
  source 1..75: mol_type = other DNA
gaatgctgacgggactatttctctgcaagatagcaatgggcgtaaggcgactattaatctttggcagattgatga

SEQ ID NO: 76657 - DNA, 75 bp, synthetic construct
  source 1..75: mol_type = other DNA
tgagtgttaacgatcgcccgttgtgggagattgacctgctgaacttcatttaccggaaggacggcaaggacattg

SEQ ID NO: 76658 - DNA, 75 bp, synthetic construct
  source 1..75: mol_type = other DNA
tgccattcatcgtgaagagtcggtaaaacgtggtatgcctgttatcagagactgccagcgttgtggtggtcgtgg

SEQ ID NO: 76659 - DNA, 75 bp, synthetic construct
  source 1..75: mol_type = other DNA
ggcgtgtatccgtcttactgggaagaatggaaaaaagtcagggaggtggtaaaagttgcctgtccggagtgtggc

SEQ ID NO: 76660 - DNA, 75 bp, synthetic construct
  source 1..75: mol_type = other DNA
cgctggtcacgtcatgatacagtcatgtttctttttgcaagtggcctggcaattttcttttgttggttcttatac

SEQ ID NO: 76661 - DNA, 75 bp, synthetic construct
  source 1..75: mol_type = other DNA
aatgatgtcgccagcctggcaactctgacaaaagtcgggcgggatattcttgcgaaatcgaccgttgccgccgtt

SEQ ID NO: 76662 - DNA, 75 bp, synthetic construct
  source 1..75: mol_type = other DNA
actacctgaaaacgcataaaacctgcagctctccagatgtcgccgcggcttccgggatgacgcatacctgcatca

SEQ ID NO: 76663 - DNA, 75 bp, synthetic construct
  source 1..75: mol_type = other DNA
tggccgccagcaaccatatcatcgcggagctctattactgctttgcaatgacacaaatcgcttgcctgccattaa

SEQ ID NO: 76664 - DNA, 75 bp, synthetic construct
  source 1..75: mol_type = other DNA
gaaataaaaaccaaacgatatgtggaatttctggccttgtctcaatctctcatgcaaaaatatttatatgagcag

SEQ ID NO: 76665 - DNA, 75 bp, synthetic construct
  source 1..75: mol_type = other DNA
aggtttattacgcgctgacggaagaagagaaagagggcgtacttgagcaattaaaacgcaagaaaggcaagccga

SEQ ID NO: 76666 - DNA, 75 bp, synthetic construct
  source 1..75: mol_type = other DNA
atgaaactggaagatttaccgaaatactattccccaaaatccccaggcctgactgatgcatccgcttcgacgtca

SEQ ID NO: 76667 - DNA, 75 bp, synthetic construct
  source 1..75: mol_type = other DNA
tttgcaggagagatttcaccgcatagtcccttttttatcgctgcgttgctaaatattgtcgctttccttgtggtt

SEQ ID NO: 76668 - DNA, 75 bp, synthetic construct
  source 1..75: mol_type = other DNA
agttcgcggggcgaatattgatcagcttattcatcgctattcgacgaccgggcaaaataatacccgtgttgttcc

SEQ ID NO: 76669 - DNA, 75 bp, synthetic construct
  source 1..75: mol_type = other DNA
cctctctggcgtggggagctggcgtgcagtttaacccgaccgaatccgtggccattgatattgcttatgaaggtt

SEQ ID NO: 76670 - DNA, 75 bp, synthetic construct
  source 1..75: mol_type = other DNA
agtagatggcgatgatgaagccatcttcagaccaatacaaaaatacatcaatggcacatggtataacgtcgcaca

SEQ ID NO: 76671 - DNA, 75 bp, synthetic construct
  source 1..75: mol_type = other DNA
ttactgtttgctgttatttataatcattcactaccaatttgggatggctggatttggattattggtttagcgttt

SEQ ID NO: 76672 - DNA, 75 bp, synthetic construct
  source 1..75: mol_type = other DNA
acgtccagtaacagctgtccggcgaatacagaacaggtttgtctgacgttctcctcggtgatcgagagtaaacgc

SEQ ID NO: 76673 - DNA, 75 bp, synthetic construct
  source 1..75: mol_type = other DNA
caggctgaacgtatccgtttggcggataaggctaattttcatattcaccgtctcctgaatatcagcggagggcat

SEQ ID NO: 76674 - DNA, 75 bp, synthetic construct
  source 1..75: mol_type = other DNA
aacagtggcaggagcaggacggccccgcatccggcgataatgtgccgcctgtgtggcttgggccaaatcagcttg

SEQ ID NO: 76675 - DNA, 75 bp, synthetic construct
  source 1..75: mol_type = other DNA
ccgctggcgagcaagctgtatgaccgtgtaggagatgctgtttttggcgctgcacttgttgattccagacttaat

SEQ ID NO: 76676 - DNA, 75 bp, synthetic construct
  source 1..75: mol_type = other DNA
attctgcaatttcgggacgttacactgtctctgcaccttataaagcgggtgccgggcgtggaaacccgaaattca

SEQ ID NO: 76677 - DNA, 75 bp, synthetic construct
  source 1..75: mol_type = other DNA
agcgtcttttttatcgtctgcgtctgtgcacacccaaattatggtgggctggacgggggcaccgaaaggtgcgcc

SEQ ID NO: 76678 - DNA, 75 bp, synthetic construct
  source 1..75: mol_type = other DNA
cgaaatctccaaacctggctgattctgtgatgattgcttatgccccgatggaaatgcccatcgtaatttctgatg

SEQ ID NO: 76679 - DNA, 75 bp, synthetic construct
  source 1..75: mol_type = other DNA
acagccgaacctgaatacctggacggcctgagcgaaccgatcgggaaattttcgatgactactgtctggcagccg

SEQ ID NO: 76680 - DNA, 75 bp, synthetic construct
  source 1..75: mol_type = other DNA
gtggcagtgcactcagataccatccgcaatacgaaactgaacttccctggtttgaacacactgacgacaggctga

SEQ ID NO: 76681 - DNA, 75 bp, synthetic construct
  source 1..75: mol_type = other DNA
ggcctggaagctgtgggagcttatgggggaggtgtattcgaaccgctggactcagaagaacggggccgcaccttc

SEQ ID NO: 76682 - DNA, 75 bp, synthetic construct
  source 1..75: mol_type = other DNA
tgacaaaagtcgggcgggatattctggctaaatcgaccgttgccgccgttatcgaatatctcggtttacaggaaa

SEQ ID NO: 76683 - DNA, 75 bp, synthetic construct
  source 1..75: mol_type = other DNA
tggaaagccttggtggtgagttattaaaaatcaccaaagaggctgccatcatggctacgatcccaaccctcactc

SEQ ID NO: 76684 - DNA, 75 bp, synthetic construct
  source 1..75: mol_type = other DNA
cgcttgattaagcgtctgcagaaattcgtaccggatgccttacccgtggtgcgtaaagccagctggcactgcaga

SEQ ID NO: 76685 - DNA, 75 bp, synthetic construct
  source 1..75: mol_type = other DNA
atgtacgcaaaatcttttctcgcatttgatggcaacggacgtctgaccggtgcccgtaccgcacagactgcgcca

SEQ ID NO: 76686 - DNA, 75 bp, synthetic construct
  source 1..75: mol_type = other DNA
ctaaatatgacattgatgttcagaaggctaatgatggcacttccgcactaccgcagcaagtcattgctttgactg

SEQ ID NO: 76687 - DNA, 75 bp, synthetic construct
  source 1..75: mol_type = other DNA
tgatgctagtaatgtcgttggtggtactgttgaagctattgggacgctaaccattaaggcagctactgccgctat

SEQ ID NO: 76688 - DNA, 75 bp, synthetic construct
  source 1..75: mol_type = other DNA
accacctatgacgcctcttccgtcccgctttataaccgtctggttgaatttaaaatcggcaccaccgaagtgatc

SEQ ID NO: 76689 - DNA, 75 bp, synthetic construct
  source 1..75: mol_type = other DNA
agtttatttcgagatttagggacctcagcagcaattatacaaaaagaacaattgcaagatgaaactaaaagtgcc

SEQ ID NO: 76690 - DNA, 75 bp, synthetic construct
  source 1..75: mol_type = other DNA
atgtacgcaaaatcttttctcgcacttgatggcaacggacgtctgaccgatgcccgtagcgcacagactgcacct

SEQ ID NO: 76691 - DNA, 75 bp, synthetic construct
  source 1..75: mol_type = other DNA
gtcttttttatcgtccgcatttgctcacatccagattatggtgggctgggcgggggcaccgaaaggtgcgccggt

SEQ ID NO: 76692 - DNA, 75 bp, synthetic construct
  source 1..75: mol_type = other DNA
atgaaaaacggccttgaactgaaagcgccagtaactgatgacatcagcagagcactggcttttgctattaagtgg

SEQ ID NO: 76693 - DNA, 75 bp, synthetic construct
  source 1..75: mol_type = other DNA
caatagcaaaagttgtaggttataaagggcatattacgttcgatacaacaaagcccgatggagcccctcgaaaac

SEQ ID NO: 76694 - DNA, 75 bp, synthetic construct
  source 1..75: mol_type = other DNA
tcggcagtcgcctctatggtgaatcttcaaagatacaaccaggagtactatctggttcagcaacgctgctcatga

SEQ ID NO: 76695 - DNA, 75 bp, synthetic construct
  source 1..75: mol_type = other DNA
cgaatccgtggccgttgatgtcgcttatgaaggttccggcagtggcgactggcgcactgacggtttcatcgtggg

SEQ ID NO: 76696 - DNA, 75 bp, synthetic construct
  source 1..75: mol_type = other DNA
atggaaataatgcgctttgatgctcattttcgtactttttgccccgcttgcaataataagttctggatgaactca

SEQ ID NO: 76697 - DNA, 75 bp, synthetic construct
  source 1..75: mol_type = other DNA
tgggtgataacgcccgttttagcctgatcgctacggcggacgacgtcgcagattgcgatacgctgatctactact

SEQ ID NO: 76698 - DNA, 75 bp, synthetic construct
  source 1..75: mol_type = other DNA
cgaatttgcggcgtgatttttgactgggatgagtacagtctcgatttatgcagcgatatcaatcaacttaatgaa

SEQ ID NO: 76699 - DNA, 75 bp, synthetic construct
  source 1..75: mol_type = other DNA
caaaacgcgagttcacccagttactcgaagtttcgctggcctaccgcaaaatcgagtgggaacacgttaagtcag

SEQ ID NO: 76700 - DNA, 75 bp, synthetic construct
  source 1..75: mol_type = other DNA
aagcactactttttacttgagaatgaggagttgcgcgaatttaagcacagcatgtctttaagaccttctgtgaaa

SEQ ID NO: 76701 - DNA, 75 bp, synthetic construct
  source 1..75: mol_type = other DNA
tttatgacgactctggtttttgataacgatgaagctgttatcagtgccagtcctggctttgatgaagcatgggaa

SEQ ID NO: 76702 - DNA, 75 bp, synthetic construct
  source 1..75: mol_type = other DNA
tcagtggagaaaaaacagtactggcagccggagcccgtcatactgtaaaggcacaggccggggaacagtatggac

SEQ ID NO: 76703 - DNA, 75 bp, synthetic construct
  source 1..75: mol_type = other DNA
ctgcaagaaggctctttggggttaggcgaaagttatatggatggctggtgggaatgtgaccgactggatatgttt

SEQ ID NO: 76704 - DNA, 75 bp, synthetic construct
  source 1..75: mol_type = other DNA
cctgtcttcctgttcctaccgttccacatatcaaacgtcgggtttacaccttcacgcagagagctaaaaaacaat

SEQ ID NO: 76705 - DNA, 75 bp, synthetic construct
  source 1..75: mol_type = other DNA
tcaatattcaggatcttgcggaatacatagacaaaagacgagaagaaggacgagctgagtgggaaaaggtcagaa

SEQ ID NO: 76706 - DNA, 75 bp, synthetic construct
  source 1..75: mol_type = other DNA
tttgtgctggaatctccgctggtcaacgggcgcggtcatatgcgcgtcggtgacagttcatggcctgtcagcgcc

SEQ ID NO: 76707 - DNA, 75 bp, synthetic construct
  source 1..75: mol_type = other DNA
aggaaatcatcctcctttgctacatgcagctctggatggaaaaagcccaggacctcagcaaacacctgtatccca

SEQ ID NO: 76708 - DNA, 75 bp, synthetic construct
  source 1..75: mol_type = other DNA
ctgaattcaataccccaaacattgaactctcagcagttagtcaaaaatactttggtatgagtccagccacagcag

SEQ ID NO: 76709 - DNA, 75 bp, synthetic construct
  source 1..75: mol_type = other DNA
cactgccggtgctttcaccgcagattctgtcggcaatatctacgtgcagggacacgaagatgaaatgctggtgca

SEQ ID NO: 76710 - DNA, 75 bp, synthetic construct
  source 1..75: mol_type = other DNA
gtcgtattgcggaaatggaagcaatgaagcgaaatattgcgcaagccgaatcggagattaaacagtcgcagcaag

SEQ ID NO: 76711 - DNA, 75 bp, synthetic construct
  source 1..75: mol_type = other DNA
ggacgccttatttacactattggctcggagccacagcgatacaccattatcgccggattacagaacaaatacctg

SEQ ID NO: 76712 - DNA, 75 bp, synthetic construct
  source 1..75: mol_type = other DNA
atgcgtttatttttttctctgctgatactgttgtcatttttttcccgtgcaacagaacctgttcaggtatttact

SEQ ID NO: 76713 - DNA, 75 bp, synthetic construct
  source 1..75: mol_type = other DNA
ccacttaaacaaacaacagttgaactctataccgtagataatcataccggacgagtggaacacgttacccgtgca

SEQ ID NO: 76714 - DNA, 75 bp, synthetic construct
  source 1..75: mol_type = other DNA
catgcagatattcttgatggcggcgaaattcagtttaatggttttgtcactgacgaagctcctaaatggacctgg

SEQ ID NO: 76715 - DNA, 75 bp, synthetic construct
  source 1..75: mol_type = other DNA
atgaataatctgatggtcattgatggtattgaagttcgtcgtgatgcttatggacgttacagcctgaacgatctg

SEQ ID NO: 76716 - DNA, 75 bp, synthetic construct
  source 1..75: mol_type = other DNA
gcggaccgggtgcgactaacctggtgaccgccattgccgatgcgcggctggactccatcccgctgatttgcatca

SEQ ID NO: 76717 - DNA, 75 bp, synthetic construct
  source 1..75: mol_type = other DNA
acggcagtactgctcggatttattgcagatagtagtgcatttgcctttttagcgtttatatctgaaggttggtta

SEQ ID NO: 76718 - DNA, 75 bp, synthetic construct
  source 1..75: mol_type = other DNA
tcgaaaaccagcctgaccgcaacagaagcctatcaaaaggcgatggccgcaaactacgtcaaagtgcgtgagcgg

SEQ ID NO: 76719 - DNA, 75 bp, synthetic construct
  source 1..75: mol_type = other DNA
acaagcctggcaacaagcccaggcgcaggtgtctcgcactctcggtcagttaacgataattagtgaacgttaccc

SEQ ID NO: 76720 - DNA, 75 bp, synthetic construct
  source 1..75: mol_type = other DNA
atgactaagcaaccaccaatcgcaaaagccgatctgcaaaaaactcagggaaaccgtgcaccagcagcagttaaa

SEQ ID NO: 76721 - DNA, 75 bp, synthetic construct
  source 1..75: mol_type = other DNA
cgctggcggtgctggaattttgagtctgacgccggaaaacagcttaatgtgtggctctccagtgaagggcttctc

SEQ ID NO: 76722 - DNA, 75 bp, synthetic construct
  source 1..75: mol_type = other DNA
atcgacggtaaagagttcgacaactcttacacccgtggtgaaccgctttctttccgtctggacggtgttatcccg

SEQ ID NO: 76723 - DNA, 75 bp, synthetic construct
  source 1..75: mol_type = other DNA
agtattgggatgcccggttcacattccattcagaccctgacaaggacatgagcgatgcggaacgcgagatcaact

SEQ ID NO: 76724 - DNA, 75 bp, synthetic construct
  source 1..75: mol_type = other DNA
tgtataccgtggataaccacacaggacgggtggaacatgttacccggacatcgaaaaccagcctgaccgcaacag

SEQ ID NO: 76725 - DNA, 75 bp, synthetic construct
  source 1..75: mol_type = other DNA
ttacagggagcccctaaaaataccggacctgatgttattcggtgcgcaacccgggcctgttatgggattttccca

SEQ ID NO: 76726 - DNA, 75 bp, synthetic construct
  source 1..75: mol_type = other DNA
gtaaccgatgcctgcattagctgggaaatgaccgatgccttgctgcgtgaaattcatcaggatctgaacgggcag

SEQ ID NO: 76727 - DNA, 75 bp, synthetic construct
  source 1..75: mol_type = other DNA
ctgaccggactgtcagcggcaacacttccgcacatggattatgaggtggcaggcacaccggcacagcgcaaggtg

SEQ ID NO: 76728 - DNA, 75 bp, synthetic construct
  source 1..75: mol_type = other DNA
caacaaatgttacccagcacgatggtgcaattttaaaaacaaacactaacggtacgacggtgagcggtacgaata

SEQ ID NO: 76729 - DNA, 75 bp, synthetic construct
  source 1..75: mol_type = other DNA
tgaggattttcaacgaagcttttggcctgatttttcgtcgttcggaagagtgcctgcaccttattcccaccagtg

SEQ ID NO: 76730 - DNA, 75 bp, synthetic construct
  source 1..75: mol_type = other DNA
agcaaagcgcgaggcatgcgagtagaaacgtccatccacaagtgggcgcagaaaggggaatgggtgaatatgtgt

SEQ ID NO: 76731 - DNA, 75 bp, synthetic construct
  source 1..75: mol_type = other DNA
caggattactggctgatggatgcagcggtaagaaacggagaatggaagatcacaccagaattattacgtcacaca

SEQ ID NO: 76732 - DNA, 75 bp, synthetic construct
  source 1..75: mol_type = other DNA
cttgccgctgataatatcgcaaatggttattcaatgactgtacagccagttcaggcatccacacgaacagcagcg

SEQ ID NO: 76733 - DNA, 75 bp, synthetic construct
  source 1..75: mol_type = other DNA
atttatacaagatatgggttatcggctgatagaacatttaattacgtatcgccagagctagccaataagctaaga

SEQ ID NO: 76734 - DNA, 75 bp, synthetic construct
  source 1..75: mol_type = other DNA
tggataaaaaaccagtaatcagggaagaacataccaaccactgcctggcggcggcaaaagcgagagctgcaaagc

SEQ ID NO: 76735 - DNA, 75 bp, synthetic construct
  source 1..75: mol_type = other DNA
ggtgtaaaatcagcaattcttgaactggaaaacaatggaaacctatcatcagatctcttggatacagcatttgag

SEQ ID NO: 76736 - DNA, 75 bp, synthetic construct
  source 1..75: mol_type = other DNA
gaacggcaggggatcccctgcccgtggcgttactacaacgatcgcgatgtacgcacaatcgttgagctggggaaa

SEQ ID NO: 76737 - DNA, 75 bp, synthetic construct
  source 1..75: mol_type = other DNA
agcggtgaatactggcaacgtcagaagacgctgctgacagaaagggaagtcagttttatgaaaggactgttcaga

SEQ ID NO: 76738 - DNA, 75 bp, synthetic construct
  source 1..75: mol_type = other DNA
tgaaaatcgccagattgtcgcggataacgcaaaaacacgcgtacccatgacgattggtgcactctggacggctta

SEQ ID NO: 76739 - DNA, 75 bp, synthetic construct
  source 1..75: mol_type = other DNA
attgtggatatgaagcggtggtatctgtgtccgcaggtacgggtcgcagatatcgtccagctgaacgggaatatc

SEQ ID NO: 76740 - DNA, 75 bp, synthetic construct
  source 1..75: mol_type = other DNA
atcgtaaaagaaaaggatttttattccatgcggtgcaatttttaatctacaccataattattagtgctgttggta

SEQ ID NO: 76741 - DNA, 75 bp, synthetic construct
  source 1..75: mol_type = other DNA
agatgctcacgaaaatgctagcaatgcttacaatgaaggattgatcgcaaaaaatgaacttagagatattagtaa

SEQ ID NO: 76742 - DNA, 75 bp, synthetic construct
  source 1..75: mol_type = other DNA
tgggaacggaacaagagttctggatggtgctaccgaaagccgaaattccacatatcaaagccaaatatacccttg

SEQ ID NO: 76743 - DNA, 75 bp, synthetic construct
  source 1..75: mol_type = other DNA
gggctaaagtcggctattattgaattagagcatagtggggggttatatcctgaacttctagacacagcatttgag

SEQ ID NO: 76744 - DNA, 75 bp, synthetic construct
  source 1..75: mol_type = other DNA
ccaccaacatcaagctggcatggactgagaacagcgaacgccgcaacgccatcagcccgaacagcttcaagtcgg

SEQ ID NO: 76745 - DNA, 75 bp, synthetic construct
  source 1..75: mol_type = other DNA
ttcctcaagcaaaaagacgacttcgataacgtcatgatgcaatggatgctcccagacgccaaaacagggcgttgg

SEQ ID NO: 76746 - DNA, 75 bp, synthetic construct
  source 1..75: mol_type = other DNA
ataactttgtaccgctggtatttggtgagaagtggaacagcattattccggtgctgcaattgctgtgtgtggtgg

SEQ ID NO: 76747 - DNA, 75 bp, synthetic construct
  source 1..75: mol_type = other DNA
atgacgatggatccgggggagtatgcggtttctgtgacggtgaaagggaagactgctgtctacggacgtgtgcgt

SEQ ID NO: 76748 - DNA, 75 bp, synthetic construct
  source 1..75: mol_type = other DNA
ctgcttgggctgatggtggtgagcaacaactttgtgccgctggttttcggtgagaagtgggcgagcatcattccg

SEQ ID NO: 76749 - DNA, 75 bp, synthetic construct
  source 1..75: mol_type = other DNA
atttacgcggggatttgcagacaggctcgcatatccggcgtcattgaccccgtactgctgtgcaatgagatgccg

SEQ ID NO: 76750 - DNA, 75 bp, synthetic construct
  source 1..75: mol_type = other DNA
gattggctcgctgctgatggcgaaagcgcgggtcgatatcagctttaaattcaacgtattcaaaacatttctgtt

SEQ ID NO: 76751 - DNA, 75 bp, synthetic construct
  source 1..75: mol_type = other DNA
cgctgggcttcctgctggtgcagattatcaacaccattctgagctatttcgtgctaatcaagcccattctgggct

SEQ ID NO: 76752 - DNA, 75 bp, synthetic construct
  source 1..75: mol_type = other DNA
atgagctctatctccctgatccaaccggatcgcgacctgttctcctggccgcagtactgggccgcctgttttgga

SEQ ID NO: 76753 - DNA, 75 bp, synthetic construct
  source 1..75: mol_type = other DNA
atgtcaacgctgaagaatacattttttatcactccgcctgacacgccaacgcaggcagggcctgaaaatattttt

SEQ ID NO: 76754 - DNA, 75 bp, synthetic construct
  source 1..75: mol_type = other DNA
tcagcttacaaagacagaaatcttcgcagtgaagcgccagatctcagagcttcgctcatgccttaccgcttcaag

SEQ ID NO: 76755 - DNA, 75 bp, synthetic construct
  source 1..75: mol_type = other DNA
cgctggtcaaatcaggcatcacgccacaggaggtggatgtggttgtcaccctgccactgagcgaatatttcgaca

SEQ ID NO: 76756 - DNA, 75 bp, synthetic construct
  source 1..75: mol_type = other DNA
ctcattatggtcagggctttgtctggaaccatattccgtggggagcagaagactttacagggaaaatacctctgc

SEQ ID NO: 76757 - DNA, 75 bp, synthetic construct
  source 1..75: mol_type = other DNA
ctgatggcaaacaggtcgtcgtgaatggctgcaggtgtgaatgtggctgtgttgttatatccagtattgctgatg

SEQ ID NO: 76758 - DNA, 75 bp, synthetic construct
  source 1..75: mol_type = other DNA
gggagattcgggagcttcagcggtagccggagcacagtcaggtaagacgacggttgagaataatgcgctcagctt

SEQ ID NO: 76759 - DNA, 75 bp, synthetic construct
  source 1..75: mol_type = other DNA
atgggtctttgttattggctttcagctttctatatttttacctgcaataccattcatcttctggatgattgctgt

SEQ ID NO: 76760 - DNA, 75 bp, synthetic construct
  source 1..75: mol_type = other DNA
tcatcaacgccccccatgagcgaatcctcacggacagagaacggcaggtataccgtcaccgtttcaaatggcagt

SEQ ID NO: 76761 - DNA, 75 bp, synthetic construct
  source 1..75: mol_type = other DNA
tatcgccgcgccacaaatgaaggtattcagctgtttctggccggaagtgccggacttctgcagaccactgaagat

SEQ ID NO: 76762 - DNA, 75 bp, synthetic construct
  source 1..75: mol_type = other DNA
atatcagtaatgaggggcttgttgtcagcaacggaggaagctcactcggttatggagaaaccggcgtcgggaatg

SEQ ID NO: 76763 - DNA, 75 bp, synthetic construct
  source 1..75: mol_type = other DNA
cattgagcaggatattaaccagcccgtccgccaggaaatcgatgcctttttctgcgcattcagggagaaagttga

SEQ ID NO: 76764 - DNA, 75 bp, synthetic construct
  source 1..75: mol_type = other DNA
ttagcggtacggctgcttcagccggtgcacatacccattcgatgacatttgtttcaggtggttccagtggtgctc

SEQ ID NO: 76765 - DNA, 75 bp, synthetic construct
  source 1..75: mol_type = other DNA
gtgccggattaagggaagacgatgagacgccagttaagaatttaattaaggagtttatgttaaatgaaacccgat

SEQ ID NO: 76766 - DNA, 75 bp, synthetic construct
  source 1..75: mol_type = other DNA
tttgatgcctgtattgattcgtggaaagcggacccggaattaaataattcgatttatatgtggaatatcctgata

SEQ ID NO: 76767 - DNA, 75 bp, synthetic construct
  source 1..75: mol_type = other DNA
ccatagtattagcgggactgcaaatagtgccggtgcgcaccaacacaagagttccggtgcatttggtggcacgaa

SEQ ID NO: 76768 - DNA, 75 bp, synthetic construct
  source 1..75: mol_type = other DNA
tttcaccggtaataatttaaaatggaataagcttgctcccgtctcatcaccagatggcgtcgctggcggttttgc

SEQ ID NO: 76769 - DNA, 75 bp, synthetic construct
  source 1..75: mol_type = other DNA
atgaaagaaacaggcacaggcaacattactgttaaggataagaactccgttatcactaatctcggaactaatctt

SEQ ID NO: 76770 - DNA, 75 bp, synthetic construct
  source 1..75: mol_type = other DNA
aaagcgacgttattgcagaattaagccgccgtttcagctgcacaatggagcactggtatgccgaacagggctgca

SEQ ID NO: 76771 - DNA, 75 bp, synthetic construct
  source 1..75: mol_type = other DNA
tctggtgtatgaagtcgatagccagtggggaaaagtgtatatcctgcgcgtcctgcatacagcacagaagtggcc

SEQ ID NO: 76772 - DNA, 75 bp, synthetic construct
  source 1..75: mol_type = other DNA
ccgtgggcgcgggcagcgtggtgctcgactctgtcccggacaacgcgctggtggtgggagaaaaagcgcgagtga

SEQ ID NO: 76773 - DNA, 75 bp, synthetic construct
  source 1..75: mol_type = other DNA
ccgtgggggcgggcagcgtggtgctcgacgcaatcccggacaacgcgctggtggtgggagaaaaagcgcgagtga

SEQ ID NO: 76774 - DNA, 75 bp, synthetic construct
  source 1..75: mol_type = other DNA
cccggaattccgcacactgtatccggaaaacatctgtatttttggtgttgtcactcacgtgatacacaggacgcg

SEQ ID NO: 76775 - DNA, 75 bp, synthetic construct
  source 1..75: mol_type = other DNA
gatgctgcatgaactctggctgcagagcggtactggacagcgtcgctgggaaggattaccggatgatgtcaggga

SEQ ID NO: 76776 - DNA, 75 bp, synthetic construct
  source 1..75: mol_type = other DNA
tgacgaccgaattattcgaaataggtagctatggcacaggttcattaaatattacggataagggttacgtcacga

SEQ ID NO: 76777 - DNA, 75 bp, synthetic construct
  source 1..75: mol_type = other DNA
taacatgaaaaaagagatcgccgccctgaacgatacggcggcgattctggactataaggttggctggggaaaaga

SEQ ID NO: 76778 - DNA, 75 bp, synthetic construct
  source 1..75: mol_type = other DNA
gcgacgtccatatcaatttcccggcccgtaaaaactggcttggtaaaactacggaacatgttcatgccattaatg

SEQ ID NO: 76779 - DNA, 75 bp, synthetic construct
  source 1..75: mol_type = other DNA
ggctgcacacccgcaccgcctgcgccagtgccggtgattgtggtcaacggatgcccgagggtgagcctttgcccg

SEQ ID NO: 76780 - DNA, 75 bp, synthetic construct
  source 1..75: mol_type = other DNA
tgaggttcgcagagcatacaatcgttccacttaccttgaaaaaagaaagggccttatgaattggtggggcaattt

SEQ ID NO: 76781 - DNA, 75 bp, synthetic construct
  source 1..75: mol_type = other DNA
tgaggctaaccaagatgcctttaatgccgagggtatggaaaaagttgttgcgaccattacgggaacatctgataa

SEQ ID NO: 76782 - DNA, 75 bp, synthetic construct
  source 1..75: mol_type = other DNA
ctggattatatcgacgagctgaacgcactggatatcagcaaggcacctgaaatcagctggccggaagcgccactg

SEQ ID NO: 76783 - DNA, 75 bp, synthetic construct
  source 1..75: mol_type = other DNA
tgctgccttgaaaatcgcagagtgaagctaccgtcaggtcttgggtgggtaaaattccggcaatctcaacgtgtg

SEQ ID NO: 76784 - DNA, 75 bp, synthetic construct
  source 1..75: mol_type = other DNA
tagttgctcatgggttacgatccatcgcaagtactgcgctcaatgaagccggatttaatcctgatgtaattgaag

SEQ ID NO: 76785 - DNA, 75 bp, synthetic construct
  source 1..75: mol_type = other DNA
ctcggactcataaagtgaagagctttgagctgaaaacggtttatgccgatgaatggatacccgatccaaccacac

SEQ ID NO: 76786 - DNA, 75 bp, synthetic construct
  source 1..75: mol_type = other DNA
agttcgatctcgattcaaagttctggacgattccagcagaacggatgaaggccaagcgtgagcacattgttcctc

SEQ ID NO: 76787 - DNA, 75 bp, synthetic construct
  source 1..75: mol_type = other DNA
gcagcagacgaccatcaccatgctgaaaaatcagcttcatgttgccctcaccagggcagacaaaaacgagctggc

SEQ ID NO: 76788 - DNA, 75 bp, synthetic construct
  source 1..75: mol_type = other DNA
taccttcagtgaaggcgattctgaataccctgctccccctggagatactgttaccggtcgctgaaaataataaat

SEQ ID NO: 76789 - DNA, 75 bp, synthetic construct
  source 1..75: mol_type = other DNA
ggggaaagccatagacttcgatgccagaacggctattccattcgaaggtgagcgccataatgcacttgatgacgc

SEQ ID NO: 76790 - DNA, 75 bp, synthetic construct
  source 1..75: mol_type = other DNA
tcaccggcgtgacggatggtgccgggcgtcacttccggctggtactgaccacgcaggcgcagcgggcagaagagg

SEQ ID NO: 76791 - DNA, 75 bp, synthetic construct
  source 1..75: mol_type = other DNA
tacagaaacaccattagcattacgtggtgatatgctatcaagtgcaggggtgaacggtaacaggtgttcacaggc

SEQ ID NO: 76792 - DNA, 75 bp, synthetic construct
  source 1..75: mol_type = other DNA
caactttatatgattttctttgttcttttttattgggggtgaataaaagtaaaattaagaaggaaaatatacttt

SEQ ID NO: 76793 - DNA, 75 bp, synthetic construct
  source 1..75: mol_type = other DNA
cacagcctgtgcagacgccagtgattgtccacaacgcctgcccgaaagtgagcctttgcccgatgccgggcagtg

SEQ ID NO: 76794 - DNA, 75 bp, synthetic construct
  source 1..75: mol_type = other DNA
agaacggctattccattcgaaggtgagcgccataatgcacttgatgacgcccgttaccaggcaaaatacgtttca

SEQ ID NO: 76795 - DNA, 75 bp, synthetic construct
  source 1..75: mol_type = other DNA
cattagtatcagatcagggaaatagtgtagccgcaaaaaaggttctgctcaccctgtgggattatatgtctacgc

SEQ ID NO: 76796 - DNA, 75 bp, synthetic construct
  source 1..75: mol_type = other DNA
cgcggtgggctggctgcagaaataccgcaatgaagctgccgcgcgcgtgatgtccaacgtcaccgatgatgacgg

SEQ ID NO: 76797 - DNA, 75 bp, synthetic construct
  source 1..75: mol_type = other DNA
gttcctggtcagtagctttaagtaattatggtgccaaaagcggtaacgggcatattgccgtattgttatcgacag

SEQ ID NO: 76798 - DNA, 75 bp, synthetic construct
  source 1..75: mol_type = other DNA
ggctgtgaccatcactggtttgaaaaccggggacctaagtgtacagcactggtttacgttgatgacgcaaccagc

SEQ ID NO: 76799 - DNA, 75 bp, synthetic construct
  source 1..75: mol_type = other DNA
catcaaaaatgaaaacggtgaacagaactcgtctgccgcagcgcatactataaatggatcgcagcaagttgccgt

SEQ ID NO: 76800 - DNA, 75 bp, synthetic construct
  source 1..75: mol_type = other DNA
ttgactatggtcgtaactatggtgtgatttacgacgttgaagcctggacagatatgcttcctgtattcggcggcg

SEQ ID NO: 76801 - DNA, 75 bp, synthetic construct
  source 1..75: mol_type = other DNA
ggtcacgtggcggcgacgagggcaaatcagagaggagaacgtctccctacgttcaactttctggggtttacctgc

SEQ ID NO: 76802 - DNA, 75 bp, synthetic construct
  source 1..75: mol_type = other DNA
aggtcgtatgattcaatttaataccgcctcgccttataaaaatgcttcggggaggttaaataaactgcagaaatg

SEQ ID NO: 76803 - DNA, 75 bp, synthetic construct
  source 1..75: mol_type = other DNA
cccaccgcgcccatcccgcacataccagcaacggatctggaggtaacgtgcggatattacttcgacctgttctgg

SEQ ID NO: 76804 - DNA, 75 bp, synthetic construct
  source 1..75: mol_type = other DNA
caggcaggaggcggtgcttatgatgcgcaggtcagaaatgatgagcaggatgtaattcttgatgagcacgaaaaa

SEQ ID NO: 76805 - DNA, 75 bp, synthetic construct
  source 1..75: mol_type = other DNA
ctggcgggttataacgaaaaaattgctgaagccgatcgcatgatgcgtccgattccagacccgtactggaagccg

SEQ ID NO: 76806 - DNA, 75 bp, synthetic construct
  source 1..75: mol_type = other DNA
acctggagcaaagctatcttagtagtgtttttagcgaactatcccgcctgggcgaatggtcgtatccgaacccac

SEQ ID NO: 76807 - DNA, 75 bp, synthetic construct
  source 1..75: mol_type = other DNA
cgccacaacgaagatgatcccatttttgtacgctctggtgtcattaacctcggcccggctgactccgcatttctc

SEQ ID NO: 76808 - DNA, 75 bp, synthetic construct
  source 1..75: mol_type = other DNA
gccatacgtttgcggcgcatttcatgatgtcgggtggaaatatccttgctttgcaaaaaatcctcggacatcacg

SEQ ID NO: 76809 - DNA, 75 bp, synthetic construct
  source 1..75: mol_type = other DNA
atgcatgaactaaccaaaattacaggacataaagatccaagaatgctaatgcggtattatcatccaaaagctgaa

SEQ ID NO: 76810 - DNA, 75 bp, synthetic construct
  source 1..75: mol_type = other DNA
gtccatcggttgatgttattactggtctgattaaagcgaatattccgacccgtatcgcctttaccgtatccagta

SEQ ID NO: 76811 - DNA, 75 bp, synthetic construct
  source 1..75: mol_type = other DNA
ctgttaaaaatgagtgtgtatgggggtgggatcttaggcttgggtattggtttgttgcatatcatgaaagttaag

SEQ ID NO: 76812 - DNA, 75 bp, synthetic construct
  source 1..75: mol_type = other DNA
cgcctcattccattgccataacggcaatggttacagttctgatatcgatcgcgctcatgtttacacgctggaaga

SEQ ID NO: 76813 - DNA, 75 bp, synthetic construct
  source 1..75: mol_type = other DNA
agcattacaatgaaaaccatccgcatagtgcgttgggttatcgctctccgcaagaatatctacgtcagcggataa

SEQ ID NO: 76814 - DNA, 75 bp, synthetic construct
  source 1..75: mol_type = other DNA
ctaagcaacaacagcaagccgcaatcaacgccatcctcgcaacaccactcgataaagacaagccagttaccatcc

SEQ ID NO: 76815 - DNA, 75 bp, synthetic construct
  source 1..75: mol_type = other DNA
tcattcctgccgatggaaagtatgtttggacgattcaaattggtcctgataaaaaggcaatagccgccatggtag

SEQ ID NO: 76816 - DNA, 75 bp, synthetic construct
  source 1..75: mol_type = other DNA
agtgtgaataccctgatggtgaatacgtattatgacttcagaaacagcagtgcattcactccatgggtgtctgtt

SEQ ID NO: 76817 - DNA, 75 bp, synthetic construct
  source 1..75: mol_type = other DNA
gccaggagatccagctcgcgtaattagcagaggtgacgttgtaattcttgtataccggagcgaagagaaaaatga

SEQ ID NO: 76818 - DNA, 75 bp, synthetic construct
  source 1..75: mol_type = other DNA
gacttcggtcagatttctaaatcacatttagatgctgatggtatttctgttaagaaagatttaaatatcaagcta

SEQ ID NO: 76819 - DNA, 75 bp, synthetic construct
  source 1..75: mol_type = other DNA
ctaatccagtgatccacgagtcaatgcgcttctttattcgccatcaaccagaaaatctcaccctggtggtgttgt

SEQ ID NO: 76820 - DNA, 75 bp, synthetic construct
  source 1..75: mol_type = other DNA
gaaactgctgatggcttccgatgcgggttacggtttcgtctgcacctttaacgatctggtggcgcgtaaccgtgc

SEQ ID NO: 76821 - DNA, 75 bp, synthetic construct
  source 1..75: mol_type = other DNA
ctggaataaatctggtgaggtgagcgatatttctgcgttgcattactcgggatatgataacaatttcgcatggag

SEQ ID NO: 76822 - DNA, 75 bp, synthetic construct
  source 1..75: mol_type = other DNA
tttattgatgaagaaaccggagcctgccttgaagatgaggacggacaggtgacgcactggtgccatatttcagct

SEQ ID NO: 76823 - DNA, 75 bp, synthetic construct
  source 1..75: mol_type = other DNA
tgcctcggcccagacggcaacggctgttgtcaacatgcaaaataccgatattacagttgatcgtaatggcagtct

SEQ ID NO: 76824 - DNA, 75 bp, synthetic construct
  source 1..75: mol_type = other DNA
aaccggcccagctcgtactgttccgatatcgaaggaaatcgcggactacatccttacacgcaaatcggggaaatt

SEQ ID NO: 76825 - DNA, 75 bp, synthetic construct
  source 1..75: mol_type = other DNA
ttgtcattccctgtctcgggttttcagccagcagcatggcagcagaggatgtgatgattgtctcggcatccggct

SEQ ID NO: 76826 - DNA, 75 bp, synthetic construct
  source 1..75: mol_type = other DNA
agacgattaacggtattcgcagttatgccggtccatttggcaaaagcgatcgcgcgttaatatttggtctgtggg

SEQ ID NO: 76827 - DNA, 75 bp, synthetic construct
  source 1..75: mol_type = other DNA
gtcgtcgtacgctgggtattggtgtgatcaacttcgcttactacctggcgaagcacggtaaacgctactccgacg

SEQ ID NO: 76828 - DNA, 75 bp, synthetic construct
  source 1..75: mol_type = other DNA
cgcattgttacctgaaacagagaaggcaaagatcgaaagttacattgaatttgtcatcaaccagaacgaaaaaaa

SEQ ID NO: 76829 - DNA, 75 bp, synthetic construct
  source 1..75: mol_type = other DNA
aaattcggccaccaatggatgcttgcattgccagcgcggacaataaaatgattgcccgacaaatgaacaaaacag

SEQ ID NO: 76830 - DNA, 75 bp, synthetic construct
  source 1..75: mol_type = other DNA
gtgaatatcgacacgacaataacgatcgatacgctcctaaataccggtctggcacttctcggttggctttacatc

SEQ ID NO: 76831 - DNA, 75 bp, synthetic construct
  source 1..75: mol_type = other DNA
ccgatataaaaatgacgatggtttacgcacacttttctccagaccatctagaagatgctgttacaaaaaatcctt

SEQ ID NO: 76832 - DNA, 75 bp, synthetic construct
  source 1..75: mol_type = other DNA
tgacggatgttttgcccggtacaggaaatgaggaggagccgtatacgacgaaaattgatacgcctgtttatgagc

SEQ ID NO: 76833 - DNA, 75 bp, synthetic construct
  source 1..75: mol_type = other DNA
gataccaagcgccggaagatggaaaaccagttcaattcgctgaaagctgcttctggtcgagcttatgatgctttg

SEQ ID NO: 76834 - DNA, 75 bp, synthetic construct
  source 1..75: mol_type = other DNA
tgaatgccgcaatcagggactggagaaatccagggcgctgatgaccggtattgatgaactggacgcaaaaacggg

SEQ ID NO: 76835 - DNA, 75 bp, synthetic construct
  source 1..75: mol_type = other DNA
cgacatcatctgatgctcgcccttcttccgatgatacgcctttgtcgggtggatgttctgataccaggaaggctt

SEQ ID NO: 76836 - DNA, 75 bp, synthetic construct
  source 1..75: mol_type = other DNA
caaaaagcaatggatgagctggtggattgtgtggcagagctggaaactaaagttggaaagtttgaaaaactggtg

SEQ ID NO: 76837 - DNA, 75 bp, synthetic construct
  source 1..75: mol_type = other DNA
gggaatttatcgacgaaaactccggtgaattttttgttcaggtctggggaaatggagccaacttcgacaacacga

SEQ ID NO: 76838 - DNA, 75 bp, synthetic construct
  source 1..75: mol_type = other DNA
aactcaccttcaccgtgaaggatgcgtacgggaacccggtcaccgggctgaagccagatgcaccagtgtttagcg

SEQ ID NO: 76839 - DNA, 75 bp, synthetic construct
  source 1..75: mol_type = other DNA
gcttggcctcccgcgcagatcagttggaagaatttgttcactacgtgaaaggcgagatcaccaaggtagtcggca

SEQ ID NO: 76840 - DNA, 75 bp, synthetic construct
  source 1..75: mol_type = other DNA
acattatttagttgaaaaaatgtttgaaacacattctttggatatgaataattctgttttggcaagccctgagga

SEQ ID NO: 76841 - DNA, 75 bp, synthetic construct
  source 1..75: mol_type = other DNA
ttgcatccctgaaagcaaaaattcaggcttaccagcgacataaacgacgtgccaacaagcgtgtgcgtgcaacca

SEQ ID NO: 76842 - DNA, 75 bp, synthetic construct
  source 1..75: mol_type = other DNA
aaaacaatccgatgctgcaggatgtggcggtgggctggctgcagaagtaccgcaatgaagctgcagcgcgcgtga

SEQ ID NO: 76843 - DNA, 75 bp, synthetic construct
  source 1..75: mol_type = other DNA
gaacgtagaccttgccgccagcggcgttgcttacaaagaacggctgaatatacctgtgattgcagagcaggtggc

SEQ ID NO: 76844 - DNA, 75 bp, synthetic construct
  source 1..75: mol_type = other DNA
gattcagcggtgatttctcgtttttttgcatccctgaaagcaaaaattcaggcttaccagcggaaaaaacgacgt

SEQ ID NO: 76845 - DNA, 75 bp, synthetic construct
  source 1..75: mol_type = other DNA
atggaagaacgcaacgttataccactcgccgtggaaatatgtatgtccgctgccttgcggcaagctgggatgcat

SEQ ID NO: 76846 - DNA, 75 bp, synthetic construct
  source 1..75: mol_type = other DNA
ggcgtaacgatgacctggaaggcgctgtcattggcgcgttttttctgcgtggggctgatccggaagtgatggata

SEQ ID NO: 76847 - DNA, 75 bp, synthetic construct
  source 1..75: mol_type = other DNA
gacgtggccgttcgcaatatgtcgaacactgaggattgcgtgaaggtcgctgctgctatagcccaaatcatgcag

SEQ ID NO: 76848 - DNA, 75 bp, synthetic construct
  source 1..75: mol_type = other DNA
acaaagatacctggtgctcgccaggggatttcaccgttccttcttcgctggcgacactgatcaagctggcatggt

SEQ ID NO: 76849 - DNA, 75 bp, synthetic construct
  source 1..75: mol_type = other DNA
gcagtgcagcgagtaaaaagcagtgtccttgttgccgtggggaaaaatttattgaaagcgaagtttttacaaaca

SEQ ID NO: 76850 - DNA, 75 bp, synthetic construct
  source 1..75: mol_type = other DNA
gcatttgcaggtcaggtttggtgacgggccgtggcaggatgttaaggggctggatgaagtgggcagtgatacagg

SEQ ID NO: 76851 - DNA, 75 bp, synthetic construct
  source 1..75: mol_type = other DNA
accttgagtacatccgcgaatggagcgtctggttcgatatcaaaatcgttttcctgacggtgttcaaaggtttcg

SEQ ID NO: 76852 - DNA, 75 bp, synthetic construct
  source 1..75: mol_type = other DNA
tgatggagagcttccgtaatcagccgtggttagggtttgaagtggtgggtatataccacgacccgaaaccgggcg

SEQ ID NO: 76853 - DNA, 75 bp, synthetic construct
  source 1..75: mol_type = other DNA
gccatcctatcccaggccatcagcctagggctgggggtacccgacggcaacctatacctgcagaaaattgttcag

SEQ ID NO: 76854 - DNA, 75 bp, synthetic construct
  source 1..75: mol_type = other DNA
atataaaaatgactatgcgttatgctcacttggccccagatcatcttgaaacggcacttagatttaatccacttg

SEQ ID NO: 76855 - DNA, 75 bp, synthetic construct
  source 1..75: mol_type = other DNA
tgatgcaaaaagagctggagtttaacaagattgggattatcgaaaccagcgcggtgctggcaggttttaccttca

SEQ ID NO: 76856 - DNA, 75 bp, synthetic construct
  source 1..75: mol_type = other DNA
aaagtcaaaccattgatgattccggagagaaggctggcgctatttacttctcttcagctttcttattatgaaaaa

SEQ ID NO: 76857 - DNA, 75 bp, synthetic construct
  source 1..75: mol_type = other DNA
aagctgagctctcccgggccagttatcttccgtcagacgcgctacggcatggacggtaagccgattatggtgtgg

SEQ ID NO: 76858 - DNA, 75 bp, synthetic construct
  source 1..75: mol_type = other DNA
atgctctggaactctggactacatatctcaatagcatcgcaggtgctgattcaaaagtgacaatcctcaaacaaa

SEQ ID NO: 76859 - DNA, 75 bp, synthetic construct
  source 1..75: mol_type = other DNA
ccggcccaacgccaggcaattgccaactcttttgcccgcgccttacagtcctctatcaacgaagacaaagcgcac

SEQ ID NO: 76860 - DNA, 75 bp, synthetic construct
  source 1..75: mol_type = other DNA
atgagaaagaaaaaccaacgaaataaatggcggactcttccggggatggccgcattgctgtgcggtctggccggt

SEQ ID NO: 76861 - DNA, 75 bp, synthetic construct
  source 1..75: mol_type = other DNA
gaagaccgcattattaaagatggttcttacaacatcgatcagggcgttggtgtgcgtgcaatcagcggtgaaaaa

SEQ ID NO: 76862 - DNA, 75 bp, synthetic construct
  source 1..75: mol_type = other DNA
tatggagcgtggtggattcagtgatgcgcttaacgaaatcaaaaccccagccaccgatgctttcctggctgaagt

SEQ ID NO: 76863 - DNA, 75 bp, synthetic construct
  source 1..75: mol_type = other DNA
catctgacggtaataaggcaatcagtgaaacagagcatgatgcggtgaaagcgatgttcagggggatactgcgaa

SEQ ID NO: 76864 - DNA, 75 bp, synthetic construct
  source 1..75: mol_type = other DNA
cgctagagaaatatgtattcccgtatatcggaaacacaccgatagatactctcaccgctcgccgctttgttgaga

SEQ ID NO: 76865 - DNA, 75 bp, synthetic construct
  source 1..75: mol_type = other DNA
cgcagcgtgtaacagaagaaggaaaacacgatggtgaagaaaaaccgcaaccatcttgcgcaatggcagataaac

SEQ ID NO: 76866 - DNA, 75 bp, synthetic construct
  source 1..75: mol_type = other DNA
cctgggtgctggatccactggcaaatgccattaattggtggaatctgctgtgctgctttttatgcctggcttacg

SEQ ID NO: 76867 - DNA, 75 bp, synthetic construct
  source 1..75: mol_type = other DNA
taccgatatgaccaagtggcagatctttgttgagtatgtgctgaaaaacaaagtgatctggctactgtgcttcgc

SEQ ID NO: 76868 - DNA, 75 bp, synthetic construct
  source 1..75: mol_type = other DNA
agtttatggctatctgccgctgcggtcgcggcactgattttttggtatcagtggtttccctgtccggagtggcag

SEQ ID NO: 76869 - DNA, 75 bp, synthetic construct
  source 1..75: mol_type = other DNA
cctataacgaattcgatctccgactgcgtaagcatctctctctggcagaggaaagcagctggcagcgttgcgccg

SEQ ID NO: 76870 - DNA, 75 bp, synthetic construct
  source 1..75: mol_type = other DNA
ggcggtgcaccgcgaggaagggctgagccagtaccgtgcatacgacagccgtggacagttaattgccgtgaaaga

SEQ ID NO: 76871 - DNA, 75 bp, synthetic construct
  source 1..75: mol_type = other DNA
tgtatcagttacggcgatgttcatcagtcaatacgctggaaaaaattattcataaaaacagagacagtttatcga

SEQ ID NO: 76872 - DNA, 75 bp, synthetic construct
  source 1..75: mol_type = other DNA
cctgtaaaatttgatggtagcaatgagtttttttattacaggccggaagtattcgacatggtagaagaagcattt

SEQ ID NO: 76873 - DNA, 75 bp, synthetic construct
  source 1..75: mol_type = other DNA
cagccacaatcaacaccatgatgacacgctatatgttcgagctgaccttgtgaatggcaactatccggcaactcc

SEQ ID NO: 76874 - DNA, 75 bp, synthetic construct
  source 1..75: mol_type = other DNA
caaagatgttagtgctgatgtctttgtttataactggggtccatgcaaatgaagaccagtcccttatcaaagaca

SEQ ID NO: 76875 - DNA, 75 bp, synthetic construct
  source 1..75: mol_type = other DNA
ctctgcgactctcgaccacagaccagaaacgaaaccagactgttgagcagagcatttctctcagaccggaacagt

SEQ ID NO: 76876 - DNA, 75 bp, synthetic construct
  source 1..75: mol_type = other DNA
acgaccgagagcgtgtcgggctaaactacgcgatcttatacgtcatgttgtagatcagtacggctacccaatcac

SEQ ID NO: 76877 - DNA, 75 bp, synthetic construct
  source 1..75: mol_type = other DNA
gttatgagagtgactcactggtcgtcactttgcagtatcaggacgaggactatggctacggttatggctccgcga

SEQ ID NO: 76878 - DNA, 75 bp, synthetic construct
  source 1..75: mol_type = other DNA
cacaaccctgcgcttgggcagtttgccgaccgtattctgcggctgcaacacggtaaatatctgggtgaggaggcc

SEQ ID NO: 76879 - DNA, 75 bp, synthetic construct
  source 1..75: mol_type = other DNA
acccggcagagctggaagccgaagcgatgttatcccgcgagcaggcttacccggatgattttacgctggcagacc

SEQ ID NO: 76880 - DNA, 75 bp, synthetic construct
  source 1..75: mol_type = other DNA
tggatggttttctgaaaggtaaatgcatcccaagtgatttaaaggttaacgaaacaaacgctgaataccttgtcc

SEQ ID NO: 76881 - DNA, 75 bp, synthetic construct
  source 1..75: mol_type = other DNA
tagtaaatattgatggagagaattcatttagaatgataactcgactacctaaaggacgagtttatatttcatccc

SEQ ID NO: 76882 - DNA, 75 bp, synthetic construct
  source 1..75: mol_type = other DNA
gtaacccaccattatattcgtgcggtcttagtgcgctgtaatatccaacgatatagtccgttattgcgtgagctg

SEQ ID NO: 76883 - DNA, 75 bp, synthetic construct
  source 1..75: mol_type = other DNA
aatggaccaaaaactcgaaggctatgacatgcctacggccgatccggtcaattatctcaatgctggcggcagttt

SEQ ID NO: 76884 - DNA, 75 bp, synthetic construct
  source 1..75: mol_type = other DNA
taagtttccgctggcaaaggctcagcgcgatgccttaagccattttctggatgcaagacatggcgatatccttgc

SEQ ID NO: 76885 - DNA, 75 bp, synthetic construct
  source 1..75: mol_type = other DNA
ataacactccaccactatcgtatcactctatatatgatattttctcaaaaattgattgtgctttcaaaaaagagt

SEQ ID NO: 76886 - DNA, 75 bp, synthetic construct
  source 1..75: mol_type = other DNA
tttgatcaaattgttagtttgggccaagtgcgtacagctaaactagccaatgatgccgacaaaagtgcaccggtt

SEQ ID NO: 76887 - DNA, 75 bp, synthetic construct
  source 1..75: mol_type = other DNA
ggacgacgaaaatgttcataagctgatggatctgtcgatcaacaaaaactggatcgataaagaagaatatccgca

SEQ ID NO: 76888 - DNA, 75 bp, synthetic construct
  source 1..75: mol_type = other DNA
cacaatatgcagagccgctggtcgaaagtcgctatctttacgacccgctgggccgcagggtggcaaaacgggtat

SEQ ID NO: 76889 - DNA, 75 bp, synthetic construct
  source 1..75: mol_type = other DNA
gagtgtcattcgatcaaaccaaatctccgaggggatcagttcagcctgattgtgaccacagtagatgacgacgtt

SEQ ID NO: 76890 - DNA, 75 bp, synthetic construct
  source 1..75: mol_type = other DNA
tgtttctccggatgacaggggaagctgttatctctggctcaaccgtgggcaaccccccgcagttaaccggcgacg

SEQ ID NO: 76891 - DNA, 75 bp, synthetic construct
  source 1..75: mol_type = other DNA
cacagggcgtggagatgttctcagaaaaattcggaggtggcactccgctttccaatatggtcaaagaggttgcgg

SEQ ID NO: 76892 - DNA, 75 bp, synthetic construct
  source 1..75: mol_type = other DNA
cgtactgcatgacgttgccccccaaacgggctatcagttacctgaagtccaaagggtatagcttcacgtgggact

SEQ ID NO: 76893 - DNA, 75 bp, synthetic construct
  source 1..75: mol_type = other DNA
gctggcgcagggctggccggaagagacggatgttgaccagcgaaatccgaactatccgggctggatcagcattta

SEQ ID NO: 76894 - DNA, 75 bp, synthetic construct
  source 1..75: mol_type = other DNA
aaagggtatcagattacctgggactgggaagaaatgtggcaggaggcccatgcccgcgcctttaccgttgctaaa

SEQ ID NO: 76895 - DNA, 75 bp, synthetic construct
  source 1..75: mol_type = other DNA
ctgcatttaatcaggccgagtttaataaactacttcttgaatgcgttgtaaaaacacagtcatcagtagcgaaaa

SEQ ID NO: 76896 - DNA, 75 bp, synthetic construct
  source 1..75: mol_type = other DNA
ggctggcgtgcagaatggtgatctgctggtagtggacagggccgaaaaaccacaacacggggacatcgttatcgc

SEQ ID NO: 76897 - DNA, 75 bp, synthetic construct
  source 1..75: mol_type = other DNA
agcaaaaaaatcaccatccatcacgatccgattgctgccgtgaactggccggagatgaccatgcgctttaccatc

SEQ ID NO: 76898 - DNA, 75 bp, synthetic construct
  source 1..75: mol_type = other DNA
ttcaaaaaatcatgctggcattcgacaaggactaccgcctgtcagaacagctatatgaccgacaagttgaactga

SEQ ID NO: 76899 - DNA, 75 bp, synthetic construct
  source 1..75: mol_type = other DNA
gccgaaggcgaagaagctctcagcttcagcgaatttaaacaggcgctttccagctcggcaaaatctaacggctga

SEQ ID NO: 76900 - DNA, 75 bp, synthetic construct
  source 1..75: mol_type = other DNA
cttactccttcttccactggggcatcagcgcctgggcaacttatacgctggcctcattaatcatggcttatcact

SEQ ID NO: 76901 - DNA, 75 bp, synthetic construct
  source 1..75: mol_type = other DNA
gctactgcctgagattcccggcgctcaaacaacgaagtttaataaagaccactttatcaagcgtggtgtaacgga

SEQ ID NO: 76902 - DNA, 75 bp, synthetic construct
  source 1..75: mol_type = other DNA
caggctgggtgaatatggattcgttgaaaatcaagattttgtgattgcttgccaaaattggcaagcaaaaggtag

SEQ ID NO: 76903 - DNA, 75 bp, synthetic construct
  source 1..75: mol_type = other DNA
tatggggaatgcgcctgatgctgctggtctggcgtctgctgggaagaacggcgtttagcgcgctgctttacccgg

SEQ ID NO: 76904 - DNA, 75 bp, synthetic construct
  source 1..75: mol_type = other DNA
cgctatccgtcatatgacatcaccaatctggcggccttcctgcaatccagctatgacattaatgatatttttacc

SEQ ID NO: 76905 - DNA, 75 bp, synthetic construct
  source 1..75: mol_type = other DNA
agcagaaaccattttccctgaccatgaactggggtgacgaagacggtatggtgattgagctgcggcaggaatgca

SEQ ID NO: 76906 - DNA, 75 bp, synthetic construct
  source 1..75: mol_type = other DNA
taatgggttctacgacagcagcattacttggctatgccttactgcacttttctttgcctaagaaagcgcaagcgt

SEQ ID NO: 76907 - DNA, 75 bp, synthetic construct
  source 1..75: mol_type = other DNA
ctgaatacggtactgatcgcgtaattgatgataattggcatgatggtgatgtattcactttaaatattgctaatt

SEQ ID NO: 76908 - DNA, 75 bp, synthetic construct
  source 1..75: mol_type = other DNA
gactggctcgcccgtgtgcgccagcatcaaccacaggcagcaaaactcaacagctatcagcactttctacgtttc

SEQ ID NO: 76909 - DNA, 75 bp, synthetic construct
  source 1..75: mol_type = other DNA
cacggcagagaagaaatccgtcttcatattgtttgcgatgtccctgatgaacttattgatttcacgtttgaatgg

SEQ ID NO: 76910 - DNA, 75 bp, synthetic construct
  source 1..75: mol_type = other DNA
tgaatgtggcgttatgcacggttatcgtgctgacgctctttttttatcgtcgtcgtgattccagacataaaccgc

SEQ ID NO: 76911 - DNA, 75 bp, synthetic construct
  source 1..75: mol_type = other DNA
acaccagaacaaatcgaaatacgtaagctgaggaaaaagctacaacgcattgaaatggagaatgaaatattaaaa

SEQ ID NO: 76912 - DNA, 75 bp, synthetic construct
  source 1..75: mol_type = other DNA
cggaaatcatgatactccgccagtgcgccgggactatgacagtcgtgagtattgggaggctgatcgggcgtaccg

SEQ ID NO: 76913 - DNA, 75 bp, synthetic construct
  source 1..75: mol_type = other DNA
tctttcgacgtaagcgatgcagagggtaacgatattaatggttacactaccgtcgattttatcagtagttggcag

SEQ ID NO: 76914 - DNA, 75 bp, synthetic construct
  source 1..75: mol_type = other DNA
cttgcgcccaaaagtttatttccggttactgcagcatggtaaggaccgttccgcaggcgcgcctgatattgttac

SEQ ID NO: 76915 - DNA, 75 bp, synthetic construct
  source 1..75: mol_type = other DNA
gacagcgttgataagactgccgaaacggatgaagaacgggaagcacgatatgcagccttgcagcaggagtggcgt

SEQ ID NO: 76916 - DNA, 75 bp, synthetic construct
  source 1..75: mol_type = other DNA
taaatactgctcttggttttatttttcgtactgcactcattaagtttgtaatgttctctgcaatttatattatgg

SEQ ID NO: 76917 - DNA, 75 bp, synthetic construct
  source 1..75: mol_type = other DNA
gatgacagcacgtgatgacctggagcagcagtacgcccgggagcgcgaactcaccggtgagttacttgaaagccg

SEQ ID NO: 76918 - DNA, 75 bp, synthetic construct
  source 1..75: mol_type = other DNA
cgctttgtgctgtggctgcgcagctactggttggtctttttaccgggaactgggcttacggggcgatagccggtt

SEQ ID NO: 76919 - DNA, 75 bp, synthetic construct
  source 1..75: mol_type = other DNA
tcggattgtcaggtgtggggatgatgttctcatcaatggcgtctggaaatgacgctggcggacttcaatctccgg

SEQ ID NO: 76920 - DNA, 75 bp, synthetic construct
  source 1..75: mol_type = other DNA
gtacgttcttcattgcgcgtgaacatacccaggcagaatatcgctggattgaaatgttcgggcatggcaagcgta

SEQ ID NO: 76921 - DNA, 75 bp, synthetic construct
  source 1..75: mol_type = other DNA
cgtgtcgcccaacaggcttcagcgacagttcaatccggatgctccggatgagcgttgggtaacggacataaccta

SEQ ID NO: 76922 - DNA, 75 bp, synthetic construct
  source 1..75: mol_type = other DNA
aagcattacaaataatgcagaaaaaagtcacaacaattgtgacagcaagcatcaacatctcaatagagaacaaga

SEQ ID NO: 76923 - DNA, 75 bp, synthetic construct
  source 1..75: mol_type = other DNA
cactttgtgctgtggctgcgcagatactggttggtctttttaccggaaactgggcttacggagcgatagccggtt

SEQ ID NO: 76924 - DNA, 75 bp, synthetic construct
  source 1..75: mol_type = other DNA
tttgatccgcgtgcttgggatgtggcaagcctgatggattttgctgtgccggtggtggcgtgtctgctggtctgg

SEQ ID NO: 76925 - DNA, 75 bp, synthetic construct
  source 1..75: mol_type = other DNA
tcgctcgcggccatgtatggcgacctgaaaacgcaggcggataatctggtcacgtctgccggtgaatgggcggga

SEQ ID NO: 76926 - DNA, 75 bp, synthetic construct
  source 1..75: mol_type = other DNA
aaatagaaagcaaaatgcacgatgctttcagtgactataaaataaacttccctgttaagtttgatggtagcactg

SEQ ID NO: 76927 - DNA, 75 bp, synthetic construct
  source 1..75: mol_type = other DNA
tgatattcaaaatatgccctacgccagccagtacatgcagcttaatggcgggccgcagttgtttgtggtgctggc

SEQ ID NO: 76928 - DNA, 75 bp, synthetic construct
  source 1..75: mol_type = other DNA
atgtttatgtggtggaaaggaaaacttcaacccggtaattatgacaagctgatttccgcaatggatttctacccg

SEQ ID NO: 76929 - DNA, 75 bp, synthetic construct
  source 1..75: mol_type = other DNA
aacggcgattccatcgataacggtactgaagggtctgcggtacgtgttggtctgggtactcagttcagcttcacc

SEQ ID NO: 76930 - DNA, 75 bp, synthetic construct
  source 1..75: mol_type = other DNA
ctgcttgattgagtttcaggtgcccgccagccaggatttcaaactggcgcataaagagatcgaccagatcctgaa

SEQ ID NO: 76931 - DNA, 75 bp, synthetic construct
  source 1..75: mol_type = other DNA
aatcagcgcacttcccgttacaggtcagagcattgacagtaaatggcggagccactcagggaaccattcaggcag

SEQ ID NO: 76932 - DNA, 75 bp, synthetic construct
  source 1..75: mol_type = other DNA
cctgttaagtttgatggtagcactgaatttttttattacaggccggaagtattcgacatggtagaagaaacatat

SEQ ID NO: 76933 - DNA, 75 bp, synthetic construct
  source 1..75: mol_type = other DNA
gccatcagctatggtgaagactcccctgtgaaaggaaatggcagtcaatggcacttctccgattacaggggagag

SEQ ID NO: 76934 - DNA, 75 bp, synthetic construct
  source 1..75: mol_type = other DNA
gaatgctggacacgcctgctgcgccgttgcctgaagtggctggggatgtcacggatctggcctatatcattttca

SEQ ID NO: 76935 - DNA, 75 bp, synthetic construct
  source 1..75: mol_type = other DNA
aacatttccacggcgacagtctgccgtcagtgtgaagatgcaccgtgcgctaacgtctgcccgaatggtgctatc

SEQ ID NO: 76936 - DNA, 75 bp, synthetic construct
  source 1..75: mol_type = other DNA
agataactggcaacaggtaatatcagaagaacgtgctatccgttgtgcaaaaagattaattcaatgtaaaggata

SEQ ID NO: 76937 - DNA, 75 bp, synthetic construct
  source 1..75: mol_type = other DNA
caataccatatgacaacgacaatgaaagtaataaattgctaaaagcaggaaagatagctggtaacaataacgagc

SEQ ID NO: 76938 - DNA, 75 bp, synthetic construct
  source 1..75: mol_type = other DNA
taactgtggttcggcacaccgctgtacatatcagccgcattatacatacaacatcaacattcctgtgcgccacaa

SEQ ID NO: 76939 - DNA, 75 bp, synthetic construct
  source 1..75: mol_type = other DNA
agtggccgacagtgcgctgaaaatcctcgacgaagcgggattacctggcgaactgcgcctgcgtcaggggctggc

SEQ ID NO: 76940 - DNA, 75 bp, synthetic construct
  source 1..75: mol_type = other DNA
gctgggctgacattaaagaggcgtttaatggcggtgtcgtggggattggtaagctgctgattaactggtcgccgg

SEQ ID NO: 76941 - DNA, 75 bp, synthetic construct
  source 1..75: mol_type = other DNA
gtcgcatgaagtcgataaactgcaaacgtatattgatcaggtggaaggcaaaaccatgctgttcgatgcgccgct

SEQ ID NO: 76942 - DNA, 75 bp, synthetic construct
  source 1..75: mol_type = other DNA
gccgtctgtcagcagtatcagccaccagtgacgcgctgaaagctaaccgcatggcgctctatggccagggagcag

SEQ ID NO: 76943 - DNA, 75 bp, synthetic construct
  source 1..75: mol_type = other DNA
tgttcagcaagcagacaaattgccccaattacgtcgcttagcctgtagtgtgtcgcaacgggataataaaacagc

SEQ ID NO: 76944 - DNA, 75 bp, synthetic construct
  source 1..75: mol_type = other DNA
ggctatcgaactcgcgaagcgcaaaatcaccgtcaattgcatcgcgccagggcttattgataccgggatgatcga

SEQ ID NO: 76945 - DNA, 75 bp, synthetic construct
  source 1..75: mol_type = other DNA
agcaaaaggggatgataagtttatcaccaccgactatttgcaacagtgccgccgatatgatccaactgataaagg

SEQ ID NO: 76946 - DNA, 75 bp, synthetic construct
  source 1..75: mol_type = other DNA
atgcgcagtcgtgtatgttgattagcgtacagtgtgagaacgatcccggcgacagcacctggcagcaatttaccc

SEQ ID NO: 76947 - DNA, 75 bp, synthetic construct
  source 1..75: mol_type = other DNA
tgatgctggttgacccgaaacagggcagtgttcgtccgttatcatacggttttatttcgcaggacgacctggcaa

SEQ ID NO: 76948 - DNA, 75 bp, synthetic construct
  source 1..75: mol_type = other DNA
gatattaatcttcttatcatgccattggttggagttttgactctgtgggggatttttattattggtgtagtaacc

SEQ ID NO: 76949 - DNA, 75 bp, synthetic construct
  source 1..75: mol_type = other DNA
gttaagccgcaacgagcacgatcaaaagatggcggacgccattgatgcttatcaacctgactacgtggtgctggc

SEQ ID NO: 76950 - DNA, 75 bp, synthetic construct
  source 1..75: mol_type = other DNA
aaacagcacacattctatctcgaagcggattacacgcagggtaacctctttgatcagaagcaagtcaacggagga

SEQ ID NO: 76951 - DNA, 75 bp, synthetic construct
  source 1..75: mol_type = other DNA
cctacgactgcggattacgcagagaagaactttgcacagtagctaccggagatattgacccttctcaacgcttgc

SEQ ID NO: 76952 - DNA, 75 bp, synthetic construct
  source 1..75: mol_type = other DNA
agcgtcatatcaaatcatctccagaccaacacaaaattacgcctgtggtaacggtgttttctctgtgtatgccta

SEQ ID NO: 76953 - DNA, 75 bp, synthetic construct
  source 1..75: mol_type = other DNA
ttataaccatgcccaatatctcgaagggagaagagaaatgatgcaatggtatgctaattatttatctgagcaaat

SEQ ID NO: 76954 - DNA, 75 bp, synthetic construct
  source 1..75: mol_type = other DNA
cggccccggctggaaaatgcctgcggatatccgcttacagctgcgcgataacacactgatactcagtgataacga

SEQ ID NO: 76955 - DNA, 75 bp, synthetic construct
  source 1..75: mol_type = other DNA
ggcagttgcggcaaagatgcttcagcgctggctgaatgtatttaaccagaaggggatgctgtatccggacatgga

SEQ ID NO: 76956 - DNA, 75 bp, synthetic construct
  source 1..75: mol_type = other DNA
tccgggaataccgcgatgataaactgtacagcgtacggcacctggtgtttaacggctttgagctgataagccagc

SEQ ID NO: 76957 - DNA, 75 bp, synthetic construct
  source 1..75: mol_type = other DNA
tcggcttatacagctcatgaaacacggcagttcgccagagagttgaatctggagccctgcacgacggcagtcagt

SEQ ID NO: 76958 - DNA, 75 bp, synthetic construct
  source 1..75: mol_type = other DNA
cgggccgtgctgttttactggcgaatggttactggacgttggctgtggaaataccctcgacccgagccgcaaaag

SEQ ID NO: 76959 - DNA, 75 bp, synthetic construct
  source 1..75: mol_type = other DNA
ggctcacggcgcagacggacgcggcgggacggaggacagagtacggtctgaatgtggtgtccggcgatatcacgg

SEQ ID NO: 76960 - DNA, 75 bp, synthetic construct
  source 1..75: mol_type = other DNA
cggacgggctggagagccgccgggaatatgatgaaccgggcaggctggtatcggagacatcgcgcagcggggaga

SEQ ID NO: 76961 - DNA, 75 bp, synthetic construct
  source 1..75: mol_type = other DNA
atgaaatcctcggaaaagagggggggtatgtcagtcatcctgacgatacaggcggagcgacgaagtggggaatta

SEQ ID NO: 76962 - DNA, 75 bp, synthetic construct
  source 1..75: mol_type = other DNA
gccggatattgcccgcgcggcaacggcaacacgcacgtctgctcaggactgggcaaaagtggccgcagtctggca

SEQ ID NO: 76963 - DNA, 75 bp, synthetic construct
  source 1..75: mol_type = other DNA
gttgatgcaatgctgatgactggtgacagctacgactgcggtaaaaaaatgggctatatgcaggcgtttgtgaag

SEQ ID NO: 76964 - DNA, 75 bp, synthetic construct
  source 1..75: mol_type = other DNA
atcatggctgcgggatattcaggtcgtggcgcagttgcaactggcggcggaacatctggcggtatccaggtcagc

SEQ ID NO: 76965 - DNA, 75 bp, synthetic construct
  source 1..75: mol_type = other DNA
ggaaagcattaattgctggtggctcggagagagggttgatttatacccaattcgttgcccaaaccgctatgtgct

SEQ ID NO: 76966 - DNA, 75 bp, synthetic construct
  source 1..75: mol_type = other DNA
tacccagagtggacgaacctacgtcggactccagaacgaatacaacggcatcattgattctgcgtcgaatcccca

SEQ ID NO: 76967 - DNA, 75 bp, synthetic construct
  source 1..75: mol_type = other DNA
cgcgcctgatgtctgcggtacttaatcaacaagggctgccagcggcctggcttgatgcccgcgagtttttacgcg

SEQ ID NO: 76968 - DNA, 75 bp, synthetic construct
  source 1..75: mol_type = other DNA
gttcaggagcttctgtcagcagtaaaaagaccttcactgttgcaaaaggtaacaatgcatcagcgacgctgaatt

SEQ ID NO: 76969 - DNA, 75 bp, synthetic construct
  source 1..75: mol_type = other DNA
gccgaatcatcccggcgcccgagctcgttaacaaccagtggcagcgtcgctacgacctgtctgtgacgctacgcc

SEQ ID NO: 76970 - DNA, 75 bp, synthetic construct
  source 1..75: mol_type = other DNA
gccggagatggttaccctgtcgccattcttaaccggaatcagccggcattctactgtgtgcctgctgaactgtat

SEQ ID NO: 76971 - DNA, 75 bp, synthetic construct
  source 1..75: mol_type = other DNA
ataatcacccgggtatgccagtacccacgaaaggacaaatcacacgcagcgcggttgaatactggtacagggcaa

SEQ ID NO: 76972 - DNA, 75 bp, synthetic construct
  source 1..75: mol_type = other DNA
ggatcggcagcctcaccgggaacggatggtctgatgtgggtgacaccggccgatcaggtgcaggatgaagcgtcg

SEQ ID NO: 76973 - DNA, 75 bp, synthetic construct
  source 1..75: mol_type = other DNA
gccggagatggttatcctgtcgccattcttaaccggaatcagccggcattctactgtgtgcctgcggaactctat

SEQ ID NO: 76974 - DNA, 75 bp, synthetic construct
  source 1..75: mol_type = other DNA
gtgattggttacgcaatgtatgcgggagtatggcaaagcccggtgccggaggaattgtaccgacgcttaattcca

SEQ ID NO: 76975 - DNA, 75 bp, synthetic construct
  source 1..75: mol_type = other DNA
aatgcgtcacgccttcatacgaggttttccgggggtatcgtacccgccacacactggatgaatttctggagatgg

SEQ ID NO: 76976 - DNA, 75 bp, synthetic construct
  source 1..75: mol_type = other DNA
acattcatcgctttgctcctgttactgctgtggctggaatgggggccacagcgtcgccagttgtggctatggttg

SEQ ID NO: 76977 - DNA, 75 bp, synthetic construct
  source 1..75: mol_type = other DNA
aaaaatcagaccaaatcgggaaccaacttccgtaatggctattccacgaaaaccgtcaccactaccgacgggccg

SEQ ID NO: 76978 - DNA, 75 bp, synthetic construct
  source 1..75: mol_type = other DNA
attatggcgcgttcccgctgatcatagcaaaaatggcagggaaataatcagaccgattcctgatggcatgtttaa

SEQ ID NO: 76979 - DNA, 75 bp, synthetic construct
  source 1..75: mol_type = other DNA
ggcctttatctgcggccagaacaggctggcaacactcccggccctgcgcaccctgctcgacatcacccgcgacct

SEQ ID NO: 76980 - DNA, 75 bp, synthetic construct
  source 1..75: mol_type = other DNA
atgctgccctcgccggggtagacagtacgatcgttgaagtgatggggctctgtgcgcagttcacctcgggggcac

SEQ ID NO: 76981 - DNA, 75 bp, synthetic construct
  source 1..75: mol_type = other DNA
gtatatcgtcgataaagtatcgactacacgcaccgagtttttcagtgatggtgcggccagaaagattgatttcac

SEQ ID NO: 76982 - DNA, 75 bp, synthetic construct
  source 1..75: mol_type = other DNA
atggataagaagcaagtaacggatttaaggtcggaactactcgattcacgttttggcgctaagtcaatttcgact

SEQ ID NO: 76983 - DNA, 75 bp, synthetic construct
  source 1..75: mol_type = other DNA
cacctgcttgtttgcaataaggatgtgccgctcttcaatcgcttcgcctcgcgagaggttcatgctgcagagtct

SEQ ID NO: 76984 - DNA, 75 bp, synthetic construct
  source 1..75: mol_type = other DNA
acgcccagtggtaattttaaagcaatagataaccacgggaaggaaataacaaacagaaaaggattacctaatgtc

SEQ ID NO: 76985 - DNA, 75 bp, synthetic construct
  source 1..75: mol_type = other DNA
tatattacaaggggagcgacagtatgcaatagttaagagtgaaggggaaagtagtcaattaaaatcatcagcatt

SEQ ID NO: 76986 - DNA, 75 bp, synthetic construct
  source 1..75: mol_type = other DNA
cgatggggcgttatctggcgttagggttaattgcgctgcccattgcctggctgggacgcgtgcgtctgcgtcagt

SEQ ID NO: 76987 - DNA, 75 bp, synthetic construct
  source 1..75: mol_type = other DNA
gacctggtagggaaggttgaaatgactgagtggttagttgactttgctgcccagcttcgcaaaggaggcaaccag

SEQ ID NO: 76988 - DNA, 75 bp, synthetic construct
  source 1..75: mol_type = other DNA
taatcagaagcagggggcctggctggatagctggctgcaatacgcgtggtttaacaatgatgtttccgaacaaga

SEQ ID NO: 76989 - DNA, 75 bp, synthetic construct
  source 1..75: mol_type = other DNA
ctgctgagaatggacagcgaacggcgcatgaaaacactgggtgaatcggtgaaaaatacgcttctcacgcccaat

SEQ ID NO: 76990 - DNA, 75 bp, synthetic construct
  source 1..75: mol_type = other DNA
ccattgtcggcggaggaatggtcggcggcgcactggcgctggggctggcacagcacggatttgcggtaacggtga

SEQ ID NO: 76991 - DNA, 75 bp, synthetic construct
  source 1..75: mol_type = other DNA
aaatctccccttgaagccactaaaacacttatggtcagcagtcgcgatctggcaattacgctgggcgatcaatta

SEQ ID NO: 76992 - DNA, 75 bp, synthetic construct
  source 1..75: mol_type = other DNA
tggcgattggttttaatcctgcgctaaggatttcgttaaagagctattttaaaccgctgaattttagcattatct

SEQ ID NO: 76993 - DNA, 75 bp, synthetic construct
  source 1..75: mol_type = other DNA
tttcctcaatggcagggaaaccacagcgcctgccggactgactggcgccctgaatatgagcctgcatgagctgga

SEQ ID NO: 76994 - DNA, 75 bp, synthetic construct
  source 1..75: mol_type = other DNA
atccctctgttcattgataaaatcaagaataatcaagagcttacaattaccgatcctaaaatgacacgttttctg

SEQ ID NO: 76995 - DNA, 75 bp, synthetic construct
  source 1..75: mol_type = other DNA
ctaaagtctttaatgccgataaaacctatttcgttttaaacggtacttcatcttctaataaagtggtcttaaacg

SEQ ID NO: 76996 - DNA, 75 bp, synthetic construct
  source 1..75: mol_type = other DNA
tgtgcgccggttacggcaaacggcggattattgagcatctgtcgatttctacgctgccgcgcggcgaagtcactg

SEQ ID NO: 76997 - DNA, 75 bp, synthetic construct
  source 1..75: mol_type = other DNA
gtggtgctggataaagacggtcgcgtgcaatgggccaaagacggggcgctcacacaggaagaggtgcagcaagtg

SEQ ID NO: 76998 - DNA, 75 bp, synthetic construct
  source 1..75: mol_type = other DNA
ttaatataacaccacacgttgggcggcatacttgggctaatatcactcttgagtttatttacaatagtctcctga

SEQ ID NO: 76999 - DNA, 75 bp, synthetic construct
  source 1..75: mol_type = other DNA
gtctgctgttgcgtacctggttacgtgatggcgaagtttttgcccagatggtcagaggcgcaggtgccgggctgg

SEQ ID NO: 77000 - DNA, 75 bp, synthetic construct
  source 1..75: mol_type = other DNA
gtaattaaaggttttaaagttcactctaatttctttgttattcgtggtaaggttaacaaaggccttgcatttgca

SEQ ID NO: 77001 - DNA, 75 bp, synthetic construct
  source 1..75: mol_type = other DNA
ggcgaagaaaacgtttcagagccacaaagtgatagatcggtatttttcaacgatgctggcaacaccgcatgagtg

SEQ ID NO: 77002 - DNA, 75 bp, synthetic construct
  source 1..75: mol_type = other DNA
taaagcactgtatgaggtaattggttttacgcctgaaaccacggtcaaagatggggtgaagaactttgttaactg

SEQ ID NO: 77003 - DNA, 75 bp, synthetic construct
  source 1..75: mol_type = other DNA
gaactgttgctggaagactacaaagcctccctgaaatatctcagcgatcacccgaaactgcagggtattgcccag

SEQ ID NO: 77004 - DNA, 75 bp, synthetic construct
  source 1..75: mol_type = other DNA
gaggcagcgatgcggggaagttttccgctatgcaattgtcactggacgtgctgagtataaccctgcaccggatct

SEQ ID NO: 77005 - DNA, 75 bp, synthetic construct
  source 1..75: mol_type = other DNA
tgaatcgtttatatctcgcgccagagttttatttgagatcgcaaacagggaggtagcttattacaacataaggca

SEQ ID NO: 77006 - DNA, 75 bp, synthetic construct
  source 1..75: mol_type = other DNA
tcgctggcgaaatgctgcatcaaataatgatggaagcgcgtatggcggtgcgcccgcgtgaaacgctgtacgaat

SEQ ID NO: 77007 - DNA, 75 bp, synthetic construct
  source 1..75: mol_type = other DNA
tctttcgcgtaaccaccttcggcgaatcgcacgggctggcgctcggctgcatcgtcgatggtgttccgccaggca

SEQ ID NO: 77008 - DNA, 75 bp, synthetic construct
  source 1..75: mol_type = other DNA
ttatactaggccttgttgaacacggttctcctttcataaaacatctacatggacttatacaaaagcgaattttaa

SEQ ID NO: 77009 - DNA, 75 bp, synthetic construct
  source 1..75: mol_type = other DNA
gtgccataagcaacaccagtaccgatgccatcaacggctcacagctttatacgatcagtgattcagtcgccaaac

SEQ ID NO: 77010 - DNA, 75 bp, synthetic construct
  source 1..75: mol_type = other DNA
ggagatggtatctatgtatttggttttgatgataaaatttatgtcaaacgactgcaaatgatacctgacaaacta

SEQ ID NO: 77011 - DNA, 75 bp, synthetic construct
  source 1..75: mol_type = other DNA
tacggtgggttacagcgacacactgaataacggcctgagcagttacagcctgaatgccggcgtgaacagtggcgg

SEQ ID NO: 77012 - DNA, 75 bp, synthetic construct
  source 1..75: mol_type = other DNA
gcaggtactggtttccggttttggtcaggttgaacgtatcacactcagtacatcaatgtcggagctaccgatatg

SEQ ID NO: 77013 - DNA, 75 bp, synthetic construct
  source 1..75: mol_type = other DNA
tgcacgaaatgcgcgatgatgttgcatttcagattatcaatgatgaattatatcttgatggcaacgctcgtcaga

SEQ ID NO: 77014 - DNA, 75 bp, synthetic construct
  source 1..75: mol_type = other DNA
acctggtgtgcggtccggtacaaatctgctggcataaattcgcccgctactgggatgtggagttgcgtgagatcc

SEQ ID NO: 77015 - DNA, 75 bp, synthetic construct
  source 1..75: mol_type = other DNA
atttttgctctcatcggtgattggttacccggcaatgtatctgtttcagcggttgtttattaatacgctggcaga

SEQ ID NO: 77016 - DNA, 75 bp, synthetic construct
  source 1..75: mol_type = other DNA
cggcgcaacagaatgctacaataaaggtcagtccacacagattccggtatctccggagttcaaaacacctcctcg

SEQ ID NO: 77017 - DNA, 75 bp, synthetic construct
  source 1..75: mol_type = other DNA
tagcggcggggcacgccgttcttgcctgtggagagatggtgcagtcaggccgctcgttgaagcaggaacccaccg

SEQ ID NO: 77018 - DNA, 75 bp, synthetic construct
  source 1..75: mol_type = other DNA
ggttgccgcttatctggcggatgaaatcgccaaactggggccgtatgagttcatctgtacgggtcgcccggacga

SEQ ID NO: 77019 - DNA, 75 bp, synthetic construct
  source 1..75: mol_type = other DNA
ggcgcgcgaagccgaaagaaaaggcttatacactcaatgacggtaacgggctttcgttactcattgagccgaacg

SEQ ID NO: 77020 - DNA, 75 bp, synthetic construct
  source 1..75: mol_type = other DNA
tacttgatgaaaacaccctgcaatgggaccaaatcaaaggcaaatacagcgccgttcatggtagctcaacgacca

SEQ ID NO: 77021 - DNA, 75 bp, synthetic construct
  source 1..75: mol_type = other DNA
gaagttaaccgctggctggtacagcatggtgcagcctgggtatatcctgatttcaacacagattacaccctgccg

SEQ ID NO: 77022 - DNA, 75 bp, synthetic construct
  source 1..75: mol_type = other DNA
aacccatgcgactgatgctgcaggctcagcacgtgcagccagcacgtcagccggacaggccgcgacgtcggctca

SEQ ID NO: 77023 - DNA, 75 bp, synthetic construct
  source 1..75: mol_type = other DNA
tcgcgttgggaagtaacagtttgtcctcgggagagaatgccatcgcattgggagagggtagtgccgctggtggca

SEQ ID NO: 77024 - DNA, 75 bp, synthetic construct
  source 1..75: mol_type = other DNA
caataggaagtgcggcgaatgcttccgcatcaaatactattgctatgggtctattggctaaagctggcggtgacg

SEQ ID NO: 77025 - DNA, 75 bp, synthetic construct
  source 1..75: mol_type = other DNA
catgctggaacttggggatgattttgcctttgttggtcggcagcgaaggttacgcattgatgacaactggtttcg

SEQ ID NO: 77026 - DNA, 75 bp, synthetic construct
  source 1..75: mol_type = other DNA
agttactgaatgccaaaattaaaagccccagcgcgcaaaagctggaggcgttgcaccgttttttggggcttgaat

SEQ ID NO: 77027 - DNA, 75 bp, synthetic construct
  source 1..75: mol_type = other DNA
gctatcgcatccatggctcacaaggtcgcgcgctctaaaacctacatcgacaacgcaggtaaagccctggtcgct

SEQ ID NO: 77028 - DNA, 75 bp, synthetic construct
  source 1..75: mol_type = other DNA
cggttcgcagttgtataatctgaaacaagatgccttgctatgggatggcactgcgtttagcgccaaacatggcac

SEQ ID NO: 77029 - DNA, 75 bp, synthetic construct
  source 1..75: mol_type = other DNA
acgcagcacaacaggagacaacgaagcataatgccgtgcacattaaccagcgatatctggaaacggcatccctgc

SEQ ID NO: 77030 - DNA, 75 bp, synthetic construct
  source 1..75: mol_type = other DNA
aacataccgtgtgacgctttccgtgacccgggaggaggcccgacatctggaggcattcctggcagagcacggtgg

SEQ ID NO: 77031 - DNA, 75 bp, synthetic construct
  source 1..75: mol_type = other DNA
aaaaatggtcaggccgttggcaccaacaccattggttcttccgaggcctgtatgcttggcgggatggcgatgaaa

SEQ ID NO: 77032 - DNA, 75 bp, synthetic construct
  source 1..75: mol_type = other DNA
cgcgccttgaacagtctgcacggatcattcagcgcacgccggatgaggttttacccgcgctggtgctggcggcga

SEQ ID NO: 77033 - DNA, 75 bp, synthetic construct
  source 1..75: mol_type = other DNA
gcagggctataacaccgcgtggatagagacgcagctcgcacacgtcgataaaaactcaattcgtggcacatacaa

SEQ ID NO: 77034 - DNA, 75 bp, synthetic construct
  source 1..75: mol_type = other DNA
atgaacaaaatatttaaagttatctggaatccggcgacaggcagttacagcgtcgccagcgaaacggcgaagagc

SEQ ID NO: 77035 - DNA, 75 bp, synthetic construct
  source 1..75: mol_type = other DNA
ggcagtaaacctgtggtgttgtgggctctgggaggatatggcataagctttaccctgctagggctgggaagcgtg

SEQ ID NO: 77036 - DNA, 75 bp, synthetic construct
  source 1..75: mol_type = other DNA
taaggttgaagaagaaagtgcgggaaccggtcgccgtgtggaaacacacgaatacccgaaccgcgacaaacccta

SEQ ID NO: 77037 - DNA, 75 bp, synthetic construct
  source 1..75: mol_type = other DNA
ctggcactgaaagcgccgctgtcgagtccggcacttaccggaacgccaacagcccccactgcggcacagtcggtt

SEQ ID NO: 77038 - DNA, 75 bp, synthetic construct
  source 1..75: mol_type = other DNA
aacatgccgcgtgatgctcaggcggtcagggtcgcccgtaaggtgacggatgaggtaaacgaatacgaggaggat

SEQ ID NO: 77039 - DNA, 75 bp, synthetic construct
  source 1..75: mol_type = other DNA
ttcgctcagaactggatcttttatcaaaaaggatcatgcctggttgtggtcttgtttttgagctatatcaacgtc

SEQ ID NO: 77040 - DNA, 75 bp, synthetic construct
  source 1..75: mol_type = other DNA
ccaaaggacggggaatagccctggtcagccgcaccatgggcgtgtcgcgtgcgcagctgtcactgcggattaacc

SEQ ID NO: 77041 - DNA, 75 bp, synthetic construct
  source 1..75: mol_type = other DNA
tgtttctaacagtaacacgtctttgacccggtccctttatcgtaatttcactcaccactacatcagggcgaaacg

SEQ ID NO: 77042 - DNA, 75 bp, synthetic construct
  source 1..75: mol_type = other DNA
ttgccgggggagcatccgctgcagccagggctcgtcggttatcagaggatgtcagtattgttgtgtttgagcggg

SEQ ID NO: 77043 - DNA, 75 bp, synthetic construct
  source 1..75: mol_type = other DNA
aatatagcgggcgtttattacagacccgttcaaaagtatataaatggcacctggtataatgtagcgagcgtttaa

SEQ ID NO: 77044 - DNA, 75 bp, synthetic construct
  source 1..75: mol_type = other DNA
gtgaatatgaataatgctctgtggcactctgatagaaattcggaaatcaaagagctgaaagccaacgactcccaa

SEQ ID NO: 77045 - DNA, 75 bp, synthetic construct
  source 1..75: mol_type = other DNA
gtgttcgacctgagacgttactccgacaggttaacaccgtctcgttaccggatagtgcgatcccgccaggcttca

SEQ ID NO: 77046 - DNA, 75 bp, synthetic construct
  source 1..75: mol_type = other DNA
aaattgcgcttaatagcgatggacatctttcgtggccaattttaccaggagagactcaccgctgcccaacgtgtc

SEQ ID NO: 77047 - DNA, 75 bp, synthetic construct
  source 1..75: mol_type = other DNA
aactactttgccagcgaagaagcccgtcgtgccgtacacatcctgctggtctccaacgtttcacagagctatttc

SEQ ID NO: 77048 - DNA, 75 bp, synthetic construct
  source 1..75: mol_type = other DNA
aataataccacgcaacttgcgaccaccgcgtttgttcaggcggcactgaaggccgttattaatggtgctccagcc

SEQ ID NO: 77049 - DNA, 75 bp, synthetic construct
  source 1..75: mol_type = other DNA
gaatatttacgccaataatgatgtggtggtgcccactggcggctgcgatgtttctgctcgtgatgtcaccgttac

SEQ ID NO: 77050 - DNA, 75 bp, synthetic construct
  source 1..75: mol_type = other DNA
ctgacgccgggcgtcaggagctggttaatgccaacaaaacaggaacaaataaagttgagattgtttctgttggtt

SEQ ID NO: 77051 - DNA, 75 bp, synthetic construct
  source 1..75: mol_type = other DNA
gatagatgcctggtccgctgaaatgaagtcctgtcaggcgaaaggcggtgactgcggcggtattatcaaaaagta

SEQ ID NO: 77052 - DNA, 75 bp, synthetic construct
  source 1..75: mol_type = other DNA
cctgtatgtagcccggaatacgctcaaagacatgctttaaccaaccaggtaattaaccttcgccactgtacgttg

SEQ ID NO: 77053 - DNA, 75 bp, synthetic construct
  source 1..75: mol_type = other DNA
tgaacatgccgcagccgtgcttaatctggttgatgacggtgttatcgaatggaatgagccagaggtcgtgagggc

SEQ ID NO: 77054 - DNA, 75 bp, synthetic construct
  source 1..75: mol_type = other DNA
agcttaacagacagcgaaatattaaaacaaaaaagataaagacgaaggccagactggcatttctaaaaatgcgat

SEQ ID NO: 77055 - DNA, 75 bp, synthetic construct
  source 1..75: mol_type = other DNA
cctgccacatggcacggcggtcagtctgcctgaagttgacaccgcaccggtatcggagaccgtgaatttatggga

SEQ ID NO: 77056 - DNA, 75 bp, synthetic construct
  source 1..75: mol_type = other DNA
tctgccgcatggcacgacgattgacctgcccgacgtggcatcgtcacccgtaacagaaactatcaacctttggga

SEQ ID NO: 77057 - DNA, 75 bp, synthetic construct
  source 1..75: mol_type = other DNA
agattagaggtagatacattcgcatctggttcatgtttcgaggaaaacgatgtcgggaaacattaaaaggctggg

SEQ ID NO: 77058 - DNA, 75 bp, synthetic construct
  source 1..75: mol_type = other DNA
atgtcgaaagtctgcataattgcctgggtttacgggcgagttcagggcgtaggatttcgctacaccacacagtac

SEQ ID NO: 77059 - DNA, 75 bp, synthetic construct
  source 1..75: mol_type = other DNA
ttcgcccgctactgggatgtggagttgcgtgagatccctatgcgccccggtcagttgtttatggacccgaaacgc

SEQ ID NO: 77060 - DNA, 75 bp, synthetic construct
  source 1..75: mol_type = other DNA
aaaaacagcctgagtggtacgtgaaagctgtcagaaaaactatcgcggcgttgccgggtggttacgctgaagcgg

SEQ ID NO: 77061 - DNA, 75 bp, synthetic construct
  source 1..75: mol_type = other DNA
aaataccgctctatcaacaagtggtggagtggataagagaaagtatttataccggggatctggtggaagacgatc

SEQ ID NO: 77062 - DNA, 75 bp, synthetic construct
  source 1..75: mol_type = other DNA
actggatgcatccgtgctcagttacacggacaaaataccggcgaaaaaccttggaccttcgctggcgacatggga

SEQ ID NO: 77063 - DNA, 75 bp, synthetic construct
  source 1..75: mol_type = other DNA
actggtggtattgaggcttatgacagttctgttagtgtgacctctcagaatgctattcttgaccatgttggtagc

SEQ ID NO: 77064 - DNA, 75 bp, synthetic construct
  source 1..75: mol_type = other DNA
tgcccatactcatggttatgatgttgttgcctatggtaataccggaacgcaagcgcagacagataacgatggttt

SEQ ID NO: 77065 - DNA, 75 bp, synthetic construct
  source 1..75: mol_type = other DNA
aggaactgaaagtcaacgttggcgataaagtgaaaactggctcgctgattatgatcttcgaagttgaaggcgcag

SEQ ID NO: 77066 - DNA, 75 bp, synthetic construct
  source 1..75: mol_type = other DNA
gggagattcgagtgatggctgaaaaattatccacctggaagttcattcttatctggctggtgtttgtgattatgg

SEQ ID NO: 77067 - DNA, 75 bp, synthetic construct
  source 1..75: mol_type = other DNA
atccaggcgatcctcggccatgagaagctggagacgacgcagatctacacgaaggtggccataaagccgttgcag

SEQ ID NO: 77068 - DNA, 75 bp, synthetic construct
  source 1..75: mol_type = other DNA
cgggcaaacctgacgctgggcgagaataatatcaactcagatatattccggtcatggagttatacgggagccagc

SEQ ID NO: 77069 - DNA, 75 bp, synthetic construct
  source 1..75: mol_type = other DNA
gatgcagaagtcttatcgcgcatcctggatatcattggcgatatgccagcatatgggtatcgccgtgtctgggcg

SEQ ID NO: 77070 - DNA, 75 bp, synthetic construct
  source 1..75: mol_type = other DNA
cgctgacggcgatggcaggcaccgcgatccgggaaacggcacggatcgacaaaccgggcgcgtgccatatcttcc

SEQ ID NO: 77071 - DNA, 75 bp, synthetic construct
  source 1..75: mol_type = other DNA
caaattgcgacccaattttatgagcgaacactactgtcacatgacaaatcagccatgctgcaacaacacgctcct

SEQ ID NO: 77072 - DNA, 75 bp, synthetic construct
  source 1..75: mol_type = other DNA
ggggctacctcgcccaaaacaaatcaatggccgccattactggttacgtaaagatgtcctcgattttatagatac

SEQ ID NO: 77073 - DNA, 75 bp, synthetic construct
  source 1..75: mol_type = other DNA
ggggagacagtttccgggagcgccccgttggctcccgtctctggctgttaagccgtgaaaagacgctgtcctccg

SEQ ID NO: 77074 - DNA, 75 bp, synthetic construct
  source 1..75: mol_type = other DNA
tccgcccgtatgaatttacagggcgcggcgatcgcattggttgggtaaaaggcattgatgacaaatggcacctga

SEQ ID NO: 77075 - DNA, 75 bp, synthetic construct
  source 1..75: mol_type = other DNA
taaatggatgtttaaggatggtgcagtgattaagcggatttatacggcagacgaacagcagcaactggcagaatc

SEQ ID NO: 77076 - DNA, 75 bp, synthetic construct
  source 1..75: mol_type = other DNA
agtggcgactttattccagggctttgccacgggattaatgtcattaattggtctgcgcgcgataaccggtatttt

SEQ ID NO: 77077 - DNA, 75 bp, synthetic construct
  source 1..75: mol_type = other DNA
ctatgccaatctgggcttgcccggtaccgggctgagttaccgtacccggcttgaccgggccgcgcgttccagagg

SEQ ID NO: 77078 - DNA, 75 bp, synthetic construct
  source 1..75: mol_type = other DNA
cggcttcggtggatgacagccgtgaaaaattcactcctgcgcagaacatgattttttcgcgtaaaagtgcgcaac

SEQ ID NO: 77079 - DNA, 75 bp, synthetic construct
  source 1..75: mol_type = other DNA
gaggcatgggaacgctacagcgttctggtcagtcgtgtggatcctgcaaatcctgaatggccggaaatgccgcaa

SEQ ID NO: 77080 - DNA, 75 bp, synthetic construct
  source 1..75: mol_type = other DNA
cgagcaactttcattatttgttgaaatcacgctgccggacggcagtcgggaacccatgattttttatgctgatat

SEQ ID NO: 77081 - DNA, 75 bp, synthetic construct
  source 1..75: mol_type = other DNA
aacgacagtgatattttgatatctgaccatgtcatcgagcgcatcaactgtaccaacggcaaaatcaactggggc

SEQ ID NO: 77082 - DNA, 75 bp, synthetic construct
  source 1..75: mol_type = other DNA
gacagcagcgggcagcatcaggatgagggtagcacattgactaaaacgggggctggtacactggagctgaccgcc

SEQ ID NO: 77083 - DNA, 75 bp, synthetic construct
  source 1..75: mol_type = other DNA
cagcagcctggtggacctggccttccgggaatatggcgagaataaccccagactttaccgcgcaggtacggaacc

SEQ ID NO: 77084 - DNA, 75 bp, synthetic construct
  source 1..75: mol_type = other DNA
gtgatgtacggtgccagaaaacccgccaccccggaaaagaacttcatggtatctgtactctgcgcactgtgcgtg

SEQ ID NO: 77085 - DNA, 75 bp, synthetic construct
  source 1..75: mol_type = other DNA
ttggtgatgatatcagcatccctgaatgcgatgtaatcaattggatgccactaccagaaccgccgcaggaggtga

SEQ ID NO: 77086 - DNA, 75 bp, synthetic construct
  source 1..75: mol_type = other DNA
gaggcatgggaacgctatagtgttctggtcagtcgtgtggatcctgcaaatcctgaatggccggaaatgccgcaa

SEQ ID NO: 77087 - DNA, 75 bp, synthetic construct
  source 1..75: mol_type = other DNA
ttctttcctgctatgaggctggcccctgtggttttgggctatatcatcaactcacagcgatgaatataaaatgct

SEQ ID NO: 77088 - DNA, 75 bp, synthetic construct
  source 1..75: mol_type = other DNA
gcggtatcgcgggaactggtaagctgctgattaactggtcgccggcaggtctgctctataaagcctttgcagctg

SEQ ID NO: 77089 - DNA, 75 bp, synthetic construct
  source 1..75: mol_type = other DNA
cgaatgaaaagtcgctcacagtgggcaccgtgcactctcttcagggagcggaaagagcgattgttatattctcgc

SEQ ID NO: 77090 - DNA, 75 bp, synthetic construct
  source 1..75: mol_type = other DNA
aaaagctacaacgcattgaaatggagaatgaaatattaaaaaaggctaccgcgctcttgatgtcagactccctga

SEQ ID NO: 77091 - DNA, 75 bp, synthetic construct
  source 1..75: mol_type = other DNA
gcccgttttgaaaaagaaaaccctggcatcaccgttaagcaagtgcccgtggaagaagatgcctataacactaaa

SEQ ID NO: 77092 - DNA, 75 bp, synthetic construct
  source 1..75: mol_type = other DNA
ttagctaatcaatcatttagtcagccatctcagcagattgcttttcaacactattgtcaaagtctggagcagatt

SEQ ID NO: 77093 - DNA, 75 bp, synthetic construct
  source 1..75: mol_type = other DNA
atccgtaaattattacttcttaatagcacagggcttaaccgtgagttgatgaaactagcccgggaagtaaactat

SEQ ID NO: 77094 - DNA, 75 bp, synthetic construct
  source 1..75: mol_type = other DNA
gcgccattgagctttatttcaaatatggtaagaagctggctcccgtcgtacgcgaattgggctacccttcgaaaa

SEQ ID NO: 77095 - DNA, 75 bp, synthetic construct
  source 1..75: mol_type = other DNA
ccagcagaatgccgttggcactcgaatgcaggcggatgctgaccgcgaagctcaatatcaagcgtctcgtgaaag

SEQ ID NO: 77096 - DNA, 75 bp, synthetic construct
  source 1..75: mol_type = other DNA
ggttatggtaccggcgatcgttttatgcgtgccggggtggaaataaaccgacacggaaaagcgctggcctaccat

SEQ ID NO: 77097 - DNA, 75 bp, synthetic construct
  source 1..75: mol_type = other DNA
attcacagccgaggaaatcatcctcctctgctacatgcaactctggatggaaaaagcccaggacctcagcaaaca

SEQ ID NO: 77098 - DNA, 75 bp, synthetic construct
  source 1..75: mol_type = other DNA
cagcttaaccgcctgcaatctgccgcccagggcgcagacggccaactggccgccattggctacgccaatcagctc

SEQ ID NO: 77099 - DNA, 75 bp, synthetic construct
  source 1..75: mol_type = other DNA
tgattttaacccacaacttccccggatggattatattagcgataattcctgttttgatcatacaaatgatcttta

SEQ ID NO: 77100 - DNA, 75 bp, synthetic construct
  source 1..75: mol_type = other DNA
gcggggatctctccgattgaagggatgttgagtgttatagaacgttacctcaatgccaaaagccccgaagcgctg

SEQ ID NO: 77101 - DNA, 75 bp, synthetic construct
  source 1..75: mol_type = other DNA
cgctccggcacgtgatgccagcgcacaggagaaaaaagacgctgacatgctgaatgaatatctgcatgatgcggc

SEQ ID NO: 77102 - DNA, 75 bp, synthetic construct
  source 1..75: mol_type = other DNA
cgaaatcaaggttccagtcagttggacaactatcaaaactatttgggctaaagggtgtgagcacttttcaatagt

SEQ ID NO: 77103 - DNA, 75 bp, synthetic construct
  source 1..75: mol_type = other DNA
ctgaccatgtcattgaacgtatcaactgtaccaacggcaacgtgaactggggcatcggcatcggtctggcgggga

SEQ ID NO: 77104 - DNA, 75 bp, synthetic construct
  source 1..75: mol_type = other DNA
cgcattatttaaccgccttcgtgccgatggcgatcagattttcccgctgggatgggcaatgattttacaacgtgc

SEQ ID NO: 77105 - DNA, 75 bp, synthetic construct
  source 1..75: mol_type = other DNA
actttgctgaactgttgctggaagactacaaagcctccctgaaatatctcagcgatcacccgaaactgcagggta

SEQ ID NO: 77106 - DNA, 75 bp, synthetic construct
  source 1..75: mol_type = other DNA
atgaaacaaatgtcactaattgagatggatggatttctgaaaggtaaatgcatcccaagtgatttaaaggttaac

SEQ ID NO: 77107 - DNA, 75 bp, synthetic construct
  source 1..75: mol_type = other DNA
gctgtcgcacagtctgctggtggggtgtttgtatcacttccagaaattgaggaagtagagaacgctgatatcaac

SEQ ID NO: 77108 - DNA, 75 bp, synthetic construct
  source 1..75: mol_type = other DNA
tcgttcggcaatcgaagatggggtagtggagccacacgagcagacagcaattaatgatgagttgtatctgtcgat

SEQ ID NO: 77109 - DNA, 75 bp, synthetic construct
  source 1..75: mol_type = other DNA
acggtttatcggtataaccgtatcgcgcttgataccaatacgatggggaattccatcgatgttgaaaaaaatatt

SEQ ID NO: 77110 - DNA, 75 bp, synthetic construct
  source 1..75: mol_type = other DNA
ggaagtagagaacgccgatataaaccagcgcctgctggaagtcatcgaacagatcgggagttactcaaagcagat

SEQ ID NO: 77111 - DNA, 75 bp, synthetic construct
  source 1..75: mol_type = other DNA
ttccctggtcatgcgtacgagtcatcaaaccatttgtcggtggcggttttggtaataaacaggatgtactggaag

SEQ ID NO: 77112 - DNA, 75 bp, synthetic construct
  source 1..75: mol_type = other DNA
actggcgataacgtggtgattcgtcagtcacacggtggttcaggcaaacaagcgacgtcggtaatcaacggtatt

SEQ ID NO: 77113 - DNA, 75 bp, synthetic construct
  source 1..75: mol_type = other DNA
tgaaagctgtacctgatgccacaattaactttgattttgcagcgatgcgcctgaacatcactattcctcagatag

SEQ ID NO: 77114 - DNA, 75 bp, synthetic construct
  source 1..75: mol_type = other DNA
gcatatgccgaagtatcacttgatggtggtacaagtgctgaaacgcccgcgcttgataatgtctggattgctata

SEQ ID NO: 77115 - DNA, 75 bp, synthetic construct
  source 1..75: mol_type = other DNA
cgtatacgcagtatctaccgatactcacttcacccacaaagcatggcacagcagctctgaaaccatcgctaaaat

SEQ ID NO: 77116 - DNA, 75 bp, synthetic construct
  source 1..75: mol_type = other DNA
ggtctgggcgtggatgatgcgaaacatggctttactgtggatgagttagcgctggtgatggcggcgtttgatacg

SEQ ID NO: 77117 - DNA, 75 bp, synthetic construct
  source 1..75: mol_type = other DNA
ggatggcgatgaaatggcgttggcgcaagcgtatggaagctgcaggtaagccgactaacaaaccgaacctggtgt

SEQ ID NO: 77118 - DNA, 75 bp, synthetic construct
  source 1..75: mol_type = other DNA
aactgggcctgacgtttacttatatggcgaccgacaacattggtgtggaattactggcagcaacgccgtttcgtc

SEQ ID NO: 77119 - DNA, 75 bp, synthetic construct
  source 1..75: mol_type = other DNA
gatgggcaatgattttgcaacgtgctggtggaactcacttcattgctgacgctgtggcgcagtctgcaaatggcg

SEQ ID NO: 77120 - DNA, 75 bp, synthetic construct
  source 1..75: mol_type = other DNA
aatgaaattgagttcggcctcgatttccatggccgtgtcagcgcaccgatggccaaagtgttaattaaagagctg

SEQ ID NO: 77121 - DNA, 75 bp, synthetic construct
  source 1..75: mol_type = other DNA
gctcagcggaagaggccgtcaccaatatgtcaaactggctggcggcgatggggcgcggagataccatccagaaat

SEQ ID NO: 77122 - DNA, 75 bp, synthetic construct
  source 1..75: mol_type = other DNA
gatgagcagtcgccggaaaagcgccccgtaattttagaggcgcagaatgtgtggataacctacaaaggaaagcta

SEQ ID NO: 77123 - DNA, 75 bp, synthetic construct
  source 1..75: mol_type = other DNA
gatacgcataatccccccttgcgaacctctttaatcatctggtgtagcctgttttttattattggtatcggcacc

SEQ ID NO: 77124 - DNA, 75 bp, synthetic construct
  source 1..75: mol_type = other DNA
agctcgattttttcggcaaacttaagaacatgagtgatgctgatcgccagaactactttgccagcgaagaagccc

SEQ ID NO: 77125 - DNA, 75 bp, synthetic construct
  source 1..75: mol_type = other DNA
ctggacaccgaatcaaaatcacgattttactgccggatacggtttcgaccgtcaggatcgtgattccgactcgct

SEQ ID NO: 77126 - DNA, 75 bp, synthetic construct
  source 1..75: mol_type = other DNA
atgcagcgcctgatcaaagagtacggcaacgagtctatctatctgaactatggcaccggtacgctgggcggcacc

SEQ ID NO: 77127 - DNA, 75 bp, synthetic construct
  source 1..75: mol_type = other DNA
taactggatgtttaaggatggcgcagttattaaacgtatttatacggcagaggaattacagcagcaggtagaaaa

SEQ ID NO: 77128 - DNA, 75 bp, synthetic construct
  source 1..75: mol_type = other DNA
gtgggtaacctacaaaggaaagctaccgggaagaattacttgttctctgaagactcctccggaatcgcaacctta

SEQ ID NO: 77129 - DNA, 75 bp, synthetic construct
  source 1..75: mol_type = other DNA
tgtattttgcttcttatggcctatgtgggtctctgtgctgcggtggtctggtttgtagtgccctggctgaaggtc

SEQ ID NO: 77130 - DNA, 75 bp, synthetic construct
  source 1..75: mol_type = other DNA
cggcaaacactttattattcgtaatattaccgcgcgaaatatcaccccggattatagtaagaaagcgggcattga

SEQ ID NO: 77131 - DNA, 75 bp, synthetic construct
  source 1..75: mol_type = other DNA
cagaaagtaatgacgcccgcgagtgtgcagctccgggcgtcgtggcgttttgtgtccgtggagaaactaacgcat

SEQ ID NO: 77132 - DNA, 75 bp, synthetic construct
  source 1..75: mol_type = other DNA
ctgagtggctggatgtaacagagaacgctttattcaaccgccttcgtgcagatggcgatcagattttcccgctgg

SEQ ID NO: 77133 - DNA, 75 bp, synthetic construct
  source 1..75: mol_type = other DNA
cgttcttgcctgtggagagatggtgcagtcaggccgctcgttgaagcaggaacccaccgaaatgattcaggcgac

SEQ ID NO: 77134 - DNA, 75 bp, synthetic construct
  source 1..75: mol_type = other DNA
ccattggtccactgaaacacctctcaaaagaggctctggaagccgcagccgaaccagacgatctcagcgagtggg

SEQ ID NO: 77135 - DNA, 75 bp, synthetic construct
  source 1..75: mol_type = other DNA
gattctgcaaccggtaaatacatggaagccactgtagtcattaccggtacggcggcggcggtaactgttggtgca

SEQ ID NO: 77136 - DNA, 75 bp, synthetic construct
  source 1..75: mol_type = other DNA
ttgtcggtgccgcgctactgatggcgggttgtagctccagcaacgaattgagtgctgccggtcagagtgtacgca

SEQ ID NO: 77137 - DNA, 75 bp, synthetic construct
  source 1..75: mol_type = other DNA
aattggcttagtgggcaaatgcaaaattatggaaacctgctaaatgtcgggatgaatgcggcatcagggcaggca

SEQ ID NO: 77138 - DNA, 75 bp, synthetic construct
  source 1..75: mol_type = other DNA
gttatctgctgatggacggacccgtattgccccaccggggccggaccggcgtgcgtcactgaaacggttgtatct

SEQ ID NO: 77139 - DNA, 75 bp, synthetic construct
  source 1..75: mol_type = other DNA
gatggtgcgtgaattgtccattgcgaccatgcaaagcaagagtttctttgaaggaatgaatctgctgaaactcaa

SEQ ID NO: 77140 - DNA, 75 bp, synthetic construct
  source 1..75: mol_type = other DNA
tggcggtactgcgcggtggactggcctccgcaggcacggtgcttcgtgtgctggcatccggtccgctggcgatgc

SEQ ID NO: 77141 - DNA, 75 bp, synthetic construct
  source 1..75: mol_type = other DNA
ggcagaaatgatgaaaaaggcgagggaataccgggatcaggaagaggcaaggcggctggaacatcgggtgcaaat

SEQ ID NO: 77142 - DNA, 75 bp, synthetic construct
  source 1..75: mol_type = other DNA
gttctgacggaaagcattggaggtaaaaccggcctgaactggtcgagaaagcagggttttcgctgcggttgttgg

SEQ ID NO: 77143 - DNA, 75 bp, synthetic construct
  source 1..75: mol_type = other DNA
atcaggcacttgaaaatcgcctgatgaaggccggtggtgttgatgcagtggtgcctcaggaggctgccgcgccgg

SEQ ID NO: 77144 - DNA, 75 bp, synthetic construct
  source 1..75: mol_type = other DNA
caaccgcaggagtgggagaaattcgcccgcgtttaccccaacgacaccgagcgccatttcctcgacgcgctggtc

SEQ ID NO: 77145 - DNA, 75 bp, synthetic construct
  source 1..75: mol_type = other DNA
gtatcgcgtatgggcgtggacatgacgcgctttagcccgcgtccggtgaaagcgcccgcaacgccgctggaaatc

SEQ ID NO: 77146 - DNA, 75 bp, synthetic construct
  source 1..75: mol_type = other DNA
atggttttattaaataacaaaagaaaaagcaagaagggtttctcactactcgagctattacttgttttaggcatt

SEQ ID NO: 77147 - DNA, 75 bp, synthetic construct
  source 1..75: mol_type = other DNA
catcggtcctgatgaagaagtgcagctcaagaaaattgcacaggcgttgcagttgccgctggagcagtacctgtg

SEQ ID NO: 77148 - DNA, 75 bp, synthetic construct
  source 1..75: mol_type = other DNA
agcgcgaaagcggcagcttcttcaaaaacagccgcacaaaacgcagcaacagcggcagaacgttcagagacaaat

SEQ ID NO: 77149 - DNA, 75 bp, synthetic construct
  source 1..75: mol_type = other DNA
gtggaagttattggcactcgcggcgcaatgaccatacgcgttactacgccgagtacgtccagcggcggcggaatt

SEQ ID NO: 77150 - DNA, 75 bp, synthetic construct
  source 1..75: mol_type = other DNA
tgaacttaaaacactgctggatcgggcgcggattgcgcatggtcgcgtactgaccaactccgaaaccaacagcat

SEQ ID NO: 77151 - DNA, 75 bp, synthetic construct
  source 1..75: mol_type = other DNA
aggtgcagctgcaggtactgcaatcatgcctggttggggtacagcaattggtgctggcgtcggtcttcttggttc

SEQ ID NO: 77152 - DNA, 75 bp, synthetic construct
  source 1..75: mol_type = other DNA
tatcactgacaccaaatggcgctgtggcggcgcacatgaggcaccgccaacaacggggatcctgtcactgtataa

SEQ ID NO: 77153 - DNA, 75 bp, synthetic construct
  source 1..75: mol_type = other DNA
caacttcactggagcgacgactggcgcaaacctgcagtgggatttctgatctgcaggtgccgctgcgtgacttgt

SEQ ID NO: 77154 - DNA, 75 bp, synthetic construct
  source 1..75: mol_type = other DNA
tcggtggctaaacgatctaaggagtttctggacaaactgcaggagccaacggcagaaatgatgaaaaaggcgagg

SEQ ID NO: 77155 - DNA, 75 bp, synthetic construct
  source 1..75: mol_type = other DNA
ggttgaaggtggtgcgcgcatgaacgtcgcaaaccctgacgacagctgggaagatcagaaacgtgacctgctggc

SEQ ID NO: 77156 - DNA, 75 bp, synthetic construct
  source 1..75: mol_type = other DNA
ctggcggtatggcgttacagtggctgctggggccgctttccgacaggattggccgcaggccggtgctgattaccg

SEQ ID NO: 77157 - DNA, 75 bp, synthetic construct
  source 1..75: mol_type = other DNA
gcagatgacgaaggatgcgatgggaaccatccagcgcgtgctggagaaggtaaacgcgctgccgcaggacaagcg

SEQ ID NO: 77158 - DNA, 75 bp, synthetic construct
  source 1..75: mol_type = other DNA
atggcgaagtcattattccggcctttacggaggcggaaaaagcacagggactgaccgatttcaatgacctggacg

SEQ ID NO: 77159 - DNA, 75 bp, synthetic construct
  source 1..75: mol_type = other DNA
agtgggaagacggcatctaccagattgaggtctctgaccccgttctgggcggacctgacggaatttctaaccgcc

SEQ ID NO: 77160 - DNA, 75 bp, synthetic construct
  source 1..75: mol_type = other DNA
gtaatgtcttttgcaatcggctgttcctctttggcgcagcaaccatctctttaagctatatcccaatgatgagtt

SEQ ID NO: 77161 - DNA, 75 bp, synthetic construct
  source 1..75: mol_type = other DNA
tcaccctgttactgagcgccgctgccgtgcaggcctccatccggaatgagattgagcgactctggaatccgcagg

SEQ ID NO: 77162 - DNA, 75 bp, synthetic construct
  source 1..75: mol_type = other DNA
gctgctggcactgatgacaggccagcgcctttcagatatttgcaaaatgcaattttcggatatccgggatggtta

SEQ ID NO: 77163 - DNA, 75 bp, synthetic construct
  source 1..75: mol_type = other DNA
ccaaaaaggcggatgtgctggccattgccagggcgtgggggatcagtggtgaggccgagctggccgtcatgcagg

SEQ ID NO: 77164 - DNA, 75 bp, synthetic construct
  source 1..75: mol_type = other DNA
tgccgcaggcgcggtgctgcgtgtgctggcatccggtccgctggcgatgctgcgcgttgccctgtatgccgtatc

SEQ ID NO: 77165 - DNA, 75 bp, synthetic construct
  source 1..75: mol_type = other DNA
aataggctccttaaaaaaactggatcaggaaatcacggttttatcacaggatgctactttagatattgtgcagac

SEQ ID NO: 77166 - DNA, 75 bp, synthetic construct
  source 1..75: mol_type = other DNA
attatggaaacctgctaaatgtcgggatgaatgcggcatcagggcaggcaacggcagggcaaaactacgccaata

SEQ ID NO: 77167 - DNA, 75 bp, synthetic construct
  source 1..75: mol_type = other DNA
ccgcacttgatattgccgaaataattgatgctgtaaaggctgaaggtcataacaggatggcgcaagtcgtgagaa

SEQ ID NO: 77168 - DNA, 75 bp, synthetic construct
  source 1..75: mol_type = other DNA
tcaccctgttactgacagccgctgccgtgcaggcctccacccgggatgaaatagagcgactctggaatccacagg

SEQ ID NO: 77169 - DNA, 75 bp, synthetic construct
  source 1..75: mol_type = other DNA
caggtcaatggtctgcgtgatgataatggcaaccgcactgcgcgtttttacgaaatgcaggatgccatcaaggct

SEQ ID NO: 77170 - DNA, 75 bp, synthetic construct
  source 1..75: mol_type = other DNA
ggtgaatgcagacggcaaagtgatgatgccatcgggtggttttccgtcatggggatatggctttgcggggatgta

SEQ ID NO: 77171 - DNA, 75 bp, synthetic construct
  source 1..75: mol_type = other DNA
tggtccgtggggcgtatggcgtcacactcaatctgctacccgccctttgagtacgactatagacctgaatacgct

SEQ ID NO: 77172 - DNA, 75 bp, synthetic construct
  source 1..75: mol_type = other DNA
ccgttccgggaaactgccgacactggcaccgccgttactgcgtcagctggccgccatcggaaataacctgaatca

SEQ ID NO: 77173 - DNA, 75 bp, synthetic construct
  source 1..75: mol_type = other DNA
cggccctttgtgagtccgggctggtaaaaaaagtcacccggaaaggtgaaaaaggtaactcaagtaatatctatc

SEQ ID NO: 77174 - DNA, 75 bp, synthetic construct
  source 1..75: mol_type = other DNA
atgaaaaaggttattgcggtttcagcgcttgcaatggcaggcatgttttcggcccagactctggctgatgagagc

SEQ ID NO: 77175 - DNA, 75 bp, synthetic construct
  source 1..75: mol_type = other DNA
gctctgcagactgccgtaccggggatgaagtcggtgaaggactttatgcagaaactggccagtgaactgaataac

SEQ ID NO: 77176 - DNA, 75 bp, synthetic construct
  source 1..75: mol_type = other DNA
atttttacacagaaggtgaatttcttgaaatgcttgaggagatagtaaatgcaactagcaaagataaatccctaa

SEQ ID NO: 77177 - DNA, 75 bp, synthetic construct
  source 1..75: mol_type = other DNA
gggaagctgccgacactggcaccgccgttactgcgtcagctggccgccatcgggaataacctgaatcagacagcg

SEQ ID NO: 77178 - DNA, 75 bp, synthetic construct
  source 1..75: mol_type = other DNA
aaggtggaattagtgagtttgttctggaaggaattacaggctatcaccttgcagagcctatgacatctgaaagta

SEQ ID NO: 77179 - DNA, 75 bp, synthetic construct
  source 1..75: mol_type = other DNA
cggcatggcgctacacgaaacctggtttgatcgctgagattaactccctggctaaccagttgcagatcacaatcc

SEQ ID NO: 77180 - DNA, 75 bp, synthetic construct
  source 1..75: mol_type = other DNA
aatatacagtacgtgtaagtgagccaaacccaggcttggctaatctacttttagaacaattcggcgggccacagg

SEQ ID NO: 77181 - DNA, 75 bp, synthetic construct
  source 1..75: mol_type = other DNA
attatgctgagagccgtatttctcttgatcagcagataattagacatccttcagcgacctacttcatgagggcgg

SEQ ID NO: 77182 - DNA, 75 bp, synthetic construct
  source 1..75: mol_type = other DNA
cggtaacagcagtgataaaacggctaatatcactctggattatcagacgcgtccggcagacgtaaaagttaatga

SEQ ID NO: 77183 - DNA, 75 bp, synthetic construct
  source 1..75: mol_type = other DNA
agaaatacgggaaatcatatgtatccaagcattccgaccggatgggcgatggattcagttttggtcctgacctgg

SEQ ID NO: 77184 - DNA, 75 bp, synthetic construct
  source 1..75: mol_type = other DNA
ctgtgacaaaaatcatggcgtgcggaaccacgctgatggggtatacacagtggtgctgttcatcaccggactgtt

SEQ ID NO: 77185 - DNA, 75 bp, synthetic construct
  source 1..75: mol_type = other DNA
gaaaaaagcgtctaaaagaactggaaaaattaaacaaagaatcggaatcagatccgaaaaataacggcccattca

SEQ ID NO: 77186 - DNA, 75 bp, synthetic construct
  source 1..75: mol_type = other DNA
tttctgctcgatgatatttgcgttgatctatgcttctacaggtttccgtttactgcgcttcaacgaagcaaaggc

SEQ ID NO: 77187 - DNA, 75 bp, synthetic construct
  source 1..75: mol_type = other DNA
tcagcgacctacttcatgagggcggctgatagtcatcatcgtgagggaatattgcagggtgcattgctggtggtc

SEQ ID NO: 77188 - DNA, 75 bp, synthetic construct
  source 1..75: mol_type = other DNA
taccgcgcggcgtaacaatcaggaaacaccgccagggcgaaacgatcaatataactttcacctacaaaggagtta

SEQ ID NO: 77189 - DNA, 75 bp, synthetic construct
  source 1..75: mol_type = other DNA
attgctcgcaggacctttgcgaagattttgcaggaaaagtttttaccgaccgcattgtcagaaaagtactccatt

SEQ ID NO: 77190 - DNA, 75 bp, synthetic construct
  source 1..75: mol_type = other DNA
aaagttgcgcaatttttgtcacgcgaaggaattcgcaatttcctcgcccgtctcgatattgacgaatcagcataa

SEQ ID NO: 77191 - DNA, 75 bp, synthetic construct
  source 1..75: mol_type = other DNA
ccaatctttgatgacgatggaaaagtcatcggcgtggtgtcgattggctacctggtgagtaaaatcgatagctgg

SEQ ID NO: 77192 - DNA, 75 bp, synthetic construct
  source 1..75: mol_type = other DNA
tactgctggcgatgccagagacggtgaagcgcggcgcggttccatttagcgccaaaagcgtcttgcgcgattttc

SEQ ID NO: 77193 - DNA, 75 bp, synthetic construct
  source 1..75: mol_type = other DNA
catgccaaggtctattgcctcttgcagatcggctacttcaaggccaagcatgccttcttcagtttcgactgggac

SEQ ID NO: 77194 - DNA, 75 bp, synthetic construct
  source 1..75: mol_type = other DNA
cctggaagacgcacagtattacccgaaagcccttgcagagctggaagcggtggcagcggaaatcctgaaacgtgc

SEQ ID NO: 77195 - DNA, 75 bp, synthetic construct
  source 1..75: mol_type = other DNA
tcattgcatgcgttgaaacaatcggggatgacttcgttctggtatctgttgcactgccttctggttcatgggtcg

SEQ ID NO: 77196 - DNA, 75 bp, synthetic construct
  source 1..75: mol_type = other DNA
ttaggcgcaggggcgggtttagttgtgtcgtcactgggtgacttcgcaaacattttccagcatgcctttggtatt

SEQ ID NO: 77197 - DNA, 75 bp, synthetic construct
  source 1..75: mol_type = other DNA
acccacactagtgactacaaagcgtttcagaataaaaacgtggtggacatcctggatgaggtactggatgagtac

SEQ ID NO: 77198 - DNA, 75 bp, synthetic construct
  source 1..75: mol_type = other DNA
atgacgggcaaagaggcaattattgattacctggggacgcataagagcttctgtgcgttggaggttgttgcacta

SEQ ID NO: 77199 - DNA, 75 bp, synthetic construct
  source 1..75: mol_type = other DNA
tgattgggtatggttatgcgagcaaaaccttccatgcgcccctgattgcgggcacgcccgggctggaactggcgg

SEQ ID NO: 77200 - DNA, 75 bp, synthetic construct
  source 1..75: mol_type = other DNA
gacgggctatccctatgaaagtgttctgacgctcgccgatcagaaagtgacgctgaagattgcgcccgcgcaggg

SEQ ID NO: 77201 - DNA, 75 bp, synthetic construct
  source 1..75: mol_type = other DNA
gactgttaacgctaatcagtggttttttcagtgagaaaatcactgcagaaaatctggtaaaacttatagagcaaa

SEQ ID NO: 77202 - DNA, 75 bp, synthetic construct
  source 1..75: mol_type = other DNA
attgtggtggtttcggctcactggtttacccgtggaacaggagtgaccgcgatggagacgccgcccacgattcat

SEQ ID NO: 77203 - DNA, 75 bp, synthetic construct
  source 1..75: mol_type = other DNA
gctggcgacgcctctattaaaaagcttctcagagaactgtagacaaaatggtcgtcatatctttagcaacaagga

SEQ ID NO: 77204 - DNA, 75 bp, synthetic construct
  source 1..75: mol_type = other DNA
ctcgtgatgaggcagcgtttattaacggtggtactgctggtattgataataccaaagtgacttcagagagaccat

SEQ ID NO: 77205 - DNA, 75 bp, synthetic construct
  source 1..75: mol_type = other DNA
tcccaagaattaaacttaatggtcaatgttattttccggggcgcccccaaaaccgtatagtatgccgacacattg

SEQ ID NO: 77206 - DNA, 75 bp, synthetic construct
  source 1..75: mol_type = other DNA
atatattcatgggaacaagttattgaatgtgcgtcttggttcaaaggagtatcttttttagctgcgcaaagaata

SEQ ID NO: 77207 - DNA, 75 bp, synthetic construct
  source 1..75: mol_type = other DNA
aatagtgataagcactattctatgtccatattcaaaatatgctattgaacacatagcttttaacttcataaagaa

SEQ ID NO: 77208 - DNA, 75 bp, synthetic construct
  source 1..75: mol_type = other DNA
atgacagaaagtattggcggtaaaaccgcactggactgggcaatgaaacaggattttcgctgcggttgctggctg

SEQ ID NO: 77209 - DNA, 75 bp, synthetic construct
  source 1..75: mol_type = other DNA
tccttttatcgccccactgaatatagcgcttaaagatatttcgaacgcgccggaagaaacggaagaaccagagac

SEQ ID NO: 77210 - DNA, 75 bp, synthetic construct
  source 1..75: mol_type = other DNA
agttactggatcatatcggtattgacccgtcaggtgtggggcagattctggattcactggcggaagccgggatcc

SEQ ID NO: 77211 - DNA, 75 bp, synthetic construct
  source 1..75: mol_type = other DNA
agatgcagaagtctctggacagccgtgtttactttgaccagaacggtgtgctctgccagcgcctcggcattgatc

SEQ ID NO: 77212 - DNA, 75 bp, synthetic construct
  source 1..75: mol_type = other DNA
actgctggcaataccacggttgtgattaatcccattacagggattggtgagccgacatctacaggtattaaagtg

SEQ ID NO: 77213 - DNA, 75 bp, synthetic construct
  source 1..75: mol_type = other DNA
ttggtggctacagcgataaccagggcgacagccgctcgaatatgaccggaactcgcgccgataaccagaaccacg

SEQ ID NO: 77214 - DNA, 75 bp, synthetic construct
  source 1..75: mol_type = other DNA
ccggtgttgaatgccaaagttggtggatattttaataacctgcgggcggcaaatcaggcatttgtgatggagcga

SEQ ID NO: 77215 - DNA, 75 bp, synthetic construct
  source 1..75: mol_type = other DNA
ccctggaaaggtaatacagatagaccagtactgagtttagtttctcgtgaaggtcaactcatgggacttgatatt

SEQ ID NO: 77216 - DNA, 75 bp, synthetic construct
  source 1..75: mol_type = other DNA
ccatcgcctgttttccgctgttactgatgctggccgggtgtgcgcctatgcatgaaacccgccaggcgttaagcc

SEQ ID NO: 77217 - DNA, 75 bp, synthetic construct
  source 1..75: mol_type = other DNA
cgtcataagaatatgaaggaactacgtatacaatatgagggacacccaatcagggcattctttgcatttgatcca

SEQ ID NO: 77218 - DNA, 75 bp, synthetic construct
  source 1..75: mol_type = other DNA
ggatatgccgaattatcgcggtcattcactgactgaaatctggcggggtacggaggatgacctttcggatgcggt

SEQ ID NO: 77219 - DNA, 75 bp, synthetic construct
  source 1..75: mol_type = other DNA
cactgctgcaaatcgacacacttatccggcaactggctgaaatatcagcaatgacagaaagtattggaggtaaaa

SEQ ID NO: 77220 - DNA, 75 bp, synthetic construct
  source 1..75: mol_type = other DNA
cccacaatgggctgcggatcagattttttatcagatcttccctgatcgttttgcgcgtagtcttcctcgtgaagc

SEQ ID NO: 77221 - DNA, 75 bp, synthetic construct
  source 1..75: mol_type = other DNA
cagcatggcacgctctgggccgagaagcatctttagttacacagctcattggttctggggcaacagccataggta

SEQ ID NO: 77222 - DNA, 75 bp, synthetic construct
  source 1..75: mol_type = other DNA
tgaaaggcgatctgaccggcatcgcgcaggcaggaacggcgtcggaaaaactgctcgcaaggcttaaaaatatcg

SEQ ID NO: 77223 - DNA, 75 bp, synthetic construct
  source 1..75: mol_type = other DNA
gttggtgtgcccgttccatggccttcagccacgccgccaacggggtggctgaaatgtaacggtgcagcattttct

SEQ ID NO: 77224 - DNA, 75 bp, synthetic construct
  source 1..75: mol_type = other DNA
atctggaaacggcacgtaacccgtatggctttatcggtggcattgatgcgcactgttttgaagaaagttacctgc

SEQ ID NO: 77225 - DNA, 75 bp, synthetic construct
  source 1..75: mol_type = other DNA
ggaaaaccgaacttgcgctggacatcatcgacaaggtgactgagcaggggcatggcgtgcttctgttcaccatgg

SEQ ID NO: 77226 - DNA, 75 bp, synthetic construct
  source 1..75: mol_type = other DNA
attttgccttgcttgatgatgtgctggatgacattgcaacctatcgtataccgctacagattgcactaaacaagg

SEQ ID NO: 77227 - DNA, 75 bp, synthetic construct
  source 1..75: mol_type = other DNA
atttaattcatatgctcagattccatttgctacaatccaggctgcaggtaaagcgaaaatcacggcattaataca

SEQ ID NO: 77228 - DNA, 75 bp, synthetic construct
  source 1..75: mol_type = other DNA
aataagttcggttttaacgaacatctgttgcatgacatgcaccatcgcctgacccccatcgaagcggcgcgcttt

SEQ ID NO: 77229 - DNA, 75 bp, synthetic construct
  source 1..75: mol_type = other DNA
tttatttctcttttatttttcaattgcatggtgctgatgtgaaaataaaacaaaacgaaagtatgatggggtcta

SEQ ID NO: 77230 - DNA, 75 bp, synthetic construct
  source 1..75: mol_type = other DNA
aataaacaatcacttggccctcgccgattttctagcgcgtatgtattcgaaggtgaacgaggcaaacgcgacagc

SEQ ID NO: 77231 - DNA, 75 bp, synthetic construct
  source 1..75: mol_type = other DNA
cggcattaccgggatgcggcggattgccgattttgcatcgctttatcaggtacgtaccggttcgcatggcccttc

SEQ ID NO: 77232 - DNA, 75 bp, synthetic construct
  source 1..75: mol_type = other DNA
aacgcctattgaagcggcgcgctttggtaaaagcattgaagattatcgcatgttctggatggaagacccgacgcc

SEQ ID NO: 77233 - DNA, 75 bp, synthetic construct
  source 1..75: mol_type = other DNA
agaatcaataacttagggtttaaagttcaacacgagcattatctgtttgaaggcgaacaaggcaaacgcgacagc

SEQ ID NO: 77234 - DNA, 75 bp, synthetic construct
  source 1..75: mol_type = other DNA
gaatgacgtaacagcttctggtatcagtgtcgccacgcataaacatggcggagtacagactggcgggggaactac

SEQ ID NO: 77235 - DNA, 75 bp, synthetic construct
  source 1..75: mol_type = other DNA
cgatgcttgggccggtgacggtaacgaatgacgtaacagcttctggtatcagtgtcgccacgcataaacatggcg

SEQ ID NO: 77236 - DNA, 75 bp, synthetic construct
  source 1..75: mol_type = other DNA
aagcatccatgaccagcgttgaaattgcagagctggtgggtaaacgtcatgacaatgtgaaacgcactattgaaa

SEQ ID NO: 77237 - DNA, 75 bp, synthetic construct
  source 1..75: mol_type = other DNA
tacgtttcaggctccttcaataacagtggagccgtgatttctgacgattcgctaaaaggttcatcaggggcaagc

SEQ ID NO: 77238 - DNA, 75 bp, synthetic construct
  source 1..75: mol_type = other DNA
atttacgcggggatttgcagacaggcccgcgtatccggcgtcattgaccccgtgctgctgtgcaatgagatgccg

SEQ ID NO: 77239 - DNA, 75 bp, synthetic construct
  source 1..75: mol_type = other DNA
tccggagaaatagaggcggatgcagacatcattctgatgctttacagggatgaagtgtacaacccggatacgcag

SEQ ID NO: 77240 - DNA, 75 bp, synthetic construct
  source 1..75: mol_type = other DNA
tggaagacggtatctggttttttgatgagagttgcccggggggagctgtttgggtgcttgaagatggctctctcg

SEQ ID NO: 77241 - DNA, 75 bp, synthetic construct
  source 1..75: mol_type = other DNA
tttactgagtgtcacgttccttggactctcacgctacggtgatatcaagctgggcccggaccatgcgcagcctga

SEQ ID NO: 77242 - DNA, 75 bp, synthetic construct
  source 1..75: mol_type = other DNA
tggaaatagcaaatcttagtgatagggcattaagtgatgggagaattatttctcctgatgcttatgaatcagtta

SEQ ID NO: 77243 - DNA, 75 bp, synthetic construct
  source 1..75: mol_type = other DNA
cgcgtcgtgaacggtgtttacggaaaagcagcaagcgggctgcatcaggtgaagagtggtatctgtcagggaatt

SEQ ID NO: 77244 - DNA, 75 bp, synthetic construct
  source 1..75: mol_type = other DNA
agaagctttacgattacacatcttgctgaccccgaagagattgttcttccagactacccggcaacagtagaacag

SEQ ID NO: 77245 - DNA, 75 bp, synthetic construct
  source 1..75: mol_type = other DNA
cccgccgcttgattcattttggtcgccaggcggcgcgcagtagctttcctgtcctgctttgtggagaagagggcg

SEQ ID NO: 77246 - DNA, 75 bp, synthetic construct
  source 1..75: mol_type = other DNA
gcaataaaaacggggatttttgactacgcaaaacagttcccctactcccacaatctgggaaaatttggggaagcc

SEQ ID NO: 77247 - DNA, 75 bp, synthetic construct
  source 1..75: mol_type = other DNA
gcccgtgatacatggtaccggtcactggagtacgataattttccggaaatcagtgaagcgaacattctgagcaca

SEQ ID NO: 77248 - DNA, 75 bp, synthetic construct
  source 1..75: mol_type = other DNA
tcggtatcggcccgtgggagcgtcgtctgcgtacgcttattgaacagtatgagctggaaacgcacgtggagatgc

SEQ ID NO: 77249 - DNA, 75 bp, synthetic construct
  source 1..75: mol_type = other DNA
gatcaagtcagatcattccggctggctggtccccgaaaataacgccatggccctggccgatcggctggccgcgtt

SEQ ID NO: 77250 - DNA, 75 bp, synthetic construct
  source 1..75: mol_type = other DNA
ctcctcaacatattgtaaaagactctacagcattgtggaatgaagttgaaagggtcgagcgccagcaaaatggtc

SEQ ID NO: 77251 - DNA, 75 bp, synthetic construct
  source 1..75: mol_type = other DNA
gcgtggagtcaaatcttaccgtgataaaacaaaagtcagtaaggttgttgctggtattccgccatcaatcagtat

SEQ ID NO: 77252 - DNA, 75 bp, synthetic construct
  source 1..75: mol_type = other DNA
gcgagcgtggtgcactgctgtacgggctgatcggcacctgccgtctgaacggtatcgatccggaagcgtatctgc

SEQ ID NO: 77253 - DNA, 75 bp, synthetic construct
  source 1..75: mol_type = other DNA
gaaggcgatgctcgacgacgcggatgtcttcctgttgccttcggtaacgggtgctgacggtgatatggaaggtat

SEQ ID NO: 77254 - DNA, 75 bp, synthetic construct
  source 1..75: mol_type = other DNA
aaatacaaccttgccgccagaacccgctggttacaggacgaacctacgggcaaagtggcgaagctgcgccaccgc

SEQ ID NO: 77255 - DNA, 75 bp, synthetic construct
  source 1..75: mol_type = other DNA
gacaagaaaagacttgtccttgagtattgtcagaaaaatttcgttgataaaggcatgattgccgatatcgctttc

SEQ ID NO: 77256 - DNA, 75 bp, synthetic construct
  source 1..75: mol_type = other DNA
gtgcgacaggagaaagcagcaacccgctggttccgcctcagcaacggaacacaggtcaatcttgctgactggaaa

SEQ ID NO: 77257 - DNA, 75 bp, synthetic construct
  source 1..75: mol_type = other DNA
aagtctacaaaacattcagcgaacttgatcttgaaatcgtcgttgatgtcagaagctttacgattacacatcttg

SEQ ID NO: 77258 - DNA, 75 bp, synthetic construct
  source 1..75: mol_type = other DNA
atgaacccttatatttatcttggtggcgcaatacttgcagaggtcattggtacaaccttaatgaagttttcagaa

SEQ ID NO: 77259 - DNA, 75 bp, synthetic construct
  source 1..75: mol_type = other DNA
cttgataaactttctgaagtaacgggttatcccccatattggtttatgttaccgccaaacgaagaagagcaggtt

SEQ ID NO: 77260 - DNA, 75 bp, synthetic construct
  source 1..75: mol_type = other DNA
cagtatttacggtattaaaagaacgctggcgaaaattttctgtctgtcagttgtaattgaagcaatcaatctgct

SEQ ID NO: 77261 - DNA, 75 bp, synthetic construct
  source 1..75: mol_type = other DNA
gaaaaagaattgcgtaaagcgcgggagatcgcctttgaggagctcggctcccaggcgcgggcgctgggggctgat

SEQ ID NO: 77262 - DNA, 75 bp, synthetic construct
  source 1..75: mol_type = other DNA
tggcgttttgttgaagatgccggacggggctatcgccgcgtggtcgcctcgccggaaccgaaacgtattgtcgaa

SEQ ID NO: 77263 - DNA, 75 bp, synthetic construct
  source 1..75: mol_type = other DNA
atccggatattcatgcacgttttctcgattcgctttccctgtgttttagtgaaaaaacggaagtcatcattattt

SEQ ID NO: 77264 - DNA, 75 bp, synthetic construct
  source 1..75: mol_type = other DNA
ggtaaggcaaaattatttgaacttgttgctgaagacgatgaagaccttgccgaactggccgacggcggcacagtt

SEQ ID NO: 77265 - DNA, 75 bp, synthetic construct
  source 1..75: mol_type = other DNA
gagccaggtaaagccgagcaggtcgatattactggaaaccatgtggctcttgtccctaaaggcagagccggaaat

SEQ ID NO: 77266 - DNA, 75 bp, synthetic construct
  source 1..75: mol_type = other DNA
gtggtaaagaaagcactcggctccattgctaaatcgggtaaaaccgcaattgttgaagtgctgtcgcccggtcaa

SEQ ID NO: 77267 - DNA, 75 bp, synthetic construct
  source 1..75: mol_type = other DNA
atcacgttcagaaaaccggaactggttgaccgactgaatgatattattgcagaacactatcctgacatgctgtca

SEQ ID NO: 77268 - DNA, 75 bp, synthetic construct
  source 1..75: mol_type = other DNA
acccatacgtttgatttccagcatgttgctgatgccattagtttatttgaacaggatcaaaaacattgctgcaaa

SEQ ID NO: 77269 - DNA, 75 bp, synthetic construct
  source 1..75: mol_type = other DNA
atacgcaggtgcgcgctttcacgtatgacgcgcagcacccgggccggatggtggcgcaccgttatgcaggcaggc

SEQ ID NO: 77270 - DNA, 75 bp, synthetic construct
  source 1..75: mol_type = other DNA
gccgaaaaaattcggaggatgaccattcctgtagacaatataattaacatctatcctgatctacataaaaaaaat

SEQ ID NO: 77271 - DNA, 75 bp, synthetic construct
  source 1..75: mol_type = other DNA
tttattttgggcagtacaaaataaaacaaataatgatctagtcttattagatcaatacacgctaaatgattttat

SEQ ID NO: 77272 - DNA, 75 bp, synthetic construct
  source 1..75: mol_type = other DNA
accagtatgagcaggatcgcatcaccgtcacggacagcctgaaccggcgtgaggtgctgcatacagaaggcgggg

SEQ ID NO: 77273 - DNA, 75 bp, synthetic construct
  source 1..75: mol_type = other DNA
tggaagtggtcaacggacatacggacattatctgctccacctcagtcagccacattctggctgtgcgaaagacta

SEQ ID NO: 77274 - DNA, 75 bp, synthetic construct
  source 1..75: mol_type = other DNA
caggtcactggaatatgataattttccggaaatcagcgaagcgaacattctgagcacatttaaacaactgcacca

SEQ ID NO: 77275 - DNA, 75 bp, synthetic construct
  source 1..75: mol_type = other DNA
ccgcactggactgggccatgaaacaggattttcgttgcggttgctggctgatggaaaaaccggaaaccgcaatga

SEQ ID NO: 77276 - DNA, 75 bp, synthetic construct
  source 1..75: mol_type = other DNA
cagctccggctgcgccattatttcctgtaccgaaccagcatgaacgatttttacgcctgcctgaggtgatgcact

SEQ ID NO: 77277 - DNA, 75 bp, synthetic construct
  source 1..75: mol_type = other DNA
tttcagatattatttcccgtatcgaaatgtatggtcacggtgctggatacacagcagatgaagtattggagcttg

SEQ ID NO: 77278 - DNA, 75 bp, synthetic construct
  source 1..75: mol_type = other DNA
ccacgatgcggggtatcactacgctggtatttagcggcggagttattcataaccgtttgctgcgtgcacgtctgg

SEQ ID NO: 77279 - DNA, 75 bp, synthetic construct
  source 1..75: mol_type = other DNA
acggtggagcaactggccagacaggtggagccggaatacacaccggcgcgaaaagttcatttttaccactgcgac

SEQ ID NO: 77280 - DNA, 75 bp, synthetic construct
  source 1..75: mol_type = other DNA
taaaaatcatgaggcggcaggggatagacaaggtcagccagctaaagaaagaatcatggatcttaaaaataacac

SEQ ID NO: 77281 - DNA, 75 bp, synthetic construct
  source 1..75: mol_type = other DNA
ctgggtgttgcgtggctgggcgatactttcgtttccaacaacatcgactggatcaaagataccgctggtgaagtg

SEQ ID NO: 77282 - DNA, 75 bp, synthetic construct
  source 1..75: mol_type = other DNA
aagtttatcacgaaagtaacggttcagcaggagcgcgaagcattgccgcaatggtcaccaccaaaggtataaaac

SEQ ID NO: 77283 - DNA, 75 bp, synthetic construct
  source 1..75: mol_type = other DNA
aaaataagactcataaaattaccgactggacgctgtgggctggaaatgacgacagagaggttatgctgacctgtc

SEQ ID NO: 77284 - DNA, 75 bp, synthetic construct
  source 1..75: mol_type = other DNA
caatatttgcttatcacgtaaaagatcccgaacgttatggtgttgttgagtttgatagtgaatggaatgctattt

SEQ ID NO: 77285 - DNA, 75 bp, synthetic construct
  source 1..75: mol_type = other DNA
gtaactaacgttagttcacctgggatatacattggtgactctgcagaacaatatttttcgtggtataatccaagc

SEQ ID NO: 77286 - DNA, 75 bp, synthetic construct
  source 1..75: mol_type = other DNA
tatatcaaacgtcatcagtggtggcaggcgtgcgaccagctcacccgctgggtgtatgtcaacggcacaaaaaac

SEQ ID NO: 77287 - DNA, 75 bp, synthetic construct
  source 1..75: mol_type = other DNA
ttaagccactgcattcaatgggcggaactggtgaaagaagcggtccagatatatgggggaatccgttctatcatc

SEQ ID NO: 77288 - DNA, 75 bp, synthetic construct
  source 1..75: mol_type = other DNA
agcgcgttctgcagtcagcaagcaagttacgtcagagtgggcgtgtggctcaccgttgtgaaggagatacacgca

SEQ ID NO: 77289 - DNA, 75 bp, synthetic construct
  source 1..75: mol_type = other DNA
taggtgggtcaccaggcctgaaaggacgtcaaattgccaaggagctggggctggtcagctgtcagcagccgactc

SEQ ID NO: 77290 - DNA, 75 bp, synthetic construct
  source 1..75: mol_type = other DNA
ttggtaatacatcaggtgtcattccaggaaaaaccattacggaacgacaggcagcggaagggctgatctccaacg

SEQ ID NO: 77291 - DNA, 75 bp, synthetic construct
  source 1..75: mol_type = other DNA
ttatcccggtgccagtcttggcatagtagaagtcgatcctgaaacgaccgatgcagacagtgccctgcatgctgc

SEQ ID NO: 77292 - DNA, 75 bp, synthetic construct
  source 1..75: mol_type = other DNA
atttatctgtttatatgcccctttccctccaaaacaaccttctggatttgcaccggcatcattttatttttcgtc

SEQ ID NO: 77293 - DNA, 75 bp, synthetic construct
  source 1..75: mol_type = other DNA
gagcgtcagcagccggagcgatatcgttctcagcaatggaacgcttaacagcgacaaggacctcagcctgaccgc

SEQ ID NO: 77294 - DNA, 75 bp, synthetic construct
  source 1..75: mol_type = other DNA
gagcgcttcttcaggagtctgaagaacgaatgggtgccggcgacgggctatgtaagcttcagcgatgcagctcac

SEQ ID NO: 77295 - DNA, 75 bp, synthetic construct
  source 1..75: mol_type = other DNA
atgaacaacacactccccgacgacatcgagcaactgaaggccctgctgatcgcacagcaggctgttatcgtccgt

SEQ ID NO: 77296 - DNA, 75 bp, synthetic construct
  source 1..75: mol_type = other DNA
ggaactgaccagccccgcacagaatattgttatcagtgatgtgcagtcagcgtactgcacatcgttcacggtcag

SEQ ID NO: 77297 - DNA, 75 bp, synthetic construct
  source 1..75: mol_type = other DNA
tcgcactggagcagttaggcctcagtcattccaccgttcataatatctttcaacggtttaatgcctctggcatgt

SEQ ID NO: 77298 - DNA, 75 bp, synthetic construct
  source 1..75: mol_type = other DNA
gcaagaaaaccagtgggctgggccatgtcgttctcgccggacagcaggctcaccatgaaagcgctggaaatggca

SEQ ID NO: 77299 - DNA, 75 bp, synthetic construct
  source 1..75: mol_type = other DNA
ctatattatcatatattgaagaaaatattgaaatcacctcaattaatatagatactcttgtgcagcattccggat

SEQ ID NO: 77300 - DNA, 75 bp, synthetic construct
  source 1..75: mol_type = other DNA
aggctccgtgggtagtcgcaaaacaggaaggtcgcgatgctgacctgcaggcgatttgctcaatgggcatcaacc

SEQ ID NO: 77301 - DNA, 75 bp, synthetic construct
  source 1..75: mol_type = other DNA
cagacggaagtttctattttgaatactacttgcctgtaaacgatgacaacatttctatatgtccggacatccatg

SEQ ID NO: 77302 - DNA, 75 bp, synthetic construct
  source 1..75: mol_type = other DNA
aatggagatgttaccgtcaaattccggtatggttcaggcaccaataatttagttttttataaaccaacccaactt

SEQ ID NO: 77303 - DNA, 75 bp, synthetic construct
  source 1..75: mol_type = other DNA
tcgccgccatgcatggcatgacaccggaggaatacgaacttcaaaaagcgcgggacaatctgaagagcgtcaccg

SEQ ID NO: 77304 - DNA, 75 bp, synthetic construct
  source 1..75: mol_type = other DNA
gtgaaagtattagctgaaccgttgaagaaaaatgcttatggtcagtacctgctaaaaatgattaaaggttattaa

SEQ ID NO: 77305 - DNA, 75 bp, synthetic construct
  source 1..75: mol_type = other DNA
ctctatttctacgacaatgatgtagtggaaatggcgaagaaccttaaaccttcagcgcgcggtgagttggaaatt

SEQ ID NO: 77306 - DNA, 75 bp, synthetic construct
  source 1..75: mol_type = other DNA
gaagaggctgaacgtgaagcggttgaacgccaggaacttgaagccaaacgtcagcaggccattgaatacatcata

SEQ ID NO: 77307 - DNA, 75 bp, synthetic construct
  source 1..75: mol_type = other DNA
tctggtgcgtattaatcgtgtgctgcacgttgttgatattcacactcctgacccggaatcgcctgtgcgaagtcc

SEQ ID NO: 77308 - DNA, 75 bp, synthetic construct
  source 1..75: mol_type = other DNA
gtttatcggcgaaaaacgccatcctgatcgtcgagtttgctaacgagatgaaccaaaaaggccacgacctgtttg

SEQ ID NO: 77309 - DNA, 75 bp, synthetic construct
  source 1..75: mol_type = other DNA
actacagaggtatcctgcaggccgatgcatatgcgggttacaatgctctttacgaaagcggtcaggcaaccgaag

SEQ ID NO: 77310 - DNA, 75 bp, synthetic construct
  source 1..75: mol_type = other DNA
actatcactgccaaagcaaattattctgttagtgttatatactgccggattcacttttttaatattatacgactt

SEQ ID NO: 77311 - DNA, 75 bp, synthetic construct
  source 1..75: mol_type = other DNA
gtttatccgcctggatgaacctgccccacttaacgccatgacgctggcgcaatggtcatcaccgaatgtgctaag

SEQ ID NO: 77312 - DNA, 75 bp, synthetic construct
  source 1..75: mol_type = other DNA
atgccggttatagcggaaccagtatgacaggcgggaaaggtgctgctgggatttgtattatcgaggagtttgcat

SEQ ID NO: 77313 - DNA, 75 bp, synthetic construct
  source 1..75: mol_type = other DNA
tcttcacgcaaatctaccagccgccggtatccaaaggcgatggctacgatcgtgacaacctgttaaaagccgaca

SEQ ID NO: 77314 - DNA, 75 bp, synthetic construct
  source 1..75: mol_type = other DNA
ttcccggaacctgtcgtactgttaattgccgttgctgcctcaatggtggtggtcggtaacttatccgacggtgcg

SEQ ID NO: 77315 - DNA, 75 bp, synthetic construct
  source 1..75: mol_type = other DNA
gcagggcgtaccgttcaacgttgatgaatatctgcgtctgtactacaccggtaacttcttccagctgcttaaccc

SEQ ID NO: 77316 - DNA, 75 bp, synthetic construct
  source 1..75: mol_type = other DNA
aacgcagacggcgtaccacacaggaaaagatcgctattgttcagcagagctttgaaccgggaatgacggtctccc

SEQ ID NO: 77317 - DNA, 75 bp, synthetic construct
  source 1..75: mol_type = other DNA
atggaagacggcgttcaggcaatgcgcgattatcttgccggactggatatcgcttcgccagagcatcaggttctg

SEQ ID NO: 77318 - DNA, 75 bp, synthetic construct
  source 1..75: mol_type = other DNA
caccagtggcgggaatagcgtatttgcatcgttaattgctcctggtggcgcaggtggcgggaaagtgggagttac

SEQ ID NO: 77319 - DNA, 75 bp, synthetic construct
  source 1..75: mol_type = other DNA
tatgaagggcgggggatgactaagcgcaaaatggctgaattgctaaatgatgcacacccagagtggtgttttagc

SEQ ID NO: 77320 - DNA, 75 bp, synthetic construct
  source 1..75: mol_type = other DNA
aaagatcgctattgttcagcagagttttgaaccgggaatgacggtctcccttgttgcccggcaacacggtgtggc

SEQ ID NO: 77321 - DNA, 75 bp, synthetic construct
  source 1..75: mol_type = other DNA
ttgagatggctggcgttttgttaggaaaagaggtgcgtaaacgtaaaacacctcaggaaaaaatcgcaattattc

SEQ ID NO: 77322 - DNA, 75 bp, synthetic construct
  source 1..75: mol_type = other DNA
tgtcccacaggtacagatagagttgctgcttatcatactcacggtgcagatagtcatggcgattatgttgatgaa

SEQ ID NO: 77323 - DNA, 75 bp, synthetic construct
  source 1..75: mol_type = other DNA
tacgaaggacggggaatgagcaaactgaaaatggccgaaaggttaaatgcagatcatcctgagtggacgttggtt

SEQ ID NO: 77324 - DNA, 75 bp, synthetic construct
  source 1..75: mol_type = other DNA
tcttcagtgcgaagatgattccgcaaaacggaaaatgaccgaaattctgtctgatgagttttatgctgccgaaaa

SEQ ID NO: 77325 - DNA, 75 bp, synthetic construct
  source 1..75: mol_type = other DNA
caggtatatctgaacttgttttgcgtgcaggtaatggtaatccgaaggggattactggtgctttatggcagcgca

SEQ ID NO: 77326 - DNA, 75 bp, synthetic construct
  source 1..75: mol_type = other DNA
atgcgttatccctggagcgggagcgccagccggaaattcaggaacggacactggatggcccttcgctgggatggt

SEQ ID NO: 77327 - DNA, 75 bp, synthetic construct
  source 1..75: mol_type = other DNA
caggttagcgaattaacaatgtgggttaaacgactggtcagtcaactgaaaaaagctcagccggactgcaaatta

SEQ ID NO: 77328 - DNA, 75 bp, synthetic construct
  source 1..75: mol_type = other DNA
ggggataaccggctttgagattgacgtggtgctgaacgagaactggcctcacgacctgccgtttgacagcgataa

SEQ ID NO: 77329 - DNA, 75 bp, synthetic construct
  source 1..75: mol_type = other DNA
gtgaccgtggtaaccacggcgcaccatacccgtttactgaccgctcagcgcgaacaactggtgctggagcgagat

SEQ ID NO: 77330 - DNA, 75 bp, synthetic construct
  source 1..75: mol_type = other DNA
gtggtggtggtgcgtttaaaaacgtgctcattcatgcgcccaacgggggcaaagaaggtgtgcaaattttgccgt

SEQ ID NO: 77331 - DNA, 75 bp, synthetic construct
  source 1..75: mol_type = other DNA
tgattcagcgttatacggaagctgaaatggcggtgctggacggaaaatccgtcacttttaatggtcagcagatga

SEQ ID NO: 77332 - DNA, 75 bp, synthetic construct
  source 1..75: mol_type = other DNA
aaaaccgtaatcggaccttcaagttactggggcagcagcctgttggtgaagtctggggagtaggacgcagactga

SEQ ID NO: 77333 - DNA, 75 bp, synthetic construct
  source 1..75: mol_type = other DNA
aaaaacgctggctaaaagtgcacagtgggcaacaaagcaatggccacagttttccggtgtggtcgcgctgacggc

SEQ ID NO: 77334 - DNA, 75 bp, synthetic construct
  source 1..75: mol_type = other DNA
atgaacaccagagaaaacaatcttaaagcccttcatgccccccgaaaaatcgacctgcgtaaggaagccgaactg

SEQ ID NO: 77335 - DNA, 75 bp, synthetic construct
  source 1..75: mol_type = other DNA
tggatgtgcgacgtatccggcttgctcttgatgatctggcaacggtaacgcatgacggatatgtgccacgtgtga

SEQ ID NO: 77336 - DNA, 75 bp, synthetic construct
  source 1..75: mol_type = other DNA
tccctttattctccatggtcgactatcgaaaaaaaagcgtgcgatgctgatatccgggctgaatgctcttcctcc

SEQ ID NO: 77337 - DNA, 75 bp, synthetic construct
  source 1..75: mol_type = other DNA
aagcccttcatgcgccccgcaaaatcaacctgcgtgaggaagccggactgctcggcgtgaatatcgtgaccgata

SEQ ID NO: 77338 - DNA, 75 bp, synthetic construct
  source 1..75: mol_type = other DNA
cggtagcgggtcttgggatgcatatgttgcctgccactaaggcgattcccaaagagatgctaccgatcgtcgaca

SEQ ID NO: 77339 - DNA, 75 bp, synthetic construct
  source 1..75: mol_type = other DNA
aaagacaccatttctgaaatgtggccagaaagaacgctggaaatgacgtggggcgagttctggaaagcagttaag

SEQ ID NO: 77340 - DNA, 75 bp, synthetic construct
  source 1..75: mol_type = other DNA
atgagcagaaaaaataaaaaagtgcgcatgagttcacgcattgatctcgctgatgcgctcaggaaagaatcatcg

SEQ ID NO: 77341 - DNA, 75 bp, synthetic construct
  source 1..75: mol_type = other DNA
agcaagagaaaaagcaaattaagataaatgaaaaaataaacacattgattgggatttttaataaaaccattgcaa

SEQ ID NO: 77342 - DNA, 75 bp, synthetic construct
  source 1..75: mol_type = other DNA
tgattaacggtaagcaaaagagctggctggcgcattgtactgatgcagaggcgttatgtattgatcgggtgatta

SEQ ID NO: 77343 - DNA, 75 bp, synthetic construct
  source 1..75: mol_type = other DNA
cccgctgaataaagaagtggttcgtgaagctggcgcatggctggttaacttcaacaacacgccaattctgtgggc

SEQ ID NO: 77344 - DNA, 75 bp, synthetic construct
  source 1..75: mol_type = other DNA
cgttttacatctggtcatttaccatcggatgcgagaatccaggatattttcagagaaattgctctggatcatgac

SEQ ID NO: 77345 - DNA, 75 bp, synthetic construct
  source 1..75: mol_type = other DNA
tggaaggaagggaatataagcatgtcgctcatgacggtatgccatgggataacagtccatgcttttacaacctgg

SEQ ID NO: 77346 - DNA, 75 bp, synthetic construct
  source 1..75: mol_type = other DNA
gcgtgtgcaggatgcagccggggaattatgctgtgaagtgcaatttcttgatgatggtgctatctgccttgagga

SEQ ID NO: 77347 - DNA, 75 bp, synthetic construct
  source 1..75: mol_type = other DNA
actatttctatggtgctggtcagagcgccgcgtcgattgtccgtcagaatgtgacgatgaacgctttgcgaaatg

SEQ ID NO: 77348 - DNA, 75 bp, synthetic construct
  source 1..75: mol_type = other DNA
ttcgctgtccccgagccagaccaggtatggtgtggagatattacctatatctgggccggaaattgctggtgctat

SEQ ID NO: 77349 - DNA, 75 bp, synthetic construct
  source 1..75: mol_type = other DNA
cggatctgcgccgcaaaatgctgctggccacactgtggaacaccggtgcgcgcattaatgaagcactggcgctga

SEQ ID NO: 77350 - DNA, 75 bp, synthetic construct
  source 1..75: mol_type = other DNA
atgaaatacctgaacctgagcagttgtcagcccggaaaacatcaatacaaaaatgcctgtcaggagcatacgtgt

SEQ ID NO: 77351 - DNA, 75 bp, synthetic construct
  source 1..75: mol_type = other DNA
ggccgaaaccttcagcgaagacgatttcgattttgcccaacagcatttgcgaatgctttccggcttgtatggcgt

SEQ ID NO: 77352 - DNA, 75 bp, synthetic construct
  source 1..75: mol_type = other DNA
atgtccattttaattgataaaaacaccaaggttatctgccagggctttaccggtagccaggggactttccactca

SEQ ID NO: 77353 - DNA, 75 bp, synthetic construct
  source 1..75: mol_type = other DNA
ccccggtgtgcatcgtttttgattattcccacacactcgcgcagaaggagttccccgtcgggctacggtctctgt

SEQ ID NO: 77354 - DNA, 75 bp, synthetic construct
  source 1..75: mol_type = other DNA
tggcctgtccggtgaatatgcggagaaatcccttgaagaatgggcggaacagattcgcaaaggagctgacaagtg

SEQ ID NO: 77355 - DNA, 75 bp, synthetic construct
  source 1..75: mol_type = other DNA
atgaaagcaattgcagcctgcgtgctgggcggcattagtttgctcggcggttccggtgcgatcatcggtgcggta

SEQ ID NO: 77356 - DNA, 75 bp, synthetic construct
  source 1..75: mol_type = other DNA
cagagagtgtccgtcatcttgagatcagaggttacgccacagacggcataaaaaatgttccaaacgggttattat

SEQ ID NO: 77357 - DNA, 75 bp, synthetic construct
  source 1..75: mol_type = other DNA
ccccacgctagcgcgggaaaagctggaggaagttcacggtctggtccttggaaaggaaaccatccgacgtctcat

SEQ ID NO: 77358 - DNA, 75 bp, synthetic construct
  source 1..75: mol_type = other DNA
gcgtacagattagccgtaccggcatccttcgcgcctcctttgccgcgcccgcgaccggaacagtgacggtcagtc

SEQ ID NO: 77359 - DNA, 75 bp, synthetic construct
  source 1..75: mol_type = other DNA
actgttaaagactctactgtgacctctggttcatggtctgatgaaggtactagtggttggtttggtaataccggc

SEQ ID NO: 77360 - DNA, 75 bp, synthetic construct
  source 1..75: mol_type = other DNA
cggtaatgctcaggctgcggtggatgaatattatgctgcgactggttcacaaccgcatcaacagaaaattcagca

SEQ ID NO: 77361 - DNA, 75 bp, synthetic construct
  source 1..75: mol_type = other DNA
ccgaagtccacgcagacggtgaagtccggaacatacagcacgccgtacctgagctacatcaacgactacggcgga

SEQ ID NO: 77362 - DNA, 75 bp, synthetic construct
  source 1..75: mol_type = other DNA
caatatgaatacgaatcacatatagatgacttacatttgacgcttggcgttatggttatattcgaacgaaaatcg

SEQ ID NO: 77363 - DNA, 75 bp, synthetic construct
  source 1..75: mol_type = other DNA
ggttcgtctgaccagtacacctgacatcagtcgcctgccacaggacagggaatcccttttttacttcagtcttcg

SEQ ID NO: 77364 - DNA, 75 bp, synthetic construct
  source 1..75: mol_type = other DNA
tggcctgtccggtgaatatgcggagaaatccctagaagaatgggcggaacagattcgcaaaggaggcaaccagtg

SEQ ID NO: 77365 - DNA, 75 bp, synthetic construct
  source 1..75: mol_type = other DNA
gcaatacagatacgatatggctcccgggaaatatttgtgcttaccagttccggctggataatggcggaaacggtg

SEQ ID NO: 77366 - DNA, 75 bp, synthetic construct
  source 1..75: mol_type = other DNA
tgccagtcatgccagcgtgatattgagcgtgaccgcgataattgggagaagacgcacggtaggctggcgatgcat

SEQ ID NO: 77367 - DNA, 75 bp, synthetic construct
  source 1..75: mol_type = other DNA
cgaaagtcggcatcgtttataactacgctaacgcatccgatcttccggctaaagcactggtagatgcgggctatg

SEQ ID NO: 77368 - DNA, 75 bp, synthetic construct
  source 1..75: mol_type = other DNA
tgcgttcttcccgcgtaccgacgggcgctaccactcaggatgccgaagtggatgatgcgaaatacggcttcgtcg

SEQ ID NO: 77369 - DNA, 75 bp, synthetic construct
  source 1..75: mol_type = other DNA
gatgaaggccgcgaagcgtttctgaaattaatggaaaccaccgatatcttcatcgaagccagtaaaggtccggcc

SEQ ID NO: 77370 - DNA, 75 bp, synthetic construct
  source 1..75: mol_type = other DNA
agaaatacggtaaggcatatgtctcccgtcatgaagaccgtatgggggaaggatttagttttggtcctgacctgt

SEQ ID NO: 77371 - DNA, 75 bp, synthetic construct
  source 1..75: mol_type = other DNA
tgccagccagattatgcgccagaacgtcaccatgaatgccctgaaagagggtatcaccagtaatgcagcccgtaa

SEQ ID NO: 77372 - DNA, 75 bp, synthetic construct
  source 1..75: mol_type = other DNA
gatttttacccgctgactggccgtgaagcgttttatttatggggattgggcacgactacagcggcggcaaacctt

SEQ ID NO: 77373 - DNA, 75 bp, synthetic construct
  source 1..75: mol_type = other DNA
aagaggaaaaagaagaagaacagtaacaggcacggtaaccacagaaaaataacatcagaaaaaaacattccggac

SEQ ID NO: 77374 - DNA, 75 bp, synthetic construct
  source 1..75: mol_type = other DNA
aacctgagcgattactttgccaaagcacgggacctggctggaataattccaccagcaggaaaaacaccaccaaca

SEQ ID NO: 77375 - DNA, 75 bp, synthetic construct
  source 1..75: mol_type = other DNA
tccggcagccatacggacaataatgccgattcccgtgtggaccagctgtctgcagccctgaactcagcgaaacag

SEQ ID NO: 77376 - DNA, 75 bp, synthetic construct
  source 1..75: mol_type = other DNA
gtgccggattttatgtctggctccataaccctgtatctgccggagaaaaggataaccagcgactgctggaactca

SEQ ID NO: 77377 - DNA, 75 bp, synthetic construct
  source 1..75: mol_type = other DNA
ggatggaatcctccggaggctacccgtaaaccgatccctaaagtaaccagagccaggctcaccctggaagactgg

SEQ ID NO: 77378 - DNA, 75 bp, synthetic construct
  source 1..75: mol_type = other DNA
tactctttaaggaattgctcaagggcaaaagcacatggcgcgaatcgttctgattcatgctctttctttctgcgt

SEQ ID NO: 77379 - DNA, 75 bp, synthetic construct
  source 1..75: mol_type = other DNA
gacattgatgcacctcacttaaatggactttatgggcgcacacaatacagcaaaaaaaatgagatgttaagtatt

SEQ ID NO: 77380 - DNA, 75 bp, synthetic construct
  source 1..75: mol_type = other DNA
atcaaaccgtgctggcgatacccgttgataaggctatcgctcaggtcagggatcgcagcaaatttgcagagatat

SEQ ID NO: 77381 - DNA, 75 bp, synthetic construct
  source 1..75: mol_type = other DNA
aaacttcaggaaggagccagcagtgtagcggcggaagcgatcaagaacggcgggaatgctcaggcggcggtggat

SEQ ID NO: 77382 - DNA, 75 bp, synthetic construct
  source 1..75: mol_type = other DNA
cggtcgaactgttggtgctaccgcgcgtcttggcactattgatctctctgccgatgctaacctttattggcatgg

SEQ ID NO: 77383 - DNA, 75 bp, synthetic construct
  source 1..75: mol_type = other DNA
atggggcgctggcttgctggcagactcatgaaagagctggggctggtcagttgccagcagccgactcaccggtat

SEQ ID NO: 77384 - DNA, 75 bp, synthetic construct
  source 1..75: mol_type = other DNA
gacggcagtatggtgatggacgccagtggggcaatgtcccgtttgccggttggtattaatgcaacgcgtcagatt

SEQ ID NO: 77385 - DNA, 75 bp, synthetic construct
  source 1..75: mol_type = other DNA
caatcatgcgttctgttggtcgttaataagcagctttcaaaaaccgttgagagaactgattgaaacaatgccaac

SEQ ID NO: 77386 - DNA, 75 bp, synthetic construct
  source 1..75: mol_type = other DNA
gatgctcatgctgaatggggggttaaacctaaaattcttggtgttggtggaggattaggcgttagaggtggtggt

SEQ ID NO: 77387 - DNA, 75 bp, synthetic construct
  source 1..75: mol_type = other DNA
gtgcagacagcgcaaggggtcagcaacaattgcaaattaccgggcggtgaaacgattgatgaatgggcattgtgg

SEQ ID NO: 77388 - DNA, 75 bp, synthetic construct
  source 1..75: mol_type = other DNA
tctggtactggctgctgcatttaataaaatgacactgccggtgctgaagggctatgtgtttgcccttatgtggct

SEQ ID NO: 77389 - DNA, 75 bp, synthetic construct
  source 1..75: mol_type = other DNA
cgttgaatccgatctcaaatatagatccattaggattagaaacactaaaatgcattaagccactgcattcaatgg

SEQ ID NO: 77390 - DNA, 75 bp, synthetic construct
  source 1..75: mol_type = other DNA
atggctgggtggagatcgacaataacctgtgtgaaaacgccctccgggtagttgcactggggcggcgtaactaca

SEQ ID NO: 77391 - DNA, 75 bp, synthetic construct
  source 1..75: mol_type = other DNA
gtacgctatcgaggctgagatccgcggcagtccggcagaagagcgactggcggtcagaaaagccagaacggtacc

SEQ ID NO: 77392 - DNA, 75 bp, synthetic construct
  source 1..75: mol_type = other DNA
ggctgaatgtgctgggtaccggaggaggggtagggtttcaggcaggagttaaggcgggagttgatttttccgatg

SEQ ID NO: 77393 - DNA, 75 bp, synthetic construct
  source 1..75: mol_type = other DNA
ggcatcgttgaactcagcaaaacagagctatgatcagtacaccacaagtcaggctcgtagccatgaatatgctga

SEQ ID NO: 77394 - DNA, 75 bp, synthetic construct
  source 1..75: mol_type = other DNA
gctaaattttgaactggtcagtgcaccgaaaggaactgctgccgatgtctttaattcacagacacaaaatgtggg

SEQ ID NO: 77395 - DNA, 75 bp, synthetic construct
  source 1..75: mol_type = other DNA
ccacatggaccctgaagggattcaatgctgtagccaatcagcagtcagctgaaaaagcggaaaatttcatgtcag

SEQ ID NO: 77396 - DNA, 75 bp, synthetic construct
  source 1..75: mol_type = other DNA
ccgtcaatacatgacctggggaatgtgaaaatgacggcgtcaaatgccaccctgacggcaggtaattatgcaatg

SEQ ID NO: 77397 - DNA, 75 bp, synthetic construct
  source 1..75: mol_type = other DNA
tgacccgcagccatgaatatgcggaaatggcctcccgtactgaaagcatgagcgggcagatgagtgaagacctgt

SEQ ID NO: 77398 - DNA, 75 bp, synthetic construct
  source 1..75: mol_type = other DNA
aacatccaaaaaatagctgaatgtggccagatagttcttcgtcgtgaaaaagacctcaaacaactgatgtctggc

SEQ ID NO: 77399 - DNA, 75 bp, synthetic construct
  source 1..75: mol_type = other DNA
gtcaccatgaatgccctgaaagagggtatcaccagtaatgcagcccgtaacggtgacaccgccagcctggtaagt

SEQ ID NO: 77400 - DNA, 75 bp, synthetic construct
  source 1..75: mol_type = other DNA
gtcacgctgaatgccgataatttcatcgtgagggataacggccccggtgtgacgccagaggcactggcgcgaatt

SEQ ID NO: 77401 - DNA, 75 bp, synthetic construct
  source 1..75: mol_type = other DNA
agcgtactggtagcatctgcgcctgtaagtcattcgatgcatatcgtgcatgggtcactattgagtccggccatt

SEQ ID NO: 77402 - DNA, 75 bp, synthetic construct
  source 1..75: mol_type = other DNA
gtgatagctatcgtgatgctgacggtgatgtagatactaacggttgggatggtactgatcgcctggatctgaccc

SEQ ID NO: 77403 - DNA, 75 bp, synthetic construct
  source 1..75: mol_type = other DNA
atgagctggcaggagaaaatcaacgcggcgctcgatgcgcggcgtgctgccgatgccctgcgtcgccgttatccg

SEQ ID NO: 77404 - DNA, 75 bp, synthetic construct
  source 1..75: mol_type = other DNA
cgctatctcctccaatgaacgcaagctggttaccggctatgctaaattcctggcttcctatggtggtaacgaagg

SEQ ID NO: 77405 - DNA, 75 bp, synthetic construct
  source 1..75: mol_type = other DNA
agattgcaggcgggccggatctgctggaggtgggcgaactgcccaccggcccggtgatctacctgcccgccgaag

SEQ ID NO: 77406 - DNA, 75 bp, synthetic construct
  source 1..75: mol_type = other DNA
tacagcctggtgttgataatgcctggcgtgaatcccgtggggatattggtaaaggaatggagagcgtaccttcgg

SEQ ID NO: 77407 - DNA, 75 bp, synthetic construct
  source 1..75: mol_type = other DNA
tggatgatgccgataccgtaacgcttaaggaagtgacagaagcattgttgcattgtgcggaacagattcgcgcgc

SEQ ID NO: 77408 - DNA, 75 bp, synthetic construct
  source 1..75: mol_type = other DNA
cggcagttattgtggcgataccagatcaggcagagtatgagccggcgcggaaactgctgggataacagcccaatg

SEQ ID NO: 77409 - DNA, 75 bp, synthetic construct
  source 1..75: mol_type = other DNA
tgttcggggcgaacctgattgtgaaaagcaccgattttctgtcccggaatccggaaatcatcaatctgtttcagg

SEQ ID NO: 77410 - DNA, 75 bp, synthetic construct
  source 1..75: mol_type = other DNA
atagataaagttatatttaaagggcaaacactggatcgtctttatcatgaaggatatgtattttctgatatcaat

SEQ ID NO: 77411 - DNA, 75 bp, synthetic construct
  source 1..75: mol_type = other DNA
gctctgtatcgtcatgcttccggcatggctgttattagcaggtaagccgatgatgatggtcaatcgtccgaagca

SEQ ID NO: 77412 - DNA, 75 bp, synthetic construct
  source 1..75: mol_type = other DNA
agaccctgaccaacagcggtctgttgcaggggaaggcctcactcaccgttaacacacagaggcttgataatcagc

SEQ ID NO: 77413 - DNA, 75 bp, synthetic construct
  source 1..75: mol_type = other DNA
gaaagacaagctgaatctggacacacagagtggcggaaaaacctggcattattatgcccagcagctatttggtgg

SEQ ID NO: 77414 - DNA, 75 bp, synthetic construct
  source 1..75: mol_type = other DNA
ctacgctggcggtgctggaattttgagtctgacgccggaaaacagctaaattcgtacctcgccagtgagggaatt

SEQ ID NO: 77415 - DNA, 75 bp, synthetic construct
  source 1..75: mol_type = other DNA
tcattgctctgctggtggcctgtggtgcgcttagtctggggctgaatcattaccgcgataacgccatcacctaca

SEQ ID NO: 77416 - DNA, 75 bp, synthetic construct
  source 1..75: mol_type = other DNA
atttaagccctatttatttagataatttccgccatgatggagaaattaatattttttgcgctcccaacccaaagc

SEQ ID NO: 77417 - DNA, 75 bp, synthetic construct
  source 1..75: mol_type = other DNA
aacgcgattacctacaaagcgcagcgcgataacaaagccagtgaactgaagctggcgaacgcaaccattactgat

SEQ ID NO: 77418 - DNA, 75 bp, synthetic construct
  source 1..75: mol_type = other DNA
tgatgaagagtggcgcacgtctttaaacatcaactcagccacaaaaaagatatttaataaccttgataacttatc

SEQ ID NO: 77419 - DNA, 75 bp, synthetic construct
  source 1..75: mol_type = other DNA
atgaaccgtgttctgtgtgtggtgattattgtcctgctggtagcctgtggtgcacttagtctggggctgaatcat

SEQ ID NO: 77420 - DNA, 75 bp, synthetic construct
  source 1..75: mol_type = other DNA
cccgttgtcagtcagctcgggtttaccgccatggtcagaaccctaaaggccgtgacagatttcgctgccgtgact

SEQ ID NO: 77421 - DNA, 75 bp, synthetic construct
  source 1..75: mol_type = other DNA
tggacagagcggttagagatactggcaggtactcacgaaaacgtaaccacactgccaatagccagagaaatataa

SEQ ID NO: 77422 - DNA, 75 bp, synthetic construct
  source 1..75: mol_type = other DNA
gccagtgcggggactgtggagcttaattccggtattggtggcctttccgttgattttgagccaacagccctcctg

SEQ ID NO: 77423 - DNA, 75 bp, synthetic construct
  source 1..75: mol_type = other DNA
tcgccataaatccgcactggtcatgcagaagtacagccgtcagcaggcgagggaggcagagcagaaaacccgtgc

SEQ ID NO: 77424 - DNA, 75 bp, synthetic construct
  source 1..75: mol_type = other DNA
tgcatgacatccggcgcacctttacaacgatgctgaacgatttaggcgtggatcctcacgtcgtggagcagctta

SEQ ID NO: 77425 - DNA, 75 bp, synthetic construct
  source 1..75: mol_type = other DNA
gttttgatcgggtggcaaagaaagcccctgtttccgccgggttcctgctacagacatgcaagcaggcgcttaagt

SEQ ID NO: 77426 - DNA, 75 bp, synthetic construct
  source 1..75: mol_type = other DNA
actcttggaataatctactacagaaataccaaccagaataaagtaaatgactccagcaacaataagaaagaaaat

SEQ ID NO: 77427 - DNA, 75 bp, synthetic construct
  source 1..75: mol_type = other DNA
attgatgcgaaacgcaatgcgcttgatatgtgggtggagcggttggagatactggcgggaacacatgaaaacgta

SEQ ID NO: 77428 - DNA, 75 bp, synthetic construct
  source 1..75: mol_type = other DNA
tggcccatgcccggagaaaaatccacgatgtgcatgcaagagcgccaaccgatatcaccacggaagccctgcagc

SEQ ID NO: 77429 - DNA, 75 bp, synthetic construct
  source 1..75: mol_type = other DNA
cacagagaaaatttactgggatttctttaaaatacaaagaaaaaatcccatatacaccagctagttcaaaaatga

SEQ ID NO: 77430 - DNA, 75 bp, synthetic construct
  source 1..75: mol_type = other DNA
tacacctatatggcgatcaccacggttctgatgatgaagcgcgtgtttaatctgccactccgggcattacagggc

SEQ ID NO: 77431 - DNA, 75 bp, synthetic construct
  source 1..75: mol_type = other DNA
aagtcaggcaacatggggctgacaggcgcagagtatggcgcaaacttcatctggctgcagacggtgtgacgcatg

SEQ ID NO: 77432 - DNA, 75 bp, synthetic construct
  source 1..75: mol_type = other DNA
gtgatttaattccggatgaacatgagtggatattcagaaaaccgaaatctttgtatatgcgccgggaaatggcgc

SEQ ID NO: 77433 - DNA, 75 bp, synthetic construct
  source 1..75: mol_type = other DNA
gaaccgggctgagatgggattttccgcgttcctgggaaaaatgggcattagtatgaatgacaggatgcgggcaac

SEQ ID NO: 77434 - DNA, 75 bp, synthetic construct
  source 1..75: mol_type = other DNA
tttaccagctgacggactatatcggttacgacatcctgctgcagtacattcaggagctgatacagcaggcccggg

SEQ ID NO: 77435 - DNA, 75 bp, synthetic construct
  source 1..75: mol_type = other DNA
tactctgaaagcaatggaaatcggtagtaacgccttaaatcgttatcaatcagtgatgaaaaatatgctaccgag

SEQ ID NO: 77436 - DNA, 75 bp, synthetic construct
  source 1..75: mol_type = other DNA
gaccgatcttgatgataatgtcatccagcgtgcatttaagctgtatccgctggagtggatgatgcgtgacgataa

SEQ ID NO: 77437 - DNA, 75 bp, synthetic construct
  source 1..75: mol_type = other DNA
tacgagtgcgaccaaattaattttgacttccatctgaaatataaaaccctcgacctgtgggcgcgttttcaggac

SEQ ID NO: 77438 - DNA, 75 bp, synthetic construct
  source 1..75: mol_type = other DNA
tactttcgaagcctacaaaaaagcggcgctggatgccgaatttgcatctctgtttgacactctggattccaccaa

SEQ ID NO: 77439 - DNA, 75 bp, synthetic construct
  source 1..75: mol_type = other DNA
tgaactggacatgccgctggcaattgtccgcctcgacgtactggtgtcttcgtttttgggagaaaccgccgccaa

SEQ ID NO: 77440 - DNA, 75 bp, synthetic construct
  source 1..75: mol_type = other DNA
tatgtggtcgaggcgtatgccgccgggtgcctgctggaaaacatcaccctgggcgatttcaccgcacctgcagca

SEQ ID NO: 77441 - DNA, 75 bp, synthetic construct
  source 1..75: mol_type = other DNA
ctggccaaatcctccggactggttatcggttatggtttgtggctgctggcaggactgctgctgctggcaattctc

SEQ ID NO: 77442 - DNA, 75 bp, synthetic construct
  source 1..75: mol_type = other DNA
acctgttcatctggcgttctaacctgctcggttcttccggtaaaggtcatgagtttatgctcaagtacctgctgg

SEQ ID NO: 77443 - DNA, 75 bp, synthetic construct
  source 1..75: mol_type = other DNA
cctgcgtctccgcaaacctggggtgagcaaactgacgtaccggaatctgctgactggtacaactccagctacatc

SEQ ID NO: 77444 - DNA, 75 bp, synthetic construct
  source 1..75: mol_type = other DNA
tcgacatggccgcagttgttcccggcatgagcgtttccgttgtcgctcatgtaaacgtgttttccagctcactta

SEQ ID NO: 77445 - DNA, 75 bp, synthetic construct
  source 1..75: mol_type = other DNA
tgccattcatcgtgaagagtctgaaaaacgaggtatgccggttttcagaaactgtcagcgttgtggtgggcgtgg

SEQ ID NO: 77446 - DNA, 75 bp, synthetic construct
  source 1..75: mol_type = other DNA
gggcagaccattacagataacgttcaaagagcacctaaaacaatcactatctcaggtgttgtagtagttgattca

SEQ ID NO: 77447 - DNA, 75 bp, synthetic construct
  source 1..75: mol_type = other DNA
aggaggagatggctggtcgccggtgaagggagaaggcgggaagggggtgtcgaggcccggtcaggaggagcaggt

SEQ ID NO: 77448 - DNA, 75 bp, synthetic construct
  source 1..75: mol_type = other DNA
tgccattcatcgtgaagagtcggaaaaacagggtgtgccggttttcagaaactgccagcgttgtggtgggcgtgg

SEQ ID NO: 77449 - DNA, 75 bp, synthetic construct
  source 1..75: mol_type = other DNA
actctgattcgccattagccgcaggtaaaccattaactcgcgcgacggacaacgcatcggttactgtaaaagaac

SEQ ID NO: 77450 - DNA, 75 bp, synthetic construct
  source 1..75: mol_type = other DNA
atgccgcccacgcccgcacgagtcgctattttactgataccacaaaagagcggtatcaccagtgcacaaacatta

SEQ ID NO: 77451 - DNA, 75 bp, synthetic construct
  source 1..75: mol_type = other DNA
ctggcactcttttgttatggaaaagacaacatccttgacaacaataagaaaaaaacgggaatcctgttgctggcg

SEQ ID NO: 77452 - DNA, 75 bp, synthetic construct
  source 1..75: mol_type = other DNA
tactgatatcaccgaagtggcgaaaaataacgtgctgactgatgatttttctgcgggaaagtcttcgacggcgag

SEQ ID NO: 77453 - DNA, 75 bp, synthetic construct
  source 1..75: mol_type = other DNA
cagcgtacccatcaggcggtaaacaggctggttcctttttatatatcagaagccggtattccatatacgggataa

SEQ ID NO: 77454 - DNA, 75 bp, synthetic construct
  source 1..75: mol_type = other DNA
ccctgtaaatccgttttttgtctttatggtaaagctgtcggtagtagtggagggagtgagtgcagcagtgcagaa

SEQ ID NO: 77455 - DNA, 75 bp, synthetic construct
  source 1..75: mol_type = other DNA
atcgtgaacaagtgaaaaatgcttttgatttcggtttttctcgttatgagaaagccatggaagaactttcaaaag

SEQ ID NO: 77456 - DNA, 75 bp, synthetic construct
  source 1..75: mol_type = other DNA
caccatgaccatcggtgctgatggcgaagtgatgcacagtctccatgcagataaaagcgggacgattaccgttaa

SEQ ID NO: 77457 - DNA, 75 bp, synthetic construct
  source 1..75: mol_type = other DNA
acagcctgatttcaataacgccaaagagggcgggactgtttcctgggtgttcgactgcggcaagattgaccagct

SEQ ID NO: 77458 - DNA, 75 bp, synthetic construct
  source 1..75: mol_type = other DNA
gttttcactggtattacccggaaggcggtaagctctggcctgaactggccgagcgcgccgacggttttaatgata

SEQ ID NO: 77459 - DNA, 75 bp, synthetic construct
  source 1..75: mol_type = other DNA
aaccgttgcaagccctcgaagcaccggtcgaaccgtggtttaaaccgctggcgtatgctctaattttgttgcggg

SEQ ID NO: 77460 - DNA, 75 bp, synthetic construct
  source 1..75: mol_type = other DNA
gaatccgcaattcagggaaaccacccgctggattggaaatccgtataaaaagaatgggctcactgatttcgacac

SEQ ID NO: 77461 - DNA, 75 bp, synthetic construct
  source 1..75: mol_type = other DNA
tcatttttttatgcgggtatttcacgcaatgaaatcccattaaaaaatcttccaagttcagacgagatgctgact

SEQ ID NO: 77462 - DNA, 75 bp, synthetic construct
  source 1..75: mol_type = other DNA
ttcgttaattggtaatgacgattacaactgtcttatcgaagggaataaaaataacaaacgaacagcaacgggtct

SEQ ID NO: 77463 - DNA, 75 bp, synthetic construct
  source 1..75: mol_type = other DNA
atgctgttaaaaatggaagagattaagcttcagcttcgtctggatgatgatttctctgatgaagatgagttgctt

SEQ ID NO: 77464 - DNA, 75 bp, synthetic construct
  source 1..75: mol_type = other DNA
caggtggttttcgcgatatgtatctcgcgaaaaataatcgcatgttttacgccttgctgattgcaatttcggtac

SEQ ID NO: 77465 - DNA, 75 bp, synthetic construct
  source 1..75: mol_type = other DNA
tcaccacccacagcctttactcctggataaagaagtacggtccggattcttccattaataaagaacagtcagatg

SEQ ID NO: 77466 - DNA, 75 bp, synthetic construct
  source 1..75: mol_type = other DNA
gcaggtggtgctccaggatgggcgtttattcggtagccccatagacattcttaaccgtgcggcccccgttgcgct

SEQ ID NO: 77467 - DNA, 75 bp, synthetic construct
  source 1..75: mol_type = other DNA
cttgcttatgaaggttccggcagtggtgactggcgcactgacggtttcatcgtgggtgtcggttataaattctga

SEQ ID NO: 77468 - DNA, 75 bp, synthetic construct
  source 1..75: mol_type = other DNA
ggcctggtgctctttatcggcggcctgcttggcctcaaacaaatcggtaaaaaacccggagcagggctggcctgc

SEQ ID NO: 77469 - DNA, 75 bp, synthetic construct
  source 1..75: mol_type = other DNA
acagatttccaacttggtggttgttatattatgtattaaggaaggcttacttctttttaggaatacctttctttt

SEQ ID NO: 77470 - DNA, 75 bp, synthetic construct
  source 1..75: mol_type = other DNA
tgtgcacgttacgtcaggcgctggactggtgtgatgaactcgatcccgatggtgagtttggcctcggcgtggcgg

SEQ ID NO: 77471 - DNA, 75 bp, synthetic construct
  source 1..75: mol_type = other DNA
cccaccaataaattaccggatttacgcggtgaatttatccgtggctgggatgatgggcgcggggtggatgccgga

SEQ ID NO: 77472 - DNA, 75 bp, synthetic construct
  source 1..75: mol_type = other DNA
gccgctggataaatgcgagctacggcactggctggcctgttttgaccaggtggcaaagcgaacgcctgttactgc

SEQ ID NO: 77473 - DNA, 75 bp, synthetic construct
  source 1..75: mol_type = other DNA
gaaagtaaatggtctgcaaggcggttcgcaggctgaaagtgagcaggggctggtggtgacgcctcaagggaatgc

SEQ ID NO: 77474 - DNA, 75 bp, synthetic construct
  source 1..75: mol_type = other DNA
cgcaatgcgctggatatgtggacggagcggttagggatactggcgggaacacatgaaaacgtaaccacgctaccc

SEQ ID NO: 77475 - DNA, 75 bp, synthetic construct
  source 1..75: mol_type = other DNA
cgcgtctgcgcgctgcatctgtttatgttcagttatgcctgatggcctgccgtgaccggctggtacgcctgttac

SEQ ID NO: 77476 - DNA, 75 bp, synthetic construct
  source 1..75: mol_type = other DNA
actattttaagagccacagataaagagtccgcacacaaatttgtacaggaaacacttcaggaagccagggaaaca

SEQ ID NO: 77477 - DNA, 75 bp, synthetic construct
  source 1..75: mol_type = other DNA
ttccattattacgagttttaaagcctctaaagatgttggtatttcaaatggtctaagaatccagttaacttttca

SEQ ID NO: 77478 - DNA, 75 bp, synthetic construct
  source 1..75: mol_type = other DNA
gtggtcattggtgcttctattcgctatggtcactaccactctgcgttccaggaatttgtcaaaaaacatgcgacg

SEQ ID NO: 77479 - DNA, 75 bp, synthetic construct
  source 1..75: mol_type = other DNA
tttaaggcgcagaccggaaaatattgcgtatatctgaaacaggactggcgcgacgagtactgtgttggcgacatt

SEQ ID NO: 77480 - DNA, 75 bp, synthetic construct
  source 1..75: mol_type = other DNA
aaattcaggaactctacaacttaccacctgcaatagcagcaccaacagtaccaagaggactagtaaacgcagtgc

SEQ ID NO: 77481 - DNA, 75 bp, synthetic construct
  source 1..75: mol_type = other DNA
attccttctggtgcatcaggaaaagtcagctggacagtgattacggattacggcggaaagagtaagccgtttgaa

SEQ ID NO: 77482 - DNA, 75 bp, synthetic construct
  source 1..75: mol_type = other DNA
gatggcgtcattgatgcaatttggcgtgattttcacggcaggcatcacgctgttcccctttgtcatgccgtcaag

SEQ ID NO: 77483 - DNA, 75 bp, synthetic construct
  source 1..75: mol_type = other DNA
ggcggcgtggcctggattgagtcaggaggtatgcctgaaaattataagtttcagatatatgaaacaaaaagaatg

SEQ ID NO: 77484 - DNA, 75 bp, synthetic construct
  source 1..75: mol_type = other DNA
agtgggctgaggaaaatagtaagaataaagatggtacagataaagtagctctagacatacaagtttctgttaaaa

SEQ ID NO: 77485 - DNA, 75 bp, synthetic construct
  source 1..75: mol_type = other DNA
gtatgccggtataccgctgaaggtcctgcagagcctgatggggcataagtccatcagctcaacggaggtctacac

SEQ ID NO: 77486 - DNA, 75 bp, synthetic construct
  source 1..75: mol_type = other DNA
gtgtcgtcgttgcccgttgctgccgtcttacctgagttacttgctgccctcgatggtgcaccgcaggtgttatta

SEQ ID NO: 77487 - DNA, 75 bp, synthetic construct
  source 1..75: mol_type = other DNA
atgccatcacggatcccccgcgcctgtcgtaagcgaggctgcgcaggcacaacaacagacagctctggctactgt

SEQ ID NO: 77488 - DNA, 75 bp, synthetic construct
  source 1..75: mol_type = other DNA
atgccaccacgaaccccaaaagcctgccgagttcgcggctgccgccataccacgactgacccgtcaggttattgc

SEQ ID NO: 77489 - DNA, 75 bp, synthetic construct
  source 1..75: mol_type = other DNA
ataaaacggattcggcagcactgctgccctgcattgaacaggcgagggaggatatccataccctgcgccaggtgc

SEQ ID NO: 77490 - DNA, 75 bp, synthetic construct
  source 1..75: mol_type = other DNA
tcatccctaaagcgcatggcggcaccgatgcagacagtaatctgcagagcctgtgctggccgtgtcataaggcga

SEQ ID NO: 77491 - DNA, 75 bp, synthetic construct
  source 1..75: mol_type = other DNA
tccgcaaaggccaatgaagttctgggcgaaatgagcttcccgcagttcagccgtctgctgccgtaccgtgattac

SEQ ID NO: 77492 - DNA, 75 bp, synthetic construct
  source 1..75: mol_type = other DNA
atcaacatgaccggcggtgacgcggccctgaacctgaccgcgatgccggccgtggtgttcaccgacccgcaagtg

SEQ ID NO: 77493 - DNA, 75 bp, synthetic construct
  source 1..75: mol_type = other DNA
atgtcagactatcaaatgtttgaagtacaggtgagccaggttgaaccgcttaccgaacaggtgaaacgcttcacg

SEQ ID NO: 77494 - DNA, 75 bp, synthetic construct
  source 1..75: mol_type = other DNA
cggaatacctgcgtacaaaggctgaggtaaatccacacgtttttgtttggccttatggcgaagcgaatggcatag

SEQ ID NO: 77495 - DNA, 75 bp, synthetic construct
  source 1..75: mol_type = other DNA
acagcattagcacaaaactgtcttttgtggataacagctggcccgttgaacagcagaaaaacgtcatgctcggcg

SEQ ID NO: 77496 - DNA, 75 bp, synthetic construct
  source 1..75: mol_type = other DNA
atccattgacacgagaggaaataacggtatcaatgattgtaagtcaagaacaatgtatttatgaccaaaccaaag

SEQ ID NO: 77497 - DNA, 75 bp, synthetic construct
  source 1..75: mol_type = other DNA
gaacgcgtccccacaccaggcgagctacccgcaaacattgatgaacgggtcatgatttgtccgttaacaaacagc

SEQ ID NO: 77498 - DNA, 75 bp, synthetic construct
  source 1..75: mol_type = other DNA
tgctgccctccactgatggcaaactccagacaaccattcgcccgccagagatgaatccccgcaggctctatgtct

SEQ ID NO: 77499 - DNA, 75 bp, synthetic construct
  source 1..75: mol_type = other DNA
gccagcggtgacaacgggggattacttactgacttattgctagtggggtttaatagtggacctcaagctcttggc

SEQ ID NO: 77500 - DNA, 75 bp, synthetic construct
  source 1..75: mol_type = other DNA
accatgaccggatatgcaggcggagttcagcgaaaagagtggttattgcgccacgaaggttatcttttgctgtaa

SEQ ID NO: 77501 - DNA, 75 bp, synthetic construct
  source 1..75: mol_type = other DNA
cgctggtgtggcgacggtggtaatggcgtttgtcgcaattattgcgctgatcaacggcattatcggcggaattgg

SEQ ID NO: 77502 - DNA, 75 bp, synthetic construct
  source 1..75: mol_type = other DNA
cactgacggcacttacttctgcgccacgaatgtggtgcgggtaaaccttatccgacaggtacaggagtcacgcag

SEQ ID NO: 77503 - DNA, 75 bp, synthetic construct
  source 1..75: mol_type = other DNA
cgccttctccagcttcctggtgcctggagtagctttattgaaagcaatccagatggtgcttcctgtcttggccca

SEQ ID NO: 77504 - DNA, 75 bp, synthetic construct
  source 1..75: mol_type = other DNA
ctggggatggggctgctgatttccacgattacccgcaaccagttcaatgccgctcaggtcgccctgaacgccgcg

SEQ ID NO: 77505 - DNA, 75 bp, synthetic construct
  source 1..75: mol_type = other DNA
aaagcggtgagcatttacgcctgaaaactctggaaagtgtctggctccaggggaaactgcgtatgtgggggcgtt

SEQ ID NO: 77506 - DNA, 75 bp, synthetic construct
  source 1..75: mol_type = other DNA
catcgccgatgaactgatgaccggatgcacaaatttcgcattcagcggaaaacctggtaccgggaaaaaccactt

SEQ ID NO: 77507 - DNA, 75 bp, synthetic construct
  source 1..75: mol_type = other DNA
cctcaacatcacagccttctgcaaggacaataatgaaacggcgctggaagtggagcaggacatcctgaacagctt

SEQ ID NO: 77508 - DNA, 75 bp, synthetic construct
  source 1..75: mol_type = other DNA
ggaagacggtatctggttttttgatgagagttgtccggggggagctgtttgggtgcttgaagatggctctctcga

SEQ ID NO: 77509 - DNA, 75 bp, synthetic construct
  source 1..75: mol_type = other DNA
gccatgctctgagccaggcgaaatccattgccgatgaattgatgaccgggtgtacaaacttcgtgttcagcggta

SEQ ID NO: 77510 - DNA, 75 bp, synthetic construct
  source 1..75: mol_type = other DNA
atcaggaaattaaaccgctggatttacgccagtttgtaagttctgctgcacaaaaaccagcatcggcatccgcag

SEQ ID NO: 77511 - DNA, 75 bp, synthetic construct
  source 1..75: mol_type = other DNA
gcagaagaacgccggaggctgtttgatgatataaggaaaaacagcccgaaagcaggaagaccaaccgtgaataaa

SEQ ID NO: 77512 - DNA, 75 bp, synthetic construct
  source 1..75: mol_type = other DNA
gaacgtcattgatgaaggctggcgtctgctggacttcaaaaatcgtaaagtcggtgagtttattcaaaaaggtta

SEQ ID NO: 77513 - DNA, 75 bp, synthetic construct
  source 1..75: mol_type = other DNA
catcaggcgcgggttgaaaaaatcctgaaccgttcgggcatccagccgcttcacaggaagtgctcattcgggaac

SEQ ID NO: 77514 - DNA, 75 bp, synthetic construct
  source 1..75: mol_type = other DNA
tcatccctaaagcgcatggcggcactgatgccgacagtaatctgcagagtctgtgctggccgtgtcataaggcga

SEQ ID NO: 77515 - DNA, 75 bp, synthetic construct
  source 1..75: mol_type = other DNA
gcgcattgatgatgtggtggatttcctgaaaaacgccagtgacagcgagcagtatgccgggtcaccgaccatccg

SEQ ID NO: 77516 - DNA, 75 bp, synthetic construct
  source 1..75: mol_type = other DNA
gcatttaccgtcatgtcatgtgacaacatgccagaaaacggtcatgttatgcgtgacgttgtcacttcctacgcg

SEQ ID NO: 77517 - DNA, 75 bp, synthetic construct
  source 1..75: mol_type = other DNA
aaaagaaacagacagccttgtatggctgtgggattatgccaaccgctcacaggcattgttccgtgagttgtatcc

SEQ ID NO: 77518 - DNA, 75 bp, synthetic construct
  source 1..75: mol_type = other DNA
caagggaggacctgaggggctaatcccgcacagtaaggcacctctggtgcgacgaaaaaagcactggcatcccga

SEQ ID NO: 77519 - DNA, 75 bp, synthetic construct
  source 1..75: mol_type = other DNA
ctgcgggcggtcagtctgggtcgtaaaaacttcctgttcttcggctctgaccatggtggtggcggggagcgctac

SEQ ID NO: 77520 - DNA, 75 bp, synthetic construct
  source 1..75: mol_type = other DNA
atcggccttttactttggttatttcattatcccaatccctgctgggatattgatgaaaaaactcagttataaagc

SEQ ID NO: 77521 - DNA, 75 bp, synthetic construct
  source 1..75: mol_type = other DNA
tgagctcggtgattttcatcatgtgaatcgtgtttatgttgtcggtggtggggccccgttgatctatgattcgat

SEQ ID NO: 77522 - DNA, 75 bp, synthetic construct
  source 1..75: mol_type = other DNA
tggtatctctacagcgctaaccgcctgaaatacccgctcattcgtaaacgactgattgaactgtggcgcgaagcc

SEQ ID NO: 77523 - DNA, 75 bp, synthetic construct
  source 1..75: mol_type = other DNA
agaagccagaaaatcgctaaccagcaacactcaggagctttcaacggctctttcatggttatctgaattcatcat

SEQ ID NO: 77524 - DNA, 75 bp, synthetic construct
  source 1..75: mol_type = other DNA
gtgcagggttcacgccagttcaaggacttcgaggactacctggtaccgcccgagaagttcaccagcctcaagcag

SEQ ID NO: 77525 - DNA, 75 bp, synthetic construct
  source 1..75: mol_type = other DNA
aacagtaacaaggcctctgcacaggccgggctggaggtaacggctgatatccgcgatgcggatgcggacatcatt

SEQ ID NO: 77526 - DNA, 75 bp, synthetic construct
  source 1..75: mol_type = other DNA
gcagtattgagctcagggcagcggatggcaaggcagacagcagcgaggtatttcgcgagctgatcacactgtcac

SEQ ID NO: 77527 - DNA, 75 bp, synthetic construct
  source 1..75: mol_type = other DNA
gacgacccgctctttgtgaactcaccgctggggctgtcgcccacaccgctaatggtcagcatggagcaaaatctg

SEQ ID NO: 77528 - DNA, 75 bp, synthetic construct
  source 1..75: mol_type = other DNA
caaaacccctgaagatctcagccagttcgatcgcctgctgaagaaaatcagcgttgaggcagctctcaacgctga

SEQ ID NO: 77529 - DNA, 75 bp, synthetic construct
  source 1..75: mol_type = other DNA
tgcaccggaattccttgccgtgctcaagctgcgggccgcgcccgccgccaaaaacgtgcttgatgccattgaggt

SEQ ID NO: 77530 - DNA, 75 bp, synthetic construct
  source 1..75: mol_type = other DNA
atcgcctgggggtctaacgtaccgcagacacgtacgccggacgcccacttctttaccgaagtacgctacaaaggc

SEQ ID NO: 77531 - DNA, 75 bp, synthetic construct
  source 1..75: mol_type = other DNA
agcacatgtaatacggtagaaacgttgctggtgaataaaaacatcgccgatagcttcctgcccgcattaagcaaa

SEQ ID NO: 77532 - DNA, 75 bp, synthetic construct
  source 1..75: mol_type = other DNA
tacaactggcgtgctaatggcacccctccctctttccatgagcagagatctttatcagagcgattgttaagagag

SEQ ID NO: 77533 - DNA, 75 bp, synthetic construct
  source 1..75: mol_type = other DNA
agaaatacagcacattacggaaatatgccccacgcatgttgtccgctttacagttagtcgcaaccccggcagcgc

SEQ ID NO: 77534 - DNA, 75 bp, synthetic construct
  source 1..75: mol_type = other DNA
tcagtcgaagacaggtggcacttatttttgatatcggtctttcaaccctttatcgttattatcctgcgagcgttt

SEQ ID NO: 77535 - DNA, 75 bp, synthetic construct
  source 1..75: mol_type = other DNA
atccggcgcagcatctggaaggtgtaactgcctcccccgtcaagaatcactatcccgctttaccgctggagcgat

SEQ ID NO: 77536 - DNA, 75 bp, synthetic construct
  source 1..75: mol_type = other DNA
ggcgttgcgctccggggatatctgggttaaaggctcgcgccgctacaaaaattttgatgattacctcatacccga

SEQ ID NO: 77537 - DNA, 75 bp, synthetic construct
  source 1..75: mol_type = other DNA
gttccgcaaaaccgcaggaaaaggagtacacccttgtcgatggggatggcatgtttttgcttattcatcccaatg

SEQ ID NO: 77538 - DNA, 75 bp, synthetic construct
  source 1..75: mol_type = other DNA
aagggctggcgctgcgcatcgtggcaggccaggtgccggacaagctgaaaaacaccgatatcatgacccttgacc

SEQ ID NO: 77539 - DNA, 75 bp, synthetic construct
  source 1..75: mol_type = other DNA
tgccctgaagtcggtgtttgatcagccaatggatattgatacgacacgtaaaagcaaggcatttaacagcgcaaa

SEQ ID NO: 77540 - DNA, 75 bp, synthetic construct
  source 1..75: mol_type = other DNA
ggaaatgggtgacctgctgtttgccacggtcaacatggcacgccatttagggacaaaagcagagattgcactaca

SEQ ID NO: 77541 - DNA, 75 bp, synthetic construct
  source 1..75: mol_type = other DNA
gtcgcggattttgtcactgacccaacgattaaaaaattgttgaaggataaggataaagacaaaaaagatgaacat

SEQ ID NO: 77542 - DNA, 75 bp, synthetic construct
  source 1..75: mol_type = other DNA
gcgcggtaaaacagaaattaccgaaattgtgctgcgtaaaccgcagtccggtgcgctgcgcggtacacgcctgca

SEQ ID NO: 77543 - DNA, 75 bp, synthetic construct
  source 1..75: mol_type = other DNA
ctgtttgtgaaccgcagtacggttggttttctgctgcgggcggaaccccttatcggtgctaacgaacagatagtg

SEQ ID NO: 77544 - DNA, 75 bp, synthetic construct
  source 1..75: mol_type = other DNA
aacgtatgatacagttcttgtacttgaagataagaaaacagggaagctgggttttccggcaagggttaagaagtg

SEQ ID NO: 77545 - DNA, 75 bp, synthetic construct
  source 1..75: mol_type = other DNA
atgcgccagggagaaattctctcattacgctgggaacacctcgatttgcagcacggcgtggcgcatcttcctgaa

SEQ ID NO: 77546 - DNA, 75 bp, synthetic construct
  source 1..75: mol_type = other DNA
attttcatgacctccgtcatgaggctatcagccgatttttcgaacttggtacattgaacgtcattgaggttgccg

SEQ ID NO: 77547 - DNA, 75 bp, synthetic construct
  source 1..75: mol_type = other DNA
acgttaatgccccttacgtatctctgaagaaatacgccgagataacaggcattcctcttaacacatgcaaaaaga

SEQ ID NO: 77548 - DNA, 75 bp, synthetic construct
  source 1..75: mol_type = other DNA
tgcgaccctgagtaaccagggcacgatacagggtggtggcggggtttccctgaacgccactgaccgtctgcagaa

SEQ ID NO: 77549 - DNA, 75 bp, synthetic construct
  source 1..75: mol_type = other DNA
aataataatgcgcaggtaacgctgttaaatacacagttaagcgagtttgccccaaccatgccccataacgaagcg

SEQ ID NO: 77550 - DNA, 75 bp, synthetic construct
  source 1..75: mol_type = other DNA
cgcatgaccctgcattcgccgcaatggggcgagattgaacgcatctggttgttacgcgggccgcaattatcatga

SEQ ID NO: 77551 - DNA, 75 bp, synthetic construct
  source 1..75: mol_type = other DNA
cttaattttgtttgatgacttttttagaagccataacttgcctaaaccatctccagtccttcatcattttttcaa

SEQ ID NO: 77552 - DNA, 75 bp, synthetic construct
  source 1..75: mol_type = other DNA
aaggtgaatccgtactctgcgggcatggggctgatgccgggtcatgtttatcgcgcgctttatccttgcccgctg

SEQ ID NO: 77553 - DNA, 75 bp, synthetic construct
  source 1..75: mol_type = other DNA
catgatttgtccgttaacaaacgaccagcttatgacaaaagcgccccctgttctcacatccccttgcggagcaaa

SEQ ID NO: 77554 - DNA, 75 bp, synthetic construct
  source 1..75: mol_type = other DNA
cctgcccatatcacgaccatcgatgaagaaaatgggcagaaagcgcatcgtattgagatcggtgattttgataac

SEQ ID NO: 77555 - DNA, 75 bp, synthetic construct
  source 1..75: mol_type = other DNA
tgacgaccaatatcgccagcttgcagccgtcgctcacagtctggagatgggggtgctgaccgaagtcagtaatga

SEQ ID NO: 77556 - DNA, 75 bp, synthetic construct
  source 1..75: mol_type = other DNA
tggtcgctaacaaaagacagcaagtccttgatggtattttcaaatacataaagagcaattgggctactgctgtta

SEQ ID NO: 77557 - DNA, 75 bp, synthetic construct
  source 1..75: mol_type = other DNA
tcgttgcgaacaaaattcagcaggtaatgaccggtatattcaagtacatcaagataaactgggctactgccacca

SEQ ID NO: 77558 - DNA, 75 bp, synthetic construct
  source 1..75: mol_type = other DNA
accgccaccgctattatgacccgctgcaggggcggtatatcactcaggatccgattgggctgaaggggggatgga

SEQ ID NO: 77559 - DNA, 75 bp, synthetic construct
  source 1..75: mol_type = other DNA
atggacccggtgtacacgccggcgcgaaaaatccacctgtaccactgcgaccatcgcggcctgccgctggccctt

SEQ ID NO: 77560 - DNA, 75 bp, synthetic construct
  source 1..75: mol_type = other DNA
tgatttgcatgactgtttcagtgctagggattattttcctcttttactggtggagggcagatatctacaggatta

SEQ ID NO: 77561 - DNA, 75 bp, synthetic construct
  source 1..75: mol_type = other DNA
taacgaatggcatccgcatagtgcactgggttatcgctcgccacgggaatatctacggcagcaagccagtaatgg

SEQ ID NO: 77562 - DNA, 75 bp, synthetic construct
  source 1..75: mol_type = other DNA
taccgccatcgaaacgggcacatacaggcaaagtggccgtgaaagaaagcaatcaacgatggtgctctgacgggt

SEQ ID NO: 77563 - DNA, 75 bp, synthetic construct
  source 1..75: mol_type = other DNA
tcatgctaccgggctaatgaaacacgccagttcgcccggatgttgggacttgaaccgaagaacacggcggtgcgg

SEQ ID NO: 77564 - DNA, 75 bp, synthetic construct
  source 1..75: mol_type = other DNA
aggctggcagcggtcagcaggtgctaaggcagaactggcgctggcggagaaactggggcatgcagttattttcca

SEQ ID NO: 77565 - DNA, 75 bp, synthetic construct
  source 1..75: mol_type = other DNA
gtaaagccgagcaaggccttacaaaaagtttcaacggtgacaccctttttaaagttgcagctgcactgcggtgtt

SEQ ID NO: 77566 - DNA, 75 bp, synthetic construct
  source 1..75: mol_type = other DNA
agtaactcagtaggagatggtgttaattttattgccgtcagaccacgtaacattgcatttaactttctggtgagg

SEQ ID NO: 77567 - DNA, 75 bp, synthetic construct
  source 1..75: mol_type = other DNA
ttattggctggtcaatgtcgccacgcatgacggcgcaactggcctgcgatgccctgcagatggcgctgtggcggc

SEQ ID NO: 77568 - DNA, 75 bp, synthetic construct
  source 1..75: mol_type = other DNA
atggatcagacatattctctggagtcattcctcaaccatgtccaaaagcgcgacccgaatcaaaccgagttcgcg

SEQ ID NO: 77569 - DNA, 75 bp, synthetic construct
  source 1..75: mol_type = other DNA
acccgttacttgctgttcccttcagtgctgccacagattttaccgtactggcagaccactgcgaaaacgtcgccg

SEQ ID NO: 77570 - DNA, 75 bp, synthetic construct
  source 1..75: mol_type = other DNA
cggtgatctttactttaaaagcagcacgtactggcaacacgattactgtgactggtgcgggcgaggcgaagaact

SEQ ID NO: 77571 - DNA, 75 bp, synthetic construct
  source 1..75: mol_type = other DNA
gcaggaaatatttctgcgcttgccgatgcggaaaacatctctcgtaagatcattacccgctgtatcaatacggcc

SEQ ID NO: 77572 - DNA, 75 bp, synthetic construct
  source 1..75: mol_type = other DNA
tgtaactataaaaattgatagccgaaaaatatctaaagaaatactaagcagaattgagttgttactagaggaaca

SEQ ID NO: 77573 - DNA, 75 bp, synthetic construct
  source 1..75: mol_type = other DNA
tttaacccgaccgaatccgtggccattgatattgcttatgaaggctccggcagtggcgactggcgcactgacggt

SEQ ID NO: 77574 - DNA, 75 bp, synthetic construct
  source 1..75: mol_type = other DNA
cgtgaagcgcagcctgccggtaacagcgcgatgatggacgcgctggcggcagcaatgggcaaaaacgttaaacgc

SEQ ID NO: 77575 - DNA, 75 bp, synthetic construct
  source 1..75: mol_type = other DNA
ccgcccggcagccaaaccgcgtgggcgtgaagcgcagcctgccggtaatagcgcgatgatggatgcgctggcggc

SEQ ID NO: 77576 - DNA, 75 bp, synthetic construct
  source 1..75: mol_type = other DNA
tatgactgcaaccttgcaggataaaaatggcaacccactaaaagataaagaaatcaccttcactgtgccaaacga

SEQ ID NO: 77577 - DNA, 75 bp, synthetic construct
  source 1..75: mol_type = other DNA
gggttcgggttgcatttaacggtattgaggatgcagaaaataatactctgttgaaactggatgaaggaagcaata

SEQ ID NO: 77578 - DNA, 75 bp, synthetic construct
  source 1..75: mol_type = other DNA
acgcagctgcgtaatctggaaacgcgtctgagctatctgcgcgagctggaagagagacgtcaggcgatcctcaag

SEQ ID NO: 77579 - DNA, 75 bp, synthetic construct
  source 1..75: mol_type = other DNA
ccggcggtcttccgtgcgctgacgcaggtaggactggtgctgcgaccgtttttaccggaacaggtcagagcaaaa

SEQ ID NO: 77580 - DNA, 75 bp, synthetic construct
  source 1..75: mol_type = other DNA
agagcttcgtgaaaacgataaagcgtgactacatcagtaccagatgggttaacggcagcaaagaaccttgcagag

SEQ ID NO: 77581 - DNA, 75 bp, synthetic construct
  source 1..75: mol_type = other DNA
atgttttccagattatttgtaaaaaaacatactccagctatggtggcaggtggcctggtatttctgttcattgtt

SEQ ID NO: 77582 - DNA, 75 bp, synthetic construct
  source 1..75: mol_type = other DNA
gcggtcacaacgagaagcagaacctggatgtagtacatactatttgtgatctgcttgacgagatggtaccgaaag

SEQ ID NO: 77583 - DNA, 75 bp, synthetic construct
  source 1..75: mol_type = other DNA
aatcaatcctgtcccgggtgttggcgacactcccgtgaatcttccagcagacattctccggtcagccaacagttt

SEQ ID NO: 77584 - DNA, 75 bp, synthetic construct
  source 1..75: mol_type = other DNA
ttataaggctgaaagcaataaaccatctcaccaagatttgattaatgctaaagctcaacaaatcaaacaatctaa

SEQ ID NO: 77585 - DNA, 75 bp, synthetic construct
  source 1..75: mol_type = other DNA
cccgaccgaatccgtggccattgatattgcttatgaaggctccggcagtggtgactggcgcactgacgggttcat

SEQ ID NO: 77586 - DNA, 75 bp, synthetic construct
  source 1..75: mol_type = other DNA
gcagccttgtgggcagtcgctatgacctggtcgatcgtaataacaatattgtcctcgaatatcgcaagaaagagc

SEQ ID NO: 77587 - DNA, 75 bp, synthetic construct
  source 1..75: mol_type = other DNA
gctgatgtcagcacggcgcgtattgctgatctgggggtaacgcaggataacgcggtggcagacggcgcgacagag

SEQ ID NO: 77588 - DNA, 75 bp, synthetic construct
  source 1..75: mol_type = other DNA
ttttatcggcaatatggtttattcccagcagggggcgattggcaatatgccgatggcggcggcattcaccctggt

SEQ ID NO: 77589 - DNA, 75 bp, synthetic construct
  source 1..75: mol_type = other DNA
tgcgcagatggcgttatgagccgggtaagccaggcagtgggattgtggtgaatatcctgtttaaaattaacggca

SEQ ID NO: 77590 - DNA, 75 bp, synthetic construct
  source 1..75: mol_type = other DNA
cggggccgtctgtgcgcgtgaatgaatggttcagcgcgtatgcgatggcgggtgtagcttacagccgtgtgtcga

SEQ ID NO: 77591 - DNA, 75 bp, synthetic construct
  source 1..75: mol_type = other DNA
tgagtgaggaaagccgccgctggctggcatcgtgcggcctgaccgtggagcagatgcaaaaccagatggacccgg

SEQ ID NO: 77592 - DNA, 75 bp, synthetic construct
  source 1..75: mol_type = other DNA
gttatgccacgctttccggcaccaacacgccgcgtgattttgtcgaatttccgtcgcaaatcaacgaacactggg

SEQ ID NO: 77593 - DNA, 75 bp, synthetic construct
  source 1..75: mol_type = other DNA
cacggcgagtatatggcaggacaggtacaaggggaatacgtggagttgagcgacggcactttatcgtggttaggg

SEQ ID NO: 77594 - DNA, 75 bp, synthetic construct
  source 1..75: mol_type = other DNA
tcagcaaaagcatatagttcttgtttctgtgatattccctttccaggttttgaagatgcaaatctggaggaaatt

SEQ ID NO: 77595 - DNA, 75 bp, synthetic construct
  source 1..75: mol_type = other DNA
ttagggcaaatcaatgatgaactgggggcgctgttggatagcctggaaaatcacacgccagttatcagaaaaaaa

SEQ ID NO: 77596 - DNA, 75 bp, synthetic construct
  source 1..75: mol_type = other DNA
ccgccacagaacgattattgcttttgccgttgatggcaataaagtctttatcgcaggtatttatcatggcggaca

SEQ ID NO: 77597 - DNA, 75 bp, synthetic construct
  source 1..75: mol_type = other DNA
acgtcacacaggaagttccaactgacgaaaacggcggtaaaaatacctactggaccaaggttggcgcggcattcg

SEQ ID NO: 77598 - DNA, 75 bp, synthetic construct
  source 1..75: mol_type = other DNA
ttatttctggcaaaagttggtgttcaggaccctcagtttgcgattgaaggcctgctaaattacgcgatggcactg

SEQ ID NO: 77599 - DNA, 75 bp, synthetic construct
  source 1..75: mol_type = other DNA
gcgtagaaccgctgatgaagatgagctggaactacaagcagccgcacgaaccgcaatctgacgaagtagctaaag

SEQ ID NO: 77600 - DNA, 75 bp, synthetic construct
  source 1..75: mol_type = other DNA
cgcgggaaattacagctcaccgttactcagcaactcgggcgcacatcaacactgtatttgagtggtagccatcaa

SEQ ID NO: 77601 - DNA, 75 bp, synthetic construct
  source 1..75: mol_type = other DNA
agtacgtgaaatgggtgggttggttttcgatgatatggtttcgtggtacggaactggctggggaatgtcgttgat

SEQ ID NO: 77602 - DNA, 75 bp, synthetic construct
  source 1..75: mol_type = other DNA
gctttattctgcgccgctctgaactcgccagtaacgaagtttctccggttccacttgattacgccgtgggtgata

SEQ ID NO: 77603 - DNA, 75 bp, synthetic construct
  source 1..75: mol_type = other DNA
gtgcggcagcgtgtgtttcagactggatgcagcacttttgaagcaattacatactactgttctaaaaaacaataa

SEQ ID NO: 77604 - DNA, 75 bp, synthetic construct
  source 1..75: mol_type = other DNA
ctgtgaagtggcttgcgcagtgtcgcatcaggagaatcaggattgcgctgcgttgtcaccagacgagtttatttc

SEQ ID NO: 77605 - DNA, 75 bp, synthetic construct
  source 1..75: mol_type = other DNA
tttgttcaggtctggggaaatggagccaacttcgacaacacgattttgcgccgttcatacgaacggcaggggatc

SEQ ID NO: 77606 - DNA, 75 bp, synthetic construct
  source 1..75: mol_type = other DNA
tggccagccaggacagaaagcgcattcgtgagtacattgcggagcagaacctgatggtcgccattgaactggacg

SEQ ID NO: 77607 - DNA, 75 bp, synthetic construct
  source 1..75: mol_type = other DNA
aagtatgagttgcatgtaccaacggttaccattccatgtgttgattgtaagtcactttcagatcagggagttgat

SEQ ID NO: 77608 - DNA, 75 bp, synthetic construct
  source 1..75: mol_type = other DNA
ttgaaagcatatctggctacgacaaaatcgttgtcaaatataataactggatcaccaaagataatggcgagtttg

SEQ ID NO: 77609 - DNA, 75 bp, synthetic construct
  source 1..75: mol_type = other DNA
agccccagaacaagatgaggaagacgaagactacgcaccaatcgctttctcttctcacggtggcttctacggtta
